United States Patent Application Publication US 2014/0004565 A1 - sequence listing, part 52

SEQ ID NO: 1228395 - RNA, 19 nt, Artificial Sequence
  Description of Artificial Sequence: Synthetic oligonucleotide
cugcugaaucaauucucau

SEQ ID NO: 1228396 - RNA, 19 nt, Artificial Sequence
  Description of Artificial Sequence: Synthetic oligonucleotide
gguuucuauccgaauucgu

SEQ ID NO: 1228397 - RNA, 19 nt, Artificial Sequence
  Description of Artificial Sequence: Synthetic oligonucleotide
ccacaauugcauucuuucu

SEQ ID NO: 1228398 - RNA, 19 nt, Artificial Sequence
  Description of Artificial Sequence: Synthetic oligonucleotide
gcauacugcgccauuuuau

SEQ ID NO: 1228399 - RNA, 19 nt, Artificial Sequence
  Description of Artificial Sequence: Synthetic oligonucleotide
gcacacgagcuuguaagua

SEQ ID NO: 1228400 - RNA, 19 nt, Artificial Sequence
  Description of Artificial Sequence: Synthetic oligonucleotide
cuacaagggccaugcggau

SEQ ID NO: 1228401 - RNA, 19 nt, Artificial Sequence
  Description of Artificial Sequence: Synthetic oligonucleotide
ccauggaauuuguuucucu

SEQ ID NO: 1228402 - RNA, 19 nt, Artificial Sequence
  Description of Artificial Sequence: Synthetic oligonucleotide
acggcaucuuuggcaggaa

SEQ ID NO: 1228403 - RNA, 19 nt, Artificial Sequence
  Description of Artificial Sequence: Synthetic oligonucleotide
ccacggcaucuuuggcagg

SEQ ID NO: 1228404 - RNA, 19 nt, Artificial Sequence
  Description of Artificial Sequence: Synthetic oligonucleotide
gccaugcggauuuucugau

SEQ ID NO: 1228405 - RNA, 19 nt, Artificial Sequence
  Description of Artificial Sequence: Synthetic oligonucleotide
ccauuuggauaucucgaau

SEQ ID NO: 1228406 - RNA, 19 nt, Artificial Sequence
  Description of Artificial Sequence: Synthetic oligonucleotide
cacggagacuagugguaau

SEQ ID NO: 1228407 - RNA, 19 nt, Artificial Sequence
  Description of Artificial Sequence: Synthetic oligonucleotide
cuguaccuucuaagccaua

SEQ ID NO: 1228408 - RNA, 19 nt, Artificial Sequence
  Description of Artificial Sequence: Synthetic oligonucleotide
cgccauuuuaugccggaaa

SEQ ID NO: 1228409 - RNA, 19 nt, Artificial Sequence
  Description of Artificial Sequence: Synthetic oligonucleotide
cggguaucugugguucuac

SEQ ID NO: 1228410 - RNA, 19 nt, Artificial Sequence
  Description of Artificial Sequence: Synthetic oligonucleotide
ccacggagacuagugguaa

SEQ ID NO: 1228411 - RNA, 19 nt, Artificial Sequence
  Description of Artificial Sequence: Synthetic oligonucleotide
gaugcgcgcugagcauacu

SEQ ID NO: 1228412 - RNA, 19 nt, Artificial Sequence
  Description of Artificial Sequence: Synthetic oligonucleotide
ccauuuuaugccggaaauu

SEQ ID NO: 1228413 - RNA, 19 nt, Artificial Sequence
  Description of Artificial Sequence: Synthetic oligonucleotide
gcgccauuuuaugccggaa

SEQ ID NO: 1228414 - RNA, 19 nt, Artificial Sequence
  Description of Artificial Sequence: Synthetic oligonucleotide
gccggaaauuaagguuuua

SEQ ID NO: 1228415 - RNA, 19 nt, Artificial Sequence
  Description of Artificial Sequence: Synthetic oligonucleotide
ggccaaccaucaacagcaa

SEQ ID NO: 1228416 - RNA, 19 nt, Artificial Sequence
  Description of Artificial Sequence: Synthetic oligonucleotide
ccggguaucugugguucua

SEQ ID NO: 1228417 - RNA, 19 nt, Artificial Sequence
  Description of Artificial Sequence: Synthetic oligonucleotide
cggagacuagugguaauau

SEQ ID NO: 1228418 - RNA, 19 nt, Artificial Sequence
  Description of Artificial Sequence: Synthetic oligonucleotide
cagccccaauagccagccu

SEQ ID NO: 1228419 - RNA, 19 nt, Artificial Sequence
  Description of Artificial Sequence: Synthetic oligonucleotide
aaugauuauaguuacaugc

SEQ ID NO: 1228420 - RNA, 19 nt, Artificial Sequence
  Description of Artificial Sequence: Synthetic oligonucleotide
auaacaauuacucagagag

SEQ ID NO: 1228421 - RNA, 19 nt, Artificial Sequence
  Description of Artificial Sequence: Synthetic oligonucleotide
uauaauaacaauuacucag

SEQ ID NO: 1228422 - RNA, 19 nt, Artificial Sequence
  Description of Artificial Sequence: Synthetic oligonucleotide
aauauacugacaucuaggc

SEQ ID NO: 1228423 - RNA, 19 nt, Artificial Sequence
  Description of Artificial Sequence: Synthetic oligonucleotide
aacaaugguauuuacgugc

SEQ ID NO: 1228424 - RNA, 19 nt, Artificial Sequence
  Description of Artificial Sequence: Synthetic oligonucleotide
ugaaauuuuaucuguaucg

SEQ ID NO: 1228425 - RNA, 19 nt, Artificial Sequence
  Description of Artificial Sequence: Synthetic oligonucleotide
aauggauccagauuuuacc

SEQ ID NO: 1228426 - RNA, 19 nt, Artificial Sequence
  Description of Artificial Sequence: Synthetic oligonucleotide
uuuggaaugaauaaauacc

SEQ ID NO: 1228427 - RNA, 19 nt, Artificial Sequence
  Description of Artificial Sequence: Synthetic oligonucleotide
gauaguaucaaaaucaccc

SEQ ID NO: 1228428 - RNA, 19 nt, Artificial Sequence
  Description of Artificial Sequence: Synthetic oligonucleotide
aaguauaugaaagacaaag

SEQ ID NO: 1228429 - RNA, 19 nt, Artificial Sequence
  Description of Artificial Sequence: Synthetic oligonucleotide
cauacuaaagauuaguuag

SEQ ID NO: 1228430 - RNA, 19 nt, Artificial Sequence
  Description of Artificial Sequence: Synthetic oligonucleotide
uuaaguauaugaaagacaa

SEQ ID NO: 1228431 - RNA, 19 nt, Artificial Sequence
  Description of Artificial Sequence: Synthetic oligonucleotide
uuaaguguuaauuauuugc

SEQ ID NO: 1228432 - RNA, 19 nt, Artificial Sequence
  Description of Artificial Sequence: Synthetic oligonucleotide
ugcaaaacuccaaagauag

SEQ ID NO: 1228433 - RNA, 19 nt, Artificial Sequence
  Description of Artificial Sequence: Synthetic oligonucleotide
auuauaguuacaugcagac

SEQ ID NO: 1228434 - RNA, 19 nt, Artificial Sequence
  Description of Artificial Sequence: Synthetic oligonucleotide
uuguacauuaaauauaaug

SEQ ID NO: 1228435 - RNA, 19 nt, Artificial Sequence
  Description of Artificial Sequence: Synthetic oligonucleotide
uuuuacggaacaauuaugc

SEQ ID NO: 1228436 - RNA, 19 nt, Artificial Sequence
  Description of Artificial Sequence: Synthetic oligonucleotide
aaacuuaaacacuacaagu

SEQ ID NO: 1228437 - RNA, 19 nt, Artificial Sequence
  Description of Artificial Sequence: Synthetic oligonucleotide
aaauaaaugaguaauagua

SEQ ID NO: 1228438 - RNA, 19 nt, Artificial Sequence
  Description of Artificial Sequence: Synthetic oligonucleotide
uuaauuauuugcuucauaa

SEQ ID NO: 1228439 - RNA, 19 nt, Artificial Sequence
  Description of Artificial Sequence: Synthetic oligonucleotide
aauagugaaaccuauuuua

SEQ ID NO: 1228440 - RNA, 19 nt, Artificial Sequence
  Description of Artificial Sequence: Synthetic oligonucleotide
uauacugacaucuaggcaa

SEQ ID NO: 1228441 - RNA, 19 nt, Artificial Sequence
  Description of Artificial Sequence: Synthetic oligonucleotide
uuuacgugcagucaguuug

SEQ ID NO: 1228442 - RNA, 19 nt, Artificial Sequence
  Description of Artificial Sequence: Synthetic oligonucleotide
uuuuaauauagaauaguga

SEQ ID NO: 1228443 - RNA, 19 nt, Artificial Sequence
  Description of Artificial Sequence: Synthetic oligonucleotide
aaaauuagcaauuuaccuu

SEQ ID NO: 1228444 - RNA, 19 nt, Artificial Sequence
  Description of Artificial Sequence: Synthetic oligonucleotide
uuggaaugaauaaauacca

SEQ ID NO: 1228445 - RNA, 19 nt, Artificial Sequence
  Description of Artificial Sequence: Synthetic oligonucleotide
uuuaaauauaauacuuuga

SEQ ID NO: 1228446 - RNA, 19 nt, Artificial Sequence
  Description of Artificial Sequence: Synthetic oligonucleotide
uaaaucauagaacugacuu

SEQ ID NO: 1228447 - RNA, 19 nt, Artificial Sequence
  Description of Artificial Sequence: Synthetic oligonucleotide
ugcaguuaaguaauaaugc

SEQ ID NO: 1228448 - RNA, 19 nt, Artificial Sequence
  Description of Artificial Sequence: Synthetic oligonucleotide
auuuaaguauaugaaagac

SEQ ID NO: 1228449 - RNA, 19 nt, Artificial Sequence
  Description of Artificial Sequence: Synthetic oligonucleotide
gauuuuaccucaaagaaac

SEQ ID NO: 1228450 - RNA, 19 nt, Artificial Sequence
  Description of Artificial Sequence: Synthetic oligonucleotide
agauuugucuacuuggagg

SEQ ID NO: 1228451 - RNA, 19 nt, Artificial Sequence
  Description of Artificial Sequence: Synthetic oligonucleotide
auaguaucaaaaucacccc

SEQ ID NO: 1228452 - RNA, 19 nt, Artificial Sequence
  Description of Artificial Sequence: Synthetic oligonucleotide
uauguaaauucacacaaac

SEQ ID NO: 1228453 - RNA, 19 nt, Artificial Sequence
  Description of Artificial Sequence: Synthetic oligonucleotide
ugcaauauaauaacaauua

SEQ ID NO: 1228454 - RNA, 19 nt, Artificial Sequence
  Description of Artificial Sequence: Synthetic oligonucleotide
uuacggaacaauuaugcag

SEQ ID NO: 1228455 - RNA, 19 nt, Artificial Sequence
  Description of Artificial Sequence: Synthetic oligonucleotide
aaaugaguaauaguaaugu

SEQ ID NO: 1228456 - RNA, 19 nt, Artificial Sequence
  Description of Artificial Sequence: Synthetic oligonucleotide
agugaaaccuauuuuauga

SEQ ID NO: 1228457 - RNA, 19 nt, Artificial Sequence
  Description of Artificial Sequence: Synthetic oligonucleotide
ugaauauacugacaucuag

SEQ ID NO: 1228458 - RNA, 19 nt, Artificial Sequence
  Description of Artificial Sequence: Synthetic oligonucleotide
aaaucauagaacugacuug

SEQ ID NO: 1228459 - RNA, 19 nt, Artificial Sequence
  Description of Artificial Sequence: Synthetic oligonucleotide
aaauuaaaucaaauacuac

SEQ ID NO: 1228460 - RNA, 19 nt, Artificial Sequence
  Description of Artificial Sequence: Synthetic oligonucleotide
uauucuuauuucaugaaaa

SEQ ID NO: 1228461 - RNA, 19 nt, Artificial Sequence
  Description of Artificial Sequence: Synthetic oligonucleotide
cuuaaccucaaauuaaaug

SEQ ID NO: 1228462 - RNA, 19 nt, Artificial Sequence
  Description of Artificial Sequence: Synthetic oligonucleotide
aaacuccaaagauaguauc

SEQ ID NO: 1228463 - RNA, 19 nt, Artificial Sequence
  Description of Artificial Sequence: Synthetic oligonucleotide
aaucaaauacuacuuaauu

SEQ ID NO: 1228464 - RNA, 19 nt, Artificial Sequence
  Description of Artificial Sequence: Synthetic oligonucleotide
uaucacucaauuuguaucc

SEQ ID NO: 1228465 - RNA, 19 nt, Artificial Sequence
  Description of Artificial Sequence: Synthetic oligonucleotide
ugauaaaggccuaaaacaa

SEQ ID NO: 1228466 - RNA, 19 nt, Artificial Sequence
  Description of Artificial Sequence: Synthetic oligonucleotide
gaauauacugacaucuagg

SEQ ID NO: 1228467 - RNA, 19 nt, Artificial Sequence
  Description of Artificial Sequence: Synthetic oligonucleotide
uauaaaccugaaaaugcag

SEQ ID NO: 1228468 - RNA, 19 nt, Artificial Sequence
  Description of Artificial Sequence: Synthetic oligonucleotide
auauaauacuuugaaacuc

SEQ ID NO: 1228469 - RNA, 19 nt, Artificial Sequence
  Description of Artificial Sequence: Synthetic oligonucleotide
ugauuauaguuacaugcag

SEQ ID NO: 1228470 - RNA, 19 nt, Artificial Sequence
  Description of Artificial Sequence: Synthetic oligonucleotide
cuaaccaacgguauuuggg

SEQ ID NO: 1228471 - RNA, 19 nt, Artificial Sequence
  Description of Artificial Sequence: Synthetic oligonucleotide
agauuaguuaggcaaagug

SEQ ID NO: 1228472 - RNA, 19 nt, Artificial Sequence
  Description of Artificial Sequence: Synthetic oligonucleotide
cuaaagauuaguuaggcaa

SEQ ID NO: 1228473 - RNA, 19 nt, Artificial Sequence
  Description of Artificial Sequence: Synthetic oligonucleotide
aaaaucaccccauacuaaa

SEQ ID NO: 1228474 - RNA, 19 nt, Artificial Sequence
  Description of Artificial Sequence: Synthetic oligonucleotide
aaugaaauuuuaucuguau

SEQ ID NO: 1228475 - RNA, 19 nt, Artificial Sequence
  Description of Artificial Sequence: Synthetic oligonucleotide
uaguagaucauuuucugac

SEQ ID NO: 1228476 - RNA, 19 nt, Artificial Sequence
  Description of Artificial Sequence: Synthetic oligonucleotide
uuuuagaccaguuuugcau

SEQ ID NO: 1228477 - RNA, 19 nt, Artificial Sequence
  Description of Artificial Sequence: Synthetic oligonucleotide
cauagaacugacuugcuac

SEQ ID NO: 1228478 - RNA, 19 nt, Artificial Sequence
  Description of Artificial Sequence: Synthetic oligonucleotide
uaaaggccuaaaacaaugg

SEQ ID NO: 1228479 - RNA, 19 nt, Artificial Sequence
  Description of Artificial Sequence: Synthetic oligonucleotide
aaaacaacuuacuggaaua

SEQ ID NO: 1228480 - RNA, 19 nt, Artificial Sequence
  Description of Artificial Sequence: Synthetic oligonucleotide
uucuaaauaaaugaguaau

SEQ ID NO: 1228481 - RNA, 19 nt, Artificial Sequence
  Description of Artificial Sequence: Synthetic oligonucleotide
uacggaacaauuaugcagu

SEQ ID NO: 1228482 - RNA, 19 nt, Artificial Sequence
  Description of Artificial Sequence: Synthetic oligonucleotide
uacuuugaaacucauuuaa

SEQ ID NO: 1228483 - RNA, 19 nt, Artificial Sequence
  Description of Artificial Sequence: Synthetic oligonucleotide
agauauaaaccugaaaaug

SEQ ID NO: 1228484 - RNA, 19 nt, Artificial Sequence
  Description of Artificial Sequence: Synthetic oligonucleotide
acugaauauacugacaucu

SEQ ID NO: 1228485 - RNA, 19 nt, Artificial Sequence
  Description of Artificial Sequence: Synthetic oligonucleotide
uuauuaucaguuaaguguu

SEQ ID NO: 1228486 - RNA, 19 nt, Artificial Sequence
  Description of Artificial Sequence: Synthetic oligonucleotide
uuagcaauuuaccuuuuac

SEQ ID NO: 1228487 - RNA, 19 nt, Artificial Sequence
  Description of Artificial Sequence: Synthetic oligonucleotide
cacagauuugucuacuugg

SEQ ID NO: 1228488 - RNA, 19 nt, Artificial Sequence
  Description of Artificial Sequence: Synthetic oligonucleotide
uccaaagauaguaucaaaa

SEQ ID NO: 1228489 - RNA, 19 nt, Artificial Sequence
  Description of Artificial Sequence: Synthetic oligonucleotide
cugauaaaggccuaaaaca

SEQ ID NO: 1228490 - RNA, 19 nt, Artificial Sequence
  Description of Artificial Sequence: Synthetic oligonucleotide
aguucauggacacugauua

SEQ ID NO: 1228491 - RNA, 19 nt, Artificial Sequence
  Description of Artificial Sequence: Synthetic oligonucleotide
aacugaauauacugacauc

SEQ ID NO: 1228492 - RNA, 19 nt, Artificial Sequence
  Description of Artificial Sequence: Synthetic oligonucleotide
uuaaguaauaaugcaauau

SEQ ID NO: 1228493 - RNA, 19 nt, Artificial Sequence
  Description of Artificial Sequence: Synthetic oligonucleotide
aauauacauccguaugaug

SEQ ID NO: 1228494 - RNA, 19 nt, Artificial Sequence
  Description of Artificial Sequence: Synthetic oligonucleotide
auauacauccguaugauga

SEQ ID NO: 1228495 - RNA, 19 nt, Artificial Sequence
  Description of Artificial Sequence: Synthetic oligonucleotide
aaauggauccagauuuuac

SEQ ID NO: 1228496 - RNA, 19 nt, Artificial Sequence
  Description of Artificial Sequence: Synthetic oligonucleotide
uuaaaucaaauacuacuua

SEQ ID NO: 1228497 - RNA, 19 nt, Artificial Sequence
  Description of Artificial Sequence: Synthetic oligonucleotide
aaucacgcaguauaaaauu

SEQ ID NO: 1228498 - RNA, 19 nt, Artificial Sequence
  Description of Artificial Sequence: Synthetic oligonucleotide
ugauuaaaucauagaacug

SEQ ID NO: 1228499 - RNA, 19 nt, Artificial Sequence
  Description of Artificial Sequence: Synthetic oligonucleotide
agaacugacuugcuacagc

SEQ ID NO: 1228500 - RNA, 19 nt, Artificial Sequence
  Description of Artificial Sequence: Synthetic oligonucleotide
ucacgcaguauaaaauuag

SEQ ID NO: 1228501 - RNA, 19 nt, Artificial Sequence
  Description of Artificial Sequence: Synthetic oligonucleotide
aaaguagaaugauuauagu

SEQ ID NO: 1228502 - RNA, 19 nt, Artificial Sequence
  Description of Artificial Sequence: Synthetic oligonucleotide
cauaauugcacacgaguag

SEQ ID NO: 1228503 - RNA, 19 nt, Artificial Sequence
  Description of Artificial Sequence: Synthetic oligonucleotide
aaucaccccauacuaaaga

SEQ ID NO: 1228504 - RNA, 19 nt, Artificial Sequence
  Description of Artificial Sequence: Synthetic oligonucleotide
uugguagauauaaaccuga

SEQ ID NO: 1228505 - RNA, 19 nt, Artificial Sequence
  Description of Artificial Sequence: Synthetic oligonucleotide
acacgaguagcucaaguuc

SEQ ID NO: 1228506 - RNA, 19 nt, Artificial Sequence
  Description of Artificial Sequence: Synthetic oligonucleotide
ugaagugcccuuaaccuca

SEQ ID NO: 1228507 - RNA, 19 nt, Artificial Sequence
  Description of Artificial Sequence: Synthetic oligonucleotide
uuaaacacuacaagugaaa

SEQ ID NO: 1228508 - RNA, 19 nt, Artificial Sequence
  Description of Artificial Sequence: Synthetic oligonucleotide
ugucuaaacucacacugug

SEQ ID NO: 1228509 - RNA, 19 nt, Artificial Sequence
  Description of Artificial Sequence: Synthetic oligonucleotide
uagauauaaaccugaaaau

SEQ ID NO: 1228510 - RNA, 19 nt, Artificial Sequence
  Description of Artificial Sequence: Synthetic oligonucleotide
ucaguuaaguguuaauuau

SEQ ID NO: 1228511 - RNA, 19 nt, Artificial Sequence
  Description of Artificial Sequence: Synthetic oligonucleotide
aaaggccuaaaacaauggu

SEQ ID NO: 1228512 - RNA, 19 nt, Artificial Sequence
  Description of Artificial Sequence: Synthetic oligonucleotide
aaccugaaaaugcaguuaa

SEQ ID NO: 1228513 - RNA, 19 nt, Artificial Sequence
  Description of Artificial Sequence: Synthetic oligonucleotide
uauugugccaauauauuuu

SEQ ID NO: 1228514 - RNA, 19 nt, Artificial Sequence
  Description of Artificial Sequence: Synthetic oligonucleotide
aaagauuaguuaggcaaag

SEQ ID NO: 1228515 - RNA, 19 nt, Artificial Sequence
  Description of Artificial Sequence: Synthetic oligonucleotide
agaauagugaaaccuauuu

SEQ ID NO: 1228516 - RNA, 19 nt, Artificial Sequence
  Description of Artificial Sequence: Synthetic oligonucleotide
aaugguauuuacgugcagu

SEQ ID NO: 1228517 - RNA, 19 nt, Artificial Sequence
  Description of Artificial Sequence: Synthetic oligonucleotide
aguuaggcaaagugauacc

SEQ ID NO: 1228518 - RNA, 19 nt, Artificial Sequence
  Description of Artificial Sequence: Synthetic oligonucleotide
uacauccguaugaugaugc

SEQ ID NO: 1228519 - RNA, 19 nt, Artificial Sequence
  Description of Artificial Sequence: Synthetic oligonucleotide
cuaucacucaauuuguauc

SEQ ID NO: 1228520 - RNA, 19 nt, Artificial Sequence
  Description of Artificial Sequence: Synthetic oligonucleotide
acauuaaauauaaugugug

SEQ ID NO: 1228521 - RNA, 19 nt, Artificial Sequence
  Description of Artificial Sequence: Synthetic oligonucleotide
aaacaacuuacuggaauag

SEQ ID NO: 1228522 - RNA, 19 nt, Artificial Sequence
  Description of Artificial Sequence: Synthetic oligonucleotide
cucaauuuguauccuuugg

SEQ ID NO: 1228523 - RNA, 19 nt, Artificial Sequence
  Description of Artificial Sequence: Synthetic oligonucleotide
uccccaacugaauauacug

SEQ ID NO: 1228524 - RNA, 19 nt, Artificial Sequence
  Description of Artificial Sequence: Synthetic oligonucleotide
aaguaauaaugcaauauaa

SEQ ID NO: 1228525 - RNA, 19 nt, Artificial Sequence
  Description of Artificial Sequence: Synthetic oligonucleotide
gaugcagauacaaaucaug

SEQ ID NO: 1228526 - RNA, 19 nt, Artificial Sequence
  Description of Artificial Sequence: Synthetic oligonucleotide
uuaaaucauagaacugacu

SEQ ID NO: 1228527 - RNA, 19 nt, Artificial Sequence
  Description of Artificial Sequence: Synthetic oligonucleotide
gagguaaagggagaaaagc

SEQ ID NO: 1228528 - RNA, 19 nt, Artificial Sequence
  Description of Artificial Sequence: Synthetic oligonucleotide
ugaacacuacuccauuccc

SEQ ID NO: 1228529 - RNA, 19 nt, Artificial Sequence
  Description of Artificial Sequence: Synthetic oligonucleotide
gauuaguuaggcaaaguga

SEQ ID NO: 1228530 - RNA, 19 nt, Artificial Sequence
  Description of Artificial Sequence: Synthetic oligonucleotide
uuuacggaacaauuaugca

SEQ ID NO: 1228531 - RNA, 19 nt, Artificial Sequence
  Description of Artificial Sequence: Synthetic oligonucleotide
agaaugauuauaguuacau

SEQ ID NO: 1228532 - RNA, 19 nt, Artificial Sequence
  Description of Artificial Sequence: Synthetic oligonucleotide
aaagugauaccuguggaaa

SEQ ID NO: 1228533 - RNA, 19 nt, Artificial Sequence
  Description of Artificial Sequence: Synthetic oligonucleotide
aguuugcaugaacugagag

SEQ ID NO: 1228534 - RNA, 19 nt, Artificial Sequence
  Description of Artificial Sequence: Synthetic oligonucleotide
gaaaccuauuuuaugaaga

SEQ ID NO: 1228535 - RNA, 19 nt, Artificial Sequence
  Description of Artificial Sequence: Synthetic oligonucleotide
agaaucacgcaguauaaaa

SEQ ID NO: 1228536 - RNA, 19 nt, Artificial Sequence
  Description of Artificial Sequence: Synthetic oligonucleotide
agugaaagcacagauuugu

SEQ ID NO: 1228537 - RNA, 19 nt, Artificial Sequence
  Description of Artificial Sequence: Synthetic oligonucleotide
uaaccaacgguauuugggu

SEQ ID NO: 1228538 - RNA, 19 nt, Artificial Sequence
  Description of Artificial Sequence: Synthetic oligonucleotide
cauucuaaauaaaugagua

SEQ ID NO: 1228539 - RNA, 19 nt, Artificial Sequence
  Description of Artificial Sequence: Synthetic oligonucleotide
gguauuuacgugcagucag

SEQ ID NO: 1228540 - RNA, 19 nt, Artificial Sequence
  Description of Artificial Sequence: Synthetic oligonucleotide
aguuuugcauucuaucacu

SEQ ID NO: 1228541 - RNA, 19 nt, Artificial Sequence
  Description of Artificial Sequence: Synthetic oligonucleotide
aaauauacauccguaugau

SEQ ID NO: 1228542 - RNA, 19 nt, Artificial Sequence
  Description of Artificial Sequence: Synthetic oligonucleotide
augaagugcccuuaaccuc

SEQ ID NO: 1228543 - RNA, 19 nt, Artificial Sequence
  Description of Artificial Sequence: Synthetic oligonucleotide
cuauucagacuuuacagca

SEQ ID NO: 1228544 - RNA, 19 nt, Artificial Sequence
  Description of Artificial Sequence: Synthetic oligonucleotide
aaugaguaauaguaauguu

SEQ ID NO: 1228545 - RNA, 19 nt, Artificial Sequence
  Description of Artificial Sequence: Synthetic oligonucleotide
aacacuacuccauucccau

SEQ ID NO: 1228546 - RNA, 19 nt, Artificial Sequence
  Description of Artificial Sequence: Synthetic oligonucleotide
auauauugugccaauauau

SEQ ID NO: 1228547 - RNA, 19 nt, Artificial Sequence
  Description of Artificial Sequence: Synthetic oligonucleotide
aaccaacgguauuuggguc

SEQ ID NO: 1228548 - RNA, 19 nt, Artificial Sequence
  Description of Artificial Sequence: Synthetic oligonucleotide
aucaguuaaguguuaauua

SEQ ID NO: 1228549 - RNA, 19 nt, Artificial Sequence
  Description of Artificial Sequence: Synthetic oligonucleotide
agauaguaucaaaaucacc

SEQ ID NO: 1228550 - RNA, 19 nt, Artificial Sequence
  Description of Artificial Sequence: Synthetic oligonucleotide
ugauaccuguggaaaauga

SEQ ID NO: 1228551 - RNA, 19 nt, Artificial Sequence
  Description of Artificial Sequence: Synthetic oligonucleotide
auaaaggccuaaaacaaug

SEQ ID NO: 1228552 - RNA, 19 nt, Artificial Sequence
  Description of Artificial Sequence: Synthetic oligonucleotide
uggccugauuaaaucauag

SEQ ID NO: 1228553 - RNA, 19 nt, Artificial Sequence
  Description of Artificial Sequence: Synthetic oligonucleotide
ugguuuuaaagugaugacu

SEQ ID NO: 1228554 - RNA, 19 nt, Artificial Sequence
  Description of Artificial Sequence: Synthetic oligonucleotide
agaaacucaguauucuuau

SEQ ID NO: 1228555 - RNA, 19 nt, Artificial Sequence
  Description of Artificial Sequence: Synthetic oligonucleotide
aauugcacacgaguagcuc

SEQ ID NO: 1228556 - RNA, 19 nt, Artificial Sequence
  Description of Artificial Sequence: Synthetic oligonucleotide
acagcacuaauucucaaaa

SEQ ID NO: 1228557 - RNA, 19 nt, Artificial Sequence
  Description of Artificial Sequence: Synthetic oligonucleotide
auuaguuaggcaaagugau

SEQ ID NO: 1228558 - RNA, 19 nt, Artificial Sequence
  Description of Artificial Sequence: Synthetic oligonucleotide
aaaucaaauacuacuuaau

SEQ ID NO: 1228559 - RNA, 19 nt, Artificial Sequence
  Description of Artificial Sequence: Synthetic oligonucleotide
cuuuuacggaacaauuaug

SEQ ID NO: 1228560 - RNA, 19 nt, Artificial Sequence
  Description of Artificial Sequence: Synthetic oligonucleotide
agcauguuaaaauauccuu

SEQ ID NO: 1228561 - RNA, 19 nt, Artificial Sequence
  Description of Artificial Sequence: Synthetic oligonucleotide
auacuaaagauuaguuagg

SEQ ID NO: 1228562 - RNA, 19 nt, Artificial Sequence
  Description of Artificial Sequence: Synthetic oligonucleotide
auucuaaauaaaugaguaa

SEQ ID NO: 1228563 - RNA, 19 nt, Artificial Sequence
  Description of Artificial Sequence: Synthetic oligonucleotide
aacuccaaagauaguauca

SEQ ID NO: 1228564 - RNA, 19 nt, Artificial Sequence
  Description of Artificial Sequence: Synthetic oligonucleotide
auggauccagauuuuaccu

SEQ ID NO: 1228565 - RNA, 19 nt, Artificial Sequence
  Description of Artificial Sequence: Synthetic oligonucleotide
uggucauucuuacacugga

SEQ ID NO: 1228566 - RNA, 19 nt, Artificial Sequence
  Description of Artificial Sequence: Synthetic oligonucleotide
uaucaguuaaguguuaauu

SEQ ID NO: 1228567 - RNA, 19 nt, Artificial Sequence
  Description of Artificial Sequence: Synthetic oligonucleotide
gauuauaguuacaugcaga

SEQ ID NO: 1228568 - RNA, 19 nt, Artificial Sequence
  Description of Artificial Sequence: Synthetic oligonucleotide
agcaguuuggaaugaauaa

SEQ ID NO: 1228569 - RNA, 19 nt, Artificial Sequence
  Description of Artificial Sequence: Synthetic oligonucleotide
gaugaugcagauacaaauc

SEQ ID NO: 1228570 - RNA, 19 nt, Artificial Sequence
  Description of Artificial Sequence: Synthetic oligonucleotide
gacaacgugcuuauuauca

SEQ ID NO: 1228571 - RNA, 19 nt, Artificial Sequence
  Description of Artificial Sequence: Synthetic oligonucleotide
ugcccuuaaccucaaauua

SEQ ID NO: 1228572 - RNA, 19 nt, Artificial Sequence
  Description of Artificial Sequence: Synthetic oligonucleotide
uaacaauuacucagagaga

SEQ ID NO: 1228573 - RNA, 19 nt, Artificial Sequence
  Description of Artificial Sequence: Synthetic oligonucleotide
aagugaugacuuuauuaau

SEQ ID NO: 1228574 - RNA, 19 nt, Artificial Sequence
  Description of Artificial Sequence: Synthetic oligonucleotide
acaacgugcuuauuaucag

SEQ ID NO: 1228575 - RNA, 19 nt, Artificial Sequence
  Description of Artificial Sequence: Synthetic oligonucleotide
caauuuaccuuuuacggaa

SEQ ID NO: 1228576 - RNA, 19 nt, Artificial Sequence
  Description of Artificial Sequence: Synthetic oligonucleotide
aucuaggcaacuguuuaac

SEQ ID NO: 1228577 - RNA, 19 nt, Artificial Sequence
  Description of Artificial Sequence: Synthetic oligonucleotide
acauucuaaauaaaugagu

SEQ ID NO: 1228578 - RNA, 19 nt, Artificial Sequence
  Description of Artificial Sequence: Synthetic oligonucleotide
aguaauaaugcaauauaau

SEQ ID NO: 1228579 - RNA, 19 nt, Artificial Sequence
  Description of Artificial Sequence: Synthetic oligonucleotide
auauacugacaucuaggca

SEQ ID NO: 1228580 - RNA, 19 nt, Artificial Sequence
  Description of Artificial Sequence: Synthetic oligonucleotide
ccugauuaaaucauagaac

SEQ ID NO: 1228581 - RNA, 19 nt, Artificial Sequence
  Description of Artificial Sequence: Synthetic oligonucleotide
auagaacugacuugcuaca

SEQ ID NO: 1228582 - RNA, 19 nt, Artificial Sequence
  Description of Artificial Sequence: Synthetic oligonucleotide
cacuacuccauucccauac

SEQ ID NO: 1228583 - RNA, 19 nt, Artificial Sequence
  Description of Artificial Sequence: Synthetic oligonucleotide
auaaaccugaaaaugcagu

SEQ ID NO: 1228584 - RNA, 19 nt, Artificial Sequence
  Description of Artificial Sequence: Synthetic oligonucleotide
aguauaugaaagacaaagu

SEQ ID NO: 1228585 - RNA, 19 nt, Artificial Sequence
  Description of Artificial Sequence: Synthetic oligonucleotide
guguuaauuauuugcuuca

SEQ ID NO: 1228586 - RNA, 19 nt, Artificial Sequence
  Description of Artificial Sequence: Synthetic oligonucleotide
augaguaauaguaauguuu

SEQ ID NO: 1228587 - RNA, 19 nt, Artificial Sequence
  Description of Artificial Sequence: Synthetic oligonucleotide
uauacauccguaugaugau

SEQ ID NO: 1228588 - RNA, 19 nt, Artificial Sequence
  Description of Artificial Sequence: Synthetic oligonucleotide
agacaaaguagaaugauua

SEQ ID NO: 1228589 - RNA, 19 nt, Artificial Sequence
  Description of Artificial Sequence: Synthetic oligonucleotide
cuuacuggaauaguagauc

SEQ ID NO: 1228590 - RNA, 19 nt, Artificial Sequence
  Description of Artificial Sequence: Synthetic oligonucleotide
ugcagauacaaaucaugaa

SEQ ID NO: 1228591 - RNA, 19 nt, Artificial Sequence
  Description of Artificial Sequence: Synthetic oligonucleotide
auaccacauugacagaugu

SEQ ID NO: 1228592 - RNA, 19 nt, Artificial Sequence
  Description of Artificial Sequence: Synthetic oligonucleotide
uucuuacacuggaugaagu

SEQ ID NO: 1228593 - RNA, 19 nt, Artificial Sequence
  Description of Artificial Sequence: Synthetic oligonucleotide
aaaucaccccauacuaaag

SEQ ID NO: 1228594 - RNA, 19 nt, Artificial Sequence
  Description of Artificial Sequence: Synthetic oligonucleotide
aucagaauggccugauuaa

SEQ ID NO: 1228595 - RNA, 19 nt, Artificial Sequence
  Description of Artificial Sequence: Synthetic oligonucleotide
augauuauaguuacaugca

SEQ ID NO: 1228596 - RNA, 19 nt, Artificial Sequence
  Description of Artificial Sequence: Synthetic oligonucleotide
aagugauaccuguggaaaa

SEQ ID NO: 1228597 - RNA, 19 nt, Artificial Sequence
  Description of Artificial Sequence: Synthetic oligonucleotide
uuacgugcagucaguuugc

SEQ ID NO: 1228598 - RNA, 19 nt, Artificial Sequence
  Description of Artificial Sequence: Synthetic oligonucleotide
agagcaagccuaaccaacg

SEQ ID NO: 1228599 - RNA, 19 nt, Artificial Sequence
  Description of Artificial Sequence: Synthetic oligonucleotide
aagaaacucaguauucuua

SEQ ID NO: 1228600 - RNA, 19 nt, Artificial Sequence
  Description of Artificial Sequence: Synthetic oligonucleotide
uuuccccaacugaauauac

SEQ ID NO: 1228601 - RNA, 19 nt, Artificial Sequence
  Description of Artificial Sequence: Synthetic oligonucleotide
gaauuauuagucugauuua

SEQ ID NO: 1228602 - RNA, 19 nt, Artificial Sequence
  Description of Artificial Sequence: Synthetic oligonucleotide
uaccuuuuacggaacaauu

SEQ ID NO: 1228603 - RNA, 19 nt, Artificial Sequence
  Description of Artificial Sequence: Synthetic oligonucleotide
acucauuuaaguauaugaa

SEQ ID NO: 1228604 - RNA, 19 nt, Artificial Sequence
  Description of Artificial Sequence: Synthetic oligonucleotide
uacagcacuaauucucaaa

SEQ ID NO: 1228605 - RNA, 19 nt, Artificial Sequence
  Description of Artificial Sequence: Synthetic oligonucleotide
cauggacacugauuaaaac

SEQ ID NO: 1228606 - RNA, 19 nt, Artificial Sequence
  Description of Artificial Sequence: Synthetic oligonucleotide
gagcaagccuaaccaacgg

SEQ ID NO: 1228607 - RNA, 19 nt, Artificial Sequence
  Description of Artificial Sequence: Synthetic oligonucleotide
agugcccuuaaccucaaau

SEQ ID NO: 1228608 - RNA, 19 nt, Artificial Sequence
  Description of Artificial Sequence: Synthetic oligonucleotide
uaaguauaugaaagacaaa

SEQ ID NO: 1228609 - RNA, 19 nt, Artificial Sequence
  Description of Artificial Sequence: Synthetic oligonucleotide
aaggccuaaaacaauggua

SEQ ID NO: 1228610 - RNA, 19 nt, Artificial Sequence
  Description of Artificial Sequence: Synthetic oligonucleotide
uuaaauggauccagauuuu

SEQ ID NO: 1228611 - RNA, 19 nt, Artificial Sequence
  Description of Artificial Sequence: Synthetic oligonucleotide
cuuaaacacuacaagugaa

SEQ ID NO: 1228612 - RNA, 19 nt, Artificial Sequence
  Description of Artificial Sequence: Synthetic oligonucleotide
accaacgguauuugggucu

SEQ ID NO: 1228613 - RNA, 19 nt, Artificial Sequence
  Description of Artificial Sequence: Synthetic oligonucleotide
uuaucaguuaaguguuaau

SEQ ID NO: 1228614 - RNA, 19 nt, Artificial Sequence
  Description of Artificial Sequence: Synthetic oligonucleotide
acaucuaggcaacuguuua

SEQ ID NO: 1228615 - RNA, 19 nt, Artificial Sequence
  Description of Artificial Sequence: Synthetic oligonucleotide
uuaccuuuuacggaacaau

SEQ ID NO: 1228616 - RNA, 19 nt, Artificial Sequence
  Description of Artificial Sequence: Synthetic oligonucleotide
aggacaacgugcuuauuau

SEQ ID NO: 1228617 - RNA, 19 nt, Artificial Sequence
  Description of Artificial Sequence: Synthetic oligonucleotide
aggccuaaaacaaugguau

SEQ ID NO: 1228618 - RNA, 19 nt, Artificial Sequence
  Description of Artificial Sequence: Synthetic oligonucleotide
aagacaaaguagaaugauu

SEQ ID NO: 1228619 - RNA, 19 nt, Artificial Sequence
  Description of Artificial Sequence: Synthetic oligonucleotide
aagauuaguuaggcaaagu

SEQ ID NO: 1228620 - RNA, 19 nt, Artificial Sequence
  Description of Artificial Sequence: Synthetic oligonucleotide
uuaguuaggcaaagugaua

SEQ ID NO: 1228621 - RNA, 19 nt, Artificial Sequence
  Description of Artificial Sequence: Synthetic oligonucleotide
caugaacacuacuccauuc

SEQ ID NO: 1228622 - RNA, 19 nt, Artificial Sequence
  Description of Artificial Sequence: Synthetic oligonucleotide
aucuguaucgacuccuuuu

SEQ ID NO: 1228623 - RNA, 19 nt, Artificial Sequence
  Description of Artificial Sequence: Synthetic oligonucleotide
augcaauauaauaacaauu

SEQ ID NO: 1228624 - RNA, 19 nt, Artificial Sequence
  Description of Artificial Sequence: Synthetic oligonucleotide
cagauuugucuacuuggag

SEQ ID NO: 1228625 - RNA, 19 nt, Artificial Sequence
  Description of Artificial Sequence: Synthetic oligonucleotide
acgguauuugggucuugac

SEQ ID NO: 1228626 - RNA, 19 nt, Artificial Sequence
  Description of Artificial Sequence: Synthetic oligonucleotide
uagaacugacuugcuacag

SEQ ID NO: 1228627 - RNA, 19 nt, Artificial Sequence
  Description of Artificial Sequence: Synthetic oligonucleotide
augcagauacaaaucauga

SEQ ID NO: 1228628 - RNA, 19 nt, Artificial Sequence
  Description of Artificial Sequence: Synthetic oligonucleotide
guagaucauuuucugacaa

SEQ ID NO: 1228629 - RNA, 19 nt, Artificial Sequence
  Description of Artificial Sequence: Synthetic oligonucleotide
uuuaccuuuuacggaacaa

SEQ ID NO: 1228630 - RNA, 19 nt, Artificial Sequence
  Description of Artificial Sequence: Synthetic oligonucleotide
aucaccccauacuaaagau

SEQ ID NO: 1228631 - RNA, 19 nt, Artificial Sequence
  Description of Artificial Sequence: Synthetic oligonucleotide
gccugauuaaaucauagaa

SEQ ID NO: 1228632 - RNA, 19 nt, Artificial Sequence
  Description of Artificial Sequence: Synthetic oligonucleotide
agauuuuaccucaaagaaa

SEQ ID NO: 1228633 - RNA, 19 nt, Artificial Sequence
  Description of Artificial Sequence: Synthetic oligonucleotide
cuaaacucacacugugguc

SEQ ID NO: 1228634 - RNA, 19 nt, Artificial Sequence
  Description of Artificial Sequence: Synthetic oligonucleotide
auuaucaguuaaguguuaa

SEQ ID NO: 1228635 - RNA, 19 nt, Artificial Sequence
  Description of Artificial Sequence: Synthetic oligonucleotide
uuccccaacugaauauacu

SEQ ID NO: 1228636 - RNA, 19 nt, Artificial Sequence
  Description of Artificial Sequence: Synthetic oligonucleotide
gagagcaagccuaaccaac

SEQ ID NO: 1228637 - RNA, 19 nt, Artificial Sequence
  Description of Artificial Sequence: Synthetic oligonucleotide
cacuacaagugaaagcaca

SEQ ID NO: 1228638 - RNA, 19 nt, Artificial Sequence
  Description of Artificial Sequence: Synthetic oligonucleotide
auacugacaucuaggcaac

SEQ ID NO: 1228639 - RNA, 19 nt, Artificial Sequence
  Description of Artificial Sequence: Synthetic oligonucleotide
uuuguauccuuugguagau

SEQ ID NO: 1228640 - RNA, 19 nt, Artificial Sequence
  Description of Artificial Sequence: Synthetic oligonucleotide
ugacaucuaggcaacuguu

SEQ ID NO: 1228641 - RNA, 19 nt, Artificial Sequence
  Description of Artificial Sequence: Synthetic oligonucleotide
aacgugcuuauuaucaguu

SEQ ID NO: 1228642 - RNA, 19 nt, Artificial Sequence
  Description of Artificial Sequence: Synthetic oligonucleotide
uggauccagauuuuaccuc

SEQ ID NO: 1228643 - RNA, 19 nt, Artificial Sequence
  Description of Artificial Sequence: Synthetic oligonucleotide
aacgguauuugggucuuga

SEQ ID NO: 1228644 - RNA, 19 nt, Artificial Sequence
  Description of Artificial Sequence: Synthetic oligonucleotide
aguaucaaaaucaccccau

SEQ ID NO: 1228645 - RNA, 19 nt, Artificial Sequence
  Description of Artificial Sequence: Synthetic oligonucleotide
uauuaucaguuaaguguua

SEQ ID NO: 1228646 - RNA, 19 nt, Artificial Sequence
  Description of Artificial Sequence: Synthetic oligonucleotide
cacgaguagcucaaguuca

SEQ ID NO: 1228647 - RNA, 19 nt, Artificial Sequence
  Description of Artificial Sequence: Synthetic oligonucleotide
aaacucacacuguggucau

SEQ ID NO: 1228648 - RNA, 19 nt, Artificial Sequence
  Description of Artificial Sequence: Synthetic oligonucleotide
ucagaauggccugauuaaa

SEQ ID NO: 1228649 - RNA, 19 nt, Artificial Sequence
  Description of Artificial Sequence: Synthetic oligonucleotide
uucuaucacucaauuugua

SEQ ID NO: 1228650 - RNA, 19 nt, Artificial Sequence
  Description of Artificial Sequence: Synthetic oligonucleotide
agcaagccuaaccaacggu

SEQ ID NO: 1228651 - RNA, 19 nt, Artificial Sequence
  Description of Artificial Sequence: Synthetic oligonucleotide
gaauagugaaaccuauuuu

SEQ ID NO: 1228652 - RNA, 19 nt, Artificial Sequence
  Description of Artificial Sequence: Synthetic oligonucleotide
agggcagcaguuuucccca

SEQ ID NO: 1228653 - RNA, 19 nt, Artificial Sequence
  Description of Artificial Sequence: Synthetic oligonucleotide
aacugagagcaagccuaac

SEQ ID NO: 1228654 - RNA, 19 nt, Artificial Sequence
  Description of Artificial Sequence: Synthetic oligonucleotide
acgcaguauaaaauuagca

SEQ ID NO: 1228655 - RNA, 19 nt, Artificial Sequence
  Description of Artificial Sequence: Synthetic oligonucleotide
caaagugauaccuguggaa

SEQ ID NO: 1228656 - RNA, 19 nt, Artificial Sequence
  Description of Artificial Sequence: Synthetic oligonucleotide
uacuggaauaguagaucau

SEQ ID NO: 1228657 - RNA, 19 nt, Artificial Sequence
  Description of Artificial Sequence: Synthetic oligonucleotide
acuuacuggaauaguagau

SEQ ID NO: 1228658 - RNA, 19 nt, Artificial Sequence
  Description of Artificial Sequence: Synthetic oligonucleotide
uaaauggauccagauuuua

SEQ ID NO: 1228659 - RNA, 19 nt, Artificial Sequence
  Description of Artificial Sequence: Synthetic oligonucleotide
cauccguaugaugaugcag

SEQ ID NO: 1228660 - RNA, 19 nt, Artificial Sequence
  Description of Artificial Sequence: Synthetic oligonucleotide
gucaguuugcaugaacuga

SEQ ID NO: 1228661 - RNA, 19 nt, Artificial Sequence
  Description of Artificial Sequence: Synthetic oligonucleotide
ucaccccauacuaaagauu

SEQ ID NO: 1228662 - RNA, 19 nt, Artificial Sequence
  Description of Artificial Sequence: Synthetic oligonucleotide
acagauuugucuacuugga

SEQ ID NO: 1228663 - RNA, 19 nt, Artificial Sequence
  Description of Artificial Sequence: Synthetic oligonucleotide
auucacacaaacagcaguu

SEQ ID NO: 1228664 - RNA, 19 nt, Artificial Sequence
  Description of Artificial Sequence: Synthetic oligonucleotide
acaaugguauuuacgugca

SEQ ID NO: 1228665 - RNA, 19 nt, Artificial Sequence
  Description of Artificial Sequence: Synthetic oligonucleotide
caaaaucaccccauacuaa

SEQ ID NO: 1228666 - RNA, 19 nt, Artificial Sequence
  Description of Artificial Sequence: Synthetic oligonucleotide
cuacuccauucccauacac

SEQ ID NO: 1228667 - RNA, 19 nt, Artificial Sequence
  Description of Artificial Sequence: Synthetic oligonucleotide
cccaacugaauauacugac

SEQ ID NO: 1228668 - RNA, 19 nt, Artificial Sequence
  Description of Artificial Sequence: Synthetic oligonucleotide
aagccuaaccaacgguauu

SEQ ID NO: 1228669 - RNA, 19 nt, Artificial Sequence
  Description of Artificial Sequence: Synthetic oligonucleotide
auacauccguaugaugaug

SEQ ID NO: 1228670 - RNA, 19 nt, Artificial Sequence
  Description of Artificial Sequence: Synthetic oligonucleotide
uugcugucuugucuccuga

SEQ ID NO: 1228671 - RNA, 19 nt, Artificial Sequence
  Description of Artificial Sequence: Synthetic oligonucleotide
uagaaucacgcaguauaaa

SEQ ID NO: 1228672 - RNA, 19 nt, Artificial Sequence
  Description of Artificial Sequence: Synthetic oligonucleotide
uugucuacuuggagguaaa

SEQ ID NO: 1228673 - RNA, 19 nt, Artificial Sequence
  Description of Artificial Sequence: Synthetic oligonucleotide
auuuacgugcagucaguuu

SEQ ID NO: 1228674 - RNA, 19 nt, Artificial Sequence
  Description of Artificial Sequence: Synthetic oligonucleotide
ugucuacuuggagguaaag

SEQ ID NO: 1228675 - RNA, 19 nt, Artificial Sequence
  Description of Artificial Sequence: Synthetic oligonucleotide
caauauauugugccaauau

SEQ ID NO: 1228676 - RNA, 19 nt, Artificial Sequence
  Description of Artificial Sequence: Synthetic oligonucleotide
acggaacaauuaugcagug

SEQ ID NO: 1228677 - RNA, 19 nt, Artificial Sequence
  Description of Artificial Sequence: Synthetic oligonucleotide
aguaucuauucagacuuua

SEQ ID NO: 1228678 - RNA, 19 nt, Artificial Sequence
  Description of Artificial Sequence: Synthetic oligonucleotide
acuacuccauucccauaca

SEQ ID NO: 1228679 - RNA, 19 nt, Artificial Sequence
  Description of Artificial Sequence: Synthetic oligonucleotide
acauccguaugaugaugca

SEQ ID NO: 1228680 - RNA, 19 nt, Artificial Sequence
  Description of Artificial Sequence: Synthetic oligonucleotide
uaucuguaucgacuccuuu

SEQ ID NO: 1228681 - RNA, 19 nt, Artificial Sequence
  Description of Artificial Sequence: Synthetic oligonucleotide
uauuuacgugcagucaguu

SEQ ID NO: 1228682 - RNA, 19 nt, Artificial Sequence
  Description of Artificial Sequence: Synthetic oligonucleotide
acacauaauugcacacgag

SEQ ID NO: 1228683 - RNA, 19 nt, Artificial Sequence
  Description of Artificial Sequence: Synthetic oligonucleotide
gaaucacgcaguauaaaau

SEQ ID NO: 1228684 - RNA, 19 nt, Artificial Sequence
  Description of Artificial Sequence: Synthetic oligonucleotide
guuuaacagggcaccugag

SEQ ID NO: 1228685 - RNA, 19 nt, Artificial Sequence
  Description of Artificial Sequence: Synthetic oligonucleotide
aacagcaguuuggaaugaa

SEQ ID NO: 1228686 - RNA, 19 nt, Artificial Sequence
  Description of Artificial Sequence: Synthetic oligonucleotide
gcacagauuugucuacuug

SEQ ID NO: 1228687 - RNA, 19 nt, Artificial Sequence
  Description of Artificial Sequence: Synthetic oligonucleotide
caaugguauuuacgugcag

SEQ ID NO: 1228688 - RNA, 19 nt, Artificial Sequence
  Description of Artificial Sequence: Synthetic oligonucleotide
ugacuugcuacagcacuaa

SEQ ID NO: 1228689 - RNA, 19 nt, Artificial Sequence
  Description of Artificial Sequence: Synthetic oligonucleotide
ccuaaccaacgguauuugg

SEQ ID NO: 1228690 - RNA, 19 nt, Artificial Sequence
  Description of Artificial Sequence: Synthetic oligonucleotide
aucacgcaguauaaaauua

SEQ ID NO: 1228691 - RNA, 19 nt, Artificial Sequence
  Description of Artificial Sequence: Synthetic oligonucleotide
cagcaguuuuccccaacug

SEQ ID NO: 1228692 - RNA, 19 nt, Artificial Sequence
  Description of Artificial Sequence: Synthetic oligonucleotide
guaucaaaaucaccccaua

SEQ ID NO: 1228693 - RNA, 19 nt, Artificial Sequence
  Description of Artificial Sequence: Synthetic oligonucleotide
agccuaaccaacgguauuu

SEQ ID NO: 1228694 - RNA, 19 nt, Artificial Sequence
  Description of Artificial Sequence: Synthetic oligonucleotide
cacauugacagauguuucu

SEQ ID NO: 1228695 - RNA, 19 nt, Artificial Sequence
  Description of Artificial Sequence: Synthetic oligonucleotide
caugcagaccuaaagguuu

SEQ ID NO: 1228696 - RNA, 19 nt, Artificial Sequence
  Description of Artificial Sequence: Synthetic oligonucleotide
cugaauauacugacaucua

SEQ ID NO: 1228697 - RNA, 19 nt, Artificial Sequence
  Description of Artificial Sequence: Synthetic oligonucleotide
cauucuuacacuggaugaa

SEQ ID NO: 1228698 - RNA, 19 nt, Artificial Sequence
  Description of Artificial Sequence: Synthetic oligonucleotide
cuugacagccaggagacua

SEQ ID NO: 1228699 - RNA, 19 nt, Artificial Sequence
  Description of Artificial Sequence: Synthetic oligonucleotide
agcacagauuugucuacuu

SEQ ID NO: 1228700 - RNA, 19 nt, Artificial Sequence
  Description of Artificial Sequence: Synthetic oligonucleotide
cagcauguuaaaauauccu

SEQ ID NO: 1228701 - RNA, 19 nt, Artificial Sequence
  Description of Artificial Sequence: Synthetic oligonucleotide
caucuaggcaacuguuuaa

SEQ ID NO: 1228702 - RNA, 19 nt, Artificial Sequence
  Description of Artificial Sequence: Synthetic oligonucleotide
cgcaguauaaaauuagcaa

SEQ ID NO: 1228703 - RNA, 19 nt, Artificial Sequence
  Description of Artificial Sequence: Synthetic oligonucleotide
acaugcagaccuaaagguu

SEQ ID NO: 1228704 - RNA, 19 nt, Artificial Sequence
  Description of Artificial Sequence: Synthetic oligonucleotide
agaccaguuuugcauucua

SEQ ID NO: 1228705 - RNA, 19 nt, Artificial Sequence
  Description of Artificial Sequence: Synthetic oligonucleotide
accugaaaaugcaguuaag

SEQ ID NO: 1228706 - RNA, 19 nt, Artificial Sequence
  Description of Artificial Sequence: Synthetic oligonucleotide
auccagauuuuaccucaaa

SEQ ID NO: 1228707 - RNA, 19 nt, Artificial Sequence
  Description of Artificial Sequence: Synthetic oligonucleotide
cuuggagguaaagggagaa

SEQ ID NO: 1228708 - RNA, 19 nt, Artificial Sequence
  Description of Artificial Sequence: Synthetic oligonucleotide
guucauggacacugauuaa

SEQ ID NO: 1228709 - RNA, 19 nt, Artificial Sequence
  Description of Artificial Sequence: Synthetic oligonucleotide
aguuacaugcagaccuaaa

SEQ ID NO: 1228710 - RNA, 19 nt, Artificial Sequence
  Description of Artificial Sequence: Synthetic oligonucleotide
ggccugauuaaaucauaga

SEQ ID NO: 1228711 - RNA, 19 nt, Artificial Sequence
  Description of Artificial Sequence: Synthetic oligonucleotide
gaacugagagcaagccuaa

SEQ ID NO: 1228712 - RNA, 19 nt, Artificial Sequence
  Description of Artificial Sequence: Synthetic oligonucleotide
ggacaacgugcuuauuauc

SEQ ID NO: 1228713 - RNA, 19 nt, Artificial Sequence
  Description of Artificial Sequence: Synthetic oligonucleotide
cugucuaaacucacacugu

SEQ ID NO: 1228714 - RNA, 19 nt, Artificial Sequence
  Description of Artificial Sequence: Synthetic oligonucleotide
gugcccuuaaccucaaauu

SEQ ID NO: 1228715 - RNA, 19 nt, Artificial Sequence
  Description of Artificial Sequence: Synthetic oligonucleotide
ccaacugaauauacugaca

SEQ ID NO: 1228716 - RNA, 19 nt, Artificial Sequence
  Description of Artificial Sequence: Synthetic oligonucleotide
accccauacuaaagauuag

SEQ ID NO: 1228717 - RNA, 19 nt, Artificial Sequence
  Description of Artificial Sequence: Synthetic oligonucleotide
acgugcagucaguuugcau

SEQ ID NO: 1228718 - RNA, 19 nt, Artificial Sequence
  Description of Artificial Sequence: Synthetic oligonucleotide
guaugaugaugcagauaca

SEQ ID NO: 1228719 - RNA, 19 nt, Artificial Sequence
  Description of Artificial Sequence: Synthetic oligonucleotide
caagccuaaccaacgguau

SEQ ID NO: 1228720 - RNA, 19 nt, Artificial Sequence
  Description of Artificial Sequence: Synthetic oligonucleotide
cagaccuaaagguuucuuu

SEQ ID NO: 1228721 - RNA, 19 nt, Artificial Sequence
  Description of Artificial Sequence: Synthetic oligonucleotide
acacuacuccauucccaua

SEQ ID NO: 1228722 - RNA, 19 nt, Artificial Sequence
  Description of Artificial Sequence: Synthetic oligonucleotide
cacugucuaaacucacacu

SEQ ID NO: 1228723 - RNA, 19 nt, Artificial Sequence
  Description of Artificial Sequence: Synthetic oligonucleotide
guauuuacgugcagucagu

SEQ ID NO: 1228724 - RNA, 19 nt, Artificial Sequence
  Description of Artificial Sequence: Synthetic oligonucleotide
cuacagcacuaauucucaa

SEQ ID NO: 1228725 - RNA, 19 nt, Artificial Sequence
  Description of Artificial Sequence: Synthetic oligonucleotide
ccuuuuacggaacaauuau

SEQ ID NO: 1228726 - RNA, 19 nt, Artificial Sequence
  Description of Artificial Sequence: Synthetic oligonucleotide
gacaucuaggcaacuguuu

SEQ ID NO: 1228727 - RNA, 19 nt, Artificial Sequence
  Description of Artificial Sequence: Synthetic oligonucleotide
gcaagccuaaccaacggua

SEQ ID NO: 1228728 - RNA, 19 nt, Artificial Sequence
  Description of Artificial Sequence: Synthetic oligonucleotide
guauccuuugguagauaua

SEQ ID NO: 1228729 - RNA, 19 nt, Artificial Sequence
  Description of Artificial Sequence: Synthetic oligonucleotide
auggccugauuaaaucaua

SEQ ID NO: 1228730 - RNA, 19 nt, Artificial Sequence
  Description of Artificial Sequence: Synthetic oligonucleotide
uuguauccuuugguagaua

SEQ ID NO: 1228731 - RNA, 19 nt, Artificial Sequence
  Description of Artificial Sequence: Synthetic oligonucleotide
auccagugcaaaacuccaa

SEQ ID NO: 1228732 - RNA, 19 nt, Artificial Sequence
  Description of Artificial Sequence: Synthetic oligonucleotide
ccccaacugaauauacuga

SEQ ID NO: 1228733 - RNA, 19 nt, Artificial Sequence
  Description of Artificial Sequence: Synthetic oligonucleotide
ugacagccaggagacuauu

SEQ ID NO: 1228734 - RNA, 19 nt, Artificial Sequence
  Description of Artificial Sequence: Synthetic oligonucleotide
gcccuuaaccucaaauuaa

SEQ ID NO: 1228735 - RNA, 19 nt, Artificial Sequence
  Description of Artificial Sequence: Synthetic oligonucleotide
gccuaaccaacgguauuug

SEQ ID NO: 1228736 - RNA, 19 nt, Artificial Sequence
  Description of Artificial Sequence: Synthetic oligonucleotide
gcaccugagguuugcuguc

SEQ ID NO: 1228737 - RNA, 19 nt, Artificial Sequence
  Description of Artificial Sequence: Synthetic oligonucleotide
ccucaaagaaacucaguau

SEQ ID NO: 1228738 - RNA, 19 nt, Artificial Sequence
  Description of Artificial Sequence: Synthetic oligonucleotide
gccuaaaacaaugguauuu

SEQ ID NO: 1228739 - RNA, 19 nt, Artificial Sequence
  Description of Artificial Sequence: Synthetic oligonucleotide
gacuugcuacagcacuaau

SEQ ID NO: 1228740 - RNA, 19 nt, Artificial Sequence
  Description of Artificial Sequence: Synthetic oligonucleotide
aacucacacuguggucauu

SEQ ID NO: 1228741 - RNA, 19 nt, Artificial Sequence
  Description of Artificial Sequence: Synthetic oligonucleotide
gaagugcccuuaaccucaa

SEQ ID NO: 1228742 - RNA, 19 nt, Artificial Sequence
  Description of Artificial Sequence: Synthetic oligonucleotide
ggacacugauuaaaacaua

SEQ ID NO: 1228743 - RNA, 19 nt, Artificial Sequence
  Description of Artificial Sequence: Synthetic oligonucleotide
acagggcaccugagguuug

SEQ ID NO: 1228744 - RNA, 19 nt, Artificial Sequence
  Description of Artificial Sequence: Synthetic oligonucleotide
caacgguauuugggucuug

SEQ ID NO: 1228745 - RNA, 19 nt, Artificial Sequence
  Description of Artificial Sequence: Synthetic oligonucleotide
caguaucuauucagacuuu

SEQ ID NO: 1228746 - RNA, 19 nt, Artificial Sequence
  Description of Artificial Sequence: Synthetic oligonucleotide
gcaaaacuccaaagauagu

SEQ ID NO: 1228747 - RNA, 19 nt, Artificial Sequence
  Description of Artificial Sequence: Synthetic oligonucleotide
gcagaccuaaagguuucuu

SEQ ID NO: 1228748 - RNA, 19 nt, Artificial Sequence
  Description of Artificial Sequence: Synthetic oligonucleotide
ccguaugaugaugcagaua

SEQ ID NO: 1228749 - RNA, 19 nt, Artificial Sequence
  Description of Artificial Sequence: Synthetic oligonucleotide
ccaacgguauuugggucuu

SEQ ID NO: 1228750 - RNA, 19 nt, Artificial Sequence
  Description of Artificial Sequence: Synthetic oligonucleotide
aauuucgacacaucgaugg

SEQ ID NO: 1228751 - RNA, 19 nt, Artificial Sequence
  Description of Artificial Sequence: Synthetic oligonucleotide
uuuacaggggcucacaugg

SEQ ID NO: 1228752 - RNA, 19 nt, Artificial Sequence
  Description of Artificial Sequence: Synthetic oligonucleotide
aaucuuacuccaucgaugg

SEQ ID NO: 1228753 - RNA, 19 nt, Artificial Sequence
  Description of Artificial Sequence: Synthetic oligonucleotide
aguugguuggaucaaauuc

SEQ ID NO: 1228754 - RNA, 19 nt, Artificial Sequence
  Description of Artificial Sequence: Synthetic oligonucleotide
auuuugacugcuuccacgc

SEQ ID NO: 1228755 - RNA, 19 nt, Artificial Sequence
  Description of Artificial Sequence: Synthetic oligonucleotide
aucaaauucaccuggcauc

SEQ ID NO: 1228756 - RNA, 19 nt, Artificial Sequence
  Description of Artificial Sequence: Synthetic oligonucleotide
acuaaagucaggaacggcc

SEQ ID NO: 1228757 - RNA, 19 nt, Artificial Sequence
  Description of Artificial Sequence: Synthetic oligonucleotide
uguauaguugguuggauca

SEQ ID NO: 1228758 - RNA, 19 nt, Artificial Sequence
  Description of Artificial Sequence: Synthetic oligonucleotide
ugcaguguggaauaggcag

SEQ ID NO: 1228759 - RNA, 19 nt, Artificial Sequence
  Description of Artificial Sequence: Synthetic oligonucleotide
uguauuugcuccgaggagg

SEQ ID NO: 1228760 - RNA, 19 nt, Artificial Sequence
  Description of Artificial Sequence: Synthetic oligonucleotide
gaccaauuucgacacaucg

SEQ ID NO: 1228761 - RNA, 19 nt, Artificial Sequence
  Description of Artificial Sequence: Synthetic oligonucleotide
uuugauacgcugcaauuca

SEQ ID NO: 1228762 - RNA, 19 nt, Artificial Sequence
  Description of Artificial Sequence: Synthetic oligonucleotide
uucaccuggcaucacaucc

SEQ ID NO: 1228763 - RNA, 19 nt, Artificial Sequence
  Description of Artificial Sequence: Synthetic oligonucleotide
gauguauuugcuccgagga

SEQ ID NO: 1228764 - RNA, 19 nt, Artificial Sequence
  Description of Artificial Sequence: Synthetic oligonucleotide
aucgaugguggcuugguac

SEQ ID NO: 1228765 - RNA, 19 nt, Artificial Sequence
  Description of Artificial Sequence: Synthetic oligonucleotide
ucuaaguggucuuccaugc

SEQ ID NO: 1228766 - RNA, 19 nt, Artificial Sequence
  Description of Artificial Sequence: Synthetic oligonucleotide
uacugaggcacucaauugc

SEQ ID NO: 1228767 - RNA, 19 nt, Artificial Sequence
  Description of Artificial Sequence: Synthetic oligonucleotide
gauagaaucucugcucugg

SEQ ID NO: 1228768 - RNA, 19 nt, Artificial Sequence
  Description of Artificial Sequence: Synthetic oligonucleotide
uguguggaacuaaagucag

SEQ ID NO: 1228769 - RNA, 19 nt, Artificial Sequence
  Description of Artificial Sequence: Synthetic oligonucleotide
ucacguucuguccagacgu

SEQ ID NO: 1228770 - RNA, 19 nt, Artificial Sequence
  Description of Artificial Sequence: Synthetic oligonucleotide
acucaauugcagcaggauc

SEQ ID NO: 1228771 - RNA, 19 nt, Artificial Sequence
  Description of Artificial Sequence: Synthetic oligonucleotide
uguggaauaggcaguggcc

SEQ ID NO: 1228772 - RNA, 19 nt, Artificial Sequence
  Description of Artificial Sequence: Synthetic oligonucleotide
gguauuguggcugaggagg

SEQ ID NO: 1228773 - RNA, 19 nt, Artificial Sequence
  Description of Artificial Sequence: Synthetic oligonucleotide
cuaaggagcaucacgcgcc

SEQ ID NO: 1228774 - RNA, 19 nt, Artificial Sequence
  Description of Artificial Sequence: Synthetic oligonucleotide
ucuuacuccaucgauggug

SEQ ID NO: 1228775 - RNA, 19 nt, Artificial Sequence
  Description of Artificial Sequence: Synthetic oligonucleotide
cacuccggaaagaugaacg

SEQ ID NO: 1228776 - RNA, 19 nt, Artificial Sequence
  Description of Artificial Sequence: Synthetic oligonucleotide
uagugugcccaccacacag

SEQ ID NO: 1228777 - RNA, 19 nt, Artificial Sequence
  Description of Artificial Sequence: Synthetic oligonucleotide
aaauucaccuggcaucaca

SEQ ID NO: 1228778 - RNA, 19 nt, Artificial Sequence
  Description of Artificial Sequence: Synthetic oligonucleotide
gaugauuuuggagccaaag

SEQ ID NO: 1228779 - RNA, 19 nt, Artificial Sequence
  Description of Artificial Sequence: Synthetic oligonucleotide
uacgcugcaauucaucuuc

SEQ ID NO: 1228780 - RNA, 19 nt, Artificial Sequence
  Description of Artificial Sequence: Synthetic oligonucleotide
aacuaaagucaggaacggc

SEQ ID NO: 1228781 - RNA, 19 nt, Artificial Sequence
  Description of Artificial Sequence: Synthetic oligonucleotide
uccucaaccugaaaccugc

SEQ ID NO: 1228782 - RNA, 19 nt, Artificial Sequence
  Description of Artificial Sequence: Synthetic oligonucleotide
ucaaccugaaaccugccau

SEQ ID NO: 1228783 - RNA, 19 nt, Artificial Sequence
  Description of Artificial Sequence: Synthetic oligonucleotide
gaacgggucgguuuuguag

SEQ ID NO: 1228784 - RNA, 19 nt, Artificial Sequence
  Description of Artificial Sequence: Synthetic oligonucleotide
aacgggucgguuuuguaga

SEQ ID NO: 1228785 - RNA, 19 nt, Artificial Sequence
  Description of Artificial Sequence: Synthetic oligonucleotide
uugaauagugugcccacca

SEQ ID NO: 1228786 - RNA, 19 nt, Artificial Sequence
  Description of Artificial Sequence: Synthetic oligonucleotide
guugauagaaucucugcuc

SEQ ID NO: 1228787 - RNA, 19 nt, Artificial Sequence
  Description of Artificial Sequence: Synthetic oligonucleotide
aaguggucuuccaugcugc

SEQ ID NO: 1228788 - RNA, 19 nt, Artificial Sequence
  Description of Artificial Sequence: Synthetic oligonucleotide
uggguauuguggcugagga

SEQ ID NO: 1228789 - RNA, 19 nt, Artificial Sequence
  Description of Artificial Sequence: Synthetic oligonucleotide
agccaaaucagcaaagcag

SEQ ID NO: 1228790 - RNA, 19 nt, Artificial Sequence
  Description of Artificial Sequence: Synthetic oligonucleotide
aaucuccgcgcgcccaucc

SEQ ID NO: 1228791 - RNA, 19 nt, Artificial Sequence
  Description of Artificial Sequence: Synthetic oligonucleotide
agggguaacacccuagggu

SEQ ID NO: 1228792 - RNA, 19 nt, Artificial Sequence
  Description of Artificial Sequence: Synthetic oligonucleotide
auagaaucucugcucuggg

SEQ ID NO: 1228793 - RNA, 19 nt, Artificial Sequence
  Description of Artificial Sequence: Synthetic oligonucleotide
gaucagguugugcuccucg

SEQ ID NO: 1228794 - RNA, 19 nt, Artificial Sequence
  Description of Artificial Sequence: Synthetic oligonucleotide
agucgaaaaggcugugagg

SEQ ID NO: 1228795 - RNA, 19 nt, Artificial Sequence
  Description of Artificial Sequence: Synthetic oligonucleotide
acuccggaaagaugaacgg

SEQ ID NO: 1228796 - RNA, 19 nt, Artificial Sequence
  Description of Artificial Sequence: Synthetic oligonucleotide
guugguauaaguugccaca

SEQ ID NO: 1228797 - RNA, 19 nt, Artificial Sequence
  Description of Artificial Sequence: Synthetic oligonucleotide
acuguguccaggcuaagga

SEQ ID NO: 1228798 - RNA, 19 nt, Artificial Sequence
  Description of Artificial Sequence: Synthetic oligonucleotide
ucaucauccggguggaugu

SEQ ID NO: 1228799 - RNA, 19 nt, Artificial Sequence
  Description of Artificial Sequence: Synthetic oligonucleotide
auaaguugccacagguacc

SEQ ID NO: 1228800 - RNA, 19 nt, Artificial Sequence
  Description of Artificial Sequence: Synthetic oligonucleotide
ugaggcacucaauugcagc

SEQ ID NO: 1228801 - RNA, 19 nt, Artificial Sequence
  Description of Artificial Sequence: Synthetic oligonucleotide
ugguauaaguugccacagg

SEQ ID NO: 1228802 - RNA, 19 nt, Artificial Sequence
  Description of Artificial Sequence: Synthetic oligonucleotide
caggcuaaggagcaucacg

SEQ ID NO: 1228803 - RNA, 19 nt, Artificial Sequence
  Description of Artificial Sequence: Synthetic oligonucleotide
cuugguacggguuggugac

SEQ ID NO: 1228804 - RNA, 19 nt, Artificial Sequence
  Description of Artificial Sequence: Synthetic oligonucleotide
aagaugaacgggucgguuu

SEQ ID NO: 1228805 - RNA, 19 nt, Artificial Sequence
  Description of Artificial Sequence: Synthetic oligonucleotide
ugccuuucaguuugauacg

SEQ ID NO: 1228806 - RNA, 19 nt, Artificial Sequence
  Description of Artificial Sequence: Synthetic oligonucleotide
uaaggagcaucacgcgccg

SEQ ID NO: 1228807 - RNA, 19 nt, Artificial Sequence
  Description of Artificial Sequence: Synthetic oligonucleotide
gucgaaaaggcugugagga

SEQ ID NO: 1228808 - RNA, 19 nt, Artificial Sequence
  Description of Artificial Sequence: Synthetic oligonucleotide
cucccagucgaaaaggcug

SEQ ID NO: 1228809 - RNA, 19 nt, Artificial Sequence
  Description of Artificial Sequence: Synthetic oligonucleotide
cuguguggaacuaaaguca

SEQ ID NO: 1228810 - RNA, 19 nt, Artificial Sequence
  Description of Artificial Sequence: Synthetic oligonucleotide
ggaguguauaguugguugg

SEQ ID NO: 1228811 - RNA, 19 nt, Artificial Sequence
  Description of Artificial Sequence: Synthetic oligonucleotide
auuuacaggggcucacaug

SEQ ID NO: 1228812 - RNA, 19 nt, Artificial Sequence
  Description of Artificial Sequence: Synthetic oligonucleotide
ccucggaugauuuuggagc

SEQ ID NO: 1228813 - RNA, 19 nt, Artificial Sequence
  Description of Artificial Sequence: Synthetic oligonucleotide
ggaaagaugaacgggucgg

SEQ ID NO: 1228814 - RNA, 19 nt, Artificial Sequence
  Description of Artificial Sequence: Synthetic oligonucleotide
auguauuugcuccgaggag

SEQ ID NO: 1228815 - RNA, 19 nt, Artificial Sequence
  Description of Artificial Sequence: Synthetic oligonucleotide
cagucgaaaaggcugugag

SEQ ID NO: 1228816 - RNA, 19 nt, Artificial Sequence
  Description of Artificial Sequence: Synthetic oligonucleotide
acacaacuucuucacuccg

SEQ ID NO: 1228817 - RNA, 19 nt, Artificial Sequence
  Description of Artificial Sequence: Synthetic oligonucleotide
uguccagacguccccagga

SEQ ID NO: 1228818 - RNA, 19 nt, Artificial Sequence
  Description of Artificial Sequence: Synthetic oligonucleotide
agccugaaaagcugauagg

SEQ ID NO: 1228819 - RNA, 19 nt, Artificial Sequence
  Description of Artificial Sequence: Synthetic oligonucleotide
uccggguggauguauuugc

SEQ ID NO: 1228820 - RNA, 19 nt, Artificial Sequence
  Description of Artificial Sequence: Synthetic oligonucleotide
caucccgccaaucuccgcg

SEQ ID NO: 1228821 - RNA, 19 nt, Artificial Sequence
  Description of Artificial Sequence: Synthetic oligonucleotide
cugugaccaauuucgacac

SEQ ID NO: 1228822 - RNA, 19 nt, Artificial Sequence
  Description of Artificial Sequence: Synthetic oligonucleotide
ucucucacggagccaaaca

SEQ ID NO: 1228823 - RNA, 19 nt, Artificial Sequence
  Description of Artificial Sequence: Synthetic oligonucleotide
aggagcaucacgcgccgcg

SEQ ID NO: 1228824 - RNA, 19 nt, Artificial Sequence
  Description of Artificial Sequence: Synthetic oligonucleotide
ugaggagguugccugcaag

SEQ ID NO: 1228825 - RNA, 19 nt, Artificial Sequence
  Description of Artificial Sequence: Synthetic oligonucleotide
ugaauggcccagcugccug

SEQ ID NO: 1228826 - RNA, 19 nt, Artificial Sequence
  Description of Artificial Sequence: Synthetic oligonucleotide
cugccaucgucucucacgg

SEQ ID NO: 1228827 - RNA, 19 nt, Artificial Sequence
  Description of Artificial Sequence: Synthetic oligonucleotide
guguggaauaggcaguggc

SEQ ID NO: 1228828 - RNA, 19 nt, Artificial Sequence
  Description of Artificial Sequence: Synthetic oligonucleotide
ugaauagugugcccaccac

SEQ ID NO: 1228829 - RNA, 19 nt, Artificial Sequence
  Description of Artificial Sequence: Synthetic oligonucleotide
cauggcaaaggugaauggc

SEQ ID NO: 1228830 - RNA, 19 nt, Artificial Sequence
  Description of Artificial Sequence: Synthetic oligonucleotide
uauuuacaggggcucacau

SEQ ID NO: 1228831 - RNA, 19 nt, Artificial Sequence
  Description of Artificial Sequence: Synthetic oligonucleotide
uacacuguucuccuucguc

SEQ ID NO: 1228832 - RNA, 19 nt, Artificial Sequence
  Description of Artificial Sequence: Synthetic oligonucleotide
aaccugucugugucaagug

SEQ ID NO: 1228833 - RNA, 19 nt, Artificial Sequence
  Description of Artificial Sequence: Synthetic oligonucleotide
uggaauaggcaguggccag

SEQ ID NO: 1228834 - RNA, 19 nt, Artificial Sequence
  Description of Artificial Sequence: Synthetic oligonucleotide
ugucugcuaaagcugcgcu

SEQ ID NO: 1228835 - RNA, 19 nt, Artificial Sequence
  Description of Artificial Sequence: Synthetic oligonucleotide
ugauacgcugcaauucauc

SEQ ID NO: 1228836 - RNA, 19 nt, Artificial Sequence
  Description of Artificial Sequence: Synthetic oligonucleotide
gauacgcugcaauucaucu

SEQ ID NO: 1228837 - RNA, 19 nt, Artificial Sequence
  Description of Artificial Sequence: Synthetic oligonucleotide
gaggcacucaauugcagca

SEQ ID NO: 1228838 - RNA, 19 nt, Artificial Sequence
  Description of Artificial Sequence: Synthetic oligonucleotide
gagguugccugcaaggaug

SEQ ID NO: 1228839 - RNA, 19 nt, Artificial Sequence
  Description of Artificial Sequence: Synthetic oligonucleotide
ucgauggugccuuucaguu

SEQ ID NO: 1228840 - RNA, 19 nt, Artificial Sequence
  Description of Artificial Sequence: Synthetic oligonucleotide
cucaauugcagcaggaucu

SEQ ID NO: 1228841 - RNA, 19 nt, Artificial Sequence
  Description of Artificial Sequence: Synthetic oligonucleotide
gggucgguuuuguagaagg

SEQ ID NO: 1228842 - RNA, 19 nt, Artificial Sequence
  Description of Artificial Sequence: Synthetic oligonucleotide
cucacguucuguccagacg

SEQ ID NO: 1228843 - RNA, 19 nt, Artificial Sequence
  Description of Artificial Sequence: Synthetic oligonucleotide
aguuugauacgcugcaauu

SEQ ID NO: 1228844 - RNA, 19 nt, Artificial Sequence
  Description of Artificial Sequence: Synthetic oligonucleotide
guacugaggcacucaauug

SEQ ID NO: 1228845 - RNA, 19 nt, Artificial Sequence
  Description of Artificial Sequence: Synthetic oligonucleotide
gggguaacacccuagggug

SEQ ID NO: 1228846 - RNA, 19 nt, Artificial Sequence
  Description of Artificial Sequence: Synthetic oligonucleotide
uggauguauuugcuccgag

SEQ ID NO: 1228847 - RNA, 19 nt, Artificial Sequence
  Description of Artificial Sequence: Synthetic oligonucleotide
uguaccggaagaugucacu

SEQ ID NO: 1228848 - RNA, 19 nt, Artificial Sequence
  Description of Artificial Sequence: Synthetic oligonucleotide
ucgaaaaggcugugaggag

SEQ ID NO: 1228849 - RNA, 19 nt, Artificial Sequence
  Description of Artificial Sequence: Synthetic oligonucleotide
guuugauacgcugcaauuc

SEQ ID NO: 1228850 - RNA, 19 nt, Artificial Sequence
  Description of Artificial Sequence: Synthetic oligonucleotide
uacggguuggugaccagcu

SEQ ID NO: 1228851 - RNA, 19 nt, Artificial Sequence
  Description of Artificial Sequence: Synthetic oligonucleotide
gggaguguauaguugguug

SEQ ID NO: 1228852 - RNA, 19 nt, Artificial Sequence
  Description of Artificial Sequence: Synthetic oligonucleotide
uccaggcuaaggagcauca

SEQ ID NO: 1228853 - RNA, 19 nt, Artificial Sequence
  Description of Artificial Sequence: Synthetic oligonucleotide
aauucaccuggcaucacau

SEQ ID NO: 1228854 - RNA, 19 nt, Artificial Sequence
  Description of Artificial Sequence: Synthetic oligonucleotide
aggcggguggcauaaauau

SEQ ID NO: 1228855 - RNA, 19 nt, Artificial Sequence
  Description of Artificial Sequence: Synthetic oligonucleotide
auuugcuccgaggaggcug

SEQ ID NO: 1228856 - RNA, 19 nt, Artificial Sequence
  Description of Artificial Sequence: Synthetic oligonucleotide
gaucaaauucaccuggcau

SEQ ID NO: 1228857 - RNA, 19 nt, Artificial Sequence
  Description of Artificial Sequence: Synthetic oligonucleotide
augugacggacccgcaggg

SEQ ID NO: 1228858 - RNA, 19 nt, Artificial Sequence
  Description of Artificial Sequence: Synthetic oligonucleotide
cuguguccaggcuaaggag

SEQ ID NO: 1228859 - RNA, 19 nt, Artificial Sequence
  Description of Artificial Sequence: Synthetic oligonucleotide
aggaaucuuacuccaucga

SEQ ID NO: 1228860 - RNA, 19 nt, Artificial Sequence
  Description of Artificial Sequence: Synthetic oligonucleotide
acaucgauggugccuuuca

SEQ ID NO: 1228861 - RNA, 19 nt, Artificial Sequence
  Description of Artificial Sequence: Synthetic oligonucleotide
cuuguucuguccacgccac

SEQ ID NO: 1228862 - RNA, 19 nt, Artificial Sequence
  Description of Artificial Sequence: Synthetic oligonucleotide
uaugagcauacugucugcu

SEQ ID NO: 1228863 - RNA, 19 nt, Artificial Sequence
  Description of Artificial Sequence: Synthetic oligonucleotide
ugacggacccgcagggucc

SEQ ID NO: 1228864 - RNA, 19 nt, Artificial Sequence
  Description of Artificial Sequence: Synthetic oligonucleotide
uccugugaccaauuucgac

SEQ ID NO: 1228865 - RNA, 19 nt, Artificial Sequence
  Description of Artificial Sequence: Synthetic oligonucleotide
ucccagucgaaaaggcugu

SEQ ID NO: 1228866 - RNA, 19 nt, Artificial Sequence
  Description of Artificial Sequence: Synthetic oligonucleotide
caucgucucucacggagcc

SEQ ID NO: 1228867 - RNA, 19 nt, Artificial Sequence
  Description of Artificial Sequence: Synthetic oligonucleotide
auuucgacacaucgauggu

SEQ ID NO: 1228868 - RNA, 19 nt, Artificial Sequence
  Description of Artificial Sequence: Synthetic oligonucleotide
gacaugggcagcacuacac

SEQ ID NO: 1228869 - RNA, 19 nt, Artificial Sequence
  Description of Artificial Sequence: Synthetic oligonucleotide
guguauaguugguuggauc

SEQ ID NO: 1228870 - RNA, 19 nt, Artificial Sequence
  Description of Artificial Sequence: Synthetic oligonucleotide
ucuccgcgcgcccaucccg

SEQ ID NO: 1228871 - RNA, 19 nt, Artificial Sequence
  Description of Artificial Sequence: Synthetic oligonucleotide
acguucuguccagacgucc

SEQ ID NO: 1228872 - RNA, 19 nt, Artificial Sequence
  Description of Artificial Sequence: Synthetic oligonucleotide
aggaccucggaugauuuug

SEQ ID NO: 1228873 - RNA, 19 nt, Artificial Sequence
  Description of Artificial Sequence: Synthetic oligonucleotide
ucacucacguucuguccag

SEQ ID NO: 1228874 - RNA, 19 nt, Artificial Sequence
  Description of Artificial Sequence: Synthetic oligonucleotide
uaccggaagaugucacuca

SEQ ID NO: 1228875 - RNA, 19 nt, Artificial Sequence
  Description of Artificial Sequence: Synthetic oligonucleotide
acugccaagacgguuccug

SEQ ID NO: 1228876 - RNA, 19 nt, Artificial Sequence
  Description of Artificial Sequence: Synthetic oligonucleotide
agcguuccuggcuuguucu

SEQ ID NO: 1228877 - RNA, 19 nt, Artificial Sequence
  Description of Artificial Sequence: Synthetic oligonucleotide
agaugaacgggucgguuuu

SEQ ID NO: 1228878 - RNA, 19 nt, Artificial Sequence
  Description of Artificial Sequence: Synthetic oligonucleotide
cuccggaaagaugaacggg

SEQ ID NO: 1228879 - RNA, 19 nt, Artificial Sequence
  Description of Artificial Sequence: Synthetic oligonucleotide
gguacccgggcaaaggugg

SEQ ID NO: 1228880 - RNA, 19 nt, Artificial Sequence
  Description of Artificial Sequence: Synthetic oligonucleotide
caaccugaaaccugccauc

SEQ ID NO: 1228881 - RNA, 19 nt, Artificial Sequence
  Description of Artificial Sequence: Synthetic oligonucleotide
ugaaaccugccaucgucuc

SEQ ID NO: 1228882 - RNA, 19 nt, Artificial Sequence
  Description of Artificial Sequence: Synthetic oligonucleotide
cacgccacuguguccaggc

SEQ ID NO: 1228883 - RNA, 19 nt, Artificial Sequence
  Description of Artificial Sequence: Synthetic oligonucleotide
gcuaaggagcaucacgcgc

SEQ ID NO: 1228884 - RNA, 19 nt, Artificial Sequence
  Description of Artificial Sequence: Synthetic oligonucleotide
aggucgucauguucugcuc

SEQ ID NO: 1228885 - RNA, 19 nt, Artificial Sequence
  Description of Artificial Sequence: Synthetic oligonucleotide
uuccugugaccaauuucga

SEQ ID NO: 1228886 - RNA, 19 nt, Artificial Sequence
  Description of Artificial Sequence: Synthetic oligonucleotide
cucaucauccggguggaug

SEQ ID NO: 1228887 - RNA, 19 nt, Artificial Sequence
  Description of Artificial Sequence: Synthetic oligonucleotide
aagcugcgcucucccaguc

SEQ ID NO: 1228888 - RNA, 19 nt, Artificial Sequence
  Description of Artificial Sequence: Synthetic oligonucleotide
ggcauaaauaugagcauac

SEQ ID NO: 1228889 - RNA, 19 nt, Artificial Sequence
  Description of Artificial Sequence: Synthetic oligonucleotide
uugauacgcugcaauucau

SEQ ID NO: 1228890 - RNA, 19 nt, Artificial Sequence
  Description of Artificial Sequence: Synthetic oligonucleotide
ugaccaauuucgacacauc

SEQ ID NO: 1228891 - RNA, 19 nt, Artificial Sequence
  Description of Artificial Sequence: Synthetic oligonucleotide
aggaugacucgagagacau

SEQ ID NO: 1228892 - RNA, 19 nt, Artificial Sequence
  Description of Artificial Sequence: Synthetic oligonucleotide
ugcuguaccggaagauguc

SEQ ID NO: 1228893 - RNA, 19 nt, Artificial Sequence
  Description of Artificial Sequence: Synthetic oligonucleotide
gcucacauggcaaagguga

SEQ ID NO: 1228894 - RNA, 19 nt, Artificial Sequence
  Description of Artificial Sequence: Synthetic oligonucleotide
uccacucuaggaucucuaa

SEQ ID NO: 1228895 - RNA, 19 nt, Artificial Sequence
  Description of Artificial Sequence: Synthetic oligonucleotide
ucgagagacaugggcagca

SEQ ID NO: 1228896 - RNA, 19 nt, Artificial Sequence
  Description of Artificial Sequence: Synthetic oligonucleotide
uaguugguuggaucaaauu

SEQ ID NO: 1228897 - RNA, 19 nt, Artificial Sequence
  Description of Artificial Sequence: Synthetic oligonucleotide
cacucuaggaucucuaagu

SEQ ID NO: 1228898 - RNA, 19 nt, Artificial Sequence
  Description of Artificial Sequence: Synthetic oligonucleotide
aaagaugaacgggucgguu

SEQ ID NO: 1228899 - RNA, 19 nt, Artificial Sequence
  Description of Artificial Sequence: Synthetic oligonucleotide
ugccaagacgguuccugug

SEQ ID NO: 1228900 - RNA, 19 nt, Artificial Sequence
  Description of Artificial Sequence: Synthetic oligonucleotide
ccugugaccaauuucgaca

SEQ ID NO: 1228901 - RNA, 19 nt, Artificial Sequence
  Description of Artificial Sequence: Synthetic oligonucleotide
uuacaggggcucacauggc

SEQ ID NO: 1228902 - RNA, 19 nt, Artificial Sequence
  Description of Artificial Sequence: Synthetic oligonucleotide
uagaagggguaacacccua

SEQ ID NO: 1228903 - RNA, 19 nt, Artificial Sequence
  Description of Artificial Sequence: Synthetic oligonucleotide
gccaucgucucucacggag

SEQ ID NO: 1228904 - RNA, 19 nt, Artificial Sequence
  Description of Artificial Sequence: Synthetic oligonucleotide
ggcacucaauugcagcagg

SEQ ID NO: 1228905 - RNA, 19 nt, Artificial Sequence
  Description of Artificial Sequence: Synthetic oligonucleotide
caagacgguuccugugacc

SEQ ID NO: 1228906 - RNA, 19 nt, Artificial Sequence
  Description of Artificial Sequence: Synthetic oligonucleotide
aaaagcugauaggcuggca

SEQ ID NO: 1228907 - RNA, 19 nt, Artificial Sequence
  Description of Artificial Sequence: Synthetic oligonucleotide
agacaugggcagcacuaca

SEQ ID NO: 1228908 - RNA, 19 nt, Artificial Sequence
  Description of Artificial Sequence: Synthetic oligonucleotide
aggaacggccaccaacagu

SEQ ID NO: 1228909 - RNA, 19 nt, Artificial Sequence
  Description of Artificial Sequence: Synthetic oligonucleotide
aaaaggcugugaggaguug

SEQ ID NO: 1228910 - RNA, 19 nt, Artificial Sequence
  Description of Artificial Sequence: Synthetic oligonucleotide
aucuccgcgcgcccauccc

SEQ ID NO: 1228911 - RNA, 19 nt, Artificial Sequence
  Description of Artificial Sequence: Synthetic oligonucleotide
cuguaccggaagaugucac

SEQ ID NO: 1228912 - RNA, 19 nt, Artificial Sequence
  Description of Artificial Sequence: Synthetic oligonucleotide
caucgauggugccuuucag

SEQ ID NO: 1228913 - RNA, 19 nt, Artificial Sequence
  Description of Artificial Sequence: Synthetic oligonucleotide
ugugaccaauuucgacaca

SEQ ID NO: 1228914 - RNA, 19 nt, Artificial Sequence
  Description of Artificial Sequence: Synthetic oligonucleotide
gaguguauaguugguugga

SEQ ID NO: 1228915 - RNA, 19 nt, Artificial Sequence
  Description of Artificial Sequence: Synthetic oligonucleotide
ggugucuggagccgugggg

SEQ ID NO: 1228916 - RNA, 19 nt, Artificial Sequence
  Description of Artificial Sequence: Synthetic oligonucleotide
gcugaugugacggacccgc

SEQ ID NO: 1228917 - RNA, 19 nt, Artificial Sequence
  Description of Artificial Sequence: Synthetic oligonucleotide
gguggcuugguacggguug

SEQ ID NO: 1228918 - RNA, 19 nt, Artificial Sequence
  Description of Artificial Sequence: Synthetic oligonucleotide
uccaucgaugguggcuugg

SEQ ID NO: 1228919 - RNA, 19 nt, Artificial Sequence
  Description of Artificial Sequence: Synthetic oligonucleotide
ggcuaaggagcaucacgcg

SEQ ID NO: 1228920 - RNA, 19 nt, Artificial Sequence
  Description of Artificial Sequence: Synthetic oligonucleotide
gcuaaagcugcgcucuccc

SEQ ID NO: 1228921 - RNA, 19 nt, Artificial Sequence
  Description of Artificial Sequence: Synthetic oligonucleotide
aguguggaauaggcagugg

SEQ ID NO: 1228922 - RNA, 19 nt, Artificial Sequence
  Description of Artificial Sequence: Synthetic oligonucleotide
aaggagcaucacgcgccgc

SEQ ID NO: 1228923 - RNA, 19 nt, Artificial Sequence
  Description of Artificial Sequence: Synthetic oligonucleotide
ggaacggccaccaacagua

SEQ ID NO: 1228924 - RNA, 19 nt, Artificial Sequence
  Description of Artificial Sequence: Synthetic oligonucleotide
uccucgcugaucucccgca

SEQ ID NO: 1228925 - RNA, 19 nt, Artificial Sequence
  Description of Artificial Sequence: Synthetic oligonucleotide
cacuguguccaggcuaagg

SEQ ID NO: 1228926 - RNA, 19 nt, Artificial Sequence
  Description of Artificial Sequence: Synthetic oligonucleotide
uccagacguccccaggaau

SEQ ID NO: 1228927 - RNA, 19 nt, Artificial Sequence
  Description of Artificial Sequence: Synthetic oligonucleotide
cuaggaucucuaagugguc

SEQ ID NO: 1228928 - RNA, 19 nt, Artificial Sequence
  Description of Artificial Sequence: Synthetic oligonucleotide
aaggaugacucgagagaca

SEQ ID NO: 1228929 - RNA, 19 nt, Artificial Sequence
  Description of Artificial Sequence: Synthetic oligonucleotide
cugucugcuaaagcugcgc

SEQ ID NO: 1228930 - RNA, 19 nt, Artificial Sequence
  Description of Artificial Sequence: Synthetic oligonucleotide
ugugggcccucugugcugc

SEQ ID NO: 1228931 - RNA, 19 nt, Artificial Sequence
  Description of Artificial Sequence: Synthetic oligonucleotide
cacuccgacuccacugccc

SEQ ID NO: 1228932 - RNA, 19 nt, Artificial Sequence
  Description of Artificial Sequence: Synthetic oligonucleotide
auacgcugcaauucaucuu

SEQ ID NO: 1228933 - RNA, 19 nt, Artificial Sequence
  Description of Artificial Sequence: Synthetic oligonucleotide
aguguauaguugguuggau

SEQ ID NO: 1228934 - RNA, 19 nt, Artificial Sequence
  Description of Artificial Sequence: Synthetic oligonucleotide
guaccggaagaugucacuc

SEQ ID NO: 1228935 - RNA, 19 nt, Artificial Sequence
  Description of Artificial Sequence: Synthetic oligonucleotide
gcuuguucuguccacgcca

SEQ ID NO: 1228936 - RNA, 19 nt, Artificial Sequence
  Description of Artificial Sequence: Synthetic oligonucleotide
ucgacacaucgauggugcc

SEQ ID NO: 1228937 - RNA, 19 nt, Artificial Sequence
  Description of Artificial Sequence: Synthetic oligonucleotide
gagacaugggcagcacuac

SEQ ID NO: 1228938 - RNA, 19 nt, Artificial Sequence
  Description of Artificial Sequence: Synthetic oligonucleotide
ggguggcauaaauaugagc

SEQ ID NO: 1228939 - RNA, 19 nt, Artificial Sequence
  Description of Artificial Sequence: Synthetic oligonucleotide
ggagccaaaucagcaaagc

SEQ ID NO: 1228940 - RNA, 19 nt, Artificial Sequence
  Description of Artificial Sequence: Synthetic oligonucleotide
gugacggacccgcaggguc

SEQ ID NO: 1228941 - RNA, 19 nt, Artificial Sequence
  Description of Artificial Sequence: Synthetic oligonucleotide
aaguugccacagguacccg

SEQ ID NO: 1228942 - RNA, 19 nt, Artificial Sequence
  Description of Artificial Sequence: Synthetic oligonucleotide
aggcacucaauugcagcag

SEQ ID NO: 1228943 - RNA, 19 nt, Artificial Sequence
  Description of Artificial Sequence: Synthetic oligonucleotide
ggagccaaacacugccaag

SEQ ID NO: 1228944 - RNA, 19 nt, Artificial Sequence
  Description of Artificial Sequence: Synthetic oligonucleotide
caguguggaauaggcagug

SEQ ID NO: 1228945 - RNA, 19 nt, Artificial Sequence
  Description of Artificial Sequence: Synthetic oligonucleotide
uaacacccuagggugucug

SEQ ID NO: 1228946 - RNA, 19 nt, Artificial Sequence
  Description of Artificial Sequence: Synthetic oligonucleotide
uggaguggcauggcuuuga

SEQ ID NO: 1228947 - RNA, 19 nt, Artificial Sequence
  Description of Artificial Sequence: Synthetic oligonucleotide
cucaaccugaaaccugcca

SEQ ID NO: 1228948 - RNA, 19 nt, Artificial Sequence
  Description of Artificial Sequence: Synthetic oligonucleotide
gcuugguacggguugguga

SEQ ID NO: 1228949 - RNA, 19 nt, Artificial Sequence
  Description of Artificial Sequence: Synthetic oligonucleotide
uuacuccaucgaugguggc

SEQ ID NO: 1228950 - RNA, 19 nt, Artificial Sequence
  Description of Artificial Sequence: Synthetic oligonucleotide
auccggguggauguauuug

SEQ ID NO: 1228951 - RNA, 19 nt, Artificial Sequence
  Description of Artificial Sequence: Synthetic oligonucleotide
gguacugaggcacucaauu

SEQ ID NO: 1228952 - RNA, 19 nt, Artificial Sequence
  Description of Artificial Sequence: Synthetic oligonucleotide
gaugaacgggucgguuuug

SEQ ID NO: 1228953 - RNA, 19 nt, Artificial Sequence
  Description of Artificial Sequence: Synthetic oligonucleotide
guauaaguugccacaggua

SEQ ID NO: 1228954 - RNA, 19 nt, Artificial Sequence
  Description of Artificial Sequence: Synthetic oligonucleotide
guacggguuggugaccagc

SEQ ID NO: 1228955 - RNA, 19 nt, Artificial Sequence
  Description of Artificial Sequence: Synthetic oligonucleotide
cuccucgcugaucucccgc

SEQ ID NO: 1228956 - RNA, 19 nt, Artificial Sequence
  Description of Artificial Sequence: Synthetic oligonucleotide
gagcaucacgcgccgcgcc

SEQ ID NO: 1228957 - RNA, 19 nt, Artificial Sequence
  Description of Artificial Sequence: Synthetic oligonucleotide
guggaacuaaagucaggaa

SEQ ID NO: 1228958 - RNA, 19 nt, Artificial Sequence
  Description of Artificial Sequence: Synthetic oligonucleotide
gcaaaggugaauggcccag

SEQ ID NO: 1228959 - RNA, 19 nt, Artificial Sequence
  Description of Artificial Sequence: Synthetic oligonucleotide
guaccaccugguccucagg

SEQ ID NO: 1228960 - RNA, 19 nt, Artificial Sequence
  Description of Artificial Sequence: Synthetic oligonucleotide
ugaacgggucgguuuugua

SEQ ID NO: 1228961 - RNA, 19 nt, Artificial Sequence
  Description of Artificial Sequence: Synthetic oligonucleotide
ucuggguauuguggcugag

SEQ ID NO: 1228962 - RNA, 19 nt, Artificial Sequence
  Description of Artificial Sequence: Synthetic oligonucleotide
ggaccucggaugauuuugg

SEQ ID NO: 1228963 - RNA, 19 nt, Artificial Sequence
  Description of Artificial Sequence: Synthetic oligonucleotide
gaaaccugccaucgucucu

SEQ ID NO: 1228964 - RNA, 19 nt, Artificial Sequence
  Description of Artificial Sequence: Synthetic oligonucleotide
gcucucccagucgaaaagg

SEQ ID NO: 1228965 - RNA, 19 nt, Artificial Sequence
  Description of Artificial Sequence: Synthetic oligonucleotide
gaccucggaugauuuugga

SEQ ID NO: 1228966 - RNA, 19 nt, Artificial Sequence
  Description of Artificial Sequence: Synthetic oligonucleotide
gggguguugccacagaagu

SEQ ID NO: 1228967 - RNA, 19 nt, Artificial Sequence
  Description of Artificial Sequence: Synthetic oligonucleotide
acguccccaggaaucuuac

SEQ ID NO: 1228968 - RNA, 19 nt, Artificial Sequence
  Description of Artificial Sequence: Synthetic oligonucleotide
agccguggggcugauguga

SEQ ID NO: 1228969 - RNA, 19 nt, Artificial Sequence
  Description of Artificial Sequence: Synthetic oligonucleotide
ccagacguccccaggaauc

SEQ ID NO: 1228970 - RNA, 19 nt, Artificial Sequence
  Description of Artificial Sequence: Synthetic oligonucleotide
cuaaagcugcgcucuccca

SEQ ID NO: 1228971 - RNA, 19 nt, Artificial Sequence
  Description of Artificial Sequence: Synthetic oligonucleotide
cucccaggucgucauguuc

SEQ ID NO: 1228972 - RNA, 19 nt, Artificial Sequence
  Description of Artificial Sequence: Synthetic oligonucleotide
agggugucuggagccgugg

SEQ ID NO: 1228973 - RNA, 19 nt, Artificial Sequence
  Description of Artificial Sequence: Synthetic oligonucleotide
cugcuguaccggaagaugu

SEQ ID NO: 1228974 - RNA, 19 nt, Artificial Sequence
  Description of Artificial Sequence: Synthetic oligonucleotide
caggaacggccaccaacag

SEQ ID NO: 1228975 - RNA, 19 nt, Artificial Sequence
  Description of Artificial Sequence: Synthetic oligonucleotide
ggggaucagguugugcucc

SEQ ID NO: 1228976 - RNA, 19 nt, Artificial Sequence
  Description of Artificial Sequence: Synthetic oligonucleotide
ccacucuaggaucucuaag

SEQ ID NO: 1228977 - RNA, 19 nt, Artificial Sequence
  Description of Artificial Sequence: Synthetic oligonucleotide
cagcccggauaccagcaac

SEQ ID NO: 1228978 - RNA, 19 nt, Artificial Sequence
  Description of Artificial Sequence: Synthetic oligonucleotide
ggaaucuuacuccaucgau

SEQ ID NO: 1228979 - RNA, 19 nt, Artificial Sequence
  Description of Artificial Sequence: Synthetic oligonucleotide
acacccuagggugucugga

SEQ ID NO: 1228980 - RNA, 19 nt, Artificial Sequence
  Description of Artificial Sequence: Synthetic oligonucleotide
guauaguugguuggaucaa

SEQ ID NO: 1228981 - RNA, 19 nt, Artificial Sequence
  Description of Artificial Sequence: Synthetic oligonucleotide
augaacgggucgguuuugu

SEQ ID NO: 1228982 - RNA, 19 nt, Artificial Sequence
  Description of Artificial Sequence: Synthetic oligonucleotide
agguacccgggcaaaggug

SEQ ID NO: 1228983 - RNA, 19 nt, Artificial Sequence
  Description of Artificial Sequence: Synthetic oligonucleotide
uauuugcuccgaggaggcu

SEQ ID NO: 1228984 - RNA, 19 nt, Artificial Sequence
  Description of Artificial Sequence: Synthetic oligonucleotide
ugugacggacccgcagggu

SEQ ID NO: 1228985 - RNA, 19 nt, Artificial Sequence
  Description of Artificial Sequence: Synthetic oligonucleotide
cagcguuccuggcuuguuc

SEQ ID NO: 1228986 - RNA, 19 nt, Artificial Sequence
  Description of Artificial Sequence: Synthetic oligonucleotide
gccuuguugauagaaucuc

SEQ ID NO: 1228987 - RNA, 19 nt, Artificial Sequence
  Description of Artificial Sequence: Synthetic oligonucleotide
caucccgcccaucaccgca

SEQ ID NO: 1228988 - RNA, 19 nt, Artificial Sequence
  Description of Artificial Sequence: Synthetic oligonucleotide
gaacaugcaggggugcagu

SEQ ID NO: 1228989 - RNA, 19 nt, Artificial Sequence
  Description of Artificial Sequence: Synthetic oligonucleotide
ggcucucaccgccaccucc

SEQ ID NO: 1228990 - RNA, 19 nt, Artificial Sequence
  Description of Artificial Sequence: Synthetic oligonucleotide
ccggaagaugucacucacg

SEQ ID NO: 1228991 - RNA, 19 nt, Artificial Sequence
  Description of Artificial Sequence: Synthetic oligonucleotide
ccaucgucucucacggagc

SEQ ID NO: 1228992 - RNA, 19 nt, Artificial Sequence
  Description of Artificial Sequence: Synthetic oligonucleotide
cacguucuguccagacguc

SEQ ID NO: 1228993 - RNA, 19 nt, Artificial Sequence
  Description of Artificial Sequence: Synthetic oligonucleotide
gcucucaccgccaccuccg

SEQ ID NO: 1228994 - RNA, 19 nt, Artificial Sequence
  Description of Artificial Sequence: Synthetic oligonucleotide
ccgcaucccgccaaucucc

SEQ ID NO: 1228995 - RNA, 19 nt, Artificial Sequence
  Description of Artificial Sequence: Synthetic oligonucleotide
agggucucaucuggaugag

SEQ ID NO: 1228996 - RNA, 19 nt, Artificial Sequence
  Description of Artificial Sequence: Synthetic oligonucleotide
cguucuguccagacguccc

SEQ ID NO: 1228997 - RNA, 19 nt, Artificial Sequence
  Description of Artificial Sequence: Synthetic oligonucleotide
ugguggcuugguacggguu

SEQ ID NO: 1228998 - RNA, 19 nt, Artificial Sequence
  Description of Artificial Sequence: Synthetic oligonucleotide
cguggggcugaugugacgg

SEQ ID NO: 1228999 - RNA, 19 nt, Artificial Sequence
  Description of Artificial Sequence: Synthetic oligonucleotide
caguuugauacgcugcaau

SEQ ID NO: 1229000 - RNA, 19 nt, Artificial Sequence
  Description of Artificial Sequence: Synthetic oligonucleotide
gguaacacccuaggguguc

SEQ ID NO: 1229001 - RNA, 19 nt, Artificial Sequence
  Description of Artificial Sequence: Synthetic oligonucleotide
cuuccacgcuggcugccug

SEQ ID NO: 1229002 - RNA, 19 nt, Artificial Sequence
  Description of Artificial Sequence: Synthetic oligonucleotide
gaggcggguggcauaaaua

SEQ ID NO: 1229003 - RNA, 19 nt, Artificial Sequence
  Description of Artificial Sequence: Synthetic oligonucleotide
agguugccugcaaggauga

SEQ ID NO: 1229004 - RNA, 19 nt, Artificial Sequence
  Description of Artificial Sequence: Synthetic oligonucleotide
acgggucgguuuuguagaa

SEQ ID NO: 1229005 - RNA, 19 nt, Artificial Sequence
  Description of Artificial Sequence: Synthetic oligonucleotide
cagcaaagcagugguccuc

SEQ ID NO: 1229006 - RNA, 19 nt, Artificial Sequence
  Description of Artificial Sequence: Synthetic oligonucleotide
aucauccggguggauguau

SEQ ID NO: 1229007 - RNA, 19 nt, Artificial Sequence
  Description of Artificial Sequence: Synthetic oligonucleotide
ccggaaagaugaacggguc

SEQ ID NO: 1229008 - RNA, 19 nt, Artificial Sequence
  Description of Artificial Sequence: Synthetic oligonucleotide
cucucaccgccaccuccgc

SEQ ID NO: 1229009 - RNA, 19 nt, Artificial Sequence
  Description of Artificial Sequence: Synthetic oligonucleotide
gcuguaccggaagauguca

SEQ ID NO: 1229010 - RNA, 19 nt, Artificial Sequence
  Description of Artificial Sequence: Synthetic oligonucleotide
cuccaucgaugguggcuug

SEQ ID NO: 1229011 - RNA, 19 nt, Artificial Sequence
  Description of Artificial Sequence: Synthetic oligonucleotide
ccaagacgguuccugugac

SEQ ID NO: 1229012 - RNA, 19 nt, Artificial Sequence
  Description of Artificial Sequence: Synthetic oligonucleotide
ugccaucgucucucacgga

SEQ ID NO: 1229013 - RNA, 19 nt, Artificial Sequence
  Description of Artificial Sequence: Synthetic oligonucleotide
gcaacacaaaccugucugu

SEQ ID NO: 1229014 - RNA, 19 nt, Artificial Sequence
  Description of Artificial Sequence: Synthetic oligonucleotide
gaacggccaccaacaguac

SEQ ID NO: 1229015 - RNA, 19 nt, Artificial Sequence
  Description of Artificial Sequence: Synthetic oligonucleotide
guccagacguccccaggaa

SEQ ID NO: 1229016 - RNA, 19 nt, Artificial Sequence
  Description of Artificial Sequence: Synthetic oligonucleotide
auccagcauuuugacugcu

SEQ ID NO: 1229017 - RNA, 19 nt, Artificial Sequence
  Description of Artificial Sequence: Synthetic oligonucleotide
ccuagggugucuggagccg

SEQ ID NO: 1229018 - RNA, 19 nt, Artificial Sequence
  Description of Artificial Sequence: Synthetic oligonucleotide
cacgcgccgcgccgcaucc

SEQ ID NO: 1229019 - RNA, 19 nt, Artificial Sequence
  Description of Artificial Sequence: Synthetic oligonucleotide
cugugaggaguugguauaa

SEQ ID NO: 1229020 - RNA, 19 nt, Artificial Sequence
  Description of Artificial Sequence: Synthetic oligonucleotide
ggcggguggcauaaauaug

SEQ ID NO: 1229021 - RNA, 19 nt, Artificial Sequence
  Description of Artificial Sequence: Synthetic oligonucleotide
gacgguuccugugaccaau

SEQ ID NO: 1229022 - RNA, 19 nt, Artificial Sequence
  Description of Artificial Sequence: Synthetic oligonucleotide
caaacacugccaagacggu

SEQ ID NO: 1229023 - RNA, 19 nt, Artificial Sequence
  Description of Artificial Sequence: Synthetic oligonucleotide
cugaugugacggacccgca

SEQ ID NO: 1229024 - RNA, 19 nt, Artificial Sequence
  Description of Artificial Sequence: Synthetic oligonucleotide
ccucaaccugaaaccugcc

SEQ ID NO: 1229025 - RNA, 19 nt, Artificial Sequence
  Description of Artificial Sequence: Synthetic oligonucleotide
gccgcaucccgccaaucuc

SEQ ID NO: 1229026 - RNA, 19 nt, Artificial Sequence
  Description of Artificial Sequence: Synthetic oligonucleotide
uccgcgcgcccaucccgcc

SEQ ID NO: 1229027 - RNA, 19 nt, Artificial Sequence
  Description of Artificial Sequence: Synthetic oligonucleotide
cagguacccgggcaaaggu

SEQ ID NO: 1229028 - RNA, 19 nt, Artificial Sequence
  Description of Artificial Sequence: Synthetic oligonucleotide
caucagggacccagcccca

SEQ ID NO: 1229029 - RNA, 19 nt, Artificial Sequence
  Description of Artificial Sequence: Synthetic oligonucleotide
ccuuguugauagaaucucu

SEQ ID NO: 1229030 - RNA, 19 nt, Artificial Sequence
  Description of Artificial Sequence: Synthetic oligonucleotide
ggacccgcaggguccacuc

SEQ ID NO: 1229031 - RNA, 19 nt, Artificial Sequence
  Description of Artificial Sequence: Synthetic oligonucleotide
caucgaugguggcuuggua

SEQ ID NO: 1229032 - RNA, 19 nt, Artificial Sequence
  Description of Artificial Sequence: Synthetic oligonucleotide
cagcaacacaaaccugucu

SEQ ID NO: 1229033 - RNA, 19 nt, Artificial Sequence
  Description of Artificial Sequence: Synthetic oligonucleotide
ggaugacucgagagacaug

SEQ ID NO: 1229034 - RNA, 19 nt, Artificial Sequence
  Description of Artificial Sequence: Synthetic oligonucleotide
ggggcacuccggaaagaug

SEQ ID NO: 1229035 - RNA, 19 nt, Artificial Sequence
  Description of Artificial Sequence: Synthetic oligonucleotide
ggcuugguacggguuggug

SEQ ID NO: 1229036 - RNA, 19 nt, Artificial Sequence
  Description of Artificial Sequence: Synthetic oligonucleotide
cugccaagacgguuccugu

SEQ ID NO: 1229037 - RNA, 19 nt, Artificial Sequence
  Description of Artificial Sequence: Synthetic oligonucleotide
gacggacccgcagggucca

SEQ ID NO: 1229038 - RNA, 19 nt, Artificial Sequence
  Description of Artificial Sequence: Synthetic oligonucleotide
guccacucuaggaucucua

SEQ ID NO: 1229039 - RNA, 19 nt, Artificial Sequence
  Description of Artificial Sequence: Synthetic oligonucleotide
gcagcacuacacuguucuc

SEQ ID NO: 1229040 - RNA, 19 nt, Artificial Sequence
  Description of Artificial Sequence: Synthetic oligonucleotide
ggagguugccugcaaggau

SEQ ID NO: 1229041 - RNA, 19 nt, Artificial Sequence
  Description of Artificial Sequence: Synthetic oligonucleotide
cuccgcccaggcccagccc

SEQ ID NO: 1229042 - RNA, 19 nt, Artificial Sequence
  Description of Artificial Sequence: Synthetic oligonucleotide
ucccgcccaucaccgcauc

SEQ ID NO: 1229043 - RNA, 19 nt, Artificial Sequence
  Description of Artificial Sequence: Synthetic oligonucleotide
cugaggagguugccugcaa

SEQ ID NO: 1229044 - RNA, 19 nt, Artificial Sequence
  Description of Artificial Sequence: Synthetic oligonucleotide
gcacucaauugcagcagga

SEQ ID NO: 1229045 - RNA, 19 nt, Artificial Sequence
  Description of Artificial Sequence: Synthetic oligonucleotide
ccaagcuguccugucacca

SEQ ID NO: 1229046 - RNA, 19 nt, Artificial Sequence
  Description of Artificial Sequence: Synthetic oligonucleotide
cgcaucccgccaaucuccg

SEQ ID NO: 1229047 - RNA, 19 nt, Artificial Sequence
  Description of Artificial Sequence: Synthetic oligonucleotide
caaucuccgcgcgcccauc

SEQ ID NO: 1229048 - RNA, 19 nt, Artificial Sequence
  Description of Artificial Sequence: Synthetic oligonucleotide
ggaauaggcaguggccagu

SEQ ID NO: 1229049 - RNA, 19 nt, Artificial Sequence
  Description of Artificial Sequence: Synthetic oligonucleotide
ccucgcugaucucccgcag

SEQ ID NO: 1229050 - RNA, 19 nt, Artificial Sequence
  Description of Artificial Sequence: Synthetic oligonucleotide
cuacacuguucuccuucgu

SEQ ID NO: 1229051 - RNA, 19 nt, Artificial Sequence
  Description of Artificial Sequence: Synthetic oligonucleotide
gcccggauaccagcaacac

SEQ ID NO: 1229052 - RNA, 19 nt, Artificial Sequence
  Description of Artificial Sequence: Synthetic oligonucleotide
acgguuccugugaccaauu

SEQ ID NO: 1229053 - RNA, 19 nt, Artificial Sequence
  Description of Artificial Sequence: Synthetic oligonucleotide
cuccgacuccacugcccca

SEQ ID NO: 1229054 - RNA, 19 nt, Artificial Sequence
  Description of Artificial Sequence: Synthetic oligonucleotide
ccguggggcugaugugacg

SEQ ID NO: 1229055 - RNA, 19 nt, Artificial Sequence
  Description of Artificial Sequence: Synthetic oligonucleotide
cauccggguggauguauuu

SEQ ID NO: 1229056 - RNA, 19 nt, Artificial Sequence
  Description of Artificial Sequence: Synthetic oligonucleotide
guaacacccuagggugucu

SEQ ID NO: 1229057 - RNA, 19 nt, Artificial Sequence
  Description of Artificial Sequence: Synthetic oligonucleotide
aucccgcccaucaccgcau

SEQ ID NO: 1229058 - RNA, 19 nt, Artificial Sequence
  Description of Artificial Sequence: Synthetic oligonucleotide
cucaggaccucggaugauu

SEQ ID NO: 1229059 - RNA, 19 nt, Artificial Sequence
  Description of Artificial Sequence: Synthetic oligonucleotide
cccggauaccagcaacaca

SEQ ID NO: 1229060 - RNA, 19 nt, Artificial Sequence
  Description of Artificial Sequence: Synthetic oligonucleotide
gcccagcugccugucauca

SEQ ID NO: 1229061 - RNA, 19 nt, Artificial Sequence
  Description of Artificial Sequence: Synthetic oligonucleotide
cacucacguucuguccaga

SEQ ID NO: 1229062 - RNA, 19 nt, Artificial Sequence
  Description of Artificial Sequence: Synthetic oligonucleotide
gcaucacgcgccgcgccgc

SEQ ID NO: 1229063 - RNA, 19 nt, Artificial Sequence
  Description of Artificial Sequence: Synthetic oligonucleotide
ccagucgaaaaggcuguga

SEQ ID NO: 1229064 - RNA, 19 nt, Artificial Sequence
  Description of Artificial Sequence: Synthetic oligonucleotide
gagcagagugugggcccuc

SEQ ID NO: 1229065 - RNA, 19 nt, Artificial Sequence
  Description of Artificial Sequence: Synthetic oligonucleotide
caucacgcgccgcgccgca

SEQ ID NO: 1229066 - RNA, 19 nt, Artificial Sequence
  Description of Artificial Sequence: Synthetic oligonucleotide
ggaugauuuuggagccaaa

SEQ ID NO: 1229067 - RNA, 19 nt, Artificial Sequence
  Description of Artificial Sequence: Synthetic oligonucleotide
caggcccagcccggauacc

SEQ ID NO: 1229068 - RNA, 19 nt, Artificial Sequence
  Description of Artificial Sequence: Synthetic oligonucleotide
cccggcucuccaggaaggg

SEQ ID NO: 1229069 - RNA, 19 nt, Artificial Sequence
  Description of Artificial Sequence: Synthetic oligonucleotide
cgaaaaggcugugaggagu

SEQ ID NO: 1229070 - RNA, 19 nt, Artificial Sequence
  Description of Artificial Sequence: Synthetic oligonucleotide
acggacccgcaggguccac

SEQ ID NO: 1229071 - RNA, 19 nt, Artificial Sequence
  Description of Artificial Sequence: Synthetic oligonucleotide
gccaaucuccgcgcgccca

SEQ ID NO: 1229072 - RNA, 19 nt, Artificial Sequence
  Description of Artificial Sequence: Synthetic oligonucleotide
gccguggggcugaugugac

SEQ ID NO: 1229073 - RNA, 19 nt, Artificial Sequence
  Description of Artificial Sequence: Synthetic oligonucleotide
gguccacucuaggaucucu

SEQ ID NO: 1229074 - RNA, 19 nt, Artificial Sequence
  Description of Artificial Sequence: Synthetic oligonucleotide
cgguuuuguagaaggggua

SEQ ID NO: 1229075 - RNA, 19 nt, Artificial Sequence
  Description of Artificial Sequence: Synthetic oligonucleotide
gguugccugcaaggaugac

SEQ ID NO: 1229076 - RNA, 19 nt, Artificial Sequence
  Description of Artificial Sequence: Synthetic oligonucleotide
caucauccggguggaugua

SEQ ID NO: 1229077 - RNA, 19 nt, Artificial Sequence
  Description of Artificial Sequence: Synthetic oligonucleotide
ccaugcugcuguaccggaa

SEQ ID NO: 1229078 - RNA, 19 nt, Artificial Sequence
  Description of Artificial Sequence: Synthetic oligonucleotide
ggguaacacccuagggugu

SEQ ID NO: 1229079 - RNA, 19 nt, Artificial Sequence
  Description of Artificial Sequence: Synthetic oligonucleotide
cccagucgaaaaggcugug

SEQ ID NO: 1229080 - RNA, 19 nt, Artificial Sequence
  Description of Artificial Sequence: Synthetic oligonucleotide
ccacgccacuguguccagg

SEQ ID NO: 1229081 - RNA, 19 nt, Artificial Sequence
  Description of Artificial Sequence: Synthetic oligonucleotide
cgacuccacugccccagug

SEQ ID NO: 1229082 - RNA, 19 nt, Artificial Sequence
  Description of Artificial Sequence: Synthetic oligonucleotide
cgggucgguuuuguagaag

SEQ ID NO: 1229083 - RNA, 19 nt, Artificial Sequence
  Description of Artificial Sequence: Synthetic oligonucleotide
ccggguggauguauuugcu

SEQ ID NO: 1229084 - RNA, 19 nt, Artificial Sequence
  Description of Artificial Sequence: Synthetic oligonucleotide
ccacuguguccaggcuaag

SEQ ID NO: 1229085 - RNA, 19 nt, Artificial Sequence
  Description of Artificial Sequence: Synthetic oligonucleotide
ccgcgcgcccaucccgccc

SEQ ID NO: 1229086 - RNA, 19 nt, Artificial Sequence
  Description of Artificial Sequence: Synthetic oligonucleotide
cgccaaucuccgcgcgccc

SEQ ID NO: 1229087 - RNA, 19 nt, Artificial Sequence
  Description of Artificial Sequence: Synthetic oligonucleotide
ggcagcguuccuggcuugu

SEQ ID NO: 1229088 - RNA, 19 nt, Artificial Sequence
  Description of Artificial Sequence: Synthetic oligonucleotide
ccaaucuccgcgcgcccau

SEQ ID NO: 1229089 - RNA, 19 nt, Artificial Sequence
  Description of Artificial Sequence: Synthetic oligonucleotide
gcagcguuccuggcuuguu

SEQ ID NO: 1229090 - RNA, 19 nt, Artificial Sequence
  Description of Artificial Sequence: Synthetic oligonucleotide
cgucucucacggagccaaa

SEQ ID NO: 1229091 - RNA, 19 nt, Artificial Sequence
  Description of Artificial Sequence: Synthetic oligonucleotide
cguccccaggaaucuuacu

SEQ ID NO: 1229092 - RNA, 19 nt, Artificial Sequence
  Description of Artificial Sequence: Synthetic oligonucleotide
gccugucaucagggaccca

SEQ ID NO: 1229093 - RNA, 19 nt, Artificial Sequence
  Description of Artificial Sequence: Synthetic oligonucleotide
cggacccgcaggguccacu

SEQ ID NO: 1229094 - RNA, 19 nt, Artificial Sequence
  Description of Artificial Sequence: Synthetic oligonucleotide
cgcgcccaucccgcccauc

SEQ ID NO: 1229095 - RNA, 19 nt, Artificial Sequence
  Description of Artificial Sequence: Synthetic oligonucleotide
guaguaaagucauagaugg

SEQ ID NO: 1229096 - RNA, 19 nt, Artificial Sequence
  Description of Artificial Sequence: Synthetic oligonucleotide
uguacaaucaggucaaugg

SEQ ID NO: 1229097 - RNA, 19 nt, Artificial Sequence
  Description of Artificial Sequence: Synthetic oligonucleotide
ugcauguucaauaagcagc

SEQ ID NO: 1229098 - RNA, 19 nt, Artificial Sequence
  Description of Artificial Sequence: Synthetic oligonucleotide
gaaaaggucauugacacgc

SEQ ID NO: 1229099 - RNA, 19 nt, Artificial Sequence
  Description of Artificial Sequence: Synthetic oligonucleotide
uuauagaaggaguccaugg

SEQ ID NO: 1229100 - RNA, 19 nt, Artificial Sequence
  Description of Artificial Sequence: Synthetic oligonucleotide
ugacauuugcaccauacag

SEQ ID NO: 1229101 - RNA, 19 nt, Artificial Sequence
  Description of Artificial Sequence: Synthetic oligonucleotide
auaagaguagcucaggcug

SEQ ID NO: 1229102 - RNA, 19 nt, Artificial Sequence
  Description of Artificial Sequence: Synthetic oligonucleotide
aaugaauucaucucggcua

SEQ ID NO: 1229103 - RNA, 19 nt, Artificial Sequence
  Description of Artificial Sequence: Synthetic oligonucleotide
auagauggguauuuggacg

SEQ ID NO: 1229104 - RNA, 19 nt, Artificial Sequence
  Description of Artificial Sequence: Synthetic oligonucleotide
aaaucaaaggcaucggggu

SEQ ID NO: 1229105 - RNA, 19 nt, Artificial Sequence
  Description of Artificial Sequence: Synthetic oligonucleotide
uuugcuugugcgaagcagg

SEQ ID NO: 1229106 - RNA, 19 nt, Artificial Sequence
  Description of Artificial Sequence: Synthetic oligonucleotide
ucuagagcuucaaugauca

SEQ ID NO: 1229107 - RNA, 19 nt, Artificial Sequence
  Description of Artificial Sequence: Synthetic oligonucleotide
ugggaacuaacccauagag

SEQ ID NO: 1229108 - RNA, 19 nt, Artificial Sequence
  Description of Artificial Sequence: Synthetic oligonucleotide
ggaacuaacccauagaggc

SEQ ID NO: 1229109 - RNA, 19 nt, Artificial Sequence
  Description of Artificial Sequence: Synthetic oligonucleotide
aauaagaguagcucaggcu

SEQ ID NO: 1229110 - RNA, 19 nt, Artificial Sequence
  Description of Artificial Sequence: Synthetic oligonucleotide
auagaaauaagaguagcuc

SEQ ID NO: 1229111 - RNA, 19 nt, Artificial Sequence
  Description of Artificial Sequence: Synthetic oligonucleotide
aaguugaaauuguugcagg

SEQ ID NO: 1229112 - RNA, 19 nt, Artificial Sequence
  Description of Artificial Sequence: Synthetic oligonucleotide
uuuaguuucuugaggguag

SEQ ID NO: 1229113 - RNA, 19 nt, Artificial Sequence
  Description of Artificial Sequence: Synthetic oligonucleotide
aaugcgcacauccuugcac

SEQ ID NO: 1229114 - RNA, 19 nt, Artificial Sequence
  Description of Artificial Sequence: Synthetic oligonucleotide
aguugaaauuguugcaggc

SEQ ID NO: 1229115 - RNA, 19 nt, Artificial Sequence
  Description of Artificial Sequence: Synthetic oligonucleotide
gaugauacggaaaagguca

SEQ ID NO: 1229116 - RNA, 19 nt, Artificial Sequence
  Description of Artificial Sequence: Synthetic oligonucleotide
auguuguacaaucagguca

SEQ ID NO: 1229117 - RNA, 19 nt, Artificial Sequence
  Description of Artificial Sequence: Synthetic oligonucleotide
acauuugcaccauacagug

SEQ ID NO: 1229118 - RNA, 19 nt, Artificial Sequence
  Description of Artificial Sequence: Synthetic oligonucleotide
aacauguuguacaaucagg

SEQ ID NO: 1229119 - RNA, 19 nt, Artificial Sequence
  Description of Artificial Sequence: Synthetic oligonucleotide
aguagucuguccaaggacc

SEQ ID NO: 1229120 - RNA, 19 nt, Artificial Sequence
  Description of Artificial Sequence: Synthetic oligonucleotide
ugugucagaaccuuauaga

SEQ ID NO: 1229121 - RNA, 19 nt, Artificial Sequence
  Description of Artificial Sequence: Synthetic oligonucleotide
auagcaagaagaucuuguc

SEQ ID NO: 1229122 - RNA, 19 nt, Artificial Sequence
  Description of Artificial Sequence: Synthetic oligonucleotide
augaguaguaaagucauag

SEQ ID NO: 1229123 - RNA, 19 nt, Artificial Sequence
  Description of Artificial Sequence: Synthetic oligonucleotide
aguaaagucauagaugggu

SEQ ID NO: 1229124 - RNA, 19 nt, Artificial Sequence
  Description of Artificial Sequence: Synthetic oligonucleotide
auguucaauaagcagccuc

SEQ ID NO: 1229125 - RNA, 19 nt, Artificial Sequence
  Description of Artificial Sequence: Synthetic oligonucleotide
gguuauuugcuuuccagcg

SEQ ID NO: 1229126 - RNA, 19 nt, Artificial Sequence
  Description of Artificial Sequence: Synthetic oligonucleotide
ugggaugauacggaaaagg

SEQ ID NO: 1229127 - RNA, 19 nt, Artificial Sequence
  Description of Artificial Sequence: Synthetic oligonucleotide
uaccagucggauaucagag

SEQ ID NO: 1229128 - RNA, 19 nt, Artificial Sequence
  Description of Artificial Sequence: Synthetic oligonucleotide
gauacggaaaaggucauug

SEQ ID NO: 1229129 - RNA, 19 nt, Artificial Sequence
  Description of Artificial Sequence: Synthetic oligonucleotide
ugugggguacucuugagga

SEQ ID NO: 1229130 - RNA, 19 nt, Artificial Sequence
  Description of Artificial Sequence: Synthetic oligonucleotide
cauuguaccaugguggccg

SEQ ID NO: 1229131 - RNA, 19 nt, Artificial Sequence
  Description of Artificial Sequence: Synthetic oligonucleotide
ucaucaaucuuuuggagua

SEQ ID NO: 1229132 - RNA, 19 nt, Artificial Sequence
  Description of Artificial Sequence: Synthetic oligonucleotide
uguuguacaaucaggucaa

SEQ ID NO: 1229133 - RNA, 19 nt, Artificial Sequence
  Description of Artificial Sequence: Synthetic oligonucleotide
agggauagcaagaagaucu

SEQ ID NO: 1229134 - RNA, 19 nt, Artificial Sequence
  Description of Artificial Sequence: Synthetic oligonucleotide
acacguacagccaucaugg

SEQ ID NO: 1229135 - RNA, 19 nt, Artificial Sequence
  Description of Artificial Sequence: Synthetic oligonucleotide
aguaguaaagucauagaug

SEQ ID NO: 1229136 - RNA, 19 nt, Artificial Sequence
  Description of Artificial Sequence: Synthetic oligonucleotide
uuguacugcuuaaugacac

SEQ ID NO: 1229137 - RNA, 19 nt, Artificial Sequence
  Description of Artificial Sequence: Synthetic oligonucleotide
uuccccugcacgcagaaug

SEQ ID NO: 1229138 - RNA, 19 nt, Artificial Sequence
  Description of Artificial Sequence: Synthetic oligonucleotide
aaacuuguuguacugcuua

SEQ ID NO: 1229139 - RNA, 19 nt, Artificial Sequence
  Description of Artificial Sequence: Synthetic oligonucleotide
uugucuacagcugugguga

SEQ ID NO: 1229140 - RNA, 19 nt, Artificial Sequence
  Description of Artificial Sequence: Synthetic oligonucleotide
acuaauauccuugggaagu

SEQ ID NO: 1229141 - RNA, 19 nt, Artificial Sequence
  Description of Artificial Sequence: Synthetic oligonucleotide
uagaugguacguuugcuug

SEQ ID NO: 1229142 - RNA, 19 nt, Artificial Sequence
  Description of Artificial Sequence: Synthetic oligonucleotide
gauacugugcaguccauca

SEQ ID NO: 1229143 - RNA, 19 nt, Artificial Sequence
  Description of Artificial Sequence: Synthetic oligonucleotide
augaauucaucucggcuag

SEQ ID NO: 1229144 - RNA, 19 nt, Artificial Sequence
  Description of Artificial Sequence: Synthetic oligonucleotide
cauagauggguauuuggac

SEQ ID NO: 1229145 - RNA, 19 nt, Artificial Sequence
  Description of Artificial Sequence: Synthetic oligonucleotide
uucauuguaccaugguggc

SEQ ID NO: 1229146 - RNA, 19 nt, Artificial Sequence
  Description of Artificial Sequence: Synthetic oligonucleotide
gaaauuguugcaggcagcc

SEQ ID NO: 1229147 - RNA, 19 nt, Artificial Sequence
  Description of Artificial Sequence: Synthetic oligonucleotide
aauauccuugggaagucuc

SEQ ID NO: 1229148 - RNA, 19 nt, Artificial Sequence
  Description of Artificial Sequence: Synthetic oligonucleotide
aguagggauagcaagaaga

SEQ ID NO: 1229149 - RNA, 19 nt, Artificial Sequence
  Description of Artificial Sequence: Synthetic oligonucleotide
gaaaugaugagaucaaaau

SEQ ID NO: 1229150 - RNA, 19 nt, Artificial Sequence
  Description of Artificial Sequence: Synthetic oligonucleotide
ugguacguuugcuugugcg

SEQ ID NO: 1229151 - RNA, 19 nt, Artificial Sequence
  Description of Artificial Sequence: Synthetic oligonucleotide
aacuaacccauagaggcug

SEQ ID NO: 1229152 - RNA, 19 nt, Artificial Sequence
  Description of Artificial Sequence: Synthetic oligonucleotide
cauacaguguuuuccaguc

SEQ ID NO: 1229153 - RNA, 19 nt, Artificial Sequence
  Description of Artificial Sequence: Synthetic oligonucleotide
cucaggcacaucauggucc

SEQ ID NO: 1229154 - RNA, 19 nt, Artificial Sequence
  Description of Artificial Sequence: Synthetic oligonucleotide
ucuacagcuguggugauga

SEQ ID NO: 1229155 - RNA, 19 nt, Artificial Sequence
  Description of Artificial Sequence: Synthetic oligonucleotide
gaugauucucacacguggg

SEQ ID NO: 1229156 - RNA, 19 nt, Artificial Sequence
  Description of Artificial Sequence: Synthetic oligonucleotide
ucugccaugaguagggaua

SEQ ID NO: 1229157 - RNA, 19 nt, Artificial Sequence
  Description of Artificial Sequence: Synthetic oligonucleotide
uauuuggacgcuccugccc

SEQ ID NO: 1229158 - RNA, 19 nt, Artificial Sequence
  Description of Artificial Sequence: Synthetic oligonucleotide
ugaaauuguugcaggcagc

SEQ ID NO: 1229159 - RNA, 19 nt, Artificial Sequence
  Description of Artificial Sequence: Synthetic oligonucleotide
ugaguaguaaagucauaga

SEQ ID NO: 1229160 - RNA, 19 nt, Artificial Sequence
  Description of Artificial Sequence: Synthetic oligonucleotide
cugugucagaaccuuauag

SEQ ID NO: 1229161 - RNA, 19 nt, Artificial Sequence
  Description of Artificial Sequence: Synthetic oligonucleotide
uuauuugcuuuccagcgua

SEQ ID NO: 1229162 - RNA, 19 nt, Artificial Sequence
  Description of Artificial Sequence: Synthetic oligonucleotide
uaccacaauaucugccagg

SEQ ID NO: 1229163 - RNA, 19 nt, Artificial Sequence
  Description of Artificial Sequence: Synthetic oligonucleotide
uccuugggaagucucaggu

SEQ ID NO: 1229164 - RNA, 19 nt, Artificial Sequence
  Description of Artificial Sequence: Synthetic oligonucleotide
uugcuugugcgaagcaggg

SEQ ID NO: 1229165 - RNA, 19 nt, Artificial Sequence
  Description of Artificial Sequence: Synthetic oligonucleotide
uguccaaggacccugcauu

SEQ ID NO: 1229166 - RNA, 19 nt, Artificial Sequence
  Description of Artificial Sequence: Synthetic oligonucleotide
auacccucaaagaugauga

SEQ ID NO: 1229167 - RNA, 19 nt, Artificial Sequence
  Description of Artificial Sequence: Synthetic oligonucleotide
gguauuuggacgcuccugc

SEQ ID NO: 1229168 - RNA, 19 nt, Artificial Sequence
  Description of Artificial Sequence: Synthetic oligonucleotide
caugccucguaccuguggg

SEQ ID NO: 1229169 - RNA, 19 nt, Artificial Sequence
  Description of Artificial Sequence: Synthetic oligonucleotide
cauagaggcugucucuucc

SEQ ID NO: 1229170 - RNA, 19 nt, Artificial Sequence
  Description of Artificial Sequence: Synthetic oligonucleotide
auacugcucaaaagcaggc

SEQ ID NO: 1229171 - RNA, 19 nt, Artificial Sequence
  Description of Artificial Sequence: Synthetic oligonucleotide
uguacugcuuaaugacacc

SEQ ID NO: 1229172 - RNA, 19 nt, Artificial Sequence
  Description of Artificial Sequence: Synthetic oligonucleotide
gaaccuuauagaaggaguc

SEQ ID NO: 1229173 - RNA, 19 nt, Artificial Sequence
  Description of Artificial Sequence: Synthetic oligonucleotide
aaggccaugauacccucaa

SEQ ID NO: 1229174 - RNA, 19 nt, Artificial Sequence
  Description of Artificial Sequence: Synthetic oligonucleotide
agagugcacacccaucucu

SEQ ID NO: 1229175 - RNA, 19 nt, Artificial Sequence
  Description of Artificial Sequence: Synthetic oligonucleotide
guagcacuuucccacguag

SEQ ID NO: 1229176 - RNA, 19 nt, Artificial Sequence
  Description of Artificial Sequence: Synthetic oligonucleotide
cacgugggaaugcauaggc

SEQ ID NO: 1229177 - RNA, 19 nt, Artificial Sequence
  Description of Artificial Sequence: Synthetic oligonucleotide
acuccgguuauuugcuuuc

SEQ ID NO: 1229178 - RNA, 19 nt, Artificial Sequence
  Description of Artificial Sequence: Synthetic oligonucleotide
auuuggacgcuccugcccu

SEQ ID NO: 1229179 - RNA, 19 nt, Artificial Sequence
  Description of Artificial Sequence: Synthetic oligonucleotide
cugcgugccauguucauug

SEQ ID NO: 1229180 - RNA, 19 nt, Artificial Sequence
  Description of Artificial Sequence: Synthetic oligonucleotide
cagguaguggagcucaggc

SEQ ID NO: 1229181 - RNA, 19 nt, Artificial Sequence
  Description of Artificial Sequence: Synthetic oligonucleotide
gauagugccaaugcgcaca

SEQ ID NO: 1229182 - RNA, 19 nt, Artificial Sequence
  Description of Artificial Sequence: Synthetic oligonucleotide
aauucccaaugccugggau

SEQ ID NO: 1229183 - RNA, 19 nt, Artificial Sequence
  Description of Artificial Sequence: Synthetic oligonucleotide
ugucuaggagcuccagcag

SEQ ID NO: 1229184 - RNA, 19 nt, Artificial Sequence
  Description of Artificial Sequence: Synthetic oligonucleotide
augauacccucaaagauga

SEQ ID NO: 1229185 - RNA, 19 nt, Artificial Sequence
  Description of Artificial Sequence: Synthetic oligonucleotide
ucauugacacgcuugucua

SEQ ID NO: 1229186 - RNA, 19 nt, Artificial Sequence
  Description of Artificial Sequence: Synthetic oligonucleotide
uugcgguccucacacgcgg

SEQ ID NO: 1229187 - RNA, 19 nt, Artificial Sequence
  Description of Artificial Sequence: Synthetic oligonucleotide
uggacugcgugccauguuc

SEQ ID NO: 1229188 - RNA, 19 nt, Artificial Sequence
  Description of Artificial Sequence: Synthetic oligonucleotide
cacuaauauccuugggaag

SEQ ID NO: 1229189 - RNA, 19 nt, Artificial Sequence
  Description of Artificial Sequence: Synthetic oligonucleotide
acgcagaauggacacuccg

SEQ ID NO: 1229190 - RNA, 19 nt, Artificial Sequence
  Description of Artificial Sequence: Synthetic oligonucleotide
gaugucccggcguagccgc

SEQ ID NO: 1229191 - RNA, 19 nt, Artificial Sequence
  Description of Artificial Sequence: Synthetic oligonucleotide
acugcccacccucccaagc

SEQ ID NO: 1229192 - RNA, 19 nt, Artificial Sequence
  Description of Artificial Sequence: Synthetic oligonucleotide
cacacgugggaaugcauag

SEQ ID NO: 1229193 - RNA, 19 nt, Artificial Sequence
  Description of Artificial Sequence: Synthetic oligonucleotide
acugaugucccggcguagc

SEQ ID NO: 1229194 - RNA, 19 nt, Artificial Sequence
  Description of Artificial Sequence: Synthetic oligonucleotide
uccccugcacgcagaaugg

SEQ ID NO: 1229195 - RNA, 19 nt, Artificial Sequence
  Description of Artificial Sequence: Synthetic oligonucleotide
aggauagaaauaagaguag

SEQ ID NO: 1229196 - RNA, 19 nt, Artificial Sequence
  Description of Artificial Sequence: Synthetic oligonucleotide
cauugcgguccucacacgc

SEQ ID NO: 1229197 - RNA, 19 nt, Artificial Sequence
  Description of Artificial Sequence: Synthetic oligonucleotide
auuguaccaugguggccgc

SEQ ID NO: 1229198 - RNA, 19 nt, Artificial Sequence
  Description of Artificial Sequence: Synthetic oligonucleotide
cagcguagcacuuucccac

SEQ ID NO: 1229199 - RNA, 19 nt, Artificial Sequence
  Description of Artificial Sequence: Synthetic oligonucleotide
auggguauuuggacgcucc

SEQ ID NO: 1229200 - RNA, 19 nt, Artificial Sequence
  Description of Artificial Sequence: Synthetic oligonucleotide
augauucucacacguggga

SEQ ID NO: 1229201 - RNA, 19 nt, Artificial Sequence
  Description of Artificial Sequence: Synthetic oligonucleotide
ucugucccaaaguagcgau

SEQ ID NO: 1229202 - RNA, 19 nt, Artificial Sequence
  Description of Artificial Sequence: Synthetic oligonucleotide
ucccaaaguagcgaucacc

SEQ ID NO: 1229203 - RNA, 19 nt, Artificial Sequence
  Description of Artificial Sequence: Synthetic oligonucleotide
uggugaugauucucacacg

SEQ ID NO: 1229204 - RNA, 19 nt, Artificial Sequence
  Description of Artificial Sequence: Synthetic oligonucleotide
acguuugcuugugcgaagc

SEQ ID NO: 1229205 - RNA, 19 nt, Artificial Sequence
  Description of Artificial Sequence: Synthetic oligonucleotide
aaggacccugcauugcggu

SEQ ID NO: 1229206 - RNA, 19 nt, Artificial Sequence
  Description of Artificial Sequence: Synthetic oligonucleotide
ugggguacucuugaggaca

SEQ ID NO: 1229207 - RNA, 19 nt, Artificial Sequence
  Description of Artificial Sequence: Synthetic oligonucleotide
guagccgccguaccagucg

SEQ ID NO: 1229208 - RNA, 19 nt, Artificial Sequence
  Description of Artificial Sequence: Synthetic oligonucleotide
gauagcaagaagaucuugu

SEQ ID NO: 1229209 - RNA, 19 nt, Artificial Sequence
  Description of Artificial Sequence: Synthetic oligonucleotide
ugcuuuccagcguagcacu

SEQ ID NO: 1229210 - RNA, 19 nt, Artificial Sequence
  Description of Artificial Sequence: Synthetic oligonucleotide
caugucuaggagcuccagc

SEQ ID NO: 1229211 - RNA, 19 nt, Artificial Sequence
  Description of Artificial Sequence: Synthetic oligonucleotide
uuuuccggcuaugaguagu

SEQ ID NO: 1229212 - RNA, 19 nt, Artificial Sequence
  Description of Artificial Sequence: Synthetic oligonucleotide
agcgaucaccaaaauuccc

SEQ ID NO: 1229213 - RNA, 19 nt, Artificial Sequence
  Description of Artificial Sequence: Synthetic oligonucleotide
ucacacgugggaaugcaua

SEQ ID NO: 1229214 - RNA, 19 nt, Artificial Sequence
  Description of Artificial Sequence: Synthetic oligonucleotide
agucggauaucagagucug

SEQ ID NO: 1229215 - RNA, 19 nt, Artificial Sequence
  Description of Artificial Sequence: Synthetic oligonucleotide
guaccagucggauaucaga

SEQ ID NO: 1229216 - RNA, 19 nt, Artificial Sequence
  Description of Artificial Sequence: Synthetic oligonucleotide
guuugcuugugcgaagcag

SEQ ID NO: 1229217 - RNA, 19 nt, Artificial Sequence
  Description of Artificial Sequence: Synthetic oligonucleotide
ggacacuccgguuauuugc

SEQ ID NO: 1229218 - RNA, 19 nt, Artificial Sequence
  Description of Artificial Sequence: Synthetic oligonucleotide
accauacaguguuuuccag

SEQ ID NO: 1229219 - RNA, 19 nt, Artificial Sequence
  Description of Artificial Sequence: Synthetic oligonucleotide
uguagaugguacguuugcu

SEQ ID NO: 1229220 - RNA, 19 nt, Artificial Sequence
  Description of Artificial Sequence: Synthetic oligonucleotide
uguggauacugugcagucc

SEQ ID NO: 1229221 - RNA, 19 nt, Artificial Sequence
  Description of Artificial Sequence: Synthetic oligonucleotide
ccggcuaugaguaguaaag

SEQ ID NO: 1229222 - RNA, 19 nt, Artificial Sequence
  Description of Artificial Sequence: Synthetic oligonucleotide
caaugaucauccuggccac

SEQ ID NO: 1229223 - RNA, 19 nt, Artificial Sequence
  Description of Artificial Sequence: Synthetic oligonucleotide
agcguagcacuuucccacg

SEQ ID NO: 1229224 - RNA, 19 nt, Artificial Sequence
  Description of Artificial Sequence: Synthetic oligonucleotide
ugcaguccuggaaggguag

SEQ ID NO: 1229225 - RNA, 19 nt, Artificial Sequence
  Description of Artificial Sequence: Synthetic oligonucleotide
ggaagucucagguagugga

SEQ ID NO: 1229226 - RNA, 19 nt, Artificial Sequence
  Description of Artificial Sequence: Synthetic oligonucleotide
ugaugucccggcguagccg

SEQ ID NO: 1229227 - RNA, 19 nt, Artificial Sequence
  Description of Artificial Sequence: Synthetic oligonucleotide
augguacguuugcuugugc

SEQ ID NO: 1229228 - RNA, 19 nt, Artificial Sequence
  Description of Artificial Sequence: Synthetic oligonucleotide
uugcuuuccagcguagcac

SEQ ID NO: 1229229 - RNA, 19 nt, Artificial Sequence
  Description of Artificial Sequence: Synthetic oligonucleotide
gaauucaucucggcuaguc

SEQ ID NO: 1229230 - RNA, 19 nt, Artificial Sequence
  Description of Artificial Sequence: Synthetic oligonucleotide
agaugguacguuugcuugu

SEQ ID NO: 1229231 - RNA, 19 nt, Artificial Sequence
  Description of Artificial Sequence: Synthetic oligonucleotide
gaugguacguuugcuugug

SEQ ID NO: 1229232 - RNA, 19 nt, Artificial Sequence
  Description of Artificial Sequence: Synthetic oligonucleotide
ugguggugcgcuuccgggg

SEQ ID NO: 1229233 - RNA, 19 nt, Artificial Sequence
  Description of Artificial Sequence: Synthetic oligonucleotide
caucucugccaugaguagg

SEQ ID NO: 1229234 - RNA, 19 nt, Artificial Sequence
  Description of Artificial Sequence: Synthetic oligonucleotide
guaccacaauaucugccag

SEQ ID NO: 1229235 - RNA, 19 nt, Artificial Sequence
  Description of Artificial Sequence: Synthetic oligonucleotide
auugacacgcuugucuaca

SEQ ID NO: 1229236 - RNA, 19 nt, Artificial Sequence
  Description of Artificial Sequence: Synthetic oligonucleotide
caaggacccugcauugcgg

SEQ ID NO: 1229237 - RNA, 19 nt, Artificial Sequence
  Description of Artificial Sequence: Synthetic oligonucleotide
gcuaugaguaguaaaguca

SEQ ID NO: 1229238 - RNA, 19 nt, Artificial Sequence
  Description of Artificial Sequence: Synthetic oligonucleotide
auguucauuguaccauggu

SEQ ID NO: 1229239 - RNA, 19 nt, Artificial Sequence
  Description of Artificial Sequence: Synthetic oligonucleotide
gacauuugcaccauacagu

SEQ ID NO: 1229240 - RNA, 19 nt, Artificial Sequence
  Description of Artificial Sequence: Synthetic oligonucleotide
uacguuugcuugugcgaag

SEQ ID NO: 1229241 - RNA, 19 nt, Artificial Sequence
  Description of Artificial Sequence: Synthetic oligonucleotide
uugugcgaagcaggggugg

SEQ ID NO: 1229242 - RNA, 19 nt, Artificial Sequence
  Description of Artificial Sequence: Synthetic oligonucleotide
guauuuggacgcuccugcc

SEQ ID NO: 1229243 - RNA, 19 nt, Artificial Sequence
  Description of Artificial Sequence: Synthetic oligonucleotide
uggacacuccgguuauuug

SEQ ID NO: 1229244 - RNA, 19 nt, Artificial Sequence
  Description of Artificial Sequence: Synthetic oligonucleotide
uccucaggcacaucauggu

SEQ ID NO: 1229245 - RNA, 19 nt, Artificial Sequence
  Description of Artificial Sequence: Synthetic oligonucleotide
gugccauguucauuguacc

SEQ ID NO: 1229246 - RNA, 19 nt, Artificial Sequence
  Description of Artificial Sequence: Synthetic oligonucleotide
uaugaguaguaaagucaua

SEQ ID NO: 1229247 - RNA, 19 nt, Artificial Sequence
  Description of Artificial Sequence: Synthetic oligonucleotide
uccggcuaugaguaguaaa

SEQ ID NO: 1229248 - RNA, 19 nt, Artificial Sequence
  Description of Artificial Sequence: Synthetic oligonucleotide
cuacuguguucccacuccc

SEQ ID NO: 1229249 - RNA, 19 nt, Artificial Sequence
  Description of Artificial Sequence: Synthetic oligonucleotide
aguacacguacagccauca

SEQ ID NO: 1229250 - RNA, 19 nt, Artificial Sequence
  Description of Artificial Sequence: Synthetic oligonucleotide
ggcuaugaguaguaaaguc

SEQ ID NO: 1229251 - RNA, 19 nt, Artificial Sequence
  Description of Artificial Sequence: Synthetic oligonucleotide
agguaguggagcucaggcu

SEQ ID NO: 1229252 - RNA, 19 nt, Artificial Sequence
  Description of Artificial Sequence: Synthetic oligonucleotide
ugguuuccccugcacgcag

SEQ ID NO: 1229253 - RNA, 19 nt, Artificial Sequence
  Description of Artificial Sequence: Synthetic oligonucleotide
cuaugaguaguaaagucau

SEQ ID NO: 1229254 - RNA, 19 nt, Artificial Sequence
  Description of Artificial Sequence: Synthetic oligonucleotide
uagccgccguaccagucgg

SEQ ID NO: 1229255 - RNA, 19 nt, Artificial Sequence
  Description of Artificial Sequence: Synthetic oligonucleotide
gggaacuaacccauagagg

SEQ ID NO: 1229256 - RNA, 19 nt, Artificial Sequence
  Description of Artificial Sequence: Synthetic oligonucleotide
uuaguuucuugaggguaga

SEQ ID NO: 1229257 - RNA, 19 nt, Artificial Sequence
  Description of Artificial Sequence: Synthetic oligonucleotide
cauggucaucacuaauauc

SEQ ID NO: 1229258 - RNA, 19 nt, Artificial Sequence
  Description of Artificial Sequence: Synthetic oligonucleotide
uuuccggcuaugaguagua

SEQ ID NO: 1229259 - RNA, 19 nt, Artificial Sequence
  Description of Artificial Sequence: Synthetic oligonucleotide
cauugacacgcuugucuac

SEQ ID NO: 1229260 - RNA, 19 nt, Artificial Sequence
  Description of Artificial Sequence: Synthetic oligonucleotide
cugcacgcagaauggacac

SEQ ID NO: 1229261 - RNA, 19 nt, Artificial Sequence
  Description of Artificial Sequence: Synthetic oligonucleotide
uaauauccuugggaagucu

SEQ ID NO: 1229262 - RNA, 19 nt, Artificial Sequence
  Description of Artificial Sequence: Synthetic oligonucleotide
uaacccauagaggcugucu

SEQ ID NO: 1229263 - RNA, 19 nt, Artificial Sequence
  Description of Artificial Sequence: Synthetic oligonucleotide
uccaugguuuccccugcac

SEQ ID NO: 1229264 - RNA, 19 nt, Artificial Sequence
  Description of Artificial Sequence: Synthetic oligonucleotide
agcccugacgcugaguuca

SEQ ID NO: 1229265 - RNA, 19 nt, Artificial Sequence
  Description of Artificial Sequence: Synthetic oligonucleotide
auugcgguccucacacgcg

SEQ ID NO: 1229266 - RNA, 19 nt, Artificial Sequence
  Description of Artificial Sequence: Synthetic oligonucleotide
cuugugcgaagcaggggug

SEQ ID NO: 1229267 - RNA, 19 nt, Artificial Sequence
  Description of Artificial Sequence: Synthetic oligonucleotide
gggaguagucuguccaagg

SEQ ID NO: 1229268 - RNA, 19 nt, Artificial Sequence
  Description of Artificial Sequence: Synthetic oligonucleotide
acgugggaaugcauaggcc

SEQ ID NO: 1229269 - RNA, 19 nt, Artificial Sequence
  Description of Artificial Sequence: Synthetic oligonucleotide
caaucaggucaauggcuac

SEQ ID NO: 1229270 - RNA, 19 nt, Artificial Sequence
  Description of Artificial Sequence: Synthetic oligonucleotide
caaugccugggaugauacg

SEQ ID NO: 1229271 - RNA, 19 nt, Artificial Sequence
  Description of Artificial Sequence: Synthetic oligonucleotide
caccauacaguguuuucca

SEQ ID NO: 1229272 - RNA, 19 nt, Artificial Sequence
  Description of Artificial Sequence: Synthetic oligonucleotide
cuaauauccuugggaaguc

SEQ ID NO: 1229273 - RNA, 19 nt, Artificial Sequence
  Description of Artificial Sequence: Synthetic oligonucleotide
ucacacgcggucucacucu

SEQ ID NO: 1229274 - RNA, 19 nt, Artificial Sequence
  Description of Artificial Sequence: Synthetic oligonucleotide
uggguauuuggacgcuccu

SEQ ID NO: 1229275 - RNA, 19 nt, Artificial Sequence
  Description of Artificial Sequence: Synthetic oligonucleotide
acaaucaggucaauggcua

SEQ ID NO: 1229276 - RNA, 19 nt, Artificial Sequence
  Description of Artificial Sequence: Synthetic oligonucleotide
cucacacgcggucucacuc

SEQ ID NO: 1229277 - RNA, 19 nt, Artificial Sequence
  Description of Artificial Sequence: Synthetic oligonucleotide
ugccaaugcgcacauccuu

SEQ ID NO: 1229278 - RNA, 19 nt, Artificial Sequence
  Description of Artificial Sequence: Synthetic oligonucleotide
gagugcacacccaucucug

SEQ ID NO: 1229279 - RNA, 19 nt, Artificial Sequence
  Description of Artificial Sequence: Synthetic oligonucleotide
augccucguaccugugggg

SEQ ID NO: 1229280 - RNA, 19 nt, Artificial Sequence
  Description of Artificial Sequence: Synthetic oligonucleotide
ugaucauccuggccacagu

SEQ ID NO: 1229281 - RNA, 19 nt, Artificial Sequence
  Description of Artificial Sequence: Synthetic oligonucleotide
acacgugggaaugcauagg

SEQ ID NO: 1229282 - RNA, 19 nt, Artificial Sequence
  Description of Artificial Sequence: Synthetic oligonucleotide
aaguagcgaucaccaaaau

SEQ ID NO: 1229283 - RNA, 19 nt, Artificial Sequence
  Description of Artificial Sequence: Synthetic oligonucleotide
cuguggauacugugcaguc

SEQ ID NO: 1229284 - RNA, 19 nt, Artificial Sequence
  Description of Artificial Sequence: Synthetic oligonucleotide
uucccacucccucugggua

SEQ ID NO: 1229285 - RNA, 19 nt, Artificial Sequence
  Description of Artificial Sequence: Synthetic oligonucleotide
gaucuuguccucaggcaca

SEQ ID NO: 1229286 - RNA, 19 nt, Artificial Sequence
  Description of Artificial Sequence: Synthetic oligonucleotide
accagucggauaucagagu

SEQ ID NO: 1229287 - RNA, 19 nt, Artificial Sequence
  Description of Artificial Sequence: Synthetic oligonucleotide
ucaaugucccggccucgcu

SEQ ID NO: 1229288 - RNA, 19 nt, Artificial Sequence
  Description of Artificial Sequence: Synthetic oligonucleotide
auauccuugggaagucuca

SEQ ID NO: 1229289 - RNA, 19 nt, Artificial Sequence
  Description of Artificial Sequence: Synthetic oligonucleotide
gcaccauacaguguuuucc

SEQ ID NO: 1229290 - RNA, 19 nt, Artificial Sequence
  Description of Artificial Sequence: Synthetic oligonucleotide
ggaugauacggaaaagguc

SEQ ID NO: 1229291 - RNA, 19 nt, Artificial Sequence
  Description of Artificial Sequence: Synthetic oligonucleotide
ugagcgcccaguucccacu

SEQ ID NO: 1229292 - RNA, 19 nt, Artificial Sequence
  Description of Artificial Sequence: Synthetic oligonucleotide
caauaagcagccucaucaa

SEQ ID NO: 1229293 - RNA, 19 nt, Artificial Sequence
  Description of Artificial Sequence: Synthetic oligonucleotide
gguacguuugcuugugcga

SEQ ID NO: 1229294 - RNA, 19 nt, Artificial Sequence
  Description of Artificial Sequence: Synthetic oligonucleotide
ggaguagucuguccaagga

SEQ ID NO: 1229295 - RNA, 19 nt, Artificial Sequence
  Description of Artificial Sequence: Synthetic oligonucleotide
uccaaggacccugcauugc

SEQ ID NO: 1229296 - RNA, 19 nt, Artificial Sequence
  Description of Artificial Sequence: Synthetic oligonucleotide
aguccugccccuguggggu

SEQ ID NO: 1229297 - RNA, 19 nt, Artificial Sequence
  Description of Artificial Sequence: Synthetic oligonucleotide
ccugacgcugaguucacgc

SEQ ID NO: 1229298 - RNA, 19 nt, Artificial Sequence
  Description of Artificial Sequence: Synthetic oligonucleotide
cuguggggucuguacagug

SEQ ID NO: 1229299 - RNA, 19 nt, Artificial Sequence
  Description of Artificial Sequence: Synthetic oligonucleotide
aaugaucauccuggccaca

SEQ ID NO: 1229300 - RNA, 19 nt, Artificial Sequence
  Description of Artificial Sequence: Synthetic oligonucleotide
uacccucaaagaugaugac

SEQ ID NO: 1229301 - RNA, 19 nt, Artificial Sequence
  Description of Artificial Sequence: Synthetic oligonucleotide
caaaggccaugauacccuc

SEQ ID NO: 1229302 - RNA, 19 nt, Artificial Sequence
  Description of Artificial Sequence: Synthetic oligonucleotide
ccaaggacccugcauugcg

SEQ ID NO: 1229303 - RNA, 19 nt, Artificial Sequence
  Description of Artificial Sequence: Synthetic oligonucleotide
gauucucacacgugggaau

SEQ ID NO: 1229304 - RNA, 19 nt, Artificial Sequence
  Description of Artificial Sequence: Synthetic oligonucleotide
gugaugauucucacacgug

SEQ ID NO: 1229305 - RNA, 19 nt, Artificial Sequence
  Description of Artificial Sequence: Synthetic oligonucleotide
acccucaaugucccggccu

SEQ ID NO: 1229306 - RNA, 19 nt, Artificial Sequence
  Description of Artificial Sequence: Synthetic oligonucleotide
cacgcagaauggacacucc

SEQ ID NO: 1229307 - RNA, 19 nt, Artificial Sequence
  Description of Artificial Sequence: Synthetic oligonucleotide
cccaaaguagcgaucacca

SEQ ID NO: 1229308 - RNA, 19 nt, Artificial Sequence
  Description of Artificial Sequence: Synthetic oligonucleotide
guaguggagcucaggcucc

SEQ ID NO: 1229309 - RNA, 19 nt, Artificial Sequence
  Description of Artificial Sequence: Synthetic oligonucleotide
ccagucggauaucagaguc

SEQ ID NO: 1229310 - RNA, 19 nt, Artificial Sequence
  Description of Artificial Sequence: Synthetic oligonucleotide
cacagagugcacacccauc

SEQ ID NO: 1229311 - RNA, 19 nt, Artificial Sequence
  Description of Artificial Sequence: Synthetic oligonucleotide
uuuggacgcuccugcccug

SEQ ID NO: 1229312 - RNA, 19 nt, Artificial Sequence
  Description of Artificial Sequence: Synthetic oligonucleotide
caccuguggauacugugca

SEQ ID NO: 1229313 - RNA, 19 nt, Artificial Sequence
  Description of Artificial Sequence: Synthetic oligonucleotide
caaugucccggccucgcuc

SEQ ID NO: 1229314 - RNA, 19 nt, Artificial Sequence
  Description of Artificial Sequence: Synthetic oligonucleotide
aggaguacacguacagcca

SEQ ID NO: 1229315 - RNA, 19 nt, Artificial Sequence
  Description of Artificial Sequence: Synthetic oligonucleotide
ccaaugccugggaugauac

SEQ ID NO: 1229316 - RNA, 19 nt, Artificial Sequence
  Description of Artificial Sequence: Synthetic oligonucleotide
gauggguauuuggacgcuc

SEQ ID NO: 1229317 - RNA, 19 nt, Artificial Sequence
  Description of Artificial Sequence: Synthetic oligonucleotide
cgguuauuugcuuuccagc

SEQ ID NO: 1229318 - RNA, 19 nt, Artificial Sequence
  Description of Artificial Sequence: Synthetic oligonucleotide
ugacacccucaaugucccg

SEQ ID NO: 1229319 - RNA, 19 nt, Artificial Sequence
  Description of Artificial Sequence: Synthetic oligonucleotide
guagaugguacguuugcuu

SEQ ID NO: 1229320 - RNA, 19 nt, Artificial Sequence
  Description of Artificial Sequence: Synthetic oligonucleotide
guacguuugcuugugcgaa

SEQ ID NO: 1229321 - RNA, 19 nt, Artificial Sequence
  Description of Artificial Sequence: Synthetic oligonucleotide
ggguaggaaggacagugca

SEQ ID NO: 1229322 - RNA, 19 nt, Artificial Sequence
  Description of Artificial Sequence: Synthetic oligonucleotide
cuccccugugagcugguug

SEQ ID NO: 1229323 - RNA, 19 nt, Artificial Sequence
  Description of Artificial Sequence: Synthetic oligonucleotide
cacguacagccaucauggc

SEQ ID NO: 1229324 - RNA, 19 nt, Artificial Sequence
  Description of Artificial Sequence: Synthetic oligonucleotide
aggacagugcauguucaau

SEQ ID NO: 1229325 - RNA, 19 nt, Artificial Sequence
  Description of Artificial Sequence: Synthetic oligonucleotide
ccaucauggcugcagcacc

SEQ ID NO: 1229326 - RNA, 19 nt, Artificial Sequence
  Description of Artificial Sequence: Synthetic oligonucleotide
gcgaucaccaaaauuccca

SEQ ID NO: 1229327 - RNA, 19 nt, Artificial Sequence
  Description of Artificial Sequence: Synthetic oligonucleotide
auggacacuccgguuauuu

SEQ ID NO: 1229328 - RNA, 19 nt, Artificial Sequence
  Description of Artificial Sequence: Synthetic oligonucleotide
guagggauagcaagaagau

SEQ ID NO: 1229329 - RNA, 19 nt, Artificial Sequence
  Description of Artificial Sequence: Synthetic oligonucleotide
acguaguccugccccugug

SEQ ID NO: 1229330 - RNA, 19 nt, Artificial Sequence
  Description of Artificial Sequence: Synthetic oligonucleotide
gaauggacacuccgguuau

SEQ ID NO: 1229331 - RNA, 19 nt, Artificial Sequence
  Description of Artificial Sequence: Synthetic oligonucleotide
cuagucuccuugucccuga

SEQ ID NO: 1229332 - RNA, 19 nt, Artificial Sequence
  Description of Artificial Sequence: Synthetic oligonucleotide
ggugggcuggauauacugc

SEQ ID NO: 1229333 - RNA, 19 nt, Artificial Sequence
  Description of Artificial Sequence: Synthetic oligonucleotide
gcuugugcgaagcaggggu

SEQ ID NO: 1229334 - RNA, 19 nt, Artificial Sequence
  Description of Artificial Sequence: Synthetic oligonucleotide
gcacuuucccacguagucc

SEQ ID NO: 1229335 - RNA, 19 nt, Artificial Sequence
  Description of Artificial Sequence: Synthetic oligonucleotide
gcaugccucguaccugugg

SEQ ID NO: 1229336 - RNA, 19 nt, Artificial Sequence
  Description of Artificial Sequence: Synthetic oligonucleotide
gccucgcucacugaugucc

SEQ ID NO: 1229337 - RNA, 19 nt, Artificial Sequence
  Description of Artificial Sequence: Synthetic oligonucleotide
gacacuccgguuauuugcu

SEQ ID NO: 1229338 - RNA, 19 nt, Artificial Sequence
  Description of Artificial Sequence: Synthetic oligonucleotide
agcgcccaguucccacugg

SEQ ID NO: 1229339 - RNA, 19 nt, Artificial Sequence
  Description of Artificial Sequence: Synthetic oligonucleotide
gggaagucucagguagugg

SEQ ID NO: 1229340 - RNA, 19 nt, Artificial Sequence
  Description of Artificial Sequence: Synthetic oligonucleotide
ugcaugccucguaccugug

SEQ ID NO: 1229341 - RNA, 19 nt, Artificial Sequence
  Description of Artificial Sequence: Synthetic oligonucleotide
acacgcuugucuacagcug

SEQ ID NO: 1229342 - RNA, 19 nt, Artificial Sequence
  Description of Artificial Sequence: Synthetic oligonucleotide
ugauacggaaaaggucauu

SEQ ID NO: 1229343 - RNA, 19 nt, Artificial Sequence
  Description of Artificial Sequence: Synthetic oligonucleotide
augguuuccccugcacgca

SEQ ID NO: 1229344 - RNA, 19 nt, Artificial Sequence
  Description of Artificial Sequence: Synthetic oligonucleotide
gaguacacguacagccauc

SEQ ID NO: 1229345 - RNA, 19 nt, Artificial Sequence
  Description of Artificial Sequence: Synthetic oligonucleotide
ccugaugauggugugcaug

SEQ ID NO: 1229346 - RNA, 19 nt, Artificial Sequence
  Description of Artificial Sequence: Synthetic oligonucleotide
cgugggaaugcauaggcca

SEQ ID NO: 1229347 - RNA, 19 nt, Artificial Sequence
  Description of Artificial Sequence: Synthetic oligonucleotide
cacacgcggucucacucug

SEQ ID NO: 1229348 - RNA, 19 nt, Artificial Sequence
  Description of Artificial Sequence: Synthetic oligonucleotide
gaucaccaaaauucccaau

SEQ ID NO: 1229349 - RNA, 19 nt, Artificial Sequence
  Description of Artificial Sequence: Synthetic oligonucleotide
gccaaugcgcacauccuug

SEQ ID NO: 1229350 - RNA, 19 nt, Artificial Sequence
  Description of Artificial Sequence: Synthetic oligonucleotide
ugaauucaucucggcuagu

SEQ ID NO: 1229351 - RNA, 19 nt, Artificial Sequence
  Description of Artificial Sequence: Synthetic oligonucleotide
gagcgcccaguucccacug

SEQ ID NO: 1229352 - RNA, 19 nt, Artificial Sequence
  Description of Artificial Sequence: Synthetic oligonucleotide
cagagugcacacccaucuc

SEQ ID NO: 1229353 - RNA, 19 nt, Artificial Sequence
  Description of Artificial Sequence: Synthetic oligonucleotide
augccugggaugauacgga

SEQ ID NO: 1229354 - RNA, 19 nt, Artificial Sequence
  Description of Artificial Sequence: Synthetic oligonucleotide
gugagcgcccaguucccac

SEQ ID NO: 1229355 - RNA, 19 nt, Artificial Sequence
  Description of Artificial Sequence: Synthetic oligonucleotide
gugugcaugccucguaccu

SEQ ID NO: 1229356 - RNA, 19 nt, Artificial Sequence
  Description of Artificial Sequence: Synthetic oligonucleotide
acgcggucucacucugcuc

SEQ ID NO: 1229357 - RNA, 19 nt, Artificial Sequence
  Description of Artificial Sequence: Synthetic oligonucleotide
ugcgugccauguucauugu

SEQ ID NO: 1229358 - RNA, 19 nt, Artificial Sequence
  Description of Artificial Sequence: Synthetic oligonucleotide
uuggacugcgugccauguu

SEQ ID NO: 1229359 - RNA, 19 nt, Artificial Sequence
  Description of Artificial Sequence: Synthetic oligonucleotide
cagugguccuucccagaug

SEQ ID NO: 1229360 - RNA, 19 nt, Artificial Sequence
  Description of Artificial Sequence: Synthetic oligonucleotide
ugauacccucaaagaugau

SEQ ID NO: 1229361 - RNA, 19 nt, Artificial Sequence
  Description of Artificial Sequence: Synthetic oligonucleotide
augauacggaaaaggucau

SEQ ID NO: 1229362 - RNA, 19 nt, Artificial Sequence
  Description of Artificial Sequence: Synthetic oligonucleotide
ugcgguccucacacgcggu

SEQ ID NO: 1229363 - RNA, 19 nt, Artificial Sequence
  Description of Artificial Sequence: Synthetic oligonucleotide
ggauagugccaaugcgcac

SEQ ID NO: 1229364 - RNA, 19 nt, Artificial Sequence
  Description of Artificial Sequence: Synthetic oligonucleotide
gggaugauacggaaaaggu

SEQ ID NO: 1229365 - RNA, 19 nt, Artificial Sequence
  Description of Artificial Sequence: Synthetic oligonucleotide
cucggcuagucuccuuguc

SEQ ID NO: 1229366 - RNA, 19 nt, Artificial Sequence
  Description of Artificial Sequence: Synthetic oligonucleotide
cgcccggcuguguagaugg

SEQ ID NO: 1229367 - RNA, 19 nt, Artificial Sequence
  Description of Artificial Sequence: Synthetic oligonucleotide
gucuacagcuguggugaug

SEQ ID NO: 1229368 - RNA, 19 nt, Artificial Sequence
  Description of Artificial Sequence: Synthetic oligonucleotide
auggugugcaugccucgua

SEQ ID NO: 1229369 - RNA, 19 nt, Artificial Sequence
  Description of Artificial Sequence: Synthetic oligonucleotide
gggucuguacagugcaguc

SEQ ID NO: 1229370 - RNA, 19 nt, Artificial Sequence
  Description of Artificial Sequence: Synthetic oligonucleotide
acacgcggucucacucugc

SEQ ID NO: 1229371 - RNA, 19 nt, Artificial Sequence
  Description of Artificial Sequence: Synthetic oligonucleotide
cggcuagucuccuuguccc

SEQ ID NO: 1229372 - RNA, 19 nt, Artificial Sequence
  Description of Artificial Sequence: Synthetic oligonucleotide
cacgcuugucuacagcugu

SEQ ID NO: 1229373 - RNA, 19 nt, Artificial Sequence
  Description of Artificial Sequence: Synthetic oligonucleotide
ggcuacuguguucccacuc

SEQ ID NO: 1229374 - RNA, 19 nt, Artificial Sequence
  Description of Artificial Sequence: Synthetic oligonucleotide
gugcaugccucguaccugu

SEQ ID NO: 1229375 - RNA, 19 nt, Artificial Sequence
  Description of Artificial Sequence: Synthetic oligonucleotide
aauggacacuccgguuauu

SEQ ID NO: 1229376 - RNA, 19 nt, Artificial Sequence
  Description of Artificial Sequence: Synthetic oligonucleotide
acuaacccauagaggcugu

SEQ ID NO: 1229377 - RNA, 19 nt, Artificial Sequence
  Description of Artificial Sequence: Synthetic oligonucleotide
ccucgcucacugauguccc

SEQ ID NO: 1229378 - RNA, 19 nt, Artificial Sequence
  Description of Artificial Sequence: Synthetic oligonucleotide
uggccgcccggcuguguag

SEQ ID NO: 1229379 - RNA, 19 nt, Artificial Sequence
  Description of Artificial Sequence: Synthetic oligonucleotide
cucccucuggguaccacaa

SEQ ID NO: 1229380 - RNA, 19 nt, Artificial Sequence
  Description of Artificial Sequence: Synthetic oligonucleotide
uccggggugagcgcccagu

SEQ ID NO: 1229381 - RNA, 19 nt, Artificial Sequence
  Description of Artificial Sequence: Synthetic oligonucleotide
gauggugugcaugccucgu

SEQ ID NO: 1229382 - RNA, 19 nt, Artificial Sequence
  Description of Artificial Sequence: Synthetic oligonucleotide
uuguaccaugguggccgcc

SEQ ID NO: 1229383 - RNA, 19 nt, Artificial Sequence
  Description of Artificial Sequence: Synthetic oligonucleotide
acugcgugccauguucauu

SEQ ID NO: 1229384 - RNA, 19 nt, Artificial Sequence
  Description of Artificial Sequence: Synthetic oligonucleotide
gcauugcgguccucacacg

SEQ ID NO: 1229385 - RNA, 19 nt, Artificial Sequence
  Description of Artificial Sequence: Synthetic oligonucleotide
uuccggcuaugaguaguaa

SEQ ID NO: 1229386 - RNA, 19 nt, Artificial Sequence
  Description of Artificial Sequence: Synthetic oligonucleotide
acacuccgguuauuugcuu

SEQ ID NO: 1229387 - RNA, 19 nt, Artificial Sequence
  Description of Artificial Sequence: Synthetic oligonucleotide
cccugcacgcagaauggac

SEQ ID NO: 1229388 - RNA, 19 nt, Artificial Sequence
  Description of Artificial Sequence: Synthetic oligonucleotide
cagcgcagcccugacgcug

SEQ ID NO: 1229389 - RNA, 19 nt, Artificial Sequence
  Description of Artificial Sequence: Synthetic oligonucleotide
cagucggauaucagagucu

SEQ ID NO: 1229390 - RNA, 19 nt, Artificial Sequence
  Description of Artificial Sequence: Synthetic oligonucleotide
uggugcgcuuccgggguga

SEQ ID NO: 1229391 - RNA, 19 nt, Artificial Sequence
  Description of Artificial Sequence: Synthetic oligonucleotide
ggauacugugcaguccauc

SEQ ID NO: 1229392 - RNA, 19 nt, Artificial Sequence
  Description of Artificial Sequence: Synthetic oligonucleotide
cguaccagucggauaucag

SEQ ID NO: 1229393 - RNA, 19 nt, Artificial Sequence
  Description of Artificial Sequence: Synthetic oligonucleotide
cuggcugguggugcgcuuc

SEQ ID NO: 1229394 - RNA, 19 nt, Artificial Sequence
  Description of Artificial Sequence: Synthetic oligonucleotide
ggaguacacguacagccau

SEQ ID NO: 1229395 - RNA, 19 nt, Artificial Sequence
  Description of Artificial Sequence: Synthetic oligonucleotide
gucucagguaguggagcuc

SEQ ID NO: 1229396 - RNA, 19 nt, Artificial Sequence
  Description of Artificial Sequence: Synthetic oligonucleotide
uuccggggugagcgcccag

SEQ ID NO: 1229397 - RNA, 19 nt, Artificial Sequence
  Description of Artificial Sequence: Synthetic oligonucleotide
ccagcguagcacuuuccca

SEQ ID NO: 1229398 - RNA, 19 nt, Artificial Sequence
  Description of Artificial Sequence: Synthetic oligonucleotide
ccauagaggcugucucuuc

SEQ ID NO: 1229399 - RNA, 19 nt, Artificial Sequence
  Description of Artificial Sequence: Synthetic oligonucleotide
ggcuggauauacugcucaa

SEQ ID NO: 1229400 - RNA, 19 nt, Artificial Sequence
  Description of Artificial Sequence: Synthetic oligonucleotide
guggugcgcuuccggggug

SEQ ID NO: 1229401 - RNA, 19 nt, Artificial Sequence
  Description of Artificial Sequence: Synthetic oligonucleotide
guucaauaagcagccucau

SEQ ID NO: 1229402 - RNA, 19 nt, Artificial Sequence
  Description of Artificial Sequence: Synthetic oligonucleotide
cacgcggucucacucugcu

SEQ ID NO: 1229403 - RNA, 19 nt, Artificial Sequence
  Description of Artificial Sequence: Synthetic oligonucleotide
gggguacucuugaggacac

SEQ ID NO: 1229404 - RNA, 19 nt, Artificial Sequence
  Description of Artificial Sequence: Synthetic oligonucleotide
gguggugcgcuuccggggu

SEQ ID NO: 1229405 - RNA, 19 nt, Artificial Sequence
  Description of Artificial Sequence: Synthetic oligonucleotide
gacugcgugccauguucau

SEQ ID NO: 1229406 - RNA, 19 nt, Artificial Sequence
  Description of Artificial Sequence: Synthetic oligonucleotide
ucguaccugugggguacuc

SEQ ID NO: 1229407 - RNA, 19 nt, Artificial Sequence
  Description of Artificial Sequence: Synthetic oligonucleotide
ggucauugacacgcuuguc

SEQ ID NO: 1229408 - RNA, 19 nt, Artificial Sequence
  Description of Artificial Sequence: Synthetic oligonucleotide
cuuggacugcgugccaugu

SEQ ID NO: 1229409 - RNA, 19 nt, Artificial Sequence
  Description of Artificial Sequence: Synthetic oligonucleotide
cagaauggacacuccgguu

SEQ ID NO: 1229410 - RNA, 19 nt, Artificial Sequence
  Description of Artificial Sequence: Synthetic oligonucleotide
cacuccgguuauuugcuuu

SEQ ID NO: 1229411 - RNA, 19 nt, Artificial Sequence
  Description of Artificial Sequence: Synthetic oligonucleotide
ggacugcgugccauguuca

SEQ ID NO: 1229412 - RNA, 19 nt, Artificial Sequence
  Description of Artificial Sequence: Synthetic oligonucleotide
cgaucaccaaaauucccaa

SEQ ID NO: 1229413 - RNA, 19 nt, Artificial Sequence
  Description of Artificial Sequence: Synthetic oligonucleotide
cauguucaauaagcagccu

SEQ ID NO: 1229414 - RNA, 19 nt, Artificial Sequence
  Description of Artificial Sequence: Synthetic oligonucleotide
guggccgcccggcugugua

SEQ ID NO: 1229415 - RNA, 19 nt, Artificial Sequence
  Description of Artificial Sequence: Synthetic oligonucleotide
ccuuauagaaggaguccau

SEQ ID NO: 1229416 - RNA, 19 nt, Artificial Sequence
  Description of Artificial Sequence: Synthetic oligonucleotide
guacacguacagccaucau

SEQ ID NO: 1229417 - RNA, 19 nt, Artificial Sequence
  Description of Artificial Sequence: Synthetic oligonucleotide
cuuuccagcguagcacuuu

SEQ ID NO: 1229418 - RNA, 19 nt, Artificial Sequence
  Description of Artificial Sequence: Synthetic oligonucleotide
gcuuaaugacacccucaau

SEQ ID NO: 1229419 - RNA, 19 nt, Artificial Sequence
  Description of Artificial Sequence: Synthetic oligonucleotide
gggcacaucuagagcuuca

SEQ ID NO: 1229420 - RNA, 19 nt, Artificial Sequence
  Description of Artificial Sequence: Synthetic oligonucleotide
ucccaaugccugggaugau

SEQ ID NO: 1229421 - RNA, 19 nt, Artificial Sequence
  Description of Artificial Sequence: Synthetic oligonucleotide
ccuugggaagucucaggua

SEQ ID NO: 1229422 - RNA, 19 nt, Artificial Sequence
  Description of Artificial Sequence: Synthetic oligonucleotide
gguuggucuggaugaggau

SEQ ID NO: 1229423 - RNA, 19 nt, Artificial Sequence
  Description of Artificial Sequence: Synthetic oligonucleotide
ccggcguagccgccguacc

SEQ ID NO: 1229424 - RNA, 19 nt, Artificial Sequence
  Description of Artificial Sequence: Synthetic oligonucleotide
ccccuguggggucuguaca

SEQ ID NO: 1229425 - RNA, 19 nt, Artificial Sequence
  Description of Artificial Sequence: Synthetic oligonucleotide
ccucuggguaccacaauau

SEQ ID NO: 1229426 - RNA, 19 nt, Artificial Sequence
  Description of Artificial Sequence: Synthetic oligonucleotide
ggugcgcuuccggggugag

SEQ ID NO: 1229427 - RNA, 19 nt, Artificial Sequence
  Description of Artificial Sequence: Synthetic oligonucleotide
ggcuagucuccuugucccu

SEQ ID NO: 1229428 - RNA, 19 nt, Artificial Sequence
  Description of Artificial Sequence: Synthetic oligonucleotide
ccaguucccacugguggga

SEQ ID NO: 1229429 - RNA, 19 nt, Artificial Sequence
  Description of Artificial Sequence: Synthetic oligonucleotide
cguagccgccguaccaguc

SEQ ID NO: 1229430 - RNA, 19 nt, Artificial Sequence
  Description of Artificial Sequence: Synthetic oligonucleotide
ggugagcgcccaguuccca

SEQ ID NO: 1229431 - RNA, 19 nt, Artificial Sequence
  Description of Artificial Sequence: Synthetic oligonucleotide
guuguacaaucaggucaau

SEQ ID NO: 1229432 - RNA, 19 nt, Artificial Sequence
  Description of Artificial Sequence: Synthetic oligonucleotide
gccugggaugauacggaaa

SEQ ID NO: 1229433 - RNA, 19 nt, Artificial Sequence
  Description of Artificial Sequence: Synthetic oligonucleotide
ccguaccagucggauauca

SEQ ID NO: 1229434 - RNA, 19 nt, Artificial Sequence
  Description of Artificial Sequence: Synthetic oligonucleotide
ucccggcguagccgccgua

SEQ ID NO: 1229435 - RNA, 19 nt, Artificial Sequence
  Description of Artificial Sequence: Synthetic oligonucleotide
gugcgaagcagggguggcu

SEQ ID NO: 1229436 - RNA, 19 nt, Artificial Sequence
  Description of Artificial Sequence: Synthetic oligonucleotide
cccugacgcugaguucacg

SEQ ID NO: 1229437 - RNA, 19 nt, Artificial Sequence
  Description of Artificial Sequence: Synthetic oligonucleotide
cccggcguagccgccguac

SEQ ID NO: 1229438 - RNA, 19 nt, Artificial Sequence
  Description of Artificial Sequence: Synthetic oligonucleotide
gggauagcaagaagaucuu

SEQ ID NO: 1229439 - RNA, 19 nt, Artificial Sequence
  Description of Artificial Sequence: Synthetic oligonucleotide
cgccguaccagucggauau

SEQ ID NO: 1229440 - RNA, 19 nt, Artificial Sequence
  Description of Artificial Sequence: Synthetic oligonucleotide
cgaagcagggguggcucug

SEQ ID NO: 1229441 - RNA, 19 nt, Artificial Sequence
  Description of Artificial Sequence: Synthetic oligonucleotide
cguuugcuugugcgaagca

SEQ ID NO: 1229442 - RNA, 19 nt, Artificial Sequence
  Description of Artificial Sequence: Synthetic oligonucleotide
cccaaugccugggaugaua

SEQ ID NO: 1229443 - RNA, 19 nt, Artificial Sequence
  Description of Artificial Sequence: Synthetic oligonucleotide
gcgcccaguucccacuggu

SEQ ID NO: 1229444 - RNA, 19 nt, Artificial Sequence
  Description of Artificial Sequence: Synthetic oligonucleotide
gcgaagcagggguggcucu

SEQ ID NO: 1229445 - RNA, 19 nt, Artificial Sequence
  Description of Artificial Sequence: Synthetic oligonucleotide
ggccgcccggcuguguaga

SEQ ID NO: 1229446 - RNA, 19 nt, Artificial Sequence
  Description of Artificial Sequence: Synthetic oligonucleotide
cggggugagcgcccaguuc

SEQ ID NO: 1229447 - RNA, 19 nt, Artificial Sequence
  Description of Artificial Sequence: Synthetic oligonucleotide
cguagcacuuucccacgua

SEQ ID NO: 1229448 - RNA, 19 nt, Artificial Sequence
  Description of Artificial Sequence: Synthetic oligonucleotide
gccguaccagucggauauc

SEQ ID NO: 1229449 - RNA, 19 nt, Artificial Sequence
  Description of Artificial Sequence: Synthetic oligonucleotide
gcccugacgcugaguucac

SEQ ID NO: 1229450 - RNA, 19 nt, Artificial Sequence
  Description of Artificial Sequence: Synthetic oligonucleotide
gcguagccgccguaccagu

SEQ ID NO: 1229451 - RNA, 19 nt, Artificial Sequence
  Description of Artificial Sequence: Synthetic oligonucleotide
cccacguaguccugccccu

SEQ ID NO: 1229452 - RNA, 19 nt, Artificial Sequence
  Description of Artificial Sequence: Synthetic oligonucleotide
ccgcccggcuguguagaug

SEQ ID NO: 1229453 - RNA, 19 nt, Artificial Sequence
  Description of Artificial Sequence: Synthetic oligonucleotide
cucguaccugugggguacu

SEQ ID NO: 1229454 - RNA, 19 nt, Artificial Sequence
  Description of Artificial Sequence: Synthetic oligonucleotide
ccucacacgcggucucacu

SEQ ID NO: 1229455 - RNA, 19 nt, Artificial Sequence
  Description of Artificial Sequence: Synthetic oligonucleotide
cccauagaggcugucucuu

SEQ ID NO: 1229456 - RNA, 19 nt, Artificial Sequence
  Description of Artificial Sequence: Synthetic oligonucleotide
cggcuaugaguaguaaagu

SEQ ID NO: 1229457 - RNA, 19 nt, Artificial Sequence
  Description of Artificial Sequence: Synthetic oligonucleotide
cggcguagccgccguacca

SEQ ID NO: 1229458 - RNA, 19 nt, Artificial Sequence
  Description of Artificial Sequence: Synthetic oligonucleotide
gccgccguaccagucggau

SEQ ID NO: 1229459 - RNA, 19 nt, Artificial Sequence
  Description of Artificial Sequence: Synthetic oligonucleotide
ccccugcacgcagaaugga

SEQ ID NO: 1229460 - RNA, 19 nt, Artificial Sequence
  Description of Artificial Sequence: Synthetic oligonucleotide
ccgccguaccagucggaua

SEQ ID NO: 1229461 - RNA, 19 nt, Artificial Sequence
  Description of Artificial Sequence: Synthetic oligonucleotide
gcuuuccagcguagcacuu

SEQ ID NO: 1229462 - RNA, 19 nt, Artificial Sequence
  Description of Artificial Sequence: Synthetic oligonucleotide
cguaccugugggguacucu

SEQ ID NO: 1229463 - RNA, 19 nt, Artificial Sequence
  Description of Artificial Sequence: Synthetic oligonucleotide
cacgcagcgcaggcuccau

SEQ ID NO: 1229464 - RNA, 19 nt, Artificial Sequence
  Description of Artificial Sequence: Synthetic oligonucleotide
gccgcccggcuguguagau

SEQ ID NO: 1229465 - RNA, 19 nt, Artificial Sequence
  Description of Artificial Sequence: Synthetic oligonucleotide
ccggggugagcgcccaguu

SEQ ID NO: 1229466 - RNA, 19 nt, Artificial Sequence
  Description of Artificial Sequence: Synthetic oligonucleotide
gcccggcuguguagauggu

SEQ ID NO: 1229467 - RNA, 19 nt, Artificial Sequence
  Description of Artificial Sequence: Synthetic oligonucleotide
cgcagcccugacgcugagu

SEQ ID NO: 1229468 - RNA, 19 nt, Artificial Sequence
  Description of Artificial Sequence: Synthetic oligonucleotide
aauacauccauuucagauc

SEQ ID NO: 1229469 - RNA, 19 nt, Artificial Sequence
  Description of Artificial Sequence: Synthetic oligonucleotide
aaaucgagauauuuaauag

SEQ ID NO: 1229470 - RNA, 19 nt, Artificial Sequence
  Description of Artificial Sequence: Synthetic oligonucleotide
uuaucuaucagucaucaca

SEQ ID NO: 1229471 - RNA, 19 nt, Artificial Sequence
  Description of Artificial Sequence: Synthetic oligonucleotide
ugugcgacaagucagcugg

SEQ ID NO: 1229472 - RNA, 19 nt, Artificial Sequence
  Description of Artificial Sequence: Synthetic oligonucleotide
uagaaaacuggauagcugg

SEQ ID NO: 1229473 - RNA, 19 nt, Artificial Sequence
  Description of Artificial Sequence: Synthetic oligonucleotide
auaaacagcaggcaccucc

SEQ ID NO: 1229474 - RNA, 19 nt, Artificial Sequence
  Description of Artificial Sequence: Synthetic oligonucleotide
auacauccauuucagaucc

SEQ ID NO: 1229475 - RNA, 19 nt, Artificial Sequence
  Description of Artificial Sequence: Synthetic oligonucleotide
aguuacauggauccggccc

SEQ ID NO: 1229476 - RNA, 19 nt, Artificial Sequence
  Description of Artificial Sequence: Synthetic oligonucleotide
uucccuaacaccgacaugg

SEQ ID NO: 1229477 - RNA, 19 nt, Artificial Sequence
  Description of Artificial Sequence: Synthetic oligonucleotide
uuaucaauguccauguugu

SEQ ID NO: 1229478 - RNA, 19 nt, Artificial Sequence
  Description of Artificial Sequence: Synthetic oligonucleotide
uuauuuguucucaagagaa

SEQ ID NO: 1229479 - RNA, 19 nt, Artificial Sequence
  Description of Artificial Sequence: Synthetic oligonucleotide
cuaaggacgaggaaaagcc

SEQ ID NO: 1229480 - RNA, 19 nt, Artificial Sequence
  Description of Artificial Sequence: Synthetic oligonucleotide
aacucgaugguugacaggg

SEQ ID NO: 1229481 - RNA, 19 nt, Artificial Sequence
  Description of Artificial Sequence: Synthetic oligonucleotide
aaaacgacuuuucugccag

SEQ ID NO: 1229482 - RNA, 19 nt, Artificial Sequence
  Description of Artificial Sequence: Synthetic oligonucleotide
ucugaauauaaauguaugc

SEQ ID NO: 1229483 - RNA, 19 nt, Artificial Sequence
  Description of Artificial Sequence: Synthetic oligonucleotide
ugugcuauuacagcuaagg

SEQ ID NO: 1229484 - RNA, 19 nt, Artificial Sequence
  Description of Artificial Sequence: Synthetic oligonucleotide
auuaaaucgagauauuuaa

SEQ ID NO: 1229485 - RNA, 19 nt, Artificial Sequence
  Description of Artificial Sequence: Synthetic oligonucleotide
uaauagacagugcaaacca

SEQ ID NO: 1229486 - RNA, 19 nt, Artificial Sequence
  Description of Artificial Sequence: Synthetic oligonucleotide
guuagcguaguccagaagc

SEQ ID NO: 1229487 - RNA, 19 nt, Artificial Sequence
  Description of Artificial Sequence: Synthetic oligonucleotide
aaaucagaugugcuauuac

SEQ ID NO: 1229488 - RNA, 19 nt, Artificial Sequence
  Description of Artificial Sequence: Synthetic oligonucleotide
ucucauaucgcuucuuccg

SEQ ID NO: 1229489 - RNA, 19 nt, Artificial Sequence
  Description of Artificial Sequence: Synthetic oligonucleotide
aguggaacuguuucgggcc

SEQ ID NO: 1229490 - RNA, 19 nt, Artificial Sequence
  Description of Artificial Sequence: Synthetic oligonucleotide
aauagcuguggaaaucucc

SEQ ID NO: 1229491 - RNA, 19 nt, Artificial Sequence
  Description of Artificial Sequence: Synthetic oligonucleotide
agauccguggcacaacucc

SEQ ID NO: 1229492 - RNA, 19 nt, Artificial Sequence
  Description of Artificial Sequence: Synthetic oligonucleotide
aaucagaugugcuauuaca

SEQ ID NO: 1229493 - RNA, 19 nt, Artificial Sequence
  Description of Artificial Sequence: Synthetic oligonucleotide
gaucguuucaacugcaagc

SEQ ID NO: 1229494 - RNA, 19 nt, Artificial Sequence
  Description of Artificial Sequence: Synthetic oligonucleotide
aaucgagauauuuaauaga

SEQ ID NO: 1229495 - RNA, 19 nt, Artificial Sequence
  Description of Artificial Sequence: Synthetic oligonucleotide
ugaguuaucuaucagucau

SEQ ID NO: 1229496 - RNA, 19 nt, Artificial Sequence
  Description of Artificial Sequence: Synthetic oligonucleotide
uuaauucuaacaaucuuau

SEQ ID NO: 1229497 - RNA, 19 nt, Artificial Sequence
  Description of Artificial Sequence: Synthetic oligonucleotide
uuacuuagcaucuccuccg

SEQ ID NO: 1229498 - RNA, 19 nt, Artificial Sequence
  Description of Artificial Sequence: Synthetic oligonucleotide
uaaaucgagauauuuaaua

SEQ ID NO: 1229499 - RNA, 19 nt, Artificial Sequence
  Description of Artificial Sequence: Synthetic oligonucleotide
ugcuauuacagcuaaggac

SEQ ID NO: 1229500 - RNA, 19 nt, Artificial Sequence
  Description of Artificial Sequence: Synthetic oligonucleotide
ucuaucagucaucacaaac

SEQ ID NO: 1229501 - RNA, 19 nt, Artificial Sequence
  Description of Artificial Sequence: Synthetic oligonucleotide
ucuugaggaaaccaaaauc

SEQ ID NO: 1229502 - RNA, 19 nt, Artificial Sequence
  Description of Artificial Sequence: Synthetic oligonucleotide
gcuauuacagcuaaggacg

SEQ ID NO: 1229503 - RNA, 19 nt, Artificial Sequence
  Description of Artificial Sequence: Synthetic oligonucleotide
gauagcugggauuuaauuc

SEQ ID NO: 1229504 - RNA, 19 nt, Artificial Sequence
  Description of Artificial Sequence: Synthetic oligonucleotide
uggauuugcaaauacaguu

SEQ ID NO: 1229505 - RNA, 19 nt, Artificial Sequence
  Description of Artificial Sequence: Synthetic oligonucleotide
guuggauuugcaaauacag

SEQ ID NO: 1229506 - RNA, 19 nt, Artificial Sequence
  Description of Artificial Sequence: Synthetic oligonucleotide
aacugcaagcggccgaccc

SEQ ID NO: 1229507 - RNA, 19 nt, Artificial Sequence
  Description of Artificial Sequence: Synthetic oligonucleotide
acgucuuacagagaugugc

SEQ ID NO: 1229508 - RNA, 19 nt, Artificial Sequence
  Description of Artificial Sequence: Synthetic oligonucleotide
uuagagcuauguuagaaaa

SEQ ID NO: 1229509 - RNA, 19 nt, Artificial Sequence
  Description of Artificial Sequence: Synthetic oligonucleotide
uauuuaauagacagugcaa

SEQ ID NO: 1229510 - RNA, 19 nt, Artificial Sequence
  Description of Artificial Sequence: Synthetic oligonucleotide
aucuuauuuguucucaaga

SEQ ID NO: 1229511 - RNA, 19 nt, Artificial Sequence
  Description of Artificial Sequence: Synthetic oligonucleotide
augguagggcuacagaggg

SEQ ID NO: 1229512 - RNA, 19 nt, Artificial Sequence
  Description of Artificial Sequence: Synthetic oligonucleotide
ugcacauguucucagugag

SEQ ID NO: 1229513 - RNA, 19 nt, Artificial Sequence
  Description of Artificial Sequence: Synthetic oligonucleotide
aaagccuacagguuuggaa

SEQ ID NO: 1229514 - RNA, 19 nt, Artificial Sequence
  Description of Artificial Sequence: Synthetic oligonucleotide
ucagaugugcuauuacagc

SEQ ID NO: 1229515 - RNA, 19 nt, Artificial Sequence
  Description of Artificial Sequence: Synthetic oligonucleotide
uguuggauuugcaaauaca

SEQ ID NO: 1229516 - RNA, 19 nt, Artificial Sequence
  Description of Artificial Sequence: Synthetic oligonucleotide
aguaccauacacgucuuac

SEQ ID NO: 1229517 - RNA, 19 nt, Artificial Sequence
  Description of Artificial Sequence: Synthetic oligonucleotide
auuacagcuaaggacgagg

SEQ ID NO: 1229518 - RNA, 19 nt, Artificial Sequence
  Description of Artificial Sequence: Synthetic oligonucleotide
aaauuaaaucgagauauuu

SEQ ID NO: 1229519 - RNA, 19 nt, Artificial Sequence
  Description of Artificial Sequence: Synthetic oligonucleotide
agcuauguuagaaaacugg

SEQ ID NO: 1229520 - RNA, 19 nt, Artificial Sequence
  Description of Artificial Sequence: Synthetic oligonucleotide
agagcuauguuagaaaacu

SEQ ID NO: 1229521 - RNA, 19 nt, Artificial Sequence
  Description of Artificial Sequence: Synthetic oligonucleotide
aauuaaaucgagauauuua

SEQ ID NO: 1229522 - RNA, 19 nt, Artificial Sequence
  Description of Artificial Sequence: Synthetic oligonucleotide
guacacaggugacagacag

SEQ ID NO: 1229523 - RNA, 19 nt, Artificial Sequence
  Description of Artificial Sequence: Synthetic oligonucleotide
ugcuaugcgagagugagca

SEQ ID NO: 1229524 - RNA, 19 nt, Artificial Sequence
  Description of Artificial Sequence: Synthetic oligonucleotide
auguuggauuugcaaauac

SEQ ID NO: 1229525 - RNA, 19 nt, Artificial Sequence
  Description of Artificial Sequence: Synthetic oligonucleotide
agugaugcggccuacugcu

SEQ ID NO: 1229526 - RNA, 19 nt, Artificial Sequence
  Description of Artificial Sequence: Synthetic oligonucleotide
gaccuuagagcuauguuag

SEQ ID NO: 1229527 - RNA, 19 nt, Artificial Sequence
  Description of Artificial Sequence: Synthetic oligonucleotide
cuaucagucaucacaaaca

SEQ ID NO: 1229528 - RNA, 19 nt, Artificial Sequence
  Description of Artificial Sequence: Synthetic oligonucleotide
uucagcaguggaguuagcg

SEQ ID NO: 1229529 - RNA, 19 nt, Artificial Sequence
  Description of Artificial Sequence: Synthetic oligonucleotide
cgagauauuuaauagacag

SEQ ID NO: 1229530 - RNA, 19 nt, Artificial Sequence
  Description of Artificial Sequence: Synthetic oligonucleotide
uuggauuugcaaauacagu

SEQ ID NO: 1229531 - RNA, 19 nt, Artificial Sequence
  Description of Artificial Sequence: Synthetic oligonucleotide
gauucagcaguggaguuag

SEQ ID NO: 1229532 - RNA, 19 nt, Artificial Sequence
  Description of Artificial Sequence: Synthetic oligonucleotide
agcucaauguuggauuugc

SEQ ID NO: 1229533 - RNA, 19 nt, Artificial Sequence
  Description of Artificial Sequence: Synthetic oligonucleotide
uucgaguuccuccaacucu

SEQ ID NO: 1229534 - RNA, 19 nt, Artificial Sequence
  Description of Artificial Sequence: Synthetic oligonucleotide
uggcacaacuccaaagacc

SEQ ID NO: 1229535 - RNA, 19 nt, Artificial Sequence
  Description of Artificial Sequence: Synthetic oligonucleotide
ucagugaguuaucuaucag

SEQ ID NO: 1229536 - RNA, 19 nt, Artificial Sequence
  Description of Artificial Sequence: Synthetic oligonucleotide
ucgaguuccuccaacucug

SEQ ID NO: 1229537 - RNA, 19 nt, Artificial Sequence
  Description of Artificial Sequence: Synthetic oligonucleotide
uguuagaaaacuggauagc

SEQ ID NO: 1229538 - RNA, 19 nt, Artificial Sequence
  Description of Artificial Sequence: Synthetic oligonucleotide
cuacagaggggacauuugg

SEQ ID NO: 1229539 - RNA, 19 nt, Artificial Sequence
  Description of Artificial Sequence: Synthetic oligonucleotide
caugcuaugcgagagugag

SEQ ID NO: 1229540 - RNA, 19 nt, Artificial Sequence
  Description of Artificial Sequence: Synthetic oligonucleotide
ucuaacaaucuuauuuguu

SEQ ID NO: 1229541 - RNA, 19 nt, Artificial Sequence
  Description of Artificial Sequence: Synthetic oligonucleotide
uucucauaucgcuucuucc

SEQ ID NO: 1229542 - RNA, 19 nt, Artificial Sequence
  Description of Artificial Sequence: Synthetic oligonucleotide
ugacagguuuggaugguag

SEQ ID NO: 1229543 - RNA, 19 nt, Artificial Sequence
  Description of Artificial Sequence: Synthetic oligonucleotide
gagaugugcgacaagucag

SEQ ID NO: 1229544 - RNA, 19 nt, Artificial Sequence
  Description of Artificial Sequence: Synthetic oligonucleotide
uacauuuccggaucguuuc

SEQ ID NO: 1229545 - RNA, 19 nt, Artificial Sequence
  Description of Artificial Sequence: Synthetic oligonucleotide
uaugcgagagugagcagug

SEQ ID NO: 1229546 - RNA, 19 nt, Artificial Sequence
  Description of Artificial Sequence: Synthetic oligonucleotide
gcaaugaggaccuuagagc

SEQ ID NO: 1229547 - RNA, 19 nt, Artificial Sequence
  Description of Artificial Sequence: Synthetic oligonucleotide
ggaccaguuacauggaucc

SEQ ID NO: 1229548 - RNA, 19 nt, Artificial Sequence
  Description of Artificial Sequence: Synthetic oligonucleotide
ucuuacagagaugugcgac

SEQ ID NO: 1229549 - RNA, 19 nt, Artificial Sequence
  Description of Artificial Sequence: Synthetic oligonucleotide
aaacucuuccccaaagccu

SEQ ID NO: 1229550 - RNA, 19 nt, Artificial Sequence
  Description of Artificial Sequence: Synthetic oligonucleotide
ccauacacgucuuacagag

SEQ ID NO: 1229551 - RNA, 19 nt, Artificial Sequence
  Description of Artificial Sequence: Synthetic oligonucleotide
ucgaugguugacagggugc

SEQ ID NO: 1229552 - RNA, 19 nt, Artificial Sequence
  Description of Artificial Sequence: Synthetic oligonucleotide
cuuauuuguucucaagaga

SEQ ID NO: 1229553 - RNA, 19 nt, Artificial Sequence
  Description of Artificial Sequence: Synthetic oligonucleotide
ucagcaguggaguuagcgu

SEQ ID NO: 1229554 - RNA, 19 nt, Artificial Sequence
  Description of Artificial Sequence: Synthetic oligonucleotide
aguuaucuaucagucauca

SEQ ID NO: 1229555 - RNA, 19 nt, Artificial Sequence
  Description of Artificial Sequence: Synthetic oligonucleotide
accaaaaucagaugugcua

SEQ ID NO: 1229556 - RNA, 19 nt, Artificial Sequence
  Description of Artificial Sequence: Synthetic oligonucleotide
uguucgaguuccuccaacu

SEQ ID NO: 1229557 - RNA, 19 nt, Artificial Sequence
  Description of Artificial Sequence: Synthetic oligonucleotide
acacgucuuacagagaugu

SEQ ID NO: 1229558 - RNA, 19 nt, Artificial Sequence
  Description of Artificial Sequence: Synthetic oligonucleotide
agaugugcgacaagucagc

SEQ ID NO: 1229559 - RNA, 19 nt, Artificial Sequence
  Description of Artificial Sequence: Synthetic oligonucleotide
gagagcugagcgauggagg

SEQ ID NO: 1229560 - RNA, 19 nt, Artificial Sequence
  Description of Artificial Sequence: Synthetic oligonucleotide
acgacuuuucugccaguac

SEQ ID NO: 1229561 - RNA, 19 nt, Artificial Sequence
  Description of Artificial Sequence: Synthetic oligonucleotide
aacuggauagcugggauuu

SEQ ID NO: 1229562 - RNA, 19 nt, Artificial Sequence
  Description of Artificial Sequence: Synthetic oligonucleotide
agcuguggaaaucuccucu

SEQ ID NO: 1229563 - RNA, 19 nt, Artificial Sequence
  Description of Artificial Sequence: Synthetic oligonucleotide
gugguaaacacaggguggg

SEQ ID NO: 1229564 - RNA, 19 nt, Artificial Sequence
  Description of Artificial Sequence: Synthetic oligonucleotide
ucguuucaacugcaagcgg

SEQ ID NO: 1229565 - RNA, 19 nt, Artificial Sequence
  Description of Artificial Sequence: Synthetic oligonucleotide
auggauccggcccaguucu

SEQ ID NO: 1229566 - RNA, 19 nt, Artificial Sequence
  Description of Artificial Sequence: Synthetic oligonucleotide
gacagugcaaaccauaauu

SEQ ID NO: 1229567 - RNA, 19 nt, Artificial Sequence
  Description of Artificial Sequence: Synthetic oligonucleotide
acaaucuuauuuguucuca

SEQ ID NO: 1229568 - RNA, 19 nt, Artificial Sequence
  Description of Artificial Sequence: Synthetic oligonucleotide
uaaggacgaggaaaagccu

SEQ ID NO: 1229569 - RNA, 19 nt, Artificial Sequence
  Description of Artificial Sequence: Synthetic oligonucleotide
ucaagagaauacauccauu

SEQ ID NO: 1229570 - RNA, 19 nt, Artificial Sequence
  Description of Artificial Sequence: Synthetic oligonucleotide
ucucagugaguuaucuauc

SEQ ID NO: 1229571 - RNA, 19 nt, Artificial Sequence
  Description of Artificial Sequence: Synthetic oligonucleotide
acagcaaugaggaccuuag

SEQ ID NO: 1229572 - RNA, 19 nt, Artificial Sequence
  Description of Artificial Sequence: Synthetic oligonucleotide
auagcuguggaaaucuccu

SEQ ID NO: 1229573 - RNA, 19 nt, Artificial Sequence
  Description of Artificial Sequence: Synthetic oligonucleotide
uguucucagugaguuaucu

SEQ ID NO: 1229574 - RNA, 19 nt, Artificial Sequence
  Description of Artificial Sequence: Synthetic oligonucleotide
gaugugcuauuacagcuaa

SEQ ID NO: 1229575 - RNA, 19 nt, Artificial Sequence
  Description of Artificial Sequence: Synthetic oligonucleotide
auaucgcuucuuccguuuc

SEQ ID NO: 1229576 - RNA, 19 nt, Artificial Sequence
  Description of Artificial Sequence: Synthetic oligonucleotide
agaaaacuggauagcuggg

SEQ ID NO: 1229577 - RNA, 19 nt, Artificial Sequence
  Description of Artificial Sequence: Synthetic oligonucleotide
uggaguuagcguaguccag

SEQ ID NO: 1229578 - RNA, 19 nt, Artificial Sequence
  Description of Artificial Sequence: Synthetic oligonucleotide
gaacucgaugguugacagg

SEQ ID NO: 1229579 - RNA, 19 nt, Artificial Sequence
  Description of Artificial Sequence: Synthetic oligonucleotide
gggugguaaacacagggug

SEQ ID NO: 1229580 - RNA, 19 nt, Artificial Sequence
  Description of Artificial Sequence: Synthetic oligonucleotide
uggaacucgaugguugaca

SEQ ID NO: 1229581 - RNA, 19 nt, Artificial Sequence
  Description of Artificial Sequence: Synthetic oligonucleotide
uuucaacugcaagcggccg

SEQ ID NO: 1229582 - RNA, 19 nt, Artificial Sequence
  Description of Artificial Sequence: Synthetic oligonucleotide
gagagugagcagugaugcg

SEQ ID NO: 1229583 - RNA, 19 nt, Artificial Sequence
  Description of Artificial Sequence: Synthetic oligonucleotide
aaagccuaucuauggcuuu

SEQ ID NO: 1229584 - RNA, 19 nt, Artificial Sequence
  Description of Artificial Sequence: Synthetic oligonucleotide
ggugguaaacacagggugg

SEQ ID NO: 1229585 - RNA, 19 nt, Artificial Sequence
  Description of Artificial Sequence: Synthetic oligonucleotide
aaaagccuaucuauggcuu

SEQ ID NO: 1229586 - RNA, 19 nt, Artificial Sequence
  Description of Artificial Sequence: Synthetic oligonucleotide
cucagugaguuaucuauca

SEQ ID NO: 1229587 - RNA, 19 nt, Artificial Sequence
  Description of Artificial Sequence: Synthetic oligonucleotide
uccuccgugucccgaagcc

SEQ ID NO: 1229588 - RNA, 19 nt, Artificial Sequence
  Description of Artificial Sequence: Synthetic oligonucleotide
ggaacucgaugguugacag

SEQ ID NO: 1229589 - RNA, 19 nt, Artificial Sequence
  Description of Artificial Sequence: Synthetic oligonucleotide
caaugaggaccuuagagcu

SEQ ID NO: 1229590 - RNA, 19 nt, Artificial Sequence
  Description of Artificial Sequence: Synthetic oligonucleotide
caugguugcugcucgccgc

SEQ ID NO: 1229591 - RNA, 19 nt, Artificial Sequence
  Description of Artificial Sequence: Synthetic oligonucleotide
guuucaacugcaagcggcc

SEQ ID NO: 1229592 - RNA, 19 nt, Artificial Sequence
  Description of Artificial Sequence: Synthetic oligonucleotide
aacucuuccccaaagccua

SEQ ID NO: 1229593 - RNA, 19 nt, Artificial Sequence
  Description of Artificial Sequence: Synthetic oligonucleotide
acuguuucgggcccacuga

SEQ ID NO: 1229594 - RNA, 19 nt, Artificial Sequence
  Description of Artificial Sequence: Synthetic oligonucleotide
uucgggcccacugaugucc

SEQ ID NO: 1229595 - RNA, 19 nt, Artificial Sequence
  Description of Artificial Sequence: Synthetic oligonucleotide
uauuacagcuaaggacgag

SEQ ID NO: 1229596 - RNA, 19 nt, Artificial Sequence
  Description of Artificial Sequence: Synthetic oligonucleotide
augguugcugcucgccgcg

SEQ ID NO: 1229597 - RNA, 19 nt, Artificial Sequence
  Description of Artificial Sequence: Synthetic oligonucleotide
ggaucguuucaacugcaag

SEQ ID NO: 1229598 - RNA, 19 nt, Artificial Sequence
  Description of Artificial Sequence: Synthetic oligonucleotide
guuagaaaacuggauagcu

SEQ ID NO: 1229599 - RNA, 19 nt, Artificial Sequence
  Description of Artificial Sequence: Synthetic oligonucleotide
aguuagcguaguccagaag

SEQ ID NO: 1229600 - RNA, 19 nt, Artificial Sequence
  Description of Artificial Sequence: Synthetic oligonucleotide
accaugcuaugcgagagug

SEQ ID NO: 1229601 - RNA, 19 nt, Artificial Sequence
  Description of Artificial Sequence: Synthetic oligonucleotide
cuccgugucccgaagccgc

SEQ ID NO: 1229602 - RNA, 19 nt, Artificial Sequence
  Description of Artificial Sequence: Synthetic oligonucleotide
acgaggaaaagccuaucua

SEQ ID NO: 1229603 - RNA, 19 nt, Artificial Sequence
  Description of Artificial Sequence: Synthetic oligonucleotide
uacagagaugugcgacaag

SEQ ID NO: 1229604 - RNA, 19 nt, Artificial Sequence
  Description of Artificial Sequence: Synthetic oligonucleotide
ugcgacaagucagcugggg

SEQ ID NO: 1229605 - RNA, 19 nt, Artificial Sequence
  Description of Artificial Sequence: Synthetic oligonucleotide
ugcaaaccauaauuucauc

SEQ ID NO: 1229606 - RNA, 19 nt, Artificial Sequence
  Description of Artificial Sequence: Synthetic oligonucleotide
uuacagagaugugcgacaa

SEQ ID NO: 1229607 - RNA, 19 nt, Artificial Sequence
  Description of Artificial Sequence: Synthetic oligonucleotide
gaugcggccuacugcuuug

SEQ ID NO: 1229608 - RNA, 19 nt, Artificial Sequence
  Description of Artificial Sequence: Synthetic oligonucleotide
ugguagggcuacagagggg

SEQ ID NO: 1229609 - RNA, 19 nt, Artificial Sequence
  Description of Artificial Sequence: Synthetic oligonucleotide
caaacagcaaugaggaccu

SEQ ID NO: 1229610 - RNA, 19 nt, Artificial Sequence
  Description of Artificial Sequence: Synthetic oligonucleotide
gacuuuucugccaguacca

SEQ ID NO: 1229611 - RNA, 19 nt, Artificial Sequence
  Description of Artificial Sequence: Synthetic oligonucleotide
gagcuauguuagaaaacug

SEQ ID NO: 1229612 - RNA, 19 nt, Artificial Sequence
  Description of Artificial Sequence: Synthetic oligonucleotide
cuguucgaucuucuucucc

SEQ ID NO: 1229613 - RNA, 19 nt, Artificial Sequence
  Description of Artificial Sequence: Synthetic oligonucleotide
guaccauacacgucuuaca

SEQ ID NO: 1229614 - RNA, 19 nt, Artificial Sequence
  Description of Artificial Sequence: Synthetic oligonucleotide
cagugaugcggccuacugc

SEQ ID NO: 1229615 - RNA, 19 nt, Artificial Sequence
  Description of Artificial Sequence: Synthetic oligonucleotide
gacauuugguaguggaacu

SEQ ID NO: 1229616 - RNA, 19 nt, Artificial Sequence
  Description of Artificial Sequence: Synthetic oligonucleotide
uuucagauccguggcacaa

SEQ ID NO: 1229617 - RNA, 19 nt, Artificial Sequence
  Description of Artificial Sequence: Synthetic oligonucleotide
ggaccuuagagcuauguua

SEQ ID NO: 1229618 - RNA, 19 nt, Artificial Sequence
  Description of Artificial Sequence: Synthetic oligonucleotide
uacuuagcaucuccuccgu

SEQ ID NO: 1229619 - RNA, 19 nt, Artificial Sequence
  Description of Artificial Sequence: Synthetic oligonucleotide
ucaacugcaagcggccgac

SEQ ID NO: 1229620 - RNA, 19 nt, Artificial Sequence
  Description of Artificial Sequence: Synthetic oligonucleotide
uuggcagcguagcccaugu

SEQ ID NO: 1229621 - RNA, 19 nt, Artificial Sequence
  Description of Artificial Sequence: Synthetic oligonucleotide
gugcuauuacagcuaagga

SEQ ID NO: 1229622 - RNA, 19 nt, Artificial Sequence
  Description of Artificial Sequence: Synthetic oligonucleotide
gagcgauggaggcugccug

SEQ ID NO: 1229623 - RNA, 19 nt, Artificial Sequence
  Description of Artificial Sequence: Synthetic oligonucleotide
agcugagcgauggaggcug

SEQ ID NO: 1229624 - RNA, 19 nt, Artificial Sequence
  Description of Artificial Sequence: Synthetic oligonucleotide
augugcgacaagucagcug

SEQ ID NO: 1229625 - RNA, 19 nt, Artificial Sequence
  Description of Artificial Sequence: Synthetic oligonucleotide
uacagcuaaggacgaggaa

SEQ ID NO: 1229626 - RNA, 19 nt, Artificial Sequence
  Description of Artificial Sequence: Synthetic oligonucleotide
uggauagcugggauuuaau

SEQ ID NO: 1229627 - RNA, 19 nt, Artificial Sequence
  Description of Artificial Sequence: Synthetic oligonucleotide
ugguaaacacagggugggg

SEQ ID NO: 1229628 - RNA, 19 nt, Artificial Sequence
  Description of Artificial Sequence: Synthetic oligonucleotide
guuuggaugguagggcuac

SEQ ID NO: 1229629 - RNA, 19 nt, Artificial Sequence
  Description of Artificial Sequence: Synthetic oligonucleotide
uguccauguugucgugggc

SEQ ID NO: 1229630 - RNA, 19 nt, Artificial Sequence
  Description of Artificial Sequence: Synthetic oligonucleotide
uggggcuacauuuccggau

SEQ ID NO: 1229631 - RNA, 19 nt, Artificial Sequence
  Description of Artificial Sequence: Synthetic oligonucleotide
cguuucaacugcaagcggc

SEQ ID NO: 1229632 - RNA, 19 nt, Artificial Sequence
  Description of Artificial Sequence: Synthetic oligonucleotide
acagaccaugcuaugcgag

SEQ ID NO: 1229633 - RNA, 19 nt, Artificial Sequence
  Description of Artificial Sequence: Synthetic oligonucleotide
aacgacuuuucugccagua

SEQ ID NO: 1229634 - RNA, 19 nt, Artificial Sequence
  Description of Artificial Sequence: Synthetic oligonucleotide
gacgaggaaaagccuaucu

SEQ ID NO: 1229635 - RNA, 19 nt, Artificial Sequence
  Description of Artificial Sequence: Synthetic oligonucleotide
caagcggccgacccuuucc

SEQ ID NO: 1229636 - RNA, 19 nt, Artificial Sequence
  Description of Artificial Sequence: Synthetic oligonucleotide
cagaugugcuauuacagcu

SEQ ID NO: 1229637 - RNA, 19 nt, Artificial Sequence
  Description of Artificial Sequence: Synthetic oligonucleotide
cauggauccggcccaguuc

SEQ ID NO: 1229638 - RNA, 19 nt, Artificial Sequence
  Description of Artificial Sequence: Synthetic oligonucleotide
ugggugagagcugagcgau

SEQ ID NO: 1229639 - RNA, 19 nt, Artificial Sequence
  Description of Artificial Sequence: Synthetic oligonucleotide
gaugguugacagggugccg

SEQ ID NO: 1229640 - RNA, 19 nt, Artificial Sequence
  Description of Artificial Sequence: Synthetic oligonucleotide
cuauuacagcuaaggacga

SEQ ID NO: 1229641 - RNA, 19 nt, Artificial Sequence
  Description of Artificial Sequence: Synthetic oligonucleotide
caacuccaaagaccagggg

SEQ ID NO: 1229642 - RNA, 19 nt, Artificial Sequence
  Description of Artificial Sequence: Synthetic oligonucleotide
aaacgacuuuucugccagu

SEQ ID NO: 1229643 - RNA, 19 nt, Artificial Sequence
  Description of Artificial Sequence: Synthetic oligonucleotide
aagcggccgacccuuucca

SEQ ID NO: 1229644 - RNA, 19 nt, Artificial Sequence
  Description of Artificial Sequence: Synthetic oligonucleotide
augguugacagggugccgu

SEQ ID NO: 1229645 - RNA, 19 nt, Artificial Sequence
  Description of Artificial Sequence: Synthetic oligonucleotide
ccuaugcuggaccaguuac

SEQ ID NO: 1229646 - RNA, 19 nt, Artificial Sequence
  Description of Artificial Sequence: Synthetic oligonucleotide
cucgucaaacucuucccca

SEQ ID NO: 1229647 - RNA, 19 nt, Artificial Sequence
  Description of Artificial Sequence: Synthetic oligonucleotide
aggaccuuagagcuauguu

SEQ ID NO: 1229648 - RNA, 19 nt, Artificial Sequence
  Description of Artificial Sequence: Synthetic oligonucleotide
auagacagugcaaaccaua

SEQ ID NO: 1229649 - RNA, 19 nt, Artificial Sequence
  Description of Artificial Sequence: Synthetic oligonucleotide
ugaugcggccuacugcuuu

SEQ ID NO: 1229650 - RNA, 19 nt, Artificial Sequence
  Description of Artificial Sequence: Synthetic oligonucleotide
ugcggccuacugcuuuggg

SEQ ID NO: 1229651 - RNA, 19 nt, Artificial Sequence
  Description of Artificial Sequence: Synthetic oligonucleotide
guucgaguuccuccaacuc

SEQ ID NO: 1229652 - RNA, 19 nt, Artificial Sequence
  Description of Artificial Sequence: Synthetic oligonucleotide
ucauaucgcuucuuccguu

SEQ ID NO: 1229653 - RNA, 19 nt, Artificial Sequence
  Description of Artificial Sequence: Synthetic oligonucleotide
gaguuaucuaucagucauc

SEQ ID NO: 1229654 - RNA, 19 nt, Artificial Sequence
  Description of Artificial Sequence: Synthetic oligonucleotide
acaagggccagggugguaa

SEQ ID NO: 1229655 - RNA, 19 nt, Artificial Sequence
  Description of Artificial Sequence: Synthetic oligonucleotide
gacagggugccgucgaucu

SEQ ID NO: 1229656 - RNA, 19 nt, Artificial Sequence
  Description of Artificial Sequence: Synthetic oligonucleotide
ggcagcguagcccauguuc

SEQ ID NO: 1229657 - RNA, 19 nt, Artificial Sequence
  Description of Artificial Sequence: Synthetic oligonucleotide
cuugagcaccucuguguug

SEQ ID NO: 1229658 - RNA, 19 nt, Artificial Sequence
  Description of Artificial Sequence: Synthetic oligonucleotide
ugagcgauggaggcugccu

SEQ ID NO: 1229659 - RNA, 19 nt, Artificial Sequence
  Description of Artificial Sequence: Synthetic oligonucleotide
cagugaguuaucuaucagu

SEQ ID NO: 1229660 - RNA, 19 nt, Artificial Sequence
  Description of Artificial Sequence: Synthetic oligonucleotide
cgacuuuucugccaguacc

SEQ ID NO: 1229661 - RNA, 19 nt, Artificial Sequence
  Description of Artificial Sequence: Synthetic oligonucleotide
caaucuuauuuguucucaa

SEQ ID NO: 1229662 - RNA, 19 nt, Artificial Sequence
  Description of Artificial Sequence: Synthetic oligonucleotide
gaguuagcguaguccagaa

SEQ ID NO: 1229663 - RNA, 19 nt, Artificial Sequence
  Description of Artificial Sequence: Synthetic oligonucleotide
uccuucaugucgucgucuu

SEQ ID NO: 1229664 - RNA, 19 nt, Artificial Sequence
  Description of Artificial Sequence: Synthetic oligonucleotide
guugacagggugccgucga

SEQ ID NO: 1229665 - RNA, 19 nt, Artificial Sequence
  Description of Artificial Sequence: Synthetic oligonucleotide
agccuacagguuuggaaau

SEQ ID NO: 1229666 - RNA, 19 nt, Artificial Sequence
  Description of Artificial Sequence: Synthetic oligonucleotide
caguuacauggauccggcc

SEQ ID NO: 1229667 - RNA, 19 nt, Artificial Sequence
  Description of Artificial Sequence: Synthetic oligonucleotide
gguagggcuacagagggga

SEQ ID NO: 1229668 - RNA, 19 nt, Artificial Sequence
  Description of Artificial Sequence: Synthetic oligonucleotide
agguuuggaaauagcugug

SEQ ID NO: 1229669 - RNA, 19 nt, Artificial Sequence
  Description of Artificial Sequence: Synthetic oligonucleotide
augcuaugcgagagugagc

SEQ ID NO: 1229670 - RNA, 19 nt, Artificial Sequence
  Description of Artificial Sequence: Synthetic oligonucleotide
auggaggauucagcagugg

SEQ ID NO: 1229671 - RNA, 19 nt, Artificial Sequence
  Description of Artificial Sequence: Synthetic oligonucleotide
uagcugggauuuaauucua

SEQ ID NO: 1229672 - RNA, 19 nt, Artificial Sequence
  Description of Artificial Sequence: Synthetic oligonucleotide
gaagccgcuggauggccuc

SEQ ID NO: 1229673 - RNA, 19 nt, Artificial Sequence
  Description of Artificial Sequence: Synthetic oligonucleotide
agcguagcccauguucuug

SEQ ID NO: 1229674 - RNA, 19 nt, Artificial Sequence
  Description of Artificial Sequence: Synthetic oligonucleotide
uccguggcacaacuccaaa

SEQ ID NO: 1229675 - RNA, 19 nt, Artificial Sequence
  Description of Artificial Sequence: Synthetic oligonucleotide
agggugguaaacacagggu

SEQ ID NO: 1229676 - RNA, 19 nt, Artificial Sequence
  Description of Artificial Sequence: Synthetic oligonucleotide
cuacugcuuugggugagag

SEQ ID NO: 1229677 - RNA, 19 nt, Artificial Sequence
  Description of Artificial Sequence: Synthetic oligonucleotide
accuuagagcuauguuaga

SEQ ID NO: 1229678 - RNA, 19 nt, Artificial Sequence
  Description of Artificial Sequence: Synthetic oligonucleotide
uguugucgugggcagccuu

SEQ ID NO: 1229679 - RNA, 19 nt, Artificial Sequence
  Description of Artificial Sequence: Synthetic oligonucleotide
gauccguggcacaacucca

SEQ ID NO: 1229680 - RNA, 19 nt, Artificial Sequence
  Description of Artificial Sequence: Synthetic oligonucleotide
cuccccgcagccucaggcc

SEQ ID NO: 1229681 - RNA, 19 nt, Artificial Sequence
  Description of Artificial Sequence: Synthetic oligonucleotide
cagaccaugcuaugcgaga

SEQ ID NO: 1229682 - RNA, 19 nt, Artificial Sequence
  Description of Artificial Sequence: Synthetic oligonucleotide
cugcccgucgcacaggcca

SEQ ID NO: 1229683 - RNA, 19 nt, Artificial Sequence
  Description of Artificial Sequence: Synthetic oligonucleotide
gucgcacaggccaccagag

SEQ ID NO: 1229684 - RNA, 19 nt, Artificial Sequence
  Description of Artificial Sequence: Synthetic oligonucleotide
cugccaguaccauacacgu

SEQ ID NO: 1229685 - RNA, 19 nt, Artificial Sequence
  Description of Artificial Sequence: Synthetic oligonucleotide
agcuaaggacgaggaaaag

SEQ ID NO: 1229686 - RNA, 19 nt, Artificial Sequence
  Description of Artificial Sequence: Synthetic oligonucleotide
caauguccauguugucgug

SEQ ID NO: 1229687 - RNA, 19 nt, Artificial Sequence
  Description of Artificial Sequence: Synthetic oligonucleotide
gauccggcccaguucucca

SEQ ID NO: 1229688 - RNA, 19 nt, Artificial Sequence
  Description of Artificial Sequence: Synthetic oligonucleotide
ugccaguaccauacacguc

SEQ ID NO: 1229689 - RNA, 19 nt, Artificial Sequence
  Description of Artificial Sequence: Synthetic oligonucleotide
agaugugcuauuacagcua

SEQ ID NO: 1229690 - RNA, 19 nt, Artificial Sequence
  Description of Artificial Sequence: Synthetic oligonucleotide
uucaugucgucgucuucuu

SEQ ID NO: 1229691 - RNA, 19 nt, Artificial Sequence
  Description of Artificial Sequence: Synthetic oligonucleotide
gcgacaagucagcuggggc

SEQ ID NO: 1229692 - RNA, 19 nt, Artificial Sequence
  Description of Artificial Sequence: Synthetic oligonucleotide
cacgucuuacagagaugug

SEQ ID NO: 1229693 - RNA, 19 nt, Artificial Sequence
  Description of Artificial Sequence: Synthetic oligonucleotide
acauguucucagugaguua

SEQ ID NO: 1229694 - RNA, 19 nt, Artificial Sequence
  Description of Artificial Sequence: Synthetic oligonucleotide
ggggcuacauuuccggauc

SEQ ID NO: 1229695 - RNA, 19 nt, Artificial Sequence
  Description of Artificial Sequence: Synthetic oligonucleotide
gcagugaugcggccuacug

SEQ ID NO: 1229696 - RNA, 19 nt, Artificial Sequence
  Description of Artificial Sequence: Synthetic oligonucleotide
gggcuacauuuccggaucg

SEQ ID NO: 1229697 - RNA, 19 nt, Artificial Sequence
  Description of Artificial Sequence: Synthetic oligonucleotide
ggaguuagcguaguccaga

SEQ ID NO: 1229698 - RNA, 19 nt, Artificial Sequence
  Description of Artificial Sequence: Synthetic oligonucleotide
ccgacccuuuccauggagg

SEQ ID NO: 1229699 - RNA, 19 nt, Artificial Sequence
  Description of Artificial Sequence: Synthetic oligonucleotide
cuaugcgagagugagcagu

SEQ ID NO: 1229700 - RNA, 19 nt, Artificial Sequence
  Description of Artificial Sequence: Synthetic oligonucleotide
acuuuucugccaguaccau

SEQ ID NO: 1229701 - RNA, 19 nt, Artificial Sequence
  Description of Artificial Sequence: Synthetic oligonucleotide
uugcugcucgccgcgccgg

SEQ ID NO: 1229702 - RNA, 19 nt, Artificial Sequence
  Description of Artificial Sequence: Synthetic oligonucleotide
uuucgggcccacugauguc

SEQ ID NO: 1229703 - RNA, 19 nt, Artificial Sequence
  Description of Artificial Sequence: Synthetic oligonucleotide
ggaaaucuccucugcaagu

SEQ ID NO: 1229704 - RNA, 19 nt, Artificial Sequence
  Description of Artificial Sequence: Synthetic oligonucleotide
aggacgaggaaaagccuau

SEQ ID NO: 1229705 - RNA, 19 nt, Artificial Sequence
  Description of Artificial Sequence: Synthetic oligonucleotide
acagcuucccuaacaccga

SEQ ID NO: 1229706 - RNA, 19 nt, Artificial Sequence
  Description of Artificial Sequence: Synthetic oligonucleotide
cucuugaggaaaccaaaau

SEQ ID NO: 1229707 - RNA, 19 nt, Artificial Sequence
  Description of Artificial Sequence: Synthetic oligonucleotide
ugaggaccuuagagcuaug

SEQ ID NO: 1229708 - RNA, 19 nt, Artificial Sequence
  Description of Artificial Sequence: Synthetic oligonucleotide
cuugucuagcuccuccugu

SEQ ID NO: 1229709 - RNA, 19 nt, Artificial Sequence
  Description of Artificial Sequence: Synthetic oligonucleotide
gcccuugcuccccuuaccc

SEQ ID NO: 1229710 - RNA, 19 nt, Artificial Sequence
  Description of Artificial Sequence: Synthetic oligonucleotide
cucauaucgcuucuuccgu

SEQ ID NO: 1229711 - RNA, 19 nt, Artificial Sequence
  Description of Artificial Sequence: Synthetic oligonucleotide
auuugguaguggaacuguu

SEQ ID NO: 1229712 - RNA, 19 nt, Artificial Sequence
  Description of Artificial Sequence: Synthetic oligonucleotide
cagcuucccuaacaccgac

SEQ ID NO: 1229713 - RNA, 19 nt, Artificial Sequence
  Description of Artificial Sequence: Synthetic oligonucleotide
aucuccuccgugucccgaa

SEQ ID NO: 1229714 - RNA, 19 nt, Artificial Sequence
  Description of Artificial Sequence: Synthetic oligonucleotide
uggaacuguuucgggccca

SEQ ID NO: 1229715 - RNA, 19 nt, Artificial Sequence
  Description of Artificial Sequence: Synthetic oligonucleotide
ucgggcccacugaugucca

SEQ ID NO: 1229716 - RNA, 19 nt, Artificial Sequence
  Description of Artificial Sequence: Synthetic oligonucleotide
ugcccugcgcacgcacacg

SEQ ID NO: 1229717 - RNA, 19 nt, Artificial Sequence
  Description of Artificial Sequence: Synthetic oligonucleotide
cagauccguggcacaacuc

SEQ ID NO: 1229718 - RNA, 19 nt, Artificial Sequence
  Description of Artificial Sequence: Synthetic oligonucleotide
cuacauuuccggaucguuu

SEQ ID NO: 1229719 - RNA, 19 nt, Artificial Sequence
  Description of Artificial Sequence: Synthetic oligonucleotide
cggccuacugcuuugggug

SEQ ID NO: 1229720 - RNA, 19 nt, Artificial Sequence
  Description of Artificial Sequence: Synthetic oligonucleotide
cagccgucagcuccuguuc

SEQ ID NO: 1229721 - RNA, 19 nt, Artificial Sequence
  Description of Artificial Sequence: Synthetic oligonucleotide
uccggcccaguucuccaau

SEQ ID NO: 1229722 - RNA, 19 nt, Artificial Sequence
  Description of Artificial Sequence: Synthetic oligonucleotide
cugcccugcgcacgcacac

SEQ ID NO: 1229723 - RNA, 19 nt, Artificial Sequence
  Description of Artificial Sequence: Synthetic oligonucleotide
augugcuauuacagcuaag

SEQ ID NO: 1229724 - RNA, 19 nt, Artificial Sequence
  Description of Artificial Sequence: Synthetic oligonucleotide
cuggauagcugggauuuaa

SEQ ID NO: 1229725 - RNA, 19 nt, Artificial Sequence
  Description of Artificial Sequence: Synthetic oligonucleotide
cuggaacucgaugguugac

SEQ ID NO: 1229726 - RNA, 19 nt, Artificial Sequence
  Description of Artificial Sequence: Synthetic oligonucleotide
cugccugcccugcgcacgc

SEQ ID NO: 1229727 - RNA, 19 nt, Artificial Sequence
  Description of Artificial Sequence: Synthetic oligonucleotide
gcgagagugagcagugaug

SEQ ID NO: 1229728 - RNA, 19 nt, Artificial Sequence
  Description of Artificial Sequence: Synthetic oligonucleotide
gcuacagaggggacauuug

SEQ ID NO: 1229729 - RNA, 19 nt, Artificial Sequence
  Description of Artificial Sequence: Synthetic oligonucleotide
gaugugcgacaagucagcu

SEQ ID NO: 1229730 - RNA, 19 nt, Artificial Sequence
  Description of Artificial Sequence: Synthetic oligonucleotide
gaggaccuuagagcuaugu

SEQ ID NO: 1229731 - RNA, 19 nt, Artificial Sequence
  Description of Artificial Sequence: Synthetic oligonucleotide
augcggccuacugcuuugg

SEQ ID NO: 1229732 - RNA, 19 nt, Artificial Sequence
  Description of Artificial Sequence: Synthetic oligonucleotide
caguggaguuagcguaguc

SEQ ID NO: 1229733 - RNA, 19 nt, Artificial Sequence
  Description of Artificial Sequence: Synthetic oligonucleotide
cugcaccgcguccugccug

SEQ ID NO: 1229734 - RNA, 19 nt, Artificial Sequence
  Description of Artificial Sequence: Synthetic oligonucleotide
gaccaugcuaugcgagagu

SEQ ID NO: 1229735 - RNA, 19 nt, Artificial Sequence
  Description of Artificial Sequence: Synthetic oligonucleotide
ggauagcugggauuuaauu

SEQ ID NO: 1229736 - RNA, 19 nt, Artificial Sequence
  Description of Artificial Sequence: Synthetic oligonucleotide
cgcuggaacucgaugguug

SEQ ID NO: 1229737 - RNA, 19 nt, Artificial Sequence
  Description of Artificial Sequence: Synthetic oligonucleotide
ugucgugggcagccuucau

SEQ ID NO: 1229738 - RNA, 19 nt, Artificial Sequence
  Description of Artificial Sequence: Synthetic oligonucleotide
caggcaccucccucccgcc

SEQ ID NO: 1229739 - RNA, 19 nt, Artificial Sequence
  Description of Artificial Sequence: Synthetic oligonucleotide
gcuaugcgagagugagcag

SEQ ID NO: 1229740 - RNA, 19 nt, Artificial Sequence
  Description of Artificial Sequence: Synthetic oligonucleotide
acgcacacgccugcccguc

SEQ ID NO: 1229741 - RNA, 19 nt, Artificial Sequence
  Description of Artificial Sequence: Synthetic oligonucleotide
ccuuagagcuauguuagaa

SEQ ID NO: 1229742 - RNA, 19 nt, Artificial Sequence
  Description of Artificial Sequence: Synthetic oligonucleotide
cauaucgcuucuuccguuu

SEQ ID NO: 1229743 - RNA, 19 nt, Artificial Sequence
  Description of Artificial Sequence: Synthetic oligonucleotide
agggugccgucgaucugcg

SEQ ID NO: 1229744 - RNA, 19 nt, Artificial Sequence
  Description of Artificial Sequence: Synthetic oligonucleotide
agcuucccuaacaccgaca

SEQ ID NO: 1229745 - RNA, 19 nt, Artificial Sequence
  Description of Artificial Sequence: Synthetic oligonucleotide
gugagagcugagcgaugga

SEQ ID NO: 1229746 - RNA, 19 nt, Artificial Sequence
  Description of Artificial Sequence: Synthetic oligonucleotide
gcggccgacccuuuccaug

SEQ ID NO: 1229747 - RNA, 19 nt, Artificial Sequence
  Description of Artificial Sequence: Synthetic oligonucleotide
gugcgacaagucagcuggg

SEQ ID NO: 1229748 - RNA, 19 nt, Artificial Sequence
  Description of Artificial Sequence: Synthetic oligonucleotide
cagcaaugaggaccuuaga

SEQ ID NO: 1229749 - RNA, 19 nt, Artificial Sequence
  Description of Artificial Sequence: Synthetic oligonucleotide
gcucuugaggaaaccaaaa

SEQ ID NO: 1229750 - RNA, 19 nt, Artificial Sequence
  Description of Artificial Sequence: Synthetic oligonucleotide
gccgacccuuuccauggag

SEQ ID NO: 1229751 - RNA, 19 nt, Artificial Sequence
  Description of Artificial Sequence: Synthetic oligonucleotide
cagucccgaacagcuuccc

SEQ ID NO: 1229752 - RNA, 19 nt, Artificial Sequence
  Description of Artificial Sequence: Synthetic oligonucleotide
uacauggauccggcccagu

SEQ ID NO: 1229753 - RNA, 19 nt, Artificial Sequence
  Description of Artificial Sequence: Synthetic oligonucleotide
auccguggcacaacuccaa

SEQ ID NO: 1229754 - RNA, 19 nt, Artificial Sequence
  Description of Artificial Sequence: Synthetic oligonucleotide
guagggcuacagaggggac

SEQ ID NO: 1229755 - RNA, 19 nt, Artificial Sequence
  Description of Artificial Sequence: Synthetic oligonucleotide
gggacauuugguaguggaa

SEQ ID NO: 1229756 - RNA, 19 nt, Artificial Sequence
  Description of Artificial Sequence: Synthetic oligonucleotide
caaagccuacagguuugga

SEQ ID NO: 1229757 - RNA, 19 nt, Artificial Sequence
  Description of Artificial Sequence: Synthetic oligonucleotide
augcgagagugagcaguga

SEQ ID NO: 1229758 - RNA, 19 nt, Artificial Sequence
  Description of Artificial Sequence: Synthetic oligonucleotide
cgaggaaaagccuaucuau

SEQ ID NO: 1229759 - RNA, 19 nt, Artificial Sequence
  Description of Artificial Sequence: Synthetic oligonucleotide
agccuaucuauggcuuuua

SEQ ID NO: 1229760 - RNA, 19 nt, Artificial Sequence
  Description of Artificial Sequence: Synthetic oligonucleotide
ggccuacugcuuuggguga

SEQ ID NO: 1229761 - RNA, 19 nt, Artificial Sequence
  Description of Artificial Sequence: Synthetic oligonucleotide
auguugucgugggcagccu

SEQ ID NO: 1229762 - RNA, 19 nt, Artificial Sequence
  Description of Artificial Sequence: Synthetic oligonucleotide
agcggccgacccuuuccau

SEQ ID NO: 1229763 - RNA, 19 nt, Artificial Sequence
  Description of Artificial Sequence: Synthetic oligonucleotide
ccuccgugucccgaagccg

SEQ ID NO: 1229764 - RNA, 19 nt, Artificial Sequence
  Description of Artificial Sequence: Synthetic oligonucleotide
gcacacgccugcccgucgc

SEQ ID NO: 1229765 - RNA, 19 nt, Artificial Sequence
  Description of Artificial Sequence: Synthetic oligonucleotide
ggaacuguuucgggcccac

SEQ ID NO: 1229766 - RNA, 19 nt, Artificial Sequence
  Description of Artificial Sequence: Synthetic oligonucleotide
gcagcguagcccauguucu

SEQ ID NO: 1229767 - RNA, 19 nt, Artificial Sequence
  Description of Artificial Sequence: Synthetic oligonucleotide
gagcagugaugcggccuac

SEQ ID NO: 1229768 - RNA, 19 nt, Artificial Sequence
  Description of Artificial Sequence: Synthetic oligonucleotide
ugcaagcggccgacccuuu

SEQ ID NO: 1229769 - RNA, 19 nt, Artificial Sequence
  Description of Artificial Sequence: Synthetic oligonucleotide
ccugccugcccugcgcacg

SEQ ID NO: 1229770 - RNA, 19 nt, Artificial Sequence
  Description of Artificial Sequence: Synthetic oligonucleotide
gccuacugcuuugggugag

SEQ ID NO: 1229771 - RNA, 19 nt, Artificial Sequence
  Description of Artificial Sequence: Synthetic oligonucleotide
uggcagcguagcccauguu

SEQ ID NO: 1229772 - RNA, 19 nt, Artificial Sequence
  Description of Artificial Sequence: Synthetic oligonucleotide
ggggagcaggagugacaag

SEQ ID NO: 1229773 - RNA, 19 nt, Artificial Sequence
  Description of Artificial Sequence: Synthetic oligonucleotide
ggacgaggaaaagccuauc

SEQ ID NO: 1229774 - RNA, 19 nt, Artificial Sequence
  Description of Artificial Sequence: Synthetic oligonucleotide
gguuuggaugguagggcua

SEQ ID NO: 1229775 - RNA, 19 nt, Artificial Sequence
  Description of Artificial Sequence: Synthetic oligonucleotide
caguaccauacacgucuua

SEQ ID NO: 1229776 - RNA, 19 nt, Artificial Sequence
  Description of Artificial Sequence: Synthetic oligonucleotide
caucuccuccgugucccga

SEQ ID NO: 1229777 - RNA, 19 nt, Artificial Sequence
  Description of Artificial Sequence: Synthetic oligonucleotide
cucgccgcgccggccuccg

SEQ ID NO: 1229778 - RNA, 19 nt, Artificial Sequence
  Description of Artificial Sequence: Synthetic oligonucleotide
ggcuacagaggggacauuu

SEQ ID NO: 1229779 - RNA, 19 nt, Artificial Sequence
  Description of Artificial Sequence: Synthetic oligonucleotide
gcggccuacugcuuugggu

SEQ ID NO: 1229780 - RNA, 19 nt, Artificial Sequence
  Description of Artificial Sequence: Synthetic oligonucleotide
gcaagcggccgacccuuuc

SEQ ID NO: 1229781 - RNA, 19 nt, Artificial Sequence
  Description of Artificial Sequence: Synthetic oligonucleotide
cacacgccugcccgucgca

SEQ ID NO: 1229782 - RNA, 19 nt, Artificial Sequence
  Description of Artificial Sequence: Synthetic oligonucleotide
cgucgcacaggccaccaga

SEQ ID NO: 1229783 - RNA, 19 nt, Artificial Sequence
  Description of Artificial Sequence: Synthetic oligonucleotide
cccgccccugggcacagac

SEQ ID NO: 1229784 - RNA, 19 nt, Artificial Sequence
  Description of Artificial Sequence: Synthetic oligonucleotide
gcgauggaggcugccugca

SEQ ID NO: 1229785 - RNA, 19 nt, Artificial Sequence
  Description of Artificial Sequence: Synthetic oligonucleotide
ggggucgggccgcccuugc

SEQ ID NO: 1229786 - RNA, 19 nt, Artificial Sequence
  Description of Artificial Sequence: Synthetic oligonucleotide
cccgcagccucaggccucg

SEQ ID NO: 1229787 - RNA, 19 nt, Artificial Sequence
  Description of Artificial Sequence: Synthetic oligonucleotide
ccugcccgucgcacaggcc

SEQ ID NO: 1229788 - RNA, 19 nt, Artificial Sequence
  Description of Artificial Sequence: Synthetic oligonucleotide
cgcccuugcuccccuuacc

SEQ ID NO: 1229789 - RNA, 19 nt, Artificial Sequence
  Description of Artificial Sequence: Synthetic oligonucleotide
ccgcccuugcuccccuuac

SEQ ID NO: 1229790 - RNA, 19 nt, Artificial Sequence
  Description of Artificial Sequence: Synthetic oligonucleotide
cggcccaguucuccaauuc

SEQ ID NO: 1229791 - RNA, 19 nt, Artificial Sequence
  Description of Artificial Sequence: Synthetic oligonucleotide
ggcuacauuuccggaucgu

SEQ ID NO: 1229792 - RNA, 19 nt, Artificial Sequence
  Description of Artificial Sequence: Synthetic oligonucleotide
gggugccgucgaucugcgc

SEQ ID NO: 1229793 - RNA, 19 nt, Artificial Sequence
  Description of Artificial Sequence: Synthetic oligonucleotide
cugcaagcggccgacccuu

SEQ ID NO: 1229794 - RNA, 19 nt, Artificial Sequence
  Description of Artificial Sequence: Synthetic oligonucleotide
ccugcgcacgcacacgccu

SEQ ID NO: 1229795 - RNA, 19 nt, Artificial Sequence
  Description of Artificial Sequence: Synthetic oligonucleotide
cgcacacgccugcccgucg

SEQ ID NO: 1229796 - RNA, 19 nt, Artificial Sequence
  Description of Artificial Sequence: Synthetic oligonucleotide
ccgucgcacaggccaccag

SEQ ID NO: 1229797 - RNA, 19 nt, Artificial Sequence
  Description of Artificial Sequence: Synthetic oligonucleotide
cagcguagcccauguucuu

SEQ ID NO: 1229798 - RNA, 19 nt, Artificial Sequence
  Description of Artificial Sequence: Synthetic oligonucleotide
ccuacugcuuugggugaga

SEQ ID NO: 1229799 - RNA, 19 nt, Artificial Sequence
  Description of Artificial Sequence: Synthetic oligonucleotide
cggaucguuucaacugcaa

SEQ ID NO: 1229800 - RNA, 19 nt, Artificial Sequence
  Description of Artificial Sequence: Synthetic oligonucleotide
gcgcacgcacacgccugcc

SEQ ID NO: 1229801 - RNA, 19 nt, Artificial Sequence
  Description of Artificial Sequence: Synthetic oligonucleotide
gccgcccuugcuccccuua

SEQ ID NO: 1229802 - RNA, 19 nt, Artificial Sequence
  Description of Artificial Sequence: Synthetic oligonucleotide
ccgugucccgaagccgcug

SEQ ID NO: 1229803 - RNA, 19 nt, Artificial Sequence
  Description of Artificial Sequence: Synthetic oligonucleotide
ccgcguccugccugcccug

SEQ ID NO: 1229804 - RNA, 19 nt, Artificial Sequence
  Description of Artificial Sequence: Synthetic oligonucleotide
gugaugcggccuacugcuu

SEQ ID NO: 1229805 - RNA, 19 nt, Artificial Sequence
  Description of Artificial Sequence: Synthetic oligonucleotide
cagggccgcgcgcuuguuu

SEQ ID NO: 1229806 - RNA, 19 nt, Artificial Sequence
  Description of Artificial Sequence: Synthetic oligonucleotide
ccccgccgcuccccgcagc

SEQ ID NO: 1229807 - RNA, 19 nt, Artificial Sequence
  Description of Artificial Sequence: Synthetic oligonucleotide
cccgucgcacaggccacca

SEQ ID NO: 1229808 - RNA, 19 nt, Artificial Sequence
  Description of Artificial Sequence: Synthetic oligonucleotide
ccaccuccgccccgcagcu

SEQ ID NO: 1229809 - RNA, 19 nt, Artificial Sequence
  Description of Artificial Sequence: Synthetic oligonucleotide
ccgucagcuccuguucgau

SEQ ID NO: 1229810 - RNA, 19 nt, Artificial Sequence
  Description of Artificial Sequence: Synthetic oligonucleotide
ccggcccaguucuccaauu

SEQ ID NO: 1229811 - RNA, 19 nt, Artificial Sequence
  Description of Artificial Sequence: Synthetic oligonucleotide
ccgcccgccccugggcaca

SEQ ID NO: 1229812 - RNA, 19 nt, Artificial Sequence
  Description of Artificial Sequence: Synthetic oligonucleotide
ccgcuggaacucgaugguu

SEQ ID NO: 1229813 - RNA, 19 nt, Artificial Sequence
  Description of Artificial Sequence: Synthetic oligonucleotide
ccgcagccucaggccucgc

SEQ ID NO: 1229814 - RNA, 19 nt, Artificial Sequence
  Description of Artificial Sequence: Synthetic oligonucleotide
aaacauagagcguuaugcc

SEQ ID NO: 1229815 - RNA, 19 nt, Artificial Sequence
  Description of Artificial Sequence: Synthetic oligonucleotide
aacauagagcguuaugccc

SEQ ID NO: 1229816 - RNA, 19 nt, Artificial Sequence
  Description of Artificial Sequence: Synthetic oligonucleotide
  modified_base (4)..(4): a, c, u, g, unknown or other
uuunacaucaucuacuguc

SEQ ID NO: 1229817 - RNA, 19 nt, Artificial Sequence
  Description of Artificial Sequence: Synthetic oligonucleotide
aauagcaagcaugugagac

SEQ ID NO: 1229818 - RNA, 19 nt, Artificial Sequence
  Description of Artificial Sequence: Synthetic oligonucleotide
uguuacauugauuccaagg

SEQ ID NO: 1229819 - RNA, 19 nt, Artificial Sequence
  Description of Artificial Sequence: Synthetic oligonucleotide
aaagacuauguccucuccc

SEQ ID NO: 1229820 - RNA, 19 nt, Artificial Sequence
  Description of Artificial Sequence: Synthetic oligonucleotide
uucaacuccagucuguagg

SEQ ID NO: 1229821 - RNA, 19 nt, Artificial Sequence
  Description of Artificial Sequence: Synthetic oligonucleotide
cucccaaucacuaacaggc

SEQ ID NO: 1229822 - RNA, 19 nt, Artificial Sequence
  Description of Artificial Sequence: Synthetic oligonucleotide
aagcaugugagacugguug

SEQ ID NO: 1229823 - RNA, 19 nt, Artificial Sequence
  Description of Artificial Sequence: Synthetic oligonucleotide
gaaguggugaccaaaacag

SEQ ID NO: 1229824 - RNA, 19 nt, Artificial Sequence
  Description of Artificial Sequence: Synthetic oligonucleotide
aauagaauagaguuugauu

SEQ ID NO: 1229825 - RNA, 19 nt, Artificial Sequence
  Description of Artificial Sequence: Synthetic oligonucleotide
aaaacuguuggugaccuuc

SEQ ID NO: 1229826 - RNA, 19 nt, Artificial Sequence
  Description of Artificial Sequence: Synthetic oligonucleotide
aagacauaaugaauaaaac

SEQ ID NO: 1229827 - RNA, 19 nt, Artificial Sequence
  Description of Artificial Sequence: Synthetic oligonucleotide
uugguuacacaccaggugc

SEQ ID NO: 1229828 - RNA, 19 nt, Artificial Sequence
  Description of Artificial Sequence: Synthetic oligonucleotide
uuugagaucacagaacagc

SEQ ID NO: 1229829 - RNA, 19 nt, Artificial Sequence
  Description of Artificial Sequence: Synthetic oligonucleotide
aaaagacuauguccucucc

SEQ ID NO: 1229830 - RNA, 19 nt, Artificial Sequence
  Description of Artificial Sequence: Synthetic oligonucleotide
auagaguuugauuugagau

SEQ ID NO: 1229831 - RNA, 19 nt, Artificial Sequence
  Description of Artificial Sequence: Synthetic oligonucleotide
  modified_base (8)..(8): a, c, u, g, unknown or other
agucuuunacaucaucuac

SEQ ID NO: 1229832 - RNA, 19 nt, Artificial Sequence
  Description of Artificial Sequence: Synthetic oligonucleotide
gaugcugggcguuagggcg

SEQ ID NO: 1229833 - RNA, 19 nt, Artificial Sequence
  Description of Artificial Sequence: Synthetic oligonucleotide
aauagaguuugauuugaga

SEQ ID NO: 1229834 - RNA, 19 nt, Artificial Sequence
  Description of Artificial Sequence: Synthetic oligonucleotide
gacaggaccgcgcagaucc

SEQ ID NO: 1229835 - RNA, 19 nt, Artificial Sequence
  Description of Artificial Sequence: Synthetic oligonucleotide
uuugauuugagaucacaga

SEQ ID NO: 1229836 - RNA, 19 nt, Artificial Sequence
  Description of Artificial Sequence: Synthetic oligonucleotide
  modified_base (6)..(6): a, c, u, g, unknown or other
ucuuunacaucaucuacug

SEQ ID NO: 1229837 - RNA, 19 nt, Artificial Sequence
  Description of Artificial Sequence: Synthetic oligonucleotide
  modified_base (3)..(3): a, c, u, g, unknown or other
uunacaucaucuacuguca

SEQ ID NO: 1229838 - RNA, 19 nt, Artificial Sequence
  Description of Artificial Sequence: Synthetic oligonucleotide
auagggacgguauucacag

SEQ ID NO: 1229839 - RNA, 19 nt, Artificial Sequence
  Description of Artificial Sequence: Synthetic oligonucleotide
  modified_base (16)..(16): a, c, u, g, unknown or other
auugcucuagucuuunaca

SEQ ID NO: 1229840 - RNA, 19 nt, Artificial Sequence
  Description of Artificial Sequence: Synthetic oligonucleotide
cauacuuacagggaaacag

SEQ ID NO: 1229841 - RNA, 19 nt, Artificial Sequence
  Description of Artificial Sequence: Synthetic oligonucleotide
gucaauagaauagaguuug

SEQ ID NO: 1229842 - RNA, 19 nt, Artificial Sequence
  Description of Artificial Sequence: Synthetic oligonucleotide
gaagagcgagguuagcucg

SEQ ID NO: 1229843 - RNA, 19 nt, Artificial Sequence
  Description of Artificial Sequence: Synthetic oligonucleotide
caggaagucaauagaauag

SEQ ID NO: 1229844 - RNA, 19 nt, Artificial Sequence
  Description of Artificial Sequence: Synthetic oligonucleotide
aagacuauguccucucccu

SEQ ID NO: 1229845 - RNA, 19 nt, Artificial Sequence
  Description of Artificial Sequence: Synthetic oligonucleotide
uuaaacauagagcguuaug

SEQ ID NO: 1229846 - RNA, 19 nt, Artificial Sequence
  Description of Artificial Sequence: Synthetic oligonucleotide
uucaugauagcugaagcca

SEQ ID NO: 1229847 - RNA, 19 nt, Artificial Sequence
  Description of Artificial Sequence: Synthetic oligonucleotide
ugauuugagaucacagaac

SEQ ID NO: 1229848 - RNA, 19 nt, Artificial Sequence
  Description of Artificial Sequence: Synthetic oligonucleotide
auugguuacacaccaggug

SEQ ID NO: 1229849 - RNA, 19 nt, Artificial Sequence
  Description of Artificial Sequence: Synthetic oligonucleotide
agaguuugauuugagauca

SEQ ID NO: 1229850 - RNA, 19 nt, Artificial Sequence
  Description of Artificial Sequence: Synthetic oligonucleotide
guggugauacucuuguggg

SEQ ID NO: 1229851 - RNA, 19 nt, Artificial Sequence
  Description of Artificial Sequence: Synthetic oligonucleotide
cugguuguaaaguuuuccc

SEQ ID NO: 1229852 - RNA, 19 nt, Artificial Sequence
  Description of Artificial Sequence: Synthetic oligonucleotide
aacagaacugccgaggcca

SEQ ID NO: 1229853 - RNA, 19 nt, Artificial Sequence
  Description of Artificial Sequence: Synthetic oligonucleotide
  modified_base (17)..(17): a, c, u, g, unknown or other
uauugcucuagucuuunac

SEQ ID NO: 1229854 - RNA, 19 nt, Artificial Sequence
  Description of Artificial Sequence: Synthetic oligonucleotide
gaaacagaacugccgaggc

SEQ ID NO: 1229855 - RNA, 19 nt, Artificial Sequence
  Description of Artificial Sequence: Synthetic oligonucleotide
guucaugauagcugaagcc

SEQ ID NO: 1229856 - RNA, 19 nt, Artificial Sequence
  Description of Artificial Sequence: Synthetic oligonucleotide
auuauccgcaaagagaugu

SEQ ID NO: 1229857 - RNA, 19 nt, Artificial Sequence
  Description of Artificial Sequence: Synthetic oligonucleotide
gacgugggaagacauaaug

SEQ ID NO: 1229858 - RNA, 19 nt, Artificial Sequence
  Description of Artificial Sequence: Synthetic oligonucleotide
uagaguuugauuugagauc

SEQ ID NO: 1229859 - RNA, 19 nt, Artificial Sequence
  Description of Artificial Sequence: Synthetic oligonucleotide
ucccauuauccgcaaagag

SEQ ID NO: 1229860 - RNA, 19 nt, Artificial Sequence
  Description of Artificial Sequence: Synthetic oligonucleotide
caagguucccauuauccgc

SEQ ID NO: 1229861 - RNA, 19 nt, Artificial Sequence
  Description of Artificial Sequence: Synthetic oligonucleotide
aacaacuuuauuaaacaua

SEQ ID NO: 1229862 - RNA, 19 nt, Artificial Sequence
  Description of Artificial Sequence: Synthetic oligonucleotide
agcguuaugcccaaauaac

SEQ ID NO: 1229863 - RNA, 19 nt, Artificial Sequence
  Description of Artificial Sequence: Synthetic oligonucleotide
uguaugguggagagucagg

SEQ ID NO: 1229864 - RNA, 19 nt, Artificial Sequence
  Description of Artificial Sequence: Synthetic oligonucleotide
uguaaaguuuucccaacua

SEQ ID NO: 1229865 - RNA, 19 nt, Artificial Sequence
  Description of Artificial Sequence: Synthetic oligonucleotide
aacgccacggcgcccaguc

SEQ ID NO: 1229866 - RNA, 19 nt, Artificial Sequence
  Description of Artificial Sequence: Synthetic oligonucleotide
cuuacagggaaacagaacu

SEQ ID NO: 1229867 - RNA, 19 nt, Artificial Sequence
  Description of Artificial Sequence: Synthetic oligonucleotide
cacaccaucgugaauggac

SEQ ID NO: 1229868 - RNA, 19 nt, Artificial Sequence
  Description of Artificial Sequence: Synthetic oligonucleotide
ugcaagguuuguuagcgcu

SEQ ID NO: 1229869 - RNA, 19 nt, Artificial Sequence
  Description of Artificial Sequence: Synthetic oligonucleotide
uuguaaaguuuucccaacu

SEQ ID NO: 1229870 - RNA, 19 nt, Artificial Sequence
  Description of Artificial Sequence: Synthetic oligonucleotide
ucaugauagcugaagccac

SEQ ID NO: 1229871 - RNA, 19 nt, Artificial Sequence
  Description of Artificial Sequence: Synthetic oligonucleotide
acauugauuccaagguucc

SEQ ID NO: 1229872 - RNA, 19 nt, Artificial Sequence
  Description of Artificial Sequence: Synthetic oligonucleotide
agguuuaugaaagacuccu

SEQ ID NO: 1229873 - RNA, 19 nt, Artificial Sequence
  Description of Artificial Sequence: Synthetic oligonucleotide
uuacacaccaggugcccgg

SEQ ID NO: 1229874 - RNA, 19 nt, Artificial Sequence
  Description of Artificial Sequence: Synthetic oligonucleotide
agcauacuuacagggaaac

SEQ ID NO: 1229875 - RNA, 19 nt, Artificial Sequence
  Description of Artificial Sequence: Synthetic oligonucleotide
aacaggccaacccauuuau

SEQ ID NO: 1229876 - RNA, 19 nt, Artificial Sequence
  Description of Artificial Sequence: Synthetic oligonucleotide
uggugaccaaaacaggacu

SEQ ID NO: 1229877 - RNA, 19 nt, Artificial Sequence
  Description of Artificial Sequence: Synthetic oligonucleotide
aggaauagggacgguauuc

SEQ ID NO: 1229878 - RNA, 19 nt, Artificial Sequence
  Description of Artificial Sequence: Synthetic oligonucleotide
ucgugaauggaccggggug

SEQ ID NO: 1229879 - RNA, 19 nt, Artificial Sequence
  Description of Artificial Sequence: Synthetic oligonucleotide
acccauuuaucacagucca

SEQ ID NO: 1229880 - RNA, 19 nt, Artificial Sequence
  Description of Artificial Sequence: Synthetic oligonucleotide
aauagggacgguauucaca

SEQ ID NO: 1229881 - RNA, 19 nt, Artificial Sequence
  Description of Artificial Sequence: Synthetic oligonucleotide
aggccaacccauuuaucac

SEQ ID NO: 1229882 - RNA, 19 nt, Artificial Sequence
  Description of Artificial Sequence: Synthetic oligonucleotide
auagcaagcaugugagacu

SEQ ID NO: 1229883 - RNA, 19 nt, Artificial Sequence
  Description of Artificial Sequence: Synthetic oligonucleotide
  modified_base (9)..(9): a, c, u, g, unknown or other
uagucuuunacaucaucua

SEQ ID NO: 1229884 - RNA, 19 nt, Artificial Sequence
  Description of Artificial Sequence: Synthetic oligonucleotide
cuucucaaguaccagcaug

SEQ ID NO: 1229885 - RNA, 19 nt, Artificial Sequence
  Description of Artificial Sequence: Synthetic oligonucleotide
uuacauugauuccaagguu

SEQ ID NO: 1229886 - RNA, 19 nt, Artificial Sequence
  Description of Artificial Sequence: Synthetic oligonucleotide
guuagggcgccccugcacg

SEQ ID NO: 1229887 - RNA, 19 nt, Artificial Sequence
  Description of Artificial Sequence: Synthetic oligonucleotide
  modified_base (11)..(11): a, c, u, g, unknown or other
ucuagucuuunacaucauc

SEQ ID NO: 1229888 - RNA, 19 nt, Artificial Sequence
  Description of Artificial Sequence: Synthetic oligonucleotide
agcgugcggggucugaggc

SEQ ID NO: 1229889 - RNA, 19 nt, Artificial Sequence
  Description of Artificial Sequence: Synthetic oligonucleotide
uugcgggugccaaugagga

SEQ ID NO: 1229890 - RNA, 19 nt, Artificial Sequence
  Description of Artificial Sequence: Synthetic oligonucleotide
gugaacuuuguuucaucag

SEQ ID NO: 1229891 - RNA, 19 nt, Artificial Sequence
  Description of Artificial Sequence: Synthetic oligonucleotide
uuaaaauagcaagcaugug

SEQ ID NO: 1229892 - RNA, 19 nt, Artificial Sequence
  Description of Artificial Sequence: Synthetic oligonucleotide
ucccaggucagucuccgcc

SEQ ID NO: 1229893 - RNA, 19 nt, Artificial Sequence
  Description of Artificial Sequence: Synthetic oligonucleotide
uagcaagcaugugagacug

SEQ ID NO: 1229894 - RNA, 19 nt, Artificial Sequence
  Description of Artificial Sequence: Synthetic oligonucleotide
uuauccgcaaagagaugug

SEQ ID NO: 1229895 - RNA, 19 nt, Artificial Sequence
  Description of Artificial Sequence: Synthetic oligonucleotide
ugcacguugggcagcagcu

SEQ ID NO: 1229896 - RNA, 19 nt, Artificial Sequence
  Description of Artificial Sequence: Synthetic oligonucleotide
agaauagaguuugauuuga

SEQ ID NO: 1229897 - RNA, 19 nt, Artificial Sequence
  Description of Artificial Sequence: Synthetic oligonucleotide
gcauugguuacacaccagg

SEQ ID NO: 1229898 - RNA, 19 nt, Artificial Sequence
  Description of Artificial Sequence: Synthetic oligonucleotide
guagcauacuuacagggaa

SEQ ID NO: 1229899 - RNA, 19 nt, Artificial Sequence
  Description of Artificial Sequence: Synthetic oligonucleotide
  modified_base (14)..(14): a, c, u, g, unknown or other
ugcucuagucuuunacauc

SEQ ID NO: 1229900 - RNA, 19 nt, Artificial Sequence
  Description of Artificial Sequence: Synthetic oligonucleotide
cucaaguaccagcaugaag

SEQ ID NO: 1229901 - RNA, 19 nt, Artificial Sequence
  Description of Artificial Sequence: Synthetic oligonucleotide
gagcguuaugcccaaauaa

SEQ ID NO: 1229902 - RNA, 19 nt, Artificial Sequence
  Description of Artificial Sequence: Synthetic oligonucleotide
uugacgugggaagacauaa

SEQ ID NO: 1229903 - RNA, 19 nt, Artificial Sequence
  Description of Artificial Sequence: Synthetic oligonucleotide
acaugcuuuuaaaauagca

SEQ ID NO: 1229904 - RNA, 19 nt, Artificial Sequence
  Description of Artificial Sequence: Synthetic oligonucleotide
  modified_base (15)..(15): a, c, u, g, unknown or other
uugcucuagucuuunacau

SEQ ID NO: 1229905 - RNA, 19 nt, Artificial Sequence
  Description of Artificial Sequence: Synthetic oligonucleotide
gaauagaguuugauuugag

SEQ ID NO: 1229906 - RNA, 19 nt, Artificial Sequence
  Description of Artificial Sequence: Synthetic oligonucleotide
guggccgacgcuuucgggg

SEQ ID NO: 1229907 - RNA, 19 nt, Artificial Sequence
  Description of Artificial Sequence: Synthetic oligonucleotide
uugcugcaagguuuguuag

SEQ ID NO: 1229908 - RNA, 19 nt, Artificial Sequence
  Description of Artificial Sequence: Synthetic oligonucleotide
ugcaugagaugggacauca

SEQ ID NO: 1229909 - RNA, 19 nt, Artificial Sequence
  Description of Artificial Sequence: Synthetic oligonucleotide
ugagacugguuguaaaguu

SEQ ID NO: 1229910 - RNA, 19 nt, Artificial Sequence
  Description of Artificial Sequence: Synthetic oligonucleotide
augauagcugaagccacac

SEQ ID NO: 1229911 - RNA, 19 nt, Artificial Sequence
  Description of Artificial Sequence: Synthetic oligonucleotide
aauaacuucccagguuuau

SEQ ID NO: 1229912 - RNA, 19 nt, Artificial Sequence
  Description of Artificial Sequence: Synthetic oligonucleotide
caagguuuguuagcgcugg

SEQ ID NO: 1229913 - RNA, 19 nt, Artificial Sequence
  Description of Artificial Sequence: Synthetic oligonucleotide
agggacgguauucacagau

SEQ ID NO: 1229914 - RNA, 19 nt, Artificial Sequence
  Description of Artificial Sequence: Synthetic oligonucleotide
agucuguaggcaaaguucu

SEQ ID NO: 1229915 - RNA, 19 nt, Artificial Sequence
  Description of Artificial Sequence: Synthetic oligonucleotide
agaccgggcacucgaagag

SEQ ID NO: 1229916 - RNA, 19 nt, Artificial Sequence
  Description of Artificial Sequence: Synthetic oligonucleotide
uauccgcaaagagaugugc

SEQ ID NO: 1229917 - RNA, 19 nt, Artificial Sequence
  Description of Artificial Sequence: Synthetic oligonucleotide
aggaagucaauagaauaga

SEQ ID NO: 1229918 - RNA, 19 nt, Artificial Sequence
  Description of Artificial Sequence: Synthetic oligonucleotide
aagguuuguuagcgcuggg

SEQ ID NO: 1229919 - RNA, 19 nt, Artificial Sequence
  Description of Artificial Sequence: Synthetic oligonucleotide
gaggacgggcggcucaucg

SEQ ID NO: 1229920 - RNA, 19 nt, Artificial Sequence
  Description of Artificial Sequence: Synthetic oligonucleotide
guaggcaaaguucucagcu

SEQ ID NO: 1229921 - RNA, 19 nt, Artificial Sequence
  Description of Artificial Sequence: Synthetic oligonucleotide
acauagagcguuaugccca

SEQ ID NO: 1229922 - RNA, 19 nt, Artificial Sequence
  Description of Artificial Sequence: Synthetic oligonucleotide
cagguuuaugaaagacucc

SEQ ID NO: 1229923 - RNA, 19 nt, Artificial Sequence
  Description of Artificial Sequence: Synthetic oligonucleotide
ucgaagagcgagguuagcu

SEQ ID NO: 1229924 - RNA, 19 nt, Artificial Sequence
  Description of Artificial Sequence: Synthetic oligonucleotide
gauacucuugugggcaugc

SEQ ID NO: 1229925 - RNA, 19 nt, Artificial Sequence
  Description of Artificial Sequence: Synthetic oligonucleotide
uccagugaacuuuguuuca

SEQ ID NO: 1229926 - RNA, 19 nt, Artificial Sequence
  Description of Artificial Sequence: Synthetic oligonucleotide
cacaugcuuuuaaaauagc

SEQ ID NO: 1229927 - RNA, 19 nt, Artificial Sequence
  Description of Artificial Sequence: Synthetic oligonucleotide
uggugauacucuugugggc

SEQ ID NO: 1229928 - RNA, 19 nt, Artificial Sequence
  Description of Artificial Sequence: Synthetic oligonucleotide
ugacagcauguagaaauug

SEQ ID NO: 1229929 - RNA, 19 nt, Artificial Sequence
  Description of Artificial Sequence: Synthetic oligonucleotide
agucuacagccccuggcag

SEQ ID NO: 1229930 - RNA, 19 nt, Artificial Sequence
  Description of Artificial Sequence: Synthetic oligonucleotide
uagagcguuaugcccaaau

SEQ ID NO: 1229931 - RNA, 19 nt, Artificial Sequence
  Description of Artificial Sequence: Synthetic oligonucleotide
gaauagggacgguauucac

SEQ ID NO: 1229932 - RNA, 19 nt, Artificial Sequence
  Description of Artificial Sequence: Synthetic oligonucleotide
aguuugauuugagaucaca

SEQ ID NO: 1229933 - RNA, 19 nt, Artificial Sequence
  Description of Artificial Sequence: Synthetic oligonucleotide
auaacuucccagguuuaug

SEQ ID NO: 1229934 - RNA, 19 nt, Artificial Sequence
  Description of Artificial Sequence: Synthetic oligonucleotide
uuguuacauugauuccaag

SEQ ID NO: 1229935 - RNA, 19 nt, Artificial Sequence
  Description of Artificial Sequence: Synthetic oligonucleotide
gaauggaccgggguguggc

SEQ ID NO: 1229936 - RNA, 19 nt, Artificial Sequence
  Description of Artificial Sequence: Synthetic oligonucleotide
agguuuguuagcgcugggg

SEQ ID NO: 1229937 - RNA, 19 nt, Artificial Sequence
  Description of Artificial Sequence: Synthetic oligonucleotide
ggcggcauugguuacacac

SEQ ID NO: 1229938 - RNA, 19 nt, Artificial Sequence
  Description of Artificial Sequence: Synthetic oligonucleotide
  modified_base (2)..(2): a, c, u, g, unknown or other
unacaucaucuacugucaa

SEQ ID NO: 1229939 - RNA, 19 nt, Artificial Sequence
  Description of Artificial Sequence: Synthetic oligonucleotide
uagcauacuuacagggaaa

SEQ ID NO: 1229940 - RNA, 19 nt, Artificial Sequence
  Description of Artificial Sequence: Synthetic oligonucleotide
ucccaaucacuaacaggcc

SEQ ID NO: 1229941 - RNA, 19 nt, Artificial Sequence
  Description of Artificial Sequence: Synthetic oligonucleotide
ccgguuuccauucaacucc

SEQ ID NO: 1229942 - RNA, 19 nt, Artificial Sequence
  Description of Artificial Sequence: Synthetic oligonucleotide
auacuuacagggaaacaga

SEQ ID NO: 1229943 - RNA, 19 nt, Artificial Sequence
  Description of Artificial Sequence: Synthetic oligonucleotide
auacaaaacacaggacagu

SEQ ID NO: 1229944 - RNA, 19 nt, Artificial Sequence
  Description of Artificial Sequence: Synthetic oligonucleotide
agcgagguuagcucguggu

SEQ ID NO: 1229945 - RNA, 19 nt, Artificial Sequence
  Description of Artificial Sequence: Synthetic oligonucleotide
cuugcugcaagguuuguua

SEQ ID NO: 1229946 - RNA, 19 nt, Artificial Sequence
  Description of Artificial Sequence: Synthetic oligonucleotide
cugagaucaccgcugccgc

SEQ ID NO: 1229947 - RNA, 19 nt, Artificial Sequence
  Description of Artificial Sequence: Synthetic oligonucleotide
aguagcauacuuacaggga

SEQ ID NO: 1229948 - RNA, 19 nt, Artificial Sequence
  Description of Artificial Sequence: Synthetic oligonucleotide
ggaagucaauagaauagag

SEQ ID NO: 1229949 - RNA, 19 nt, Artificial Sequence
  Description of Artificial Sequence: Synthetic oligonucleotide
auuugagaucacagaacag

SEQ ID NO: 1229950 - RNA, 19 nt, Artificial Sequence
  Description of Artificial Sequence: Synthetic oligonucleotide
aggacgggcggcucaucgc

SEQ ID NO: 1229951 - RNA, 19 nt, Artificial Sequence
  Description of Artificial Sequence: Synthetic oligonucleotide
  modified_base (7)..(7): a, c, u, g, unknown or other
gucuuunacaucaucuacu

SEQ ID NO: 1229952 - RNA, 19 nt, Artificial Sequence
  Description of Artificial Sequence: Synthetic oligonucleotide
ugaccaaaacaggacugca

SEQ ID NO: 1229953 - RNA, 19 nt, Artificial Sequence
  Description of Artificial Sequence: Synthetic oligonucleotide
aucgugaauggaccggggu

SEQ ID NO: 1229954 - RNA, 19 nt, Artificial Sequence
  Description of Artificial Sequence: Synthetic oligonucleotide
caccaucgugaauggaccg

SEQ ID NO: 1229955 - RNA, 19 nt, Artificial Sequence
  Description of Artificial Sequence: Synthetic oligonucleotide
accgcgcagauccucuccg

SEQ ID NO: 1229956 - RNA, 19 nt, Artificial Sequence
  Description of Artificial Sequence: Synthetic oligonucleotide
gugaccaaaacaggacugc

SEQ ID NO: 1229957 - RNA, 19 nt, Artificial Sequence
  Description of Artificial Sequence: Synthetic oligonucleotide
guuagcucguggugcugcg

SEQ ID NO: 1229958 - RNA, 19 nt, Artificial Sequence
  Description of Artificial Sequence: Synthetic oligonucleotide
ucccagguuuaugaaagac

SEQ ID NO: 1229959 - RNA, 19 nt, Artificial Sequence
  Description of Artificial Sequence: Synthetic oligonucleotide
auuaaacauagagcguuau

SEQ ID NO: 1229960 - RNA, 19 nt, Artificial Sequence
  Description of Artificial Sequence: Synthetic oligonucleotide
aguugugggucuugacgug

SEQ ID NO: 1229961 - RNA, 19 nt, Artificial Sequence
  Description of Artificial Sequence: Synthetic oligonucleotide
auaaugaauaaaacaucua

SEQ ID NO: 1229962 - RNA, 19 nt, Artificial Sequence
  Description of Artificial Sequence: Synthetic oligonucleotide
cuguaugguggagagucag

SEQ ID NO: 1229963 - RNA, 19 nt, Artificial Sequence
  Description of Artificial Sequence: Synthetic oligonucleotide
ugcuauggcugugucaaaa

SEQ ID NO: 1229964 - RNA, 19 nt, Artificial Sequence
  Description of Artificial Sequence: Synthetic oligonucleotide
  modified_base (13)..(13): a, c, u, g, unknown or other
gcucuagucuuunacauca

SEQ ID NO: 1229965 - RNA, 19 nt, Artificial Sequence
  Description of Artificial Sequence: Synthetic oligonucleotide
agagcguuaugcccaaaua

SEQ ID NO: 1229966 - RNA, 19 nt, Artificial Sequence
  Description of Artificial Sequence: Synthetic oligonucleotide
ucugccugccgccgcgggg

SEQ ID NO: 1229967 - RNA, 19 nt, Artificial Sequence
  Description of Artificial Sequence: Synthetic oligonucleotide
gaguggccgacgcuuucgg

SEQ ID NO: 1229968 - RNA, 19 nt, Artificial Sequence
  Description of Artificial Sequence: Synthetic oligonucleotide
gacgcuuucggggcucgcg

SEQ ID NO: 1229969 - RNA, 19 nt, Artificial Sequence
  Description of Artificial Sequence: Synthetic oligonucleotide
acuauguccucucccugaa

SEQ ID NO: 1229970 - RNA, 19 nt, Artificial Sequence
  Description of Artificial Sequence: Synthetic oligonucleotide
gaugugcuauggcuguguc

SEQ ID NO: 1229971 - RNA, 19 nt, Artificial Sequence
  Description of Artificial Sequence: Synthetic oligonucleotide
caucgugaauggaccgggg

SEQ ID NO: 1229972 - RNA, 19 nt, Artificial Sequence
  Description of Artificial Sequence: Synthetic oligonucleotide
aacagcccguaguagcaua

SEQ ID NO: 1229973 - RNA, 19 nt, Artificial Sequence
  Description of Artificial Sequence: Synthetic oligonucleotide
cccguaguagcauacuuac

SEQ ID NO: 1229974 - RNA, 19 nt, Artificial Sequence
  Description of Artificial Sequence: Synthetic oligonucleotide
cauugauuccaagguuccc

SEQ ID NO: 1229975 - RNA, 19 nt, Artificial Sequence
  Description of Artificial Sequence: Synthetic oligonucleotide
gcaugcaugagaugggaca

SEQ ID NO: 1229976 - RNA, 19 nt, Artificial Sequence
  Description of Artificial Sequence: Synthetic oligonucleotide
acgugggaagacauaauga

SEQ ID NO: 1229977 - RNA, 19 nt, Artificial Sequence
  Description of Artificial Sequence: Synthetic oligonucleotide
uggugaccuucauacuucu

SEQ ID NO: 1229978 - RNA, 19 nt, Artificial Sequence
  Description of Artificial Sequence: Synthetic oligonucleotide
acagcccguaguagcauac

SEQ ID NO: 1229979 - RNA, 19 nt, Artificial Sequence
  Description of Artificial Sequence: Synthetic oligonucleotide
augugagacugguuguaaa

SEQ ID NO: 1229980 - RNA, 19 nt, Artificial Sequence
  Description of Artificial Sequence: Synthetic oligonucleotide
gagcgagguuagcucgugg

SEQ ID NO: 1229981 - RNA, 19 nt, Artificial Sequence
  Description of Artificial Sequence: Synthetic oligonucleotide
cagccucccaaucacuaac

SEQ ID NO: 1229982 - RNA, 19 nt, Artificial Sequence
  Description of Artificial Sequence: Synthetic oligonucleotide
aaggguggugauacucuug

SEQ ID NO: 1229983 - RNA, 19 nt, Artificial Sequence
  Description of Artificial Sequence: Synthetic oligonucleotide
cagcucaacuucuggcggc

SEQ ID NO: 1229984 - RNA, 19 nt, Artificial Sequence
  Description of Artificial Sequence: Synthetic oligonucleotide
uuagcucguggugcugcgg

SEQ ID NO: 1229985 - RNA, 19 nt, Artificial Sequence
  Description of Artificial Sequence: Synthetic oligonucleotide
gcaggacauagucaaagca

SEQ ID NO: 1229986 - RNA, 19 nt, Artificial Sequence
  Description of Artificial Sequence: Synthetic oligonucleotide
uugcuugcgggugccaaug

SEQ ID NO: 1229987 - RNA, 19 nt, Artificial Sequence
  Description of Artificial Sequence: Synthetic oligonucleotide
aaauaacuucccagguuua

SEQ ID NO: 1229988 - RNA, 19 nt, Artificial Sequence
  Description of Artificial Sequence: Synthetic oligonucleotide
ggugaccaaaacaggacug

SEQ ID NO: 1229989 - RNA, 19 nt, Artificial Sequence
  Description of Artificial Sequence: Synthetic oligonucleotide
gagcgugcggggucugagg

SEQ ID NO: 1229990 - RNA, 19 nt, Artificial Sequence
  Description of Artificial Sequence: Synthetic oligonucleotide
cagugaacuuuguuucauc

SEQ ID NO: 1229991 - RNA, 19 nt, Artificial Sequence
  Description of Artificial Sequence: Synthetic oligonucleotide
cccauuauccgcaaagaga

SEQ ID NO: 1229992 - RNA, 19 nt, Artificial Sequence
  Description of Artificial Sequence: Synthetic oligonucleotide
ugauacucuugugggcaug

SEQ ID NO: 1229993 - RNA, 19 nt, Artificial Sequence
  Description of Artificial Sequence: Synthetic oligonucleotide
acucgaagagcgagguuag

SEQ ID NO: 1229994 - RNA, 19 nt, Artificial Sequence
  Description of Artificial Sequence: Synthetic oligonucleotide
ugacgugggaagacauaau

SEQ ID NO: 1229995 - RNA, 19 nt, Artificial Sequence
  Description of Artificial Sequence: Synthetic oligonucleotide
cagccgaggaugguggcgg

SEQ ID NO: 1229996 - RNA, 19 nt, Artificial Sequence
  Description of Artificial Sequence: Synthetic oligonucleotide
cacucgaagagcgagguua

SEQ ID NO: 1229997 - RNA, 19 nt, Artificial Sequence
  Description of Artificial Sequence: Synthetic oligonucleotide
caucaucuacugucaagga

SEQ ID NO: 1229998 - RNA, 19 nt, Artificial Sequence
  Description of Artificial Sequence: Synthetic oligonucleotide
  modified_base (19)..(19): a, c, u, g, unknown or other
acuauugcucuagucuuun

SEQ ID NO: 1229999 - RNA, 19 nt, Artificial Sequence
  Description of Artificial Sequence: Synthetic oligonucleotide
gaccgcgcagauccucucc

SEQ ID NO: 1230000 - RNA, 19 nt, Artificial Sequence
  Description of Artificial Sequence: Synthetic oligonucleotide
acggcuuccagggaucccu

SEQ ID NO: 1230001 - RNA, 19 nt, Artificial Sequence
  Description of Artificial Sequence: Synthetic oligonucleotide
uccggggcaacgccacggc

SEQ ID NO: 1230002 - RNA, 19 nt, Artificial Sequence
  Description of Artificial Sequence: Synthetic oligonucleotide
gacgguauucacagauguc

SEQ ID NO: 1230003 - RNA, 19 nt, Artificial Sequence
  Description of Artificial Sequence: Synthetic oligonucleotide
cauugguuacacaccaggu

SEQ ID NO: 1230004 - RNA, 19 nt, Artificial Sequence
  Description of Artificial Sequence: Synthetic oligonucleotide
aagagcgagguuagcucgu

SEQ ID NO: 1230005 - RNA, 19 nt, Artificial Sequence
  Description of Artificial Sequence: Synthetic oligonucleotide
ggaauagggacgguauuca

SEQ ID NO: 1230006 - RNA, 19 nt, Artificial Sequence
  Description of Artificial Sequence: Synthetic oligonucleotide
gcugcuguuuauacaaaac

SEQ ID NO: 1230007 - RNA, 19 nt, Artificial Sequence
  Description of Artificial Sequence: Synthetic oligonucleotide
agggaacagcccguaguag

SEQ ID NO: 1230008 - RNA, 19 nt, Artificial Sequence
  Description of Artificial Sequence: Synthetic oligonucleotide
augcaugagaugggacauc

SEQ ID NO: 1230009 - RNA, 19 nt, Artificial Sequence
  Description of Artificial Sequence: Synthetic oligonucleotide
cuuucggggcucgcggccg

SEQ ID NO: 1230010 - RNA, 19 nt, Artificial Sequence
  Description of Artificial Sequence: Synthetic oligonucleotide
caacuauugcucuagucuu

SEQ ID NO: 1230011 - RNA, 19 nt, Artificial Sequence
  Description of Artificial Sequence: Synthetic oligonucleotide
acagaacugccgaggccac

SEQ ID NO: 1230012 - RNA, 19 nt, Artificial Sequence
  Description of Artificial Sequence: Synthetic oligonucleotide
cucaucgcgcuccgagccc

SEQ ID NO: 1230013 - RNA, 19 nt, Artificial Sequence
  Description of Artificial Sequence: Synthetic oligonucleotide
cagaccgggcacucgaaga

SEQ ID NO: 1230014 - RNA, 19 nt, Artificial Sequence
  Description of Artificial Sequence: Synthetic oligonucleotide
uccgccgguuuccauucaa

SEQ ID NO: 1230015 - RNA, 19 nt, Artificial Sequence
  Description of Artificial Sequence: Synthetic oligonucleotide
ggcaccgcggacgagccgg

SEQ ID NO: 1230016 - RNA, 19 nt, Artificial Sequence
  Description of Artificial Sequence: Synthetic oligonucleotide
gccgguuuccauucaacuc

SEQ ID NO: 1230017 - RNA, 19 nt, Artificial Sequence
  Description of Artificial Sequence: Synthetic oligonucleotide
ucgcgcuccgagcccacca

SEQ ID NO: 1230018 - RNA, 19 nt, Artificial Sequence
  Description of Artificial Sequence: Synthetic oligonucleotide
ccuggcagguuaaugucug

SEQ ID NO: 1230019 - RNA, 19 nt, Artificial Sequence
  Description of Artificial Sequence: Synthetic oligonucleotide
gccacaccaucgugaaugg

SEQ ID NO: 1230020 - RNA, 19 nt, Artificial Sequence
  Description of Artificial Sequence: Synthetic oligonucleotide
ggacgguauucacagaugu

SEQ ID NO: 1230021 - RNA, 19 nt, Artificial Sequence
  Description of Artificial Sequence: Synthetic oligonucleotide
gguuagcucguggugcugc

SEQ ID NO: 1230022 - RNA, 19 nt, Artificial Sequence
  Description of Artificial Sequence: Synthetic oligonucleotide
gucaaggcggugcgcgccc

SEQ ID NO: 1230023 - RNA, 19 nt, Artificial Sequence
  Description of Artificial Sequence: Synthetic oligonucleotide
cacacaacugacacaugcu

SEQ ID NO: 1230024 - RNA, 19 nt, Artificial Sequence
  Description of Artificial Sequence: Synthetic oligonucleotide
accugcgggcgucugccug

SEQ ID NO: 1230025 - RNA, 19 nt, Artificial Sequence
  Description of Artificial Sequence: Synthetic oligonucleotide
cuccagucuguaggcaaag

SEQ ID NO: 1230026 - RNA, 19 nt, Artificial Sequence
  Description of Artificial Sequence: Synthetic oligonucleotide
cuccggggcaacgccacgg

SEQ ID NO: 1230027 - RNA, 19 nt, Artificial Sequence
  Description of Artificial Sequence: Synthetic oligonucleotide
  modified_base (5)..(5): a, c, u, g, unknown or other
cuuunacaucaucuacugu

SEQ ID NO: 1230028 - RNA, 19 nt, Artificial Sequence
  Description of Artificial Sequence: Synthetic oligonucleotide
gaccgggcacucgaagagc

SEQ ID NO: 1230029 - RNA, 19 nt, Artificial Sequence
  Description of Artificial Sequence: Synthetic oligonucleotide
gcgcagauccucuccgcgg

SEQ ID NO: 1230030 - RNA, 19 nt, Artificial Sequence
  Description of Artificial Sequence: Synthetic oligonucleotide
acaucacggcuuccaggga

SEQ ID NO: 1230031 - RNA, 19 nt, Artificial Sequence
  Description of Artificial Sequence: Synthetic oligonucleotide
ccaucgugaauggaccggg

SEQ ID NO: 1230032 - RNA, 19 nt, Artificial Sequence
  Description of Artificial Sequence: Synthetic oligonucleotide
gcggcugcuugcugcaagg

SEQ ID NO: 1230033 - RNA, 19 nt, Artificial Sequence
  Description of Artificial Sequence: Synthetic oligonucleotide
uagggacgguauucacaga

SEQ ID NO: 1230034 - RNA, 19 nt, Artificial Sequence
  Description of Artificial Sequence: Synthetic oligonucleotide
gguuacacaccaggugccc

SEQ ID NO: 1230035 - RNA, 19 nt, Artificial Sequence
  Description of Artificial Sequence: Synthetic oligonucleotide
uuguuucaucagugccaga

SEQ ID NO: 1230036 - RNA, 19 nt, Artificial Sequence
  Description of Artificial Sequence: Synthetic oligonucleotide
ugggcguuagggcgccccu

SEQ ID NO: 1230037 - RNA, 19 nt, Artificial Sequence
  Description of Artificial Sequence: Synthetic oligonucleotide
cauagagcguuaugcccaa

SEQ ID NO: 1230038 - RNA, 19 nt, Artificial Sequence
  Description of Artificial Sequence: Synthetic oligonucleotide
ggaagacauaaugaauaaa

SEQ ID NO: 1230039 - RNA, 19 nt, Artificial Sequence
  Description of Artificial Sequence: Synthetic oligonucleotide
caauagaauagaguuugau

SEQ ID NO: 1230040 - RNA, 19 nt, Artificial Sequence
  Description of Artificial Sequence: Synthetic oligonucleotide
gucuugacgugggaagaca

SEQ ID NO: 1230041 - RNA, 19 nt, Artificial Sequence
  Description of Artificial Sequence: Synthetic oligonucleotide
agagcgagguuagcucgug

SEQ ID NO: 1230042 - RNA, 19 nt, Artificial Sequence
  Description of Artificial Sequence: Synthetic oligonucleotide
cuugacgugggaagacaua

SEQ ID NO: 1230043 - RNA, 19 nt, Artificial Sequence
  Description of Artificial Sequence: Synthetic oligonucleotide
aggacaguugugggucuug

SEQ ID NO: 1230044 - RNA, 19 nt, Artificial Sequence
  Description of Artificial Sequence: Synthetic oligonucleotide
agcucaacuucuggcggca

SEQ ID NO: 1230045 - RNA, 19 nt, Artificial Sequence
  Description of Artificial Sequence: Synthetic oligonucleotide
gcgagguuagcucguggug

SEQ ID NO: 1230046 - RNA, 19 nt, Artificial Sequence
  Description of Artificial Sequence: Synthetic oligonucleotide
gaguuugauuugagaucac

SEQ ID NO: 1230047 - RNA, 19 nt, Artificial Sequence
  Description of Artificial Sequence: Synthetic oligonucleotide
gcaagguuuguuagcgcug

SEQ ID NO: 1230048 - RNA, 19 nt, Artificial Sequence
  Description of Artificial Sequence: Synthetic oligonucleotide
acccgaccggcaccgggag

SEQ ID NO: 1230049 - RNA, 19 nt, Artificial Sequence
  Description of Artificial Sequence: Synthetic oligonucleotide
ggcguuagggcgccccugc

SEQ ID NO: 1230050 - RNA, 19 nt, Artificial Sequence
  Description of Artificial Sequence: Synthetic oligonucleotide
cucguggugcugcggggac

SEQ ID NO: 1230051 - RNA, 19 nt, Artificial Sequence
  Description of Artificial Sequence: Synthetic oligonucleotide
gagacugguuguaaaguuu

SEQ ID NO: 1230052 - RNA, 19 nt, Artificial Sequence
  Description of Artificial Sequence: Synthetic oligonucleotide
gugcugcggggacaccggg

SEQ ID NO: 1230053 - RNA, 19 nt, Artificial Sequence
  Description of Artificial Sequence: Synthetic oligonucleotide
cugccugccgccgcggggc

SEQ ID NO: 1230054 - RNA, 19 nt, Artificial Sequence
  Description of Artificial Sequence: Synthetic oligonucleotide
cacggcgcccaguccgagg

SEQ ID NO: 1230055 - RNA, 19 nt, Artificial Sequence
  Description of Artificial Sequence: Synthetic oligonucleotide
gaaggguggugauacucuu

SEQ ID NO: 1230056 - RNA, 19 nt, Artificial Sequence
  Description of Artificial Sequence: Synthetic oligonucleotide
acuaacaggccaacccauu

SEQ ID NO: 1230057 - RNA, 19 nt, Artificial Sequence
  Description of Artificial Sequence: Synthetic oligonucleotide
cgagguuagcucguggugc

SEQ ID NO: 1230058 - RNA, 19 nt, Artificial Sequence
  Description of Artificial Sequence: Synthetic oligonucleotide
agcaagcaugugagacugg

SEQ ID NO: 1230059 - RNA, 19 nt, Artificial Sequence
  Description of Artificial Sequence: Synthetic oligonucleotide
accggcaccgggagggcgg

SEQ ID NO: 1230060 - RNA, 19 nt, Artificial Sequence
  Description of Artificial Sequence: Synthetic oligonucleotide
gcagaccgggcacucgaag

SEQ ID NO: 1230061 - RNA, 19 nt, Artificial Sequence
  Description of Artificial Sequence: Synthetic oligonucleotide
cucgaagagcgagguuagc

SEQ ID NO: 1230062 - RNA, 19 nt, Artificial Sequence
  Description of Artificial Sequence: Synthetic oligonucleotide
uacugucaaggagggcuuc

SEQ ID NO: 1230063 - RNA, 19 nt, Artificial Sequence
  Description of Artificial Sequence: Synthetic oligonucleotide
gugaauggaccggggugug

SEQ ID NO: 1230064 - RNA, 19 nt, Artificial Sequence
  Description of Artificial Sequence: Synthetic oligonucleotide
caugugagacugguuguaa

SEQ ID NO: 1230065 - RNA, 19 nt, Artificial Sequence
  Description of Artificial Sequence: Synthetic oligonucleotide
acaccgggccggccccgcc

SEQ ID NO: 1230066 - RNA, 19 nt, Artificial Sequence
  Description of Artificial Sequence: Synthetic oligonucleotide
ggggcaacgccacggcgcc

SEQ ID NO: 1230067 - RNA, 19 nt, Artificial Sequence
  Description of Artificial Sequence: Synthetic oligonucleotide
gcggcauugguuacacacc

SEQ ID NO: 1230068 - RNA, 19 nt, Artificial Sequence
  Description of Artificial Sequence: Synthetic oligonucleotide
aucgcgcuccgagcccacc

SEQ ID NO: 1230069 - RNA, 19 nt, Artificial Sequence
  Description of Artificial Sequence: Synthetic oligonucleotide
ggccugagaucaccgcugc

SEQ ID NO: 1230070 - RNA, 19 nt, Artificial Sequence
  Description of Artificial Sequence: Synthetic oligonucleotide
cugggcguuagggcgcccc

SEQ ID NO: 1230071 - RNA, 19 nt, Artificial Sequence
  Description of Artificial Sequence: Synthetic oligonucleotide
gaccggcaccgggagggcg

SEQ ID NO: 1230072 - RNA, 19 nt, Artificial Sequence
  Description of Artificial Sequence: Synthetic oligonucleotide
cccaaucacuaacaggcca

SEQ ID NO: 1230073 - RNA, 19 nt, Artificial Sequence
  Description of Artificial Sequence: Synthetic oligonucleotide
acgggcggcucaucgcgcu

SEQ ID NO: 1230074 - RNA, 19 nt, Artificial Sequence
  Description of Artificial Sequence: Synthetic oligonucleotide
gugggaagacauaaugaau

SEQ ID NO: 1230075 - RNA, 19 nt, Artificial Sequence
  Description of Artificial Sequence: Synthetic oligonucleotide
gcuuucggggcucgcggcc

SEQ ID NO: 1230076 - RNA, 19 nt, Artificial Sequence
  Description of Artificial Sequence: Synthetic oligonucleotide
agccccuggcagguuaaug

SEQ ID NO: 1230077 - RNA, 19 nt, Artificial Sequence
  Description of Artificial Sequence: Synthetic oligonucleotide
gggacgguauucacagaug

SEQ ID NO: 1230078 - RNA, 19 nt, Artificial Sequence
  Description of Artificial Sequence: Synthetic oligonucleotide
gcagauccucuccgcggcg

SEQ ID NO: 1230079 - RNA, 19 nt, Artificial Sequence
  Description of Artificial Sequence: Synthetic oligonucleotide
caaggcggugcgcgccccg

SEQ ID NO: 1230080 - RNA, 19 nt, Artificial Sequence
  Description of Artificial Sequence: Synthetic oligonucleotide
ccgcagccgaggauggugg

SEQ ID NO: 1230081 - RNA, 19 nt, Artificial Sequence
  Description of Artificial Sequence: Synthetic oligonucleotide
ggcauugguuacacaccag

SEQ ID NO: 1230082 - RNA, 19 nt, Artificial Sequence
  Description of Artificial Sequence: Synthetic oligonucleotide
aggaccgcgcagauccucu

SEQ ID NO: 1230083 - RNA, 19 nt, Artificial Sequence
  Description of Artificial Sequence: Synthetic oligonucleotide
gucuguaggcaaaguucuc

SEQ ID NO: 1230084 - RNA, 19 nt, Artificial Sequence
  Description of Artificial Sequence: Synthetic oligonucleotide
gcuccggggccugagauca

SEQ ID NO: 1230085 - RNA, 19 nt, Artificial Sequence
  Description of Artificial Sequence: Synthetic oligonucleotide
gacccgaccggcaccggga

SEQ ID NO: 1230086 - RNA, 19 nt, Artificial Sequence
  Description of Artificial Sequence: Synthetic oligonucleotide
ucaaggcggugcgcgcccc

SEQ ID NO: 1230087 - RNA, 19 nt, Artificial Sequence
  Description of Artificial Sequence: Synthetic oligonucleotide
ccugaugcugggcguuagg

SEQ ID NO: 1230088 - RNA, 19 nt, Artificial Sequence
  Description of Artificial Sequence: Synthetic oligonucleotide
gcagccgaggaugguggcg

SEQ ID NO: 1230089 - RNA, 19 nt, Artificial Sequence
  Description of Artificial Sequence: Synthetic oligonucleotide
ggucaaggcggugcgcgcc

SEQ ID NO: 1230090 - RNA, 19 nt, Artificial Sequence
  Description of Artificial Sequence: Synthetic oligonucleotide
caucacggcuuccagggau

SEQ ID NO: 1230091 - RNA, 19 nt, Artificial Sequence
  Description of Artificial Sequence: Synthetic oligonucleotide
ccaacccacacaacugaca

SEQ ID NO: 1230092 - RNA, 19 nt, Artificial Sequence
  Description of Artificial Sequence: Synthetic oligonucleotide
cacuaacaggccaacccau

SEQ ID NO: 1230093 - RNA, 19 nt, Artificial Sequence
  Description of Artificial Sequence: Synthetic oligonucleotide
caaggagggcuuccaaggu

SEQ ID NO: 1230094 - RNA, 19 nt, Artificial Sequence
  Description of Artificial Sequence: Synthetic oligonucleotide
gacgggcggcucaucgcgc

SEQ ID NO: 1230095 - RNA, 19 nt, Artificial Sequence
  Description of Artificial Sequence: Synthetic oligonucleotide
gcauacuuacagggaaaca

SEQ ID NO: 1230096 - RNA, 19 nt, Artificial Sequence
  Description of Artificial Sequence: Synthetic oligonucleotide
gcguuaugcccaaauaacu

SEQ ID NO: 1230097 - RNA, 19 nt, Artificial Sequence
  Description of Artificial Sequence: Synthetic oligonucleotide
cccaguccgaggaccgggg

SEQ ID NO: 1230098 - RNA, 19 nt, Artificial Sequence
  Description of Artificial Sequence: Synthetic oligonucleotide
agucagggaacagcccgua

SEQ ID NO: 1230099 - RNA, 19 nt, Artificial Sequence
  Description of Artificial Sequence: Synthetic oligonucleotide
agguuagcucguggugcug

SEQ ID NO: 1230100 - RNA, 19 nt, Artificial Sequence
  Description of Artificial Sequence: Synthetic oligonucleotide
uggaggacgggcggcucau

SEQ ID NO: 1230101 - RNA, 19 nt, Artificial Sequence
  Description of Artificial Sequence: Synthetic oligonucleotide
ggagcgugcggggucugag

SEQ ID NO: 1230102 - RNA, 19 nt, Artificial Sequence
  Description of Artificial Sequence: Synthetic oligonucleotide
ccgaggaugguggcggcgg

SEQ ID NO: 1230103 - RNA, 19 nt, Artificial Sequence
  Description of Artificial Sequence: Synthetic oligonucleotide
gcgugcggggucugaggcg

SEQ ID NO: 1230104 - RNA, 19 nt, Artificial Sequence
  Description of Artificial Sequence: Synthetic oligonucleotide
caucagugccagacaggaa

SEQ ID NO: 1230105 - RNA, 19 nt, Artificial Sequence
  Description of Artificial Sequence: Synthetic oligonucleotide
cgcagauccucuccgcggc

SEQ ID NO: 1230106 - RNA, 19 nt, Artificial Sequence
  Description of Artificial Sequence: Synthetic oligonucleotide
ugcuugcugcaagguuugu

SEQ ID NO: 1230107 - RNA, 19 nt, Artificial Sequence
  Description of Artificial Sequence: Synthetic oligonucleotide
gccgcccgggucaaggcgg

SEQ ID NO: 1230108 - RNA, 19 nt, Artificial Sequence
  Description of Artificial Sequence: Synthetic oligonucleotide
cggggcaacgccacggcgc

SEQ ID NO: 1230109 - RNA, 19 nt, Artificial Sequence
  Description of Artificial Sequence: Synthetic oligonucleotide
uggcggcauugguuacaca

SEQ ID NO: 1230110 - RNA, 19 nt, Artificial Sequence
  Description of Artificial Sequence: Synthetic oligonucleotide
gcggguggcgggcuccggg

SEQ ID NO: 1230111 - RNA, 19 nt, Artificial Sequence
  Description of Artificial Sequence: Synthetic oligonucleotide
gggucaaggcggugcgcgc

SEQ ID NO: 1230112 - RNA, 19 nt, Artificial Sequence
  Description of Artificial Sequence: Synthetic oligonucleotide
gcaagcaugugagacuggu

SEQ ID NO: 1230113 - RNA, 19 nt, Artificial Sequence
  Description of Artificial Sequence: Synthetic oligonucleotide
ggcgcccaguccgaggacc

SEQ ID NO: 1230114 - RNA, 19 nt, Artificial Sequence
  Description of Artificial Sequence: Synthetic oligonucleotide
ccggggccugagaucaccg

SEQ ID NO: 1230115 - RNA, 19 nt, Artificial Sequence
  Description of Artificial Sequence: Synthetic oligonucleotide
gcccaguccgaggaccggg

SEQ ID NO: 1230116 - RNA, 19 nt, Artificial Sequence
  Description of Artificial Sequence: Synthetic oligonucleotide
cgccacggcgcccaguccg

SEQ ID NO: 1230117 - RNA, 19 nt, Artificial Sequence
  Description of Artificial Sequence: Synthetic oligonucleotide
ggacaguugugggucuuga

SEQ ID NO: 1230118 - RNA, 19 nt, Artificial Sequence
  Description of Artificial Sequence: Synthetic oligonucleotide
gcggacccgaccggcaccg

SEQ ID NO: 1230119 - RNA, 19 nt, Artificial Sequence
  Description of Artificial Sequence: Synthetic oligonucleotide
gucuccgccgguuuccauu

SEQ ID NO: 1230120 - RNA, 19 nt, Artificial Sequence
  Description of Artificial Sequence: Synthetic oligonucleotide
ggcggcucaucgcgcuccg

SEQ ID NO: 1230121 - RNA, 19 nt, Artificial Sequence
  Description of Artificial Sequence: Synthetic oligonucleotide
cccaaauaacuucccaggu

SEQ ID NO: 1230122 - RNA, 19 nt, Artificial Sequence
  Description of Artificial Sequence: Synthetic oligonucleotide
gcgggcaccgcggacgagc

SEQ ID NO: 1230123 - RNA, 19 nt, Artificial Sequence
  Description of Artificial Sequence: Synthetic oligonucleotide
ggggccugagaucaccgcu

SEQ ID NO: 1230124 - RNA, 19 nt, Artificial Sequence
  Description of Artificial Sequence: Synthetic oligonucleotide
caucgcgcuccgagcccac

SEQ ID NO: 1230125 - RNA, 19 nt, Artificial Sequence
  Description of Artificial Sequence: Synthetic oligonucleotide
gacaccgggccggccccgc

SEQ ID NO: 1230126 - RNA, 19 nt, Artificial Sequence
  Description of Artificial Sequence: Synthetic oligonucleotide
  modified_base (12)..(12): a, c, u, g, unknown or other
cucuagucuuunacaucau

SEQ ID NO: 1230127 - RNA, 19 nt, Artificial Sequence
  Description of Artificial Sequence: Synthetic oligonucleotide
ccaaauaacuucccagguu

SEQ ID NO: 1230128 - RNA, 19 nt, Artificial Sequence
  Description of Artificial Sequence: Synthetic oligonucleotide
ccgccgguuuccauucaac

SEQ ID NO: 1230129 - RNA, 19 nt, Artificial Sequence
  Description of Artificial Sequence: Synthetic oligonucleotide
ggcacucgaagagcgaggu

SEQ ID NO: 1230130 - RNA, 19 nt, Artificial Sequence
  Description of Artificial Sequence: Synthetic oligonucleotide
cggcucaucgcgcuccgag

SEQ ID NO: 1230131 - RNA, 19 nt, Artificial Sequence
  Description of Artificial Sequence: Synthetic oligonucleotide
caggaauagggacgguauu

SEQ ID NO: 1230132 - RNA, 19 nt, Artificial Sequence
  Description of Artificial Sequence: Synthetic oligonucleotide
cacugacagcauguagaaa

SEQ ID NO: 1230133 - RNA, 19 nt, Artificial Sequence
  Description of Artificial Sequence: Synthetic oligonucleotide
ggggcgcggacccgaccgg

SEQ ID NO: 1230134 - RNA, 19 nt, Artificial Sequence
  Description of Artificial Sequence: Synthetic oligonucleotide
ggcgucugccugccgccgc

SEQ ID NO: 1230135 - RNA, 19 nt, Artificial Sequence
  Description of Artificial Sequence: Synthetic oligonucleotide
cugcgggcgucugccugcc

SEQ ID NO: 1230136 - RNA, 19 nt, Artificial Sequence
  Description of Artificial Sequence: Synthetic oligonucleotide
gcccguaguagcauacuua

SEQ ID NO: 1230137 - RNA, 19 nt, Artificial Sequence
  Description of Artificial Sequence: Synthetic oligonucleotide
agcccaccauggaccugcg

SEQ ID NO: 1230138 - RNA, 19 nt, Artificial Sequence
  Description of Artificial Sequence: Synthetic oligonucleotide
cguuaugcccaaauaacuu

SEQ ID NO: 1230139 - RNA, 19 nt, Artificial Sequence
  Description of Artificial Sequence: Synthetic oligonucleotide
ccguaguagcauacuuaca

SEQ ID NO: 1230140 - RNA, 19 nt, Artificial Sequence
  Description of Artificial Sequence: Synthetic oligonucleotide
agcagaccgggcacucgaa

SEQ ID NO: 1230141 - RNA, 19 nt, Artificial Sequence
  Description of Artificial Sequence: Synthetic oligonucleotide
gcuccggggcaacgccacg

SEQ ID NO: 1230142 - RNA, 19 nt, Artificial Sequence
  Description of Artificial Sequence: Synthetic oligonucleotide
cguuagggcgccccugcac

SEQ ID NO: 1230143 - RNA, 19 nt, Artificial Sequence
  Description of Artificial Sequence: Synthetic oligonucleotide
ggcggggacaggaccgcgc

SEQ ID NO: 1230144 - RNA, 19 nt, Artificial Sequence
  Description of Artificial Sequence: Synthetic oligonucleotide
ggaccgcgcagauccucuc

SEQ ID NO: 1230145 - RNA, 19 nt, Artificial Sequence
  Description of Artificial Sequence: Synthetic oligonucleotide
gaccgggguguggcuuccc

SEQ ID NO: 1230146 - RNA, 19 nt, Artificial Sequence
  Description of Artificial Sequence: Synthetic oligonucleotide
gcgcuccgagcccaccaug

SEQ ID NO: 1230147 - RNA, 19 nt, Artificial Sequence
  Description of Artificial Sequence: Synthetic oligonucleotide
guuccugaugcugggcguu

SEQ ID NO: 1230148 - RNA, 19 nt, Artificial Sequence
  Description of Artificial Sequence: Synthetic oligonucleotide
cgcuuucggggcucgcggc

SEQ ID NO: 1230149 - RNA, 19 nt, Artificial Sequence
  Description of Artificial Sequence: Synthetic oligonucleotide
caccgcggacgagccgggg

SEQ ID NO: 1230150 - RNA, 19 nt, Artificial Sequence
  Description of Artificial Sequence: Synthetic oligonucleotide
gggcgucugccugccgccg

SEQ ID NO: 1230151 - RNA, 19 nt, Artificial Sequence
  Description of Artificial Sequence: Synthetic oligonucleotide
gggguguggcuucccaggu

SEQ ID NO: 1230152 - RNA, 19 nt, Artificial Sequence
  Description of Artificial Sequence: Synthetic oligonucleotide
cagucuccgccgguuucca

SEQ ID NO: 1230153 - RNA, 19 nt, Artificial Sequence
  Description of Artificial Sequence: Synthetic oligonucleotide
ccggcuuggcacugcagaa

SEQ ID NO: 1230154 - RNA, 19 nt, Artificial Sequence
  Description of Artificial Sequence: Synthetic oligonucleotide
gggcguuagggcgccccug

SEQ ID NO: 1230155 - RNA, 19 nt, Artificial Sequence
  Description of Artificial Sequence: Synthetic oligonucleotide
gcgcggacccgaccggcac

SEQ ID NO: 1230156 - RNA, 19 nt, Artificial Sequence
  Description of Artificial Sequence: Synthetic oligonucleotide
gggcggggacaggaccgcg

SEQ ID NO: 1230157 - RNA, 19 nt, Artificial Sequence
  Description of Artificial Sequence: Synthetic oligonucleotide
ggaccgggguguggcuucc

SEQ ID NO: 1230158 - RNA, 19 nt, Artificial Sequence
  Description of Artificial Sequence: Synthetic oligonucleotide
gcgggcuccggggcaacgc

SEQ ID NO: 1230159 - RNA, 19 nt, Artificial Sequence
  Description of Artificial Sequence: Synthetic oligonucleotide
ccauggaccugcgggcguc

SEQ ID NO: 1230160 - RNA, 19 nt, Artificial Sequence
  Description of Artificial Sequence: Synthetic oligonucleotide
cgggcgucugccugccgcc

SEQ ID NO: 1230161 - RNA, 19 nt, Artificial Sequence
  Description of Artificial Sequence: Synthetic oligonucleotide
cgggcaccgcggacgagcc

SEQ ID NO: 1230162 - RNA, 19 nt, Artificial Sequence
  Description of Artificial Sequence: Synthetic oligonucleotide
gaacugccgaggccaccuu

SEQ ID NO: 1230163 - RNA, 19 nt, Artificial Sequence
  Description of Artificial Sequence: Synthetic oligonucleotide
cgugaauggaccggggugu

SEQ ID NO: 1230164 - RNA, 19 nt, Artificial Sequence
  Description of Artificial Sequence: Synthetic oligonucleotide
cccgaccggcaccgggagg

SEQ ID NO: 1230165 - RNA, 19 nt, Artificial Sequence
  Description of Artificial Sequence: Synthetic oligonucleotide
acggagcgugcggggucug

SEQ ID NO: 1230166 - RNA, 19 nt, Artificial Sequence
  Description of Artificial Sequence: Synthetic oligonucleotide
gcguuagggcgccccugca

SEQ ID NO: 1230167 - RNA, 19 nt, Artificial Sequence
  Description of Artificial Sequence: Synthetic oligonucleotide
gcaccgcggacgagccggg

SEQ ID NO: 1230168 - RNA, 19 nt, Artificial Sequence
  Description of Artificial Sequence: Synthetic oligonucleotide
ccgacgcuuucggggcucg

SEQ ID NO: 1230169 - RNA, 19 nt, Artificial Sequence
  Description of Artificial Sequence: Synthetic oligonucleotide
ggucagucuccgccgguuu

SEQ ID NO: 1230170 - RNA, 19 nt, Artificial Sequence
  Description of Artificial Sequence: Synthetic oligonucleotide
cagcccguaguagcauacu

SEQ ID NO: 1230171 - RNA, 19 nt, Artificial Sequence
  Description of Artificial Sequence: Synthetic oligonucleotide
cgcggacccgaccggcacc

SEQ ID NO: 1230172 - RNA, 19 nt, Artificial Sequence
  Description of Artificial Sequence: Synthetic oligonucleotide
cgccgguuuccauucaacu

SEQ ID NO: 1230173 - RNA, 19 nt, Artificial Sequence
  Description of Artificial Sequence: Synthetic oligonucleotide
gggcuccggggcaacgcca

SEQ ID NO: 1230174 - RNA, 19 nt, Artificial Sequence
  Description of Artificial Sequence: Synthetic oligonucleotide
cgcccggaguggccgacgc

SEQ ID NO: 1230175 - RNA, 19 nt, Artificial Sequence
  Description of Artificial Sequence: Synthetic oligonucleotide
gcgcccggaguggccgacg

SEQ ID NO: 1230176 - RNA, 19 nt, Artificial Sequence
  Description of Artificial Sequence: Synthetic oligonucleotide
gccgacgcuuucggggcuc

SEQ ID NO: 1230177 - RNA, 19 nt, Artificial Sequence
  Description of Artificial Sequence: Synthetic oligonucleotide
gggacggagcgugcggggu

SEQ ID NO: 1230178 - RNA, 19 nt, Artificial Sequence
  Description of Artificial Sequence: Synthetic oligonucleotide
ggacgagccggggcccgca

SEQ ID NO: 1230179 - RNA, 19 nt, Artificial Sequence
  Description of Artificial Sequence: Synthetic oligonucleotide
ccgggcacucgaagagcga

SEQ ID NO: 1230180 - RNA, 19 nt, Artificial Sequence
  Description of Artificial Sequence: Synthetic oligonucleotide
gccacggcgcccaguccga

SEQ ID NO: 1230181 - RNA, 19 nt, Artificial Sequence
  Description of Artificial Sequence: Synthetic oligonucleotide
ccgagcccaccauggaccu

SEQ ID NO: 1230182 - RNA, 19 nt, Artificial Sequence
  Description of Artificial Sequence: Synthetic oligonucleotide
gggcaacgccacggcgccc

SEQ ID NO: 1230183 - RNA, 19 nt, Artificial Sequence
  Description of Artificial Sequence: Synthetic oligonucleotide
cgucugccugccgccgcgg

SEQ ID NO: 1230184 - RNA, 19 nt, Artificial Sequence
  Description of Artificial Sequence: Synthetic oligonucleotide
ccacggcgcccaguccgag

SEQ ID NO: 1230185 - RNA, 19 nt, Artificial Sequence
  Description of Artificial Sequence: Synthetic oligonucleotide
cgcccaguccgaggaccgg

SEQ ID NO: 1230186 - RNA, 19 nt, Artificial Sequence
  Description of Artificial Sequence: Synthetic oligonucleotide
gcacucgaagagcgagguu

SEQ ID NO: 1230187 - RNA, 19 nt, Artificial Sequence
  Description of Artificial Sequence: Synthetic oligonucleotide
ggcgggcaccgcggacgag

SEQ ID NO: 1230188 - RNA, 19 nt, Artificial Sequence
  Description of Artificial Sequence: Synthetic oligonucleotide
ccgcggguggcgggcuccg

SEQ ID NO: 1230189 - RNA, 19 nt, Artificial Sequence
  Description of Artificial Sequence: Synthetic oligonucleotide
cgcggacgagccggggccc

SEQ ID NO: 1230190 - RNA, 19 nt, Artificial Sequence
  Description of Artificial Sequence: Synthetic oligonucleotide
cccggaguggccgacgcuu

SEQ ID NO: 1230191 - RNA, 19 nt, Artificial Sequence
  Description of Artificial Sequence: Synthetic oligonucleotide
gcugggcguuagggcgccc

SEQ ID NO: 1230192 - RNA, 19 nt, Artificial Sequence
  Description of Artificial Sequence: Synthetic oligonucleotide
caacgccacggcgcccagu

SEQ ID NO: 1230193 - RNA, 19 nt, Artificial Sequence
  Description of Artificial Sequence: Synthetic oligonucleotide
gcucaacuucuggcggcau

SEQ ID NO: 1230194 - RNA, 19 nt, Artificial Sequence
  Description of Artificial Sequence: Synthetic oligonucleotide
cgacgcuuucggggcucgc

SEQ ID NO: 1230195 - RNA, 19 nt, Artificial Sequence
  Description of Artificial Sequence: Synthetic oligonucleotide
cgggcggcucaucgcgcuc

SEQ ID NO: 1230196 - RNA, 19 nt, Artificial Sequence
  Description of Artificial Sequence: Synthetic oligonucleotide
gcccggaguggccgacgcu

SEQ ID NO: 1230197 - RNA, 19 nt, Artificial Sequence
  Description of Artificial Sequence: Synthetic oligonucleotide
cggacgagccggggcccgc

SEQ ID NO: 1230198 - RNA, 19 nt, Artificial Sequence
  Description of Artificial Sequence: Synthetic oligonucleotide
gcggcucaucgcgcuccga

SEQ ID NO: 1230199 - RNA, 19 nt, Artificial Sequence
  Description of Artificial Sequence: Synthetic oligonucleotide
cggcgcccaguccgaggac

SEQ ID NO: 1230200 - RNA, 19 nt, Artificial Sequence
  Description of Artificial Sequence: Synthetic oligonucleotide
cagccccuggcagguuaau

SEQ ID NO: 1230201 - RNA, 19 nt, Artificial Sequence
  Description of Artificial Sequence: Synthetic oligonucleotide
ccggaguggccgacgcuuu

SEQ ID NO: 1230202 - RNA, 19 nt, Artificial Sequence
  Description of Artificial Sequence: Synthetic oligonucleotide
cggacccgaccggcaccgg

SEQ ID NO: 1230203 - RNA, 19 nt, Artificial Sequence
  Description of Artificial Sequence: Synthetic oligonucleotide
ccgaggccaccuucuccau

SEQ ID NO: 1230204 - RNA, 19 nt, Artificial Sequence
  Description of Artificial Sequence: Synthetic oligonucleotide
cggagcgugcggggucuga

SEQ ID NO: 1230205 - RNA, 19 nt, Artificial Sequence
  Description of Artificial Sequence: Synthetic oligonucleotide
cgcgcuccgagcccaccau

SEQ ID NO: 1230206 - RNA, 19 nt, Artificial Sequence
  Description of Artificial Sequence: Synthetic oligonucleotide
gcccgcagccgaggauggu

SEQ ID NO: 1230207 - RNA, 19 nt, Artificial Sequence
  Description of Artificial Sequence: Synthetic oligonucleotide
gcggggccgcccgggucaa

SEQ ID NO: 1230208 - RNA, 19 nt, Artificial Sequence
  Description of Artificial Sequence: Synthetic oligonucleotide
cgcccgggucaaggcggug

SEQ ID NO: 1230209 - RNA, 19 nt, Artificial Sequence
  Description of Artificial Sequence: Synthetic oligonucleotide
cggcgcccggaguggccga

SEQ ID NO: 1230210 - RNA, 19 nt, Artificial Sequence
  Description of Artificial Sequence: Synthetic oligonucleotide
cggggccgcccgggucaag

SEQ ID NO: 1230211 - RNA, 19 nt, Artificial Sequence
  Description of Artificial Sequence: Synthetic oligonucleotide
aagacgcugaacuagaucc

SEQ ID NO: 1230212 - RNA, 19 nt, Artificial Sequence
  Description of Artificial Sequence: Synthetic oligonucleotide
aaaguguucaguaaugggc

SEQ ID NO: 1230213 - RNA, 19 nt, Artificial Sequence
  Description of Artificial Sequence: Synthetic oligonucleotide
uuauaacuggcucaagacg

SEQ ID NO: 1230214 - RNA, 19 nt, Artificial Sequence
  Description of Artificial Sequence: Synthetic oligonucleotide
aaucuggucacuuguaaag

SEQ ID NO: 1230215 - RNA, 19 nt, Artificial Sequence
  Description of Artificial Sequence: Synthetic oligonucleotide
ucaucaaauaggaaacccg

SEQ ID NO: 1230216 - RNA, 19 nt, Artificial Sequence
  Description of Artificial Sequence: Synthetic oligonucleotide
aacgugaccuuccucaugg

SEQ ID NO: 1230217 - RNA, 19 nt, Artificial Sequence
  Description of Artificial Sequence: Synthetic oligonucleotide
ucuuccaucgcuaauaauc

SEQ ID NO: 1230218 - RNA, 19 nt, Artificial Sequence
  Description of Artificial Sequence: Synthetic oligonucleotide
aauagacucaauaaagaag

SEQ ID NO: 1230219 - RNA, 19 nt, Artificial Sequence
  Description of Artificial Sequence: Synthetic oligonucleotide
aaagguugguaguugaucu

SEQ ID NO: 1230220 - RNA, 19 nt, Artificial Sequence
  Description of Artificial Sequence: Synthetic oligonucleotide
aacacucucaggcuacagc

SEQ ID NO: 1230221 - RNA, 19 nt, Artificial Sequence
  Description of Artificial Sequence: Synthetic oligonucleotide
gacaugaauguucaugagg

SEQ ID NO: 1230222 - RNA, 19 nt, Artificial Sequence
  Description of Artificial Sequence: Synthetic oligonucleotide
aacgauauuuauccugguc

SEQ ID NO: 1230223 - RNA, 19 nt, Artificial Sequence
  Description of Artificial Sequence: Synthetic oligonucleotide
ugagguaguaggcugugcg

SEQ ID NO: 1230224 - RNA, 19 nt, Artificial Sequence
  Description of Artificial Sequence: Synthetic oligonucleotide
ucgauauuggccuaaauua

SEQ ID NO: 1230225 - RNA, 19 nt, Artificial Sequence
  Description of Artificial Sequence: Synthetic oligonucleotide
acaaauagacucaauaaag

SEQ ID NO: 1230226 - RNA, 19 nt, Artificial Sequence
  Description of Artificial Sequence: Synthetic oligonucleotide
agggucauuacaaauagac

SEQ ID NO: 1230227 - RNA, 19 nt, Artificial Sequence
  Description of Artificial Sequence: Synthetic oligonucleotide
gauaaguugggcuuccaug

SEQ ID NO: 1230228 - RNA, 19 nt, Artificial Sequence
  Description of Artificial Sequence: Synthetic oligonucleotide
acgucgaagaucuugaugu

SEQ ID NO: 1230229 - RNA, 19 nt, Artificial Sequence
  Description of Artificial Sequence: Synthetic oligonucleotide
gaugccuugagaccgaaug

SEQ ID NO: 1230230 - RNA, 19 nt, Artificial Sequence
  Description of Artificial Sequence: Synthetic oligonucleotide
ucgagcuccauuauaacug

SEQ ID NO: 1230231 - RNA, 19 nt, Artificial Sequence
  Description of Artificial Sequence: Synthetic oligonucleotide
auagacucaauaaagaaga

SEQ ID NO: 1230232 - RNA, 19 nt, Artificial Sequence
  Description of Artificial Sequence: Synthetic oligonucleotide
ugacauaucaccaguacau

SEQ ID NO: 1230233 - RNA, 19 nt, Artificial Sequence
  Description of Artificial Sequence: Synthetic oligonucleotide
agaccuuguaaccauguuc

SEQ ID NO: 1230234 - RNA, 19 nt, Artificial Sequence
  Description of Artificial Sequence: Synthetic oligonucleotide
acuagauccucauaggacu

SEQ ID NO: 1230235 - RNA, 19 nt, Artificial Sequence
  Description of Artificial Sequence: Synthetic oligonucleotide
cugcuuagggagaagaagg

SEQ ID NO: 1230236 - RNA, 19 nt, Artificial Sequence
  Description of Artificial Sequence: Synthetic oligonucleotide
agacucaauaaagaagacc

SEQ ID NO: 1230237 - RNA, 19 nt, Artificial Sequence
  Description of Artificial Sequence: Synthetic oligonucleotide
ggucauuacaaauagacuc

SEQ ID NO: 1230238 - RNA, 19 nt, Artificial Sequence
  Description of Artificial Sequence: Synthetic oligonucleotide
guaacgauauuuauccugg

SEQ ID NO: 1230239 - RNA, 19 nt, Artificial Sequence
  Description of Artificial Sequence: Synthetic oligonucleotide
aacacuuuaguugguguuc

SEQ ID NO: 1230240 - RNA, 19 nt, Artificial Sequence
  Description of Artificial Sequence: Synthetic oligonucleotide
cucgauuuaccauguagcg

SEQ ID NO: 1230241 - RNA, 19 nt, Artificial Sequence
  Description of Artificial Sequence: Synthetic oligonucleotide
cuuccaucgcuaauaaucc

SEQ ID NO: 1230242 - RNA, 19 nt, Artificial Sequence
  Description of Artificial Sequence: Synthetic oligonucleotide
guagcguguacccacgucg

SEQ ID NO: 1230243 - RNA, 19 nt, Artificial Sequence
  Description of Artificial Sequence: Synthetic oligonucleotide
aguuggcuagggcauaggc

SEQ ID NO: 1230244 - RNA, 19 nt, Artificial Sequence
  Description of Artificial Sequence: Synthetic oligonucleotide
ugugcggcucugaacaugg

SEQ ID NO: 1230245 - RNA, 19 nt, Artificial Sequence
  Description of Artificial Sequence: Synthetic oligonucleotide
aaagaagaccuuguaacca

SEQ ID NO: 1230246 - RNA, 19 nt, Artificial Sequence
  Description of Artificial Sequence: Synthetic oligonucleotide
ugacggcauagguagaugg

SEQ ID NO: 1230247 - RNA, 19 nt, Artificial Sequence
  Description of Artificial Sequence: Synthetic oligonucleotide
aauucucuuaagaaagucu

SEQ ID NO: 1230248 - RNA, 19 nt, Artificial Sequence
  Description of Artificial Sequence: Synthetic oligonucleotide
aaacccaccaugaucauca

SEQ ID NO: 1230249 - RNA, 19 nt, Artificial Sequence
  Description of Artificial Sequence: Synthetic oligonucleotide
agccucuauauucagguag

SEQ ID NO: 1230250 - RNA, 19 nt, Artificial Sequence
  Description of Artificial Sequence: Synthetic oligonucleotide
aauugagacuuguuuggga

SEQ ID NO: 1230251 - RNA, 19 nt, Artificial Sequence
  Description of Artificial Sequence: Synthetic oligonucleotide
ugaauguucaugagguagu

SEQ ID NO: 1230252 - RNA, 19 nt, Artificial Sequence
  Description of Artificial Sequence: Synthetic oligonucleotide
uauuggccuaaauuaaaca

SEQ ID NO: 1230253 - RNA, 19 nt, Artificial Sequence
  Description of Artificial Sequence: Synthetic oligonucleotide
uguucaguaaugggcaggg

SEQ ID NO: 1230254 - RNA, 19 nt, Artificial Sequence
  Description of Artificial Sequence: Synthetic oligonucleotide
gacucaauaaagaagaccu

SEQ ID NO: 1230255 - RNA, 19 nt, Artificial Sequence
  Description of Artificial Sequence: Synthetic oligonucleotide
ucgaggugugacaugaaug

SEQ ID NO: 1230256 - RNA, 19 nt, Artificial Sequence
  Description of Artificial Sequence: Synthetic oligonucleotide
aaugcggccucugagguug

SEQ ID NO: 1230257 - RNA, 19 nt, Artificial Sequence
  Description of Artificial Sequence: Synthetic oligonucleotide
ucugcuuagggagaagaag

SEQ ID NO: 1230258 - RNA, 19 nt, Artificial Sequence
  Description of Artificial Sequence: Synthetic oligonucleotide
gcgguaacgauauuuaucc

SEQ ID NO: 1230259 - RNA, 19 nt, Artificial Sequence
  Description of Artificial Sequence: Synthetic oligonucleotide
aggaaacccggagacaucc

SEQ ID NO: 1230260 - RNA, 19 nt, Artificial Sequence
  Description of Artificial Sequence: Synthetic oligonucleotide
ucaucugaacuuuuaucca

SEQ ID NO: 1230261 - RNA, 19 nt, Artificial Sequence
  Description of Artificial Sequence: Synthetic oligonucleotide
uuuccucacagacacccgc

SEQ ID NO: 1230262 - RNA, 19 nt, Artificial Sequence
  Description of Artificial Sequence: Synthetic oligonucleotide
auguuuucggcaaugaugu

SEQ ID NO: 1230263 - RNA, 19 nt, Artificial Sequence
  Description of Artificial Sequence: Synthetic oligonucleotide
uccguugguuccuaggaag

SEQ ID NO: 1230264 - RNA, 19 nt, Artificial Sequence
  Description of Artificial Sequence: Synthetic oligonucleotide
gguaacgauauuuauccug

SEQ ID NO: 1230265 - RNA, 19 nt, Artificial Sequence
  Description of Artificial Sequence: Synthetic oligonucleotide
aaguguucaguaaugggca

SEQ ID NO: 1230266 - RNA, 19 nt, Artificial Sequence
  Description of Artificial Sequence: Synthetic oligonucleotide
uucgagcuccauuauaacu

SEQ ID NO: 1230267 - RNA, 19 nt, Artificial Sequence
  Description of Artificial Sequence: Synthetic oligonucleotide
ugguaguugaucucauagc

SEQ ID NO: 1230268 - RNA, 19 nt, Artificial Sequence
  Description of Artificial Sequence: Synthetic oligonucleotide
cuuagggagaagaagggca

SEQ ID NO: 1230269 - RNA, 19 nt, Artificial Sequence
  Description of Artificial Sequence: Synthetic oligonucleotide
uuggcuaggaauugagacu

SEQ ID NO: 1230270 - RNA, 19 nt, Artificial Sequence
  Description of Artificial Sequence: Synthetic oligonucleotide
ggcauagguagauggaucg

SEQ ID NO: 1230271 - RNA, 19 nt, Artificial Sequence
  Description of Artificial Sequence: Synthetic oligonucleotide
gaauugagacuuguuuggg

SEQ ID NO: 1230272 - RNA, 19 nt, Artificial Sequence
  Description of Artificial Sequence: Synthetic oligonucleotide
agauggaucgaggugugac

SEQ ID NO: 1230273 - RNA, 19 nt, Artificial Sequence
  Description of Artificial Sequence: Synthetic oligonucleotide
gaacuagauccucauagga

SEQ ID NO: 1230274 - RNA, 19 nt, Artificial Sequence
  Description of Artificial Sequence: Synthetic oligonucleotide
ucucccuugggauagcggu

SEQ ID NO: 1230275 - RNA, 19 nt, Artificial Sequence
  Description of Artificial Sequence: Synthetic oligonucleotide
agcugaugccuugagaccg

SEQ ID NO: 1230276 - RNA, 19 nt, Artificial Sequence
  Description of Artificial Sequence: Synthetic oligonucleotide
gauauuuauccuggucccg

SEQ ID NO: 1230277 - RNA, 19 nt, Artificial Sequence
  Description of Artificial Sequence: Synthetic oligonucleotide
uccaucgcuaauaauccaa

SEQ ID NO: 1230278 - RNA, 19 nt, Artificial Sequence
  Description of Artificial Sequence: Synthetic oligonucleotide
ugggauagcgguaacgaua

SEQ ID NO: 1230279 - RNA, 19 nt, Artificial Sequence
  Description of Artificial Sequence: Synthetic oligonucleotide
uaccauguagcguguaccc

SEQ ID NO: 1230280 - RNA, 19 nt, Artificial Sequence
  Description of Artificial Sequence: Synthetic oligonucleotide
agguaguaggcugugcggc

SEQ ID NO: 1230281 - RNA, 19 nt, Artificial Sequence
  Description of Artificial Sequence: Synthetic oligonucleotide
auauggcugguccacaccu

SEQ ID NO: 1230282 - RNA, 19 nt, Artificial Sequence
  Description of Artificial Sequence: Synthetic oligonucleotide
aacgaggacagaggcaauc

SEQ ID NO: 1230283 - RNA, 19 nt, Artificial Sequence
  Description of Artificial Sequence: Synthetic oligonucleotide
cauuauaacuggcucaaga

SEQ ID NO: 1230284 - RNA, 19 nt, Artificial Sequence
  Description of Artificial Sequence: Synthetic oligonucleotide
ugucguucgagcuccauua

SEQ ID NO: 1230285 - RNA, 19 nt, Artificial Sequence
  Description of Artificial Sequence: Synthetic oligonucleotide
uggccuaaauuaaacacuu

SEQ ID NO: 1230286 - RNA, 19 nt, Artificial Sequence
  Description of Artificial Sequence: Synthetic oligonucleotide
ggagguagaacacucucag

SEQ ID NO: 1230287 - RNA, 19 nt, Artificial Sequence
  Description of Artificial Sequence: Synthetic oligonucleotide
uagguagauggaucgaggu

SEQ ID NO: 1230288 - RNA, 19 nt, Artificial Sequence
  Description of Artificial Sequence: Synthetic oligonucleotide
uccuuuagggcugccagag

SEQ ID NO: 1230289 - RNA, 19 nt, Artificial Sequence
  Description of Artificial Sequence: Synthetic oligonucleotide
guugagauaucgugugagc

SEQ ID NO: 1230290 - RNA, 19 nt, Artificial Sequence
  Description of Artificial Sequence: Synthetic oligonucleotide
agcgguaacgauauuuauc

SEQ ID NO: 1230291 - RNA, 19 nt, Artificial Sequence
  Description of Artificial Sequence: Synthetic oligonucleotide
uaggucuugccucgagccg

SEQ ID NO: 1230292 - RNA, 19 nt, Artificial Sequence
  Description of Artificial Sequence: Synthetic oligonucleotide
gcagaaucaaugaucgucg

SEQ ID NO: 1230293 - RNA, 19 nt, Artificial Sequence
  Description of Artificial Sequence: Synthetic oligonucleotide
augaucgucguucucuggu

SEQ ID NO: 1230294 - RNA, 19 nt, Artificial Sequence
  Description of Artificial Sequence: Synthetic oligonucleotide
uccauuauaacuggcucaa

SEQ ID NO: 1230295 - RNA, 19 nt, Artificial Sequence
  Description of Artificial Sequence: Synthetic oligonucleotide
agcucacugccucucgucg

SEQ ID NO: 1230296 - RNA, 19 nt, Artificial Sequence
  Description of Artificial Sequence: Synthetic oligonucleotide
cauagguagauggaucgag

SEQ ID NO: 1230297 - RNA, 19 nt, Artificial Sequence
  Description of Artificial Sequence: Synthetic oligonucleotide
aaauuccucaggguagugu

SEQ ID NO: 1230298 - RNA, 19 nt, Artificial Sequence
  Description of Artificial Sequence: Synthetic oligonucleotide
uccuauccaguugagauau

SEQ ID NO: 1230299 - RNA, 19 nt, Artificial Sequence
  Description of Artificial Sequence: Synthetic oligonucleotide
acauccguugguuccuagg

SEQ ID NO: 1230300 - RNA, 19 nt, Artificial Sequence
  Description of Artificial Sequence: Synthetic oligonucleotide
uccuguauuuacagacccc

SEQ ID NO: 1230301 - RNA, 19 nt, Artificial Sequence
  Description of Artificial Sequence: Synthetic oligonucleotide
gaucgucguucucugguag

SEQ ID NO: 1230302 - RNA, 19 nt, Artificial Sequence
  Description of Artificial Sequence: Synthetic oligonucleotide
auagguagauggaucgagg

SEQ ID NO: 1230303 - RNA, 19 nt, Artificial Sequence
  Description of Artificial Sequence: Synthetic oligonucleotide
ucgugugagcuucguagag

SEQ ID NO: 1230304 - RNA, 19 nt, Artificial Sequence
  Description of Artificial Sequence: Synthetic oligonucleotide
ugagauaucgugugagcuu

SEQ ID NO: 1230305 - RNA, 19 nt, Artificial Sequence
  Description of Artificial Sequence: Synthetic oligonucleotide
cuuuagggcugccagagca

SEQ ID NO: 1230306 - RNA, 19 nt, Artificial Sequence
  Description of Artificial Sequence: Synthetic oligonucleotide
gucauuacaaauagacuca

SEQ ID NO: 1230307 - RNA, 19 nt, Artificial Sequence
  Description of Artificial Sequence: Synthetic oligonucleotide
acuuuuauccaggaaguau

SEQ ID NO: 1230308 - RNA, 19 nt, Artificial Sequence
  Description of Artificial Sequence: Synthetic oligonucleotide
gaccgaaugaaguuggcua

SEQ ID NO: 1230309 - RNA, 19 nt, Artificial Sequence
  Description of Artificial Sequence: Synthetic oligonucleotide
gaugagaggccagagucac

SEQ ID NO: 1230310 - RNA, 19 nt, Artificial Sequence
  Description of Artificial Sequence: Synthetic oligonucleotide
gaaugguccucuucauaug

SEQ ID NO: 1230311 - RNA, 19 nt, Artificial Sequence
  Description of Artificial Sequence: Synthetic oligonucleotide
ugcuacagacuucuucacu

SEQ ID NO: 1230312 - RNA, 19 nt, Artificial Sequence
  Description of Artificial Sequence: Synthetic oligonucleotide
ugguguuccuauccaguug

SEQ ID NO: 1230313 - RNA, 19 nt, Artificial Sequence
  Description of Artificial Sequence: Synthetic oligonucleotide
agguagauggaucgaggug

SEQ ID NO: 1230314 - RNA, 19 nt, Artificial Sequence
  Description of Artificial Sequence: Synthetic oligonucleotide
gagauaucgugugagcuuc

SEQ ID NO: 1230315 - RNA, 19 nt, Artificial Sequence
  Description of Artificial Sequence: Synthetic oligonucleotide
cauguagcguguacccacg

SEQ ID NO: 1230316 - RNA, 19 nt, Artificial Sequence
  Description of Artificial Sequence: Synthetic oligonucleotide
ucccguagugcaaauuccu

SEQ ID NO: 1230317 - RNA, 19 nt, Artificial Sequence
  Description of Artificial Sequence: Synthetic oligonucleotide
guuuuggcuaggaauugag

SEQ ID NO: 1230318 - RNA, 19 nt, Artificial Sequence
  Description of Artificial Sequence: Synthetic oligonucleotide
ugauaaguugggcuuccau

SEQ ID NO: 1230319 - RNA, 19 nt, Artificial Sequence
  Description of Artificial Sequence: Synthetic oligonucleotide
aaccgcaacgugaccuucc

SEQ ID NO: 1230320 - RNA, 19 nt, Artificial Sequence
  Description of Artificial Sequence: Synthetic oligonucleotide
cgauuuaccauguagcgug

SEQ ID NO: 1230321 - RNA, 19 nt, Artificial Sequence
  Description of Artificial Sequence: Synthetic oligonucleotide
uuuagggcugccagagcac

SEQ ID NO: 1230322 - RNA, 19 nt, Artificial Sequence
  Description of Artificial Sequence: Synthetic oligonucleotide
ucauauggcugguccacac

SEQ ID NO: 1230323 - RNA, 19 nt, Artificial Sequence
  Description of Artificial Sequence: Synthetic oligonucleotide
gaggcaaucuggucacuug

SEQ ID NO: 1230324 - RNA, 19 nt, Artificial Sequence
  Description of Artificial Sequence: Synthetic oligonucleotide
ucgauuuaccauguagcgu

SEQ ID NO: 1230325 - RNA, 19 nt, Artificial Sequence
  Description of Artificial Sequence: Synthetic oligonucleotide
agcuucguagagauguagg

SEQ ID NO: 1230326 - RNA, 19 nt, Artificial Sequence
  Description of Artificial Sequence: Synthetic oligonucleotide
ucauuacaaauagacucaa

SEQ ID NO: 1230327 - RNA, 19 nt, Artificial Sequence
  Description of Artificial Sequence: Synthetic oligonucleotide
auaggacucucccuuggga

SEQ ID NO: 1230328 - RNA, 19 nt, Artificial Sequence
  Description of Artificial Sequence: Synthetic oligonucleotide
agccgguaaacccaccaug

SEQ ID NO: 1230329 - RNA, 19 nt, Artificial Sequence
  Description of Artificial Sequence: Synthetic oligonucleotide
cauaggacucucccuuggg

SEQ ID NO: 1230330 - RNA, 19 nt, Artificial Sequence
  Description of Artificial Sequence: Synthetic oligonucleotide
gagcugaugccuugagacc

SEQ ID NO: 1230331 - RNA, 19 nt, Artificial Sequence
  Description of Artificial Sequence: Synthetic oligonucleotide
aggacugccgaguuucacu

SEQ ID NO: 1230332 - RNA, 19 nt, Artificial Sequence
  Description of Artificial Sequence: Synthetic oligonucleotide
caaugaucgucguucucug

SEQ ID NO: 1230333 - RNA, 19 nt, Artificial Sequence
  Description of Artificial Sequence: Synthetic oligonucleotide
aggacacuugagauagggc

SEQ ID NO: 1230334 - RNA, 19 nt, Artificial Sequence
  Description of Artificial Sequence: Synthetic oligonucleotide
uggcuaggaauugagacuu

SEQ ID NO: 1230335 - RNA, 19 nt, Artificial Sequence
  Description of Artificial Sequence: Synthetic oligonucleotide
aggcaaucuggucacuugu

SEQ ID NO: 1230336 - RNA, 19 nt, Artificial Sequence
  Description of Artificial Sequence: Synthetic oligonucleotide
aucgugugagcuucguaga

SEQ ID NO: 1230337 - RNA, 19 nt, Artificial Sequence
  Description of Artificial Sequence: Synthetic oligonucleotide
cuugccccgagaugagagg

SEQ ID NO: 1230338 - RNA, 19 nt, Artificial Sequence
  Description of Artificial Sequence: Synthetic oligonucleotide
aagaccuuguaaccauguu

SEQ ID NO: 1230339 - RNA, 19 nt, Artificial Sequence
  Description of Artificial Sequence: Synthetic oligonucleotide
cauauggcugguccacacc

SEQ ID NO: 1230340 - RNA, 19 nt, Artificial Sequence
  Description of Artificial Sequence: Synthetic oligonucleotide
uggucacuuguaaaguguu

SEQ ID NO: 1230341 - RNA, 19 nt, Artificial Sequence
  Description of Artificial Sequence: Synthetic oligonucleotide
uuccaucgcuaauaaucca

SEQ ID NO: 1230342 - RNA, 19 nt, Artificial Sequence
  Description of Artificial Sequence: Synthetic oligonucleotide
uaguuuuggcuaggaauug

SEQ ID NO: 1230343 - RNA, 19 nt, Artificial Sequence
  Description of Artificial Sequence: Synthetic oligonucleotide
cacgucgaagaucuugaug

SEQ ID NO: 1230344 - RNA, 19 nt, Artificial Sequence
  Description of Artificial Sequence: Synthetic oligonucleotide
aucgaggugugacaugaau

SEQ ID NO: 1230345 - RNA, 19 nt, Artificial Sequence
  Description of Artificial Sequence: Synthetic oligonucleotide
uuccuauccaguugagaua

SEQ ID NO: 1230346 - RNA, 19 nt, Artificial Sequence
  Description of Artificial Sequence: Synthetic oligonucleotide
uguuccuauccaguugaga

SEQ ID NO: 1230347 - RNA, 19 nt, Artificial Sequence
  Description of Artificial Sequence: Synthetic oligonucleotide
auccuggucccguagugca

SEQ ID NO: 1230348 - RNA, 19 nt, Artificial Sequence
  Description of Artificial Sequence: Synthetic oligonucleotide
uguagcguguacccacguc

SEQ ID NO: 1230349 - RNA, 19 nt, Artificial Sequence
  Description of Artificial Sequence: Synthetic oligonucleotide
guaguugaucucauagcac

SEQ ID NO: 1230350 - RNA, 19 nt, Artificial Sequence
  Description of Artificial Sequence: Synthetic oligonucleotide
uagcguguacccacgucga

SEQ ID NO: 1230351 - RNA, 19 nt, Artificial Sequence
  Description of Artificial Sequence: Synthetic oligonucleotide
agacacccgcaucaaucuc

SEQ ID NO: 1230352 - RNA, 19 nt, Artificial Sequence
  Description of Artificial Sequence: Synthetic oligonucleotide
uaacgauauuuauccuggu

SEQ ID NO: 1230353 - RNA, 19 nt, Artificial Sequence
  Description of Artificial Sequence: Synthetic oligonucleotide
ucacgggugauguccacau

SEQ ID NO: 1230354 - RNA, 19 nt, Artificial Sequence
  Description of Artificial Sequence: Synthetic oligonucleotide
agguugguaguugaucuca

SEQ ID NO: 1230355 - RNA, 19 nt, Artificial Sequence
  Description of Artificial Sequence: Synthetic oligonucleotide
gaacaugguccugcacucg

SEQ ID NO: 1230356 - RNA, 19 nt, Artificial Sequence
  Description of Artificial Sequence: Synthetic oligonucleotide
caguaaugggcagggacag

SEQ ID NO: 1230357 - RNA, 19 nt, Artificial Sequence
  Description of Artificial Sequence: Synthetic oligonucleotide
uugagauagggcagcucau

SEQ ID NO: 1230358 - RNA, 19 nt, Artificial Sequence
  Description of Artificial Sequence: Synthetic oligonucleotide
gagguugaguucacucucc

SEQ ID NO: 1230359 - RNA, 19 nt, Artificial Sequence
  Description of Artificial Sequence: Synthetic oligonucleotide
aaguuggcuagggcauagg

SEQ ID NO: 1230360 - RNA, 19 nt, Artificial Sequence
  Description of Artificial Sequence: Synthetic oligonucleotide
cucaagacgcugaacuaga

SEQ ID NO: 1230361 - RNA, 19 nt, Artificial Sequence
  Description of Artificial Sequence: Synthetic oligonucleotide
ggcugugcggcucugaaca

SEQ ID NO: 1230362 - RNA, 19 nt, Artificial Sequence
  Description of Artificial Sequence: Synthetic oligonucleotide
uguacccacgucgaagauc

SEQ ID NO: 1230363 - RNA, 19 nt, Artificial Sequence
  Description of Artificial Sequence: Synthetic oligonucleotide
ucaagacgcugaacuagau

SEQ ID NO: 1230364 - RNA, 19 nt, Artificial Sequence
  Description of Artificial Sequence: Synthetic oligonucleotide
uugccccgagaugagaggc

SEQ ID NO: 1230365 - RNA, 19 nt, Artificial Sequence
  Description of Artificial Sequence: Synthetic oligonucleotide
gccuaaauuaaacacuuua

SEQ ID NO: 1230366 - RNA, 19 nt, Artificial Sequence
  Description of Artificial Sequence: Synthetic oligonucleotide
gagcuucguagagauguag

SEQ ID NO: 1230367 - RNA, 19 nt, Artificial Sequence
  Description of Artificial Sequence: Synthetic oligonucleotide
ugagauagggcagcucauc

SEQ ID NO: 1230368 - RNA, 19 nt, Artificial Sequence
  Description of Artificial Sequence: Synthetic oligonucleotide
agcuccauuauaacuggcu

SEQ ID NO: 1230369 - RNA, 19 nt, Artificial Sequence
  Description of Artificial Sequence: Synthetic oligonucleotide
cucugguaguguugguggc

SEQ ID NO: 1230370 - RNA, 19 nt, Artificial Sequence
  Description of Artificial Sequence: Synthetic oligonucleotide
gauagcgguaacgauauuu

SEQ ID NO: 1230371 - RNA, 19 nt, Artificial Sequence
  Description of Artificial Sequence: Synthetic oligonucleotide
aguuuuggcuaggaauuga

SEQ ID NO: 1230372 - RNA, 19 nt, Artificial Sequence
  Description of Artificial Sequence: Synthetic oligonucleotide
auagcgguaacgauauuua

SEQ ID NO: 1230373 - RNA, 19 nt, Artificial Sequence
  Description of Artificial Sequence: Synthetic oligonucleotide
ucgucguucucugguagug

SEQ ID NO: 1230374 - RNA, 19 nt, Artificial Sequence
  Description of Artificial Sequence: Synthetic oligonucleotide
gacacccgcaucaaucuca

SEQ ID NO: 1230375 - RNA, 19 nt, Artificial Sequence
  Description of Artificial Sequence: Synthetic oligonucleotide
uggugacauaucaccagua

SEQ ID NO: 1230376 - RNA, 19 nt, Artificial Sequence
  Description of Artificial Sequence: Synthetic oligonucleotide
uugucguucgagcuccauu

SEQ ID NO: 1230377 - RNA, 19 nt, Artificial Sequence
  Description of Artificial Sequence: Synthetic oligonucleotide
auaagccacaggugugagu

SEQ ID NO: 1230378 - RNA, 19 nt, Artificial Sequence
  Description of Artificial Sequence: Synthetic oligonucleotide
ggucccguagugcaaauuc

SEQ ID NO: 1230379 - RNA, 19 nt, Artificial Sequence
  Description of Artificial Sequence: Synthetic oligonucleotide
cauccguugguuccuagga

SEQ ID NO: 1230380 - RNA, 19 nt, Artificial Sequence
  Description of Artificial Sequence: Synthetic oligonucleotide
aauggcucuccuguauuua

SEQ ID NO: 1230381 - RNA, 19 nt, Artificial Sequence
  Description of Artificial Sequence: Synthetic oligonucleotide
guucgagcuccauuauaac

SEQ ID NO: 1230382 - RNA, 19 nt, Artificial Sequence
  Description of Artificial Sequence: Synthetic oligonucleotide
ucuugccucgagccgguaa

SEQ ID NO: 1230383 - RNA, 19 nt, Artificial Sequence
  Description of Artificial Sequence: Synthetic oligonucleotide
uagcgguaacgauauuuau

SEQ ID NO: 1230384 - RNA, 19 nt, Artificial Sequence
  Description of Artificial Sequence: Synthetic oligonucleotide
cucucccuugggauagcgg

SEQ ID NO: 1230385 - RNA, 19 nt, Artificial Sequence
  Description of Artificial Sequence: Synthetic oligonucleotide
agaccgaaugaaguuggcu

SEQ ID NO: 1230386 - RNA, 19 nt, Artificial Sequence
  Description of Artificial Sequence: Synthetic oligonucleotide
caaucuggucacuuguaaa

SEQ ID NO: 1230387 - RNA, 19 nt, Artificial Sequence
  Description of Artificial Sequence: Synthetic oligonucleotide
uaaacccaccaugaucauc

SEQ ID NO: 1230388 - RNA, 19 nt, Artificial Sequence
  Description of Artificial Sequence: Synthetic oligonucleotide
uuugagcacugugugcaaa

SEQ ID NO: 1230389 - RNA, 19 nt, Artificial Sequence
  Description of Artificial Sequence: Synthetic oligonucleotide
gcucaagacgcugaacuag

SEQ ID NO: 1230390 - RNA, 19 nt, Artificial Sequence
  Description of Artificial Sequence: Synthetic oligonucleotide
gguagauggaucgaggugu

SEQ ID NO: 1230391 - RNA, 19 nt, Artificial Sequence
  Description of Artificial Sequence: Synthetic oligonucleotide
guacccacgucgaagaucu

SEQ ID NO: 1230392 - RNA, 19 nt, Artificial Sequence
  Description of Artificial Sequence: Synthetic oligonucleotide
ucguucgagcuccauuaua

SEQ ID NO: 1230393 - RNA, 19 nt, Artificial Sequence
  Description of Artificial Sequence: Synthetic oligonucleotide
gccgaguuucacuugcuug

SEQ ID NO: 1230394 - RNA, 19 nt, Artificial Sequence
  Description of Artificial Sequence: Synthetic oligonucleotide
uggaucgaggugugacaug

SEQ ID NO: 1230395 - RNA, 19 nt, Artificial Sequence
  Description of Artificial Sequence: Synthetic oligonucleotide
gacauccguugguuccuag

SEQ ID NO: 1230396 - RNA, 19 nt, Artificial Sequence
  Description of Artificial Sequence: Synthetic oligonucleotide
cauaucaccaguacauuuu

SEQ ID NO: 1230397 - RNA, 19 nt, Artificial Sequence
  Description of Artificial Sequence: Synthetic oligonucleotide
aguugggcuuccauguugu

SEQ ID NO: 1230398 - RNA, 19 nt, Artificial Sequence
  Description of Artificial Sequence: Synthetic oligonucleotide
ccuggugacauaucaccag

SEQ ID NO: 1230399 - RNA, 19 nt, Artificial Sequence
  Description of Artificial Sequence: Synthetic oligonucleotide
aucgucguucucugguagu

SEQ ID NO: 1230400 - RNA, 19 nt, Artificial Sequence
  Description of Artificial Sequence: Synthetic oligonucleotide
cuguucauaagggacaccu

SEQ ID NO: 1230401 - RNA, 19 nt, Artificial Sequence
  Description of Artificial Sequence: Synthetic oligonucleotide
ugagcuucguagagaugua

SEQ ID NO: 1230402 - RNA, 19 nt, Artificial Sequence
  Description of Artificial Sequence: Synthetic oligonucleotide
auggaucgaggugugacau

SEQ ID NO: 1230403 - RNA, 19 nt, Artificial Sequence
  Description of Artificial Sequence: Synthetic oligonucleotide
cucgagccgguaaacccac

SEQ ID NO: 1230404 - RNA, 19 nt, Artificial Sequence
  Description of Artificial Sequence: Synthetic oligonucleotide
gcacucaauucucuuaaga

SEQ ID NO: 1230405 - RNA, 19 nt, Artificial Sequence
  Description of Artificial Sequence: Synthetic oligonucleotide
gucccguagugcaaauucc

SEQ ID NO: 1230406 - RNA, 19 nt, Artificial Sequence
  Description of Artificial Sequence: Synthetic oligonucleotide
cuccccaugacggcauagg

SEQ ID NO: 1230407 - RNA, 19 nt, Artificial Sequence
  Description of Artificial Sequence: Synthetic oligonucleotide
gacgcugaacuagauccuc

SEQ ID NO: 1230408 - RNA, 19 nt, Artificial Sequence
  Description of Artificial Sequence: Synthetic oligonucleotide
guagauggaucgaggugug

SEQ ID NO: 1230409 - RNA, 19 nt, Artificial Sequence
  Description of Artificial Sequence: Synthetic oligonucleotide
ggaucgaggugugacauga

SEQ ID NO: 1230410 - RNA, 19 nt, Artificial Sequence
  Description of Artificial Sequence: Synthetic oligonucleotide
auaucgugugagcuucgua

SEQ ID NO: 1230411 - RNA, 19 nt, Artificial Sequence
  Description of Artificial Sequence: Synthetic oligonucleotide
acggcauagguagauggau

SEQ ID NO: 1230412 - RNA, 19 nt, Artificial Sequence
  Description of Artificial Sequence: Synthetic oligonucleotide
gcaacgaggacagaggcaa

SEQ ID NO: 1230413 - RNA, 19 nt, Artificial Sequence
  Description of Artificial Sequence: Synthetic oligonucleotide
ucccuugggauagcgguaa

SEQ ID NO: 1230414 - RNA, 19 nt, Artificial Sequence
  Description of Artificial Sequence: Synthetic oligonucleotide
cugggagaaagaauucaua

SEQ ID NO: 1230415 - RNA, 19 nt, Artificial Sequence
  Description of Artificial Sequence: Synthetic oligonucleotide
gacugccgaguuucacuug

SEQ ID NO: 1230416 - RNA, 19 nt, Artificial Sequence
  Description of Artificial Sequence: Synthetic oligonucleotide
gccucgagccgguaaaccc

SEQ ID NO: 1230417 - RNA, 19 nt, Artificial Sequence
  Description of Artificial Sequence: Synthetic oligonucleotide
gacggcauagguagaugga

SEQ ID NO: 1230418 - RNA, 19 nt, Artificial Sequence
  Description of Artificial Sequence: Synthetic oligonucleotide
accgcaacgugaccuuccu

SEQ ID NO: 1230419 - RNA, 19 nt, Artificial Sequence
  Description of Artificial Sequence: Synthetic oligonucleotide
uguuuucggcaaugauguc

SEQ ID NO: 1230420 - RNA, 19 nt, Artificial Sequence
  Description of Artificial Sequence: Synthetic oligonucleotide
ccguugguuccuaggaagg

SEQ ID NO: 1230421 - RNA, 19 nt, Artificial Sequence
  Description of Artificial Sequence: Synthetic oligonucleotide
agauaucgugugagcuucg

SEQ ID NO: 1230422 - RNA, 19 nt, Artificial Sequence
  Description of Artificial Sequence: Synthetic oligonucleotide
gagaccgaaugaaguuggc

SEQ ID NO: 1230423 - RNA, 19 nt, Artificial Sequence
  Description of Artificial Sequence: Synthetic oligonucleotide
gguguguguucacagccuc

SEQ ID NO: 1230424 - RNA, 19 nt, Artificial Sequence
  Description of Artificial Sequence: Synthetic oligonucleotide
caacgugaccuuccucaug

SEQ ID NO: 1230425 - RNA, 19 nt, Artificial Sequence
  Description of Artificial Sequence: Synthetic oligonucleotide
gcuuagggagaagaagggc

SEQ ID NO: 1230426 - RNA, 19 nt, Artificial Sequence
  Description of Artificial Sequence: Synthetic oligonucleotide
augacggcauagguagaug

SEQ ID NO: 1230427 - RNA, 19 nt, Artificial Sequence
  Description of Artificial Sequence: Synthetic oligonucleotide
caguuccuacaggaggaag

SEQ ID NO: 1230428 - RNA, 19 nt, Artificial Sequence
  Description of Artificial Sequence: Synthetic oligonucleotide
ccgaguuucacuugcuuga

SEQ ID NO: 1230429 - RNA, 19 nt, Artificial Sequence
  Description of Artificial Sequence: Synthetic oligonucleotide
auguagcguguacccacgu

SEQ ID NO: 1230430 - RNA, 19 nt, Artificial Sequence
  Description of Artificial Sequence: Synthetic oligonucleotide
gcuugccccgagaugagag

SEQ ID NO: 1230431 - RNA, 19 nt, Artificial Sequence
  Description of Artificial Sequence: Synthetic oligonucleotide
gcaaucuggucacuuguaa

SEQ ID NO: 1230432 - RNA, 19 nt, Artificial Sequence
  Description of Artificial Sequence: Synthetic oligonucleotide
ccuacaggaggaaggcaac

SEQ ID NO: 1230433 - RNA, 19 nt, Artificial Sequence
  Description of Artificial Sequence: Synthetic oligonucleotide
uccuggucccguagugcaa

SEQ ID NO: 1230434 - RNA, 19 nt, Artificial Sequence
  Description of Artificial Sequence: Synthetic oligonucleotide
uagauggaucgagguguga

SEQ ID NO: 1230435 - RNA, 19 nt, Artificial Sequence
  Description of Artificial Sequence: Synthetic oligonucleotide
gcuucguagagauguaggu

SEQ ID NO: 1230436 - RNA, 19 nt, Artificial Sequence
  Description of Artificial Sequence: Synthetic oligonucleotide
cuucacgggugauguccac

SEQ ID NO: 1230437 - RNA, 19 nt, Artificial Sequence
  Description of Artificial Sequence: Synthetic oligonucleotide
cuggugacauaucaccagu

SEQ ID NO: 1230438 - RNA, 19 nt, Artificial Sequence
  Description of Artificial Sequence: Synthetic oligonucleotide
gguccugcacucgauuuac

SEQ ID NO: 1230439 - RNA, 19 nt, Artificial Sequence
  Description of Artificial Sequence: Synthetic oligonucleotide
guaguaggcugugcggcuc

SEQ ID NO: 1230440 - RNA, 19 nt, Artificial Sequence
  Description of Artificial Sequence: Synthetic oligonucleotide
cugcuugccccgagaugag

SEQ ID NO: 1230441 - RNA, 19 nt, Artificial Sequence
  Description of Artificial Sequence: Synthetic oligonucleotide
gccuugagaccgaaugaag

SEQ ID NO: 1230442 - RNA, 19 nt, Artificial Sequence
  Description of Artificial Sequence: Synthetic oligonucleotide
guaggacagguggcugucc

SEQ ID NO: 1230443 - RNA, 19 nt, Artificial Sequence
  Description of Artificial Sequence: Synthetic oligonucleotide
gauguaggucuugccucga

SEQ ID NO: 1230444 - RNA, 19 nt, Artificial Sequence
  Description of Artificial Sequence: Synthetic oligonucleotide
ucucgucgauauuggccua

SEQ ID NO: 1230445 - RNA, 19 nt, Artificial Sequence
  Description of Artificial Sequence: Synthetic oligonucleotide
accuuguaaccauguucuu

SEQ ID NO: 1230446 - RNA, 19 nt, Artificial Sequence
  Description of Artificial Sequence: Synthetic oligonucleotide
gcguguacccacgucgaag

SEQ ID NO: 1230447 - RNA, 19 nt, Artificial Sequence
  Description of Artificial Sequence: Synthetic oligonucleotide
ugcuugccccgagaugaga

SEQ ID NO: 1230448 - RNA, 19 nt, Artificial Sequence
  Description of Artificial Sequence: Synthetic oligonucleotide
acgcugaacuagauccuca

SEQ ID NO: 1230449 - RNA, 19 nt, Artificial Sequence
  Description of Artificial Sequence: Synthetic oligonucleotide
gauaucgugugagcuucgu

SEQ ID NO: 1230450 - RNA, 19 nt, Artificial Sequence
  Description of Artificial Sequence: Synthetic oligonucleotide
cguucgagcuccauuauaa

SEQ ID NO: 1230451 - RNA, 19 nt, Artificial Sequence
  Description of Artificial Sequence: Synthetic oligonucleotide
uggcuagggcauaggcaua

SEQ ID NO: 1230452 - RNA, 19 nt, Artificial Sequence
  Description of Artificial Sequence: Synthetic oligonucleotide
cgauauuggccuaaauuaa

SEQ ID NO: 1230453 - RNA, 19 nt, Artificial Sequence
  Description of Artificial Sequence: Synthetic oligonucleotide
ucgucgauauuggccuaaa

SEQ ID NO: 1230454 - RNA, 19 nt, Artificial Sequence
  Description of Artificial Sequence: Synthetic oligonucleotide
gccauaagccacaggugug

SEQ ID NO: 1230455 - RNA, 19 nt, Artificial Sequence
  Description of Artificial Sequence: Synthetic oligonucleotide
cccgcaucaaucucauuca

SEQ ID NO: 1230456 - RNA, 19 nt, Artificial Sequence
  Description of Artificial Sequence: Synthetic oligonucleotide
gccgguaaacccaccauga

SEQ ID NO: 1230457 - RNA, 19 nt, Artificial Sequence
  Description of Artificial Sequence: Synthetic oligonucleotide
ccgaaugaaguuggcuagg

SEQ ID NO: 1230458 - RNA, 19 nt, Artificial Sequence
  Description of Artificial Sequence: Synthetic oligonucleotide
ggcuagggcauaggcauac

SEQ ID NO: 1230459 - RNA, 19 nt, Artificial Sequence
  Description of Artificial Sequence: Synthetic oligonucleotide
agcguguacccacgucgaa

SEQ ID NO: 1230460 - RNA, 19 nt, Artificial Sequence
  Description of Artificial Sequence: Synthetic oligonucleotide
gauuuaccauguagcgugu

SEQ ID NO: 1230461 - RNA, 19 nt, Artificial Sequence
  Description of Artificial Sequence: Synthetic oligonucleotide
gacauaucaccaguacauu

SEQ ID NO: 1230462 - RNA, 19 nt, Artificial Sequence
  Description of Artificial Sequence: Synthetic oligonucleotide
agguggcuguccaauuccu

SEQ ID NO: 1230463 - RNA, 19 nt, Artificial Sequence
  Description of Artificial Sequence: Synthetic oligonucleotide
auuuaccauguagcgugua

SEQ ID NO: 1230464 - RNA, 19 nt, Artificial Sequence
  Description of Artificial Sequence: Synthetic oligonucleotide
cuaggaauugagacuuguu

SEQ ID NO: 1230465 - RNA, 19 nt, Artificial Sequence
  Description of Artificial Sequence: Synthetic oligonucleotide
cccguagugcaaauuccuc

SEQ ID NO: 1230466 - RNA, 19 nt, Artificial Sequence
  Description of Artificial Sequence: Synthetic oligonucleotide
guagcucacugccucucgu

SEQ ID NO: 1230467 - RNA, 19 nt, Artificial Sequence
  Description of Artificial Sequence: Synthetic oligonucleotide
cagaaucaaugaucgucgu

SEQ ID NO: 1230468 - RNA, 19 nt, Artificial Sequence
  Description of Artificial Sequence: Synthetic oligonucleotide
gggucauuacaaauagacu

SEQ ID NO: 1230469 - RNA, 19 nt, Artificial Sequence
  Description of Artificial Sequence: Synthetic oligonucleotide
cgaggugugacaugaaugu

SEQ ID NO: 1230470 - RNA, 19 nt, Artificial Sequence
  Description of Artificial Sequence: Synthetic oligonucleotide
cguguacccacgucgaaga

SEQ ID NO: 1230471 - RNA, 19 nt, Artificial Sequence
  Description of Artificial Sequence: Synthetic oligonucleotide
gggauagcgguaacgauau

SEQ ID NO: 1230472 - RNA, 19 nt, Artificial Sequence
  Description of Artificial Sequence: Synthetic oligonucleotide
acacccgcaucaaucucau

SEQ ID NO: 1230473 - RNA, 19 nt, Artificial Sequence
  Description of Artificial Sequence: Synthetic oligonucleotide
ggcucaagacgcugaacua

SEQ ID NO: 1230474 - RNA, 19 nt, Artificial Sequence
  Description of Artificial Sequence: Synthetic oligonucleotide
ccucgagccgguaaaccca

SEQ ID NO: 1230475 - RNA, 19 nt, Artificial Sequence
  Description of Artificial Sequence: Synthetic oligonucleotide
gguaguaggcugugcggcu

SEQ ID NO: 1230476 - RNA, 19 nt, Artificial Sequence
  Description of Artificial Sequence: Synthetic oligonucleotide
cucccuugggauagcggua

SEQ ID NO: 1230477 - RNA, 19 nt, Artificial Sequence
  Description of Artificial Sequence: Synthetic oligonucleotide
gccuggugacauaucacca

SEQ ID NO: 1230478 - RNA, 19 nt, Artificial Sequence
  Description of Artificial Sequence: Synthetic oligonucleotide
caugacggcauagguagau

SEQ ID NO: 1230479 - RNA, 19 nt, Artificial Sequence
  Description of Artificial Sequence: Synthetic oligonucleotide
cuccacucugcagccauaa

SEQ ID NO: 1230480 - RNA, 19 nt, Artificial Sequence
  Description of Artificial Sequence: Synthetic oligonucleotide
ccuuuagggcugccagagc

SEQ ID NO: 1230481 - RNA, 19 nt, Artificial Sequence
  Description of Artificial Sequence: Synthetic oligonucleotide
ccauaagccacagguguga

SEQ ID NO: 1230482 - RNA, 19 nt, Artificial Sequence
  Description of Artificial Sequence: Synthetic oligonucleotide
uggucccguagugcaaauu

SEQ ID NO: 1230483 - RNA, 19 nt, Artificial Sequence
  Description of Artificial Sequence: Synthetic oligonucleotide
gaucgaggugugacaugaa

SEQ ID NO: 1230484 - RNA, 19 nt, Artificial Sequence
  Description of Artificial Sequence: Synthetic oligonucleotide
cuuuagcaaacugcagaau

SEQ ID NO: 1230485 - RNA, 19 nt, Artificial Sequence
  Description of Artificial Sequence: Synthetic oligonucleotide
ugcggccucugagguugag

SEQ ID NO: 1230486 - RNA, 19 nt, Artificial Sequence
  Description of Artificial Sequence: Synthetic oligonucleotide
ccauuauaacuggcucaag

SEQ ID NO: 1230487 - RNA, 19 nt, Artificial Sequence
  Description of Artificial Sequence: Synthetic oligonucleotide
cagcuucacgggugauguc

SEQ ID NO: 1230488 - RNA, 19 nt, Artificial Sequence
  Description of Artificial Sequence: Synthetic oligonucleotide
cagccucuauauucaggua

SEQ ID NO: 1230489 - RNA, 19 nt, Artificial Sequence
  Description of Artificial Sequence: Synthetic oligonucleotide
cucgucgauauuggccuaa

SEQ ID NO: 1230490 - RNA, 19 nt, Artificial Sequence
  Description of Artificial Sequence: Synthetic oligonucleotide
cacuuuaguugguguuccu

SEQ ID NO: 1230491 - RNA, 19 nt, Artificial Sequence
  Description of Artificial Sequence: Synthetic oligonucleotide
gucguucgagcuccauuau

SEQ ID NO: 1230492 - RNA, 19 nt, Artificial Sequence
  Description of Artificial Sequence: Synthetic oligonucleotide
ggcaaucuggucacuugua

SEQ ID NO: 1230493 - RNA, 19 nt, Artificial Sequence
  Description of Artificial Sequence: Synthetic oligonucleotide
ccccaugacggcauaggua

SEQ ID NO: 1230494 - RNA, 19 nt, Artificial Sequence
  Description of Artificial Sequence: Synthetic oligonucleotide
gcugaugccuugagaccga

SEQ ID NO: 1230495 - RNA, 19 nt, Artificial Sequence
  Description of Artificial Sequence: Synthetic oligonucleotide
aggcaccgcaugacagccu

SEQ ID NO: 1230496 - RNA, 19 nt, Artificial Sequence
  Description of Artificial Sequence: Synthetic oligonucleotide
guguacccacgucgaagau

SEQ ID NO: 1230497 - RNA, 19 nt, Artificial Sequence
  Description of Artificial Sequence: Synthetic oligonucleotide
ggcauacugcuugccccga

SEQ ID NO: 1230498 - RNA, 19 nt, Artificial Sequence
  Description of Artificial Sequence: Synthetic oligonucleotide
gguugguaguugaucucau

SEQ ID NO: 1230499 - RNA, 19 nt, Artificial Sequence
  Description of Artificial Sequence: Synthetic oligonucleotide
cuugucguucgagcuccau

SEQ ID NO: 1230500 - RNA, 19 nt, Artificial Sequence
  Description of Artificial Sequence: Synthetic oligonucleotide
ccgcaacgugaccuuccuc

SEQ ID NO: 1230501 - RNA, 19 nt, Artificial Sequence
  Description of Artificial Sequence: Synthetic oligonucleotide
cgucgaagaucuugaugua

SEQ ID NO: 1230502 - RNA, 19 nt, Artificial Sequence
  Description of Artificial Sequence: Synthetic oligonucleotide
gcugugcggcucugaacau

SEQ ID NO: 1230503 - RNA, 19 nt, Artificial Sequence
  Description of Artificial Sequence: Synthetic oligonucleotide
ccgguaaacccaccaugau

SEQ ID NO: 1230504 - RNA, 19 nt, Artificial Sequence
  Description of Artificial Sequence: Synthetic oligonucleotide
cgguaacgauauuuauccu

SEQ ID NO: 1230505 - RNA, 19 nt, Artificial Sequence
  Description of Artificial Sequence: Synthetic oligonucleotide
cacgggugauguccacauu

SEQ ID NO: 1230506 - RNA, 19 nt, Artificial Sequence
  Description of Artificial Sequence: Synthetic oligonucleotide
ccuagggccucagcagucu

SEQ ID NO: 1230507 - RNA, 19 nt, Artificial Sequence
  Description of Artificial Sequence: Synthetic oligonucleotide
gucuugccucgagccggua

SEQ ID NO: 1230508 - RNA, 19 nt, Artificial Sequence
  Description of Artificial Sequence: Synthetic oligonucleotide
ggauagcgguaacgauauu

SEQ ID NO: 1230509 - RNA, 19 nt, Artificial Sequence
  Description of Artificial Sequence: Synthetic oligonucleotide
cgucgauauuggccuaaau

SEQ ID NO: 1230510 - RNA, 19 nt, Artificial Sequence
  Description of Artificial Sequence: Synthetic oligonucleotide
cacccgcaucaaucucauu

SEQ ID NO: 1230511 - RNA, 19 nt, Artificial Sequence
  Description of Artificial Sequence: Synthetic oligonucleotide
cgucguucucugguagugu

SEQ ID NO: 1230512 - RNA, 19 nt, Artificial Sequence
  Description of Artificial Sequence: Synthetic oligonucleotide
aauuaagacaucaugaagc

SEQ ID NO: 1230513 - RNA, 19 nt, Artificial Sequence
  Description of Artificial Sequence: Synthetic oligonucleotide
aucuaaagaaccuucagcc

SEQ ID NO: 1230514 - RNA, 19 nt, Artificial Sequence
  Description of Artificial Sequence: Synthetic oligonucleotide
aauucguucagaaaguucc

SEQ ID NO: 1230515 - RNA, 19 nt, Artificial Sequence
  Description of Artificial Sequence: Synthetic oligonucleotide
aaacaaguucaucaaaccc

SEQ ID NO: 1230516 - RNA, 19 nt, Artificial Sequence
  Description of Artificial Sequence: Synthetic oligonucleotide
ucacuaacgaaccauaucc

SEQ ID NO: 1230517 - RNA, 19 nt, Artificial Sequence
  Description of Artificial Sequence: Synthetic oligonucleotide
auuaacugcaaagagauag

SEQ ID NO: 1230518 - RNA, 19 nt, Artificial Sequence
  Description of Artificial Sequence: Synthetic oligonucleotide
uuuuauacauaagaugccg

SEQ ID NO: 1230519 - RNA, 19 nt, Artificial Sequence
  Description of Artificial Sequence: Synthetic oligonucleotide
ucaugugcgagauaaaagc

SEQ ID NO: 1230520 - RNA, 19 nt, Artificial Sequence
  Description of Artificial Sequence: Synthetic oligonucleotide
ugaaauaucacugccaaac

SEQ ID NO: 1230521 - RNA, 19 nt, Artificial Sequence
  Description of Artificial Sequence: Synthetic oligonucleotide
ucaaggauggcucaucugc

SEQ ID NO: 1230522 - RNA, 19 nt, Artificial Sequence
  Description of Artificial Sequence: Synthetic oligonucleotide
uguauaauaaucccagcgu

SEQ ID NO: 1230523 - RNA, 19 nt, Artificial Sequence
  Description of Artificial Sequence: Synthetic oligonucleotide
uugaacauugacauuaccu

SEQ ID NO: 1230524 - RNA, 19 nt, Artificial Sequence
  Description of Artificial Sequence: Synthetic oligonucleotide
ucaguauacaaaaugaguu

SEQ ID NO: 1230525 - RNA, 19 nt, Artificial Sequence
  Description of Artificial Sequence: Synthetic oligonucleotide
agcgucaggacauacuucc

SEQ ID NO: 1230526 - RNA, 19 nt, Artificial Sequence
  Description of Artificial Sequence: Synthetic oligonucleotide
acacccucaaaauaucucc

SEQ ID NO: 1230527 - RNA, 19 nt, Artificial Sequence
  Description of Artificial Sequence: Synthetic oligonucleotide
uccuguauaauaaucccag

SEQ ID NO: 1230528 - RNA, 19 nt, Artificial Sequence
  Description of Artificial Sequence: Synthetic oligonucleotide
auacauaagaugccgcagc

SEQ ID NO: 1230529 - RNA, 19 nt, Artificial Sequence
  Description of Artificial Sequence: Synthetic oligonucleotide
acuaacgaaccauaucccc

SEQ ID NO: 1230530 - RNA, 19 nt, Artificial Sequence
  Description of Artificial Sequence: Synthetic oligonucleotide
ucuguauuguuuuggagcc

SEQ ID NO: 1230531 - RNA, 19 nt, Artificial Sequence
  Description of Artificial Sequence: Synthetic oligonucleotide
cuguauaauaaucccagcg

SEQ ID NO: 1230532 - RNA, 19 nt, Artificial Sequence
  Description of Artificial Sequence: Synthetic oligonucleotide
uucaguauacaaaaugagu

SEQ ID NO: 1230533 - RNA, 19 nt, Artificial Sequence
  Description of Artificial Sequence: Synthetic oligonucleotide
aguuccuguauaauaaucc

SEQ ID NO: 1230534 - RNA, 19 nt, Artificial Sequence
  Description of Artificial Sequence: Synthetic oligonucleotide
aauaucuccagcgagagua

SEQ ID NO: 1230535 - RNA, 19 nt, Artificial Sequence
  Description of Artificial Sequence: Synthetic oligonucleotide
agauaguuugaacauugac

SEQ ID NO: 1230536 - RNA, 19 nt, Artificial Sequence
  Description of Artificial Sequence: Synthetic oligonucleotide
uccaagcauaucaugaugc

SEQ ID NO: 1230537 - RNA, 19 nt, Artificial Sequence
  Description of Artificial Sequence: Synthetic oligonucleotide
auuaauggcaugugaccgc

SEQ ID NO: 1230538 - RNA, 19 nt, Artificial Sequence
  Description of Artificial Sequence: Synthetic oligonucleotide
ucuaaagaaccuucagccg

SEQ ID NO: 1230539 - RNA, 19 nt, Artificial Sequence
  Description of Artificial Sequence: Synthetic oligonucleotide
uuuauacauaagaugccgc

SEQ ID NO: 1230540 - RNA, 19 nt, Artificial Sequence
  Description of Artificial Sequence: Synthetic oligonucleotide
uauaauaaucccagcguca

SEQ ID NO: 1230541 - RNA, 19 nt, Artificial Sequence
  Description of Artificial Sequence: Synthetic oligonucleotide
uuuaugcacgggaagagca

SEQ ID NO: 1230542 - RNA, 19 nt, Artificial Sequence
  Description of Artificial Sequence: Synthetic oligonucleotide
gaaauuuaugcacgggaag

SEQ ID NO: 1230543 - RNA, 19 nt, Artificial Sequence
  Description of Artificial Sequence: Synthetic oligonucleotide
aggucauccauucacuaac

SEQ ID NO: 1230544 - RNA, 19 nt, Artificial Sequence
  Description of Artificial Sequence: Synthetic oligonucleotide
aaggugucugucuuuguuc

SEQ ID NO: 1230545 - RNA, 19 nt, Artificial Sequence
  Description of Artificial Sequence: Synthetic oligonucleotide
caaagagauaguuugaaca

SEQ ID NO: 1230546 - RNA, 19 nt, Artificial Sequence
  Description of Artificial Sequence: Synthetic oligonucleotide
aaauuuaugcacgggaaga

SEQ ID NO: 1230547 - RNA, 19 nt, Artificial Sequence
  Description of Artificial Sequence: Synthetic oligonucleotide
uuuaaagcacaccaaggaa

SEQ ID NO: 1230548 - RNA, 19 nt, Artificial Sequence
  Description of Artificial Sequence: Synthetic oligonucleotide
uuauacauaagaugccgca

SEQ ID NO: 1230549 - RNA, 19 nt, Artificial Sequence
  Description of Artificial Sequence: Synthetic oligonucleotide
agauuugacuuauuucggg

SEQ ID NO: 1230550 - RNA, 19 nt, Artificial Sequence
  Description of Artificial Sequence: Synthetic oligonucleotide
auaccagggauucagcauc

SEQ ID NO: 1230551 - RNA, 19 nt, Artificial Sequence
  Description of Artificial Sequence: Synthetic oligonucleotide
ugaaauuuaugcacgggaa

SEQ ID NO: 1230552 - RNA, 19 nt, Artificial Sequence
  Description of Artificial Sequence: Synthetic oligonucleotide
uguagacuuuauuuuauac

SEQ ID NO: 1230553 - RNA, 19 nt, Artificial Sequence
  Description of Artificial Sequence: Synthetic oligonucleotide
ugggucgauaucaacaagc

SEQ ID NO: 1230554 - RNA, 19 nt, Artificial Sequence
  Description of Artificial Sequence: Synthetic oligonucleotide
aaauaucacugccaaacaa

SEQ ID NO: 1230555 - RNA, 19 nt, Artificial Sequence
  Description of Artificial Sequence: Synthetic oligonucleotide
ucguucaucauguuguaug

SEQ ID NO: 1230556 - RNA, 19 nt, Artificial Sequence
  Description of Artificial Sequence: Synthetic oligonucleotide
uuugacuuauuucggguga

SEQ ID NO: 1230557 - RNA, 19 nt, Artificial Sequence
  Description of Artificial Sequence: Synthetic oligonucleotide
cuucaguauacaaaaugag

SEQ ID NO: 1230558 - RNA, 19 nt, Artificial Sequence
  Description of Artificial Sequence: Synthetic oligonucleotide
aaaauguccguugcucuac

SEQ ID NO: 1230559 - RNA, 19 nt, Artificial Sequence
  Description of Artificial Sequence: Synthetic oligonucleotide
aauuuaugcacgggaagag

SEQ ID NO: 1230560 - RNA, 19 nt, Artificial Sequence
  Description of Artificial Sequence: Synthetic oligonucleotide
uguaucgaaaugucacagg

SEQ ID NO: 1230561 - RNA, 19 nt, Artificial Sequence
  Description of Artificial Sequence: Synthetic oligonucleotide
auuggaaucccagacuugg

SEQ ID NO: 1230562 - RNA, 19 nt, Artificial Sequence
  Description of Artificial Sequence: Synthetic oligonucleotide
uugaaucucacuuaauuuu

SEQ ID NO: 1230563 - RNA, 19 nt, Artificial Sequence
  Description of Artificial Sequence: Synthetic oligonucleotide
aaacucaugugcgagauaa

SEQ ID NO: 1230564 - RNA, 19 nt, Artificial Sequence
  Description of Artificial Sequence: Synthetic oligonucleotide
accucuacuagguguaucg

SEQ ID NO: 1230565 - RNA, 19 nt, Artificial Sequence
  Description of Artificial Sequence: Synthetic oligonucleotide
uaucaugaugcacauaaua

SEQ ID NO: 1230566 - RNA, 19 nt, Artificial Sequence
  Description of Artificial Sequence: Synthetic oligonucleotide
uccacaaaagccucugaag

SEQ ID NO: 1230567 - RNA, 19 nt, Artificial Sequence
  Description of Artificial Sequence: Synthetic oligonucleotide
aucagaaacuugugggucg

SEQ ID NO: 1230568 - RNA, 19 nt, Artificial Sequence
  Description of Artificial Sequence: Synthetic oligonucleotide
acauaauaucccuuggcug

SEQ ID NO: 1230569 - RNA, 19 nt, Artificial Sequence
  Description of Artificial Sequence: Synthetic oligonucleotide
caauuaagacaucaugaag

SEQ ID NO: 1230570 - RNA, 19 nt, Artificial Sequence
  Description of Artificial Sequence: Synthetic oligonucleotide
aaacuugugggucgauauc

SEQ ID NO: 1230571 - RNA, 19 nt, Artificial Sequence
  Description of Artificial Sequence: Synthetic oligonucleotide
cuuuaucuaaagaaccuuc

SEQ ID NO: 1230572 - RNA, 19 nt, Artificial Sequence
  Description of Artificial Sequence: Synthetic oligonucleotide
cuugacuugcaucaugaag

SEQ ID NO: 1230573 - RNA, 19 nt, Artificial Sequence
  Description of Artificial Sequence: Synthetic oligonucleotide
ucuacuagguguaucgaaa

SEQ ID NO: 1230574 - RNA, 19 nt, Artificial Sequence
  Description of Artificial Sequence: Synthetic oligonucleotide
acaaaccucagcuuaucag

SEQ ID NO: 1230575 - RNA, 19 nt, Artificial Sequence
  Description of Artificial Sequence: Synthetic oligonucleotide
ugcacauaauaucccuugg

SEQ ID NO: 1230576 - RNA, 19 nt, Artificial Sequence
  Description of Artificial Sequence: Synthetic oligonucleotide
ucgggugaaguaaugaagu

SEQ ID NO: 1230577 - RNA, 19 nt, Artificial Sequence
  Description of Artificial Sequence: Synthetic oligonucleotide
uuuuagcacagacccaagc

SEQ ID NO: 1230578 - RNA, 19 nt, Artificial Sequence
  Description of Artificial Sequence: Synthetic oligonucleotide
aucgaaaugucacagguuu

SEQ ID NO: 1230579 - RNA, 19 nt, Artificial Sequence
  Description of Artificial Sequence: Synthetic oligonucleotide
auuugacuuauuucgggug

SEQ ID NO: 1230580 - RNA, 19 nt, Artificial Sequence
  Description of Artificial Sequence: Synthetic oligonucleotide
uccgcgucucaccaaagcg

SEQ ID NO: 1230581 - RNA, 19 nt, Artificial Sequence
  Description of Artificial Sequence: Synthetic oligonucleotide
agguguaucgaaaugucac

SEQ ID NO: 1230582 - RNA, 19 nt, Artificial Sequence
  Description of Artificial Sequence: Synthetic oligonucleotide
uaacgaaccauauccccag

SEQ ID NO: 1230583 - RNA, 19 nt, Artificial Sequence
  Description of Artificial Sequence: Synthetic oligonucleotide
aaguaaugaagucuccuuu

SEQ ID NO: 1230584 - RNA, 19 nt, Artificial Sequence
  Description of Artificial Sequence: Synthetic oligonucleotide
uauacauaagaugccgcag

SEQ ID NO: 1230585 - RNA, 19 nt, Artificial Sequence
  Description of Artificial Sequence: Synthetic oligonucleotide
uuccuguauaauaauccca

SEQ ID NO: 1230586 - RNA, 19 nt, Artificial Sequence
  Description of Artificial Sequence: Synthetic oligonucleotide
ucagcuuaucagaaacuug

SEQ ID NO: 1230587 - RNA, 19 nt, Artificial Sequence
  Description of Artificial Sequence: Synthetic oligonucleotide
auuuaugcacgggaagagc

SEQ ID NO: 1230588 - RNA, 19 nt, Artificial Sequence
  Description of Artificial Sequence: Synthetic oligonucleotide
guauaauaaucccagcguc

SEQ ID NO: 1230589 - RNA, 19 nt, Artificial Sequence
  Description of Artificial Sequence: Synthetic oligonucleotide
caaggugccaagacaaacc

SEQ ID NO: 1230590 - RNA, 19 nt, Artificial Sequence
  Description of Artificial Sequence: Synthetic oligonucleotide
auaauaaucccagcgucag

SEQ ID NO: 1230591 - RNA, 19 nt, Artificial Sequence
  Description of Artificial Sequence: Synthetic oligonucleotide
ucugaaauuuaugcacggg

SEQ ID NO: 1230592 - RNA, 19 nt, Artificial Sequence
  Description of Artificial Sequence: Synthetic oligonucleotide
uuaacugcaaagagauagu

SEQ ID NO: 1230593 - RNA, 19 nt, Artificial Sequence
  Description of Artificial Sequence: Synthetic oligonucleotide
uuugaacauugacauuacc

SEQ ID NO: 1230594 - RNA, 19 nt, Artificial Sequence
  Description of Artificial Sequence: Synthetic oligonucleotide
aacuugugggucgauauca

SEQ ID NO: 1230595 - RNA, 19 nt, Artificial Sequence
  Description of Artificial Sequence: Synthetic oligonucleotide
ugugguagcaaagcaaaga

SEQ ID NO: 1230596 - RNA, 19 nt, Artificial Sequence
  Description of Artificial Sequence: Synthetic oligonucleotide
ugaugugguagcaaagcaa

SEQ ID NO: 1230597 - RNA, 19 nt, Artificial Sequence
  Description of Artificial Sequence: Synthetic oligonucleotide
uugaaucuuucucccaucu

SEQ ID NO: 1230598 - RNA, 19 nt, Artificial Sequence
  Description of Artificial Sequence: Synthetic oligonucleotide
cauaagaugccgcagcauc

SEQ ID NO: 1230599 - RNA, 19 nt, Artificial Sequence
  Description of Artificial Sequence: Synthetic oligonucleotide
uacauaagaugccgcagca

SEQ ID NO: 1230600 - RNA, 19 nt, Artificial Sequence
  Description of Artificial Sequence: Synthetic oligonucleotide
cagccgaacaucaaugccc

SEQ ID NO: 1230601 - RNA, 19 nt, Artificial Sequence
  Description of Artificial Sequence: Synthetic oligonucleotide
ugcaauucguucagaaagu

SEQ ID NO: 1230602 - RNA, 19 nt, Artificial Sequence
  Description of Artificial Sequence: Synthetic oligonucleotide
cucaugugcgagauaaaag

SEQ ID NO: 1230603 - RNA, 19 nt, Artificial Sequence
  Description of Artificial Sequence: Synthetic oligonucleotide
ucagccgaacaucaaugcc

SEQ ID NO: 1230604 - RNA, 19 nt, Artificial Sequence
  Description of Artificial Sequence: Synthetic oligonucleotide
guugaaauaucacugccaa

SEQ ID NO: 1230605 - RNA, 19 nt, Artificial Sequence
  Description of Artificial Sequence: Synthetic oligonucleotide
agagauaguuugaacauug

SEQ ID NO: 1230606 - RNA, 19 nt, Artificial Sequence
  Description of Artificial Sequence: Synthetic oligonucleotide
uguauuguuuuggagccug

SEQ ID NO: 1230607 - RNA, 19 nt, Artificial Sequence
  Description of Artificial Sequence: Synthetic oligonucleotide
uucagaucucgguaccagg

SEQ ID NO: 1230608 - RNA, 19 nt, Artificial Sequence
  Description of Artificial Sequence: Synthetic oligonucleotide
acuagguguaucgaaaugu

SEQ ID NO: 1230609 - RNA, 19 nt, Artificial Sequence
  Description of Artificial Sequence: Synthetic oligonucleotide
uucacuaacgaaccauauc

SEQ ID NO: 1230610 - RNA, 19 nt, Artificial Sequence
  Description of Artificial Sequence: Synthetic oligonucleotide
augcacauaauaucccuug

SEQ ID NO: 1230611 - RNA, 19 nt, Artificial Sequence
  Description of Artificial Sequence: Synthetic oligonucleotide
uaauaaucccagcgucagg

SEQ ID NO: 1230612 - RNA, 19 nt, Artificial Sequence
  Description of Artificial Sequence: Synthetic oligonucleotide
aagaugccgcagcaucggc

SEQ ID NO: 1230613 - RNA, 19 nt, Artificial Sequence
  Description of Artificial Sequence: Synthetic oligonucleotide
ugucaaugcuugaaucuca

SEQ ID NO: 1230614 - RNA, 19 nt, Artificial Sequence
  Description of Artificial Sequence: Synthetic oligonucleotide
cuaaagaaccuucagccga

SEQ ID NO: 1230615 - RNA, 19 nt, Artificial Sequence
  Description of Artificial Sequence: Synthetic oligonucleotide
ccucaaaauaucuccagcg

SEQ ID NO: 1230616 - RNA, 19 nt, Artificial Sequence
  Description of Artificial Sequence: Synthetic oligonucleotide
ucauucccggagcugaagc

SEQ ID NO: 1230617 - RNA, 19 nt, Artificial Sequence
  Description of Artificial Sequence: Synthetic oligonucleotide
auguauaccagggauucag

SEQ ID NO: 1230618 - RNA, 19 nt, Artificial Sequence
  Description of Artificial Sequence: Synthetic oligonucleotide
ucccuugugccauucugcg

SEQ ID NO: 1230619 - RNA, 19 nt, Artificial Sequence
  Description of Artificial Sequence: Synthetic oligonucleotide
gcuuaucagaaacuugugg

SEQ ID NO: 1230620 - RNA, 19 nt, Artificial Sequence
  Description of Artificial Sequence: Synthetic oligonucleotide
acaaggugccaagacaaac

SEQ ID NO: 1230621 - RNA, 19 nt, Artificial Sequence
  Description of Artificial Sequence: Synthetic oligonucleotide
uucagccgaacaucaaugc

SEQ ID NO: 1230622 - RNA, 19 nt, Artificial Sequence
  Description of Artificial Sequence: Synthetic oligonucleotide
guagucggcaaucagggca

SEQ ID NO: 1230623 - RNA, 19 nt, Artificial Sequence
  Description of Artificial Sequence: Synthetic oligonucleotide
uacuagguguaucgaaaug

SEQ ID NO: 1230624 - RNA, 19 nt, Artificial Sequence
  Description of Artificial Sequence: Synthetic oligonucleotide
uguauaccagggauucagc

SEQ ID NO: 1230625 - RNA, 19 nt, Artificial Sequence
  Description of Artificial Sequence: Synthetic oligonucleotide
uaucaacaagcacuucucu

SEQ ID NO: 1230626 - RNA, 19 nt, Artificial Sequence
  Description of Artificial Sequence: Synthetic oligonucleotide
uuggcucaccucuacuagg

SEQ ID NO: 1230627 - RNA, 19 nt, Artificial Sequence
  Description of Artificial Sequence: Synthetic oligonucleotide
cgagauaaaagcuguaucc

SEQ ID NO: 1230628 - RNA, 19 nt, Artificial Sequence
  Description of Artificial Sequence: Synthetic oligonucleotide
uuucgggugaaguaaugaa

SEQ ID NO: 1230629 - RNA, 19 nt, Artificial Sequence
  Description of Artificial Sequence: Synthetic oligonucleotide
uagguguaucgaaauguca

SEQ ID NO: 1230630 - RNA, 19 nt, Artificial Sequence
  Description of Artificial Sequence: Synthetic oligonucleotide
aaucccagacuuggugacc

SEQ ID NO: 1230631 - RNA, 19 nt, Artificial Sequence
  Description of Artificial Sequence: Synthetic oligonucleotide
uguuguaugaaggcuucug

SEQ ID NO: 1230632 - RNA, 19 nt, Artificial Sequence
  Description of Artificial Sequence: Synthetic oligonucleotide
auacaggggaugcccacac

SEQ ID NO: 1230633 - RNA, 19 nt, Artificial Sequence
  Description of Artificial Sequence: Synthetic oligonucleotide
aggggaugcccacacgggc

SEQ ID NO: 1230634 - RNA, 19 nt, Artificial Sequence
  Description of Artificial Sequence: Synthetic oligonucleotide
cugaaauuuaugcacggga

SEQ ID NO: 1230635 - RNA, 19 nt, Artificial Sequence
  Description of Artificial Sequence: Synthetic oligonucleotide
auaagaugccgcagcaucg

SEQ ID NO: 1230636 - RNA, 19 nt, Artificial Sequence
  Description of Artificial Sequence: Synthetic oligonucleotide
uuaauggcaugugaccgcc

SEQ ID NO: 1230637 - RNA, 19 nt, Artificial Sequence
  Description of Artificial Sequence: Synthetic oligonucleotide
aauguccguugcucuacag

SEQ ID NO: 1230638 - RNA, 19 nt, Artificial Sequence
  Description of Artificial Sequence: Synthetic oligonucleotide
aaguaacugcugcuucaag

SEQ ID NO: 1230639 - RNA, 19 nt, Artificial Sequence
  Description of Artificial Sequence: Synthetic oligonucleotide
uaagaugccgcagcaucgg

SEQ ID NO: 1230640 - RNA, 19 nt, Artificial Sequence
  Description of Artificial Sequence: Synthetic oligonucleotide
ucguucagaaaguuccugu

SEQ ID NO: 1230641 - RNA, 19 nt, Artificial Sequence
  Description of Artificial Sequence: Synthetic oligonucleotide
uauuucgggugaaguaaug

SEQ ID NO: 1230642 - RNA, 19 nt, Artificial Sequence
  Description of Artificial Sequence: Synthetic oligonucleotide
cuagguguaucgaaauguc

SEQ ID NO: 1230643 - RNA, 19 nt, Artificial Sequence
  Description of Artificial Sequence: Synthetic oligonucleotide
cacuaacgaaccauauccc

SEQ ID NO: 1230644 - RNA, 19 nt, Artificial Sequence
  Description of Artificial Sequence: Synthetic oligonucleotide
uuauuucgggugaaguaau

SEQ ID NO: 1230645 - RNA, 19 nt, Artificial Sequence
  Description of Artificial Sequence: Synthetic oligonucleotide
caugugaccgccagugccc

SEQ ID NO: 1230646 - RNA, 19 nt, Artificial Sequence
  Description of Artificial Sequence: Synthetic oligonucleotide
aacccagcuacagaugaug

SEQ ID NO: 1230647 - RNA, 19 nt, Artificial Sequence
  Description of Artificial Sequence: Synthetic oligonucleotide
gaugugguagcaaagcaaa

SEQ ID NO: 1230648 - RNA, 19 nt, Artificial Sequence
  Description of Artificial Sequence: Synthetic oligonucleotide
uggguuggucaaaaccucc

SEQ ID NO: 1230649 - RNA, 19 nt, Artificial Sequence
  Description of Artificial Sequence: Synthetic oligonucleotide
gacccaagcugacugaaca

SEQ ID NO: 1230650 - RNA, 19 nt, Artificial Sequence
  Description of Artificial Sequence: Synthetic oligonucleotide
cuaacgaaccauaucccca

SEQ ID NO: 1230651 - RNA, 19 nt, Artificial Sequence
  Description of Artificial Sequence: Synthetic oligonucleotide
aagaaccuucagccgaaca

SEQ ID NO: 1230652 - RNA, 19 nt, Artificial Sequence
  Description of Artificial Sequence: Synthetic oligonucleotide
uccagcuaaugcaauucgu

SEQ ID NO: 1230653 - RNA, 19 nt, Artificial Sequence
  Description of Artificial Sequence: Synthetic oligonucleotide
aggguucauuaacauauca

SEQ ID NO: 1230654 - RNA, 19 nt, Artificial Sequence
  Description of Artificial Sequence: Synthetic oligonucleotide
ucugaggguucauuaacau

SEQ ID NO: 1230655 - RNA, 19 nt, Artificial Sequence
  Description of Artificial Sequence: Synthetic oligonucleotide
cauguuguaugaaggcuuc

SEQ ID NO: 1230656 - RNA, 19 nt, Artificial Sequence
  Description of Artificial Sequence: Synthetic oligonucleotide
guguaucgaaaugucacag

SEQ ID NO: 1230657 - RNA, 19 nt, Artificial Sequence
  Description of Artificial Sequence: Synthetic oligonucleotide
auaauaucccuuggcuggg

SEQ ID NO: 1230658 - RNA, 19 nt, Artificial Sequence
  Description of Artificial Sequence: Synthetic oligonucleotide
aaauaucuccagcgagagu

SEQ ID NO: 1230659 - RNA, 19 nt, Artificial Sequence
  Description of Artificial Sequence: Synthetic oligonucleotide
ugccaagacaaaccucagc

SEQ ID NO: 1230660 - RNA, 19 nt, Artificial Sequence
  Description of Artificial Sequence: Synthetic oligonucleotide
acccucaaaauaucuccag

SEQ ID NO: 1230661 - RNA, 19 nt, Artificial Sequence
  Description of Artificial Sequence: Synthetic oligonucleotide
cagcuaaugcaauucguuc

SEQ ID NO: 1230662 - RNA, 19 nt, Artificial Sequence
  Description of Artificial Sequence: Synthetic oligonucleotide
acugaacacccucaaaaua

SEQ ID NO: 1230663 - RNA, 19 nt, Artificial Sequence
  Description of Artificial Sequence: Synthetic oligonucleotide
gauuugacuuauuucgggu

SEQ ID NO: 1230664 - RNA, 19 nt, Artificial Sequence
  Description of Artificial Sequence: Synthetic oligonucleotide
agggauucagcaucucucu

SEQ ID NO: 1230665 - RNA, 19 nt, Artificial Sequence
  Description of Artificial Sequence: Synthetic oligonucleotide
guaucgaaaugucacaggu

SEQ ID NO: 1230666 - RNA, 19 nt, Artificial Sequence
  Description of Artificial Sequence: Synthetic oligonucleotide
gcuaaugcaauucguucag

SEQ ID NO: 1230667 - RNA, 19 nt, Artificial Sequence
  Description of Artificial Sequence: Synthetic oligonucleotide
aggagcaauuaagacauca

SEQ ID NO: 1230668 - RNA, 19 nt, Artificial Sequence
  Description of Artificial Sequence: Synthetic oligonucleotide
aaauguccguugcucuaca

SEQ ID NO: 1230669 - RNA, 19 nt, Artificial Sequence
  Description of Artificial Sequence: Synthetic oligonucleotide
gugguagcaaagcaaagaa

SEQ ID NO: 1230670 - RNA, 19 nt, Artificial Sequence
  Description of Artificial Sequence: Synthetic oligonucleotide
aaagaaccuucagccgaac

SEQ ID NO: 1230671 - RNA, 19 nt, Artificial Sequence
  Description of Artificial Sequence: Synthetic oligonucleotide
aagcacaccaaggaauuaa

SEQ ID NO: 1230672 - RNA, 19 nt, Artificial Sequence
  Description of Artificial Sequence: Synthetic oligonucleotide
ggugaaguaaugaagucuc

SEQ ID NO: 1230673 - RNA, 19 nt, Artificial Sequence
  Description of Artificial Sequence: Synthetic oligonucleotide
ugugccauucugcgcaggu

SEQ ID NO: 1230674 - RNA, 19 nt, Artificial Sequence
  Description of Artificial Sequence: Synthetic oligonucleotide
ugacuugcaucaugaaguc

SEQ ID NO: 1230675 - RNA, 19 nt, Artificial Sequence
  Description of Artificial Sequence: Synthetic oligonucleotide
caaacccagcuacagauga

SEQ ID NO: 1230676 - RNA, 19 nt, Artificial Sequence
  Description of Artificial Sequence: Synthetic oligonucleotide
aaaagccucugaagguguc

SEQ ID NO: 1230677 - RNA, 19 nt, Artificial Sequence
  Description of Artificial Sequence: Synthetic oligonucleotide
uucugcgcagguaacugaa

SEQ ID NO: 1230678 - RNA, 19 nt, Artificial Sequence
  Description of Artificial Sequence: Synthetic oligonucleotide
gaaacuugugggucgauau

SEQ ID NO: 1230679 - RNA, 19 nt, Artificial Sequence
  Description of Artificial Sequence: Synthetic oligonucleotide
agagaggcuacuuucccuu

SEQ ID NO: 1230680 - RNA, 19 nt, Artificial Sequence
  Description of Artificial Sequence: Synthetic oligonucleotide
uaucgaaaugucacagguu

SEQ ID NO: 1230681 - RNA, 19 nt, Artificial Sequence
  Description of Artificial Sequence: Synthetic oligonucleotide
ugcgagauaaaagcuguau

SEQ ID NO: 1230682 - RNA, 19 nt, Artificial Sequence
  Description of Artificial Sequence: Synthetic oligonucleotide
auaucccuuggcuggguug

SEQ ID NO: 1230683 - RNA, 19 nt, Artificial Sequence
  Description of Artificial Sequence: Synthetic oligonucleotide
aaucccagcgucaggacau

SEQ ID NO: 1230684 - RNA, 19 nt, Artificial Sequence
  Description of Artificial Sequence: Synthetic oligonucleotide
cucugaugugguagcaaag

SEQ ID NO: 1230685 - RNA, 19 nt, Artificial Sequence
  Description of Artificial Sequence: Synthetic oligonucleotide
aagagauaguuugaacauu

SEQ ID NO: 1230686 - RNA, 19 nt, Artificial Sequence
  Description of Artificial Sequence: Synthetic oligonucleotide
uggcucaccucuacuaggu

SEQ ID NO: 1230687 - RNA, 19 nt, Artificial Sequence
  Description of Artificial Sequence: Synthetic oligonucleotide
gacaaaccucagcuuauca

SEQ ID NO: 1230688 - RNA, 19 nt, Artificial Sequence
  Description of Artificial Sequence: Synthetic oligonucleotide
cuccaagcauaucaugaug

SEQ ID NO: 1230689 - RNA, 19 nt, Artificial Sequence
  Description of Artificial Sequence: Synthetic oligonucleotide
uuuguuccaucauggccgu

SEQ ID NO: 1230690 - RNA, 19 nt, Artificial Sequence
  Description of Artificial Sequence: Synthetic oligonucleotide
uucguucagaaaguuccug

SEQ ID NO: 1230691 - RNA, 19 nt, Artificial Sequence
  Description of Artificial Sequence: Synthetic oligonucleotide
aggggcuaguauuuuauua

SEQ ID NO: 1230692 - RNA, 19 nt, Artificial Sequence
  Description of Artificial Sequence: Synthetic oligonucleotide
uuaugcacgggaagagcau

SEQ ID NO: 1230693 - RNA, 19 nt, Artificial Sequence
  Description of Artificial Sequence: Synthetic oligonucleotide
gaaccuucagccgaacauc

SEQ ID NO: 1230694 - RNA, 19 nt, Artificial Sequence
  Description of Artificial Sequence: Synthetic oligonucleotide
cagcuuaucagaaacuugu

SEQ ID NO: 1230695 - RNA, 19 nt, Artificial Sequence
  Description of Artificial Sequence: Synthetic oligonucleotide
ucuccagcgagaguacccc

SEQ ID NO: 1230696 - RNA, 19 nt, Artificial Sequence
  Description of Artificial Sequence: Synthetic oligonucleotide
ugcgcagguaacugaaauc

SEQ ID NO: 1230697 - RNA, 19 nt, Artificial Sequence
  Description of Artificial Sequence: Synthetic oligonucleotide
aaaccucagcuuaucagaa

SEQ ID NO: 1230698 - RNA, 19 nt, Artificial Sequence
  Description of Artificial Sequence: Synthetic oligonucleotide
gaguaccccggccuggacc

SEQ ID NO: 1230699 - RNA, 19 nt, Artificial Sequence
  Description of Artificial Sequence: Synthetic oligonucleotide
augugcgagauaaaagcug

SEQ ID NO: 1230700 - RNA, 19 nt, Artificial Sequence
  Description of Artificial Sequence: Synthetic oligonucleotide
ggugccaagacaaaccuca

SEQ ID NO: 1230701 - RNA, 19 nt, Artificial Sequence
  Description of Artificial Sequence: Synthetic oligonucleotide
uugaaauaucacugccaaa

SEQ ID NO: 1230702 - RNA, 19 nt, Artificial Sequence
  Description of Artificial Sequence: Synthetic oligonucleotide
aauaucccuuggcuggguu

SEQ ID NO: 1230703 - RNA, 19 nt, Artificial Sequence
  Description of Artificial Sequence: Synthetic oligonucleotide
acucaugugcgagauaaaa

SEQ ID NO: 1230704 - RNA, 19 nt, Artificial Sequence
  Description of Artificial Sequence: Synthetic oligonucleotide
cugaacacccucaaaauau

SEQ ID NO: 1230705 - RNA, 19 nt, Artificial Sequence
  Description of Artificial Sequence: Synthetic oligonucleotide
aaccuucagccgaacauca

SEQ ID NO: 1230706 - RNA, 19 nt, Artificial Sequence
  Description of Artificial Sequence: Synthetic oligonucleotide
gaggcuacuuucccuugug

SEQ ID NO: 1230707 - RNA, 19 nt, Artificial Sequence
  Description of Artificial Sequence: Synthetic oligonucleotide
ggucaaaaccuccuucaug

SEQ ID NO: 1230708 - RNA, 19 nt, Artificial Sequence
  Description of Artificial Sequence: Synthetic oligonucleotide
ugacuuauuucgggugaag

SEQ ID NO: 1230709 - RNA, 19 nt, Artificial Sequence
  Description of Artificial Sequence: Synthetic oligonucleotide
ggucccuucguucaucaug

SEQ ID NO: 1230710 - RNA, 19 nt, Artificial Sequence
  Description of Artificial Sequence: Synthetic oligonucleotide
cacccgguugcuuucugcc

SEQ ID NO: 1230711 - RNA, 19 nt, Artificial Sequence
  Description of Artificial Sequence: Synthetic oligonucleotide
ccguagucggcaaucaggg

SEQ ID NO: 1230712 - RNA, 19 nt, Artificial Sequence
  Description of Artificial Sequence: Synthetic oligonucleotide
guuccaggagcaauuaaga

SEQ ID NO: 1230713 - RNA, 19 nt, Artificial Sequence
  Description of Artificial Sequence: Synthetic oligonucleotide
auucugcgcagguaacuga

SEQ ID NO: 1230714 - RNA, 19 nt, Artificial Sequence
  Description of Artificial Sequence: Synthetic oligonucleotide
gcgcagguaacugaaaucc

SEQ ID NO: 1230715 - RNA, 19 nt, Artificial Sequence
  Description of Artificial Sequence: Synthetic oligonucleotide
cuucagaucucgguaccag

SEQ ID NO: 1230716 - RNA, 19 nt, Artificial Sequence
  Description of Artificial Sequence: Synthetic oligonucleotide
gauuggaaucccagacuug

SEQ ID NO: 1230717 - RNA, 19 nt, Artificial Sequence
  Description of Artificial Sequence: Synthetic oligonucleotide
cagguaacugaaauccaca

SEQ ID NO: 1230718 - RNA, 19 nt, Artificial Sequence
  Description of Artificial Sequence: Synthetic oligonucleotide
gaggucauccauucacuaa

SEQ ID NO: 1230719 - RNA, 19 nt, Artificial Sequence
  Description of Artificial Sequence: Synthetic oligonucleotide
ugacugacgggcauuccuu

SEQ ID NO: 1230720 - RNA, 19 nt, Artificial Sequence
  Description of Artificial Sequence: Synthetic oligonucleotide
uggucaaaaccuccuucau

SEQ ID NO: 1230721 - RNA, 19 nt, Artificial Sequence
  Description of Artificial Sequence: Synthetic oligonucleotide
cauucugcgcagguaacug

SEQ ID NO: 1230722 - RNA, 19 nt, Artificial Sequence
  Description of Artificial Sequence: Synthetic oligonucleotide
guugaaucuuucucccauc

SEQ ID NO: 1230723 - RNA, 19 nt, Artificial Sequence
  Description of Artificial Sequence: Synthetic oligonucleotide
aaaacucaugugcgagaua

SEQ ID NO: 1230724 - RNA, 19 nt, Artificial Sequence
  Description of Artificial Sequence: Synthetic oligonucleotide
cuugaaucucacuuaauuu

SEQ ID NO: 1230725 - RNA, 19 nt, Artificial Sequence
  Description of Artificial Sequence: Synthetic oligonucleotide
aacgaaccauauccccagu

SEQ ID NO: 1230726 - RNA, 19 nt, Artificial Sequence
  Description of Artificial Sequence: Synthetic oligonucleotide
cagaucucgguaccaggag

SEQ ID NO: 1230727 - RNA, 19 nt, Artificial Sequence
  Description of Artificial Sequence: Synthetic oligonucleotide
gagauuggaaucccagacu

SEQ ID NO: 1230728 - RNA, 19 nt, Artificial Sequence
  Description of Artificial Sequence: Synthetic oligonucleotide
cuggguuggucaaaaccuc

SEQ ID NO: 1230729 - RNA, 19 nt, Artificial Sequence
  Description of Artificial Sequence: Synthetic oligonucleotide
gcaaagagauaguuugaac

SEQ ID NO: 1230730 - RNA, 19 nt, Artificial Sequence
  Description of Artificial Sequence: Synthetic oligonucleotide
aagcagugcuuuucccaga

SEQ ID NO: 1230731 - RNA, 19 nt, Artificial Sequence
  Description of Artificial Sequence: Synthetic oligonucleotide
uaccagggauucagcaucu

SEQ ID NO: 1230732 - RNA, 19 nt, Artificial Sequence
  Description of Artificial Sequence: Synthetic oligonucleotide
cacauggucccuucguuca

SEQ ID NO: 1230733 - RNA, 19 nt, Artificial Sequence
  Description of Artificial Sequence: Synthetic oligonucleotide
acccgguugcuuucugccg

SEQ ID NO: 1230734 - RNA, 19 nt, Artificial Sequence
  Description of Artificial Sequence: Synthetic oligonucleotide
uccacauggucccuucguu

SEQ ID NO: 1230735 - RNA, 19 nt, Artificial Sequence
  Description of Artificial Sequence: Synthetic oligonucleotide
agaugccgcagcaucggcg

SEQ ID NO: 1230736 - RNA, 19 nt, Artificial Sequence
  Description of Artificial Sequence: Synthetic oligonucleotide
agaggcuacuuucccuugu

SEQ ID NO: 1230737 - RNA, 19 nt, Artificial Sequence
  Description of Artificial Sequence: Synthetic oligonucleotide
gucaggucagcuguuccag

SEQ ID NO: 1230738 - RNA, 19 nt, Artificial Sequence
  Description of Artificial Sequence: Synthetic oligonucleotide
gguguaucgaaaugucaca

SEQ ID NO: 1230739 - RNA, 19 nt, Artificial Sequence
  Description of Artificial Sequence: Synthetic oligonucleotide
cugucaggucagcuguucc

SEQ ID NO: 1230740 - RNA, 19 nt, Artificial Sequence
  Description of Artificial Sequence: Synthetic oligonucleotide
uaugcacgggaagagcauc

SEQ ID NO: 1230741 - RNA, 19 nt, Artificial Sequence
  Description of Artificial Sequence: Synthetic oligonucleotide
ucacccgguugcuuucugc

SEQ ID NO: 1230742 - RNA, 19 nt, Artificial Sequence
  Description of Artificial Sequence: Synthetic oligonucleotide
agcaaagaaguugaaucuu

SEQ ID NO: 1230743 - RNA, 19 nt, Artificial Sequence
  Description of Artificial Sequence: Synthetic oligonucleotide
ucgaaaugucacagguuuu

SEQ ID NO: 1230744 - RNA, 19 nt, Artificial Sequence
  Description of Artificial Sequence: Synthetic oligonucleotide
ggggcuaguauuuuauuaa

SEQ ID NO: 1230745 - RNA, 19 nt, Artificial Sequence
  Description of Artificial Sequence: Synthetic oligonucleotide
auggccguagucggcaauc

SEQ ID NO: 1230746 - RNA, 19 nt, Artificial Sequence
  Description of Artificial Sequence: Synthetic oligonucleotide
cauuaccuucaguauacaa

SEQ ID NO: 1230747 - RNA, 19 nt, Artificial Sequence
  Description of Artificial Sequence: Synthetic oligonucleotide
ugccggcucauucccggag

SEQ ID NO: 1230748 - RNA, 19 nt, Artificial Sequence
  Description of Artificial Sequence: Synthetic oligonucleotide
caucauggccguagucggc

SEQ ID NO: 1230749 - RNA, 19 nt, Artificial Sequence
  Description of Artificial Sequence: Synthetic oligonucleotide
gugggucgauaucaacaag

SEQ ID NO: 1230750 - RNA, 19 nt, Artificial Sequence
  Description of Artificial Sequence: Synthetic oligonucleotide
aucauggccguagucggca

SEQ ID NO: 1230751 - RNA, 19 nt, Artificial Sequence
  Description of Artificial Sequence: Synthetic oligonucleotide
gcgagauaaaagcuguauc

SEQ ID NO: 1230752 - RNA, 19 nt, Artificial Sequence
  Description of Artificial Sequence: Synthetic oligonucleotide
gucaaugcuugaaucucac

SEQ ID NO: 1230753 - RNA, 19 nt, Artificial Sequence
  Description of Artificial Sequence: Synthetic oligonucleotide
caugugcgagauaaaagcu

SEQ ID NO: 1230754 - RNA, 19 nt, Artificial Sequence
  Description of Artificial Sequence: Synthetic oligonucleotide
gaaguaacugcugcuucaa

SEQ ID NO: 1230755 - RNA, 19 nt, Artificial Sequence
  Description of Artificial Sequence: Synthetic oligonucleotide
uuugacugacgggcauucc

SEQ ID NO: 1230756 - RNA, 19 nt, Artificial Sequence
  Description of Artificial Sequence: Synthetic oligonucleotide
cucuacuagguguaucgaa

SEQ ID NO: 1230757 - RNA, 19 nt, Artificial Sequence
  Description of Artificial Sequence: Synthetic oligonucleotide
gccguagucggcaaucagg

SEQ ID NO: 1230758 - RNA, 19 nt, Artificial Sequence
  Description of Artificial Sequence: Synthetic oligonucleotide
uaaaaggggcuaguauuuu

SEQ ID NO: 1230759 - RNA, 19 nt, Artificial Sequence
  Description of Artificial Sequence: Synthetic oligonucleotide
agcuuaucagaaacuugug

SEQ ID NO: 1230760 - RNA, 19 nt, Artificial Sequence
  Description of Artificial Sequence: Synthetic oligonucleotide
cuugugguguuuucugaaa

SEQ ID NO: 1230761 - RNA, 19 nt, Artificial Sequence
  Description of Artificial Sequence: Synthetic oligonucleotide
ggucauccauucacuaacg

SEQ ID NO: 1230762 - RNA, 19 nt, Artificial Sequence
  Description of Artificial Sequence: Synthetic oligonucleotide
gaugccgcagcaucggcgu

SEQ ID NO: 1230763 - RNA, 19 nt, Artificial Sequence
  Description of Artificial Sequence: Synthetic oligonucleotide
agcuccccaaagauuugac

SEQ ID NO: 1230764 - RNA, 19 nt, Artificial Sequence
  Description of Artificial Sequence: Synthetic oligonucleotide
ucugcgcagguaacugaaa

SEQ ID NO: 1230765 - RNA, 19 nt, Artificial Sequence
  Description of Artificial Sequence: Synthetic oligonucleotide
ccuguauaauaaucccagc

SEQ ID NO: 1230766 - RNA, 19 nt, Artificial Sequence
  Description of Artificial Sequence: Synthetic oligonucleotide
auucacuaacgaaccauau

SEQ ID NO: 1230767 - RNA, 19 nt, Artificial Sequence
  Description of Artificial Sequence: Synthetic oligonucleotide
agaguaccccggccuggac

SEQ ID NO: 1230768 - RNA, 19 nt, Artificial Sequence
  Description of Artificial Sequence: Synthetic oligonucleotide
agcauaaaaggggcuagua

SEQ ID NO: 1230769 - RNA, 19 nt, Artificial Sequence
  Description of Artificial Sequence: Synthetic oligonucleotide
gcugcuucaaggauggcuc

SEQ ID NO: 1230770 - RNA, 19 nt, Artificial Sequence
  Description of Artificial Sequence: Synthetic oligonucleotide
ggucgauaucaacaagcac

SEQ ID NO: 1230771 - RNA, 19 nt, Artificial Sequence
  Description of Artificial Sequence: Synthetic oligonucleotide
uaauggcaugugaccgcca

SEQ ID NO: 1230772 - RNA, 19 nt, Artificial Sequence
  Description of Artificial Sequence: Synthetic oligonucleotide
agacccaagcugacugaac

SEQ ID NO: 1230773 - RNA, 19 nt, Artificial Sequence
  Description of Artificial Sequence: Synthetic oligonucleotide
acgaaccauauccccagua

SEQ ID NO: 1230774 - RNA, 19 nt, Artificial Sequence
  Description of Artificial Sequence: Synthetic oligonucleotide
gaaggugucugucuuuguu

SEQ ID NO: 1230775 - RNA, 19 nt, Artificial Sequence
  Description of Artificial Sequence: Synthetic oligonucleotide
cauucccggagcugaagca

SEQ ID NO: 1230776 - RNA, 19 nt, Artificial Sequence
  Description of Artificial Sequence: Synthetic oligonucleotide
uguauccuuuaggaacauc

SEQ ID NO: 1230777 - RNA, 19 nt, Artificial Sequence
  Description of Artificial Sequence: Synthetic oligonucleotide
cuccagcgagaguaccccg

SEQ ID NO: 1230778 - RNA, 19 nt, Artificial Sequence
  Description of Artificial Sequence: Synthetic oligonucleotide
auucguucagaaaguuccu

SEQ ID NO: 1230779 - RNA, 19 nt, Artificial Sequence
  Description of Artificial Sequence: Synthetic oligonucleotide
gcagguaacugaaauccac

SEQ ID NO: 1230780 - RNA, 19 nt, Artificial Sequence
  Description of Artificial Sequence: Synthetic oligonucleotide
gcccacacgggccacuccg

SEQ ID NO: 1230781 - RNA, 19 nt, Artificial Sequence
  Description of Artificial Sequence: Synthetic oligonucleotide
cuguagacuuuauuuuaua

SEQ ID NO: 1230782 - RNA, 19 nt, Artificial Sequence
  Description of Artificial Sequence: Synthetic oligonucleotide
gcuugaaucucacuuaauu

SEQ ID NO: 1230783 - RNA, 19 nt, Artificial Sequence
  Description of Artificial Sequence: Synthetic oligonucleotide
uucccggagcugaagcauu

SEQ ID NO: 1230784 - RNA, 19 nt, Artificial Sequence
  Description of Artificial Sequence: Synthetic oligonucleotide
ccagagaggcuacuuuccc

SEQ ID NO: 1230785 - RNA, 19 nt, Artificial Sequence
  Description of Artificial Sequence: Synthetic oligonucleotide
ugacgggcauuccuuucuu

SEQ ID NO: 1230786 - RNA, 19 nt, Artificial Sequence
  Description of Artificial Sequence: Synthetic oligonucleotide
cuucaaggauggcucaucu

SEQ ID NO: 1230787 - RNA, 19 nt, Artificial Sequence
  Description of Artificial Sequence: Synthetic oligonucleotide
agcugacugaacacccuca

SEQ ID NO: 1230788 - RNA, 19 nt, Artificial Sequence
  Description of Artificial Sequence: Synthetic oligonucleotide
cagcaucggcgucacccgg

SEQ ID NO: 1230789 - RNA, 19 nt, Artificial Sequence
  Description of Artificial Sequence: Synthetic oligonucleotide
agccucugaaggugucugu

SEQ ID NO: 1230790 - RNA, 19 nt, Artificial Sequence
  Description of Artificial Sequence: Synthetic oligonucleotide
cccgguugcuuucugccgg

SEQ ID NO: 1230791 - RNA, 19 nt, Artificial Sequence
  Description of Artificial Sequence: Synthetic oligonucleotide
gggucgauaucaacaagca

SEQ ID NO: 1230792 - RNA, 19 nt, Artificial Sequence
  Description of Artificial Sequence: Synthetic oligonucleotide
acccagcuacagaugaugu

SEQ ID NO: 1230793 - RNA, 19 nt, Artificial Sequence
  Description of Artificial Sequence: Synthetic oligonucleotide
ugccgcagcaucggcguca

SEQ ID NO: 1230794 - RNA, 19 nt, Artificial Sequence
  Description of Artificial Sequence: Synthetic oligonucleotide
gucccuucguucaucaugu

SEQ ID NO: 1230795 - RNA, 19 nt, Artificial Sequence
  Description of Artificial Sequence: Synthetic oligonucleotide
gugaccgccagugcccagc

SEQ ID NO: 1230796 - RNA, 19 nt, Artificial Sequence
  Description of Artificial Sequence: Synthetic oligonucleotide
cuacuagguguaucgaaau

SEQ ID NO: 1230797 - RNA, 19 nt, Artificial Sequence
  Description of Artificial Sequence: Synthetic oligonucleotide
auguuguaugaaggcuucu

SEQ ID NO: 1230798 - RNA, 19 nt, Artificial Sequence
  Description of Artificial Sequence: Synthetic oligonucleotide
acauggucccuucguucau

SEQ ID NO: 1230799 - RNA, 19 nt, Artificial Sequence
  Description of Artificial Sequence: Synthetic oligonucleotide
ucccggagcugaagcauuu

SEQ ID NO: 1230800 - RNA, 19 nt, Artificial Sequence
  Description of Artificial Sequence: Synthetic oligonucleotide
augcacgggaagagcauca

SEQ ID NO: 1230801 - RNA, 19 nt, Artificial Sequence
  Description of Artificial Sequence: Synthetic oligonucleotide
cccuucguucaucauguug

SEQ ID NO: 1230802 - RNA, 19 nt, Artificial Sequence
  Description of Artificial Sequence: Synthetic oligonucleotide
gaugcacauaauaucccuu

SEQ ID NO: 1230803 - RNA, 19 nt, Artificial Sequence
  Description of Artificial Sequence: Synthetic oligonucleotide
ugugaccgccagugcccag

SEQ ID NO: 1230804 - RNA, 19 nt, Artificial Sequence
  Description of Artificial Sequence: Synthetic oligonucleotide
uggccguagucggcaauca

SEQ ID NO: 1230805 - RNA, 19 nt, Artificial Sequence
  Description of Artificial Sequence: Synthetic oligonucleotide
cuaaugcaauucguucaga

SEQ ID NO: 1230806 - RNA, 19 nt, Artificial Sequence
  Description of Artificial Sequence: Synthetic oligonucleotide
ugcacgggaagagcaucaa

SEQ ID NO: 1230807 - RNA, 19 nt, Artificial Sequence
  Description of Artificial Sequence: Synthetic oligonucleotide
ucauggccguagucggcaa

SEQ ID NO: 1230808 - RNA, 19 nt, Artificial Sequence
  Description of Artificial Sequence: Synthetic oligonucleotide
gcauaaaaggggcuaguau

SEQ ID NO: 1230809 - RNA, 19 nt, Artificial Sequence
  Description of Artificial Sequence: Synthetic oligonucleotide
gggugaaguaaugaagucu

SEQ ID NO: 1230810 - RNA, 19 nt, Artificial Sequence
  Description of Artificial Sequence: Synthetic oligonucleotide
ccaagcauaucaugaugca

SEQ ID NO: 1230811 - RNA, 19 nt, Artificial Sequence
  Description of Artificial Sequence: Synthetic oligonucleotide
cuucguucaucauguugua

SEQ ID NO: 1230812 - RNA, 19 nt, Artificial Sequence
  Description of Artificial Sequence: Synthetic oligonucleotide
gagaguaccccggccugga

SEQ ID NO: 1230813 - RNA, 19 nt, Artificial Sequence
  Description of Artificial Sequence: Synthetic oligonucleotide
cauggucccuucguucauc

SEQ ID NO: 1230814 - RNA, 19 nt, Artificial Sequence
  Description of Artificial Sequence: Synthetic oligonucleotide
cagaggucauccauucacu

SEQ ID NO: 1230815 - RNA, 19 nt, Artificial Sequence
  Description of Artificial Sequence: Synthetic oligonucleotide
caggacccagagaggcuac

SEQ ID NO: 1230816 - RNA, 19 nt, Artificial Sequence
  Description of Artificial Sequence: Synthetic oligonucleotide
acuugugggucgauaucaa

SEQ ID NO: 1230817 - RNA, 19 nt, Artificial Sequence
  Description of Artificial Sequence: Synthetic oligonucleotide
cccagcuacagaugaugug

SEQ ID NO: 1230818 - RNA, 19 nt, Artificial Sequence
  Description of Artificial Sequence: Synthetic oligonucleotide
cauguauaccagggauuca

SEQ ID NO: 1230819 - RNA, 19 nt, Artificial Sequence
  Description of Artificial Sequence: Synthetic oligonucleotide
cgucaggacauacuuccac

SEQ ID NO: 1230820 - RNA, 19 nt, Artificial Sequence
  Description of Artificial Sequence: Synthetic oligonucleotide
gucacccgguugcuuucug

SEQ ID NO: 1230821 - RNA, 19 nt, Artificial Sequence
  Description of Artificial Sequence: Synthetic oligonucleotide
ucaccucuacuagguguau

SEQ ID NO: 1230822 - RNA, 19 nt, Artificial Sequence
  Description of Artificial Sequence: Synthetic oligonucleotide
cugacgggcauuccuuucu

SEQ ID NO: 1230823 - RNA, 19 nt, Artificial Sequence
  Description of Artificial Sequence: Synthetic oligonucleotide
ggccguagucggcaaucag

SEQ ID NO: 1230824 - RNA, 19 nt, Artificial Sequence
  Description of Artificial Sequence: Synthetic oligonucleotide
augugaccgccagugccca

SEQ ID NO: 1230825 - RNA, 19 nt, Artificial Sequence
  Description of Artificial Sequence: Synthetic oligonucleotide
caccucuacuagguguauc

SEQ ID NO: 1230826 - RNA, 19 nt, Artificial Sequence
  Description of Artificial Sequence: Synthetic oligonucleotide
gcgagaguaccccggccug

SEQ ID NO: 1230827 - RNA, 19 nt, Artificial Sequence
  Description of Artificial Sequence: Synthetic oligonucleotide
ccagcgagaguaccccggc

SEQ ID NO: 1230828 - RNA, 19 nt, Artificial Sequence
  Description of Artificial Sequence: Synthetic oligonucleotide
gacuugcaucaugaagucu

SEQ ID NO: 1230829 - RNA, 19 nt, Artificial Sequence
  Description of Artificial Sequence: Synthetic oligonucleotide
ucccagcgucaggacauac

SEQ ID NO: 1230830 - RNA, 19 nt, Artificial Sequence
  Description of Artificial Sequence: Synthetic oligonucleotide
gggcauuccuuucuugacu

SEQ ID NO: 1230831 - RNA, 19 nt, Artificial Sequence
  Description of Artificial Sequence: Synthetic oligonucleotide
agcaucggcgucacccggu

SEQ ID NO: 1230832 - RNA, 19 nt, Artificial Sequence
  Description of Artificial Sequence: Synthetic oligonucleotide
ggcucaccucuacuaggug

SEQ ID NO: 1230833 - RNA, 19 nt, Artificial Sequence
  Description of Artificial Sequence: Synthetic oligonucleotide
caggagcaauuaagacauc

SEQ ID NO: 1230834 - RNA, 19 nt, Artificial Sequence
  Description of Artificial Sequence: Synthetic oligonucleotide
cugcgcagguaacugaaau

SEQ ID NO: 1230835 - RNA, 19 nt, Artificial Sequence
  Description of Artificial Sequence: Synthetic oligonucleotide
ggccacuccgcgucucacc

SEQ ID NO: 1230836 - RNA, 19 nt, Artificial Sequence
  Description of Artificial Sequence: Synthetic oligonucleotide
uggggccuguagacuuuau

SEQ ID NO: 1230837 - RNA, 19 nt, Artificial Sequence
  Description of Artificial Sequence: Synthetic oligonucleotide
gcaaucagggcagcgccuc

SEQ ID NO: 1230838 - RNA, 19 nt, Artificial Sequence
  Description of Artificial Sequence: Synthetic oligonucleotide
gacugacgggcauuccuuu

SEQ ID NO: 1230839 - RNA, 19 nt, Artificial Sequence
  Description of Artificial Sequence: Synthetic oligonucleotide
cauugacauuaccuucagu

SEQ ID NO: 1230840 - RNA, 19 nt, Artificial Sequence
  Description of Artificial Sequence: Synthetic oligonucleotide
caucggcgucacccgguug

SEQ ID NO: 1230841 - RNA, 19 nt, Artificial Sequence
  Description of Artificial Sequence: Synthetic oligonucleotide
ggagcaauuaagacaucau

SEQ ID NO: 1230842 - RNA, 19 nt, Artificial Sequence
  Description of Artificial Sequence: Synthetic oligonucleotide
ucggcgucacccgguugcu

SEQ ID NO: 1230843 - RNA, 19 nt, Artificial Sequence
  Description of Artificial Sequence: Synthetic oligonucleotide
cgggugaaguaaugaaguc

SEQ ID NO: 1230844 - RNA, 19 nt, Artificial Sequence
  Description of Artificial Sequence: Synthetic oligonucleotide
caguagcuccccaaagauu

SEQ ID NO: 1230845 - RNA, 19 nt, Artificial Sequence
  Description of Artificial Sequence: Synthetic oligonucleotide
guauuguuuuggagccugu

SEQ ID NO: 1230846 - RNA, 19 nt, Artificial Sequence
  Description of Artificial Sequence: Synthetic oligonucleotide
ccgguugcuuucugccggc

SEQ ID NO: 1230847 - RNA, 19 nt, Artificial Sequence
  Description of Artificial Sequence: Synthetic oligonucleotide
ucccuucguucaucauguu

SEQ ID NO: 1230848 - RNA, 19 nt, Artificial Sequence
  Description of Artificial Sequence: Synthetic oligonucleotide
acgggccacuccgcgucuc

SEQ ID NO: 1230849 - RNA, 19 nt, Artificial Sequence
  Description of Artificial Sequence: Synthetic oligonucleotide
gcaaagcaaagaaguugaa

SEQ ID NO: 1230850 - RNA, 19 nt, Artificial Sequence
  Description of Artificial Sequence: Synthetic oligonucleotide
acucggccacagagauggg

SEQ ID NO: 1230851 - RNA, 19 nt, Artificial Sequence
  Description of Artificial Sequence: Synthetic oligonucleotide
ggguuggucaaaaccuccu

SEQ ID NO: 1230852 - RNA, 19 nt, Artificial Sequence
  Description of Artificial Sequence: Synthetic oligonucleotide
ccuucagccgaacaucaau

SEQ ID NO: 1230853 - RNA, 19 nt, Artificial Sequence
  Description of Artificial Sequence: Synthetic oligonucleotide
cccagcauaaaaggggcua

SEQ ID NO: 1230854 - RNA, 19 nt, Artificial Sequence
  Description of Artificial Sequence: Synthetic oligonucleotide
cuguauuguuuuggagccu

SEQ ID NO: 1230855 - RNA, 19 nt, Artificial Sequence
  Description of Artificial Sequence: Synthetic oligonucleotide
cgcagguaacugaaaucca

SEQ ID NO: 1230856 - RNA, 19 nt, Artificial Sequence
  Description of Artificial Sequence: Synthetic oligonucleotide
cgagaguaccccggccugg

SEQ ID NO: 1230857 - RNA, 19 nt, Artificial Sequence
  Description of Artificial Sequence: Synthetic oligonucleotide
ccagggauucagcaucucu

SEQ ID NO: 1230858 - RNA, 19 nt, Artificial Sequence
  Description of Artificial Sequence: Synthetic oligonucleotide
gcaauucguucagaaaguu

SEQ ID NO: 1230859 - RNA, 19 nt, Artificial Sequence
  Description of Artificial Sequence: Synthetic oligonucleotide
ggcgucacccgguugcuuu

SEQ ID NO: 1230860 - RNA, 19 nt, Artificial Sequence
  Description of Artificial Sequence: Synthetic oligonucleotide
agcugucaggucagcuguu

SEQ ID NO: 1230861 - RNA, 19 nt, Artificial Sequence
  Description of Artificial Sequence: Synthetic oligonucleotide
uuguuccaucauggccgua

SEQ ID NO: 1230862 - RNA, 19 nt, Artificial Sequence
  Description of Artificial Sequence: Synthetic oligonucleotide
gcgucacccgguugcuuuc

SEQ ID NO: 1230863 - RNA, 19 nt, Artificial Sequence
  Description of Artificial Sequence: Synthetic oligonucleotide
ccgcgucucaccaaagcgu

SEQ ID NO: 1230864 - RNA, 19 nt, Artificial Sequence
  Description of Artificial Sequence: Synthetic oligonucleotide
ccucuacuagguguaucga

SEQ ID NO: 1230865 - RNA, 19 nt, Artificial Sequence
  Description of Artificial Sequence: Synthetic oligonucleotide
gggcagcgccuccagcuaa

SEQ ID NO: 1230866 - RNA, 19 nt, Artificial Sequence
  Description of Artificial Sequence: Synthetic oligonucleotide
ggggccuguagacuuuauu

SEQ ID NO: 1230867 - RNA, 19 nt, Artificial Sequence
  Description of Artificial Sequence: Synthetic oligonucleotide
cauggccguagucggcaau

SEQ ID NO: 1230868 - RNA, 19 nt, Artificial Sequence
  Description of Artificial Sequence: Synthetic oligonucleotide
ggcaaucagggcagcgccu

SEQ ID NO: 1230869 - RNA, 19 nt, Artificial Sequence
  Description of Artificial Sequence: Synthetic oligonucleotide
gcgucucaccaaagcguuc

SEQ ID NO: 1230870 - RNA, 19 nt, Artificial Sequence
  Description of Artificial Sequence: Synthetic oligonucleotide
gggccacuccgcgucucac

SEQ ID NO: 1230871 - RNA, 19 nt, Artificial Sequence
  Description of Artificial Sequence: Synthetic oligonucleotide
ccccaaagauuugacuuau

SEQ ID NO: 1230872 - RNA, 19 nt, Artificial Sequence
  Description of Artificial Sequence: Synthetic oligonucleotide
guaccccggccuggaccca

SEQ ID NO: 1230873 - RNA, 19 nt, Artificial Sequence
  Description of Artificial Sequence: Synthetic oligonucleotide
cccgaaguaacugcugcuu

SEQ ID NO: 1230874 - RNA, 19 nt, Artificial Sequence
  Description of Artificial Sequence: Synthetic oligonucleotide
ggacccagagaggcuacuu

SEQ ID NO: 1230875 - RNA, 19 nt, Artificial Sequence
  Description of Artificial Sequence: Synthetic oligonucleotide
cgcgucucaccaaagcguu

SEQ ID NO: 1230876 - RNA, 19 nt, Artificial Sequence
  Description of Artificial Sequence: Synthetic oligonucleotide
gcaucggcgucacccgguu

SEQ ID NO: 1230877 - RNA, 19 nt, Artificial Sequence
  Description of Artificial Sequence: Synthetic oligonucleotide
cccagacuuggugaccccu

SEQ ID NO: 1230878 - RNA, 19 nt, Artificial Sequence
  Description of Artificial Sequence: Synthetic oligonucleotide
cgggccacuccgcgucuca

SEQ ID NO: 1230879 - RNA, 19 nt, Artificial Sequence
  Description of Artificial Sequence: Synthetic oligonucleotide
cgucacccgguugcuuucu

SEQ ID NO: 1230880 - RNA, 19 nt, Artificial Sequence
  Description of Artificial Sequence: Synthetic oligonucleotide
cgguugcuuucugccggcu

SEQ ID NO: 1230881 - RNA, 19 nt, Artificial Sequence
  Description of Artificial Sequence: Synthetic oligonucleotide
cggcgucacccgguugcuu

SEQ ID NO: 1230882 - RNA, 19 nt, Artificial Sequence
  Description of Artificial Sequence: Synthetic oligonucleotide
aauaucaguagguagagag

SEQ ID NO: 1230883 - RNA, 19 nt, Artificial Sequence
  Description of Artificial Sequence: Synthetic oligonucleotide
uugagauaaacaaauacca

SEQ ID NO: 1230884 - RNA, 19 nt, Artificial Sequence
  Description of Artificial Sequence: Synthetic oligonucleotide
uuguacugaacguagaacg

SEQ ID NO: 1230885 - RNA, 19 nt, Artificial Sequence
  Description of Artificial Sequence: Synthetic oligonucleotide
agaccaauaggcuaggagg

SEQ ID NO: 1230886 - RNA, 19 nt, Artificial Sequence
  Description of Artificial Sequence: Synthetic oligonucleotide
uguguguuaggauaagggg

SEQ ID NO: 1230887 - RNA, 19 nt, Artificial Sequence
  Description of Artificial Sequence: Synthetic oligonucleotide
aagacggccaggcauaccg

SEQ ID NO: 1230888 - RNA, 19 nt, Artificial Sequence
  Description of Artificial Sequence: Synthetic oligonucleotide
aguguaugcuuccaggagc

SEQ ID NO: 1230889 - RNA, 19 nt, Artificial Sequence
  Description of Artificial Sequence: Synthetic oligonucleotide
cugucaaagauuaagauca

SEQ ID NO: 1230890 - RNA, 19 nt, Artificial Sequence
  Description of Artificial Sequence: Synthetic oligonucleotide
uuuucuuaguuccaggcca

SEQ ID NO: 1230891 - RNA, 19 nt, Artificial Sequence
  Description of Artificial Sequence: Synthetic oligonucleotide
aacaaauaccagcaggacu

SEQ ID NO: 1230892 - RNA, 19 nt, Artificial Sequence
  Description of Artificial Sequence: Synthetic oligonucleotide
aagaccaauaggcuaggag

SEQ ID NO: 1230893 - RNA, 19 nt, Artificial Sequence
  Description of Artificial Sequence: Synthetic oligonucleotide
caaagauuaagaucagagc

SEQ ID NO: 1230894 - RNA, 19 nt, Artificial Sequence
  Description of Artificial Sequence: Synthetic oligonucleotide
auaccugggauguaagugg

SEQ ID NO: 1230895 - RNA, 19 nt, Artificial Sequence
  Description of Artificial Sequence: Synthetic oligonucleotide
cuugauucggaaauagcgc

SEQ ID NO: 1230896 - RNA, 19 nt, Artificial Sequence
  Description of Artificial Sequence: Synthetic oligonucleotide
aaccacaacgccaaagcgc

SEQ ID NO: 1230897 - RNA, 19 nt, Artificial Sequence
  Description of Artificial Sequence: Synthetic oligonucleotide
agcuaaugccaccuaauac

SEQ ID NO: 1230898 - RNA, 19 nt, Artificial Sequence
  Description of Artificial Sequence: Synthetic oligonucleotide
acgaguaucggucccacac

SEQ ID NO: 1230899 - RNA, 19 nt, Artificial Sequence
  Description of Artificial Sequence: Synthetic oligonucleotide
uaggcuaggagguaaauuc

SEQ ID NO: 1230900 - RNA, 19 nt, Artificial Sequence
  Description of Artificial Sequence: Synthetic oligonucleotide
aaauagcgcacauauucca

SEQ ID NO: 1230901 - RNA, 19 nt, Artificial Sequence
  Description of Artificial Sequence: Synthetic oligonucleotide
aguggaaauacuuucucgu

SEQ ID NO: 1230902 - RNA, 19 nt, Artificial Sequence
  Description of Artificial Sequence: Synthetic oligonucleotide
ggaaauagcgcacauauuc

SEQ ID NO: 1230903 - RNA, 19 nt, Artificial Sequence
  Description of Artificial Sequence: Synthetic oligonucleotide
uguacugaacguagaacgc

SEQ ID NO: 1230904 - RNA, 19 nt, Artificial Sequence
  Description of Artificial Sequence: Synthetic oligonucleotide
ucucguaauggcaggagcc

SEQ ID NO: 1230905 - RNA, 19 nt, Artificial Sequence
  Description of Artificial Sequence: Synthetic oligonucleotide
ucagcgggaacccagacuc

SEQ ID NO: 1230906 - RNA, 19 nt, Artificial Sequence
  Description of Artificial Sequence: Synthetic oligonucleotide
gagauugucuauuugagua

SEQ ID NO: 1230907 - RNA, 19 nt, Artificial Sequence
  Description of Artificial Sequence: Synthetic oligonucleotide
aauucgaguuucuguguag

SEQ ID NO: 1230908 - RNA, 19 nt, Artificial Sequence
  Description of Artificial Sequence: Synthetic oligonucleotide
aauccaagcauaacuguag

SEQ ID NO: 1230909 - RNA, 19 nt, Artificial Sequence
  Description of Artificial Sequence: Synthetic oligonucleotide
uacuacuacuacuaggcca

SEQ ID NO: 1230910 - RNA, 19 nt, Artificial Sequence
  Description of Artificial Sequence: Synthetic oligonucleotide
gcuaaugccaccuaauacc

SEQ ID NO: 1230911 - RNA, 19 nt, Artificial Sequence
  Description of Artificial Sequence: Synthetic oligonucleotide
uuugaguaguguaugcuuc

SEQ ID NO: 1230912 - RNA, 19 nt, Artificial Sequence
  Description of Artificial Sequence: Synthetic oligonucleotide
agcauaggggaccagagcu

SEQ ID NO: 1230913 - RNA, 19 nt, Artificial Sequence
  Description of Artificial Sequence: Synthetic oligonucleotide
aacgccaaagcgcucgaag

SEQ ID NO: 1230914 - RNA, 19 nt, Artificial Sequence
  Description of Artificial Sequence: Synthetic oligonucleotide
guuccuacgaaugagccag

SEQ ID NO: 1230915 - RNA, 19 nt, Artificial Sequence
  Description of Artificial Sequence: Synthetic oligonucleotide
aagaugauaccugggaugu

SEQ ID NO: 1230916 - RNA, 19 nt, Artificial Sequence
  Description of Artificial Sequence: Synthetic oligonucleotide
gaugcucaacaccacugcg

SEQ ID NO: 1230917 - RNA, 19 nt, Artificial Sequence
  Description of Artificial Sequence: Synthetic oligonucleotide
uucggaacuggaaaacggc

SEQ ID NO: 1230918 - RNA, 19 nt, Artificial Sequence
  Description of Artificial Sequence: Synthetic oligonucleotide
gaaauagcgcacauauucc

SEQ ID NO: 1230919 - RNA, 19 nt, Artificial Sequence
  Description of Artificial Sequence: Synthetic oligonucleotide
gaguaucggucccacaccg

SEQ ID NO: 1230920 - RNA, 19 nt, Artificial Sequence
  Description of Artificial Sequence: Synthetic oligonucleotide
uaguguaugcuuccaggag

SEQ ID NO: 1230921 - RNA, 19 nt, Artificial Sequence
  Description of Artificial Sequence: Synthetic oligonucleotide
agcguggaugcucaacacc

SEQ ID NO: 1230922 - RNA, 19 nt, Artificial Sequence
  Description of Artificial Sequence: Synthetic oligonucleotide
ugucgggucauguuucuag

SEQ ID NO: 1230923 - RNA, 19 nt, Artificial Sequence
  Description of Artificial Sequence: Synthetic oligonucleotide
acuacuacuaggccaucag

SEQ ID NO: 1230924 - RNA, 19 nt, Artificial Sequence
  Description of Artificial Sequence: Synthetic oligonucleotide
ucgaaguacggguuacccg

SEQ ID NO: 1230925 - RNA, 19 nt, Artificial Sequence
  Description of Artificial Sequence: Synthetic oligonucleotide
ucgaauguuuucuuaguuc

SEQ ID NO: 1230926 - RNA, 19 nt, Artificial Sequence
  Description of Artificial Sequence: Synthetic oligonucleotide
uuucuuaguuccaggccag

SEQ ID NO: 1230927 - RNA, 19 nt, Artificial Sequence
  Description of Artificial Sequence: Synthetic oligonucleotide
uucgcggacauucggaacu

SEQ ID NO: 1230928 - RNA, 19 nt, Artificial Sequence
  Description of Artificial Sequence: Synthetic oligonucleotide
cuacgaaugagccagugca

SEQ ID NO: 1230929 - RNA, 19 nt, Artificial Sequence
  Description of Artificial Sequence: Synthetic oligonucleotide
guaucacccacacccaccg

SEQ ID NO: 1230930 - RNA, 19 nt, Artificial Sequence
  Description of Artificial Sequence: Synthetic oligonucleotide
ggcaguaagccacuguucg

SEQ ID NO: 1230931 - RNA, 19 nt, Artificial Sequence
  Description of Artificial Sequence: Synthetic oligonucleotide
uucucguaauggcaggagc

SEQ ID NO: 1230932 - RNA, 19 nt, Artificial Sequence
  Description of Artificial Sequence: Synthetic oligonucleotide
auggcgcaaguauuggugg

SEQ ID NO: 1230933 - RNA, 19 nt, Artificial Sequence
  Description of Artificial Sequence: Synthetic oligonucleotide
agcaauaucaguagguaga

SEQ ID NO: 1230934 - RNA, 19 nt, Artificial Sequence
  Description of Artificial Sequence: Synthetic oligonucleotide
ugucuauuugaguagugua

SEQ ID NO: 1230935 - RNA, 19 nt, Artificial Sequence
  Description of Artificial Sequence: Synthetic oligonucleotide
uugaguaguguaugcuucc

SEQ ID NO: 1230936 - RNA, 19 nt, Artificial Sequence
  Description of Artificial Sequence: Synthetic oligonucleotide
uaaauucgaguuucugugu

SEQ ID NO: 1230937 - RNA, 19 nt, Artificial Sequence
  Description of Artificial Sequence: Synthetic oligonucleotide
gaucauguugagauaaaca

SEQ ID NO: 1230938 - RNA, 19 nt, Artificial Sequence
  Description of Artificial Sequence: Synthetic oligonucleotide
guagauguguguuaggaua

SEQ ID NO: 1230939 - RNA, 19 nt, Artificial Sequence
  Description of Artificial Sequence: Synthetic oligonucleotide
uauuugaguaguguaugcu

SEQ ID NO: 1230940 - RNA, 19 nt, Artificial Sequence
  Description of Artificial Sequence: Synthetic oligonucleotide
ucuuaguuccaggccagcg

SEQ ID NO: 1230941 - RNA, 19 nt, Artificial Sequence
  Description of Artificial Sequence: Synthetic oligonucleotide
guuacccgcagucuggcag

SEQ ID NO: 1230942 - RNA, 19 nt, Artificial Sequence
  Description of Artificial Sequence: Synthetic oligonucleotide
uacgaaugagccagugcag

SEQ ID NO: 1230943 - RNA, 19 nt, Artificial Sequence
  Description of Artificial Sequence: Synthetic oligonucleotide
ucggauggcgcaaguauug

SEQ ID NO: 1230944 - RNA, 19 nt, Artificial Sequence
  Description of Artificial Sequence: Synthetic oligonucleotide
auuugaguaguguaugcuu

SEQ ID NO: 1230945 - RNA, 19 nt, Artificial Sequence
  Description of Artificial Sequence: Synthetic oligonucleotide
gauggcgcaaguauuggug

SEQ ID NO: 1230946 - RNA, 19 nt, Artificial Sequence
  Description of Artificial Sequence: Synthetic oligonucleotide
ucgaguuucuguguagaag

SEQ ID NO: 1230947 - RNA, 19 nt, Artificial Sequence
  Description of Artificial Sequence: Synthetic oligonucleotide
uacugaacguagaacgccu

SEQ ID NO: 1230948 - RNA, 19 nt, Artificial Sequence
  Description of Artificial Sequence: Synthetic oligonucleotide
auucggaacuggaaaacgg

SEQ ID NO: 1230949 - RNA, 19 nt, Artificial Sequence
  Description of Artificial Sequence: Synthetic oligonucleotide
aguaucacccacacccacc

SEQ ID NO: 1230950 - RNA, 19 nt, Artificial Sequence
  Description of Artificial Sequence: Synthetic oligonucleotide
aucggucccacaccgcagc

SEQ ID NO: 1230951 - RNA, 19 nt, Artificial Sequence
  Description of Artificial Sequence: Synthetic oligonucleotide
caccgagccacucagcggg

SEQ ID NO: 1230952 - RNA, 19 nt, Artificial Sequence
  Description of Artificial Sequence: Synthetic oligonucleotide
acauucggaacuggaaaac

SEQ ID NO: 1230953 - RNA, 19 nt, Artificial Sequence
  Description of Artificial Sequence: Synthetic oligonucleotide
auaucaguagguagagagg

SEQ ID NO: 1230954 - RNA, 19 nt, Artificial Sequence
  Description of Artificial Sequence: Synthetic oligonucleotide
acuguucgcggacauucgg

SEQ ID NO: 1230955 - RNA, 19 nt, Artificial Sequence
  Description of Artificial Sequence: Synthetic oligonucleotide
ucgaucaccucggauggcg

SEQ ID NO: 1230956 - RNA, 19 nt, Artificial Sequence
  Description of Artificial Sequence: Synthetic oligonucleotide
auagaucccaaaauccaag

SEQ ID NO: 1230957 - RNA, 19 nt, Artificial Sequence
  Description of Artificial Sequence: Synthetic oligonucleotide
ggaggcaacaguaucaccc

SEQ ID NO: 1230958 - RNA, 19 nt, Artificial Sequence
  Description of Artificial Sequence: Synthetic oligonucleotide
agcaaagaccaauaggcua

SEQ ID NO: 1230959 - RNA, 19 nt, Artificial Sequence
  Description of Artificial Sequence: Synthetic oligonucleotide
cagcaauaucaguagguag

SEQ ID NO: 1230960 - RNA, 19 nt, Artificial Sequence
  Description of Artificial Sequence: Synthetic oligonucleotide
aagcuaaugccaccuaaua

SEQ ID NO: 1230961 - RNA, 19 nt, Artificial Sequence
  Description of Artificial Sequence: Synthetic oligonucleotide
ugcucaacaccacugcgaa

SEQ ID NO: 1230962 - RNA, 19 nt, Artificial Sequence
  Description of Artificial Sequence: Synthetic oligonucleotide
ucguucauccaggaagagg

SEQ ID NO: 1230963 - RNA, 19 nt, Artificial Sequence
  Description of Artificial Sequence: Synthetic oligonucleotide
ugugcccgaguccaugaag

SEQ ID NO: 1230964 - RNA, 19 nt, Artificial Sequence
  Description of Artificial Sequence: Synthetic oligonucleotide
gaaaacggcauugccuugc

SEQ ID NO: 1230965 - RNA, 19 nt, Artificial Sequence
  Description of Artificial Sequence: Synthetic oligonucleotide
caguaagccacuguucgcg

SEQ ID NO: 1230966 - RNA, 19 nt, Artificial Sequence
  Description of Artificial Sequence: Synthetic oligonucleotide
agaacgccugcacagcgag

SEQ ID NO: 1230967 - RNA, 19 nt, Artificial Sequence
  Description of Artificial Sequence: Synthetic oligonucleotide
gaaggcuccgaagaguaug

SEQ ID NO: 1230968 - RNA, 19 nt, Artificial Sequence
  Description of Artificial Sequence: Synthetic oligonucleotide
cauucggaacuggaaaacg

SEQ ID NO: 1230969 - RNA, 19 nt, Artificial Sequence
  Description of Artificial Sequence: Synthetic oligonucleotide
gcugauagaucccaaaauc

SEQ ID NO: 1230970 - RNA, 19 nt, Artificial Sequence
  Description of Artificial Sequence: Synthetic oligonucleotide
uugucuauuugaguagugu

SEQ ID NO: 1230971 - RNA, 19 nt, Artificial Sequence
  Description of Artificial Sequence: Synthetic oligonucleotide
acuuguacugaacguagaa

SEQ ID NO: 1230972 - RNA, 19 nt, Artificial Sequence
  Description of Artificial Sequence: Synthetic oligonucleotide
cucaacaccacugcgaaca

SEQ ID NO: 1230973 - RNA, 19 nt, Artificial Sequence
  Description of Artificial Sequence: Synthetic oligonucleotide
ugaccgcuuggcauucugg

SEQ ID NO: 1230974 - RNA, 19 nt, Artificial Sequence
  Description of Artificial Sequence: Synthetic oligonucleotide
ugagccagugcagccaggg

SEQ ID NO: 1230975 - RNA, 19 nt, Artificial Sequence
  Description of Artificial Sequence: Synthetic oligonucleotide
cacaccgcagcguggaugc

SEQ ID NO: 1230976 - RNA, 19 nt, Artificial Sequence
  Description of Artificial Sequence: Synthetic oligonucleotide
cagcgcaccacgaguaucg

SEQ ID NO: 1230977 - RNA, 19 nt, Artificial Sequence
  Description of Artificial Sequence: Synthetic oligonucleotide
cacauauaguaguggccgg

SEQ ID NO: 1230978 - RNA, 19 nt, Artificial Sequence
  Description of Artificial Sequence: Synthetic oligonucleotide
caaguauuggugggcaccg

SEQ ID NO: 1230979 - RNA, 19 nt, Artificial Sequence
  Description of Artificial Sequence: Synthetic oligonucleotide
guggcuaccacaaugaagu

SEQ ID NO: 1230980 - RNA, 19 nt, Artificial Sequence
  Description of Artificial Sequence: Synthetic oligonucleotide
aacuguaguucaggucuac

SEQ ID NO: 1230981 - RNA, 19 nt, Artificial Sequence
  Description of Artificial Sequence: Synthetic oligonucleotide
acugcgaacaccacugcag

SEQ ID NO: 1230982 - RNA, 19 nt, Artificial Sequence
  Description of Artificial Sequence: Synthetic oligonucleotide
auaccagcagugccucccc

SEQ ID NO: 1230983 - RNA, 19 nt, Artificial Sequence
  Description of Artificial Sequence: Synthetic oligonucleotide
cuacagagaugaucugugc

SEQ ID NO: 1230984 - RNA, 19 nt, Artificial Sequence
  Description of Artificial Sequence: Synthetic oligonucleotide
ucuacuccacugucaaaga

SEQ ID NO: 1230985 - RNA, 19 nt, Artificial Sequence
  Description of Artificial Sequence: Synthetic oligonucleotide
cuacuacuaggccaucagc

SEQ ID NO: 1230986 - RNA, 19 nt, Artificial Sequence
  Description of Artificial Sequence: Synthetic oligonucleotide
gcaaagaccaauaggcuag

SEQ ID NO: 1230987 - RNA, 19 nt, Artificial Sequence
  Description of Artificial Sequence: Synthetic oligonucleotide
auauaguaguggccgguca

SEQ ID NO: 1230988 - RNA, 19 nt, Artificial Sequence
  Description of Artificial Sequence: Synthetic oligonucleotide
acuacuacuacuaggccau

SEQ ID NO: 1230989 - RNA, 19 nt, Artificial Sequence
  Description of Artificial Sequence: Synthetic oligonucleotide
gaucccaaaauccaagcau

SEQ ID NO: 1230990 - RNA, 19 nt, Artificial Sequence
  Description of Artificial Sequence: Synthetic oligonucleotide
gaugauaccugggauguaa

SEQ ID NO: 1230991 - RNA, 19 nt, Artificial Sequence
  Description of Artificial Sequence: Synthetic oligonucleotide
acuacuaggccaucagcaa

SEQ ID NO: 1230992 - RNA, 19 nt, Artificial Sequence
  Description of Artificial Sequence: Synthetic oligonucleotide
ugauaccugggauguaagu

SEQ ID NO: 1230993 - RNA, 19 nt, Artificial Sequence
  Description of Artificial Sequence: Synthetic oligonucleotide
uuucucguaauggcaggag

SEQ ID NO: 1230994 - RNA, 19 nt, Artificial Sequence
  Description of Artificial Sequence: Synthetic oligonucleotide
cuacuacuacuacuaggcc

SEQ ID NO: 1230995 - RNA, 19 nt, Artificial Sequence
  Description of Artificial Sequence: Synthetic oligonucleotide
aguggcuaccacaaugaag

SEQ ID NO: 1230996 - RNA, 19 nt, Artificial Sequence
  Description of Artificial Sequence: Synthetic oligonucleotide
ugcaaauauagaugucaua

SEQ ID NO: 1230997 - RNA, 19 nt, Artificial Sequence
  Description of Artificial Sequence: Synthetic oligonucleotide
guacugaacguagaacgcc

SEQ ID NO: 1230998 - RNA, 19 nt, Artificial Sequence
  Description of Artificial Sequence: Synthetic oligonucleotide
gucgggucauguuucuagg

SEQ ID NO: 1230999 - RNA, 19 nt, Artificial Sequence
  Description of Artificial Sequence: Synthetic oligonucleotide
aagcauaacuguaguucag

SEQ ID NO: 1231000 - RNA, 19 nt, Artificial Sequence
  Description of Artificial Sequence: Synthetic oligonucleotide
guagguagagaggcaaaag

SEQ ID NO: 1231001 - RNA, 19 nt, Artificial Sequence
  Description of Artificial Sequence: Synthetic oligonucleotide
caaagcgcucgaaguacgg

SEQ ID NO: 1231002 - RNA, 19 nt, Artificial Sequence
  Description of Artificial Sequence: Synthetic oligonucleotide
aaguacggguuacccgcag

SEQ ID NO: 1231003 - RNA, 19 nt, Artificial Sequence
  Description of Artificial Sequence: Synthetic oligonucleotide
aguaguggccggucaaaga

SEQ ID NO: 1231004 - RNA, 19 nt, Artificial Sequence
  Description of Artificial Sequence: Synthetic oligonucleotide
cacugucucguucauccag

SEQ ID NO: 1231005 - RNA, 19 nt, Artificial Sequence
  Description of Artificial Sequence: Synthetic oligonucleotide
aggauaagggguccacugu

SEQ ID NO: 1231006 - RNA, 19 nt, Artificial Sequence
  Description of Artificial Sequence: Synthetic oligonucleotide
uuacccgcagucuggcagc

SEQ ID NO: 1231007 - RNA, 19 nt, Artificial Sequence
  Description of Artificial Sequence: Synthetic oligonucleotide
uaguggccggucaaagaug

SEQ ID NO: 1231008 - RNA, 19 nt, Artificial Sequence
  Description of Artificial Sequence: Synthetic oligonucleotide
uaucggucccacaccgcag

SEQ ID NO: 1231009 - RNA, 19 nt, Artificial Sequence
  Description of Artificial Sequence: Synthetic oligonucleotide
cucgaaguacggguuaccc

SEQ ID NO: 1231010 - RNA, 19 nt, Artificial Sequence
  Description of Artificial Sequence: Synthetic oligonucleotide
ugccaccuaauaccagcag

SEQ ID NO: 1231011 - RNA, 19 nt, Artificial Sequence
  Description of Artificial Sequence: Synthetic oligonucleotide
cauggaggcuggcaguaag

SEQ ID NO: 1231012 - RNA, 19 nt, Artificial Sequence
  Description of Artificial Sequence: Synthetic oligonucleotide
aggcuaggagguaaauucg

SEQ ID NO: 1231013 - RNA, 19 nt, Artificial Sequence
  Description of Artificial Sequence: Synthetic oligonucleotide
acggguuacccgcagucug

SEQ ID NO: 1231014 - RNA, 19 nt, Artificial Sequence
  Description of Artificial Sequence: Synthetic oligonucleotide
ugccaaauauggaggcaac

SEQ ID NO: 1231015 - RNA, 19 nt, Artificial Sequence
  Description of Artificial Sequence: Synthetic oligonucleotide
caggagugaagcagucggg

SEQ ID NO: 1231016 - RNA, 19 nt, Artificial Sequence
  Description of Artificial Sequence: Synthetic oligonucleotide
acgccaaagcgcucgaagu

SEQ ID NO: 1231017 - RNA, 19 nt, Artificial Sequence
  Description of Artificial Sequence: Synthetic oligonucleotide
gauucggaaauagcgcaca

SEQ ID NO: 1231018 - RNA, 19 nt, Artificial Sequence
  Description of Artificial Sequence: Synthetic oligonucleotide
uuaggauaagggguccacu

SEQ ID NO: 1231019 - RNA, 19 nt, Artificial Sequence
  Description of Artificial Sequence: Synthetic oligonucleotide
aguaugacccaagggcuug

SEQ ID NO: 1231020 - RNA, 19 nt, Artificial Sequence
  Description of Artificial Sequence: Synthetic oligonucleotide
cgaaguacggguuacccgc

SEQ ID NO: 1231021 - RNA, 19 nt, Artificial Sequence
  Description of Artificial Sequence: Synthetic oligonucleotide
uaguucaggucuacuccac

SEQ ID NO: 1231022 - RNA, 19 nt, Artificial Sequence
  Description of Artificial Sequence: Synthetic oligonucleotide
ggaccagagcucuugcucc

SEQ ID NO: 1231023 - RNA, 19 nt, Artificial Sequence
  Description of Artificial Sequence: Synthetic oligonucleotide
guaucggucccacaccgca

SEQ ID NO: 1231024 - RNA, 19 nt, Artificial Sequence
  Description of Artificial Sequence: Synthetic oligonucleotide
uacuacuacuaggccauca

SEQ ID NO: 1231025 - RNA, 19 nt, Artificial Sequence
  Description of Artificial Sequence: Synthetic oligonucleotide
ugcccaaugccaacaccga

SEQ ID NO: 1231026 - RNA, 19 nt, Artificial Sequence
  Description of Artificial Sequence: Synthetic oligonucleotide
auucgaguuucuguguaga

SEQ ID NO: 1231027 - RNA, 19 nt, Artificial Sequence
  Description of Artificial Sequence: Synthetic oligonucleotide
ggagguaaauucgaguuuc

SEQ ID NO: 1231028 - RNA, 19 nt, Artificial Sequence
  Description of Artificial Sequence: Synthetic oligonucleotide
aaacggcauugccuugcug

SEQ ID NO: 1231029 - RNA, 19 nt, Artificial Sequence
  Description of Artificial Sequence: Synthetic oligonucleotide
aaggcuccgaagaguauga

SEQ ID NO: 1231030 - RNA, 19 nt, Artificial Sequence
  Description of Artificial Sequence: Synthetic oligonucleotide
cuuucagucagagagcgcu

SEQ ID NO: 1231031 - RNA, 19 nt, Artificial Sequence
  Description of Artificial Sequence: Synthetic oligonucleotide
aggaccucgaucaccucgg

SEQ ID NO: 1231032 - RNA, 19 nt, Artificial Sequence
  Description of Artificial Sequence: Synthetic oligonucleotide
ggcuaccacaaugaagugg

SEQ ID NO: 1231033 - RNA, 19 nt, Artificial Sequence
  Description of Artificial Sequence: Synthetic oligonucleotide
uuucuaggccuuggguucc

SEQ ID NO: 1231034 - RNA, 19 nt, Artificial Sequence
  Description of Artificial Sequence: Synthetic oligonucleotide
uguuaggauaaggggucca

SEQ ID NO: 1231035 - RNA, 19 nt, Artificial Sequence
  Description of Artificial Sequence: Synthetic oligonucleotide
uccaagcauaacuguaguu

SEQ ID NO: 1231036 - RNA, 19 nt, Artificial Sequence
  Description of Artificial Sequence: Synthetic oligonucleotide
uggcaguaagccacuguuc

SEQ ID NO: 1231037 - RNA, 19 nt, Artificial Sequence
  Description of Artificial Sequence: Synthetic oligonucleotide
acauauaguaguggccggu

SEQ ID NO: 1231038 - RNA, 19 nt, Artificial Sequence
  Description of Artificial Sequence: Synthetic oligonucleotide
gcaacaguaucacccacac

SEQ ID NO: 1231039 - RNA, 19 nt, Artificial Sequence
  Description of Artificial Sequence: Synthetic oligonucleotide
ggaugcucaacaccacugc

SEQ ID NO: 1231040 - RNA, 19 nt, Artificial Sequence
  Description of Artificial Sequence: Synthetic oligonucleotide
cacuguucgcggacauucg

SEQ ID NO: 1231041 - RNA, 19 nt, Artificial Sequence
  Description of Artificial Sequence: Synthetic oligonucleotide
caaagaccaauaggcuagg

SEQ ID NO: 1231042 - RNA, 19 nt, Artificial Sequence
  Description of Artificial Sequence: Synthetic oligonucleotide
gacggccaggcauaccgug

SEQ ID NO: 1231043 - RNA, 19 nt, Artificial Sequence
  Description of Artificial Sequence: Synthetic oligonucleotide
ggcauugccuugcuggagc

SEQ ID NO: 1231044 - RNA, 19 nt, Artificial Sequence
  Description of Artificial Sequence: Synthetic oligonucleotide
aguaucggucccacaccgc

SEQ ID NO: 1231045 - RNA, 19 nt, Artificial Sequence
  Description of Artificial Sequence: Synthetic oligonucleotide
uggaggcaacaguaucacc

SEQ ID NO: 1231046 - RNA, 19 nt, Artificial Sequence
  Description of Artificial Sequence: Synthetic oligonucleotide
aguggccggucaaagauga

SEQ ID NO: 1231047 - RNA, 19 nt, Artificial Sequence
  Description of Artificial Sequence: Synthetic oligonucleotide
guuaggauaagggguccac

SEQ ID NO: 1231048 - RNA, 19 nt, Artificial Sequence
  Description of Artificial Sequence: Synthetic oligonucleotide
uaacuguaguucaggucua

SEQ ID NO: 1231049 - RNA, 19 nt, Artificial Sequence
  Description of Artificial Sequence: Synthetic oligonucleotide
caccuaauaccagcagugc

SEQ ID NO: 1231050 - RNA, 19 nt, Artificial Sequence
  Description of Artificial Sequence: Synthetic oligonucleotide
ucggucccacaccgcagcg

SEQ ID NO: 1231051 - RNA, 19 nt, Artificial Sequence
  Description of Artificial Sequence: Synthetic oligonucleotide
cauauaguaguggccgguc

SEQ ID NO: 1231052 - RNA, 19 nt, Artificial Sequence
  Description of Artificial Sequence: Synthetic oligonucleotide
gugcugauagaucccaaaa

SEQ ID NO: 1231053 - RNA, 19 nt, Artificial Sequence
  Description of Artificial Sequence: Synthetic oligonucleotide
gcagguagauguguguuag

SEQ ID NO: 1231054 - RNA, 19 nt, Artificial Sequence
  Description of Artificial Sequence: Synthetic oligonucleotide
guacggguuacccgcaguc

SEQ ID NO: 1231055 - RNA, 19 nt, Artificial Sequence
  Description of Artificial Sequence: Synthetic oligonucleotide
cacugucgggucauguuuc

SEQ ID NO: 1231056 - RNA, 19 nt, Artificial Sequence
  Description of Artificial Sequence: Synthetic oligonucleotide
augcuuccaggagcgacac

SEQ ID NO: 1231057 - RNA, 19 nt, Artificial Sequence
  Description of Artificial Sequence: Synthetic oligonucleotide
ggacauucggaacuggaaa

SEQ ID NO: 1231058 - RNA, 19 nt, Artificial Sequence
  Description of Artificial Sequence: Synthetic oligonucleotide
ggcuccgaagaguaugacc

SEQ ID NO: 1231059 - RNA, 19 nt, Artificial Sequence
  Description of Artificial Sequence: Synthetic oligonucleotide
guaguggccggucaaagau

SEQ ID NO: 1231060 - RNA, 19 nt, Artificial Sequence
  Description of Artificial Sequence: Synthetic oligonucleotide
caccaacaggaagaagucc

SEQ ID NO: 1231061 - RNA, 19 nt, Artificial Sequence
  Description of Artificial Sequence: Synthetic oligonucleotide
aguacggguuacccgcagu

SEQ ID NO: 1231062 - RNA, 19 nt, Artificial Sequence
  Description of Artificial Sequence: Synthetic oligonucleotide
augaccgcuuggcauucug

SEQ ID NO: 1231063 - RNA, 19 nt, Artificial Sequence
  Description of Artificial Sequence: Synthetic oligonucleotide
ggauaagggguccacuguc

SEQ ID NO: 1231064 - RNA, 19 nt, Artificial Sequence
  Description of Artificial Sequence: Synthetic oligonucleotide
auucggaaauagcgcacau

SEQ ID NO: 1231065 - RNA, 19 nt, Artificial Sequence
  Description of Artificial Sequence: Synthetic oligonucleotide
ccucgaucaccucggaugg

SEQ ID NO: 1231066 - RNA, 19 nt, Artificial Sequence
  Description of Artificial Sequence: Synthetic oligonucleotide
uccgaagaguaugacccaa

SEQ ID NO: 1231067 - RNA, 19 nt, Artificial Sequence
  Description of Artificial Sequence: Synthetic oligonucleotide
gaucaccucggauggcgca

SEQ ID NO: 1231068 - RNA, 19 nt, Artificial Sequence
  Description of Artificial Sequence: Synthetic oligonucleotide
auaggcuaggagguaaauu

SEQ ID NO: 1231069 - RNA, 19 nt, Artificial Sequence
  Description of Artificial Sequence: Synthetic oligonucleotide
augauaccugggauguaag

SEQ ID NO: 1231070 - RNA, 19 nt, Artificial Sequence
  Description of Artificial Sequence: Synthetic oligonucleotide
uggcagcguuccuucauga

SEQ ID NO: 1231071 - RNA, 19 nt, Artificial Sequence
  Description of Artificial Sequence: Synthetic oligonucleotide
gucaaagauuaagaucaga

SEQ ID NO: 1231072 - RNA, 19 nt, Artificial Sequence
  Description of Artificial Sequence: Synthetic oligonucleotide
uccuacgaaugagccagug

SEQ ID NO: 1231073 - RNA, 19 nt, Artificial Sequence
  Description of Artificial Sequence: Synthetic oligonucleotide
ggauguaaguggcuaccac

SEQ ID NO: 1231074 - RNA, 19 nt, Artificial Sequence
  Description of Artificial Sequence: Synthetic oligonucleotide
cuggcagcguuccuucaug

SEQ ID NO: 1231075 - RNA, 19 nt, Artificial Sequence
  Description of Artificial Sequence: Synthetic oligonucleotide
augcucaacaccacugcga

SEQ ID NO: 1231076 - RNA, 19 nt, Artificial Sequence
  Description of Artificial Sequence: Synthetic oligonucleotide
uggccggucaaagaugaua

SEQ ID NO: 1231077 - RNA, 19 nt, Artificial Sequence
  Description of Artificial Sequence: Synthetic oligonucleotide
caugagcaccaucccuacc

SEQ ID NO: 1231078 - RNA, 19 nt, Artificial Sequence
  Description of Artificial Sequence: Synthetic oligonucleotide
ugcccgaguccaugaagac

SEQ ID NO: 1231079 - RNA, 19 nt, Artificial Sequence
  Description of Artificial Sequence: Synthetic oligonucleotide
agagagcgcuugaugagcu

SEQ ID NO: 1231080 - RNA, 19 nt, Artificial Sequence
  Description of Artificial Sequence: Synthetic oligonucleotide
guucgcggacauucggaac

SEQ ID NO: 1231081 - RNA, 19 nt, Artificial Sequence
  Description of Artificial Sequence: Synthetic oligonucleotide
uacggguuacccgcagucu

SEQ ID NO: 1231082 - RNA, 19 nt, Artificial Sequence
  Description of Artificial Sequence: Synthetic oligonucleotide
ccuacgaaugagccagugc

SEQ ID NO: 1231083 - RNA, 19 nt, Artificial Sequence
  Description of Artificial Sequence: Synthetic oligonucleotide
gucuauuugaguaguguau

SEQ ID NO: 1231084 - RNA, 19 nt, Artificial Sequence
  Description of Artificial Sequence: Synthetic oligonucleotide
cuguucgcggacauucgga

SEQ ID NO: 1231085 - RNA, 19 nt, Artificial Sequence
  Description of Artificial Sequence: Synthetic oligonucleotide
guguuaggauaaggggucc

SEQ ID NO: 1231086 - RNA, 19 nt, Artificial Sequence
  Description of Artificial Sequence: Synthetic oligonucleotide
caccgggcgagugaugccc

SEQ ID NO: 1231087 - RNA, 19 nt, Artificial Sequence
  Description of Artificial Sequence: Synthetic oligonucleotide
gauuaagaucagagcuaca

SEQ ID NO: 1231088 - RNA, 19 nt, Artificial Sequence
  Description of Artificial Sequence: Synthetic oligonucleotide
cagcguggaugcucaacac

SEQ ID NO: 1231089 - RNA, 19 nt, Artificial Sequence
  Description of Artificial Sequence: Synthetic oligonucleotide
gauaagggguccacugucu

SEQ ID NO: 1231090 - RNA, 19 nt, Artificial Sequence
  Description of Artificial Sequence: Synthetic oligonucleotide
ggguuccuacgaaugagcc

SEQ ID NO: 1231091 - RNA, 19 nt, Artificial Sequence
  Description of Artificial Sequence: Synthetic oligonucleotide
gaagcuaaugccaccuaau

SEQ ID NO: 1231092 - RNA, 19 nt, Artificial Sequence
  Description of Artificial Sequence: Synthetic oligonucleotide
cugccaaauauggaggcaa

SEQ ID NO: 1231093 - RNA, 19 nt, Artificial Sequence
  Description of Artificial Sequence: Synthetic oligonucleotide
gcaguaagccacuguucgc

SEQ ID NO: 1231094 - RNA, 19 nt, Artificial Sequence
  Description of Artificial Sequence: Synthetic oligonucleotide
agcgcacauauuccaggaa

SEQ ID NO: 1231095 - RNA, 19 nt, Artificial Sequence
  Description of Artificial Sequence: Synthetic oligonucleotide
gaccgcuuggcauucuggu

SEQ ID NO: 1231096 - RNA, 19 nt, Artificial Sequence
  Description of Artificial Sequence: Synthetic oligonucleotide
ggcgagugaugcccaaugc

SEQ ID NO: 1231097 - RNA, 19 nt, Artificial Sequence
  Description of Artificial Sequence: Synthetic oligonucleotide
cuuucucguaauggcagga

SEQ ID NO: 1231098 - RNA, 19 nt, Artificial Sequence
  Description of Artificial Sequence: Synthetic oligonucleotide
cacuuguacugaacguaga

SEQ ID NO: 1231099 - RNA, 19 nt, Artificial Sequence
  Description of Artificial Sequence: Synthetic oligonucleotide
uuggguuccuggggaagcu

SEQ ID NO: 1231100 - RNA, 19 nt, Artificial Sequence
  Description of Artificial Sequence: Synthetic oligonucleotide
caccacgaguaucgguccc

SEQ ID NO: 1231101 - RNA, 19 nt, Artificial Sequence
  Description of Artificial Sequence: Synthetic oligonucleotide
gugcccgaguccaugaaga

SEQ ID NO: 1231102 - RNA, 19 nt, Artificial Sequence
  Description of Artificial Sequence: Synthetic oligonucleotide
ucaccucggauggcgcaag

SEQ ID NO: 1231103 - RNA, 19 nt, Artificial Sequence
  Description of Artificial Sequence: Synthetic oligonucleotide
augaagacggccaggcaua

SEQ ID NO: 1231104 - RNA, 19 nt, Artificial Sequence
  Description of Artificial Sequence: Synthetic oligonucleotide
acaacgccaaagcgcucga

SEQ ID NO: 1231105 - RNA, 19 nt, Artificial Sequence
  Description of Artificial Sequence: Synthetic oligonucleotide
uaccagcagugccucccca

SEQ ID NO: 1231106 - RNA, 19 nt, Artificial Sequence
  Description of Artificial Sequence: Synthetic oligonucleotide
ggaaaacggcauugccuug

SEQ ID NO: 1231107 - RNA, 19 nt, Artificial Sequence
  Description of Artificial Sequence: Synthetic oligonucleotide
ccaccaacaggaagaaguc

SEQ ID NO: 1231108 - RNA, 19 nt, Artificial Sequence
  Description of Artificial Sequence: Synthetic oligonucleotide
uguaugcuuccaggagcga

SEQ ID NO: 1231109 - RNA, 19 nt, Artificial Sequence
  Description of Artificial Sequence: Synthetic oligonucleotide
uacccgcagucuggcagcg

SEQ ID NO: 1231110 - RNA, 19 nt, Artificial Sequence
  Description of Artificial Sequence: Synthetic oligonucleotide
uuccuacgaaugagccagu

SEQ ID NO: 1231111 - RNA, 19 nt, Artificial Sequence
  Description of Artificial Sequence: Synthetic oligonucleotide
ggagauugucuauuugagu

SEQ ID NO: 1231112 - RNA, 19 nt, Artificial Sequence
  Description of Artificial Sequence: Synthetic oligonucleotide
gaacgccugcacagcgagg

SEQ ID NO: 1231113 - RNA, 19 nt, Artificial Sequence
  Description of Artificial Sequence: Synthetic oligonucleotide
cgcaccacgaguaucgguc

SEQ ID NO: 1231114 - RNA, 19 nt, Artificial Sequence
  Description of Artificial Sequence: Synthetic oligonucleotide
gaaguacggguuacccgca

SEQ ID NO: 1231115 - RNA, 19 nt, Artificial Sequence
  Description of Artificial Sequence: Synthetic oligonucleotide
aggcuccgaagaguaugac

SEQ ID NO: 1231116 - RNA, 19 nt, Artificial Sequence
  Description of Artificial Sequence: Synthetic oligonucleotide
ucgcggacauucggaacug

SEQ ID NO: 1231117 - RNA, 19 nt, Artificial Sequence
  Description of Artificial Sequence: Synthetic oligonucleotide
ggcaccgggcgagugaugc

SEQ ID NO: 1231118 - RNA, 19 nt, Artificial Sequence
  Description of Artificial Sequence: Synthetic oligonucleotide
gcguggaugcucaacacca

SEQ ID NO: 1231119 - RNA, 19 nt, Artificial Sequence
  Description of Artificial Sequence: Synthetic oligonucleotide
ucguaauggcaggagccuu

SEQ ID NO: 1231120 - RNA, 19 nt, Artificial Sequence
  Description of Artificial Sequence: Synthetic oligonucleotide
gaagacggccaggcauacc

SEQ ID NO: 1231121 - RNA, 19 nt, Artificial Sequence
  Description of Artificial Sequence: Synthetic oligonucleotide
cucguucauccaggaagag

SEQ ID NO: 1231122 - RNA, 19 nt, Artificial Sequence
  Description of Artificial Sequence: Synthetic oligonucleotide
accacgaguaucgguccca

SEQ ID NO: 1231123 - RNA, 19 nt, Artificial Sequence
  Description of Artificial Sequence: Synthetic oligonucleotide
gucggggcagcagguacag

SEQ ID NO: 1231124 - RNA, 19 nt, Artificial Sequence
  Description of Artificial Sequence: Synthetic oligonucleotide
uccccucgaauguuuucuu

SEQ ID NO: 1231125 - RNA, 19 nt, Artificial Sequence
  Description of Artificial Sequence: Synthetic oligonucleotide
acuaggccaucagcaauau

SEQ ID NO: 1231126 - RNA, 19 nt, Artificial Sequence
  Description of Artificial Sequence: Synthetic oligonucleotide
gcaccacgaguaucggucc

SEQ ID NO: 1231127 - RNA, 19 nt, Artificial Sequence
  Description of Artificial Sequence: Synthetic oligonucleotide
agcgcaccacgaguaucgg

SEQ ID NO: 1231128 - RNA, 19 nt, Artificial Sequence
  Description of Artificial Sequence: Synthetic oligonucleotide
cuccgaagaguaugaccca

SEQ ID NO: 1231129 - RNA, 19 nt, Artificial Sequence
  Description of Artificial Sequence: Synthetic oligonucleotide
ggcgcaaguauuggugggc

SEQ ID NO: 1231130 - RNA, 19 nt, Artificial Sequence
  Description of Artificial Sequence: Synthetic oligonucleotide
acgaagcuaaugccaccua

SEQ ID NO: 1231131 - RNA, 19 nt, Artificial Sequence
  Description of Artificial Sequence: Synthetic oligonucleotide
uaugacccaagggcuugau

SEQ ID NO: 1231132 - RNA, 19 nt, Artificial Sequence
  Description of Artificial Sequence: Synthetic oligonucleotide
cuaggccaucagcaauauc

SEQ ID NO: 1231133 - RNA, 19 nt, Artificial Sequence
  Description of Artificial Sequence: Synthetic oligonucleotide
gggucauguuucuaggccu

SEQ ID NO: 1231134 - RNA, 19 nt, Artificial Sequence
  Description of Artificial Sequence: Synthetic oligonucleotide
ugggcaccgggcgagugau

SEQ ID NO: 1231135 - RNA, 19 nt, Artificial Sequence
  Description of Artificial Sequence: Synthetic oligonucleotide
ggcuaggagguaaauucga

SEQ ID NO: 1231136 - RNA, 19 nt, Artificial Sequence
  Description of Artificial Sequence: Synthetic oligonucleotide
aucaccucggauggcgcaa

SEQ ID NO: 1231137 - RNA, 19 nt, Artificial Sequence
  Description of Artificial Sequence: Synthetic oligonucleotide
accaauaggcuaggaggua

SEQ ID NO: 1231138 - RNA, 19 nt, Artificial Sequence
  Description of Artificial Sequence: Synthetic oligonucleotide
ggcauaccguggcagccac

SEQ ID NO: 1231139 - RNA, 19 nt, Artificial Sequence
  Description of Artificial Sequence: Synthetic oligonucleotide
gaacccagacuccgcgacu

SEQ ID NO: 1231140 - RNA, 19 nt, Artificial Sequence
  Description of Artificial Sequence: Synthetic oligonucleotide
gccaccuaauaccagcagu

SEQ ID NO: 1231141 - RNA, 19 nt, Artificial Sequence
  Description of Artificial Sequence: Synthetic oligonucleotide
cucgaucaccucggauggc

SEQ ID NO: 1231142 - RNA, 19 nt, Artificial Sequence
  Description of Artificial Sequence: Synthetic oligonucleotide
cggguuacccgcagucugg

SEQ ID NO: 1231143 - RNA, 19 nt, Artificial Sequence
  Description of Artificial Sequence: Synthetic oligonucleotide
cucguaauggcaggagccu

SEQ ID NO: 1231144 - RNA, 19 nt, Artificial Sequence
  Description of Artificial Sequence: Synthetic oligonucleotide
gcauugccuugcuggagca

SEQ ID NO: 1231145 - RNA, 19 nt, Artificial Sequence
  Description of Artificial Sequence: Synthetic oligonucleotide
cgggaacccagacuccgcg

SEQ ID NO: 1231146 - RNA, 19 nt, Artificial Sequence
  Description of Artificial Sequence: Synthetic oligonucleotide
cucagcgggaacccagacu

SEQ ID NO: 1231147 - RNA, 19 nt, Artificial Sequence
  Description of Artificial Sequence: Synthetic oligonucleotide
cucggauggcgcaaguauu

SEQ ID NO: 1231148 - RNA, 19 nt, Artificial Sequence
  Description of Artificial Sequence: Synthetic oligonucleotide
caggagcgacacagugcug

SEQ ID NO: 1231149 - RNA, 19 nt, Artificial Sequence
  Description of Artificial Sequence: Synthetic oligonucleotide
cguagaacgccugcacagc

SEQ ID NO: 1231150 - RNA, 19 nt, Artificial Sequence
  Description of Artificial Sequence: Synthetic oligonucleotide
ggguuacccgcagucuggc

SEQ ID NO: 1231151 - RNA, 19 nt, Artificial Sequence
  Description of Artificial Sequence: Synthetic oligonucleotide
cacgaguaucggucccaca

SEQ ID NO: 1231152 - RNA, 19 nt, Artificial Sequence
  Description of Artificial Sequence: Synthetic oligonucleotide
guacagggccugggaauca

SEQ ID NO: 1231153 - RNA, 19 nt, Artificial Sequence
  Description of Artificial Sequence: Synthetic oligonucleotide
cuacuacuacuaggccauc

SEQ ID NO: 1231154 - RNA, 19 nt, Artificial Sequence
  Description of Artificial Sequence: Synthetic oligonucleotide
gcucgaaguacggguuacc

SEQ ID NO: 1231155 - RNA, 19 nt, Artificial Sequence
  Description of Artificial Sequence: Synthetic oligonucleotide
ccaauaggcuaggagguaa

SEQ ID NO: 1231156 - RNA, 19 nt, Artificial Sequence
  Description of Artificial Sequence: Synthetic oligonucleotide
ggauggcgcaaguauuggu

SEQ ID NO: 1231157 - RNA, 19 nt, Artificial Sequence
  Description of Artificial Sequence: Synthetic oligonucleotide
agaugauaccugggaugua

SEQ ID NO: 1231158 - RNA, 19 nt, Artificial Sequence
  Description of Artificial Sequence: Synthetic oligonucleotide
gcucaacaccacugcgaac

SEQ ID NO: 1231159 - RNA, 19 nt, Artificial Sequence
  Description of Artificial Sequence: Synthetic oligonucleotide
auaccguggcagccacaua

SEQ ID NO: 1231160 - RNA, 19 nt, Artificial Sequence
  Description of Artificial Sequence: Synthetic oligonucleotide
gaccucgaucaccucggau

SEQ ID NO: 1231161 - RNA, 19 nt, Artificial Sequence
  Description of Artificial Sequence: Synthetic oligonucleotide
agacggccaggcauaccgu

SEQ ID NO: 1231162 - RNA, 19 nt, Artificial Sequence
  Description of Artificial Sequence: Synthetic oligonucleotide
accucggauggcgcaagua

SEQ ID NO: 1231163 - RNA, 19 nt, Artificial Sequence
  Description of Artificial Sequence: Synthetic oligonucleotide
agcgcuugaugagcugguu

SEQ ID NO: 1231164 - RNA, 19 nt, Artificial Sequence
  Description of Artificial Sequence: Synthetic oligonucleotide
gguuacccgcagucuggca

SEQ ID NO: 1231165 - RNA, 19 nt, Artificial Sequence
  Description of Artificial Sequence: Synthetic oligonucleotide
gcgcaaguauuggugggca

SEQ ID NO: 1231166 - RNA, 19 nt, Artificial Sequence
  Description of Artificial Sequence: Synthetic oligonucleotide
cgaagcuaaugccaccuaa

SEQ ID NO: 1231167 - RNA, 19 nt, Artificial Sequence
  Description of Artificial Sequence: Synthetic oligonucleotide
accguggcagccacauaua

SEQ ID NO: 1231168 - RNA, 19 nt, Artificial Sequence
  Description of Artificial Sequence: Synthetic oligonucleotide
gcacugucgggucauguuu

SEQ ID NO: 1231169 - RNA, 19 nt, Artificial Sequence
  Description of Artificial Sequence: Synthetic oligonucleotide
cggauggcgcaaguauugg

SEQ ID NO: 1231170 - RNA, 19 nt, Artificial Sequence
  Description of Artificial Sequence: Synthetic oligonucleotide
ccacaccgcagcguggaug

SEQ ID NO: 1231171 - RNA, 19 nt, Artificial Sequence
  Description of Artificial Sequence: Synthetic oligonucleotide
ccucgaauguuuucuuagu

SEQ ID NO: 1231172 - RNA, 19 nt, Artificial Sequence
  Description of Artificial Sequence: Synthetic oligonucleotide
gagcgacacagugcugaua

SEQ ID NO: 1231173 - RNA, 19 nt, Artificial Sequence
  Description of Artificial Sequence: Synthetic oligonucleotide
cgcaaguauuggugggcac

SEQ ID NO: 1231174 - RNA, 19 nt, Artificial Sequence
  Description of Artificial Sequence: Synthetic oligonucleotide
gcguuccuucaugaccagc

SEQ ID NO: 1231175 - RNA, 19 nt, Artificial Sequence
  Description of Artificial Sequence: Synthetic oligonucleotide
gcaccgggcgagugaugcc

SEQ ID NO: 1231176 - RNA, 19 nt, Artificial Sequence
  Description of Artificial Sequence: Synthetic oligonucleotide
cggacauucggaacuggaa

SEQ ID NO: 1231177 - RNA, 19 nt, Artificial Sequence
  Description of Artificial Sequence: Synthetic oligonucleotide
ccacgaguaucggucccac

SEQ ID NO: 1231178 - RNA, 19 nt, Artificial Sequence
  Description of Artificial Sequence: Synthetic oligonucleotide
gcccaagcaaaggcaugac

SEQ ID NO: 1231179 - RNA, 19 nt, Artificial Sequence
  Description of Artificial Sequence: Synthetic oligonucleotide
gaugaccgcuuggcauucu

SEQ ID NO: 1231180 - RNA, 19 nt, Artificial Sequence
  Description of Artificial Sequence: Synthetic oligonucleotide
gcgacacagugcugauaga

SEQ ID NO: 1231181 - RNA, 19 nt, Artificial Sequence
  Description of Artificial Sequence: Synthetic oligonucleotide
ccgcagucuggcagcguuc

SEQ ID NO: 1231182 - RNA, 19 nt, Artificial Sequence
  Description of Artificial Sequence: Synthetic oligonucleotide
ggagcgacacagugcugau

SEQ ID NO: 1231183 - RNA, 19 nt, Artificial Sequence
  Description of Artificial Sequence: Synthetic oligonucleotide
cgcucgaaguacggguuac

SEQ ID NO: 1231184 - RNA, 19 nt, Artificial Sequence
  Description of Artificial Sequence: Synthetic oligonucleotide
caacgccaaagcgcucgaa

SEQ ID NO: 1231185 - RNA, 19 nt, Artificial Sequence
  Description of Artificial Sequence: Synthetic oligonucleotide
cugucgggucauguuucua

SEQ ID NO: 1231186 - RNA, 19 nt, Artificial Sequence
  Description of Artificial Sequence: Synthetic oligonucleotide
gcgcucgaaguacggguua

SEQ ID NO: 1231187 - RNA, 19 nt, Artificial Sequence
  Description of Artificial Sequence: Synthetic oligonucleotide
cggcauugccuugcuggag

SEQ ID NO: 1231188 - RNA, 19 nt, Artificial Sequence
  Description of Artificial Sequence: Synthetic oligonucleotide
gcgcaccacgaguaucggu

SEQ ID NO: 1231189 - RNA, 19 nt, Artificial Sequence
  Description of Artificial Sequence: Synthetic oligonucleotide
caccucggauggcgcaagu

SEQ ID NO: 1231190 - RNA, 19 nt, Artificial Sequence
  Description of Artificial Sequence: Synthetic oligonucleotide
gguugaggacgaagcuaau

SEQ ID NO: 1231191 - RNA, 19 nt, Artificial Sequence
  Description of Artificial Sequence: Synthetic oligonucleotide
ccgaguccaugaagacaaa

SEQ ID NO: 1231192 - RNA, 19 nt, Artificial Sequence
  Description of Artificial Sequence: Synthetic oligonucleotide
guggccggucaaagaugau

SEQ ID NO: 1231193 - RNA, 19 nt, Artificial Sequence
  Description of Artificial Sequence: Synthetic oligonucleotide
cggaaauagcgcacauauu

SEQ ID NO: 1231194 - RNA, 19 nt, Artificial Sequence
  Description of Artificial Sequence: Synthetic oligonucleotide
cacugccaugccgguggcu

SEQ ID NO: 1231195 - RNA, 19 nt, Artificial Sequence
  Description of Artificial Sequence: Synthetic oligonucleotide
ccgggcgagugaugcccaa

SEQ ID NO: 1231196 - RNA, 19 nt, Artificial Sequence
  Description of Artificial Sequence: Synthetic oligonucleotide
ccgagccacucagcgggaa

SEQ ID NO: 1231197 - RNA, 19 nt, Artificial Sequence
  Description of Artificial Sequence: Synthetic oligonucleotide
ccgccagcaccgagccacu

SEQ ID NO: 1231198 - RNA, 19 nt, Artificial Sequence
  Description of Artificial Sequence: Synthetic oligonucleotide
aauguuuuaacuuuccaac

SEQ ID NO: 1231199 - RNA, 19 nt, Artificial Sequence
  Description of Artificial Sequence: Synthetic oligonucleotide
aauacucucaucuuccacc

SEQ ID NO: 1231200 - RNA, 19 nt, Artificial Sequence
  Description of Artificial Sequence: Synthetic oligonucleotide
aaaucuacaccacagauug

SEQ ID NO: 1231201 - RNA, 19 nt, Artificial Sequence
  Description of Artificial Sequence: Synthetic oligonucleotide
uauuuaauaagacucagca

SEQ ID NO: 1231202 - RNA, 19 nt, Artificial Sequence
  Description of Artificial Sequence: Synthetic oligonucleotide
uuaccaaugucacagaaag

SEQ ID NO: 1231203 - RNA, 19 nt, Artificial Sequence
  Description of Artificial Sequence: Synthetic oligonucleotide
ucuacuagccauuugaacc

SEQ ID NO: 1231204 - RNA, 19 nt, Artificial Sequence
  Description of Artificial Sequence: Synthetic oligonucleotide
uuucaaauaguaaucaaca

SEQ ID NO: 1231205 - RNA, 19 nt, Artificial Sequence
  Description of Artificial Sequence: Synthetic oligonucleotide
uguaaguguaaucacauca

SEQ ID NO: 1231206 - RNA, 19 nt, Artificial Sequence
  Description of Artificial Sequence: Synthetic oligonucleotide
cucauauuuaauaagacuc

SEQ ID NO: 1231207 - RNA, 19 nt, Artificial Sequence
  Description of Artificial Sequence: Synthetic oligonucleotide
gauggauugaaggagaagg

SEQ ID NO: 1231208 - RNA, 19 nt, Artificial Sequence
  Description of Artificial Sequence: Synthetic oligonucleotide
ucuaacugcacucuaagca

SEQ ID NO: 1231209 - RNA, 19 nt, Artificial Sequence
  Description of Artificial Sequence: Synthetic oligonucleotide
auacuaaggaguuugauca

SEQ ID NO: 1231210 - RNA, 19 nt, Artificial Sequence
  Description of Artificial Sequence: Synthetic oligonucleotide
aauaucuguaaguguaauc

SEQ ID NO: 1231211 - RNA, 19 nt, Artificial Sequence
  Description of Artificial Sequence: Synthetic oligonucleotide
aaagcguuugguuccauuc

SEQ ID NO: 1231212 - RNA, 19 nt, Artificial Sequence
  Description of Artificial Sequence: Synthetic oligonucleotide
uaagauuaggugaagaauc

SEQ ID NO: 1231213 - RNA, 19 nt, Artificial Sequence
  Description of Artificial Sequence: Synthetic oligonucleotide
aguguuacugcucauuuuc

SEQ ID NO: 1231214 - RNA, 19 nt, Artificial Sequence
  Description of Artificial Sequence: Synthetic oligonucleotide
uguaaaguugccaugguaa

SEQ ID NO: 1231215 - RNA, 19 nt, Artificial Sequence
  Description of Artificial Sequence: Synthetic oligonucleotide
ucuugauuaagauuaggug

SEQ ID NO: 1231216 - RNA, 19 nt, Artificial Sequence
  Description of Artificial Sequence: Synthetic oligonucleotide
uuuuagaugaugacagcag

SEQ ID NO: 1231217 - RNA, 19 nt, Artificial Sequence
  Description of Artificial Sequence: Synthetic oligonucleotide
auuuaauaagacucagcac

SEQ ID NO: 1231218 - RNA, 19 nt, Artificial Sequence
  Description of Artificial Sequence: Synthetic oligonucleotide
cuugcuguaauacaagccc

SEQ ID NO: 1231219 - RNA, 19 nt, Artificial Sequence
  Description of Artificial Sequence: Synthetic oligonucleotide
uaaucaacagccuugcugu

SEQ ID NO: 1231220 - RNA, 19 nt, Artificial Sequence
  Description of Artificial Sequence: Synthetic oligonucleotide
ucucuuaccuuauucacag

SEQ ID NO: 1231221 - RNA, 19 nt, Artificial Sequence
  Description of Artificial Sequence: Synthetic oligonucleotide
uguggaccuguuuaaaugg

SEQ ID NO: 1231222 - RNA, 19 nt, Artificial Sequence
  Description of Artificial Sequence: Synthetic oligonucleotide
aaaagugaguccuuugaga

SEQ ID NO: 1231223 - RNA, 19 nt, Artificial Sequence
  Description of Artificial Sequence: Synthetic oligonucleotide
uucuugauuaagauuaggu

SEQ ID NO: 1231224 - RNA, 19 nt, Artificial Sequence
  Description of Artificial Sequence: Synthetic oligonucleotide
acauagaguccucagguac

SEQ ID NO: 1231225 - RNA, 19 nt, Artificial Sequence
  Description of Artificial Sequence: Synthetic oligonucleotide
ucaaauauacuaaggaguu

SEQ ID NO: 1231226 - RNA, 19 nt, Artificial Sequence
  Description of Artificial Sequence: Synthetic oligonucleotide
aacaacuggaugcaugucu

SEQ ID NO: 1231227 - RNA, 19 nt, Artificial Sequence
  Description of Artificial Sequence: Synthetic oligonucleotide
uuccucauauuuaauaaga

SEQ ID NO: 1231228 - RNA, 19 nt, Artificial Sequence
  Description of Artificial Sequence: Synthetic oligonucleotide
auaucuguaaguguaauca

SEQ ID NO: 1231229 - RNA, 19 nt, Artificial Sequence
  Description of Artificial Sequence: Synthetic oligonucleotide
acaguuucgaguuuaaaau

SEQ ID NO: 1231230 - RNA, 19 nt, Artificial Sequence
  Description of Artificial Sequence: Synthetic oligonucleotide
aucgcaguguuucagggac

SEQ ID NO: 1231231 - RNA, 19 nt, Artificial Sequence
  Description of Artificial Sequence: Synthetic oligonucleotide
aaaggguacacuucuugug

SEQ ID NO: 1231232 - RNA, 19 nt, Artificial Sequence
  Description of Artificial Sequence: Synthetic oligonucleotide
uguagcuucauuauucuua

SEQ ID NO: 1231233 - RNA, 19 nt, Artificial Sequence
  Description of Artificial Sequence: Synthetic oligonucleotide
uguaaucacaucauaggaa

SEQ ID NO: 1231234 - RNA, 19 nt, Artificial Sequence
  Description of Artificial Sequence: Synthetic oligonucleotide
uuugagaacaugcacugaa

SEQ ID NO: 1231235 - RNA, 19 nt, Artificial Sequence
  Description of Artificial Sequence: Synthetic oligonucleotide
uuucuaacugcacucuaag

SEQ ID NO: 1231236 - RNA, 19 nt, Artificial Sequence
  Description of Artificial Sequence: Synthetic oligonucleotide
guaaucaacagccuugcug

SEQ ID NO: 1231237 - RNA, 19 nt, Artificial Sequence
  Description of Artificial Sequence: Synthetic oligonucleotide
uaucaagcgccccagauaa

SEQ ID NO: 1231238 - RNA, 19 nt, Artificial Sequence
  Description of Artificial Sequence: Synthetic oligonucleotide
agcugugguacauggaagc

SEQ ID NO: 1231239 - RNA, 19 nt, Artificial Sequence
  Description of Artificial Sequence: Synthetic oligonucleotide
auuauucuuaggcugguca

SEQ ID NO: 1231240 - RNA, 19 nt, Artificial Sequence
  Description of Artificial Sequence: Synthetic oligonucleotide
aggaaauacaccggaaagc

SEQ ID NO: 1231241 - RNA, 19 nt, Artificial Sequence
  Description of Artificial Sequence: Synthetic oligonucleotide
acagacgagacucaaauau

SEQ ID NO: 1231242 - RNA, 19 nt, Artificial Sequence
  Description of Artificial Sequence: Synthetic oligonucleotide
gauaguaccuauucuuuac

SEQ ID NO: 1231243 - RNA, 19 nt, Artificial Sequence
  Description of Artificial Sequence: Synthetic oligonucleotide
ugcauggucaguuuucacc

SEQ ID NO: 1231244 - RNA, 19 nt, Artificial Sequence
  Description of Artificial Sequence: Synthetic oligonucleotide
aaguuaacauuuuauccaa

SEQ ID NO: 1231245 - RNA, 19 nt, Artificial Sequence
  Description of Artificial Sequence: Synthetic oligonucleotide
gauggauggucgcagcucg

SEQ ID NO: 1231246 - RNA, 19 nt, Artificial Sequence
  Description of Artificial Sequence: Synthetic oligonucleotide
auuaagauuaggugaagaa

SEQ ID NO: 1231247 - RNA, 19 nt, Artificial Sequence
  Description of Artificial Sequence: Synthetic oligonucleotide
aucaauucuuucuagcaga

SEQ ID NO: 1231248 - RNA, 19 nt, Artificial Sequence
  Description of Artificial Sequence: Synthetic oligonucleotide
uuugaacccguaaagucac

SEQ ID NO: 1231249 - RNA, 19 nt, Artificial Sequence
  Description of Artificial Sequence: Synthetic oligonucleotide
gauuaggugaagaaucagc

SEQ ID NO: 1231250 - RNA, 19 nt, Artificial Sequence
  Description of Artificial Sequence: Synthetic oligonucleotide
aaaguuuucuuggccaaag

SEQ ID NO: 1231251 - RNA, 19 nt, Artificial Sequence
  Description of Artificial Sequence: Synthetic oligonucleotide
agugauaguaccuauucuu

SEQ ID NO: 1231252 - RNA, 19 nt, Artificial Sequence
  Description of Artificial Sequence: Synthetic oligonucleotide
uggacaacggagcauaauc

SEQ ID NO: 1231253 - RNA, 19 nt, Artificial Sequence
  Description of Artificial Sequence: Synthetic oligonucleotide
gaguggacagaacagcucc

SEQ ID NO: 1231254 - RNA, 19 nt, Artificial Sequence
  Description of Artificial Sequence: Synthetic oligonucleotide
guagcuucauuauucuuag

SEQ ID NO: 1231255 - RNA, 19 nt, Artificial Sequence
  Description of Artificial Sequence: Synthetic oligonucleotide
acucuaagcaguucacagg

SEQ ID NO: 1231256 - RNA, 19 nt, Artificial Sequence
  Description of Artificial Sequence: Synthetic oligonucleotide
accggaaagcguuugguuc

SEQ ID NO: 1231257 - RNA, 19 nt, Artificial Sequence
  Description of Artificial Sequence: Synthetic oligonucleotide
uuaccuuauucacaguuuc

SEQ ID NO: 1231258 - RNA, 19 nt, Artificial Sequence
  Description of Artificial Sequence: Synthetic oligonucleotide
aagaaaagugaguccuuug

SEQ ID NO: 1231259 - RNA, 19 nt, Artificial Sequence
  Description of Artificial Sequence: Synthetic oligonucleotide
aaaggccacccuuucuaac

SEQ ID NO: 1231260 - RNA, 19 nt, Artificial Sequence
  Description of Artificial Sequence: Synthetic oligonucleotide
cauuugaacccguaaaguc

SEQ ID NO: 1231261 - RNA, 19 nt, Artificial Sequence
  Description of Artificial Sequence: Synthetic oligonucleotide
uuaggugaagaaucagcag

SEQ ID NO: 1231262 - RNA, 19 nt, Artificial Sequence
  Description of Artificial Sequence: Synthetic oligonucleotide
ggaaauacaccggaaagcg

SEQ ID NO: 1231263 - RNA, 19 nt, Artificial Sequence
  Description of Artificial Sequence: Synthetic oligonucleotide
uuuucuggacaacggagca

SEQ ID NO: 1231264 - RNA, 19 nt, Artificial Sequence
  Description of Artificial Sequence: Synthetic oligonucleotide
aaagucacuuggauaaaag

SEQ ID NO: 1231265 - RNA, 19 nt, Artificial Sequence
  Description of Artificial Sequence: Synthetic oligonucleotide
agaacuccccguuugaacu

SEQ ID NO: 1231266 - RNA, 19 nt, Artificial Sequence
  Description of Artificial Sequence: Synthetic oligonucleotide
uugcuauucugacugguca

SEQ ID NO: 1231267 - RNA, 19 nt, Artificial Sequence
  Description of Artificial Sequence: Synthetic oligonucleotide
uuaagauuaggugaagaau

SEQ ID NO: 1231268 - RNA, 19 nt, Artificial Sequence
  Description of Artificial Sequence: Synthetic oligonucleotide
uucuugugcaauagaagga

SEQ ID NO: 1231269 - RNA, 19 nt, Artificial Sequence
  Description of Artificial Sequence: Synthetic oligonucleotide
ugugcaauagaaggaaaug

SEQ ID NO: 1231270 - RNA, 19 nt, Artificial Sequence
  Description of Artificial Sequence: Synthetic oligonucleotide
ugggaaacgagucuccacu

SEQ ID NO: 1231271 - RNA, 19 nt, Artificial Sequence
  Description of Artificial Sequence: Synthetic oligonucleotide
uaauagcuuauuuauucaa

SEQ ID NO: 1231272 - RNA, 19 nt, Artificial Sequence
  Description of Artificial Sequence: Synthetic oligonucleotide
uucucuuaccuuauucaca

SEQ ID NO: 1231273 - RNA, 19 nt, Artificial Sequence
  Description of Artificial Sequence: Synthetic oligonucleotide
aagugauaguaccuauucu

SEQ ID NO: 1231274 - RNA, 19 nt, Artificial Sequence
  Description of Artificial Sequence: Synthetic oligonucleotide
uccucauauuuaauaagac

SEQ ID NO: 1231275 - RNA, 19 nt, Artificial Sequence
  Description of Artificial Sequence: Synthetic oligonucleotide
uuggcaguugcucucaaaa

SEQ ID NO: 1231276 - RNA, 19 nt, Artificial Sequence
  Description of Artificial Sequence: Synthetic oligonucleotide
agacgagacucaaauauac

SEQ ID NO: 1231277 - RNA, 19 nt, Artificial Sequence
  Description of Artificial Sequence: Synthetic oligonucleotide
uaccuauucuuuaccaaug

SEQ ID NO: 1231278 - RNA, 19 nt, Artificial Sequence
  Description of Artificial Sequence: Synthetic oligonucleotide
ugcucucaaaagcugggag

SEQ ID NO: 1231279 - RNA, 19 nt, Artificial Sequence
  Description of Artificial Sequence: Synthetic oligonucleotide
caucaauucuuucuagcag

SEQ ID NO: 1231280 - RNA, 19 nt, Artificial Sequence
  Description of Artificial Sequence: Synthetic oligonucleotide
cugggaguaaaucugcuug

SEQ ID NO: 1231281 - RNA, 19 nt, Artificial Sequence
  Description of Artificial Sequence: Synthetic oligonucleotide
auuaggugaagaaucagca

SEQ ID NO: 1231282 - RNA, 19 nt, Artificial Sequence
  Description of Artificial Sequence: Synthetic oligonucleotide
guacccaaugaccucagag

SEQ ID NO: 1231283 - RNA, 19 nt, Artificial Sequence
  Description of Artificial Sequence: Synthetic oligonucleotide
ucaccaugauaucaagcgc

SEQ ID NO: 1231284 - RNA, 19 nt, Artificial Sequence
  Description of Artificial Sequence: Synthetic oligonucleotide
auaguaaucaacagccuug

SEQ ID NO: 1231285 - RNA, 19 nt, Artificial Sequence
  Description of Artificial Sequence: Synthetic oligonucleotide
uuauucuuaggcuggucac

SEQ ID NO: 1231286 - RNA, 19 nt, Artificial Sequence
  Description of Artificial Sequence: Synthetic oligonucleotide
aaauacaccggaaagcguu

SEQ ID NO: 1231287 - RNA, 19 nt, Artificial Sequence
  Description of Artificial Sequence: Synthetic oligonucleotide
ugagcuggaaugcaugguc

SEQ ID NO: 1231288 - RNA, 19 nt, Artificial Sequence
  Description of Artificial Sequence: Synthetic oligonucleotide
uaagcaguucacagggagc

SEQ ID NO: 1231289 - RNA, 19 nt, Artificial Sequence
  Description of Artificial Sequence: Synthetic oligonucleotide
ugagaacaugcacugaaua

SEQ ID NO: 1231290 - RNA, 19 nt, Artificial Sequence
  Description of Artificial Sequence: Synthetic oligonucleotide
acaucgcaguguuucaggg

SEQ ID NO: 1231291 - RNA, 19 nt, Artificial Sequence
  Description of Artificial Sequence: Synthetic oligonucleotide
acugacauagaguccucag

SEQ ID NO: 1231292 - RNA, 19 nt, Artificial Sequence
  Description of Artificial Sequence: Synthetic oligonucleotide
agauaauguuuuaacuuuc

SEQ ID NO: 1231293 - RNA, 19 nt, Artificial Sequence
  Description of Artificial Sequence: Synthetic oligonucleotide
aagauuaggugaagaauca

SEQ ID NO: 1231294 - RNA, 19 nt, Artificial Sequence
  Description of Artificial Sequence: Synthetic oligonucleotide
cugacauagaguccucagg

SEQ ID NO: 1231295 - RNA, 19 nt, Artificial Sequence
  Description of Artificial Sequence: Synthetic oligonucleotide
aaggaaaugcugaugugca

SEQ ID NO: 1231296 - RNA, 19 nt, Artificial Sequence
  Description of Artificial Sequence: Synthetic oligonucleotide
cagagaguuucuacuagcc

SEQ ID NO: 1231297 - RNA, 19 nt, Artificial Sequence
  Description of Artificial Sequence: Synthetic oligonucleotide
uugugcaauagaaggaaau

SEQ ID NO: 1231298 - RNA, 19 nt, Artificial Sequence
  Description of Artificial Sequence: Synthetic oligonucleotide
uaguaccuauucuuuacca

SEQ ID NO: 1231299 - RNA, 19 nt, Artificial Sequence
  Description of Artificial Sequence: Synthetic oligonucleotide
auuugaacccguaaaguca

SEQ ID NO: 1231300 - RNA, 19 nt, Artificial Sequence
  Description of Artificial Sequence: Synthetic oligonucleotide
aagcaguucacagggagca

SEQ ID NO: 1231301 - RNA, 19 nt, Artificial Sequence
  Description of Artificial Sequence: Synthetic oligonucleotide
aagacucagcaccgagugg

SEQ ID NO: 1231302 - RNA, 19 nt, Artificial Sequence
  Description of Artificial Sequence: Synthetic oligonucleotide
cacagauuggaaaggguac

SEQ ID NO: 1231303 - RNA, 19 nt, Artificial Sequence
  Description of Artificial Sequence: Synthetic oligonucleotide
acccaaugaccucagagcu

SEQ ID NO: 1231304 - RNA, 19 nt, Artificial Sequence
  Description of Artificial Sequence: Synthetic oligonucleotide
acgagacucaaauauacua

SEQ ID NO: 1231305 - RNA, 19 nt, Artificial Sequence
  Description of Artificial Sequence: Synthetic oligonucleotide
uucuaacugcacucuaagc

SEQ ID NO: 1231306 - RNA, 19 nt, Artificial Sequence
  Description of Artificial Sequence: Synthetic oligonucleotide
uucuuucuagcagaguuga

SEQ ID NO: 1231307 - RNA, 19 nt, Artificial Sequence
  Description of Artificial Sequence: Synthetic oligonucleotide
uuagaugaugacagcaguu

SEQ ID NO: 1231308 - RNA, 19 nt, Artificial Sequence
  Description of Artificial Sequence: Synthetic oligonucleotide
caguuucgaguuuaaaaug

SEQ ID NO: 1231309 - RNA, 19 nt, Artificial Sequence
  Description of Artificial Sequence: Synthetic oligonucleotide
uucuacuagccauuugaac

SEQ ID NO: 1231310 - RNA, 19 nt, Artificial Sequence
  Description of Artificial Sequence: Synthetic oligonucleotide
uacacuucuugugcaauag

SEQ ID NO: 1231311 - RNA, 19 nt, Artificial Sequence
  Description of Artificial Sequence: Synthetic oligonucleotide
aagcguuugguuccauucu

SEQ ID NO: 1231312 - RNA, 19 nt, Artificial Sequence
  Description of Artificial Sequence: Synthetic oligonucleotide
aguuucgaguuuaaaauga

SEQ ID NO: 1231313 - RNA, 19 nt, Artificial Sequence
  Description of Artificial Sequence: Synthetic oligonucleotide
aaggaaggacagacgagac

SEQ ID NO: 1231314 - RNA, 19 nt, Artificial Sequence
  Description of Artificial Sequence: Synthetic oligonucleotide
aacgagucuccacugugga

SEQ ID NO: 1231315 - RNA, 19 nt, Artificial Sequence
  Description of Artificial Sequence: Synthetic oligonucleotide
agcauaaucuugcuguaaa

SEQ ID NO: 1231316 - RNA, 19 nt, Artificial Sequence
  Description of Artificial Sequence: Synthetic oligonucleotide
cuguggaccuguuuaaaug

SEQ ID NO: 1231317 - RNA, 19 nt, Artificial Sequence
  Description of Artificial Sequence: Synthetic oligonucleotide
uaaguguaaucacaucaua

SEQ ID NO: 1231318 - RNA, 19 nt, Artificial Sequence
  Description of Artificial Sequence: Synthetic oligonucleotide
cugaauagagaccugcaca

SEQ ID NO: 1231319 - RNA, 19 nt, Artificial Sequence
  Description of Artificial Sequence: Synthetic oligonucleotide
aaguaugugguggacaauu

SEQ ID NO: 1231320 - RNA, 19 nt, Artificial Sequence
  Description of Artificial Sequence: Synthetic oligonucleotide
uugcuguaauacaagcccu

SEQ ID NO: 1231321 - RNA, 19 nt, Artificial Sequence
  Description of Artificial Sequence: Synthetic oligonucleotide
uacaccggaaagcguuugg

SEQ ID NO: 1231322 - RNA, 19 nt, Artificial Sequence
  Description of Artificial Sequence: Synthetic oligonucleotide
accgaguggacagaacagc

SEQ ID NO: 1231323 - RNA, 19 nt, Artificial Sequence
  Description of Artificial Sequence: Synthetic oligonucleotide
aguuuucaccaugauauca

SEQ ID NO: 1231324 - RNA, 19 nt, Artificial Sequence
  Description of Artificial Sequence: Synthetic oligonucleotide
cuucucgaggaaauacacc

SEQ ID NO: 1231325 - RNA, 19 nt, Artificial Sequence
  Description of Artificial Sequence: Synthetic oligonucleotide
aguugcucucaaaagcugg

SEQ ID NO: 1231326 - RNA, 19 nt, Artificial Sequence
  Description of Artificial Sequence: Synthetic oligonucleotide
aauauacuaaggaguuuga

SEQ ID NO: 1231327 - RNA, 19 nt, Artificial Sequence
  Description of Artificial Sequence: Synthetic oligonucleotide
ucaagcgccccagauaaug

SEQ ID NO: 1231328 - RNA, 19 nt, Artificial Sequence
  Description of Artificial Sequence: Synthetic oligonucleotide
ucgguacugacagaggggc

SEQ ID NO: 1231329 - RNA, 19 nt, Artificial Sequence
  Description of Artificial Sequence: Synthetic oligonucleotide
gauggucgcagcucgguac

SEQ ID NO: 1231330 - RNA, 19 nt, Artificial Sequence
  Description of Artificial Sequence: Synthetic oligonucleotide
uuugcagcuuugcuguagu

SEQ ID NO: 1231331 - RNA, 19 nt, Artificial Sequence
  Description of Artificial Sequence: Synthetic oligonucleotide
ggcaguugcucucaaaagc

SEQ ID NO: 1231332 - RNA, 19 nt, Artificial Sequence
  Description of Artificial Sequence: Synthetic oligonucleotide
guacauggaagccagccuc

SEQ ID NO: 1231333 - RNA, 19 nt, Artificial Sequence
  Description of Artificial Sequence: Synthetic oligonucleotide
gaacccguaaagucacuug

SEQ ID NO: 1231334 - RNA, 19 nt, Artificial Sequence
  Description of Artificial Sequence: Synthetic oligonucleotide
ugauaguaccuauucuuua

SEQ ID NO: 1231335 - RNA, 19 nt, Artificial Sequence
  Description of Artificial Sequence: Synthetic oligonucleotide
ugguaaaguauguggugga

SEQ ID NO: 1231336 - RNA, 19 nt, Artificial Sequence
  Description of Artificial Sequence: Synthetic oligonucleotide
gucaacaucgcaguguuuc

SEQ ID NO: 1231337 - RNA, 19 nt, Artificial Sequence
  Description of Artificial Sequence: Synthetic oligonucleotide
uggcaguugcucucaaaag

SEQ ID NO: 1231338 - RNA, 19 nt, Artificial Sequence
  Description of Artificial Sequence: Synthetic oligonucleotide
aguaccuauucuuuaccaa

SEQ ID NO: 1231339 - RNA, 19 nt, Artificial Sequence
  Description of Artificial Sequence: Synthetic oligonucleotide
cacaguaucagucuucaaa

SEQ ID NO: 1231340 - RNA, 19 nt, Artificial Sequence
  Description of Artificial Sequence: Synthetic oligonucleotide
ggaugcaugucucugguac

SEQ ID NO: 1231341 - RNA, 19 nt, Artificial Sequence
  Description of Artificial Sequence: Synthetic oligonucleotide
agagcuuugcagcuuugcu

SEQ ID NO: 1231342 - RNA, 19 nt, Artificial Sequence
  Description of Artificial Sequence: Synthetic oligonucleotide
acacuucaagaauaucugu

SEQ ID NO: 1231343 - RNA, 19 nt, Artificial Sequence
  Description of Artificial Sequence: Synthetic oligonucleotide
acaacuggaugcaugucuc

SEQ ID NO: 1231344 - RNA, 19 nt, Artificial Sequence
  Description of Artificial Sequence: Synthetic oligonucleotide
augucacagaaagucaaag

SEQ ID NO: 1231345 - RNA, 19 nt, Artificial Sequence
  Description of Artificial Sequence: Synthetic oligonucleotide
ucaggugcucaucaccaac

SEQ ID NO: 1231346 - RNA, 19 nt, Artificial Sequence
  Description of Artificial Sequence: Synthetic oligonucleotide
uaacugcacucuaagcagu

SEQ ID NO: 1231347 - RNA, 19 nt, Artificial Sequence
  Description of Artificial Sequence: Synthetic oligonucleotide
cucgguacugacagagggg

SEQ ID NO: 1231348 - RNA, 19 nt, Artificial Sequence
  Description of Artificial Sequence: Synthetic oligonucleotide
aaacaacuggaugcauguc

SEQ ID NO: 1231349 - RNA, 19 nt, Artificial Sequence
  Description of Artificial Sequence: Synthetic oligonucleotide
gagaccugcacaguaucag

SEQ ID NO: 1231350 - RNA, 19 nt, Artificial Sequence
  Description of Artificial Sequence: Synthetic oligonucleotide
gguggcuuaacacacuuca

SEQ ID NO: 1231351 - RNA, 19 nt, Artificial Sequence
  Description of Artificial Sequence: Synthetic oligonucleotide
aacuggaugcaugucucug

SEQ ID NO: 1231352 - RNA, 19 nt, Artificial Sequence
  Description of Artificial Sequence: Synthetic oligonucleotide
ugucucugguacccaauga

SEQ ID NO: 1231353 - RNA, 19 nt, Artificial Sequence
  Description of Artificial Sequence: Synthetic oligonucleotide
uuacugcucauuuucuuuu

SEQ ID NO: 1231354 - RNA, 19 nt, Artificial Sequence
  Description of Artificial Sequence: Synthetic oligonucleotide
accuauucuuuaccaaugu

SEQ ID NO: 1231355 - RNA, 19 nt, Artificial Sequence
  Description of Artificial Sequence: Synthetic oligonucleotide
caggugcucaucaccaacc

SEQ ID NO: 1231356 - RNA, 19 nt, Artificial Sequence
  Description of Artificial Sequence: Synthetic oligonucleotide
uauucuuaggcuggucaca

SEQ ID NO: 1231357 - RNA, 19 nt, Artificial Sequence
  Description of Artificial Sequence: Synthetic oligonucleotide
guggacaauucccaguuca

SEQ ID NO: 1231358 - RNA, 19 nt, Artificial Sequence
  Description of Artificial Sequence: Synthetic oligonucleotide
ugggaguaaaucugcuugu

SEQ ID NO: 1231359 - RNA, 19 nt, Artificial Sequence
  Description of Artificial Sequence: Synthetic oligonucleotide
ugacuggucaucugaaauu

SEQ ID NO: 1231360 - RNA, 19 nt, Artificial Sequence
  Description of Artificial Sequence: Synthetic oligonucleotide
ugauuaagauuaggugaag

SEQ ID NO: 1231361 - RNA, 19 nt, Artificial Sequence
  Description of Artificial Sequence: Synthetic oligonucleotide
agccauuugaacccguaaa

SEQ ID NO: 1231362 - RNA, 19 nt, Artificial Sequence
  Description of Artificial Sequence: Synthetic oligonucleotide
agcguuugguuccauucug

SEQ ID NO: 1231363 - RNA, 19 nt, Artificial Sequence
  Description of Artificial Sequence: Synthetic oligonucleotide
ugcuguaauacaagcccuc

SEQ ID NO: 1231364 - RNA, 19 nt, Artificial Sequence
  Description of Artificial Sequence: Synthetic oligonucleotide
uugagaacaugcacugaau

SEQ ID NO: 1231365 - RNA, 19 nt, Artificial Sequence
  Description of Artificial Sequence: Synthetic oligonucleotide
aaaagugauaguaccuauu

SEQ ID NO: 1231366 - RNA, 19 nt, Artificial Sequence
  Description of Artificial Sequence: Synthetic oligonucleotide
accuuauucacaguuucga

SEQ ID NO: 1231367 - RNA, 19 nt, Artificial Sequence
  Description of Artificial Sequence: Synthetic oligonucleotide
ucuugcuguaaaguugcca

SEQ ID NO: 1231368 - RNA, 19 nt, Artificial Sequence
  Description of Artificial Sequence: Synthetic oligonucleotide
acauugcuauucugacugg

SEQ ID NO: 1231369 - RNA, 19 nt, Artificial Sequence
  Description of Artificial Sequence: Synthetic oligonucleotide
caugauaucaagcgcccca

SEQ ID NO: 1231370 - RNA, 19 nt, Artificial Sequence
  Description of Artificial Sequence: Synthetic oligonucleotide
guaguggagaucugccagc

SEQ ID NO: 1231371 - RNA, 19 nt, Artificial Sequence
  Description of Artificial Sequence: Synthetic oligonucleotide
agagucaacaucgcagugu

SEQ ID NO: 1231372 - RNA, 19 nt, Artificial Sequence
  Description of Artificial Sequence: Synthetic oligonucleotide
cugaugugcagagaguuuc

SEQ ID NO: 1231373 - RNA, 19 nt, Artificial Sequence
  Description of Artificial Sequence: Synthetic oligonucleotide
gggacuucaucauagcuuc

SEQ ID NO: 1231374 - RNA, 19 nt, Artificial Sequence
  Description of Artificial Sequence: Synthetic oligonucleotide
ucuguuggcaguugcucuc

SEQ ID NO: 1231375 - RNA, 19 nt, Artificial Sequence
  Description of Artificial Sequence: Synthetic oligonucleotide
guuuucuuggccaaaguua

SEQ ID NO: 1231376 - RNA, 19 nt, Artificial Sequence
  Description of Artificial Sequence: Synthetic oligonucleotide
agauuaggugaagaaucag

SEQ ID NO: 1231377 - RNA, 19 nt, Artificial Sequence
  Description of Artificial Sequence: Synthetic oligonucleotide
ugaugugcagagaguuucu

SEQ ID NO: 1231378 - RNA, 19 nt, Artificial Sequence
  Description of Artificial Sequence: Synthetic oligonucleotide
ucuaagcaguucacaggga

SEQ ID NO: 1231379 - RNA, 19 nt, Artificial Sequence
  Description of Artificial Sequence: Synthetic oligonucleotide
agcuggaaugcauggucag

SEQ ID NO: 1231380 - RNA, 19 nt, Artificial Sequence
  Description of Artificial Sequence: Synthetic oligonucleotide
acuguggaccuguuuaaau

SEQ ID NO: 1231381 - RNA, 19 nt, Artificial Sequence
  Description of Artificial Sequence: Synthetic oligonucleotide
uugcuguaaaguugccaug

SEQ ID NO: 1231382 - RNA, 19 nt, Artificial Sequence
  Description of Artificial Sequence: Synthetic oligonucleotide
uguuacugcucauuuucuu

SEQ ID NO: 1231383 - RNA, 19 nt, Artificial Sequence
  Description of Artificial Sequence: Synthetic oligonucleotide
agcaguuugauggauugaa

SEQ ID NO: 1231384 - RNA, 19 nt, Artificial Sequence
  Description of Artificial Sequence: Synthetic oligonucleotide
augauaucaagcgccccag

SEQ ID NO: 1231385 - RNA, 19 nt, Artificial Sequence
  Description of Artificial Sequence: Synthetic oligonucleotide
augacagcaguuugaugga

SEQ ID NO: 1231386 - RNA, 19 nt, Artificial Sequence
  Description of Artificial Sequence: Synthetic oligonucleotide
auaucaagcgccccagaua

SEQ ID NO: 1231387 - RNA, 19 nt, Artificial Sequence
  Description of Artificial Sequence: Synthetic oligonucleotide
agaaucccaaacaacugga

SEQ ID NO: 1231388 - RNA, 19 nt, Artificial Sequence
  Description of Artificial Sequence: Synthetic oligonucleotide
uacuaaggaguuugaucac

SEQ ID NO: 1231389 - RNA, 19 nt, Artificial Sequence
  Description of Artificial Sequence: Synthetic oligonucleotide
guaaaguugccaugguaaa

SEQ ID NO: 1231390 - RNA, 19 nt, Artificial Sequence
  Description of Artificial Sequence: Synthetic oligonucleotide
acgagucuccacuguggac

SEQ ID NO: 1231391 - RNA, 19 nt, Artificial Sequence
  Description of Artificial Sequence: Synthetic oligonucleotide
uugaucacuucuucuugau

SEQ ID NO: 1231392 - RNA, 19 nt, Artificial Sequence
  Description of Artificial Sequence: Synthetic oligonucleotide
ucauagcuucacuuacuuc

SEQ ID NO: 1231393 - RNA, 19 nt, Artificial Sequence
  Description of Artificial Sequence: Synthetic oligonucleotide
caaaagcugggaguaaauc

SEQ ID NO: 1231394 - RNA, 19 nt, Artificial Sequence
  Description of Artificial Sequence: Synthetic oligonucleotide
ugcuauucugacuggucau

SEQ ID NO: 1231395 - RNA, 19 nt, Artificial Sequence
  Description of Artificial Sequence: Synthetic oligonucleotide
guaaaguaugugguggaca

SEQ ID NO: 1231396 - RNA, 19 nt, Artificial Sequence
  Description of Artificial Sequence: Synthetic oligonucleotide
cguaaagucacuuggauaa

SEQ ID NO: 1231397 - RNA, 19 nt, Artificial Sequence
  Description of Artificial Sequence: Synthetic oligonucleotide
cuugcuguaaaguugccau

SEQ ID NO: 1231398 - RNA, 19 nt, Artificial Sequence
  Description of Artificial Sequence: Synthetic oligonucleotide
cauagaguccucagguaca

SEQ ID NO: 1231399 - RNA, 19 nt, Artificial Sequence
  Description of Artificial Sequence: Synthetic oligonucleotide
ugauaucaagcgccccaga

SEQ ID NO: 1231400 - RNA, 19 nt, Artificial Sequence
  Description of Artificial Sequence: Synthetic oligonucleotide
caccgaguggacagaacag

SEQ ID NO: 1231401 - RNA, 19 nt, Artificial Sequence
  Description of Artificial Sequence: Synthetic oligonucleotide
uccggaugagcuggaaugc

SEQ ID NO: 1231402 - RNA, 19 nt, Artificial Sequence
  Description of Artificial Sequence: Synthetic oligonucleotide
uagccauuugaacccguaa

SEQ ID NO: 1231403 - RNA, 19 nt, Artificial Sequence
  Description of Artificial Sequence: Synthetic oligonucleotide
agaccugcacaguaucagu

SEQ ID NO: 1231404 - RNA, 19 nt, Artificial Sequence
  Description of Artificial Sequence: Synthetic oligonucleotide
caaacaacuggaugcaugu

SEQ ID NO: 1231405 - RNA, 19 nt, Artificial Sequence
  Description of Artificial Sequence: Synthetic oligonucleotide
ucugacuggucaucugaaa

SEQ ID NO: 1231406 - RNA, 19 nt, Artificial Sequence
  Description of Artificial Sequence: Synthetic oligonucleotide
ggaaccaugcacuucucga

SEQ ID NO: 1231407 - RNA, 19 nt, Artificial Sequence
  Description of Artificial Sequence: Synthetic oligonucleotide
ucgugauggauggucgcag

SEQ ID NO: 1231408 - RNA, 19 nt, Artificial Sequence
  Description of Artificial Sequence: Synthetic oligonucleotide
uaauaagacucagcaccga

SEQ ID NO: 1231409 - RNA, 19 nt, Artificial Sequence
  Description of Artificial Sequence: Synthetic oligonucleotide
auauacuaaggaguuugau

SEQ ID NO: 1231410 - RNA, 19 nt, Artificial Sequence
  Description of Artificial Sequence: Synthetic oligonucleotide
cagcugugguacauggaag

SEQ ID NO: 1231411 - RNA, 19 nt, Artificial Sequence
  Description of Artificial Sequence: Synthetic oligonucleotide
gauaucaagcgccccagau

SEQ ID NO: 1231412 - RNA, 19 nt, Artificial Sequence
  Description of Artificial Sequence: Synthetic oligonucleotide
ucgcagagucaacaucgca

SEQ ID NO: 1231413 - RNA, 19 nt, Artificial Sequence
  Description of Artificial Sequence: Synthetic oligonucleotide
cacuucucgaggaaauaca

SEQ ID NO: 1231414 - RNA, 19 nt, Artificial Sequence
  Description of Artificial Sequence: Synthetic oligonucleotide
gcagagaguuucuacuagc

SEQ ID NO: 1231415 - RNA, 19 nt, Artificial Sequence
  Description of Artificial Sequence: Synthetic oligonucleotide
cugccgagcagucgcagag

SEQ ID NO: 1231416 - RNA, 19 nt, Artificial Sequence
  Description of Artificial Sequence: Synthetic oligonucleotide
ucauuauucuuaggcuggu

SEQ ID NO: 1231417 - RNA, 19 nt, Artificial Sequence
  Description of Artificial Sequence: Synthetic oligonucleotide
cagcucgguacugacagag

SEQ ID NO: 1231418 - RNA, 19 nt, Artificial Sequence
  Description of Artificial Sequence: Synthetic oligonucleotide
guggacagaacagcuccgg

SEQ ID NO: 1231419 - RNA, 19 nt, Artificial Sequence
  Description of Artificial Sequence: Synthetic oligonucleotide
guaauacaagcccucuucu

SEQ ID NO: 1231420 - RNA, 19 nt, Artificial Sequence
  Description of Artificial Sequence: Synthetic oligonucleotide
ccuuauucacaguuucgag

SEQ ID NO: 1231421 - RNA, 19 nt, Artificial Sequence
  Description of Artificial Sequence: Synthetic oligonucleotide
acacuucuugugcaauaga

SEQ ID NO: 1231422 - RNA, 19 nt, Artificial Sequence
  Description of Artificial Sequence: Synthetic oligonucleotide
cuacaccacagauuggaaa

SEQ ID NO: 1231423 - RNA, 19 nt, Artificial Sequence
  Description of Artificial Sequence: Synthetic oligonucleotide
guaccuauucuuuaccaau

SEQ ID NO: 1231424 - RNA, 19 nt, Artificial Sequence
  Description of Artificial Sequence: Synthetic oligonucleotide
agaauaucuguaaguguaa

SEQ ID NO: 1231425 - RNA, 19 nt, Artificial Sequence
  Description of Artificial Sequence: Synthetic oligonucleotide
aguggacagaacagcuccg

SEQ ID NO: 1231426 - RNA, 19 nt, Artificial Sequence
  Description of Artificial Sequence: Synthetic oligonucleotide
ugguacccaaugaccucag

SEQ ID NO: 1231427 - RNA, 19 nt, Artificial Sequence
  Description of Artificial Sequence: Synthetic oligonucleotide
agccgguguagcuucauua

SEQ ID NO: 1231428 - RNA, 19 nt, Artificial Sequence
  Description of Artificial Sequence: Synthetic oligonucleotide
auucuuaggcuggucacau

SEQ ID NO: 1231429 - RNA, 19 nt, Artificial Sequence
  Description of Artificial Sequence: Synthetic oligonucleotide
cagauuggaaaggguacac

SEQ ID NO: 1231430 - RNA, 19 nt, Artificial Sequence
  Description of Artificial Sequence: Synthetic oligonucleotide
gguacugacagaggggcug

SEQ ID NO: 1231431 - RNA, 19 nt, Artificial Sequence
  Description of Artificial Sequence: Synthetic oligonucleotide
gagagaacuccccguuuga

SEQ ID NO: 1231432 - RNA, 19 nt, Artificial Sequence
  Description of Artificial Sequence: Synthetic oligonucleotide
agggacuucaucauagcuu

SEQ ID NO: 1231433 - RNA, 19 nt, Artificial Sequence
  Description of Artificial Sequence: Synthetic oligonucleotide
acccgguggcuuaacacac

SEQ ID NO: 1231434 - RNA, 19 nt, Artificial Sequence
  Description of Artificial Sequence: Synthetic oligonucleotide
gaacuccccguuugaacuc

SEQ ID NO: 1231435 - RNA, 19 nt, Artificial Sequence
  Description of Artificial Sequence: Synthetic oligonucleotide
aauacaccggaaagcguuu

SEQ ID NO: 1231436 - RNA, 19 nt, Artificial Sequence
  Description of Artificial Sequence: Synthetic oligonucleotide
aagcgccccagauaauguu

SEQ ID NO: 1231437 - RNA, 19 nt, Artificial Sequence
  Description of Artificial Sequence: Synthetic oligonucleotide
auggucgcagcucgguacu

SEQ ID NO: 1231438 - RNA, 19 nt, Artificial Sequence
  Description of Artificial Sequence: Synthetic oligonucleotide
ugaacccguaaagucacuu

SEQ ID NO: 1231439 - RNA, 19 nt, Artificial Sequence
  Description of Artificial Sequence: Synthetic oligonucleotide
aacuccccguuugaacuca

SEQ ID NO: 1231440 - RNA, 19 nt, Artificial Sequence
  Description of Artificial Sequence: Synthetic oligonucleotide
caguuuucaccaugauauc

SEQ ID NO: 1231441 - RNA, 19 nt, Artificial Sequence
  Description of Artificial Sequence: Synthetic oligonucleotide
uccacccgguggcuuaaca

SEQ ID NO: 1231442 - RNA, 19 nt, Artificial Sequence
  Description of Artificial Sequence: Synthetic oligonucleotide
ccaaccugguuucucagac

SEQ ID NO: 1231443 - RNA, 19 nt, Artificial Sequence
  Description of Artificial Sequence: Synthetic oligonucleotide
gucacuuggauaaaaguuu

SEQ ID NO: 1231444 - RNA, 19 nt, Artificial Sequence
  Description of Artificial Sequence: Synthetic oligonucleotide
gaaggcacugacauagagu

SEQ ID NO: 1231445 - RNA, 19 nt, Artificial Sequence
  Description of Artificial Sequence: Synthetic oligonucleotide
guggaccuguuuaaauggc

SEQ ID NO: 1231446 - RNA, 19 nt, Artificial Sequence
  Description of Artificial Sequence: Synthetic oligonucleotide
cugcacaguaucagucuuc

SEQ ID NO: 1231447 - RNA, 19 nt, Artificial Sequence
  Description of Artificial Sequence: Synthetic oligonucleotide
gugggaaacgagucuccac

SEQ ID NO: 1231448 - RNA, 19 nt, Artificial Sequence
  Description of Artificial Sequence: Synthetic oligonucleotide
augugguggacaauuccca

SEQ ID NO: 1231449 - RNA, 19 nt, Artificial Sequence
  Description of Artificial Sequence: Synthetic oligonucleotide
cuugugcaauagaaggaaa

SEQ ID NO: 1231450 - RNA, 19 nt, Artificial Sequence
  Description of Artificial Sequence: Synthetic oligonucleotide
ugaaagagcuuugcagcuu

SEQ ID NO: 1231451 - RNA, 19 nt, Artificial Sequence
  Description of Artificial Sequence: Synthetic oligonucleotide
gcaccgaguggacagaaca

SEQ ID NO: 1231452 - RNA, 19 nt, Artificial Sequence
  Description of Artificial Sequence: Synthetic oligonucleotide
cacccgguggcuuaacaca

SEQ ID NO: 1231453 - RNA, 19 nt, Artificial Sequence
  Description of Artificial Sequence: Synthetic oligonucleotide
cagagucaacaucgcagug

SEQ ID NO: 1231454 - RNA, 19 nt, Artificial Sequence
  Description of Artificial Sequence: Synthetic oligonucleotide
guuucgaguuuaaaaugaa

SEQ ID NO: 1231455 - RNA, 19 nt, Artificial Sequence
  Description of Artificial Sequence: Synthetic oligonucleotide
gagcuggaaugcaugguca

SEQ ID NO: 1231456 - RNA, 19 nt, Artificial Sequence
  Description of Artificial Sequence: Synthetic oligonucleotide
gacagacgagacucaaaua

SEQ ID NO: 1231457 - RNA, 19 nt, Artificial Sequence
  Description of Artificial Sequence: Synthetic oligonucleotide
auaguucucuuaccuuauu

SEQ ID NO: 1231458 - RNA, 19 nt, Artificial Sequence
  Description of Artificial Sequence: Synthetic oligonucleotide
caccaaccugguuucucag

SEQ ID NO: 1231459 - RNA, 19 nt, Artificial Sequence
  Description of Artificial Sequence: Synthetic oligonucleotide
gacaacggagcauaaucuu

SEQ ID NO: 1231460 - RNA, 19 nt, Artificial Sequence
  Description of Artificial Sequence: Synthetic oligonucleotide
uugaacccguaaagucacu

SEQ ID NO: 1231461 - RNA, 19 nt, Artificial Sequence
  Description of Artificial Sequence: Synthetic oligonucleotide
gagucaacaucgcaguguu

SEQ ID NO: 1231462 - RNA, 19 nt, Artificial Sequence
  Description of Artificial Sequence: Synthetic oligonucleotide
uggaaaggguacacuucuu

SEQ ID NO: 1231463 - RNA, 19 nt, Artificial Sequence
  Description of Artificial Sequence: Synthetic oligonucleotide
gggaaacgagucuccacug

SEQ ID NO: 1231464 - RNA, 19 nt, Artificial Sequence
  Description of Artificial Sequence: Synthetic oligonucleotide
gcucccagaggcaagcugc

SEQ ID NO: 1231465 - RNA, 19 nt, Artificial Sequence
  Description of Artificial Sequence: Synthetic oligonucleotide
guacugacagaggggcugc

SEQ ID NO: 1231466 - RNA, 19 nt, Artificial Sequence
  Description of Artificial Sequence: Synthetic oligonucleotide
cauuauucuuaggcugguc

SEQ ID NO: 1231467 - RNA, 19 nt, Artificial Sequence
  Description of Artificial Sequence: Synthetic oligonucleotide
ucgcaguguuucagggacu

SEQ ID NO: 1231468 - RNA, 19 nt, Artificial Sequence
  Description of Artificial Sequence: Synthetic oligonucleotide
guacacuucuugugcaaua

SEQ ID NO: 1231469 - RNA, 19 nt, Artificial Sequence
  Description of Artificial Sequence: Synthetic oligonucleotide
uggauggucgcagcucggu

SEQ ID NO: 1231470 - RNA, 19 nt, Artificial Sequence
  Description of Artificial Sequence: Synthetic oligonucleotide
gcaguuugauggauugaag

SEQ ID NO: 1231471 - RNA, 19 nt, Artificial Sequence
  Description of Artificial Sequence: Synthetic oligonucleotide
aacugcacucuaagcaguu

SEQ ID NO: 1231472 - RNA, 19 nt, Artificial Sequence
  Description of Artificial Sequence: Synthetic oligonucleotide
accacagauuggaaagggu

SEQ ID NO: 1231473 - RNA, 19 nt, Artificial Sequence
  Description of Artificial Sequence: Synthetic oligonucleotide
aauucccaguucacagaau

SEQ ID NO: 1231474 - RNA, 19 nt, Artificial Sequence
  Description of Artificial Sequence: Synthetic oligonucleotide
aguugccaugguaaaguau

SEQ ID NO: 1231475 - RNA, 19 nt, Artificial Sequence
  Description of Artificial Sequence: Synthetic oligonucleotide
caucgcaguguuucaggga

SEQ ID NO: 1231476 - RNA, 19 nt, Artificial Sequence
  Description of Artificial Sequence: Synthetic oligonucleotide
uguuggcaguugcucucaa

SEQ ID NO: 1231477 - RNA, 19 nt, Artificial Sequence
  Description of Artificial Sequence: Synthetic oligonucleotide
ccucauauuuaauaagacu

SEQ ID NO: 1231478 - RNA, 19 nt, Artificial Sequence
  Description of Artificial Sequence: Synthetic oligonucleotide
ugcaugucucugguaccca

SEQ ID NO: 1231479 - RNA, 19 nt, Artificial Sequence
  Description of Artificial Sequence: Synthetic oligonucleotide
caucauagcuucacuuacu

SEQ ID NO: 1231480 - RNA, 19 nt, Artificial Sequence
  Description of Artificial Sequence: Synthetic oligonucleotide
gagcauaaucuugcuguaa

SEQ ID NO: 1231481 - RNA, 19 nt, Artificial Sequence
  Description of Artificial Sequence: Synthetic oligonucleotide
agcucgguacugacagagg

SEQ ID NO: 1231482 - RNA, 19 nt, Artificial Sequence
  Description of Artificial Sequence: Synthetic oligonucleotide
caaaggccacccuuucuaa

SEQ ID NO: 1231483 - RNA, 19 nt, Artificial Sequence
  Description of Artificial Sequence: Synthetic oligonucleotide
agcaccgaguggacagaac

SEQ ID NO: 1231484 - RNA, 19 nt, Artificial Sequence
  Description of Artificial Sequence: Synthetic oligonucleotide
gacgagacucaaauauacu

SEQ ID NO: 1231485 - RNA, 19 nt, Artificial Sequence
  Description of Artificial Sequence: Synthetic oligonucleotide
gcguuugguuccauucugg

SEQ ID NO: 1231486 - RNA, 19 nt, Artificial Sequence
  Description of Artificial Sequence: Synthetic oligonucleotide
acccguaaagucacuugga

SEQ ID NO: 1231487 - RNA, 19 nt, Artificial Sequence
  Description of Artificial Sequence: Synthetic oligonucleotide
gcugugguacauggaagcc

SEQ ID NO: 1231488 - RNA, 19 nt, Artificial Sequence
  Description of Artificial Sequence: Synthetic oligonucleotide
cuuugagaacaugcacuga

SEQ ID NO: 1231489 - RNA, 19 nt, Artificial Sequence
  Description of Artificial Sequence: Synthetic oligonucleotide
cuagccauuugaacccgua

SEQ ID NO: 1231490 - RNA, 19 nt, Artificial Sequence
  Description of Artificial Sequence: Synthetic oligonucleotide
gccucgugauggauggucg

SEQ ID NO: 1231491 - RNA, 19 nt, Artificial Sequence
  Description of Artificial Sequence: Synthetic oligonucleotide
gaaagcguuugguuccauu

SEQ ID NO: 1231492 - RNA, 19 nt, Artificial Sequence
  Description of Artificial Sequence: Synthetic oligonucleotide
gugauaguaccuauucuuu

SEQ ID NO: 1231493 - RNA, 19 nt, Artificial Sequence
  Description of Artificial Sequence: Synthetic oligonucleotide
guaaagucacuuggauaaa

SEQ ID NO: 1231494 - RNA, 19 nt, Artificial Sequence
  Description of Artificial Sequence: Synthetic oligonucleotide
auggauggucgcagcucgg

SEQ ID NO: 1231495 - RNA, 19 nt, Artificial Sequence
  Description of Artificial Sequence: Synthetic oligonucleotide
gaauagagaccugcacagu

SEQ ID NO: 1231496 - RNA, 19 nt, Artificial Sequence
  Description of Artificial Sequence: Synthetic oligonucleotide
gugauggauggucgcagcu

SEQ ID NO: 1231497 - RNA, 19 nt, Artificial Sequence
  Description of Artificial Sequence: Synthetic oligonucleotide
cucgugauggauggucgca

SEQ ID NO: 1231498 - RNA, 19 nt, Artificial Sequence
  Description of Artificial Sequence: Synthetic oligonucleotide
cagggacuucaucauagcu

SEQ ID NO: 1231499 - RNA, 19 nt, Artificial Sequence
  Description of Artificial Sequence: Synthetic oligonucleotide
guaaaucugcuuguugguu

SEQ ID NO: 1231500 - RNA, 19 nt, Artificial Sequence
  Description of Artificial Sequence: Synthetic oligonucleotide
cggagcauaaucuugcugu

SEQ ID NO: 1231501 - RNA, 19 nt, Artificial Sequence
  Description of Artificial Sequence: Synthetic oligonucleotide
ccacccgguggcuuaacac

SEQ ID NO: 1231502 - RNA, 19 nt, Artificial Sequence
  Description of Artificial Sequence: Synthetic oligonucleotide
ggagcauaaucuugcugua

SEQ ID NO: 1231503 - RNA, 19 nt, Artificial Sequence
  Description of Artificial Sequence: Synthetic oligonucleotide
ggacaacggagcauaaucu

SEQ ID NO: 1231504 - RNA, 19 nt, Artificial Sequence
  Description of Artificial Sequence: Synthetic oligonucleotide
acuagccauuugaacccgu

SEQ ID NO: 1231505 - RNA, 19 nt, Artificial Sequence
  Description of Artificial Sequence: Synthetic oligonucleotide
agcgccccagauaauguuu

SEQ ID NO: 1231506 - RNA, 19 nt, Artificial Sequence
  Description of Artificial Sequence: Synthetic oligonucleotide
ggccacccuuucuaacugc

SEQ ID NO: 1231507 - RNA, 19 nt, Artificial Sequence
  Description of Artificial Sequence: Synthetic oligonucleotide
caagcgccccagauaaugu

SEQ ID NO: 1231508 - RNA, 19 nt, Artificial Sequence
  Description of Artificial Sequence: Synthetic oligonucleotide
ugccgagcagucgcagagu

SEQ ID NO: 1231509 - RNA, 19 nt, Artificial Sequence
  Description of Artificial Sequence: Synthetic oligonucleotide
guggcuuaacacacuucaa

SEQ ID NO: 1231510 - RNA, 19 nt, Artificial Sequence
  Description of Artificial Sequence: Synthetic oligonucleotide
cuagcagaguugaguuucu

SEQ ID NO: 1231511 - RNA, 19 nt, Artificial Sequence
  Description of Artificial Sequence: Synthetic oligonucleotide
cauugcuauucugacuggu

SEQ ID NO: 1231512 - RNA, 19 nt, Artificial Sequence
  Description of Artificial Sequence: Synthetic oligonucleotide
cuccccguuugaacucauc

SEQ ID NO: 1231513 - RNA, 19 nt, Artificial Sequence
  Description of Artificial Sequence: Synthetic oligonucleotide
gggucaggcgacagcacug

SEQ ID NO: 1231514 - RNA, 19 nt, Artificial Sequence
  Description of Artificial Sequence: Synthetic oligonucleotide
gaacagcuccggguuggga

SEQ ID NO: 1231515 - RNA, 19 nt, Artificial Sequence
  Description of Artificial Sequence: Synthetic oligonucleotide
guguuacugcucauuuucu

SEQ ID NO: 1231516 - RNA, 19 nt, Artificial Sequence
  Description of Artificial Sequence: Synthetic oligonucleotide
cgugauggauggucgcagc

SEQ ID NO: 1231517 - RNA, 19 nt, Artificial Sequence
  Description of Artificial Sequence: Synthetic oligonucleotide
cuggaaugcauggucaguu

SEQ ID NO: 1231518 - RNA, 19 nt, Artificial Sequence
  Description of Artificial Sequence: Synthetic oligonucleotide
gucugcuauugcugaggaa

SEQ ID NO: 1231519 - RNA, 19 nt, Artificial Sequence
  Description of Artificial Sequence: Synthetic oligonucleotide
uggucgcagcucgguacug

SEQ ID NO: 1231520 - RNA, 19 nt, Artificial Sequence
  Description of Artificial Sequence: Synthetic oligonucleotide
gacagcaguuugauggauu

SEQ ID NO: 1231521 - RNA, 19 nt, Artificial Sequence
  Description of Artificial Sequence: Synthetic oligonucleotide
ccaugauaucaagcgcccc

SEQ ID NO: 1231522 - RNA, 19 nt, Artificial Sequence
  Description of Artificial Sequence: Synthetic oligonucleotide
ccguaaagucacuuggaua

SEQ ID NO: 1231523 - RNA, 19 nt, Artificial Sequence
  Description of Artificial Sequence: Synthetic oligonucleotide
cgaguggacagaacagcuc

SEQ ID NO: 1231524 - RNA, 19 nt, Artificial Sequence
  Description of Artificial Sequence: Synthetic oligonucleotide
cacuguggaccuguuuaaa

SEQ ID NO: 1231525 - RNA, 19 nt, Artificial Sequence
  Description of Artificial Sequence: Synthetic oligonucleotide
gagcagucgcagagucaac

SEQ ID NO: 1231526 - RNA, 19 nt, Artificial Sequence
  Description of Artificial Sequence: Synthetic oligonucleotide
gcgacagcacugccacuug

SEQ ID NO: 1231527 - RNA, 19 nt, Artificial Sequence
  Description of Artificial Sequence: Synthetic oligonucleotide
gguacccaaugaccucaga

SEQ ID NO: 1231528 - RNA, 19 nt, Artificial Sequence
  Description of Artificial Sequence: Synthetic oligonucleotide
caguguuacugcucauuuu

SEQ ID NO: 1231529 - RNA, 19 nt, Artificial Sequence
  Description of Artificial Sequence: Synthetic oligonucleotide
gccacccuuucuaacugca

SEQ ID NO: 1231530 - RNA, 19 nt, Artificial Sequence
  Description of Artificial Sequence: Synthetic oligonucleotide
caccggaaagcguuugguu

SEQ ID NO: 1231531 - RNA, 19 nt, Artificial Sequence
  Description of Artificial Sequence: Synthetic oligonucleotide
caacagccuugcuguaaua

SEQ ID NO: 1231532 - RNA, 19 nt, Artificial Sequence
  Description of Artificial Sequence: Synthetic oligonucleotide
gccccagauaauguuuuaa

SEQ ID NO: 1231533 - RNA, 19 nt, Artificial Sequence
  Description of Artificial Sequence: Synthetic oligonucleotide
gcugccgagcagucgcaga

SEQ ID NO: 1231534 - RNA, 19 nt, Artificial Sequence
  Description of Artificial Sequence: Synthetic oligonucleotide
ggauggucgcagcucggua

SEQ ID NO: 1231535 - RNA, 19 nt, Artificial Sequence
  Description of Artificial Sequence: Synthetic oligonucleotide
gguacacuucuugugcaau

SEQ ID NO: 1231536 - RNA, 19 nt, Artificial Sequence
  Description of Artificial Sequence: Synthetic oligonucleotide
ccgaguggacagaacagcu

SEQ ID NO: 1231537 - RNA, 19 nt, Artificial Sequence
  Description of Artificial Sequence: Synthetic oligonucleotide
cucuuaccuuauucacagu

SEQ ID NO: 1231538 - RNA, 19 nt, Artificial Sequence
  Description of Artificial Sequence: Synthetic oligonucleotide
cgagcagucgcagagucaa

SEQ ID NO: 1231539 - RNA, 19 nt, Artificial Sequence
  Description of Artificial Sequence: Synthetic oligonucleotide
ggagcaucuuugagaagcu

SEQ ID NO: 1231540 - RNA, 19 nt, Artificial Sequence
  Description of Artificial Sequence: Synthetic oligonucleotide
aucaagcgccccagauaau

SEQ ID NO: 1231541 - RNA, 19 nt, Artificial Sequence
  Description of Artificial Sequence: Synthetic oligonucleotide
ggucgcagcucgguacuga

SEQ ID NO: 1231542 - RNA, 19 nt, Artificial Sequence
  Description of Artificial Sequence: Synthetic oligonucleotide
ccuuucuaacugcacucua

SEQ ID NO: 1231543 - RNA, 19 nt, Artificial Sequence
  Description of Artificial Sequence: Synthetic oligonucleotide
ggcugccgagcagucgcag

SEQ ID NO: 1231544 - RNA, 19 nt, Artificial Sequence
  Description of Artificial Sequence: Synthetic oligonucleotide
ggucaguuuucaccaugau

SEQ ID NO: 1231545 - RNA, 19 nt, Artificial Sequence
  Description of Artificial Sequence: Synthetic oligonucleotide
ggacuucaucauagcuuca

SEQ ID NO: 1231546 - RNA, 19 nt, Artificial Sequence
  Description of Artificial Sequence: Synthetic oligonucleotide
gcagcucgguacugacaga

SEQ ID NO: 1231547 - RNA, 19 nt, Artificial Sequence
  Description of Artificial Sequence: Synthetic oligonucleotide
cagcaccgaguggacagaa

SEQ ID NO: 1231548 - RNA, 19 nt, Artificial Sequence
  Description of Artificial Sequence: Synthetic oligonucleotide
cccguaaagucacuuggau

SEQ ID NO: 1231549 - RNA, 19 nt, Artificial Sequence
  Description of Artificial Sequence: Synthetic oligonucleotide
cguuugguuccauucuggu

SEQ ID NO: 1231550 - RNA, 19 nt, Artificial Sequence
  Description of Artificial Sequence: Synthetic oligonucleotide
cgguggcuuaacacacuuc

SEQ ID NO: 1231551 - RNA, 19 nt, Artificial Sequence
  Description of Artificial Sequence: Synthetic oligonucleotide
ccgagcagucgcagaguca

SEQ ID NO: 1231552 - RNA, 19 nt, Artificial Sequence
  Description of Artificial Sequence: Synthetic oligonucleotide
ccggaugagcuggaaugca

SEQ ID NO: 1231553 - RNA, 19 nt, Artificial Sequence
  Description of Artificial Sequence: Synthetic oligonucleotide
cagccgguguagcuucauu

SEQ ID NO: 1231554 - RNA, 19 nt, Artificial Sequence
  Description of Artificial Sequence: Synthetic oligonucleotide
ccgguguagcuucauuauu

SEQ ID NO: 1231555 - RNA, 19 nt, Artificial Sequence
  Description of Artificial Sequence: Synthetic oligonucleotide
ccgguggcuuaacacacuu

SEQ ID NO: 1231556 - RNA, 19 nt, Artificial Sequence
  Description of Artificial Sequence: Synthetic oligonucleotide
gcgccccagauaauguuuu

SEQ ID NO: 1231557 - RNA, 19 nt, Artificial Sequence
  Description of Artificial Sequence: Synthetic oligonucleotide
cccgguggcuuaacacacu

SEQ ID NO: 1231558 - RNA, 19 nt, Artificial Sequence
  Description of Artificial Sequence: Synthetic oligonucleotide
ggaaagcguuugguuccau

SEQ ID NO: 1231559 - RNA, 19 nt, Artificial Sequence
  Description of Artificial Sequence: Synthetic oligonucleotide
cgccccagauaauguuuua

SEQ ID NO: 1231560 - RNA, 19 nt, Artificial Sequence
  Description of Artificial Sequence: Synthetic oligonucleotide
cgguacugacagaggggcu

SEQ ID NO: 1231561 - RNA, 19 nt, Artificial Sequence
  Description of Artificial Sequence: Synthetic oligonucleotide
uuuuauuaagccaaagccg

SEQ ID NO: 1231562 - RNA, 19 nt, Artificial Sequence
  Description of Artificial Sequence: Synthetic oligonucleotide
aauguauccauuaaacugc

SEQ ID NO: 1231563 - RNA, 19 nt, Artificial Sequence
  Description of Artificial Sequence: Synthetic oligonucleotide
uaauguauccauuaaacug

SEQ ID NO: 1231564 - RNA, 19 nt, Artificial Sequence
  Description of Artificial Sequence: Synthetic oligonucleotide
agugauguuaauuacagca

SEQ ID NO: 1231565 - RNA, 19 nt, Artificial Sequence
  Description of Artificial Sequence: Synthetic oligonucleotide
aaggggaggagcuaauucc

SEQ ID NO: 1231566 - RNA, 19 nt, Artificial Sequence
  Description of Artificial Sequence: Synthetic oligonucleotide
uuuauuaagccaaagccgu

SEQ ID NO: 1231567 - RNA, 19 nt, Artificial Sequence
  Description of Artificial Sequence: Synthetic oligonucleotide
aaauggagccaccaaacuc

SEQ ID NO: 1231568 - RNA, 19 nt, Artificial Sequence
  Description of Artificial Sequence: Synthetic oligonucleotide
uguaauggcaagaaaagaa

SEQ ID NO: 1231569 - RNA, 19 nt, Artificial Sequence
  Description of Artificial Sequence: Synthetic oligonucleotide
aagaaauagcuaaaugggc

SEQ ID NO: 1231570 - RNA, 19 nt, Artificial Sequence
  Description of Artificial Sequence: Synthetic oligonucleotide
uuuuaagugauguuaauua

SEQ ID NO: 1231571 - RNA, 19 nt, Artificial Sequence
  Description of Artificial Sequence: Synthetic oligonucleotide
aauuccaauccauucucgg

SEQ ID NO: 1231572 - RNA, 19 nt, Artificial Sequence
  Description of Artificial Sequence: Synthetic oligonucleotide
ugaucugucuuaaaagucc

SEQ ID NO: 1231573 - RNA, 19 nt, Artificial Sequence
  Description of Artificial Sequence: Synthetic oligonucleotide
uuuaucaauucucgcaucc

SEQ ID NO: 1231574 - RNA, 19 nt, Artificial Sequence
  Description of Artificial Sequence: Synthetic oligonucleotide
ucagauuuacaaaggaccc

SEQ ID NO: 1231575 - RNA, 19 nt, Artificial Sequence
  Description of Artificial Sequence: Synthetic oligonucleotide
aaugucagcccauauucag

SEQ ID NO: 1231576 - RNA, 19 nt, Artificial Sequence
  Description of Artificial Sequence: Synthetic oligonucleotide
ucugaguguacccuaaacc

SEQ ID NO: 1231577 - RNA, 19 nt, Artificial Sequence
  Description of Artificial Sequence: Synthetic oligonucleotide
ucugaagguagcuauacug

SEQ ID NO: 1231578 - RNA, 19 nt, Artificial Sequence
  Description of Artificial Sequence: Synthetic oligonucleotide
cugaguguacccuaaaccg

SEQ ID NO: 1231579 - RNA, 19 nt, Artificial Sequence
  Description of Artificial Sequence: Synthetic oligonucleotide
aaaggacccgcacauuccc

SEQ ID NO: 1231580 - RNA, 19 nt, Artificial Sequence
  Description of Artificial Sequence: Synthetic oligonucleotide
ugaaucaaaggucagcuuc

SEQ ID NO: 1231581 - RNA, 19 nt, Artificial Sequence
  Description of Artificial Sequence: Synthetic oligonucleotide
agcuaaaugggcuaggaug

SEQ ID NO: 1231582 - RNA, 19 nt, Artificial Sequence
  Description of Artificial Sequence: Synthetic oligonucleotide
uucacuuuggccgaaaagc

SEQ ID NO: 1231583 - RNA, 19 nt, Artificial Sequence
  Description of Artificial Sequence: Synthetic oligonucleotide
agcugguaaauuccaaucc

SEQ ID NO: 1231584 - RNA, 19 nt, Artificial Sequence
  Description of Artificial Sequence: Synthetic oligonucleotide
agccgagucauccuuagcc

SEQ ID NO: 1231585 - RNA, 19 nt, Artificial Sequence
  Description of Artificial Sequence: Synthetic oligonucleotide
auaugcucccucuuguacc

SEQ ID NO: 1231586 - RNA, 19 nt, Artificial Sequence
  Description of Artificial Sequence: Synthetic oligonucleotide
gcuaauuccacacaaaaug

SEQ ID NO: 1231587 - RNA, 19 nt, Artificial Sequence
  Description of Artificial Sequence: Synthetic oligonucleotide
uuuaggaauggauuucugc

SEQ ID NO: 1231588 - RNA, 19 nt, Artificial Sequence
  Description of Artificial Sequence: Synthetic oligonucleotide
uagcuauacugcaaaauag

SEQ ID NO: 1231589 - RNA, 19 nt, Artificial Sequence
  Description of Artificial Sequence: Synthetic oligonucleotide
agcuuaaagcuggagaucc

SEQ ID NO: 1231590 - RNA, 19 nt, Artificial Sequence
  Description of Artificial Sequence: Synthetic oligonucleotide
ugucuuaaaagucccuucc

SEQ ID NO: 1231591 - RNA, 19 nt, Artificial Sequence
  Description of Artificial Sequence: Synthetic oligonucleotide
uaacgauuguacaauauuc

SEQ ID NO: 1231592 - RNA, 19 nt, Artificial Sequence
  Description of Artificial Sequence: Synthetic oligonucleotide
ucauuuaugcuugaaauuc

SEQ ID NO: 1231593 - RNA, 19 nt, Artificial Sequence
  Description of Artificial Sequence: Synthetic oligonucleotide
uggcacaaaagaaauagcu

SEQ ID NO: 1231594 - RNA, 19 nt, Artificial Sequence
  Description of Artificial Sequence: Synthetic oligonucleotide
acugaaaucaccugcccag

SEQ ID NO: 1231595 - RNA, 19 nt, Artificial Sequence
  Description of Artificial Sequence: Synthetic oligonucleotide
ugguguaauggcaagaaaa

SEQ ID NO: 1231596 - RNA, 19 nt, Artificial Sequence
  Description of Artificial Sequence: Synthetic oligonucleotide
cuaaaaggauccuuuuagg

SEQ ID NO: 1231597 - RNA, 19 nt, Artificial Sequence
  Description of Artificial Sequence: Synthetic oligonucleotide
auaauguauccauuaaacu

SEQ ID NO: 1231598 - RNA, 19 nt, Artificial Sequence
  Description of Artificial Sequence: Synthetic oligonucleotide
uguuaggcgagaaggauga

SEQ ID NO: 1231599 - RNA, 19 nt, Artificial Sequence
  Description of Artificial Sequence: Synthetic oligonucleotide
uauaacagaggucacuuua

SEQ ID NO: 1231600 - RNA, 19 nt, Artificial Sequence
  Description of Artificial Sequence: Synthetic oligonucleotide
guauuuaucaauucucgca

SEQ ID NO: 1231601 - RNA, 19 nt, Artificial Sequence
  Description of Artificial Sequence: Synthetic oligonucleotide
uuaugcuugaaauuccagu

SEQ ID NO: 1231602 - RNA, 19 nt, Artificial Sequence
  Description of Artificial Sequence: Synthetic oligonucleotide
uugauaccuggcuuuaggg

SEQ ID NO: 1231603 - RNA, 19 nt, Artificial Sequence
  Description of Artificial Sequence: Synthetic oligonucleotide
cacuaaauucugaagguag

SEQ ID NO: 1231604 - RNA, 19 nt, Artificial Sequence
  Description of Artificial Sequence: Synthetic oligonucleotide
uuguacaauauucauuuau

SEQ ID NO: 1231605 - RNA, 19 nt, Artificial Sequence
  Description of Artificial Sequence: Synthetic oligonucleotide
aauggagccaccaaacucu

SEQ ID NO: 1231606 - RNA, 19 nt, Artificial Sequence
  Description of Artificial Sequence: Synthetic oligonucleotide
aaauuaacgauuguacaau

SEQ ID NO: 1231607 - RNA, 19 nt, Artificial Sequence
  Description of Artificial Sequence: Synthetic oligonucleotide
agauucgaugcucaggaag

SEQ ID NO: 1231608 - RNA, 19 nt, Artificial Sequence
  Description of Artificial Sequence: Synthetic oligonucleotide
aauucucgcauccccaaca

SEQ ID NO: 1231609 - RNA, 19 nt, Artificial Sequence
  Description of Artificial Sequence: Synthetic oligonucleotide
aaccgaucaggcuagaguu

SEQ ID NO: 1231610 - RNA, 19 nt, Artificial Sequence
  Description of Artificial Sequence: Synthetic oligonucleotide
gauaccuggcuuuaggguc

SEQ ID NO: 1231611 - RNA, 19 nt, Artificial Sequence
  Description of Artificial Sequence: Synthetic oligonucleotide
auuaaguccugaaugacug

SEQ ID NO: 1231612 - RNA, 19 nt, Artificial Sequence
  Description of Artificial Sequence: Synthetic oligonucleotide
cauuuaugcuugaaauucc

SEQ ID NO: 1231613 - RNA, 19 nt, Artificial Sequence
  Description of Artificial Sequence: Synthetic oligonucleotide
uacccuaaaccgaucaggc

SEQ ID NO: 1231614 - RNA, 19 nt, Artificial Sequence
  Description of Artificial Sequence: Synthetic oligonucleotide
uauuaagccaaagccguag

SEQ ID NO: 1231615 - RNA, 19 nt, Artificial Sequence
  Description of Artificial Sequence: Synthetic oligonucleotide
agaguggugaggcuauaac

SEQ ID NO: 1231616 - RNA, 19 nt, Artificial Sequence
  Description of Artificial Sequence: Synthetic oligonucleotide
gauacuuggcugcuauucc

SEQ ID NO: 1231617 - RNA, 19 nt, Artificial Sequence
  Description of Artificial Sequence: Synthetic oligonucleotide
ugcuauuccaaagcgagug

SEQ ID NO: 1231618 - RNA, 19 nt, Artificial Sequence
  Description of Artificial Sequence: Synthetic oligonucleotide
aaauagcuaaaugggcuag

SEQ ID NO: 1231619 - RNA, 19 nt, Artificial Sequence
  Description of Artificial Sequence: Synthetic oligonucleotide
aacgauuguacaauauuca

SEQ ID NO: 1231620 - RNA, 19 nt, Artificial Sequence
  Description of Artificial Sequence: Synthetic oligonucleotide
agaaauagcuaaaugggcu

SEQ ID NO: 1231621 - RNA, 19 nt, Artificial Sequence
  Description of Artificial Sequence: Synthetic oligonucleotide
uaggcgagaaggaugaauc

SEQ ID NO: 1231622 - RNA, 19 nt, Artificial Sequence
  Description of Artificial Sequence: Synthetic oligonucleotide
uccacgguaaucucgguac

SEQ ID NO: 1231623 - RNA, 19 nt, Artificial Sequence
  Description of Artificial Sequence: Synthetic oligonucleotide
auuuaucaauucucgcauc

SEQ ID NO: 1231624 - RNA, 19 nt, Artificial Sequence
  Description of Artificial Sequence: Synthetic oligonucleotide
aauagcuaaaugggcuagg

SEQ ID NO: 1231625 - RNA, 19 nt, Artificial Sequence
  Description of Artificial Sequence: Synthetic oligonucleotide
ucuuguacccaacugcgaa

SEQ ID NO: 1231626 - RNA, 19 nt, Artificial Sequence
  Description of Artificial Sequence: Synthetic oligonucleotide
uuacaaaggacccgcacau

SEQ ID NO: 1231627 - RNA, 19 nt, Artificial Sequence
  Description of Artificial Sequence: Synthetic oligonucleotide
aaagccgagucauccuuag

SEQ ID NO: 1231628 - RNA, 19 nt, Artificial Sequence
  Description of Artificial Sequence: Synthetic oligonucleotide
acagcgucaguuugauacc

SEQ ID NO: 1231629 - RNA, 19 nt, Artificial Sequence
  Description of Artificial Sequence: Synthetic oligonucleotide
aauuaacgauuguacaaua

SEQ ID NO: 1231630 - RNA, 19 nt, Artificial Sequence
  Description of Artificial Sequence: Synthetic oligonucleotide
ugaguguacccuaaaccga

SEQ ID NO: 1231631 - RNA, 19 nt, Artificial Sequence
  Description of Artificial Sequence: Synthetic oligonucleotide
aaauuccaauccauucucg

SEQ ID NO: 1231632 - RNA, 19 nt, Artificial Sequence
  Description of Artificial Sequence: Synthetic oligonucleotide
caucguucacauuaguaug

SEQ ID NO: 1231633 - RNA, 19 nt, Artificial Sequence
  Description of Artificial Sequence: Synthetic oligonucleotide
aguaugaagcuggaacucg

SEQ ID NO: 1231634 - RNA, 19 nt, Artificial Sequence
  Description of Artificial Sequence: Synthetic oligonucleotide
uaggauugggacaccaaga

SEQ ID NO: 1231635 - RNA, 19 nt, Artificial Sequence
  Description of Artificial Sequence: Synthetic oligonucleotide
acuucgaagucucaaaauu

SEQ ID NO: 1231636 - RNA, 19 nt, Artificial Sequence
  Description of Artificial Sequence: Synthetic oligonucleotide
ugauguuaauuacagcauu

SEQ ID NO: 1231637 - RNA, 19 nt, Artificial Sequence
  Description of Artificial Sequence: Synthetic oligonucleotide
aguccugaaugacuggcuc

SEQ ID NO: 1231638 - RNA, 19 nt, Artificial Sequence
  Description of Artificial Sequence: Synthetic oligonucleotide
gauaugcucccucuuguac

SEQ ID NO: 1231639 - RNA, 19 nt, Artificial Sequence
  Description of Artificial Sequence: Synthetic oligonucleotide
uuuugguaaauggagccac

SEQ ID NO: 1231640 - RNA, 19 nt, Artificial Sequence
  Description of Artificial Sequence: Synthetic oligonucleotide
uguacccuaaaccgaucag

SEQ ID NO: 1231641 - RNA, 19 nt, Artificial Sequence
  Description of Artificial Sequence: Synthetic oligonucleotide
ucaccugcccagcuuaaag

SEQ ID NO: 1231642 - RNA, 19 nt, Artificial Sequence
  Description of Artificial Sequence: Synthetic oligonucleotide
aucccuaguguugucaugg

SEQ ID NO: 1231643 - RNA, 19 nt, Artificial Sequence
  Description of Artificial Sequence: Synthetic oligonucleotide
accuuuugguaaauggagc

SEQ ID NO: 1231644 - RNA, 19 nt, Artificial Sequence
  Description of Artificial Sequence: Synthetic oligonucleotide
gcuaaaugggcuaggaugg

SEQ ID NO: 1231645 - RNA, 19 nt, Artificial Sequence
  Description of Artificial Sequence: Synthetic oligonucleotide
ccuacagcuaaaaggaucc

SEQ ID NO: 1231646 - RNA, 19 nt, Artificial Sequence
  Description of Artificial Sequence: Synthetic oligonucleotide
ugauaccuggcuuuagggu

SEQ ID NO: 1231647 - RNA, 19 nt, Artificial Sequence
  Description of Artificial Sequence: Synthetic oligonucleotide
uuugguaaauggagccacc

SEQ ID NO: 1231648 - RNA, 19 nt, Artificial Sequence
  Description of Artificial Sequence: Synthetic oligonucleotide
gguacacuaaauucugaag

SEQ ID NO: 1231649 - RNA, 19 nt, Artificial Sequence
  Description of Artificial Sequence: Synthetic oligonucleotide
agccugagcugguaaauuc

SEQ ID NO: 1231650 - RNA, 19 nt, Artificial Sequence
  Description of Artificial Sequence: Synthetic oligonucleotide
aaaucccuaguguugucau

SEQ ID NO: 1231651 - RNA, 19 nt, Artificial Sequence
  Description of Artificial Sequence: Synthetic oligonucleotide
ggaucgaccugauacuugg

SEQ ID NO: 1231652 - RNA, 19 nt, Artificial Sequence
  Description of Artificial Sequence: Synthetic oligonucleotide
uggacaucuaaugugguau

SEQ ID NO: 1231653 - RNA, 19 nt, Artificial Sequence
  Description of Artificial Sequence: Synthetic oligonucleotide
guagcuauacugcaaaaua

SEQ ID NO: 1231654 - RNA, 19 nt, Artificial Sequence
  Description of Artificial Sequence: Synthetic oligonucleotide
guacccuaaaccgaucagg

SEQ ID NO: 1231655 - RNA, 19 nt, Artificial Sequence
  Description of Artificial Sequence: Synthetic oligonucleotide
ugauacuuggcugcuauuc

SEQ ID NO: 1231656 - RNA, 19 nt, Artificial Sequence
  Description of Artificial Sequence: Synthetic oligonucleotide
gaguggugaggcuauaaca

SEQ ID NO: 1231657 - RNA, 19 nt, Artificial Sequence
  Description of Artificial Sequence: Synthetic oligonucleotide
uuaaagccgagucauccuu

SEQ ID NO: 1231658 - RNA, 19 nt, Artificial Sequence
  Description of Artificial Sequence: Synthetic oligonucleotide
gaaauagcuaaaugggcua

SEQ ID NO: 1231659 - RNA, 19 nt, Artificial Sequence
  Description of Artificial Sequence: Synthetic oligonucleotide
ugucagcccauauucaguc

SEQ ID NO: 1231660 - RNA, 19 nt, Artificial Sequence
  Description of Artificial Sequence: Synthetic oligonucleotide
ucaggaucgaccugauacu

SEQ ID NO: 1231661 - RNA, 19 nt, Artificial Sequence
  Description of Artificial Sequence: Synthetic oligonucleotide
gaucugucuuaaaaguccc

SEQ ID NO: 1231662 - RNA, 19 nt, Artificial Sequence
  Description of Artificial Sequence: Synthetic oligonucleotide
guaaauggagccaccaaac

SEQ ID NO: 1231663 - RNA, 19 nt, Artificial Sequence
  Description of Artificial Sequence: Synthetic oligonucleotide
uguaaaugucagcccauau

SEQ ID NO: 1231664 - RNA, 19 nt, Artificial Sequence
  Description of Artificial Sequence: Synthetic oligonucleotide
uuuccaggcugccauuuac

SEQ ID NO: 1231665 - RNA, 19 nt, Artificial Sequence
  Description of Artificial Sequence: Synthetic oligonucleotide
acgauuguacaauauucau

SEQ ID NO: 1231666 - RNA, 19 nt, Artificial Sequence
  Description of Artificial Sequence: Synthetic oligonucleotide
uuggccgaaaagcaggcau

SEQ ID NO: 1231667 - RNA, 19 nt, Artificial Sequence
  Description of Artificial Sequence: Synthetic oligonucleotide
gaugaaucaaaggucagcu

SEQ ID NO: 1231668 - RNA, 19 nt, Artificial Sequence
  Description of Artificial Sequence: Synthetic oligonucleotide
aagccgagucauccuuagc

SEQ ID NO: 1231669 - RNA, 19 nt, Artificial Sequence
  Description of Artificial Sequence: Synthetic oligonucleotide
uaaaucccuaguguuguca

SEQ ID NO: 1231670 - RNA, 19 nt, Artificial Sequence
  Description of Artificial Sequence: Synthetic oligonucleotide
uccgucuuguacccaacug

SEQ ID NO: 1231671 - RNA, 19 nt, Artificial Sequence
  Description of Artificial Sequence: Synthetic oligonucleotide
accuacagcuaaaaggauc

SEQ ID NO: 1231672 - RNA, 19 nt, Artificial Sequence
  Description of Artificial Sequence: Synthetic oligonucleotide
auggaagacucuauaaugu

SEQ ID NO: 1231673 - RNA, 19 nt, Artificial Sequence
  Description of Artificial Sequence: Synthetic oligonucleotide
cuuguacccaacugcgaag

SEQ ID NO: 1231674 - RNA, 19 nt, Artificial Sequence
  Description of Artificial Sequence: Synthetic oligonucleotide
aaucccuaguguugucaug

SEQ ID NO: 1231675 - RNA, 19 nt, Artificial Sequence
  Description of Artificial Sequence: Synthetic oligonucleotide
acaccuuaaagccgaguca

SEQ ID NO: 1231676 - RNA, 19 nt, Artificial Sequence
  Description of Artificial Sequence: Synthetic oligonucleotide
cuauaauguauccauuaaa

SEQ ID NO: 1231677 - RNA, 19 nt, Artificial Sequence
  Description of Artificial Sequence: Synthetic oligonucleotide
cuuuggccgaaaagcaggc

SEQ ID NO: 1231678 - RNA, 19 nt, Artificial Sequence
  Description of Artificial Sequence: Synthetic oligonucleotide
gaauggauuucugcugugc

SEQ ID NO: 1231679 - RNA, 19 nt, Artificial Sequence
  Description of Artificial Sequence: Synthetic oligonucleotide
aggagcuaauuccacacaa

SEQ ID NO: 1231680 - RNA, 19 nt, Artificial Sequence
  Description of Artificial Sequence: Synthetic oligonucleotide
ucugguguaauggcaagaa

SEQ ID NO: 1231681 - RNA, 19 nt, Artificial Sequence
  Description of Artificial Sequence: Synthetic oligonucleotide
aucgaccugauacuuggcu

SEQ ID NO: 1231682 - RNA, 19 nt, Artificial Sequence
  Description of Artificial Sequence: Synthetic oligonucleotide
ugguaaauuccaauccauu

SEQ ID NO: 1231683 - RNA, 19 nt, Artificial Sequence
  Description of Artificial Sequence: Synthetic oligonucleotide
agcgaguguuacuguuucc

SEQ ID NO: 1231684 - RNA, 19 nt, Artificial Sequence
  Description of Artificial Sequence: Synthetic oligonucleotide
caagcuuguggccacccgc

SEQ ID NO: 1231685 - RNA, 19 nt, Artificial Sequence
  Description of Artificial Sequence: Synthetic oligonucleotide
aauagaguggugaggcuau

SEQ ID NO: 1231686 - RNA, 19 nt, Artificial Sequence
  Description of Artificial Sequence: Synthetic oligonucleotide
uaaauucugaagguagcua

SEQ ID NO: 1231687 - RNA, 19 nt, Artificial Sequence
  Description of Artificial Sequence: Synthetic oligonucleotide
caagauugacagcagucuc

SEQ ID NO: 1231688 - RNA, 19 nt, Artificial Sequence
  Description of Artificial Sequence: Synthetic oligonucleotide
gcugcuauuccaaagcgag

SEQ ID NO: 1231689 - RNA, 19 nt, Artificial Sequence
  Description of Artificial Sequence: Synthetic oligonucleotide
agcuauacugcaaaauagu

SEQ ID NO: 1231690 - RNA, 19 nt, Artificial Sequence
  Description of Artificial Sequence: Synthetic oligonucleotide
uggaagacucuauaaugua

SEQ ID NO: 1231691 - RNA, 19 nt, Artificial Sequence
  Description of Artificial Sequence: Synthetic oligonucleotide
ccaguguuaggcgagaagg

SEQ ID NO: 1231692 - RNA, 19 nt, Artificial Sequence
  Description of Artificial Sequence: Synthetic oligonucleotide
uccacccuaaaauggcaca

SEQ ID NO: 1231693 - RNA, 19 nt, Artificial Sequence
  Description of Artificial Sequence: Synthetic oligonucleotide
uucugaagguagcuauacu

SEQ ID NO: 1231694 - RNA, 19 nt, Artificial Sequence
  Description of Artificial Sequence: Synthetic oligonucleotide
cacuuuggccgaaaagcag

SEQ ID NO: 1231695 - RNA, 19 nt, Artificial Sequence
  Description of Artificial Sequence: Synthetic oligonucleotide
ugccauuuacuuugguagu

SEQ ID NO: 1231696 - RNA, 19 nt, Artificial Sequence
  Description of Artificial Sequence: Synthetic oligonucleotide
ugaggcuauaacagagguc

SEQ ID NO: 1231697 - RNA, 19 nt, Artificial Sequence
  Description of Artificial Sequence: Synthetic oligonucleotide
gucacucgggacuucgaag

SEQ ID NO: 1231698 - RNA, 19 nt, Artificial Sequence
  Description of Artificial Sequence: Synthetic oligonucleotide
cuagaccaagcuuguggcc

SEQ ID NO: 1231699 - RNA, 19 nt, Artificial Sequence
  Description of Artificial Sequence: Synthetic oligonucleotide
uccaauccauucucggacu

SEQ ID NO: 1231700 - RNA, 19 nt, Artificial Sequence
  Description of Artificial Sequence: Synthetic oligonucleotide
acacaccuacagcuaaaag

SEQ ID NO: 1231701 - RNA, 19 nt, Artificial Sequence
  Description of Artificial Sequence: Synthetic oligonucleotide
uuauuaagccaaagccgua

SEQ ID NO: 1231702 - RNA, 19 nt, Artificial Sequence
  Description of Artificial Sequence: Synthetic oligonucleotide
ugggcuaggaugggaacag

SEQ ID NO: 1231703 - RNA, 19 nt, Artificial Sequence
  Description of Artificial Sequence: Synthetic oligonucleotide
accaagauucgaugcucag

SEQ ID NO: 1231704 - RNA, 19 nt, Artificial Sequence
  Description of Artificial Sequence: Synthetic oligonucleotide
auugggacaccaagauucg

SEQ ID NO: 1231705 - RNA, 19 nt, Artificial Sequence
  Description of Artificial Sequence: Synthetic oligonucleotide
ugguaaauggagccaccaa

SEQ ID NO: 1231706 - RNA, 19 nt, Artificial Sequence
  Description of Artificial Sequence: Synthetic oligonucleotide
gguaaauggagccaccaaa

SEQ ID NO: 1231707 - RNA, 19 nt, Artificial Sequence
  Description of Artificial Sequence: Synthetic oligonucleotide
auccccaacauacaacauu

SEQ ID NO: 1231708 - RNA, 19 nt, Artificial Sequence
  Description of Artificial Sequence: Synthetic oligonucleotide
uuguacccaacugcgaagu

SEQ ID NO: 1231709 - RNA, 19 nt, Artificial Sequence
  Description of Artificial Sequence: Synthetic oligonucleotide
cccagcaaugucaaagucc

SEQ ID NO: 1231710 - RNA, 19 nt, Artificial Sequence
  Description of Artificial Sequence: Synthetic oligonucleotide
auagcuaaaugggcuagga

SEQ ID NO: 1231711 - RNA, 19 nt, Artificial Sequence
  Description of Artificial Sequence: Synthetic oligonucleotide
agauugacagcagucucca

SEQ ID NO: 1231712 - RNA, 19 nt, Artificial Sequence
  Description of Artificial Sequence: Synthetic oligonucleotide
agguugauaugcucccucu

SEQ ID NO: 1231713 - RNA, 19 nt, Artificial Sequence
  Description of Artificial Sequence: Synthetic oligonucleotide
gagcaccccggauggaggg

SEQ ID NO: 1231714 - RNA, 19 nt, Artificial Sequence
  Description of Artificial Sequence: Synthetic oligonucleotide
ccgaaaagcaggcaucagg

SEQ ID NO: 1231715 - RNA, 19 nt, Artificial Sequence
  Description of Artificial Sequence: Synthetic oligonucleotide
gucacuuuaaaucccuagu

SEQ ID NO: 1231716 - RNA, 19 nt, Artificial Sequence
  Description of Artificial Sequence: Synthetic oligonucleotide
gauucgaugcucaggaagu

SEQ ID NO: 1231717 - RNA, 19 nt, Artificial Sequence
  Description of Artificial Sequence: Synthetic oligonucleotide
uccauucucggacuuuguu

SEQ ID NO: 1231718 - RNA, 19 nt, Artificial Sequence
  Description of Artificial Sequence: Synthetic oligonucleotide
uaaagccgagucauccuua

SEQ ID NO: 1231719 - RNA, 19 nt, Artificial Sequence
  Description of Artificial Sequence: Synthetic oligonucleotide
uagcuaaaugggcuaggau

SEQ ID NO: 1231720 - RNA, 19 nt, Artificial Sequence
  Description of Artificial Sequence: Synthetic oligonucleotide
aacagggcuaggaugggaa

SEQ ID NO: 1231721 - RNA, 19 nt, Artificial Sequence
  Description of Artificial Sequence: Synthetic oligonucleotide
guacccaacugcgaaguug

SEQ ID NO: 1231722 - RNA, 19 nt, Artificial Sequence
  Description of Artificial Sequence: Synthetic oligonucleotide
aagauucgaugcucaggaa

SEQ ID NO: 1231723 - RNA, 19 nt, Artificial Sequence
  Description of Artificial Sequence: Synthetic oligonucleotide
gugaucugucuuaaaaguc

SEQ ID NO: 1231724 - RNA, 19 nt, Artificial Sequence
  Description of Artificial Sequence: Synthetic oligonucleotide
guguuaggcgagaaggaug

SEQ ID NO: 1231725 - RNA, 19 nt, Artificial Sequence
  Description of Artificial Sequence: Synthetic oligonucleotide
uuccacgguaaucucggua

SEQ ID NO: 1231726 - RNA, 19 nt, Artificial Sequence
  Description of Artificial Sequence: Synthetic oligonucleotide
aaaacaccuuaaagccgag

SEQ ID NO: 1231727 - RNA, 19 nt, Artificial Sequence
  Description of Artificial Sequence: Synthetic oligonucleotide
cuaaaugggcuaggauggg

SEQ ID NO: 1231728 - RNA, 19 nt, Artificial Sequence
  Description of Artificial Sequence: Synthetic oligonucleotide
aguguuaggcgagaaggau

SEQ ID NO: 1231729 - RNA, 19 nt, Artificial Sequence
  Description of Artificial Sequence: Synthetic oligonucleotide
gacaccaagauucgaugcu

SEQ ID NO: 1231730 - RNA, 19 nt, Artificial Sequence
  Description of Artificial Sequence: Synthetic oligonucleotide
aaagcgaguguuacuguuu

SEQ ID NO: 1231731 - RNA, 19 nt, Artificial Sequence
  Description of Artificial Sequence: Synthetic oligonucleotide
uggccgaaaagcaggcauc

SEQ ID NO: 1231732 - RNA, 19 nt, Artificial Sequence
  Description of Artificial Sequence: Synthetic oligonucleotide
aguuaggauugggacacca

SEQ ID NO: 1231733 - RNA, 19 nt, Artificial Sequence
  Description of Artificial Sequence: Synthetic oligonucleotide
gauccuuuuaggaauggau

SEQ ID NO: 1231734 - RNA, 19 nt, Artificial Sequence
  Description of Artificial Sequence: Synthetic oligonucleotide
auaacagaggucacuuuaa

SEQ ID NO: 1231735 - RNA, 19 nt, Artificial Sequence
  Description of Artificial Sequence: Synthetic oligonucleotide
ccuaaaccgaucaggcuag

SEQ ID NO: 1231736 - RNA, 19 nt, Artificial Sequence
  Description of Artificial Sequence: Synthetic oligonucleotide
ggugaggcuauaacagagg

SEQ ID NO: 1231737 - RNA, 19 nt, Artificial Sequence
  Description of Artificial Sequence: Synthetic oligonucleotide
cuauacugcaaaauaguuu

SEQ ID NO: 1231738 - RNA, 19 nt, Artificial Sequence
  Description of Artificial Sequence: Synthetic oligonucleotide
cagccugacgucucuggag

SEQ ID NO: 1231739 - RNA, 19 nt, Artificial Sequence
  Description of Artificial Sequence: Synthetic oligonucleotide
gaggagcuaauuccacaca

SEQ ID NO: 1231740 - RNA, 19 nt, Artificial Sequence
  Description of Artificial Sequence: Synthetic oligonucleotide
auggugugacugaaaucac

SEQ ID NO: 1231741 - RNA, 19 nt, Artificial Sequence
  Description of Artificial Sequence: Synthetic oligonucleotide
augaaucaaaggucagcuu

SEQ ID NO: 1231742 - RNA, 19 nt, Artificial Sequence
  Description of Artificial Sequence: Synthetic oligonucleotide
cuuuugguaaauggagcca

SEQ ID NO: 1231743 - RNA, 19 nt, Artificial Sequence
  Description of Artificial Sequence: Synthetic oligonucleotide
cugaaaucaccugcccagc

SEQ ID NO: 1231744 - RNA, 19 nt, Artificial Sequence
  Description of Artificial Sequence: Synthetic oligonucleotide
ccgucuuguacccaacugc

SEQ ID NO: 1231745 - RNA, 19 nt, Artificial Sequence
  Description of Artificial Sequence: Synthetic oligonucleotide
acccuaaaccgaucaggcu

SEQ ID NO: 1231746 - RNA, 19 nt, Artificial Sequence
  Description of Artificial Sequence: Synthetic oligonucleotide
cagguugauaugcucccuc

SEQ ID NO: 1231747 - RNA, 19 nt, Artificial Sequence
  Description of Artificial Sequence: Synthetic oligonucleotide
caggguguugucuguguuc

SEQ ID NO: 1231748 - RNA, 19 nt, Artificial Sequence
  Description of Artificial Sequence: Synthetic oligonucleotide
cacgguaaucucgguaccc

SEQ ID NO: 1231749 - RNA, 19 nt, Artificial Sequence
  Description of Artificial Sequence: Synthetic oligonucleotide
aggauccuuuuaggaaugg

SEQ ID NO: 1231750 - RNA, 19 nt, Artificial Sequence
  Description of Artificial Sequence: Synthetic oligonucleotide
ucucggacuuuguuuucaa

SEQ ID NO: 1231751 - RNA, 19 nt, Artificial Sequence
  Description of Artificial Sequence: Synthetic oligonucleotide
ucguccgucuuguacccaa

SEQ ID NO: 1231752 - RNA, 19 nt, Artificial Sequence
  Description of Artificial Sequence: Synthetic oligonucleotide
gacucaacucagauuuaca

SEQ ID NO: 1231753 - RNA, 19 nt, Artificial Sequence
  Description of Artificial Sequence: Synthetic oligonucleotide
aggaugaaucaaaggucag

SEQ ID NO: 1231754 - RNA, 19 nt, Artificial Sequence
  Description of Artificial Sequence: Synthetic oligonucleotide
augggcuaggaugggaaca

SEQ ID NO: 1231755 - RNA, 19 nt, Artificial Sequence
  Description of Artificial Sequence: Synthetic oligonucleotide
gucagcccauauucagucc

SEQ ID NO: 1231756 - RNA, 19 nt, Artificial Sequence
  Description of Artificial Sequence: Synthetic oligonucleotide
caauucucgcauccccaac

SEQ ID NO: 1231757 - RNA, 19 nt, Artificial Sequence
  Description of Artificial Sequence: Synthetic oligonucleotide
guuugauaccuggcuuuag

SEQ ID NO: 1231758 - RNA, 19 nt, Artificial Sequence
  Description of Artificial Sequence: Synthetic oligonucleotide
gugaggcuauaacagaggu

SEQ ID NO: 1231759 - RNA, 19 nt, Artificial Sequence
  Description of Artificial Sequence: Synthetic oligonucleotide
uguauccauuaaacugcua

SEQ ID NO: 1231760 - RNA, 19 nt, Artificial Sequence
  Description of Artificial Sequence: Synthetic oligonucleotide
auguauccauuaaacugcu

SEQ ID NO: 1231761 - RNA, 19 nt, Artificial Sequence
  Description of Artificial Sequence: Synthetic oligonucleotide
cugacgucucuggaguggc

SEQ ID NO: 1231762 - RNA, 19 nt, Artificial Sequence
  Description of Artificial Sequence: Synthetic oligonucleotide
caguguuaggcgagaagga

SEQ ID NO: 1231763 - RNA, 19 nt, Artificial Sequence
  Description of Artificial Sequence: Synthetic oligonucleotide
gacuucgaagucucaaaau

SEQ ID NO: 1231764 - RNA, 19 nt, Artificial Sequence
  Description of Artificial Sequence: Synthetic oligonucleotide
uuuggccgaaaagcaggca

SEQ ID NO: 1231765 - RNA, 19 nt, Artificial Sequence
  Description of Artificial Sequence: Synthetic oligonucleotide
aguguacccuaaaccgauc

SEQ ID NO: 1231766 - RNA, 19 nt, Artificial Sequence
  Description of Artificial Sequence: Synthetic oligonucleotide
ccaagauucgaugcucagg

SEQ ID NO: 1231767 - RNA, 19 nt, Artificial Sequence
  Description of Artificial Sequence: Synthetic oligonucleotide
agguagcuauacugcaaaa

SEQ ID NO: 1231768 - RNA, 19 nt, Artificial Sequence
  Description of Artificial Sequence: Synthetic oligonucleotide
aggcuagaguuguucacuu

SEQ ID NO: 1231769 - RNA, 19 nt, Artificial Sequence
  Description of Artificial Sequence: Synthetic oligonucleotide
cuuaaagccgagucauccu

SEQ ID NO: 1231770 - RNA, 19 nt, Artificial Sequence
  Description of Artificial Sequence: Synthetic oligonucleotide
ugccguccagcagagcuga

SEQ ID NO: 1231771 - RNA, 19 nt, Artificial Sequence
  Description of Artificial Sequence: Synthetic oligonucleotide
caccaagauucgaugcuca

SEQ ID NO: 1231772 - RNA, 19 nt, Artificial Sequence
  Description of Artificial Sequence: Synthetic oligonucleotide
cgaagucucaaaauucauc

SEQ ID NO: 1231773 - RNA, 19 nt, Artificial Sequence
  Description of Artificial Sequence: Synthetic oligonucleotide
augucagcccauauucagu

SEQ ID NO: 1231774 - RNA, 19 nt, Artificial Sequence
  Description of Artificial Sequence: Synthetic oligonucleotide
uguacccaacugcgaaguu

SEQ ID NO: 1231775 - RNA, 19 nt, Artificial Sequence
  Description of Artificial Sequence: Synthetic oligonucleotide
gaucgaccugauacuuggc

SEQ ID NO: 1231776 - RNA, 19 nt, Artificial Sequence
  Description of Artificial Sequence: Synthetic oligonucleotide
ccuaguguugucauggugu

SEQ ID NO: 1231777 - RNA, 19 nt, Artificial Sequence
  Description of Artificial Sequence: Synthetic oligonucleotide
ucccuaguguugucauggu

SEQ ID NO: 1231778 - RNA, 19 nt, Artificial Sequence
  Description of Artificial Sequence: Synthetic oligonucleotide
aggaucgaccugauacuug

SEQ ID NO: 1231779 - RNA, 19 nt, Artificial Sequence
  Description of Artificial Sequence: Synthetic oligonucleotide
uugggacaccaagauucga

SEQ ID NO: 1231780 - RNA, 19 nt, Artificial Sequence
  Description of Artificial Sequence: Synthetic oligonucleotide
aucucgguacccagggugu

SEQ ID NO: 1231781 - RNA, 19 nt, Artificial Sequence
  Description of Artificial Sequence: Synthetic oligonucleotide
aggcuauaacagaggucac

SEQ ID NO: 1231782 - RNA, 19 nt, Artificial Sequence
  Description of Artificial Sequence: Synthetic oligonucleotide
cagcuuaaagcuggagauc

SEQ ID NO: 1231783 - RNA, 19 nt, Artificial Sequence
  Description of Artificial Sequence: Synthetic oligonucleotide
aguccuagaccaagcuugu

SEQ ID NO: 1231784 - RNA, 19 nt, Artificial Sequence
  Description of Artificial Sequence: Synthetic oligonucleotide
acucuauaauguauccauu

SEQ ID NO: 1231785 - RNA, 19 nt, Artificial Sequence
  Description of Artificial Sequence: Synthetic oligonucleotide
cugguaaauuccaauccau

SEQ ID NO: 1231786 - RNA, 19 nt, Artificial Sequence
  Description of Artificial Sequence: Synthetic oligonucleotide
ugacgucucuggaguggcu

SEQ ID NO: 1231787 - RNA, 19 nt, Artificial Sequence
  Description of Artificial Sequence: Synthetic oligonucleotide
ccaacugcgaaguugcucu

SEQ ID NO: 1231788 - RNA, 19 nt, Artificial Sequence
  Description of Artificial Sequence: Synthetic oligonucleotide
ccuuuuaggaauggauuuc

SEQ ID NO: 1231789 - RNA, 19 nt, Artificial Sequence
  Description of Artificial Sequence: Synthetic oligonucleotide
accgaucaggcuagaguug

SEQ ID NO: 1231790 - RNA, 19 nt, Artificial Sequence
  Description of Artificial Sequence: Synthetic oligonucleotide
gaguguacccuaaaccgau

SEQ ID NO: 1231791 - RNA, 19 nt, Artificial Sequence
  Description of Artificial Sequence: Synthetic oligonucleotide
caacugcgaaguugcucug

SEQ ID NO: 1231792 - RNA, 19 nt, Artificial Sequence
  Description of Artificial Sequence: Synthetic oligonucleotide
guguuggcggagccugagc

SEQ ID NO: 1231793 - RNA, 19 nt, Artificial Sequence
  Description of Artificial Sequence: Synthetic oligonucleotide
gaacagggcuaggauggga

SEQ ID NO: 1231794 - RNA, 19 nt, Artificial Sequence
  Description of Artificial Sequence: Synthetic oligonucleotide
guuaggauugggacaccaa

SEQ ID NO: 1231795 - RNA, 19 nt, Artificial Sequence
  Description of Artificial Sequence: Synthetic oligonucleotide
ucgggacuucgaagucuca

SEQ ID NO: 1231796 - RNA, 19 nt, Artificial Sequence
  Description of Artificial Sequence: Synthetic oligonucleotide
cccuaaaccgaucaggcua

SEQ ID NO: 1231797 - RNA, 19 nt, Artificial Sequence
  Description of Artificial Sequence: Synthetic oligonucleotide
uucccaguguuaggcgaga

SEQ ID NO: 1231798 - RNA, 19 nt, Artificial Sequence
  Description of Artificial Sequence: Synthetic oligonucleotide
ccaucguucacauuaguau

SEQ ID NO: 1231799 - RNA, 19 nt, Artificial Sequence
  Description of Artificial Sequence: Synthetic oligonucleotide
gcaagauugacagcagucu

SEQ ID NO: 1231800 - RNA, 19 nt, Artificial Sequence
  Description of Artificial Sequence: Synthetic oligonucleotide
ggcauggugaucugucuua

SEQ ID NO: 1231801 - RNA, 19 nt, Artificial Sequence
  Description of Artificial Sequence: Synthetic oligonucleotide
ccgagucauccuuagccug

SEQ ID NO: 1231802 - RNA, 19 nt, Artificial Sequence
  Description of Artificial Sequence: Synthetic oligonucleotide
cagggcuaggaugggaaca

SEQ ID NO: 1231803 - RNA, 19 nt, Artificial Sequence
  Description of Artificial Sequence: Synthetic oligonucleotide
cugaaauggaaaacaccuu

SEQ ID NO: 1231804 - RNA, 19 nt, Artificial Sequence
  Description of Artificial Sequence: Synthetic oligonucleotide
agcgucaguuugauaccug

SEQ ID NO: 1231805 - RNA, 19 nt, Artificial Sequence
  Description of Artificial Sequence: Synthetic oligonucleotide
gauugacagcagucuccaa

SEQ ID NO: 1231806 - RNA, 19 nt, Artificial Sequence
  Description of Artificial Sequence: Synthetic oligonucleotide
cccaacauacaacauuaaa

SEQ ID NO: 1231807 - RNA, 19 nt, Artificial Sequence
  Description of Artificial Sequence: Synthetic oligonucleotide
cauugacguucuugccguc

SEQ ID NO: 1231808 - RNA, 19 nt, Artificial Sequence
  Description of Artificial Sequence: Synthetic oligonucleotide
ccugacgucucuggagugg

SEQ ID NO: 1231809 - RNA, 19 nt, Artificial Sequence
  Description of Artificial Sequence: Synthetic oligonucleotide
uacaaaggacccgcacauu

SEQ ID NO: 1231810 - RNA, 19 nt, Artificial Sequence
  Description of Artificial Sequence: Synthetic oligonucleotide
caaacucugucccaucguu

SEQ ID NO: 1231811 - RNA, 19 nt, Artificial Sequence
  Description of Artificial Sequence: Synthetic oligonucleotide
uuguucacuuuggccgaaa

SEQ ID NO: 1231812 - RNA, 19 nt, Artificial Sequence
  Description of Artificial Sequence: Synthetic oligonucleotide
cucggacuuuguuuucaaa

SEQ ID NO: 1231813 - RNA, 19 nt, Artificial Sequence
  Description of Artificial Sequence: Synthetic oligonucleotide
ggcuuuagggucugagugu

SEQ ID NO: 1231814 - RNA, 19 nt, Artificial Sequence
  Description of Artificial Sequence: Synthetic oligonucleotide
cacacaccuacagcuaaaa

SEQ ID NO: 1231815 - RNA, 19 nt, Artificial Sequence
  Description of Artificial Sequence: Synthetic oligonucleotide
ggauccuuuuaggaaugga

SEQ ID NO: 1231816 - RNA, 19 nt, Artificial Sequence
  Description of Artificial Sequence: Synthetic oligonucleotide
ccuggcuuuagggucugag

SEQ ID NO: 1231817 - RNA, 19 nt, Artificial Sequence
  Description of Artificial Sequence: Synthetic oligonucleotide
cccuaguguugucauggug

SEQ ID NO: 1231818 - RNA, 19 nt, Artificial Sequence
  Description of Artificial Sequence: Synthetic oligonucleotide
agcuggucuuccacgguaa

SEQ ID NO: 1231819 - RNA, 19 nt, Artificial Sequence
  Description of Artificial Sequence: Synthetic oligonucleotide
ggagcuaauuccacacaaa

SEQ ID NO: 1231820 - RNA, 19 nt, Artificial Sequence
  Description of Artificial Sequence: Synthetic oligonucleotide
ggccgaaaagcaggcauca

SEQ ID NO: 1231821 - RNA, 19 nt, Artificial Sequence
  Description of Artificial Sequence: Synthetic oligonucleotide
ccacgguaaucucgguacc

SEQ ID NO: 1231822 - RNA, 19 nt, Artificial Sequence
  Description of Artificial Sequence: Synthetic oligonucleotide
gcuauacugcaaaauaguu

SEQ ID NO: 1231823 - RNA, 19 nt, Artificial Sequence
  Description of Artificial Sequence: Synthetic oligonucleotide
guccuagaccaagcuugug

SEQ ID NO: 1231824 - RNA, 19 nt, Artificial Sequence
  Description of Artificial Sequence: Synthetic oligonucleotide
gcuauuccaaagcgagugu

SEQ ID NO: 1231825 - RNA, 19 nt, Artificial Sequence
  Description of Artificial Sequence: Synthetic oligonucleotide
gcgaguguuacuguuuccu

SEQ ID NO: 1231826 - RNA, 19 nt, Artificial Sequence
  Description of Artificial Sequence: Synthetic oligonucleotide
cugcuauuccaaagcgagu

SEQ ID NO: 1231827 - RNA, 19 nt, Artificial Sequence
  Description of Artificial Sequence: Synthetic oligonucleotide
ggcuauaacagaggucacu

SEQ ID NO: 1231828 - RNA, 19 nt, Artificial Sequence
  Description of Artificial Sequence: Synthetic oligonucleotide
ggaguggcuccuccccaac

SEQ ID NO: 1231829 - RNA, 19 nt, Artificial Sequence
  Description of Artificial Sequence: Synthetic oligonucleotide
gccgagucauccuuagccu

SEQ ID NO: 1231830 - RNA, 19 nt, Artificial Sequence
  Description of Artificial Sequence: Synthetic oligonucleotide
gccacccgcauugacguuc

SEQ ID NO: 1231831 - RNA, 19 nt, Artificial Sequence
  Description of Artificial Sequence: Synthetic oligonucleotide
ggggaggagcuaauuccac

SEQ ID NO: 1231832 - RNA, 19 nt, Artificial Sequence
  Description of Artificial Sequence: Synthetic oligonucleotide
auagaguggugaggcuaua

SEQ ID NO: 1231833 - RNA, 19 nt, Artificial Sequence
  Description of Artificial Sequence: Synthetic oligonucleotide
gccugacgucucuggagug

SEQ ID NO: 1231834 - RNA, 19 nt, Artificial Sequence
  Description of Artificial Sequence: Synthetic oligonucleotide
ccucauagccaagcaccag

SEQ ID NO: 1231835 - RNA, 19 nt, Artificial Sequence
  Description of Artificial Sequence: Synthetic oligonucleotide
cccgcacauucccagcuuc

SEQ ID NO: 1231836 - RNA, 19 nt, Artificial Sequence
  Description of Artificial Sequence: Synthetic oligonucleotide
gguacccaggguguugucu

SEQ ID NO: 1231837 - RNA, 19 nt, Artificial Sequence
  Description of Artificial Sequence: Synthetic oligonucleotide
cuaaaccgaucaggcuaga

SEQ ID NO: 1231838 - RNA, 19 nt, Artificial Sequence
  Description of Artificial Sequence: Synthetic oligonucleotide
ccauucucggacuuuguuu

SEQ ID NO: 1231839 - RNA, 19 nt, Artificial Sequence
  Description of Artificial Sequence: Synthetic oligonucleotide
cagcgucaguuugauaccu

SEQ ID NO: 1231840 - RNA, 19 nt, Artificial Sequence
  Description of Artificial Sequence: Synthetic oligonucleotide
guuaggcgagaaggaugaa

SEQ ID NO: 1231841 - RNA, 19 nt, Artificial Sequence
  Description of Artificial Sequence: Synthetic oligonucleotide
ccacccuaaaauggcacaa

SEQ ID NO: 1231842 - RNA, 19 nt, Artificial Sequence
  Description of Artificial Sequence: Synthetic oligonucleotide
caggaucgaccugauacuu

SEQ ID NO: 1231843 - RNA, 19 nt, Artificial Sequence
  Description of Artificial Sequence: Synthetic oligonucleotide
aguccacgggugagcuggu

SEQ ID NO: 1231844 - RNA, 19 nt, Artificial Sequence
  Description of Artificial Sequence: Synthetic oligonucleotide
cucuguguuggcggagccu

SEQ ID NO: 1231845 - RNA, 19 nt, Artificial Sequence
  Description of Artificial Sequence: Synthetic oligonucleotide
cucguccgucuuguaccca

SEQ ID NO: 1231846 - RNA, 19 nt, Artificial Sequence
  Description of Artificial Sequence: Synthetic oligonucleotide
ccgaucaggcuagaguugu

SEQ ID NO: 1231847 - RNA, 19 nt, Artificial Sequence
  Description of Artificial Sequence: Synthetic oligonucleotide
cccggauggagggcccagc

SEQ ID NO: 1231848 - RNA, 19 nt, Artificial Sequence
  Description of Artificial Sequence: Synthetic oligonucleotide
ggcugccauuuacuuuggu

SEQ ID NO: 1231849 - RNA, 19 nt, Artificial Sequence
  Description of Artificial Sequence: Synthetic oligonucleotide
gcaccagagcaccccggau

SEQ ID NO: 1231850 - RNA, 19 nt, Artificial Sequence
  Description of Artificial Sequence: Synthetic oligonucleotide
gccguagcccuuggugaaa

SEQ ID NO: 1231851 - RNA, 19 nt, Artificial Sequence
  Description of Artificial Sequence: Synthetic oligonucleotide
ccaauccauucucggacuu

SEQ ID NO: 1231852 - RNA, 19 nt, Artificial Sequence
  Description of Artificial Sequence: Synthetic oligonucleotide
ccacccgcauugacguucu

SEQ ID NO: 1231853 - RNA, 19 nt, Artificial Sequence
  Description of Artificial Sequence: Synthetic oligonucleotide
ggccacccgcauugacguu

SEQ ID NO: 1231854 - RNA, 19 nt, Artificial Sequence
  Description of Artificial Sequence: Synthetic oligonucleotide
cacccgcauugacguucuu

SEQ ID NO: 1231855 - RNA, 19 nt, Artificial Sequence
  Description of Artificial Sequence: Synthetic oligonucleotide
uauacaaucccgcaguccg

SEQ ID NO: 1231856 - RNA, 19 nt, Artificial Sequence
  Description of Artificial Sequence: Synthetic oligonucleotide
agcauaacugaccagacac

SEQ ID NO: 1231857 - RNA, 19 nt, Artificial Sequence
  Description of Artificial Sequence: Synthetic oligonucleotide
aaaggagugggccagcguc

SEQ ID NO: 1231858 - RNA, 19 nt, Artificial Sequence
  Description of Artificial Sequence: Synthetic oligonucleotide
agacacagcccauagaagg

SEQ ID NO: 1231859 - RNA, 19 nt, Artificial Sequence
  Description of Artificial Sequence: Synthetic oligonucleotide
cucacuagaagcuggagcc

SEQ ID NO: 1231860 - RNA, 19 nt, Artificial Sequence
  Description of Artificial Sequence: Synthetic oligonucleotide
uuuacaagggaccuccagc

SEQ ID NO: 1231861 - RNA, 19 nt, Artificial Sequence
  Description of Artificial Sequence: Synthetic oligonucleotide
uuuacacuggccaucaagu

SEQ ID NO: 1231862 - RNA, 19 nt, Artificial Sequence
  Description of Artificial Sequence: Synthetic oligonucleotide
ucuaguagucucuuauccg

SEQ ID NO: 1231863 - RNA, 19 nt, Artificial Sequence
  Description of Artificial Sequence: Synthetic oligonucleotide
acgccaauagcccagcgcc

SEQ ID NO: 1231864 - RNA, 19 nt, Artificial Sequence
  Description of Artificial Sequence: Synthetic oligonucleotide
uuaugagcaggguugaggc

SEQ ID NO: 1231865 - RNA, 19 nt, Artificial Sequence
  Description of Artificial Sequence: Synthetic oligonucleotide
auaggcuacaaaugcugcc

SEQ ID NO: 1231866 - RNA, 19 nt, Artificial Sequence
  Description of Artificial Sequence: Synthetic oligonucleotide
uacacuguaggaaucuagc

SEQ ID NO: 1231867 - RNA, 19 nt, Artificial Sequence
  Description of Artificial Sequence: Synthetic oligonucleotide
aaccggauacacuguaggg

SEQ ID NO: 1231868 - RNA, 19 nt, Artificial Sequence
  Description of Artificial Sequence: Synthetic oligonucleotide
gagcauaggcuacaaaugc

SEQ ID NO: 1231869 - RNA, 19 nt, Artificial Sequence
  Description of Artificial Sequence: Synthetic oligonucleotide
augguuaccugguagaggu

SEQ ID NO: 1231870 - RNA, 19 nt, Artificial Sequence
  Description of Artificial Sequence: Synthetic oligonucleotide
gaucgcaggaagcauauac

SEQ ID NO: 1231871 - RNA, 19 nt, Artificial Sequence
  Description of Artificial Sequence: Synthetic oligonucleotide
guaaauagaggcugugaag

SEQ ID NO: 1231872 - RNA, 19 nt, Artificial Sequence
  Description of Artificial Sequence: Synthetic oligonucleotide
guaggaaucuagcaggccc

SEQ ID NO: 1231873 - RNA, 19 nt, Artificial Sequence
  Description of Artificial Sequence: Synthetic oligonucleotide
aggaagcauauacaauccc

SEQ ID NO: 1231874 - RNA, 19 nt, Artificial Sequence
  Description of Artificial Sequence: Synthetic oligonucleotide
agcgcaaccggauacacug

SEQ ID NO: 1231875 - RNA, 19 nt, Artificial Sequence
  Description of Artificial Sequence: Synthetic oligonucleotide
aaucaggcgaagccgagca

SEQ ID NO: 1231876 - RNA, 19 nt, Artificial Sequence
  Description of Artificial Sequence: Synthetic oligonucleotide
cucuaguagucucuuaucc

SEQ ID NO: 1231877 - RNA, 19 nt, Artificial Sequence
  Description of Artificial Sequence: Synthetic oligonucleotide
uacgaggcuagcauaacug

SEQ ID NO: 1231878 - RNA, 19 nt, Artificial Sequence
  Description of Artificial Sequence: Synthetic oligonucleotide
uuacaagggaccuccagca

SEQ ID NO: 1231879 - RNA, 19 nt, Artificial Sequence
  Description of Artificial Sequence: Synthetic oligonucleotide
aacaguucgaaagaucccu

SEQ ID NO: 1231880 - RNA, 19 nt, Artificial Sequence
  Description of Artificial Sequence: Synthetic oligonucleotide
agcauauacaaucccgcag

SEQ ID NO: 1231881 - RNA, 19 nt, Artificial Sequence
  Description of Artificial Sequence: Synthetic oligonucleotide
aagagcucgaacucugcug

SEQ ID NO: 1231882 - RNA, 19 nt, Artificial Sequence
  Description of Artificial Sequence: Synthetic oligonucleotide
ucucugacagcgcaaccgg

SEQ ID NO: 1231883 - RNA, 19 nt, Artificial Sequence
  Description of Artificial Sequence: Synthetic oligonucleotide
guugaacccgcccagguag

SEQ ID NO: 1231884 - RNA, 19 nt, Artificial Sequence
  Description of Artificial Sequence: Synthetic oligonucleotide
agauggaaguggcucacac

SEQ ID NO: 1231885 - RNA, 19 nt, Artificial Sequence
  Description of Artificial Sequence: Synthetic oligonucleotide
ucacuaccggaaaaggaag

SEQ ID NO: 1231886 - RNA, 19 nt, Artificial Sequence
  Description of Artificial Sequence: Synthetic oligonucleotide
uucucugacagcgcaaccg

SEQ ID NO: 1231887 - RNA, 19 nt, Artificial Sequence
  Description of Artificial Sequence: Synthetic oligonucleotide
aguucgaaagaucccucgg

SEQ ID NO: 1231888 - RNA, 19 nt, Artificial Sequence
  Description of Artificial Sequence: Synthetic oligonucleotide
cuagaaaccggaaggcagc

SEQ ID NO: 1231889 - RNA, 19 nt, Artificial Sequence
  Description of Artificial Sequence: Synthetic oligonucleotide
uguccagaaaguguguugc

SEQ ID NO: 1231890 - RNA, 19 nt, Artificial Sequence
  Description of Artificial Sequence: Synthetic oligonucleotide
cucagauugucuaccagug

SEQ ID NO: 1231891 - RNA, 19 nt, Artificial Sequence
  Description of Artificial Sequence: Synthetic oligonucleotide
acucagauugucuaccagu

SEQ ID NO: 1231892 - RNA, 19 nt, Artificial Sequence
  Description of Artificial Sequence: Synthetic oligonucleotide
aacucugcugccucgcaug

SEQ ID NO: 1231893 - RNA, 19 nt, Artificial Sequence
  Description of Artificial Sequence: Synthetic oligonucleotide
ucuaccagugcccgaagcu

SEQ ID NO: 1231894 - RNA, 19 nt, Artificial Sequence
  Description of Artificial Sequence: Synthetic oligonucleotide
uacacuguagggcucugca

SEQ ID NO: 1231895 - RNA, 19 nt, Artificial Sequence
  Description of Artificial Sequence: Synthetic oligonucleotide
uaccggaaaaggaagugac

SEQ ID NO: 1231896 - RNA, 19 nt, Artificial Sequence
  Description of Artificial Sequence: Synthetic oligonucleotide
cauaacugaccagacacag

SEQ ID NO: 1231897 - RNA, 19 nt, Artificial Sequence
  Description of Artificial Sequence: Synthetic oligonucleotide
agcacucagauugucuacc

SEQ ID NO: 1231898 - RNA, 19 nt, Artificial Sequence
  Description of Artificial Sequence: Synthetic oligonucleotide
caggaagcauauacaaucc

SEQ ID NO: 1231899 - RNA, 19 nt, Artificial Sequence
  Description of Artificial Sequence: Synthetic oligonucleotide
cagaaaguugggaagacca

SEQ ID NO: 1231900 - RNA, 19 nt, Artificial Sequence
  Description of Artificial Sequence: Synthetic oligonucleotide
agcuccuuggggccaaacc

SEQ ID NO: 1231901 - RNA, 19 nt, Artificial Sequence
  Description of Artificial Sequence: Synthetic oligonucleotide
gagucucagcaauagcucc

SEQ ID NO: 1231902 - RNA, 19 nt, Artificial Sequence
  Description of Artificial Sequence: Synthetic oligonucleotide
acacgcuucagccacaaau

SEQ ID NO: 1231903 - RNA, 19 nt, Artificial Sequence
  Description of Artificial Sequence: Synthetic oligonucleotide
aucaccgcuguccagccuc

SEQ ID NO: 1231904 - RNA, 19 nt, Artificial Sequence
  Description of Artificial Sequence: Synthetic oligonucleotide
ggaagcauauacaaucccg

SEQ ID NO: 1231905 - RNA, 19 nt, Artificial Sequence
  Description of Artificial Sequence: Synthetic oligonucleotide
caaccggauacacuguagg

SEQ ID NO: 1231906 - RNA, 19 nt, Artificial Sequence
  Description of Artificial Sequence: Synthetic oligonucleotide
gauugucuaccagugcccg

SEQ ID NO: 1231907 - RNA, 19 nt, Artificial Sequence
  Description of Artificial Sequence: Synthetic oligonucleotide
ugcaaucaggcgaagccga

SEQ ID NO: 1231908 - RNA, 19 nt, Artificial Sequence
  Description of Artificial Sequence: Synthetic oligonucleotide
uaggcuacaaaugcugccc

SEQ ID NO: 1231909 - RNA, 19 nt, Artificial Sequence
  Description of Artificial Sequence: Synthetic oligonucleotide
gcaggaagcauauacaauc

SEQ ID NO: 1231910 - RNA, 19 nt, Artificial Sequence
  Description of Artificial Sequence: Synthetic oligonucleotide
gaacagauucuagccaggg

SEQ ID NO: 1231911 - RNA, 19 nt, Artificial Sequence
  Description of Artificial Sequence: Synthetic oligonucleotide
ucgagguuggccucccacg

SEQ ID NO: 1231912 - RNA, 19 nt, Artificial Sequence
  Description of Artificial Sequence: Synthetic oligonucleotide
uaugagcaggguugaggcg

SEQ ID NO: 1231913 - RNA, 19 nt, Artificial Sequence
  Description of Artificial Sequence: Synthetic oligonucleotide
cagccacaaauuuacacug

SEQ ID NO: 1231914 - RNA, 19 nt, Artificial Sequence
  Description of Artificial Sequence: Synthetic oligonucleotide
uucgaaagaucccucggau

SEQ ID NO: 1231915 - RNA, 19 nt, Artificial Sequence
  Description of Artificial Sequence: Synthetic oligonucleotide
acugggcaccaacaguucg

SEQ ID NO: 1231916 - RNA, 19 nt, Artificial Sequence
  Description of Artificial Sequence: Synthetic oligonucleotide
gaggcuagcauaacugacc

SEQ ID NO: 1231917 - RNA, 19 nt, Artificial Sequence
  Description of Artificial Sequence: Synthetic oligonucleotide
ugaagcagaucaccgcugu

SEQ ID NO: 1231918 - RNA, 19 nt, Artificial Sequence
  Description of Artificial Sequence: Synthetic oligonucleotide
acgcccacugcccuguagc

SEQ ID NO: 1231919 - RNA, 19 nt, Artificial Sequence
  Description of Artificial Sequence: Synthetic oligonucleotide
agaucaccgcuguccagcc

SEQ ID NO: 1231920 - RNA, 19 nt, Artificial Sequence
  Description of Artificial Sequence: Synthetic oligonucleotide
uauccgguccugcaaucag

SEQ ID NO: 1231921 - RNA, 19 nt, Artificial Sequence
  Description of Artificial Sequence: Synthetic oligonucleotide
cccaucagagccuagaaac

SEQ ID NO: 1231922 - RNA, 19 nt, Artificial Sequence
  Description of Artificial Sequence: Synthetic oligonucleotide
agagcauaggcuacaaaug

SEQ ID NO: 1231923 - RNA, 19 nt, Artificial Sequence
  Description of Artificial Sequence: Synthetic oligonucleotide
caguucgaaagaucccucg

SEQ ID NO: 1231924 - RNA, 19 nt, Artificial Sequence
  Description of Artificial Sequence: Synthetic oligonucleotide
ucgcaggaagcauauacaa

SEQ ID NO: 1231925 - RNA, 19 nt, Artificial Sequence
  Description of Artificial Sequence: Synthetic oligonucleotide
cuagcauaacugaccagac

SEQ ID NO: 1231926 - RNA, 19 nt, Artificial Sequence
  Description of Artificial Sequence: Synthetic oligonucleotide
cucacuaccggaaaaggaa

SEQ ID NO: 1231927 - RNA, 19 nt, Artificial Sequence
  Description of Artificial Sequence: Synthetic oligonucleotide
acgucugcguccugcagac

SEQ ID NO: 1231928 - RNA, 19 nt, Artificial Sequence
  Description of Artificial Sequence: Synthetic oligonucleotide
aaaggagccuccaaacgga

SEQ ID NO: 1231929 - RNA, 19 nt, Artificial Sequence
  Description of Artificial Sequence: Synthetic oligonucleotide
gggaacagauucuagccag

SEQ ID NO: 1231930 - RNA, 19 nt, Artificial Sequence
  Description of Artificial Sequence: Synthetic oligonucleotide
auaacugaccagacacagc

SEQ ID NO: 1231931 - RNA, 19 nt, Artificial Sequence
  Description of Artificial Sequence: Synthetic oligonucleotide
guagucucuuauccggucc

SEQ ID NO: 1231932 - RNA, 19 nt, Artificial Sequence
  Description of Artificial Sequence: Synthetic oligonucleotide
uccgguccugcaaucaggc

SEQ ID NO: 1231933 - RNA, 19 nt, Artificial Sequence
  Description of Artificial Sequence: Synthetic oligonucleotide
auguucaccucacugcccu

SEQ ID NO: 1231934 - RNA, 19 nt, Artificial Sequence
  Description of Artificial Sequence: Synthetic oligonucleotide
ugcuguugaacccgcccag

SEQ ID NO: 1231935 - RNA, 19 nt, Artificial Sequence
  Description of Artificial Sequence: Synthetic oligonucleotide
cuccaaacggacagcggcg

SEQ ID NO: 1231936 - RNA, 19 nt, Artificial Sequence
  Description of Artificial Sequence: Synthetic oligonucleotide
uagcauaacugaccagaca

SEQ ID NO: 1231937 - RNA, 19 nt, Artificial Sequence
  Description of Artificial Sequence: Synthetic oligonucleotide
cagguggaugcacacacgc

SEQ ID NO: 1231938 - RNA, 19 nt, Artificial Sequence
  Description of Artificial Sequence: Synthetic oligonucleotide
gcagucaagggcccgaagg

SEQ ID NO: 1231939 - RNA, 19 nt, Artificial Sequence
  Description of Artificial Sequence: Synthetic oligonucleotide
cuguaggaaucuagcaggc

SEQ ID NO: 1231940 - RNA, 19 nt, Artificial Sequence
  Description of Artificial Sequence: Synthetic oligonucleotide
ugacagcgcaaccggauac

SEQ ID NO: 1231941 - RNA, 19 nt, Artificial Sequence
  Description of Artificial Sequence: Synthetic oligonucleotide
aggcuagcauaacugacca

SEQ ID NO: 1231942 - RNA, 19 nt, Artificial Sequence
  Description of Artificial Sequence: Synthetic oligonucleotide
caacaguucgaaagauccc

SEQ ID NO: 1231943 - RNA, 19 nt, Artificial Sequence
  Description of Artificial Sequence: Synthetic oligonucleotide
ugaggcggcucagagacug

SEQ ID NO: 1231944 - RNA, 19 nt, Artificial Sequence
  Description of Artificial Sequence: Synthetic oligonucleotide
agaccacuccuucguacac

SEQ ID NO: 1231945 - RNA, 19 nt, Artificial Sequence
  Description of Artificial Sequence: Synthetic oligonucleotide
aggcuacaaaugcugcccg

SEQ ID NO: 1231946 - RNA, 19 nt, Artificial Sequence
  Description of Artificial Sequence: Synthetic oligonucleotide
ccuagaaaccggaaggcag

SEQ ID NO: 1231947 - RNA, 19 nt, Artificial Sequence
  Description of Artificial Sequence: Synthetic oligonucleotide
aaacggacagcggcggaag

SEQ ID NO: 1231948 - RNA, 19 nt, Artificial Sequence
  Description of Artificial Sequence: Synthetic oligonucleotide
uagcccagcgccaugguua

SEQ ID NO: 1231949 - RNA, 19 nt, Artificial Sequence
  Description of Artificial Sequence: Synthetic oligonucleotide
cucaguuguccagaaagug

SEQ ID NO: 1231950 - RNA, 19 nt, Artificial Sequence
  Description of Artificial Sequence: Synthetic oligonucleotide
uggcacgccucucaguugu

SEQ ID NO: 1231951 - RNA, 19 nt, Artificial Sequence
  Description of Artificial Sequence: Synthetic oligonucleotide
uuacacuggccaucaaguc

SEQ ID NO: 1231952 - RNA, 19 nt, Artificial Sequence
  Description of Artificial Sequence: Synthetic oligonucleotide
caaugccagggcuacugcc

SEQ ID NO: 1231953 - RNA, 19 nt, Artificial Sequence
  Description of Artificial Sequence: Synthetic oligonucleotide
uguuugggacaggugacca

SEQ ID NO: 1231954 - RNA, 19 nt, Artificial Sequence
  Description of Artificial Sequence: Synthetic oligonucleotide
aagggcccgaaggugcucg

SEQ ID NO: 1231955 - RNA, 19 nt, Artificial Sequence
  Description of Artificial Sequence: Synthetic oligonucleotide
gaucccucggaucuccuga

SEQ ID NO: 1231956 - RNA, 19 nt, Artificial Sequence
  Description of Artificial Sequence: Synthetic oligonucleotide
cugcaaucaggcgaagccg

SEQ ID NO: 1231957 - RNA, 19 nt, Artificial Sequence
  Description of Artificial Sequence: Synthetic oligonucleotide
acuaccggaaaaggaagug

SEQ ID NO: 1231958 - RNA, 19 nt, Artificial Sequence
  Description of Artificial Sequence: Synthetic oligonucleotide
caaugggaacagauucuag

SEQ ID NO: 1231959 - RNA, 19 nt, Artificial Sequence
  Description of Artificial Sequence: Synthetic oligonucleotide
aaggcgagggaacccucug

SEQ ID NO: 1231960 - RNA, 19 nt, Artificial Sequence
  Description of Artificial Sequence: Synthetic oligonucleotide
uucguacacuguaggaauc

SEQ ID NO: 1231961 - RNA, 19 nt, Artificial Sequence
  Description of Artificial Sequence: Synthetic oligonucleotide
ucgaaagaucccucggauc

SEQ ID NO: 1231962 - RNA, 19 nt, Artificial Sequence
  Description of Artificial Sequence: Synthetic oligonucleotide
ugccagaaaguugggaaga

SEQ ID NO: 1231963 - RNA, 19 nt, Artificial Sequence
  Description of Artificial Sequence: Synthetic oligonucleotide
aaggugcucgaagaauuca

SEQ ID NO: 1231964 - RNA, 19 nt, Artificial Sequence
  Description of Artificial Sequence: Synthetic oligonucleotide
uguaggaaucuagcaggcc

SEQ ID NO: 1231965 - RNA, 19 nt, Artificial Sequence
  Description of Artificial Sequence: Synthetic oligonucleotide
aaggagccuccaaacggac

SEQ ID NO: 1231966 - RNA, 19 nt, Artificial Sequence
  Description of Artificial Sequence: Synthetic oligonucleotide
cagaucaccgcuguccagc

SEQ ID NO: 1231967 - RNA, 19 nt, Artificial Sequence
  Description of Artificial Sequence: Synthetic oligonucleotide
agucgugcuagcuccuucu

SEQ ID NO: 1231968 - RNA, 19 nt, Artificial Sequence
  Description of Artificial Sequence: Synthetic oligonucleotide
agaagagcucgaacucugc

SEQ ID NO: 1231969 - RNA, 19 nt, Artificial Sequence
  Description of Artificial Sequence: Synthetic oligonucleotide
agugagcaguggccguacc

SEQ ID NO: 1231970 - RNA, 19 nt, Artificial Sequence
  Description of Artificial Sequence: Synthetic oligonucleotide
ucgugcuagcuccuucuca

SEQ ID NO: 1231971 - RNA, 19 nt, Artificial Sequence
  Description of Artificial Sequence: Synthetic oligonucleotide
agugcccgaagcuucucug

SEQ ID NO: 1231972 - RNA, 19 nt, Artificial Sequence
  Description of Artificial Sequence: Synthetic oligonucleotide
ggcuguuugggacagguga

SEQ ID NO: 1231973 - RNA, 19 nt, Artificial Sequence
  Description of Artificial Sequence: Synthetic oligonucleotide
guucgaaagaucccucgga

SEQ ID NO: 1231974 - RNA, 19 nt, Artificial Sequence
  Description of Artificial Sequence: Synthetic oligonucleotide
cauauacaaucccgcaguc

SEQ ID NO: 1231975 - RNA, 19 nt, Artificial Sequence
  Description of Artificial Sequence: Synthetic oligonucleotide
aggaacugcacgucugcgu

SEQ ID NO: 1231976 - RNA, 19 nt, Artificial Sequence
  Description of Artificial Sequence: Synthetic oligonucleotide
accucacuaccggaaaagg

SEQ ID NO: 1231977 - RNA, 19 nt, Artificial Sequence
  Description of Artificial Sequence: Synthetic oligonucleotide
ggugccaaugccaaugaug

SEQ ID NO: 1231978 - RNA, 19 nt, Artificial Sequence
  Description of Artificial Sequence: Synthetic oligonucleotide
uggaugcacacacgcuuca

SEQ ID NO: 1231979 - RNA, 19 nt, Artificial Sequence
  Description of Artificial Sequence: Synthetic oligonucleotide
gcuagcauaacugaccaga

SEQ ID NO: 1231980 - RNA, 19 nt, Artificial Sequence
  Description of Artificial Sequence: Synthetic oligonucleotide
cagagcauaggcuacaaau

SEQ ID NO: 1231981 - RNA, 19 nt, Artificial Sequence
  Description of Artificial Sequence: Synthetic oligonucleotide
auacacuguagggcucugc

SEQ ID NO: 1231982 - RNA, 19 nt, Artificial Sequence
  Description of Artificial Sequence: Synthetic oligonucleotide
ucgaagaauucagggucag

SEQ ID NO: 1231983 - RNA, 19 nt, Artificial Sequence
  Description of Artificial Sequence: Synthetic oligonucleotide
uguugaacccgcccaggua

SEQ ID NO: 1231984 - RNA, 19 nt, Artificial Sequence
  Description of Artificial Sequence: Synthetic oligonucleotide
uggaaguggcucacacagc

SEQ ID NO: 1231985 - RNA, 19 nt, Artificial Sequence
  Description of Artificial Sequence: Synthetic oligonucleotide
uggcacgccagggaaggcg

SEQ ID NO: 1231986 - RNA, 19 nt, Artificial Sequence
  Description of Artificial Sequence: Synthetic oligonucleotide
agccuccaaacggacagcg

SEQ ID NO: 1231987 - RNA, 19 nt, Artificial Sequence
  Description of Artificial Sequence: Synthetic oligonucleotide
cuacaaaugcugcccguuc

SEQ ID NO: 1231988 - RNA, 19 nt, Artificial Sequence
  Description of Artificial Sequence: Synthetic oligonucleotide
cacgccaauagcccagcgc

SEQ ID NO: 1231989 - RNA, 19 nt, Artificial Sequence
  Description of Artificial Sequence: Synthetic oligonucleotide
caaucccgcaguccggcgg

SEQ ID NO: 1231990 - RNA, 19 nt, Artificial Sequence
  Description of Artificial Sequence: Synthetic oligonucleotide
uuauccgguccugcaauca

SEQ ID NO: 1231991 - RNA, 19 nt, Artificial Sequence
  Description of Artificial Sequence: Synthetic oligonucleotide
ucguacacuguaggaaucu

SEQ ID NO: 1231992 - RNA, 19 nt, Artificial Sequence
  Description of Artificial Sequence: Synthetic oligonucleotide
uaccagugcccgaagcuuc

SEQ ID NO: 1231993 - RNA, 19 nt, Artificial Sequence
  Description of Artificial Sequence: Synthetic oligonucleotide
gaacugcacgucugcgucc

SEQ ID NO: 1231994 - RNA, 19 nt, Artificial Sequence
  Description of Artificial Sequence: Synthetic oligonucleotide
uggaaagcccggggaaagg

SEQ ID NO: 1231995 - RNA, 19 nt, Artificial Sequence
  Description of Artificial Sequence: Synthetic oligonucleotide
acaguucgaaagaucccuc

SEQ ID NO: 1231996 - RNA, 19 nt, Artificial Sequence
  Description of Artificial Sequence: Synthetic oligonucleotide
acagcgcaaccggauacac

SEQ ID NO: 1231997 - RNA, 19 nt, Artificial Sequence
  Description of Artificial Sequence: Synthetic oligonucleotide
uguugcaggcagagucuca

SEQ ID NO: 1231998 - RNA, 19 nt, Artificial Sequence
  Description of Artificial Sequence: Synthetic oligonucleotide
uugaacccgcccagguagc

SEQ ID NO: 1231999 - RNA, 19 nt, Artificial Sequence
  Description of Artificial Sequence: Synthetic oligonucleotide
agcaguggccguaccaccg

SEQ ID NO: 1232000 - RNA, 19 nt, Artificial Sequence
  Description of Artificial Sequence: Synthetic oligonucleotide
agccacaaauuuacacugg

SEQ ID NO: 1232001 - RNA, 19 nt, Artificial Sequence
  Description of Artificial Sequence: Synthetic oligonucleotide
aucgcaggaagcauauaca

SEQ ID NO: 1232002 - RNA, 19 nt, Artificial Sequence
  Description of Artificial Sequence: Synthetic oligonucleotide
acaaucccgcaguccggcg

SEQ ID NO: 1232003 - RNA, 19 nt, Artificial Sequence
  Description of Artificial Sequence: Synthetic oligonucleotide
aggguuugcuucucagggu

SEQ ID NO: 1232004 - RNA, 19 nt, Artificial Sequence
  Description of Artificial Sequence: Synthetic oligonucleotide
gcccauagaaggcuguuug

SEQ ID NO: 1232005 - RNA, 19 nt, Artificial Sequence
  Description of Artificial Sequence: Synthetic oligonucleotide
cuuauccgguccugcaauc

SEQ ID NO: 1232006 - RNA, 19 nt, Artificial Sequence
  Description of Artificial Sequence: Synthetic oligonucleotide
ucugcguccugcagacgga

SEQ ID NO: 1232007 - RNA, 19 nt, Artificial Sequence
  Description of Artificial Sequence: Synthetic oligonucleotide
guggccguaccaccgcgcg

SEQ ID NO: 1232008 - RNA, 19 nt, Artificial Sequence
  Description of Artificial Sequence: Synthetic oligonucleotide
ggaacugcacgucugcguc

SEQ ID NO: 1232009 - RNA, 19 nt, Artificial Sequence
  Description of Artificial Sequence: Synthetic oligonucleotide
aaggaucgcaggaagcaua

SEQ ID NO: 1232010 - RNA, 19 nt, Artificial Sequence
  Description of Artificial Sequence: Synthetic oligonucleotide
cuguuugggacaggugacc

SEQ ID NO: 1232011 - RNA, 19 nt, Artificial Sequence
  Description of Artificial Sequence: Synthetic oligonucleotide
cuggagccaacaucggguc

SEQ ID NO: 1232012 - RNA, 19 nt, Artificial Sequence
  Description of Artificial Sequence: Synthetic oligonucleotide
caccucacuaccggaaaag

SEQ ID NO: 1232013 - RNA, 19 nt, Artificial Sequence
  Description of Artificial Sequence: Synthetic oligonucleotide
ugagccuguugaagcagau

SEQ ID NO: 1232014 - RNA, 19 nt, Artificial Sequence
  Description of Artificial Sequence: Synthetic oligonucleotide
ucacuagaagcuggagcca

SEQ ID NO: 1232015 - RNA, 19 nt, Artificial Sequence
  Description of Artificial Sequence: Synthetic oligonucleotide
aucccucggaucuccugag

SEQ ID NO: 1232016 - RNA, 19 nt, Artificial Sequence
  Description of Artificial Sequence: Synthetic oligonucleotide
agggcuacugccagaaagu

SEQ ID NO: 1232017 - RNA, 19 nt, Artificial Sequence
  Description of Artificial Sequence: Synthetic oligonucleotide
aacggacagcggcggaaga

SEQ ID NO: 1232018 - RNA, 19 nt, Artificial Sequence
  Description of Artificial Sequence: Synthetic oligonucleotide
auacaaucccgcaguccgg

SEQ ID NO: 1232019 - RNA, 19 nt, Artificial Sequence
  Description of Artificial Sequence: Synthetic oligonucleotide
auugucuaccagugcccga

SEQ ID NO: 1232020 - RNA, 19 nt, Artificial Sequence
  Description of Artificial Sequence: Synthetic oligonucleotide
cacugaagccaggaacugc

SEQ ID NO: 1232021 - RNA, 19 nt, Artificial Sequence
  Description of Artificial Sequence: Synthetic oligonucleotide
gaagagcucgaacucugcu

SEQ ID NO: 1232022 - RNA, 19 nt, Artificial Sequence
  Description of Artificial Sequence: Synthetic oligonucleotide
aaaccggaaggcagccuug

SEQ ID NO: 1232023 - RNA, 19 nt, Artificial Sequence
  Description of Artificial Sequence: Synthetic oligonucleotide
cugcacgccaauagcccag

SEQ ID NO: 1232024 - RNA, 19 nt, Artificial Sequence
  Description of Artificial Sequence: Synthetic oligonucleotide
cuacugccagaaaguuggg

SEQ ID NO: 1232025 - RNA, 19 nt, Artificial Sequence
  Description of Artificial Sequence: Synthetic oligonucleotide
ccucugucaguuucauucg

SEQ ID NO: 1232026 - RNA, 19 nt, Artificial Sequence
  Description of Artificial Sequence: Synthetic oligonucleotide
gcauauacaaucccgcagu

SEQ ID NO: 1232027 - RNA, 19 nt, Artificial Sequence
  Description of Artificial Sequence: Synthetic oligonucleotide
cuggacuccuccagagaug

SEQ ID NO: 1232028 - RNA, 19 nt, Artificial Sequence
  Description of Artificial Sequence: Synthetic oligonucleotide
gaaaccggaaggcagccuu

SEQ ID NO: 1232029 - RNA, 19 nt, Artificial Sequence
  Description of Artificial Sequence: Synthetic oligonucleotide
ucgaacucugcugccucgc

SEQ ID NO: 1232030 - RNA, 19 nt, Artificial Sequence
  Description of Artificial Sequence: Synthetic oligonucleotide
acucuggggcccucacuag

SEQ ID NO: 1232031 - RNA, 19 nt, Artificial Sequence
  Description of Artificial Sequence: Synthetic oligonucleotide
guuggccucccacggacac

SEQ ID NO: 1232032 - RNA, 19 nt, Artificial Sequence
  Description of Artificial Sequence: Synthetic oligonucleotide
cuucguacacuguaggaau

SEQ ID NO: 1232033 - RNA, 19 nt, Artificial Sequence
  Description of Artificial Sequence: Synthetic oligonucleotide
caaucaggcgaagccgagc

SEQ ID NO: 1232034 - RNA, 19 nt, Artificial Sequence
  Description of Artificial Sequence: Synthetic oligonucleotide
ugcagacggaaggaucgca

SEQ ID NO: 1232035 - RNA, 19 nt, Artificial Sequence
  Description of Artificial Sequence: Synthetic oligonucleotide
aucaggcgaagccgagcag

SEQ ID NO: 1232036 - RNA, 19 nt, Artificial Sequence
  Description of Artificial Sequence: Synthetic oligonucleotide
auccgguccugcaaucagg

SEQ ID NO: 1232037 - RNA, 19 nt, Artificial Sequence
  Description of Artificial Sequence: Synthetic oligonucleotide
accgucaccccagagcagu

SEQ ID NO: 1232038 - RNA, 19 nt, Artificial Sequence
  Description of Artificial Sequence: Synthetic oligonucleotide
agccucacgcccacugccc

SEQ ID NO: 1232039 - RNA, 19 nt, Artificial Sequence
  Description of Artificial Sequence: Synthetic oligonucleotide
cuaccggaaaaggaaguga

SEQ ID NO: 1232040 - RNA, 19 nt, Artificial Sequence
  Description of Artificial Sequence: Synthetic oligonucleotide
agcagucaagggcccgaag

SEQ ID NO: 1232041 - RNA, 19 nt, Artificial Sequence
  Description of Artificial Sequence: Synthetic oligonucleotide
gaaguggcucacacagcug

SEQ ID NO: 1232042 - RNA, 19 nt, Artificial Sequence
  Description of Artificial Sequence: Synthetic oligonucleotide
ggcgagggaacccucuggc

SEQ ID NO: 1232043 - RNA, 19 nt, Artificial Sequence
  Description of Artificial Sequence: Synthetic oligonucleotide
gaauucagggucagugucu

SEQ ID NO: 1232044 - RNA, 19 nt, Artificial Sequence
  Description of Artificial Sequence: Synthetic oligonucleotide
gaaagaucccucggaucuc

SEQ ID NO: 1232045 - RNA, 19 nt, Artificial Sequence
  Description of Artificial Sequence: Synthetic oligonucleotide
ucccucggaucuccugagc

SEQ ID NO: 1232046 - RNA, 19 nt, Artificial Sequence
  Description of Artificial Sequence: Synthetic oligonucleotide
ccaacugcaguaaguccag

SEQ ID NO: 1232047 - RNA, 19 nt, Artificial Sequence
  Description of Artificial Sequence: Synthetic oligonucleotide
cugcuguugaacccgccca

SEQ ID NO: 1232048 - RNA, 19 nt, Artificial Sequence
  Description of Artificial Sequence: Synthetic oligonucleotide
gagcucgaacucugcugcc

SEQ ID NO: 1232049 - RNA, 19 nt, Artificial Sequence
  Description of Artificial Sequence: Synthetic oligonucleotide
uccacucuggggcccucac

SEQ ID NO: 1232050 - RNA, 19 nt, Artificial Sequence
  Description of Artificial Sequence: Synthetic oligonucleotide
cugggcaccaacaguucga

SEQ ID NO: 1232051 - RNA, 19 nt, Artificial Sequence
  Description of Artificial Sequence: Synthetic oligonucleotide
uggcuacgaggcuagcaua

SEQ ID NO: 1232052 - RNA, 19 nt, Artificial Sequence
  Description of Artificial Sequence: Synthetic oligonucleotide
cagcauugguggcuacgag

SEQ ID NO: 1232053 - RNA, 19 nt, Artificial Sequence
  Description of Artificial Sequence: Synthetic oligonucleotide
uuaccugguagaggucagu

SEQ ID NO: 1232054 - RNA, 19 nt, Artificial Sequence
  Description of Artificial Sequence: Synthetic oligonucleotide
ucagugagcaguggccgua

SEQ ID NO: 1232055 - RNA, 19 nt, Artificial Sequence
  Description of Artificial Sequence: Synthetic oligonucleotide
gacggaaggaucgcaggaa

SEQ ID NO: 1232056 - RNA, 19 nt, Artificial Sequence
  Description of Artificial Sequence: Synthetic oligonucleotide
agcaggguugaggcggcuc

SEQ ID NO: 1232057 - RNA, 19 nt, Artificial Sequence
  Description of Artificial Sequence: Synthetic oligonucleotide
cacuccuucguacacugua

SEQ ID NO: 1232058 - RNA, 19 nt, Artificial Sequence
  Description of Artificial Sequence: Synthetic oligonucleotide
cacgucugcguccugcaga

SEQ ID NO: 1232059 - RNA, 19 nt, Artificial Sequence
  Description of Artificial Sequence: Synthetic oligonucleotide
agcgccaugguuaccuggu

SEQ ID NO: 1232060 - RNA, 19 nt, Artificial Sequence
  Description of Artificial Sequence: Synthetic oligonucleotide
aguuguccagaaagugugu

SEQ ID NO: 1232061 - RNA, 19 nt, Artificial Sequence
  Description of Artificial Sequence: Synthetic oligonucleotide
caguggccguaccaccgcg

SEQ ID NO: 1232062 - RNA, 19 nt, Artificial Sequence
  Description of Artificial Sequence: Synthetic oligonucleotide
accggaaaaggaagugaca

SEQ ID NO: 1232063 - RNA, 19 nt, Artificial Sequence
  Description of Artificial Sequence: Synthetic oligonucleotide
ucggaucuccugagccugu

SEQ ID NO: 1232064 - RNA, 19 nt, Artificial Sequence
  Description of Artificial Sequence: Synthetic oligonucleotide
cacucuggggcccucacua

SEQ ID NO: 1232065 - RNA, 19 nt, Artificial Sequence
  Description of Artificial Sequence: Synthetic oligonucleotide
guggaugcacacacgcuuc

SEQ ID NO: 1232066 - RNA, 19 nt, Artificial Sequence
  Description of Artificial Sequence: Synthetic oligonucleotide
ugcacgccaauagcccagc

SEQ ID NO: 1232067 - RNA, 19 nt, Artificial Sequence
  Description of Artificial Sequence: Synthetic oligonucleotide
gcuguaaauagaggcugug

SEQ ID NO: 1232068 - RNA, 19 nt, Artificial Sequence
  Description of Artificial Sequence: Synthetic oligonucleotide
ccagguagcuguaaauaga

SEQ ID NO: 1232069 - RNA, 19 nt, Artificial Sequence
  Description of Artificial Sequence: Synthetic oligonucleotide
cccucggaucuccugagcc

SEQ ID NO: 1232070 - RNA, 19 nt, Artificial Sequence
  Description of Artificial Sequence: Synthetic oligonucleotide
guggcuacgaggcuagcau

SEQ ID NO: 1232071 - RNA, 19 nt, Artificial Sequence
  Description of Artificial Sequence: Synthetic oligonucleotide
ugguuaccugguagagguc

SEQ ID NO: 1232072 - RNA, 19 nt, Artificial Sequence
  Description of Artificial Sequence: Synthetic oligonucleotide
acccugagcucgccgcaag

SEQ ID NO: 1232073 - RNA, 19 nt, Artificial Sequence
  Description of Artificial Sequence: Synthetic oligonucleotide
ccgcuguccagccucacgc

SEQ ID NO: 1232074 - RNA, 19 nt, Artificial Sequence
  Description of Artificial Sequence: Synthetic oligonucleotide
caguccggcggccagggca

SEQ ID NO: 1232075 - RNA, 19 nt, Artificial Sequence
  Description of Artificial Sequence: Synthetic oligonucleotide
ugccucgcaugcccggccu

SEQ ID NO: 1232076 - RNA, 19 nt, Artificial Sequence
  Description of Artificial Sequence: Synthetic oligonucleotide
aggaucgcaggaagcauau

SEQ ID NO: 1232077 - RNA, 19 nt, Artificial Sequence
  Description of Artificial Sequence: Synthetic oligonucleotide
gcagacggaaggaucgcag

SEQ ID NO: 1232078 - RNA, 19 nt, Artificial Sequence
  Description of Artificial Sequence: Synthetic oligonucleotide
gcaauggcacgccagggaa

SEQ ID NO: 1232079 - RNA, 19 nt, Artificial Sequence
  Description of Artificial Sequence: Synthetic oligonucleotide
cauucgagguuggccuccc

SEQ ID NO: 1232080 - RNA, 19 nt, Artificial Sequence
  Description of Artificial Sequence: Synthetic oligonucleotide
ugggccagucgugcuagcu

SEQ ID NO: 1232081 - RNA, 19 nt, Artificial Sequence
  Description of Artificial Sequence: Synthetic oligonucleotide
cacgccagggaaggcgagg

SEQ ID NO: 1232082 - RNA, 19 nt, Artificial Sequence
  Description of Artificial Sequence: Synthetic oligonucleotide
caaugccaaugauguucac

SEQ ID NO: 1232083 - RNA, 19 nt, Artificial Sequence
  Description of Artificial Sequence: Synthetic oligonucleotide
ggccugcacgccaauagcc

SEQ ID NO: 1232084 - RNA, 19 nt, Artificial Sequence
  Description of Artificial Sequence: Synthetic oligonucleotide
cuggcacgccucucaguug

SEQ ID NO: 1232085 - RNA, 19 nt, Artificial Sequence
  Description of Artificial Sequence: Synthetic oligonucleotide
cuacgaggcuagcauaacu

SEQ ID NO: 1232086 - RNA, 19 nt, Artificial Sequence
  Description of Artificial Sequence: Synthetic oligonucleotide
gcggaagaagagcucgaac

SEQ ID NO: 1232087 - RNA, 19 nt, Artificial Sequence
  Description of Artificial Sequence: Synthetic oligonucleotide
uugaggcggcucagagacu

SEQ ID NO: 1232088 - RNA, 19 nt, Artificial Sequence
  Description of Artificial Sequence: Synthetic oligonucleotide
ggcuagcauaacugaccag

SEQ ID NO: 1232089 - RNA, 19 nt, Artificial Sequence
  Description of Artificial Sequence: Synthetic oligonucleotide
cagucgugcuagcuccuuc

SEQ ID NO: 1232090 - RNA, 19 nt, Artificial Sequence
  Description of Artificial Sequence: Synthetic oligonucleotide
gguugaggcggcucagaga

SEQ ID NO: 1232091 - RNA, 19 nt, Artificial Sequence
  Description of Artificial Sequence: Synthetic oligonucleotide
ggccguaccaccgcgcgcc

SEQ ID NO: 1232092 - RNA, 19 nt, Artificial Sequence
  Description of Artificial Sequence: Synthetic oligonucleotide
aagacccaucagagccuag

SEQ ID NO: 1232093 - RNA, 19 nt, Artificial Sequence
  Description of Artificial Sequence: Synthetic oligonucleotide
gggaagaccacuccuucgu

SEQ ID NO: 1232094 - RNA, 19 nt, Artificial Sequence
  Description of Artificial Sequence: Synthetic oligonucleotide
gcuguugaacccgcccagg

SEQ ID NO: 1232095 - RNA, 19 nt, Artificial Sequence
  Description of Artificial Sequence: Synthetic oligonucleotide
cugcagacggaaggaucgc

SEQ ID NO: 1232096 - RNA, 19 nt, Artificial Sequence
  Description of Artificial Sequence: Synthetic oligonucleotide
ccucacuaccggaaaagga

SEQ ID NO: 1232097 - RNA, 19 nt, Artificial Sequence
  Description of Artificial Sequence: Synthetic oligonucleotide
gagauggaaguggcucaca

SEQ ID NO: 1232098 - RNA, 19 nt, Artificial Sequence
  Description of Artificial Sequence: Synthetic oligonucleotide
cgaggcuagcauaacugac

SEQ ID NO: 1232099 - RNA, 19 nt, Artificial Sequence
  Description of Artificial Sequence: Synthetic oligonucleotide
gucgugcuagcuccuucuc

SEQ ID NO: 1232100 - RNA, 19 nt, Artificial Sequence
  Description of Artificial Sequence: Synthetic oligonucleotide
cacuaccggaaaaggaagu

SEQ ID NO: 1232101 - RNA, 19 nt, Artificial Sequence
  Description of Artificial Sequence: Synthetic oligonucleotide
cugccucgcaugcccggcc

SEQ ID NO: 1232102 - RNA, 19 nt, Artificial Sequence
  Description of Artificial Sequence: Synthetic oligonucleotide
cagucaagggcccgaaggu

SEQ ID NO: 1232103 - RNA, 19 nt, Artificial Sequence
  Description of Artificial Sequence: Synthetic oligonucleotide
gaguuccugcccagccuug

SEQ ID NO: 1232104 - RNA, 19 nt, Artificial Sequence
  Description of Artificial Sequence: Synthetic oligonucleotide
agcugcuuaugagcagggu

SEQ ID NO: 1232105 - RNA, 19 nt, Artificial Sequence
  Description of Artificial Sequence: Synthetic oligonucleotide
cacuagaagcuggagccaa

SEQ ID NO: 1232106 - RNA, 19 nt, Artificial Sequence
  Description of Artificial Sequence: Synthetic oligonucleotide
ccggccugcacgccaauag

SEQ ID NO: 1232107 - RNA, 19 nt, Artificial Sequence
  Description of Artificial Sequence: Synthetic oligonucleotide
gaacucugcugccucgcau

SEQ ID NO: 1232108 - RNA, 19 nt, Artificial Sequence
  Description of Artificial Sequence: Synthetic oligonucleotide
ggaugcacacacgcuucag

SEQ ID NO: 1232109 - RNA, 19 nt, Artificial Sequence
  Description of Artificial Sequence: Synthetic oligonucleotide
gaaggaucgcaggaagcau

SEQ ID NO: 1232110 - RNA, 19 nt, Artificial Sequence
  Description of Artificial Sequence: Synthetic oligonucleotide
acggacagcggcggaagaa

SEQ ID NO: 1232111 - RNA, 19 nt, Artificial Sequence
  Description of Artificial Sequence: Synthetic oligonucleotide
cgcaccgucaccccagagc

SEQ ID NO: 1232112 - RNA, 19 nt, Artificial Sequence
  Description of Artificial Sequence: Synthetic oligonucleotide
gcauaacugaccagacaca

SEQ ID NO: 1232113 - RNA, 19 nt, Artificial Sequence
  Description of Artificial Sequence: Synthetic oligonucleotide
caaacggacagcggcggaa

SEQ ID NO: 1232114 - RNA, 19 nt, Artificial Sequence
  Description of Artificial Sequence: Synthetic oligonucleotide
ggcccuguugcaggcagag

SEQ ID NO: 1232115 - RNA, 19 nt, Artificial Sequence
  Description of Artificial Sequence: Synthetic oligonucleotide
gccugcacgccaauagccc

SEQ ID NO: 1232116 - RNA, 19 nt, Artificial Sequence
  Description of Artificial Sequence: Synthetic oligonucleotide
cugacagcgcaaccggaua

SEQ ID NO: 1232117 - RNA, 19 nt, Artificial Sequence
  Description of Artificial Sequence: Synthetic oligonucleotide
caccgucaccccagagcag

SEQ ID NO: 1232118 - RNA, 19 nt, Artificial Sequence
  Description of Artificial Sequence: Synthetic oligonucleotide
gcagcauugguggcuacga

SEQ ID NO: 1232119 - RNA, 19 nt, Artificial Sequence
  Description of Artificial Sequence: Synthetic oligonucleotide
gcaaugggaacagauucua

SEQ ID NO: 1232120 - RNA, 19 nt, Artificial Sequence
  Description of Artificial Sequence: Synthetic oligonucleotide
gcugcuuaugagcaggguu

SEQ ID NO: 1232121 - RNA, 19 nt, Artificial Sequence
  Description of Artificial Sequence: Synthetic oligonucleotide
cagugagcaguggccguac

SEQ ID NO: 1232122 - RNA, 19 nt, Artificial Sequence
  Description of Artificial Sequence: Synthetic oligonucleotide
ccuucguacacuguaggaa

SEQ ID NO: 1232123 - RNA, 19 nt, Artificial Sequence
  Description of Artificial Sequence: Synthetic oligonucleotide
gcgaagccgagcagcauug

SEQ ID NO: 1232124 - RNA, 19 nt, Artificial Sequence
  Description of Artificial Sequence: Synthetic oligonucleotide
caucucuaguagucucuua

SEQ ID NO: 1232125 - RNA, 19 nt, Artificial Sequence
  Description of Artificial Sequence: Synthetic oligonucleotide
gaaggcgagggaacccucu

SEQ ID NO: 1232126 - RNA, 19 nt, Artificial Sequence
  Description of Artificial Sequence: Synthetic oligonucleotide
gcuggagccaacaucgggu

SEQ ID NO: 1232127 - RNA, 19 nt, Artificial Sequence
  Description of Artificial Sequence: Synthetic oligonucleotide
ggcuacgaggcuagcauaa

SEQ ID NO: 1232128 - RNA, 19 nt, Artificial Sequence
  Description of Artificial Sequence: Synthetic oligonucleotide
cuguugaacccgcccaggu

SEQ ID NO: 1232129 - RNA, 19 nt, Artificial Sequence
  Description of Artificial Sequence: Synthetic oligonucleotide
gcuuaugagcaggguugag

SEQ ID NO: 1232130 - RNA, 19 nt, Artificial Sequence
  Description of Artificial Sequence: Synthetic oligonucleotide
uccggcggccagggcaaag

SEQ ID NO: 1232131 - RNA, 19 nt, Artificial Sequence
  Description of Artificial Sequence: Synthetic oligonucleotide
guccaguaggaaagaccca

SEQ ID NO: 1232132 - RNA, 19 nt, Artificial Sequence
  Description of Artificial Sequence: Synthetic oligonucleotide
gcacgccaauagcccagcg

SEQ ID NO: 1232133 - RNA, 19 nt, Artificial Sequence
  Description of Artificial Sequence: Synthetic oligonucleotide
aguccggcggccagggcaa

SEQ ID NO: 1232134 - RNA, 19 nt, Artificial Sequence
  Description of Artificial Sequence: Synthetic oligonucleotide
ccugcacgccaauagccca

SEQ ID NO: 1232135 - RNA, 19 nt, Artificial Sequence
  Description of Artificial Sequence: Synthetic oligonucleotide
ggaagaccacuccuucgua

SEQ ID NO: 1232136 - RNA, 19 nt, Artificial Sequence
  Description of Artificial Sequence: Synthetic oligonucleotide
cacacacgcuucagccaca

SEQ ID NO: 1232137 - RNA, 19 nt, Artificial Sequence
  Description of Artificial Sequence: Synthetic oligonucleotide
gcuacgaggcuagcauaac

SEQ ID NO: 1232138 - RNA, 19 nt, Artificial Sequence
  Description of Artificial Sequence: Synthetic oligonucleotide
cgcaugcccggccugcacg

SEQ ID NO: 1232139 - RNA, 19 nt, Artificial Sequence
  Description of Artificial Sequence: Synthetic oligonucleotide
ccgguccugcaaucaggcg

SEQ ID NO: 1232140 - RNA, 19 nt, Artificial Sequence
  Description of Artificial Sequence: Synthetic oligonucleotide
ggauacacuguagggcucu

SEQ ID NO: 1232141 - RNA, 19 nt, Artificial Sequence
  Description of Artificial Sequence: Synthetic oligonucleotide
gcgucccugccacuggcac

SEQ ID NO: 1232142 - RNA, 19 nt, Artificial Sequence
  Description of Artificial Sequence: Synthetic oligonucleotide
caugcccggccugcacgcc

SEQ ID NO: 1232143 - RNA, 19 nt, Artificial Sequence
  Description of Artificial Sequence: Synthetic oligonucleotide
agggcccgaaggugcucga

SEQ ID NO: 1232144 - RNA, 19 nt, Artificial Sequence
  Description of Artificial Sequence: Synthetic oligonucleotide
gcaccucacuaccggaaaa

SEQ ID NO: 1232145 - RNA, 19 nt, Artificial Sequence
  Description of Artificial Sequence: Synthetic oligonucleotide
gagcagucaagggcccgaa

SEQ ID NO: 1232146 - RNA, 19 nt, Artificial Sequence
  Description of Artificial Sequence: Synthetic oligonucleotide
gcccagguagcuguaaaua

SEQ ID NO: 1232147 - RNA, 19 nt, Artificial Sequence
  Description of Artificial Sequence: Synthetic oligonucleotide
gcgagggaacccucuggca

SEQ ID NO: 1232148 - RNA, 19 nt, Artificial Sequence
  Description of Artificial Sequence: Synthetic oligonucleotide
gaucaccgcuguccagccu

SEQ ID NO: 1232149 - RNA, 19 nt, Artificial Sequence
  Description of Artificial Sequence: Synthetic oligonucleotide
ggcacgccagggaaggcga

SEQ ID NO: 1232150 - RNA, 19 nt, Artificial Sequence
  Description of Artificial Sequence: Synthetic oligonucleotide
gacccugagcucgccgcaa

SEQ ID NO: 1232151 - RNA, 19 nt, Artificial Sequence
  Description of Artificial Sequence: Synthetic oligonucleotide
ggcgaagccgagcagcauu

SEQ ID NO: 1232152 - RNA, 19 nt, Artificial Sequence
  Description of Artificial Sequence: Synthetic oligonucleotide
ggcuacaaaugcugcccgu

SEQ ID NO: 1232153 - RNA, 19 nt, Artificial Sequence
  Description of Artificial Sequence: Synthetic oligonucleotide
guccugcaaucaggcgaag

SEQ ID NO: 1232154 - RNA, 19 nt, Artificial Sequence
  Description of Artificial Sequence: Synthetic oligonucleotide
caccgcgcgccccucgcca

SEQ ID NO: 1232155 - RNA, 19 nt, Artificial Sequence
  Description of Artificial Sequence: Synthetic oligonucleotide
gcugccucgcaugcccggc

SEQ ID NO: 1232156 - RNA, 19 nt, Artificial Sequence
  Description of Artificial Sequence: Synthetic oligonucleotide
accgcgcgccccucgccau

SEQ ID NO: 1232157 - RNA, 19 nt, Artificial Sequence
  Description of Artificial Sequence: Synthetic oligonucleotide
cagugcccgaagcuucucu

SEQ ID NO: 1232158 - RNA, 19 nt, Artificial Sequence
  Description of Artificial Sequence: Synthetic oligonucleotide
cagcgcaaccggauacacu

SEQ ID NO: 1232159 - RNA, 19 nt, Artificial Sequence
  Description of Artificial Sequence: Synthetic oligonucleotide
ggggcccucacuagaagcu

SEQ ID NO: 1232160 - RNA, 19 nt, Artificial Sequence
  Description of Artificial Sequence: Synthetic oligonucleotide
gccucucaguuguccagaa

SEQ ID NO: 1232161 - RNA, 19 nt, Artificial Sequence
  Description of Artificial Sequence: Synthetic oligonucleotide
gggaaggcgagggaacccu

SEQ ID NO: 1232162 - RNA, 19 nt, Artificial Sequence
  Description of Artificial Sequence: Synthetic oligonucleotide
cccuguagcccagcucccc

SEQ ID NO: 1232163 - RNA, 19 nt, Artificial Sequence
  Description of Artificial Sequence: Synthetic oligonucleotide
ccucacgcccacugcccug

SEQ ID NO: 1232164 - RNA, 19 nt, Artificial Sequence
  Description of Artificial Sequence: Synthetic oligonucleotide
cugcguccugcagacggaa

SEQ ID NO: 1232165 - RNA, 19 nt, Artificial Sequence
  Description of Artificial Sequence: Synthetic oligonucleotide
cggauacacuguagggcuc

SEQ ID NO: 1232166 - RNA, 19 nt, Artificial Sequence
  Description of Artificial Sequence: Synthetic oligonucleotide
gguuggccucccacggaca

SEQ ID NO: 1232167 - RNA, 19 nt, Artificial Sequence
  Description of Artificial Sequence: Synthetic oligonucleotide
guccacucuggggcccuca

SEQ ID NO: 1232168 - RNA, 19 nt, Artificial Sequence
  Description of Artificial Sequence: Synthetic oligonucleotide
cucgcaugcccggccugca

SEQ ID NO: 1232169 - RNA, 19 nt, Artificial Sequence
  Description of Artificial Sequence: Synthetic oligonucleotide
cacuggcacgccucucagu

SEQ ID NO: 1232170 - RNA, 19 nt, Artificial Sequence
  Description of Artificial Sequence: Synthetic oligonucleotide
cgaagccgagcagcauugg

SEQ ID NO: 1232171 - RNA, 19 nt, Artificial Sequence
  Description of Artificial Sequence: Synthetic oligonucleotide
gccucgcaugcccggccug

SEQ ID NO: 1232172 - RNA, 19 nt, Artificial Sequence
  Description of Artificial Sequence: Synthetic oligonucleotide
cacacgcuucagccacaaa

SEQ ID NO: 1232173 - RNA, 19 nt, Artificial Sequence
  Description of Artificial Sequence: Synthetic oligonucleotide
cugccacuggcacgccucu

SEQ ID NO: 1232174 - RNA, 19 nt, Artificial Sequence
  Description of Artificial Sequence: Synthetic oligonucleotide
caccgcuguccagccucac

SEQ ID NO: 1232175 - RNA, 19 nt, Artificial Sequence
  Description of Artificial Sequence: Synthetic oligonucleotide
gcccguuccccuggaugug

SEQ ID NO: 1232176 - RNA, 19 nt, Artificial Sequence
  Description of Artificial Sequence: Synthetic oligonucleotide
gccguaccaccgcgcgccc

SEQ ID NO: 1232177 - RNA, 19 nt, Artificial Sequence
  Description of Artificial Sequence: Synthetic oligonucleotide
gcucgccgcaagcccaucu

SEQ ID NO: 1232178 - RNA, 19 nt, Artificial Sequence
  Description of Artificial Sequence: Synthetic oligonucleotide
gcuuguagacacagcccau

SEQ ID NO: 1232179 - RNA, 19 nt, Artificial Sequence
  Description of Artificial Sequence: Synthetic oligonucleotide
ggaucgcaggaagcauaua

SEQ ID NO: 1232180 - RNA, 19 nt, Artificial Sequence
  Description of Artificial Sequence: Synthetic oligonucleotide
ccgcaguccggcggccagg

SEQ ID NO: 1232181 - RNA, 19 nt, Artificial Sequence
  Description of Artificial Sequence: Synthetic oligonucleotide
ccgcaccgucaccccagag

SEQ ID NO: 1232182 - RNA, 19 nt, Artificial Sequence
  Description of Artificial Sequence: Synthetic oligonucleotide
ccgaaggugcucgaagaau

SEQ ID NO: 1232183 - RNA, 19 nt, Artificial Sequence
  Description of Artificial Sequence: Synthetic oligonucleotide
ccgcccagguagcuguaaa

SEQ ID NO: 1232184 - RNA, 19 nt, Artificial Sequence
  Description of Artificial Sequence: Synthetic oligonucleotide
ggcacgccucucaguuguc

SEQ ID NO: 1232185 - RNA, 19 nt, Artificial Sequence
  Description of Artificial Sequence: Synthetic oligonucleotide
ccguaccaccgcgcgcccc

SEQ ID NO: 1232186 - RNA, 19 nt, Artificial Sequence
  Description of Artificial Sequence: Synthetic oligonucleotide
ccgcaagcccaucucuagu

SEQ ID NO: 1232187 - RNA, 19 nt, Artificial Sequence
  Description of Artificial Sequence: Synthetic oligonucleotide
ggagugggccagcgucccu

SEQ ID NO: 1232188 - RNA, 19 nt, Artificial Sequence
  Description of Artificial Sequence: Synthetic oligonucleotide
cgcgccccucgccauccag

SEQ ID NO: 1232189 - RNA, 19 nt, Artificial Sequence
  Description of Artificial Sequence: Synthetic oligonucleotide
cgcgcgccccucgccaucc

SEQ ID NO: 1232190 - RNA, 19 nt, Artificial Sequence
  Description of Artificial Sequence: Synthetic oligonucleotide
cguaccaccgcgcgccccu

SEQ ID NO: 1232191 - RNA, 19 nt, Artificial Sequence
  Description of Artificial Sequence: Synthetic oligonucleotide
acccgcccagguagcugua

SEQ ID NO: 1232192 - RNA, 19 nt, Artificial Sequence
  Description of Artificial Sequence: Synthetic oligonucleotide
gcgcaaccggauacacugu

SEQ ID NO: 1232193 - RNA, 19 nt, Artificial Sequence
  Description of Artificial Sequence: Synthetic oligonucleotide
gcccagcgccaugguuacc

SEQ ID NO: 1232194 - RNA, 19 nt, Artificial Sequence
  Description of Artificial Sequence: Synthetic oligonucleotide
gccagucgugcuagcuccu

SEQ ID NO: 1232195 - RNA, 19 nt, Artificial Sequence
  Description of Artificial Sequence: Synthetic oligonucleotide
cccgcaccgucaccccaga

SEQ ID NO: 1232196 - RNA, 19 nt, Artificial Sequence
  Description of Artificial Sequence: Synthetic oligonucleotide
ccacggacaccagcuugua

SEQ ID NO: 1232197 - RNA, 19 nt, Artificial Sequence
  Description of Artificial Sequence: Synthetic oligonucleotide
cccggacaccugcagcaau

SEQ ID NO: 1232198 - RNA, 19 nt, Artificial Sequence
  Description of Artificial Sequence: Synthetic oligonucleotide
ccgcgcgccccucgccauc

SEQ ID NO: 1232199 - RNA, 19 nt, Artificial Sequence
  Description of Artificial Sequence: Synthetic oligonucleotide
guccggcggccagggcaaa

SEQ ID NO: 1232200 - RNA, 19 nt, Artificial Sequence
  Description of Artificial Sequence: Synthetic oligonucleotide
gcccuguugcaggcagagu

SEQ ID NO: 1232201 - RNA, 19 nt, Artificial Sequence
  Description of Artificial Sequence: Synthetic oligonucleotide
cccgcccagguagcuguaa

SEQ ID NO: 1232202 - RNA, 19 nt, Artificial Sequence
  Description of Artificial Sequence: Synthetic oligonucleotide
aauaucuugagaaugggac

SEQ ID NO: 1232203 - RNA, 19 nt, Artificial Sequence
  Description of Artificial Sequence: Synthetic oligonucleotide
agaguuuuaacuuuucuag

SEQ ID NO: 1232204 - RNA, 19 nt, Artificial Sequence
  Description of Artificial Sequence: Synthetic oligonucleotide
aaucauacaaccauggaag

SEQ ID NO: 1232205 - RNA, 19 nt, Artificial Sequence
  Description of Artificial Sequence: Synthetic oligonucleotide
uguaacuauuccuaguccg

SEQ ID NO: 1232206 - RNA, 19 nt, Artificial Sequence
  Description of Artificial Sequence: Synthetic oligonucleotide
agugugauuguucacaauc

SEQ ID NO: 1232207 - RNA, 19 nt, Artificial Sequence
  Description of Artificial Sequence: Synthetic oligonucleotide
aaguaauccacccaguacu

SEQ ID NO: 1232208 - RNA, 19 nt, Artificial Sequence
  Description of Artificial Sequence: Synthetic oligonucleotide
ucuguaaauacauuaauau

SEQ ID NO: 1232209 - RNA, 19 nt, Artificial Sequence
  Description of Artificial Sequence: Synthetic oligonucleotide
aaaucauacaaccauggaa

SEQ ID NO: 1232210 - RNA, 19 nt, Artificial Sequence
  Description of Artificial Sequence: Synthetic oligonucleotide
uguacgaagucauaguugc

SEQ ID NO: 1232211 - RNA, 19 nt, Artificial Sequence
  Description of Artificial Sequence: Synthetic oligonucleotide
uugugaaaaucauacaacc

SEQ ID NO: 1232212 - RNA, 19 nt, Artificial Sequence
  Description of Artificial Sequence: Synthetic oligonucleotide
auauagaccacacuucguc

SEQ ID NO: 1232213 - RNA, 19 nt, Artificial Sequence
  Description of Artificial Sequence: Synthetic oligonucleotide
aacacucggacuuccacac

SEQ ID NO: 1232214 - RNA, 19 nt, Artificial Sequence
  Description of Artificial Sequence: Synthetic oligonucleotide
aacguaaguaaacuguugu

SEQ ID NO: 1232215 - RNA, 19 nt, Artificial Sequence
  Description of Artificial Sequence: Synthetic oligonucleotide
ucaccuuuggagaagagcu

SEQ ID NO: 1232216 - RNA, 19 nt, Artificial Sequence
  Description of Artificial Sequence: Synthetic oligonucleotide
uuaaauuauagguugggua

SEQ ID NO: 1232217 - RNA, 19 nt, Artificial Sequence
  Description of Artificial Sequence: Synthetic oligonucleotide
gaugacaucguaaauuugc

SEQ ID NO: 1232218 - RNA, 19 nt, Artificial Sequence
  Description of Artificial Sequence: Synthetic oligonucleotide
agagccuucaaacacucgg

SEQ ID NO: 1232219 - RNA, 19 nt, Artificial Sequence
  Description of Artificial Sequence: Synthetic oligonucleotide
uguggcacggaugacaucg

SEQ ID NO: 1232220 - RNA, 19 nt, Artificial Sequence
  Description of Artificial Sequence: Synthetic oligonucleotide
gauggaaacgaugacggcg

SEQ ID NO: 1232221 - RNA, 19 nt, Artificial Sequence
  Description of Artificial Sequence: Synthetic oligonucleotide
uuuuggagagccuucaaac

SEQ ID NO: 1232222 - RNA, 19 nt, Artificial Sequence
  Description of Artificial Sequence: Synthetic oligonucleotide
uguugaaauccaaagccug

SEQ ID NO: 1232223 - RNA, 19 nt, Artificial Sequence
  Description of Artificial Sequence: Synthetic oligonucleotide
ugauccagccauuugaugu

SEQ ID NO: 1232224 - RNA, 19 nt, Artificial Sequence
  Description of Artificial Sequence: Synthetic oligonucleotide
gauguaacuauuccuaguc

SEQ ID NO: 1232225 - RNA, 19 nt, Artificial Sequence
  Description of Artificial Sequence: Synthetic oligonucleotide
ucuguggacauucauugug

SEQ ID NO: 1232226 - RNA, 19 nt, Artificial Sequence
  Description of Artificial Sequence: Synthetic oligonucleotide
ugugaaaaucauacaacca

SEQ ID NO: 1232227 - RNA, 19 nt, Artificial Sequence
  Description of Artificial Sequence: Synthetic oligonucleotide
agaaguaucuuguggcacg

SEQ ID NO: 1232228 - RNA, 19 nt, Artificial Sequence
  Description of Artificial Sequence: Synthetic oligonucleotide
uaucuuguggcacggauga

SEQ ID NO: 1232229 - RNA, 19 nt, Artificial Sequence
  Description of Artificial Sequence: Synthetic oligonucleotide
uauagaccacacuucgucg

SEQ ID NO: 1232230 - RNA, 19 nt, Artificial Sequence
  Description of Artificial Sequence: Synthetic oligonucleotide
acgacgaccucauuguccc

SEQ ID NO: 1232231 - RNA, 19 nt, Artificial Sequence
  Description of Artificial Sequence: Synthetic oligonucleotide
uauuccucuuucuuagagg

SEQ ID NO: 1232232 - RNA, 19 nt, Artificial Sequence
  Description of Artificial Sequence: Synthetic oligonucleotide
auacaugaucccaucaucc

SEQ ID NO: 1232233 - RNA, 19 nt, Artificial Sequence
  Description of Artificial Sequence: Synthetic oligonucleotide
auguaacuauuccuagucc

SEQ ID NO: 1232234 - RNA, 19 nt, Artificial Sequence
  Description of Artificial Sequence: Synthetic oligonucleotide
aaaaucauacaaccaugga

SEQ ID NO: 1232235 - RNA, 19 nt, Artificial Sequence
  Description of Artificial Sequence: Synthetic oligonucleotide
aucauacaaccauggaagc

SEQ ID NO: 1232236 - RNA, 19 nt, Artificial Sequence
  Description of Artificial Sequence: Synthetic oligonucleotide
aauaccauuuuaaggaacu

SEQ ID NO: 1232237 - RNA, 19 nt, Artificial Sequence
  Description of Artificial Sequence: Synthetic oligonucleotide
uuaauauuccucuuucuua

SEQ ID NO: 1232238 - RNA, 19 nt, Artificial Sequence
  Description of Artificial Sequence: Synthetic oligonucleotide
ucuaauuaggauauucauu

SEQ ID NO: 1232239 - RNA, 19 nt, Artificial Sequence
  Description of Artificial Sequence: Synthetic oligonucleotide
gaugacggcguucagcucc

SEQ ID NO: 1232240 - RNA, 19 nt, Artificial Sequence
  Description of Artificial Sequence: Synthetic oligonucleotide
acuagccuguauucgaugg

SEQ ID NO: 1232241 - RNA, 19 nt, Artificial Sequence
  Description of Artificial Sequence: Synthetic oligonucleotide
ugucugaggaguuuacucc

SEQ ID NO: 1232242 - RNA, 19 nt, Artificial Sequence
  Description of Artificial Sequence: Synthetic oligonucleotide
aagaaguaucuuguggcac

SEQ ID NO: 1232243 - RNA, 19 nt, Artificial Sequence
  Description of Artificial Sequence: Synthetic oligonucleotide
ucgucgaaguugcucaucg

SEQ ID NO: 1232244 - RNA, 19 nt, Artificial Sequence
  Description of Artificial Sequence: Synthetic oligonucleotide
cauuugauguaacuauucc

SEQ ID NO: 1232245 - RNA, 19 nt, Artificial Sequence
  Description of Artificial Sequence: Synthetic oligonucleotide
agacaagacuguuucagag

SEQ ID NO: 1232246 - RNA, 19 nt, Artificial Sequence
  Description of Artificial Sequence: Synthetic oligonucleotide
accuuaucuacauagccug

SEQ ID NO: 1232247 - RNA, 19 nt, Artificial Sequence
  Description of Artificial Sequence: Synthetic oligonucleotide
uuugcauauauguaacaaa

SEQ ID NO: 1232248 - RNA, 19 nt, Artificial Sequence
  Description of Artificial Sequence: Synthetic oligonucleotide
auauuugcauauauguaac

SEQ ID NO: 1232249 - RNA, 19 nt, Artificial Sequence
  Description of Artificial Sequence: Synthetic oligonucleotide
agaggguguguugaaaucc

SEQ ID NO: 1232250 - RNA, 19 nt, Artificial Sequence
  Description of Artificial Sequence: Synthetic oligonucleotide
aguaaacuguuguccaagg

SEQ ID NO: 1232251 - RNA, 19 nt, Artificial Sequence
  Description of Artificial Sequence: Synthetic oligonucleotide
auauuccucuuucuuagag

SEQ ID NO: 1232252 - RNA, 19 nt, Artificial Sequence
  Description of Artificial Sequence: Synthetic oligonucleotide
agagcuugcgcuuuucuug

SEQ ID NO: 1232253 - RNA, 19 nt, Artificial Sequence
  Description of Artificial Sequence: Synthetic oligonucleotide
aaagcgucgaccgccguac

SEQ ID NO: 1232254 - RNA, 19 nt, Artificial Sequence
  Description of Artificial Sequence: Synthetic oligonucleotide
ggauauagaccacacuucg

SEQ ID NO: 1232255 - RNA, 19 nt, Artificial Sequence
  Description of Artificial Sequence: Synthetic oligonucleotide
aaacacucggacuuccaca

SEQ ID NO: 1232256 - RNA, 19 nt, Artificial Sequence
  Description of Artificial Sequence: Synthetic oligonucleotide
agugucagucaccuucacc

SEQ ID NO: 1232257 - RNA, 19 nt, Artificial Sequence
  Description of Artificial Sequence: Synthetic oligonucleotide
uauagguuggguaucucuc

SEQ ID NO: 1232258 - RNA, 19 nt, Artificial Sequence
  Description of Artificial Sequence: Synthetic oligonucleotide
ugagcggggaagaagcugc

SEQ ID NO: 1232259 - RNA, 19 nt, Artificial Sequence
  Description of Artificial Sequence: Synthetic oligonucleotide
uuuaaauuauagguugggu

SEQ ID NO: 1232260 - RNA, 19 nt, Artificial Sequence
  Description of Artificial Sequence: Synthetic oligonucleotide
acaucguaaauuugcucgg

SEQ ID NO: 1232261 - RNA, 19 nt, Artificial Sequence
  Description of Artificial Sequence: Synthetic oligonucleotide
cacacuucgucgaaguugc

SEQ ID NO: 1232262 - RNA, 19 nt, Artificial Sequence
  Description of Artificial Sequence: Synthetic oligonucleotide
aguaggacgcacgacgacc

SEQ ID NO: 1232263 - RNA, 19 nt, Artificial Sequence
  Description of Artificial Sequence: Synthetic oligonucleotide
uucaccaugacguggcgug

SEQ ID NO: 1232264 - RNA, 19 nt, Artificial Sequence
  Description of Artificial Sequence: Synthetic oligonucleotide
gaaguaauccacccaguac

SEQ ID NO: 1232265 - RNA, 19 nt, Artificial Sequence
  Description of Artificial Sequence: Synthetic oligonucleotide
uuuacuccaucacagguuu

SEQ ID NO: 1232266 - RNA, 19 nt, Artificial Sequence
  Description of Artificial Sequence: Synthetic oligonucleotide
aguuuacuccaucacaggu

SEQ ID NO: 1232267 - RNA, 19 nt, Artificial Sequence
  Description of Artificial Sequence: Synthetic oligonucleotide
aaacuguuguccaagggca

SEQ ID NO: 1232268 - RNA, 19 nt, Artificial Sequence
  Description of Artificial Sequence: Synthetic oligonucleotide
uuuggagagccuucaaaca

SEQ ID NO: 1232269 - RNA, 19 nt, Artificial Sequence
  Description of Artificial Sequence: Synthetic oligonucleotide
uuauagguuggguaucucu

SEQ ID NO: 1232270 - RNA, 19 nt, Artificial Sequence
  Description of Artificial Sequence: Synthetic oligonucleotide
acuucgucgaaguugcuca

SEQ ID NO: 1232271 - RNA, 19 nt, Artificial Sequence
  Description of Artificial Sequence: Synthetic oligonucleotide
ugcucaucggguuuuggag

SEQ ID NO: 1232272 - RNA, 19 nt, Artificial Sequence
  Description of Artificial Sequence: Synthetic oligonucleotide
uaucucucaucugaaaagc

SEQ ID NO: 1232273 - RNA, 19 nt, Artificial Sequence
  Description of Artificial Sequence: Synthetic oligonucleotide
ucugaaaagcuggagacaa

SEQ ID NO: 1232274 - RNA, 19 nt, Artificial Sequence
  Description of Artificial Sequence: Synthetic oligonucleotide
ugcaugacaggcuuguagu

SEQ ID NO: 1232275 - RNA, 19 nt, Artificial Sequence
  Description of Artificial Sequence: Synthetic oligonucleotide
uacggugcgaugcuacccg

SEQ ID NO: 1232276 - RNA, 19 nt, Artificial Sequence
  Description of Artificial Sequence: Synthetic oligonucleotide
uacuucaccaugacguggc

SEQ ID NO: 1232277 - RNA, 19 nt, Artificial Sequence
  Description of Artificial Sequence: Synthetic oligonucleotide
uuucggaagguccugcaac

SEQ ID NO: 1232278 - RNA, 19 nt, Artificial Sequence
  Description of Artificial Sequence: Synthetic oligonucleotide
aaauuugcucgggaaagug

SEQ ID NO: 1232279 - RNA, 19 nt, Artificial Sequence
  Description of Artificial Sequence: Synthetic oligonucleotide
uccuccguggauauagacc

SEQ ID NO: 1232280 - RNA, 19 nt, Artificial Sequence
  Description of Artificial Sequence: Synthetic oligonucleotide
uacaccuuaucuacauagc

SEQ ID NO: 1232281 - RNA, 19 nt, Artificial Sequence
  Description of Artificial Sequence: Synthetic oligonucleotide
uuucuuagagguaggcagu

SEQ ID NO: 1232282 - RNA, 19 nt, Artificial Sequence
  Description of Artificial Sequence: Synthetic oligonucleotide
gaguuuacuccaucacagg

SEQ ID NO: 1232283 - RNA, 19 nt, Artificial Sequence
  Description of Artificial Sequence: Synthetic oligonucleotide
ugaggguaacuacacacaa

SEQ ID NO: 1232284 - RNA, 19 nt, Artificial Sequence
  Description of Artificial Sequence: Synthetic oligonucleotide
uggacauucauugugugau

SEQ ID NO: 1232285 - RNA, 19 nt, Artificial Sequence
  Description of Artificial Sequence: Synthetic oligonucleotide
guugaaauccaaagccugg

SEQ ID NO: 1232286 - RNA, 19 nt, Artificial Sequence
  Description of Artificial Sequence: Synthetic oligonucleotide
gaccuguggaacuagccug

SEQ ID NO: 1232287 - RNA, 19 nt, Artificial Sequence
  Description of Artificial Sequence: Synthetic oligonucleotide
guaacuauuccuaguccgg

SEQ ID NO: 1232288 - RNA, 19 nt, Artificial Sequence
  Description of Artificial Sequence: Synthetic oligonucleotide
ugcauauauguaacaaaau

SEQ ID NO: 1232289 - RNA, 19 nt, Artificial Sequence
  Description of Artificial Sequence: Synthetic oligonucleotide
acauucauugugugauuuc

SEQ ID NO: 1232290 - RNA, 19 nt, Artificial Sequence
  Description of Artificial Sequence: Synthetic oligonucleotide
aauauuccucuuucuuaga

SEQ ID NO: 1232291 - RNA, 19 nt, Artificial Sequence
  Description of Artificial Sequence: Synthetic oligonucleotide
ucugcgaugagcggggaag

SEQ ID NO: 1232292 - RNA, 19 nt, Artificial Sequence
  Description of Artificial Sequence: Synthetic oligonucleotide
cacagcucgucauaguagc

SEQ ID NO: 1232293 - RNA, 19 nt, Artificial Sequence
  Description of Artificial Sequence: Synthetic oligonucleotide
ugauguaacuauuccuagu

SEQ ID NO: 1232294 - RNA, 19 nt, Artificial Sequence
  Description of Artificial Sequence: Synthetic oligonucleotide
agccauuugauguaacuau

SEQ ID NO: 1232295 - RNA, 19 nt, Artificial Sequence
  Description of Artificial Sequence: Synthetic oligonucleotide
uucacguucugcugguaag

SEQ ID NO: 1232296 - RNA, 19 nt, Artificial Sequence
  Description of Artificial Sequence: Synthetic oligonucleotide
ucgaaguugcucaucgggu

SEQ ID NO: 1232297 - RNA, 19 nt, Artificial Sequence
  Description of Artificial Sequence: Synthetic oligonucleotide
uaagaggguguguugaaau

SEQ ID NO: 1232298 - RNA, 19 nt, Artificial Sequence
  Description of Artificial Sequence: Synthetic oligonucleotide
agagaugagcauguguguc

SEQ ID NO: 1232299 - RNA, 19 nt, Artificial Sequence
  Description of Artificial Sequence: Synthetic oligonucleotide
agggaagugugauuguuca

SEQ ID NO: 1232300 - RNA, 19 nt, Artificial Sequence
  Description of Artificial Sequence: Synthetic oligonucleotide
uggcuuauauaguuugaga

SEQ ID NO: 1232301 - RNA, 19 nt, Artificial Sequence
  Description of Artificial Sequence: Synthetic oligonucleotide
gaaacgaugacggcguuca

SEQ ID NO: 1232302 - RNA, 19 nt, Artificial Sequence
  Description of Artificial Sequence: Synthetic oligonucleotide
aagggaagugugauuguuc

SEQ ID NO: 1232303 - RNA, 19 nt, Artificial Sequence
  Description of Artificial Sequence: Synthetic oligonucleotide
uagguuuucggaagguccu

SEQ ID NO: 1232304 - RNA, 19 nt, Artificial Sequence
  Description of Artificial Sequence: Synthetic oligonucleotide
gaguuuuaacuuuucuaga

SEQ ID NO: 1232305 - RNA, 19 nt, Artificial Sequence
  Description of Artificial Sequence: Synthetic oligonucleotide
cacaaucauggccuguacg

SEQ ID NO: 1232306 - RNA, 19 nt, Artificial Sequence
  Description of Artificial Sequence: Synthetic oligonucleotide
aguacuucaccaugacgug

SEQ ID NO: 1232307 - RNA, 19 nt, Artificial Sequence
  Description of Artificial Sequence: Synthetic oligonucleotide
guagauuaaagccugcagu

SEQ ID NO: 1232308 - RNA, 19 nt, Artificial Sequence
  Description of Artificial Sequence: Synthetic oligonucleotide
uuucaggcuggcaacguaa

SEQ ID NO: 1232309 - RNA, 19 nt, Artificial Sequence
  Description of Artificial Sequence: Synthetic oligonucleotide
aacuagccuguauucgaug

SEQ ID NO: 1232310 - RNA, 19 nt, Artificial Sequence
  Description of Artificial Sequence: Synthetic oligonucleotide
gguagauuaaagccugcag

SEQ ID NO: 1232311 - RNA, 19 nt, Artificial Sequence
  Description of Artificial Sequence: Synthetic oligonucleotide
uguccaguugagacgggcc

SEQ ID NO: 1232312 - RNA, 19 nt, Artificial Sequence
  Description of Artificial Sequence: Synthetic oligonucleotide
guaacuacacacaacaagu

SEQ ID NO: 1232313 - RNA, 19 nt, Artificial Sequence
  Description of Artificial Sequence: Synthetic oligonucleotide
ccaucacagguuuugaucc

SEQ ID NO: 1232314 - RNA, 19 nt, Artificial Sequence
  Description of Artificial Sequence: Synthetic oligonucleotide
caguacuucaccaugacgu

SEQ ID NO: 1232315 - RNA, 19 nt, Artificial Sequence
  Description of Artificial Sequence: Synthetic oligonucleotide
ugcaacacuuccucgucug

SEQ ID NO: 1232316 - RNA, 19 nt, Artificial Sequence
  Description of Artificial Sequence: Synthetic oligonucleotide
ucuuucuuagagguaggca

SEQ ID NO: 1232317 - RNA, 19 nt, Artificial Sequence
  Description of Artificial Sequence: Synthetic oligonucleotide
gaaaguggaccuguggaac

SEQ ID NO: 1232318 - RNA, 19 nt, Artificial Sequence
  Description of Artificial Sequence: Synthetic oligonucleotide
cauacaaccauggaagcca

SEQ ID NO: 1232319 - RNA, 19 nt, Artificial Sequence
  Description of Artificial Sequence: Synthetic oligonucleotide
gaaguaucuuguggcacgg

SEQ ID NO: 1232320 - RNA, 19 nt, Artificial Sequence
  Description of Artificial Sequence: Synthetic oligonucleotide
gugaaaaucauacaaccau

SEQ ID NO: 1232321 - RNA, 19 nt, Artificial Sequence
  Description of Artificial Sequence: Synthetic oligonucleotide
ucguaaauuugcucgggaa

SEQ ID NO: 1232322 - RNA, 19 nt, Artificial Sequence
  Description of Artificial Sequence: Synthetic oligonucleotide
agucuaauuaggauauuca

SEQ ID NO: 1232323 - RNA, 19 nt, Artificial Sequence
  Description of Artificial Sequence: Synthetic oligonucleotide
uggaccuguggaacuagcc

SEQ ID NO: 1232324 - RNA, 19 nt, Artificial Sequence
  Description of Artificial Sequence: Synthetic oligonucleotide
cacagguuuugauccagcc

SEQ ID NO: 1232325 - RNA, 19 nt, Artificial Sequence
  Description of Artificial Sequence: Synthetic oligonucleotide
caugacguggcguggcagg

SEQ ID NO: 1232326 - RNA, 19 nt, Artificial Sequence
  Description of Artificial Sequence: Synthetic oligonucleotide
cucaucggguuuuggagag

SEQ ID NO: 1232327 - RNA, 19 nt, Artificial Sequence
  Description of Artificial Sequence: Synthetic oligonucleotide
aguaucuuguggcacggau

SEQ ID NO: 1232328 - RNA, 19 nt, Artificial Sequence
  Description of Artificial Sequence: Synthetic oligonucleotide
gccaguaggacgcacgacg

SEQ ID NO: 1232329 - RNA, 19 nt, Artificial Sequence
  Description of Artificial Sequence: Synthetic oligonucleotide
aacuauuccuaguccggau

SEQ ID NO: 1232330 - RNA, 19 nt, Artificial Sequence
  Description of Artificial Sequence: Synthetic oligonucleotide
uaacuacacacaacaaguu

SEQ ID NO: 1232331 - RNA, 19 nt, Artificial Sequence
  Description of Artificial Sequence: Synthetic oligonucleotide
caaagucagugucagucac

SEQ ID NO: 1232332 - RNA, 19 nt, Artificial Sequence
  Description of Artificial Sequence: Synthetic oligonucleotide
auccuugagagcucuucag

SEQ ID NO: 1232333 - RNA, 19 nt, Artificial Sequence
  Description of Artificial Sequence: Synthetic oligonucleotide
cugcaugacaggcuuguag

SEQ ID NO: 1232334 - RNA, 19 nt, Artificial Sequence
  Description of Artificial Sequence: Synthetic oligonucleotide
cacgacgaccucauugucc

SEQ ID NO: 1232335 - RNA, 19 nt, Artificial Sequence
  Description of Artificial Sequence: Synthetic oligonucleotide
uggcaacguaaguaaacug

SEQ ID NO: 1232336 - RNA, 19 nt, Artificial Sequence
  Description of Artificial Sequence: Synthetic oligonucleotide
ggauguccaguugagacgg

SEQ ID NO: 1232337 - RNA, 19 nt, Artificial Sequence
  Description of Artificial Sequence: Synthetic oligonucleotide
uugaaguaauccacccagu

SEQ ID NO: 1232338 - RNA, 19 nt, Artificial Sequence
  Description of Artificial Sequence: Synthetic oligonucleotide
ucgaccgccguacggugcg

SEQ ID NO: 1232339 - RNA, 19 nt, Artificial Sequence
  Description of Artificial Sequence: Synthetic oligonucleotide
acuacacacaacaaguuua

SEQ ID NO: 1232340 - RNA, 19 nt, Artificial Sequence
  Description of Artificial Sequence: Synthetic oligonucleotide
ugggacccaagucuaauua

SEQ ID NO: 1232341 - RNA, 19 nt, Artificial Sequence
  Description of Artificial Sequence: Synthetic oligonucleotide
ggagacaagacuguuucag

SEQ ID NO: 1232342 - RNA, 19 nt, Artificial Sequence
  Description of Artificial Sequence: Synthetic oligonucleotide
uuaaagccugcaguuugag

SEQ ID NO: 1232343 - RNA, 19 nt, Artificial Sequence
  Description of Artificial Sequence: Synthetic oligonucleotide
ugguaagaggguguguuga

SEQ ID NO: 1232344 - RNA, 19 nt, Artificial Sequence
  Description of Artificial Sequence: Synthetic oligonucleotide
cuauuccuaguccggauuc

SEQ ID NO: 1232345 - RNA, 19 nt, Artificial Sequence
  Description of Artificial Sequence: Synthetic oligonucleotide
acguucugcugguaagagg

SEQ ID NO: 1232346 - RNA, 19 nt, Artificial Sequence
  Description of Artificial Sequence: Synthetic oligonucleotide
aagccauccucaaaguggu

SEQ ID NO: 1232347 - RNA, 19 nt, Artificial Sequence
  Description of Artificial Sequence: Synthetic oligonucleotide
guuuugauccagccauuug

SEQ ID NO: 1232348 - RNA, 19 nt, Artificial Sequence
  Description of Artificial Sequence: Synthetic oligonucleotide
ugacaucguaaauuugcuc

SEQ ID NO: 1232349 - RNA, 19 nt, Artificial Sequence
  Description of Artificial Sequence: Synthetic oligonucleotide
uuuucggaagguccugcaa

SEQ ID NO: 1232350 - RNA, 19 nt, Artificial Sequence
  Description of Artificial Sequence: Synthetic oligonucleotide
aucguaaauuugcucggga

SEQ ID NO: 1232351 - RNA, 19 nt, Artificial Sequence
  Description of Artificial Sequence: Synthetic oligonucleotide
cuguauucgauggaaacga

SEQ ID NO: 1232352 - RNA, 19 nt, Artificial Sequence
  Description of Artificial Sequence: Synthetic oligonucleotide
gagacaagacuguuucaga

SEQ ID NO: 1232353 - RNA, 19 nt, Artificial Sequence
  Description of Artificial Sequence: Synthetic oligonucleotide
uaacuauuccuaguccgga

SEQ ID NO: 1232354 - RNA, 19 nt, Artificial Sequence
  Description of Artificial Sequence: Synthetic oligonucleotide
cuugagaaugggacccaag

SEQ ID NO: 1232355 - RNA, 19 nt, Artificial Sequence
  Description of Artificial Sequence: Synthetic oligonucleotide
uggcguggcaggauuggag

SEQ ID NO: 1232356 - RNA, 19 nt, Artificial Sequence
  Description of Artificial Sequence: Synthetic oligonucleotide
uucaaacacucggacuucc

SEQ ID NO: 1232357 - RNA, 19 nt, Artificial Sequence
  Description of Artificial Sequence: Synthetic oligonucleotide
cucgucugcgaugagcggg

SEQ ID NO: 1232358 - RNA, 19 nt, Artificial Sequence
  Description of Artificial Sequence: Synthetic oligonucleotide
uauacaccuuaucuacaua

SEQ ID NO: 1232359 - RNA, 19 nt, Artificial Sequence
  Description of Artificial Sequence: Synthetic oligonucleotide
guuguccaagggcagcugc

SEQ ID NO: 1232360 - RNA, 19 nt, Artificial Sequence
  Description of Artificial Sequence: Synthetic oligonucleotide
uucuuagagguaggcagug

SEQ ID NO: 1232361 - RNA, 19 nt, Artificial Sequence
  Description of Artificial Sequence: Synthetic oligonucleotide
ugcucgggaaaguggaccu

SEQ ID NO: 1232362 - RNA, 19 nt, Artificial Sequence
  Description of Artificial Sequence: Synthetic oligonucleotide
accuuuggagaagagcuug

SEQ ID NO: 1232363 - RNA, 19 nt, Artificial Sequence
  Description of Artificial Sequence: Synthetic oligonucleotide
aucccgcaggacaucaugc

SEQ ID NO: 1232364 - RNA, 19 nt, Artificial Sequence
  Description of Artificial Sequence: Synthetic oligonucleotide
acuauuccuaguccggauu

SEQ ID NO: 1232365 - RNA, 19 nt, Artificial Sequence
  Description of Artificial Sequence: Synthetic oligonucleotide
caucggguuuuggagagcc

SEQ ID NO: 1232366 - RNA, 19 nt, Artificial Sequence
  Description of Artificial Sequence: Synthetic oligonucleotide
guccaguugagacgggccc

SEQ ID NO: 1232367 - RNA, 19 nt, Artificial Sequence
  Description of Artificial Sequence: Synthetic oligonucleotide
uguagguuuucggaagguc

SEQ ID NO: 1232368 - RNA, 19 nt, Artificial Sequence
  Description of Artificial Sequence: Synthetic oligonucleotide
aggacuggguagauuaaag

SEQ ID NO: 1232369 - RNA, 19 nt, Artificial Sequence
  Description of Artificial Sequence: Synthetic oligonucleotide
auacauuaauauuccucuu

SEQ ID NO: 1232370 - RNA, 19 nt, Artificial Sequence
  Description of Artificial Sequence: Synthetic oligonucleotide
uauuccuaguccggauucc

SEQ ID NO: 1232371 - RNA, 19 nt, Artificial Sequence
  Description of Artificial Sequence: Synthetic oligonucleotide
agguuggguaucucucauc

SEQ ID NO: 1232372 - RNA, 19 nt, Artificial Sequence
  Description of Artificial Sequence: Synthetic oligonucleotide
acggaugacaucguaaauu

SEQ ID NO: 1232373 - RNA, 19 nt, Artificial Sequence
  Description of Artificial Sequence: Synthetic oligonucleotide
acuuugggauauuugcaua

SEQ ID NO: 1232374 - RNA, 19 nt, Artificial Sequence
  Description of Artificial Sequence: Synthetic oligonucleotide
caucguaaauuugcucggg

SEQ ID NO: 1232375 - RNA, 19 nt, Artificial Sequence
  Description of Artificial Sequence: Synthetic oligonucleotide
ucuaagacuucuggcugca

SEQ ID NO: 1232376 - RNA, 19 nt, Artificial Sequence
  Description of Artificial Sequence: Synthetic oligonucleotide
uugcgcuuuucuugccgcg

SEQ ID NO: 1232377 - RNA, 19 nt, Artificial Sequence
  Description of Artificial Sequence: Synthetic oligonucleotide
auuauagguuggguaucuc

SEQ ID NO: 1232378 - RNA, 19 nt, Artificial Sequence
  Description of Artificial Sequence: Synthetic oligonucleotide
cagcacugucuccagaaac

SEQ ID NO: 1232379 - RNA, 19 nt, Artificial Sequence
  Description of Artificial Sequence: Synthetic oligonucleotide
acaucaagggaagugugau

SEQ ID NO: 1232380 - RNA, 19 nt, Artificial Sequence
  Description of Artificial Sequence: Synthetic oligonucleotide
guaucuuguggcacggaug

SEQ ID NO: 1232381 - RNA, 19 nt, Artificial Sequence
  Description of Artificial Sequence: Synthetic oligonucleotide
uggguaucucucaucugaa

SEQ ID NO: 1232382 - RNA, 19 nt, Artificial Sequence
  Description of Artificial Sequence: Synthetic oligonucleotide
aagugugauuguucacaau

SEQ ID NO: 1232383 - RNA, 19 nt, Artificial Sequence
  Description of Artificial Sequence: Synthetic oligonucleotide
acccaagucuaauuaggau

SEQ ID NO: 1232384 - RNA, 19 nt, Artificial Sequence
  Description of Artificial Sequence: Synthetic oligonucleotide
ccuguauucgauggaaacg

SEQ ID NO: 1232385 - RNA, 19 nt, Artificial Sequence
  Description of Artificial Sequence: Synthetic oligonucleotide
cucuuucuuagagguaggc

SEQ ID NO: 1232386 - RNA, 19 nt, Artificial Sequence
  Description of Artificial Sequence: Synthetic oligonucleotide
uccguggauauagaccaca

SEQ ID NO: 1232387 - RNA, 19 nt, Artificial Sequence
  Description of Artificial Sequence: Synthetic oligonucleotide
ggaacuagccuguauucga

SEQ ID NO: 1232388 - RNA, 19 nt, Artificial Sequence
  Description of Artificial Sequence: Synthetic oligonucleotide
uaaagcgucgaccgccgua

SEQ ID NO: 1232389 - RNA, 19 nt, Artificial Sequence
  Description of Artificial Sequence: Synthetic oligonucleotide
cugaggguaacuacacaca

SEQ ID NO: 1232390 - RNA, 19 nt, Artificial Sequence
  Description of Artificial Sequence: Synthetic oligonucleotide
acuucaccaugacguggcg

SEQ ID NO: 1232391 - RNA, 19 nt, Artificial Sequence
  Description of Artificial Sequence: Synthetic oligonucleotide
gacaagacuguuucagagu

SEQ ID NO: 1232392 - RNA, 19 nt, Artificial Sequence
  Description of Artificial Sequence: Synthetic oligonucleotide
aggcuggcaacguaaguaa

SEQ ID NO: 1232393 - RNA, 19 nt, Artificial Sequence
  Description of Artificial Sequence: Synthetic oligonucleotide
uagguuggguaucucucau

SEQ ID NO: 1232394 - RNA, 19 nt, Artificial Sequence
  Description of Artificial Sequence: Synthetic oligonucleotide
gggacccaagucuaauuag

SEQ ID NO: 1232395 - RNA, 19 nt, Artificial Sequence
  Description of Artificial Sequence: Synthetic oligonucleotide
agccugaggguaacuacac

SEQ ID NO: 1232396 - RNA, 19 nt, Artificial Sequence
  Description of Artificial Sequence: Synthetic oligonucleotide
ucuagacuuugggauauuu

SEQ ID NO: 1232397 - RNA, 19 nt, Artificial Sequence
  Description of Artificial Sequence: Synthetic oligonucleotide
gacccaagucuaauuagga

SEQ ID NO: 1232398 - RNA, 19 nt, Artificial Sequence
  Description of Artificial Sequence: Synthetic oligonucleotide
gauccagccauuugaugua

SEQ ID NO: 1232399 - RNA, 19 nt, Artificial Sequence
  Description of Artificial Sequence: Synthetic oligonucleotide
agcgucgaccgccguacgg

SEQ ID NO: 1232400 - RNA, 19 nt, Artificial Sequence
  Description of Artificial Sequence: Synthetic oligonucleotide
agcugccaaauucccacca

SEQ ID NO: 1232401 - RNA, 19 nt, Artificial Sequence
  Description of Artificial Sequence: Synthetic oligonucleotide
guggacauucauuguguga

SEQ ID NO: 1232402 - RNA, 19 nt, Artificial Sequence
  Description of Artificial Sequence: Synthetic oligonucleotide
aucugaaaagcuggagaca

SEQ ID NO: 1232403 - RNA, 19 nt, Artificial Sequence
  Description of Artificial Sequence: Synthetic oligonucleotide
cacccaguacuucaccaug

SEQ ID NO: 1232404 - RNA, 19 nt, Artificial Sequence
  Description of Artificial Sequence: Synthetic oligonucleotide
uuugggauauuugcauaua

SEQ ID NO: 1232405 - RNA, 19 nt, Artificial Sequence
  Description of Artificial Sequence: Synthetic oligonucleotide
gaggguaacuacacacaac

SEQ ID NO: 1232406 - RNA, 19 nt, Artificial Sequence
  Description of Artificial Sequence: Synthetic oligonucleotide
aaggucacguucacaccug

SEQ ID NO: 1232407 - RNA, 19 nt, Artificial Sequence
  Description of Artificial Sequence: Synthetic oligonucleotide
cuguggucugcaugacagg

SEQ ID NO: 1232408 - RNA, 19 nt, Artificial Sequence
  Description of Artificial Sequence: Synthetic oligonucleotide
cgaugagcggggaagaagc

SEQ ID NO: 1232409 - RNA, 19 nt, Artificial Sequence
  Description of Artificial Sequence: Synthetic oligonucleotide
ucccgcaggacaucaugcu

SEQ ID NO: 1232410 - RNA, 19 nt, Artificial Sequence
  Description of Artificial Sequence: Synthetic oligonucleotide
cuugccgcggccaguagga

SEQ ID NO: 1232411 - RNA, 19 nt, Artificial Sequence
  Description of Artificial Sequence: Synthetic oligonucleotide
gccuguauucgauggaaac

SEQ ID NO: 1232412 - RNA, 19 nt, Artificial Sequence
  Description of Artificial Sequence: Synthetic oligonucleotide
acagggauguccaguugag

SEQ ID NO: 1232413 - RNA, 19 nt, Artificial Sequence
  Description of Artificial Sequence: Synthetic oligonucleotide
aagcgucgaccgccguacg

SEQ ID NO: 1232414 - RNA, 19 nt, Artificial Sequence
  Description of Artificial Sequence: Synthetic oligonucleotide
uugaugugcacagcucguc

SEQ ID NO: 1232415 - RNA, 19 nt, Artificial Sequence
  Description of Artificial Sequence: Synthetic oligonucleotide
cuccuccguggauauagac

SEQ ID NO: 1232416 - RNA, 19 nt, Artificial Sequence
  Description of Artificial Sequence: Synthetic oligonucleotide
agcuccucggccauugaug

SEQ ID NO: 1232417 - RNA, 19 nt, Artificial Sequence
  Description of Artificial Sequence: Synthetic oligonucleotide
cgcuuggcauacaugaucc

SEQ ID NO: 1232418 - RNA, 19 nt, Artificial Sequence
  Description of Artificial Sequence: Synthetic oligonucleotide
caaggucacguucacaccu

SEQ ID NO: 1232419 - RNA, 19 nt, Artificial Sequence
  Description of Artificial Sequence: Synthetic oligonucleotide
ucggguuuuggagagccuu

SEQ ID NO: 1232420 - RNA, 19 nt, Artificial Sequence
  Description of Artificial Sequence: Synthetic oligonucleotide
cuuugggauauuugcauau

SEQ ID NO: 1232421 - RNA, 19 nt, Artificial Sequence
  Description of Artificial Sequence: Synthetic oligonucleotide
cacguucugcugguaagag

SEQ ID NO: 1232422 - RNA, 19 nt, Artificial Sequence
  Description of Artificial Sequence: Synthetic oligonucleotide
aucucucaucugaaaagcu

SEQ ID NO: 1232423 - RNA, 19 nt, Artificial Sequence
  Description of Artificial Sequence: Synthetic oligonucleotide
acgaccucauuguccccag

SEQ ID NO: 1232424 - RNA, 19 nt, Artificial Sequence
  Description of Artificial Sequence: Synthetic oligonucleotide
uacauagccugaggguaac

SEQ ID NO: 1232425 - RNA, 19 nt, Artificial Sequence
  Description of Artificial Sequence: Synthetic oligonucleotide
acggugcgaugcuacccgg

SEQ ID NO: 1232426 - RNA, 19 nt, Artificial Sequence
  Description of Artificial Sequence: Synthetic oligonucleotide
cagcucgucauaguagcug

SEQ ID NO: 1232427 - RNA, 19 nt, Artificial Sequence
  Description of Artificial Sequence: Synthetic oligonucleotide
uccaguugagacgggcccu

SEQ ID NO: 1232428 - RNA, 19 nt, Artificial Sequence
  Description of Artificial Sequence: Synthetic oligonucleotide
ggccuguacgaagucauag

SEQ ID NO: 1232429 - RNA, 19 nt, Artificial Sequence
  Description of Artificial Sequence: Synthetic oligonucleotide
aguggaccuguggaacuag

SEQ ID NO: 1232430 - RNA, 19 nt, Artificial Sequence
  Description of Artificial Sequence: Synthetic oligonucleotide
ccuaaagcgucgaccgccg

SEQ ID NO: 1232431 - RNA, 19 nt, Artificial Sequence
  Description of Artificial Sequence: Synthetic oligonucleotide
aaguugcucaucggguuuu

SEQ ID NO: 1232432 - RNA, 19 nt, Artificial Sequence
  Description of Artificial Sequence: Synthetic oligonucleotide
uguuguccaagggcagcug

SEQ ID NO: 1232433 - RNA, 19 nt, Artificial Sequence
  Description of Artificial Sequence: Synthetic oligonucleotide
ucauggccuguacgaaguc

SEQ ID NO: 1232434 - RNA, 19 nt, Artificial Sequence
  Description of Artificial Sequence: Synthetic oligonucleotide
guacggugcgaugcuaccc

SEQ ID NO: 1232435 - RNA, 19 nt, Artificial Sequence
  Description of Artificial Sequence: Synthetic oligonucleotide
cacagggauucccgugagg

SEQ ID NO: 1232436 - RNA, 19 nt, Artificial Sequence
  Description of Artificial Sequence: Synthetic oligonucleotide
uaguugccuuugaaguaau

SEQ ID NO: 1232437 - RNA, 19 nt, Artificial Sequence
  Description of Artificial Sequence: Synthetic oligonucleotide
aguugccuuugaaguaauc

SEQ ID NO: 1232438 - RNA, 19 nt, Artificial Sequence
  Description of Artificial Sequence: Synthetic oligonucleotide
gauauagaccacacuucgu

SEQ ID NO: 1232439 - RNA, 19 nt, Artificial Sequence
  Description of Artificial Sequence: Synthetic oligonucleotide
cacuucgucgaaguugcuc

SEQ ID NO: 1232440 - RNA, 19 nt, Artificial Sequence
  Description of Artificial Sequence: Synthetic oligonucleotide
ggauauuugcauauaugua

SEQ ID NO: 1232441 - RNA, 19 nt, Artificial Sequence
  Description of Artificial Sequence: Synthetic oligonucleotide
gcgucugccugucacacac

SEQ ID NO: 1232442 - RNA, 19 nt, Artificial Sequence
  Description of Artificial Sequence: Synthetic oligonucleotide
cagcugccaaauucccacc

SEQ ID NO: 1232443 - RNA, 19 nt, Artificial Sequence
  Description of Artificial Sequence: Synthetic oligonucleotide
ggcaacguaaguaaacugu

SEQ ID NO: 1232444 - RNA, 19 nt, Artificial Sequence
  Description of Artificial Sequence: Synthetic oligonucleotide
gaccacacuucgucgaagu

SEQ ID NO: 1232445 - RNA, 19 nt, Artificial Sequence
  Description of Artificial Sequence: Synthetic oligonucleotide
cuagccuguauucgaugga

SEQ ID NO: 1232446 - RNA, 19 nt, Artificial Sequence
  Description of Artificial Sequence: Synthetic oligonucleotide
aaguaucuuguggcacgga

SEQ ID NO: 1232447 - RNA, 19 nt, Artificial Sequence
  Description of Artificial Sequence: Synthetic oligonucleotide
gauguccaguugagacggg

SEQ ID NO: 1232448 - RNA, 19 nt, Artificial Sequence
  Description of Artificial Sequence: Synthetic oligonucleotide
guacgaagucauaguugcc

SEQ ID NO: 1232449 - RNA, 19 nt, Artificial Sequence
  Description of Artificial Sequence: Synthetic oligonucleotide
gcugccaaauucccaccag

SEQ ID NO: 1232450 - RNA, 19 nt, Artificial Sequence
  Description of Artificial Sequence: Synthetic oligonucleotide
gccaaauucccaccagcac

SEQ ID NO: 1232451 - RNA, 19 nt, Artificial Sequence
  Description of Artificial Sequence: Synthetic oligonucleotide
accaugacguggcguggca

SEQ ID NO: 1232452 - RNA, 19 nt, Artificial Sequence
  Description of Artificial Sequence: Synthetic oligonucleotide
uucuugccgcggccaguag

SEQ ID NO: 1232453 - RNA, 19 nt, Artificial Sequence
  Description of Artificial Sequence: Synthetic oligonucleotide
uacaaccauggaagccauc

SEQ ID NO: 1232454 - RNA, 19 nt, Artificial Sequence
  Description of Artificial Sequence: Synthetic oligonucleotide
ggcaggauuggaguguuca

SEQ ID NO: 1232455 - RNA, 19 nt, Artificial Sequence
  Description of Artificial Sequence: Synthetic oligonucleotide
gcacggaugacaucguaaa

SEQ ID NO: 1232456 - RNA, 19 nt, Artificial Sequence
  Description of Artificial Sequence: Synthetic oligonucleotide
gcuggcaacguaaguaaac

SEQ ID NO: 1232457 - RNA, 19 nt, Artificial Sequence
  Description of Artificial Sequence: Synthetic oligonucleotide
ccacacuucgucgaaguug

SEQ ID NO: 1232458 - RNA, 19 nt, Artificial Sequence
  Description of Artificial Sequence: Synthetic oligonucleotide
gguuuucggaagguccugc

SEQ ID NO: 1232459 - RNA, 19 nt, Artificial Sequence
  Description of Artificial Sequence: Synthetic oligonucleotide
guaagaggguguguugaaa

SEQ ID NO: 1232460 - RNA, 19 nt, Artificial Sequence
  Description of Artificial Sequence: Synthetic oligonucleotide
accuguggaacuagccugu

SEQ ID NO: 1232461 - RNA, 19 nt, Artificial Sequence
  Description of Artificial Sequence: Synthetic oligonucleotide
aguuggucggccagcuugu

SEQ ID NO: 1232462 - RNA, 19 nt, Artificial Sequence
  Description of Artificial Sequence: Synthetic oligonucleotide
caguaggacgcacgacgac

SEQ ID NO: 1232463 - RNA, 19 nt, Artificial Sequence
  Description of Artificial Sequence: Synthetic oligonucleotide
agugguccaaggucacguu

SEQ ID NO: 1232464 - RNA, 19 nt, Artificial Sequence
  Description of Artificial Sequence: Synthetic oligonucleotide
aggacgcacgacgaccuca

SEQ ID NO: 1232465 - RNA, 19 nt, Artificial Sequence
  Description of Artificial Sequence: Synthetic oligonucleotide
uucgucgaaguugcucauc

SEQ ID NO: 1232466 - RNA, 19 nt, Artificial Sequence
  Description of Artificial Sequence: Synthetic oligonucleotide
ggaugacaucguaaauuug

SEQ ID NO: 1232467 - RNA, 19 nt, Artificial Sequence
  Description of Artificial Sequence: Synthetic oligonucleotide
cuggcaacguaaguaaacu

SEQ ID NO: 1232468 - RNA, 19 nt, Artificial Sequence
  Description of Artificial Sequence: Synthetic oligonucleotide
gcuggcgucugccugucac

SEQ ID NO: 1232469 - RNA, 19 nt, Artificial Sequence
  Description of Artificial Sequence: Synthetic oligonucleotide
caccaugacguggcguggc

SEQ ID NO: 1232470 - RNA, 19 nt, Artificial Sequence
  Description of Artificial Sequence: Synthetic oligonucleotide
gccauugaugugcacagcu

SEQ ID NO: 1232471 - RNA, 19 nt, Artificial Sequence
  Description of Artificial Sequence: Synthetic oligonucleotide
cauagccugaggguaacua

SEQ ID NO: 1232472 - RNA, 19 nt, Artificial Sequence
  Description of Artificial Sequence: Synthetic oligonucleotide
accacacuucgucgaaguu

SEQ ID NO: 1232473 - RNA, 19 nt, Artificial Sequence
  Description of Artificial Sequence: Synthetic oligonucleotide
gucaagagcuuugcauguc

SEQ ID NO: 1232474 - RNA, 19 nt, Artificial Sequence
  Description of Artificial Sequence: Synthetic oligonucleotide
acguucacaccugcacucu

SEQ ID NO: 1232475 - RNA, 19 nt, Artificial Sequence
  Description of Artificial Sequence: Synthetic oligonucleotide
uggcaucaccuguggucug

SEQ ID NO: 1232476 - RNA, 19 nt, Artificial Sequence
  Description of Artificial Sequence: Synthetic oligonucleotide
gguaagaggguguguugaa

SEQ ID NO: 1232477 - RNA, 19 nt, Artificial Sequence
  Description of Artificial Sequence: Synthetic oligonucleotide
cagccauuugauguaacua

SEQ ID NO: 1232478 - RNA, 19 nt, Artificial Sequence
  Description of Artificial Sequence: Synthetic oligonucleotide
gggaagugugauuguucac

SEQ ID NO: 1232479 - RNA, 19 nt, Artificial Sequence
  Description of Artificial Sequence: Synthetic oligonucleotide
cuccguggauauagaccac

SEQ ID NO: 1232480 - RNA, 19 nt, Artificial Sequence
  Description of Artificial Sequence: Synthetic oligonucleotide
auacaaccauggaagccau

SEQ ID NO: 1232481 - RNA, 19 nt, Artificial Sequence
  Description of Artificial Sequence: Synthetic oligonucleotide
gcggggaagaagcugcauc

SEQ ID NO: 1232482 - RNA, 19 nt, Artificial Sequence
  Description of Artificial Sequence: Synthetic oligonucleotide
cggggcugucccuaaagcg

SEQ ID NO: 1232483 - RNA, 19 nt, Artificial Sequence
  Description of Artificial Sequence: Synthetic oligonucleotide
gcaacacuuccucgucugc

SEQ ID NO: 1232484 - RNA, 19 nt, Artificial Sequence
  Description of Artificial Sequence: Synthetic oligonucleotide
cagagaugagcaugugugu

SEQ ID NO: 1232485 - RNA, 19 nt, Artificial Sequence
  Description of Artificial Sequence: Synthetic oligonucleotide
uggccuguacgaagucaua

SEQ ID NO: 1232486 - RNA, 19 nt, Artificial Sequence
  Description of Artificial Sequence: Synthetic oligonucleotide
uggucaucaugggcagaga

SEQ ID NO: 1232487 - RNA, 19 nt, Artificial Sequence
  Description of Artificial Sequence: Synthetic oligonucleotide
ugcgaugagcggggaagaa

SEQ ID NO: 1232488 - RNA, 19 nt, Artificial Sequence
  Description of Artificial Sequence: Synthetic oligonucleotide
guggaccuguggaacuagc

SEQ ID NO: 1232489 - RNA, 19 nt, Artificial Sequence
  Description of Artificial Sequence: Synthetic oligonucleotide
ggucaagagcuuugcaugu

SEQ ID NO: 1232490 - RNA, 19 nt, Artificial Sequence
  Description of Artificial Sequence: Synthetic oligonucleotide
augacguggcguggcagga

SEQ ID NO: 1232491 - RNA, 19 nt, Artificial Sequence
  Description of Artificial Sequence: Synthetic oligonucleotide
gcgaugagcggggaagaag

SEQ ID NO: 1232492 - RNA, 19 nt, Artificial Sequence
  Description of Artificial Sequence: Synthetic oligonucleotide
uggaaacgaugacggcguu

SEQ ID NO: 1232493 - RNA, 19 nt, Artificial Sequence
  Description of Artificial Sequence: Synthetic oligonucleotide
accgccguacggugcgaug

SEQ ID NO: 1232494 - RNA, 19 nt, Artificial Sequence
  Description of Artificial Sequence: Synthetic oligonucleotide
uaggacgcacgacgaccuc

SEQ ID NO: 1232495 - RNA, 19 nt, Artificial Sequence
  Description of Artificial Sequence: Synthetic oligonucleotide
ccguggauauagaccacac

SEQ ID NO: 1232496 - RNA, 19 nt, Artificial Sequence
  Description of Artificial Sequence: Synthetic oligonucleotide
gaacuagccuguauucgau

SEQ ID NO: 1232497 - RNA, 19 nt, Artificial Sequence
  Description of Artificial Sequence: Synthetic oligonucleotide
cguaaauuugcucgggaaa

SEQ ID NO: 1232498 - RNA, 19 nt, Artificial Sequence
  Description of Artificial Sequence: Synthetic oligonucleotide
cggccauugaugugcacag

SEQ ID NO: 1232499 - RNA, 19 nt, Artificial Sequence
  Description of Artificial Sequence: Synthetic oligonucleotide
guaggacgcacgacgaccu

SEQ ID NO: 1232500 - RNA, 19 nt, Artificial Sequence
  Description of Artificial Sequence: Synthetic oligonucleotide
cuggcgucugccugucaca

SEQ ID NO: 1232501 - RNA, 19 nt, Artificial Sequence
  Description of Artificial Sequence: Synthetic oligonucleotide
ucugcaugacaggcuugua

SEQ ID NO: 1232502 - RNA, 19 nt, Artificial Sequence
  Description of Artificial Sequence: Synthetic oligonucleotide
acauagccugaggguaacu

SEQ ID NO: 1232503 - RNA, 19 nt, Artificial Sequence
  Description of Artificial Sequence: Synthetic oligonucleotide
uggcaggauuggaguguuc

SEQ ID NO: 1232504 - RNA, 19 nt, Artificial Sequence
  Description of Artificial Sequence: Synthetic oligonucleotide
gcgcuuuucuugccgcggc

SEQ ID NO: 1232505 - RNA, 19 nt, Artificial Sequence
  Description of Artificial Sequence: Synthetic oligonucleotide
ggaaacgaugacggcguuc

SEQ ID NO: 1232506 - RNA, 19 nt, Artificial Sequence
  Description of Artificial Sequence: Synthetic oligonucleotide
ccaguaggacgcacgacga

SEQ ID NO: 1232507 - RNA, 19 nt, Artificial Sequence
  Description of Artificial Sequence: Synthetic oligonucleotide
gucgaccgccguacggugc

SEQ ID NO: 1232508 - RNA, 19 nt, Artificial Sequence
  Description of Artificial Sequence: Synthetic oligonucleotide
ggugauccuggcaucaccu

SEQ ID NO: 1232509 - RNA, 19 nt, Artificial Sequence
  Description of Artificial Sequence: Synthetic oligonucleotide
gcggccaguaggacgcacg

SEQ ID NO: 1232510 - RNA, 19 nt, Artificial Sequence
  Description of Artificial Sequence: Synthetic oligonucleotide
ggguaucucucaucugaaa

SEQ ID NO: 1232511 - RNA, 19 nt, Artificial Sequence
  Description of Artificial Sequence: Synthetic oligonucleotide
ccguacggugcgaugcuac

SEQ ID NO: 1232512 - RNA, 19 nt, Artificial Sequence
  Description of Artificial Sequence: Synthetic oligonucleotide
ggcacggaugacaucguaa

SEQ ID NO: 1232513 - RNA, 19 nt, Artificial Sequence
  Description of Artificial Sequence: Synthetic oligonucleotide
ggguuuuggagagccuuca

SEQ ID NO: 1232514 - RNA, 19 nt, Artificial Sequence
  Description of Artificial Sequence: Synthetic oligonucleotide
cguacggugcgaugcuacc

SEQ ID NO: 1232515 - RNA, 19 nt, Artificial Sequence
  Description of Artificial Sequence: Synthetic oligonucleotide
ggcguggcaggauuggagu

SEQ ID NO: 1232516 - RNA, 19 nt, Artificial Sequence
  Description of Artificial Sequence: Synthetic oligonucleotide
augacggcguucagcuccu

SEQ ID NO: 1232517 - RNA, 19 nt, Artificial Sequence
  Description of Artificial Sequence: Synthetic oligonucleotide
ccggggcugucccuaaagc

SEQ ID NO: 1232518 - RNA, 19 nt, Artificial Sequence
  Description of Artificial Sequence: Synthetic oligonucleotide
gacguggcguggcaggauu

SEQ ID NO: 1232519 - RNA, 19 nt, Artificial Sequence
  Description of Artificial Sequence: Synthetic oligonucleotide
auccagcaguugagggauc

SEQ ID NO: 1232520 - RNA, 19 nt, Artificial Sequence
  Description of Artificial Sequence: Synthetic oligonucleotide
ugacguggcguggcaggau

SEQ ID NO: 1232521 - RNA, 19 nt, Artificial Sequence
  Description of Artificial Sequence: Synthetic oligonucleotide
gcaugucugaggaguuuac

SEQ ID NO: 1232522 - RNA, 19 nt, Artificial Sequence
  Description of Artificial Sequence: Synthetic oligonucleotide
cucggccauugaugugcac

SEQ ID NO: 1232523 - RNA, 19 nt, Artificial Sequence
  Description of Artificial Sequence: Synthetic oligonucleotide
cgucgaaguugcucaucgg

SEQ ID NO: 1232524 - RNA, 19 nt, Artificial Sequence
  Description of Artificial Sequence: Synthetic oligonucleotide
gccuguacgaagucauagu

SEQ ID NO: 1232525 - RNA, 19 nt, Artificial Sequence
  Description of Artificial Sequence: Synthetic oligonucleotide
ugcuggcgucugccuguca

SEQ ID NO: 1232526 - RNA, 19 nt, Artificial Sequence
  Description of Artificial Sequence: Synthetic oligonucleotide
cagggauguccaguugaga

SEQ ID NO: 1232527 - RNA, 19 nt, Artificial Sequence
  Description of Artificial Sequence: Synthetic oligonucleotide
ccucgucugcgaugagcgg

SEQ ID NO: 1232528 - RNA, 19 nt, Artificial Sequence
  Description of Artificial Sequence: Synthetic oligonucleotide
agguuuugauccagccauu

SEQ ID NO: 1232529 - RNA, 19 nt, Artificial Sequence
  Description of Artificial Sequence: Synthetic oligonucleotide
ccgccguacggugcgaugc

SEQ ID NO: 1232530 - RNA, 19 nt, Artificial Sequence
  Description of Artificial Sequence: Synthetic oligonucleotide
aucggguuuuggagagccu

SEQ ID NO: 1232531 - RNA, 19 nt, Artificial Sequence
  Description of Artificial Sequence: Synthetic oligonucleotide
ccuaguccggauucccaca

SEQ ID NO: 1232532 - RNA, 19 nt, Artificial Sequence
  Description of Artificial Sequence: Synthetic oligonucleotide
gcaacguaaguaaacuguu

SEQ ID NO: 1232533 - RNA, 19 nt, Artificial Sequence
  Description of Artificial Sequence: Synthetic oligonucleotide
caucaagggaagugugauu

SEQ ID NO: 1232534 - RNA, 19 nt, Artificial Sequence
  Description of Artificial Sequence: Synthetic oligonucleotide
agcggggaagaagcugcau

SEQ ID NO: 1232535 - RNA, 19 nt, Artificial Sequence
  Description of Artificial Sequence: Synthetic oligonucleotide
ggcaacagggauguccagu

SEQ ID NO: 1232536 - RNA, 19 nt, Artificial Sequence
  Description of Artificial Sequence: Synthetic oligonucleotide
caccuguggucugcaugac

SEQ ID NO: 1232537 - RNA, 19 nt, Artificial Sequence
  Description of Artificial Sequence: Synthetic oligonucleotide
ccuguacgaagucauaguu

SEQ ID NO: 1232538 - RNA, 19 nt, Artificial Sequence
  Description of Artificial Sequence: Synthetic oligonucleotide
agacuguuucagaguuuua

SEQ ID NO: 1232539 - RNA, 19 nt, Artificial Sequence
  Description of Artificial Sequence: Synthetic oligonucleotide
cacggaugacaucguaaau

SEQ ID NO: 1232540 - RNA, 19 nt, Artificial Sequence
  Description of Artificial Sequence: Synthetic oligonucleotide
agacgggcccugagggcug

SEQ ID NO: 1232541 - RNA, 19 nt, Artificial Sequence
  Description of Artificial Sequence: Synthetic oligonucleotide
ccaugacguggcguggcag

SEQ ID NO: 1232542 - RNA, 19 nt, Artificial Sequence
  Description of Artificial Sequence: Synthetic oligonucleotide
gaaguuggucggccagcuu

SEQ ID NO: 1232543 - RNA, 19 nt, Artificial Sequence
  Description of Artificial Sequence: Synthetic oligonucleotide
cuucgucgaaguugcucau

SEQ ID NO: 1232544 - RNA, 19 nt, Artificial Sequence
  Description of Artificial Sequence: Synthetic oligonucleotide
gguuuugauccagccauuu

SEQ ID NO: 1232545 - RNA, 19 nt, Artificial Sequence
  Description of Artificial Sequence: Synthetic oligonucleotide
cuaagacuucuggcugcaa

SEQ ID NO: 1232546 - RNA, 19 nt, Artificial Sequence
  Description of Artificial Sequence: Synthetic oligonucleotide
cgcuuuucuugccgcggcc

SEQ ID NO: 1232547 - RNA, 19 nt, Artificial Sequence
  Description of Artificial Sequence: Synthetic oligonucleotide
ccaggcccggggcuguccc

SEQ ID NO: 1232548 - RNA, 19 nt, Artificial Sequence
  Description of Artificial Sequence: Synthetic oligonucleotide
gcucgggaaaguggaccug

SEQ ID NO: 1232549 - RNA, 19 nt, Artificial Sequence
  Description of Artificial Sequence: Synthetic oligonucleotide
cuguggaacuagccuguau

SEQ ID NO: 1232550 - RNA, 19 nt, Artificial Sequence
  Description of Artificial Sequence: Synthetic oligonucleotide
gggauucccgugagggcuc

SEQ ID NO: 1232551 - RNA, 19 nt, Artificial Sequence
  Description of Artificial Sequence: Synthetic oligonucleotide
acacuucgucgaaguugcu

SEQ ID NO: 1232552 - RNA, 19 nt, Artificial Sequence
  Description of Artificial Sequence: Synthetic oligonucleotide
ggcuggcaacguaaguaaa

SEQ ID NO: 1232553 - RNA, 19 nt, Artificial Sequence
  Description of Artificial Sequence: Synthetic oligonucleotide
gcugucccuaaagcgucga

SEQ ID NO: 1232554 - RNA, 19 nt, Artificial Sequence
  Description of Artificial Sequence: Synthetic oligonucleotide
cgcacgacgaccucauugu

SEQ ID NO: 1232555 - RNA, 19 nt, Artificial Sequence
  Description of Artificial Sequence: Synthetic oligonucleotide
ggccaguaggacgcacgac

SEQ ID NO: 1232556 - RNA, 19 nt, Artificial Sequence
  Description of Artificial Sequence: Synthetic oligonucleotide
cggcguucagcuccucggc

SEQ ID NO: 1232557 - RNA, 19 nt, Artificial Sequence
  Description of Artificial Sequence: Synthetic oligonucleotide
cuaaagcgucgaccgccgu

SEQ ID NO: 1232558 - RNA, 19 nt, Artificial Sequence
  Description of Artificial Sequence: Synthetic oligonucleotide
ggauuggaguguucacguu

SEQ ID NO: 1232559 - RNA, 19 nt, Artificial Sequence
  Description of Artificial Sequence: Synthetic oligonucleotide
caguugagacgggcccuga

SEQ ID NO: 1232560 - RNA, 19 nt, Artificial Sequence
  Description of Artificial Sequence: Synthetic oligonucleotide
cgucgaccgccguacggug

SEQ ID NO: 1232561 - RNA, 19 nt, Artificial Sequence
  Description of Artificial Sequence: Synthetic oligonucleotide
gugcuggcgucugccuguc

SEQ ID NO: 1232562 - RNA, 19 nt, Artificial Sequence
  Description of Artificial Sequence: Synthetic oligonucleotide
cagcuccucggccauugau

SEQ ID NO: 1232563 - RNA, 19 nt, Artificial Sequence
  Description of Artificial Sequence: Synthetic oligonucleotide
ccucggccauugaugugca

SEQ ID NO: 1232564 - RNA, 19 nt, Artificial Sequence
  Description of Artificial Sequence: Synthetic oligonucleotide
caagucuaauuaggauauu

SEQ ID NO: 1232565 - RNA, 19 nt, Artificial Sequence
  Description of Artificial Sequence: Synthetic oligonucleotide
cguggauauagaccacacu

SEQ ID NO: 1232566 - RNA, 19 nt, Artificial Sequence
  Description of Artificial Sequence: Synthetic oligonucleotide
cgaaguugcucaucggguu

SEQ ID NO: 1232567 - RNA, 19 nt, Artificial Sequence
  Description of Artificial Sequence: Synthetic oligonucleotide
gcgucgaccgccguacggu

SEQ ID NO: 1232568 - RNA, 19 nt, Artificial Sequence
  Description of Artificial Sequence: Synthetic oligonucleotide
ugacggcguucagcuccuc

SEQ ID NO: 1232569 - RNA, 19 nt, Artificial Sequence
  Description of Artificial Sequence: Synthetic oligonucleotide
cgaugacggcguucagcuc

SEQ ID NO: 1232570 - RNA, 19 nt, Artificial Sequence
  Description of Artificial Sequence: Synthetic oligonucleotide
gacgcacgacgaccucauu

SEQ ID NO: 1232571 - RNA, 19 nt, Artificial Sequence
  Description of Artificial Sequence: Synthetic oligonucleotide
cggccaguaggacgcacga

SEQ ID NO: 1232572 - RNA, 19 nt, Artificial Sequence
  Description of Artificial Sequence: Synthetic oligonucleotide
gaccgccguacggugcgau

SEQ ID NO: 1232573 - RNA, 19 nt, Artificial Sequence
  Description of Artificial Sequence: Synthetic oligonucleotide
ccaggcgcuuggcauacau

SEQ ID NO: 1232574 - RNA, 19 nt, Artificial Sequence
  Description of Artificial Sequence: Synthetic oligonucleotide
ggauucccgugagggcucu

SEQ ID NO: 1232575 - RNA, 19 nt, Artificial Sequence
  Description of Artificial Sequence: Synthetic oligonucleotide
cggugcgaugcuacccgga

SEQ ID NO: 1232576 - RNA, 19 nt, Artificial Sequence
  Description of Artificial Sequence: Synthetic oligonucleotide
gccguacggugcgaugcua

SEQ ID NO: 1232577 - RNA, 19 nt, Artificial Sequence
  Description of Artificial Sequence: Synthetic oligonucleotide
ccgugagggcucuccuggu

SEQ ID NO: 1232578 - RNA, 19 nt, Artificial Sequence
  Description of Artificial Sequence: Synthetic oligonucleotide
cgcggccaguaggacgcac

SEQ ID NO: 1232579 - RNA, 19 nt, Artificial Sequence
  Description of Artificial Sequence: Synthetic oligonucleotide
cgccguacggugcgaugcu

SEQ ID NO: 1232580 - RNA, 19 nt, Artificial Sequence
  Description of Artificial Sequence: Synthetic oligonucleotide
cgaccgccguacggugcga

SEQ ID NO: 1232581 - RNA, 19 nt, Artificial Sequence
  Description of Artificial Sequence: Synthetic oligonucleotide
aaacaugucacucuccacg

SEQ ID NO: 1232582 - RNA, 19 nt, Artificial Sequence
  Description of Artificial Sequence: Synthetic oligonucleotide
ucagcaaacgcauagagca

SEQ ID NO: 1232583 - RNA, 19 nt, Artificial Sequence
  Description of Artificial Sequence: Synthetic oligonucleotide
gaugcgaucguuuacugcg

SEQ ID NO: 1232584 - RNA, 19 nt, Artificial Sequence
  Description of Artificial Sequence: Synthetic oligonucleotide
gaugaauuaauguccaagc

SEQ ID NO: 1232585 - RNA, 19 nt, Artificial Sequence
  Description of Artificial Sequence: Synthetic oligonucleotide
ugaaugugaagucuguuag

SEQ ID NO: 1232586 - RNA, 19 nt, Artificial Sequence
  Description of Artificial Sequence: Synthetic oligonucleotide
aaugugaagucuguuaggg

SEQ ID NO: 1232587 - RNA, 19 nt, Artificial Sequence
  Description of Artificial Sequence: Synthetic oligonucleotide
ucucucaucaaucacugag

SEQ ID NO: 1232588 - RNA, 19 nt, Artificial Sequence
  Description of Artificial Sequence: Synthetic oligonucleotide
aaaucugagggaugacucc

SEQ ID NO: 1232589 - RNA, 19 nt, Artificial Sequence
  Description of Artificial Sequence: Synthetic oligonucleotide
ugaucauugaaaucugagg

SEQ ID NO: 1232590 - RNA, 19 nt, Artificial Sequence
  Description of Artificial Sequence: Synthetic oligonucleotide
uccacaaacccucucacgg

SEQ ID NO: 1232591 - RNA, 19 nt, Artificial Sequence
  Description of Artificial Sequence: Synthetic oligonucleotide
ugaauuaauguccaagcac

SEQ ID NO: 1232592 - RNA, 19 nt, Artificial Sequence
  Description of Artificial Sequence: Synthetic oligonucleotide
ugauaaacagguaggaugu

SEQ ID NO: 1232593 - RNA, 19 nt, Artificial Sequence
  Description of Artificial Sequence: Synthetic oligonucleotide
gaauuaauguccaagcacc

SEQ ID NO: 1232594 - RNA, 19 nt, Artificial Sequence
  Description of Artificial Sequence: Synthetic oligonucleotide
uucucgaaagcucuguggg

SEQ ID NO: 1232595 - RNA, 19 nt, Artificial Sequence
  Description of Artificial Sequence: Synthetic oligonucleotide
uugaccaugaaugugaagu

SEQ ID NO: 1232596 - RNA, 19 nt, Artificial Sequence
  Description of Artificial Sequence: Synthetic oligonucleotide
aaagugaugagugggaugu

SEQ ID NO: 1232597 - RNA, 19 nt, Artificial Sequence
  Description of Artificial Sequence: Synthetic oligonucleotide
ugacugaagacguaaacca

SEQ ID NO: 1232598 - RNA, 19 nt, Artificial Sequence
  Description of Artificial Sequence: Synthetic oligonucleotide
aaccugacaaaacgagccc

SEQ ID NO: 1232599 - RNA, 19 nt, Artificial Sequence
  Description of Artificial Sequence: Synthetic oligonucleotide
gauaaugccgccauauucc

SEQ ID NO: 1232600 - RNA, 19 nt, Artificial Sequence
  Description of Artificial Sequence: Synthetic oligonucleotide
ucacaaugggauauuugcg

SEQ ID NO: 1232601 - RNA, 19 nt, Artificial Sequence
  Description of Artificial Sequence: Synthetic oligonucleotide
cuuguugucgaugcgaucg

SEQ ID NO: 1232602 - RNA, 19 nt, Artificial Sequence
  Description of Artificial Sequence: Synthetic oligonucleotide
aaugccgccauauuccugu

SEQ ID NO: 1232603 - RNA, 19 nt, Artificial Sequence
  Description of Artificial Sequence: Synthetic oligonucleotide
aacauauccgagcacgugu

SEQ ID NO: 1232604 - RNA, 19 nt, Artificial Sequence
  Description of Artificial Sequence: Synthetic oligonucleotide
ugggauguugaaagcaucg

SEQ ID NO: 1232605 - RNA, 19 nt, Artificial Sequence
  Description of Artificial Sequence: Synthetic oligonucleotide
gauguugaaagcaucgcag

SEQ ID NO: 1232606 - RNA, 19 nt, Artificial Sequence
  Description of Artificial Sequence: Synthetic oligonucleotide
ucaucaaucacugagugua

SEQ ID NO: 1232607 - RNA, 19 nt, Artificial Sequence
  Description of Artificial Sequence: Synthetic oligonucleotide
aaaccaaucuuccauugau

SEQ ID NO: 1232608 - RNA, 19 nt, Artificial Sequence
  Description of Artificial Sequence: Synthetic oligonucleotide
ucagcagccauuccgaagu

SEQ ID NO: 1232609 - RNA, 19 nt, Artificial Sequence
  Description of Artificial Sequence: Synthetic oligonucleotide
aaaagugaugagugggaug

SEQ ID NO: 1232610 - RNA, 19 nt, Artificial Sequence
  Description of Artificial Sequence: Synthetic oligonucleotide
guaaaauccugacugaaga

SEQ ID NO: 1232611 - RNA, 19 nt, Artificial Sequence
  Description of Artificial Sequence: Synthetic oligonucleotide
gaaccugacaaaacgagcc

SEQ ID NO: 1232612 - RNA, 19 nt, Artificial Sequence
  Description of Artificial Sequence: Synthetic oligonucleotide
ucucaucaaucacugagug

SEQ ID NO: 1232613 - RNA, 19 nt, Artificial Sequence
  Description of Artificial Sequence: Synthetic oligonucleotide
aaucugagggaugacuccg

SEQ ID NO: 1232614 - RNA, 19 nt, Artificial Sequence
  Description of Artificial Sequence: Synthetic oligonucleotide
auucucgaaagcucugugg

SEQ ID NO: 1232615 - RNA, 19 nt, Artificial Sequence
  Description of Artificial Sequence: Synthetic oligonucleotide
aaaacugcgggucguggug

SEQ ID NO: 1232616 - RNA, 19 nt, Artificial Sequence
  Description of Artificial Sequence: Synthetic oligonucleotide
gaaugugaagucuguuagg

SEQ ID NO: 1232617 - RNA, 19 nt, Artificial Sequence
  Description of Artificial Sequence: Synthetic oligonucleotide
agaugaauuaauguccaag

SEQ ID NO: 1232618 - RNA, 19 nt, Artificial Sequence
  Description of Artificial Sequence: Synthetic oligonucleotide
uggcuguuagcuuuccucg

SEQ ID NO: 1232619 - RNA, 19 nt, Artificial Sequence
  Description of Artificial Sequence: Synthetic oligonucleotide
gagcucaugacaucauagg

SEQ ID NO: 1232620 - RNA, 19 nt, Artificial Sequence
  Description of Artificial Sequence: Synthetic oligonucleotide
uuaucagcagccauuccga

SEQ ID NO: 1232621 - RNA, 19 nt, Artificial Sequence
  Description of Artificial Sequence: Synthetic oligonucleotide
uucuuugcguaauugggca

SEQ ID NO: 1232622 - RNA, 19 nt, Artificial Sequence
  Description of Artificial Sequence: Synthetic oligonucleotide
auucaguccaaucacugga

SEQ ID NO: 1232623 - RNA, 19 nt, Artificial Sequence
  Description of Artificial Sequence: Synthetic oligonucleotide
cagaacauauccgagcacg

SEQ ID NO: 1232624 - RNA, 19 nt, Artificial Sequence
  Description of Artificial Sequence: Synthetic oligonucleotide
uaguugaagaacucgcgca

SEQ ID NO: 1232625 - RNA, 19 nt, Artificial Sequence
  Description of Artificial Sequence: Synthetic oligonucleotide
augaauuaauguccaagca

SEQ ID NO: 1232626 - RNA, 19 nt, Artificial Sequence
  Description of Artificial Sequence: Synthetic oligonucleotide
uauccgagcacguguagag

SEQ ID NO: 1232627 - RNA, 19 nt, Artificial Sequence
  Description of Artificial Sequence: Synthetic oligonucleotide
agacguaaaccaaucuucc

SEQ ID NO: 1232628 - RNA, 19 nt, Artificial Sequence
  Description of Artificial Sequence: Synthetic oligonucleotide
aucaacaaaagugaugagu

SEQ ID NO: 1232629 - RNA, 19 nt, Artificial Sequence
  Description of Artificial Sequence: Synthetic oligonucleotide
uugccgacaauuccaacgc

SEQ ID NO: 1232630 - RNA, 19 nt, Artificial Sequence
  Description of Artificial Sequence: Synthetic oligonucleotide
aacaugucacucuccacga

SEQ ID NO: 1232631 - RNA, 19 nt, Artificial Sequence
  Description of Artificial Sequence: Synthetic oligonucleotide
uccaaagggacgauugugu

SEQ ID NO: 1232632 - RNA, 19 nt, Artificial Sequence
  Description of Artificial Sequence: Synthetic oligonucleotide
agagucauucaguccaauc

SEQ ID NO: 1232633 - RNA, 19 nt, Artificial Sequence
  Description of Artificial Sequence: Synthetic oligonucleotide
agaaccugacaaaacgagc

SEQ ID NO: 1232634 - RNA, 19 nt, Artificial Sequence
  Description of Artificial Sequence: Synthetic oligonucleotide
aaacucucucucaucaauc

SEQ ID NO: 1232635 - RNA, 19 nt, Artificial Sequence
  Description of Artificial Sequence: Synthetic oligonucleotide
aucauugaaaucugaggga

SEQ ID NO: 1232636 - RNA, 19 nt, Artificial Sequence
  Description of Artificial Sequence: Synthetic oligonucleotide
gaacccugagccuugcugc

SEQ ID NO: 1232637 - RNA, 19 nt, Artificial Sequence
  Description of Artificial Sequence: Synthetic oligonucleotide
cauagagcagcuuggcacc

SEQ ID NO: 1232638 - RNA, 19 nt, Artificial Sequence
  Description of Artificial Sequence: Synthetic oligonucleotide
guaguugaagaacucgcgc

SEQ ID NO: 1232639 - RNA, 19 nt, Artificial Sequence
  Description of Artificial Sequence: Synthetic oligonucleotide
aggacgauggaccuucuug

SEQ ID NO: 1232640 - RNA, 19 nt, Artificial Sequence
  Description of Artificial Sequence: Synthetic oligonucleotide
cacucuuauggccuggucc

SEQ ID NO: 1232641 - RNA, 19 nt, Artificial Sequence
  Description of Artificial Sequence: Synthetic oligonucleotide
acugcgaccggcuggcuac

SEQ ID NO: 1232642 - RNA, 19 nt, Artificial Sequence
  Description of Artificial Sequence: Synthetic oligonucleotide
cauucaguccaaucacugg

SEQ ID NO: 1232643 - RNA, 19 nt, Artificial Sequence
  Description of Artificial Sequence: Synthetic oligonucleotide
acaaugggauauuugcgug

SEQ ID NO: 1232644 - RNA, 19 nt, Artificial Sequence
  Description of Artificial Sequence: Synthetic oligonucleotide
auugauucggccccgucca

SEQ ID NO: 1232645 - RNA, 19 nt, Artificial Sequence
  Description of Artificial Sequence: Synthetic oligonucleotide
ggaaacuuauucuuaucag

SEQ ID NO: 1232646 - RNA, 19 nt, Artificial Sequence
  Description of Artificial Sequence: Synthetic oligonucleotide
aacgcauagagcagcuugg

SEQ ID NO: 1232647 - RNA, 19 nt, Artificial Sequence
  Description of Artificial Sequence: Synthetic oligonucleotide
ugaagacguaaaccaaucu

SEQ ID NO: 1232648 - RNA, 19 nt, Artificial Sequence
  Description of Artificial Sequence: Synthetic oligonucleotide
gaaccaggcggucacuggg

SEQ ID NO: 1232649 - RNA, 19 nt, Artificial Sequence
  Description of Artificial Sequence: Synthetic oligonucleotide
gacgauuguguccagcuca

SEQ ID NO: 1232650 - RNA, 19 nt, Artificial Sequence
  Description of Artificial Sequence: Synthetic oligonucleotide
aaaggguuggcgaacuucu

SEQ ID NO: 1232651 - RNA, 19 nt, Artificial Sequence
  Description of Artificial Sequence: Synthetic oligonucleotide
aucguuuacugcgaccggc

SEQ ID NO: 1232652 - RNA, 19 nt, Artificial Sequence
  Description of Artificial Sequence: Synthetic oligonucleotide
ucauugaaaucugagggau

SEQ ID NO: 1232653 - RNA, 19 nt, Artificial Sequence
  Description of Artificial Sequence: Synthetic oligonucleotide
cauugauucggccccgucc

SEQ ID NO: 1232654 - RNA, 19 nt, Artificial Sequence
  Description of Artificial Sequence: Synthetic oligonucleotide
acguaaaccaaucuuccau

SEQ ID NO: 1232655 - RNA, 19 nt, Artificial Sequence
  Description of Artificial Sequence: Synthetic oligonucleotide
guuuacugcgaccggcugg

SEQ ID NO: 1232656 - RNA, 19 nt, Artificial Sequence
  Description of Artificial Sequence: Synthetic oligonucleotide
uguuagggcaggagaguag

SEQ ID NO: 1232657 - RNA, 19 nt, Artificial Sequence
  Description of Artificial Sequence: Synthetic oligonucleotide
augaucauugaaaucugag

SEQ ID NO: 1232658 - RNA, 19 nt, Artificial Sequence
  Description of Artificial Sequence: Synthetic oligonucleotide
ugcguaauugggcaugauc

SEQ ID NO: 1232659 - RNA, 19 nt, Artificial Sequence
  Description of Artificial Sequence: Synthetic oligonucleotide
gaggccgcagcugagaacc

SEQ ID NO: 1232660 - RNA, 19 nt, Artificial Sequence
  Description of Artificial Sequence: Synthetic oligonucleotide
acguguagaggauggcugg

SEQ ID NO: 1232661 - RNA, 19 nt, Artificial Sequence
  Description of Artificial Sequence: Synthetic oligonucleotide
accugacaaaacgagcccc

SEQ ID NO: 1232662 - RNA, 19 nt, Artificial Sequence
  Description of Artificial Sequence: Synthetic oligonucleotide
uuuacugcgaccggcuggc

SEQ ID NO: 1232663 - RNA, 19 nt, Artificial Sequence
  Description of Artificial Sequence: Synthetic oligonucleotide
caugucacucuccacgaag

SEQ ID NO: 1232664 - RNA, 19 nt, Artificial Sequence
  Description of Artificial Sequence: Synthetic oligonucleotide
agucuguuagggcaggaga

SEQ ID NO: 1232665 - RNA, 19 nt, Artificial Sequence
  Description of Artificial Sequence: Synthetic oligonucleotide
aagaacucgcgcagguuac

SEQ ID NO: 1232666 - RNA, 19 nt, Artificial Sequence
  Description of Artificial Sequence: Synthetic oligonucleotide
cauauuccugugcugugcc

SEQ ID NO: 1232667 - RNA, 19 nt, Artificial Sequence
  Description of Artificial Sequence: Synthetic oligonucleotide
uugugcugcgcgucgaugc

SEQ ID NO: 1232668 - RNA, 19 nt, Artificial Sequence
  Description of Artificial Sequence: Synthetic oligonucleotide
uaauguccaagcacccuga

SEQ ID NO: 1232669 - RNA, 19 nt, Artificial Sequence
  Description of Artificial Sequence: Synthetic oligonucleotide
gaagucggcgcaucugugc

SEQ ID NO: 1232670 - RNA, 19 nt, Artificial Sequence
  Description of Artificial Sequence: Synthetic oligonucleotide
uccgagcacguguagagga

SEQ ID NO: 1232671 - RNA, 19 nt, Artificial Sequence
  Description of Artificial Sequence: Synthetic oligonucleotide
cucgaaagcucugugggcc

SEQ ID NO: 1232672 - RNA, 19 nt, Artificial Sequence
  Description of Artificial Sequence: Synthetic oligonucleotide
caguccaaucacuggagcc

SEQ ID NO: 1232673 - RNA, 19 nt, Artificial Sequence
  Description of Artificial Sequence: Synthetic oligonucleotide
aagucggcgcaucugugcu

SEQ ID NO: 1232674 - RNA, 19 nt, Artificial Sequence
  Description of Artificial Sequence: Synthetic oligonucleotide
gucaccaagaagguguuug

SEQ ID NO: 1232675 - RNA, 19 nt, Artificial Sequence
  Description of Artificial Sequence: Synthetic oligonucleotide
ugugcugcgcgucgaugcg

SEQ ID NO: 1232676 - RNA, 19 nt, Artificial Sequence
  Description of Artificial Sequence: Synthetic oligonucleotide
aaagcaucgcagaaccuga

SEQ ID NO: 1232677 - RNA, 19 nt, Artificial Sequence
  Description of Artificial Sequence: Synthetic oligonucleotide
acaguugccucagcaaacg

SEQ ID NO: 1232678 - RNA, 19 nt, Artificial Sequence
  Description of Artificial Sequence: Synthetic oligonucleotide
ugucauaggcuuugcuuga

SEQ ID NO: 1232679 - RNA, 19 nt, Artificial Sequence
  Description of Artificial Sequence: Synthetic oligonucleotide
auaaacagguaggaugugu

SEQ ID NO: 1232680 - RNA, 19 nt, Artificial Sequence
  Description of Artificial Sequence: Synthetic oligonucleotide
gagggaugacuccggaugc

SEQ ID NO: 1232681 - RNA, 19 nt, Artificial Sequence
  Description of Artificial Sequence: Synthetic oligonucleotide
cacguguagaggauggcug

SEQ ID NO: 1232682 - RNA, 19 nt, Artificial Sequence
  Description of Artificial Sequence: Synthetic oligonucleotide
ugcagggaaaggguuggcg

SEQ ID NO: 1232683 - RNA, 19 nt, Artificial Sequence
  Description of Artificial Sequence: Synthetic oligonucleotide
ugaccaugaaugugaaguc

SEQ ID NO: 1232684 - RNA, 19 nt, Artificial Sequence
  Description of Artificial Sequence: Synthetic oligonucleotide
ucugcguagccagccaagg

SEQ ID NO: 1232685 - RNA, 19 nt, Artificial Sequence
  Description of Artificial Sequence: Synthetic oligonucleotide
aagucuguuagggcaggag

SEQ ID NO: 1232686 - RNA, 19 nt, Artificial Sequence
  Description of Artificial Sequence: Synthetic oligonucleotide
ucucgaaagcucugugggc

SEQ ID NO: 1232687 - RNA, 19 nt, Artificial Sequence
  Description of Artificial Sequence: Synthetic oligonucleotide
guugaaagcaucgcagaac

SEQ ID NO: 1232688 - RNA, 19 nt, Artificial Sequence
  Description of Artificial Sequence: Synthetic oligonucleotide
cuuuccucgcuugugcugc

SEQ ID NO: 1232689 - RNA, 19 nt, Artificial Sequence
  Description of Artificial Sequence: Synthetic oligonucleotide
uucacaaccucagggccag

SEQ ID NO: 1232690 - RNA, 19 nt, Artificial Sequence
  Description of Artificial Sequence: Synthetic oligonucleotide
ggucagaacauauccgagc

SEQ ID NO: 1232691 - RNA, 19 nt, Artificial Sequence
  Description of Artificial Sequence: Synthetic oligonucleotide
gaucguuuacugcgaccgg

SEQ ID NO: 1232692 - RNA, 19 nt, Artificial Sequence
  Description of Artificial Sequence: Synthetic oligonucleotide
gucuguuagggcaggagag

SEQ ID NO: 1232693 - RNA, 19 nt, Artificial Sequence
  Description of Artificial Sequence: Synthetic oligonucleotide
ucagaacauauccgagcac

SEQ ID NO: 1232694 - RNA, 19 nt, Artificial Sequence
  Description of Artificial Sequence: Synthetic oligonucleotide
agccauuccgaagucggcg

SEQ ID NO: 1232695 - RNA, 19 nt, Artificial Sequence
  Description of Artificial Sequence: Synthetic oligonucleotide
caggucagaacauauccga

SEQ ID NO: 1232696 - RNA, 19 nt, Artificial Sequence
  Description of Artificial Sequence: Synthetic oligonucleotide
acgcuccucccauucauuc

SEQ ID NO: 1232697 - RNA, 19 nt, Artificial Sequence
  Description of Artificial Sequence: Synthetic oligonucleotide
gaagacguaaaccaaucuu

SEQ ID NO: 1232698 - RNA, 19 nt, Artificial Sequence
  Description of Artificial Sequence: Synthetic oligonucleotide
uccucgcuugugcugcgcg

SEQ ID NO: 1232699 - RNA, 19 nt, Artificial Sequence
  Description of Artificial Sequence: Synthetic oligonucleotide
aaugggauauuugcguguu

SEQ ID NO: 1232700 - RNA, 19 nt, Artificial Sequence
  Description of Artificial Sequence: Synthetic oligonucleotide
ugaagucuguuagggcagg

SEQ ID NO: 1232701 - RNA, 19 nt, Artificial Sequence
  Description of Artificial Sequence: Synthetic oligonucleotide
aacugcgggucguggugcg

SEQ ID NO: 1232702 - RNA, 19 nt, Artificial Sequence
  Description of Artificial Sequence: Synthetic oligonucleotide
gacguaaaccaaucuucca

SEQ ID NO: 1232703 - RNA, 19 nt, Artificial Sequence
  Description of Artificial Sequence: Synthetic oligonucleotide
ucauaggcuuugcuugacu

SEQ ID NO: 1232704 - RNA, 19 nt, Artificial Sequence
  Description of Artificial Sequence: Synthetic oligonucleotide
ucguuuacugcgaccggcu

SEQ ID NO: 1232705 - RNA, 19 nt, Artificial Sequence
  Description of Artificial Sequence: Synthetic oligonucleotide
gagcacguguagaggaugg

SEQ ID NO: 1232706 - RNA, 19 nt, Artificial Sequence
  Description of Artificial Sequence: Synthetic oligonucleotide
ugugggucuuggcaccacc

SEQ ID NO: 1232707 - RNA, 19 nt, Artificial Sequence
  Description of Artificial Sequence: Synthetic oligonucleotide
ccuccaaggacgauggacc

SEQ ID NO: 1232708 - RNA, 19 nt, Artificial Sequence
  Description of Artificial Sequence: Synthetic oligonucleotide
accaugaaugugaagucug

SEQ ID NO: 1232709 - RNA, 19 nt, Artificial Sequence
  Description of Artificial Sequence: Synthetic oligonucleotide
gaaaggguuggcgaacuuc

SEQ ID NO: 1232710 - RNA, 19 nt, Artificial Sequence
  Description of Artificial Sequence: Synthetic oligonucleotide
gacaauuccaacgcuccuc

SEQ ID NO: 1232711 - RNA, 19 nt, Artificial Sequence
  Description of Artificial Sequence: Synthetic oligonucleotide
cugaguguaugauguucag

SEQ ID NO: 1232712 - RNA, 19 nt, Artificial Sequence
  Description of Artificial Sequence: Synthetic oligonucleotide
uuuugggcacaguugccuc

SEQ ID NO: 1232713 - RNA, 19 nt, Artificial Sequence
  Description of Artificial Sequence: Synthetic oligonucleotide
acgauggaccuucuugcug

SEQ ID NO: 1232714 - RNA, 19 nt, Artificial Sequence
  Description of Artificial Sequence: Synthetic oligonucleotide
gaacauauccgagcacgug

SEQ ID NO: 1232715 - RNA, 19 nt, Artificial Sequence
  Description of Artificial Sequence: Synthetic oligonucleotide
ugucgaugcgaucguuuac

SEQ ID NO: 1232716 - RNA, 19 nt, Artificial Sequence
  Description of Artificial Sequence: Synthetic oligonucleotide
ucauucucgaaagcucugu

SEQ ID NO: 1232717 - RNA, 19 nt, Artificial Sequence
  Description of Artificial Sequence: Synthetic oligonucleotide
aacucgcgcagguuacaca

SEQ ID NO: 1232718 - RNA, 19 nt, Artificial Sequence
  Description of Artificial Sequence: Synthetic oligonucleotide
ggucauggcacucucggac

SEQ ID NO: 1232719 - RNA, 19 nt, Artificial Sequence
  Description of Artificial Sequence: Synthetic oligonucleotide
cuuugcguaauugggcaug

SEQ ID NO: 1232720 - RNA, 19 nt, Artificial Sequence
  Description of Artificial Sequence: Synthetic oligonucleotide
cacggcugcagggaaaggg

SEQ ID NO: 1232721 - RNA, 19 nt, Artificial Sequence
  Description of Artificial Sequence: Synthetic oligonucleotide
ucaugacaucauaggcacc

SEQ ID NO: 1232722 - RNA, 19 nt, Artificial Sequence
  Description of Artificial Sequence: Synthetic oligonucleotide
uugucgaugcgaucguuua

SEQ ID NO: 1232723 - RNA, 19 nt, Artificial Sequence
  Description of Artificial Sequence: Synthetic oligonucleotide
cauucucgaaagcucugug

SEQ ID NO: 1232724 - RNA, 19 nt, Artificial Sequence
  Description of Artificial Sequence: Synthetic oligonucleotide
cugguugccgacaauucca

SEQ ID NO: 1232725 - RNA, 19 nt, Artificial Sequence
  Description of Artificial Sequence: Synthetic oligonucleotide
agugacaucuucauuggua

SEQ ID NO: 1232726 - RNA, 19 nt, Artificial Sequence
  Description of Artificial Sequence: Synthetic oligonucleotide
caucaacaaaagugaugag

SEQ ID NO: 1232727 - RNA, 19 nt, Artificial Sequence
  Description of Artificial Sequence: Synthetic oligonucleotide
uuugcguaauugggcauga

SEQ ID NO: 1232728 - RNA, 19 nt, Artificial Sequence
  Description of Artificial Sequence: Synthetic oligonucleotide
ucgaugcgaucguuuacug

SEQ ID NO: 1232729 - RNA, 19 nt, Artificial Sequence
  Description of Artificial Sequence: Synthetic oligonucleotide
auuccaacgcuccucccau

SEQ ID NO: 1232730 - RNA, 19 nt, Artificial Sequence
  Description of Artificial Sequence: Synthetic oligonucleotide
ucuguuagggcaggagagu

SEQ ID NO: 1232731 - RNA, 19 nt, Artificial Sequence
  Description of Artificial Sequence: Synthetic oligonucleotide
accaugccggauaaugccg

SEQ ID NO: 1232732 - RNA, 19 nt, Artificial Sequence
  Description of Artificial Sequence: Synthetic oligonucleotide
acuaucuccaggaaacuua

SEQ ID NO: 1232733 - RNA, 19 nt, Artificial Sequence
  Description of Artificial Sequence: Synthetic oligonucleotide
acgcauagagcagcuuggc

SEQ ID NO: 1232734 - RNA, 19 nt, Artificial Sequence
  Description of Artificial Sequence: Synthetic oligonucleotide
cacagcacccuuugcgccc

SEQ ID NO: 1232735 - RNA, 19 nt, Artificial Sequence
  Description of Artificial Sequence: Synthetic oligonucleotide
uccgcucccuggcuguuag

SEQ ID NO: 1232736 - RNA, 19 nt, Artificial Sequence
  Description of Artificial Sequence: Synthetic oligonucleotide
uggggucauggcacucucg

SEQ ID NO: 1232737 - RNA, 19 nt, Artificial Sequence
  Description of Artificial Sequence: Synthetic oligonucleotide
ucgcuugugcugcgcgucg

SEQ ID NO: 1232738 - RNA, 19 nt, Artificial Sequence
  Description of Artificial Sequence: Synthetic oligonucleotide
aagcaucgcagaaccugac

SEQ ID NO: 1232739 - RNA, 19 nt, Artificial Sequence
  Description of Artificial Sequence: Synthetic oligonucleotide
auaguuggugucaccaaga

SEQ ID NO: 1232740 - RNA, 19 nt, Artificial Sequence
  Description of Artificial Sequence: Synthetic oligonucleotide
aucaaucacugaguguaug

SEQ ID NO: 1232741 - RNA, 19 nt, Artificial Sequence
  Description of Artificial Sequence: Synthetic oligonucleotide
gauaaacagguaggaugug

SEQ ID NO: 1232742 - RNA, 19 nt, Artificial Sequence
  Description of Artificial Sequence: Synthetic oligonucleotide
uucggccccguccagugac

SEQ ID NO: 1232743 - RNA, 19 nt, Artificial Sequence
  Description of Artificial Sequence: Synthetic oligonucleotide
agugaccacacuaucucca

SEQ ID NO: 1232744 - RNA, 19 nt, Artificial Sequence
  Description of Artificial Sequence: Synthetic oligonucleotide
aucgcagaaccugacaaaa

SEQ ID NO: 1232745 - RNA, 19 nt, Artificial Sequence
  Description of Artificial Sequence: Synthetic oligonucleotide
agggaaaggguuggcgaac

SEQ ID NO: 1232746 - RNA, 19 nt, Artificial Sequence
  Description of Artificial Sequence: Synthetic oligonucleotide
cacaaugggauauuugcgu

SEQ ID NO: 1232747 - RNA, 19 nt, Artificial Sequence
  Description of Artificial Sequence: Synthetic oligonucleotide
ccaggucagaacauauccg

SEQ ID NO: 1232748 - RNA, 19 nt, Artificial Sequence
  Description of Artificial Sequence: Synthetic oligonucleotide
uggugugggucuuggcacc

SEQ ID NO: 1232749 - RNA, 19 nt, Artificial Sequence
  Description of Artificial Sequence: Synthetic oligonucleotide
uuagggcaggagaguagac

SEQ ID NO: 1232750 - RNA, 19 nt, Artificial Sequence
  Description of Artificial Sequence: Synthetic oligonucleotide
aguugccucagcaaacgca

SEQ ID NO: 1232751 - RNA, 19 nt, Artificial Sequence
  Description of Artificial Sequence: Synthetic oligonucleotide
acugugauuuugggcacag

SEQ ID NO: 1232752 - RNA, 19 nt, Artificial Sequence
  Description of Artificial Sequence: Synthetic oligonucleotide
ggcacucucggacuggagc

SEQ ID NO: 1232753 - RNA, 19 nt, Artificial Sequence
  Description of Artificial Sequence: Synthetic oligonucleotide
ugucugcguagccagccaa

SEQ ID NO: 1232754 - RNA, 19 nt, Artificial Sequence
  Description of Artificial Sequence: Synthetic oligonucleotide
uuguugucgaugcgaucgu

SEQ ID NO: 1232755 - RNA, 19 nt, Artificial Sequence
  Description of Artificial Sequence: Synthetic oligonucleotide
gcaaucucggcugugggcc

SEQ ID NO: 1232756 - RNA, 19 nt, Artificial Sequence
  Description of Artificial Sequence: Synthetic oligonucleotide
cagcaaacgcauagagcag

SEQ ID NO: 1232757 - RNA, 19 nt, Artificial Sequence
  Description of Artificial Sequence: Synthetic oligonucleotide
ucuuugcguaauugggcau

SEQ ID NO: 1232758 - RNA, 19 nt, Artificial Sequence
  Description of Artificial Sequence: Synthetic oligonucleotide
ugacuccggaugcugugac

SEQ ID NO: 1232759 - RNA, 19 nt, Artificial Sequence
  Description of Artificial Sequence: Synthetic oligonucleotide
agcaucgcagaaccugaca

SEQ ID NO: 1232760 - RNA, 19 nt, Artificial Sequence
  Description of Artificial Sequence: Synthetic oligonucleotide
ugcugcgcgucgaugcggc

SEQ ID NO: 1232761 - RNA, 19 nt, Artificial Sequence
  Description of Artificial Sequence: Synthetic oligonucleotide
ucgaaagcucugugggcca

SEQ ID NO: 1232762 - RNA, 19 nt, Artificial Sequence
  Description of Artificial Sequence: Synthetic oligonucleotide
guuagggcaggagaguaga

SEQ ID NO: 1232763 - RNA, 19 nt, Artificial Sequence
  Description of Artificial Sequence: Synthetic oligonucleotide
agcacguguagaggauggc

SEQ ID NO: 1232764 - RNA, 19 nt, Artificial Sequence
  Description of Artificial Sequence: Synthetic oligonucleotide
cauauccgagcacguguag

SEQ ID NO: 1232765 - RNA, 19 nt, Artificial Sequence
  Description of Artificial Sequence: Synthetic oligonucleotide
ugguugccgacaauuccaa

SEQ ID NO: 1232766 - RNA, 19 nt, Artificial Sequence
  Description of Artificial Sequence: Synthetic oligonucleotide
uuggcaccaugccggauaa

SEQ ID NO: 1232767 - RNA, 19 nt, Artificial Sequence
  Description of Artificial Sequence: Synthetic oligonucleotide
cagguuacacagggcaucc

SEQ ID NO: 1232768 - RNA, 19 nt, Artificial Sequence
  Description of Artificial Sequence: Synthetic oligonucleotide
ccgacaauuccaacgcucc

SEQ ID NO: 1232769 - RNA, 19 nt, Artificial Sequence
  Description of Artificial Sequence: Synthetic oligonucleotide
caucauucucgaaagcucu

SEQ ID NO: 1232770 - RNA, 19 nt, Artificial Sequence
  Description of Artificial Sequence: Synthetic oligonucleotide
auauccgagcacguguaga

SEQ ID NO: 1232771 - RNA, 19 nt, Artificial Sequence
  Description of Artificial Sequence: Synthetic oligonucleotide
aacccucucacggcugcag

SEQ ID NO: 1232772 - RNA, 19 nt, Artificial Sequence
  Description of Artificial Sequence: Synthetic oligonucleotide
gcugguugccgacaauucc

SEQ ID NO: 1232773 - RNA, 19 nt, Artificial Sequence
  Description of Artificial Sequence: Synthetic oligonucleotide
uuuccucgcuugugcugcg

SEQ ID NO: 1232774 - RNA, 19 nt, Artificial Sequence
  Description of Artificial Sequence: Synthetic oligonucleotide
agggacgauuguguccagc

SEQ ID NO: 1232775 - RNA, 19 nt, Artificial Sequence
  Description of Artificial Sequence: Synthetic oligonucleotide
agcagccauuccgaagucg

SEQ ID NO: 1232776 - RNA, 19 nt, Artificial Sequence
  Description of Artificial Sequence: Synthetic oligonucleotide
ugccggauaaugccgccau

SEQ ID NO: 1232777 - RNA, 19 nt, Artificial Sequence
  Description of Artificial Sequence: Synthetic oligonucleotide
ugauccgcucccuggcugu

SEQ ID NO: 1232778 - RNA, 19 nt, Artificial Sequence
  Description of Artificial Sequence: Synthetic oligonucleotide
aaggguuggcgaacuucuc

SEQ ID NO: 1232779 - RNA, 19 nt, Artificial Sequence
  Description of Artificial Sequence: Synthetic oligonucleotide
cgaucguuuacugcgaccg

SEQ ID NO: 1232780 - RNA, 19 nt, Artificial Sequence
  Description of Artificial Sequence: Synthetic oligonucleotide
ggcgaacuucuccacauac

SEQ ID NO: 1232781 - RNA, 19 nt, Artificial Sequence
  Description of Artificial Sequence: Synthetic oligonucleotide
uugauucggccccguccag

SEQ ID NO: 1232782 - RNA, 19 nt, Artificial Sequence
  Description of Artificial Sequence: Synthetic oligonucleotide
aaccaaucuuccauugauu

SEQ ID NO: 1232783 - RNA, 19 nt, Artificial Sequence
  Description of Artificial Sequence: Synthetic oligonucleotide
cucacggcugcagggaaag

SEQ ID NO: 1232784 - RNA, 19 nt, Artificial Sequence
  Description of Artificial Sequence: Synthetic oligonucleotide
ggcaccacccagcugcucc

SEQ ID NO: 1232785 - RNA, 19 nt, Artificial Sequence
  Description of Artificial Sequence: Synthetic oligonucleotide
agaacauauccgagcacgu

SEQ ID NO: 1232786 - RNA, 19 nt, Artificial Sequence
  Description of Artificial Sequence: Synthetic oligonucleotide
caugccggauaaugccgcc

SEQ ID NO: 1232787 - RNA, 19 nt, Artificial Sequence
  Description of Artificial Sequence: Synthetic oligonucleotide
ucaucacaaugggauauuu

SEQ ID NO: 1232788 - RNA, 19 nt, Artificial Sequence
  Description of Artificial Sequence: Synthetic oligonucleotide
ugcgcgucgaugcggcgcu

SEQ ID NO: 1232789 - RNA, 19 nt, Artificial Sequence
  Description of Artificial Sequence: Synthetic oligonucleotide
caugucauaggcuuugcuu

SEQ ID NO: 1232790 - RNA, 19 nt, Artificial Sequence
  Description of Artificial Sequence: Synthetic oligonucleotide
auuccgaagucggcgcauc

SEQ ID NO: 1232791 - RNA, 19 nt, Artificial Sequence
  Description of Artificial Sequence: Synthetic oligonucleotide
ggaaccaggcggucacugg

SEQ ID NO: 1232792 - RNA, 19 nt, Artificial Sequence
  Description of Artificial Sequence: Synthetic oligonucleotide
agucggcgcaucugugcuc

SEQ ID NO: 1232793 - RNA, 19 nt, Artificial Sequence
  Description of Artificial Sequence: Synthetic oligonucleotide
agaggauggcuggaugaug

SEQ ID NO: 1232794 - RNA, 19 nt, Artificial Sequence
  Description of Artificial Sequence: Synthetic oligonucleotide
acgauuguguccagcucag

SEQ ID NO: 1232795 - RNA, 19 nt, Artificial Sequence
  Description of Artificial Sequence: Synthetic oligonucleotide
auccgagcacguguagagg

SEQ ID NO: 1232796 - RNA, 19 nt, Artificial Sequence
  Description of Artificial Sequence: Synthetic oligonucleotide
ugccgacaauuccaacgcu

SEQ ID NO: 1232797 - RNA, 19 nt, Artificial Sequence
  Description of Artificial Sequence: Synthetic oligonucleotide
acugauccgcucccuggcu

SEQ ID NO: 1232798 - RNA, 19 nt, Artificial Sequence
  Description of Artificial Sequence: Synthetic oligonucleotide
ugcggcgcuggccuccgcc

SEQ ID NO: 1232799 - RNA, 19 nt, Artificial Sequence
  Description of Artificial Sequence: Synthetic oligonucleotide
cagugauaaacagguagga

SEQ ID NO: 1232800 - RNA, 19 nt, Artificial Sequence
  Description of Artificial Sequence: Synthetic oligonucleotide
gcguguuuccuccaaggac

SEQ ID NO: 1232801 - RNA, 19 nt, Artificial Sequence
  Description of Artificial Sequence: Synthetic oligonucleotide
ggcauaguuggugucacca

SEQ ID NO: 1232802 - RNA, 19 nt, Artificial Sequence
  Description of Artificial Sequence: Synthetic oligonucleotide
ucucacggcugcagggaaa

SEQ ID NO: 1232803 - RNA, 19 nt, Artificial Sequence
  Description of Artificial Sequence: Synthetic oligonucleotide
gaacucgcgcagguuacac

SEQ ID NO: 1232804 - RNA, 19 nt, Artificial Sequence
  Description of Artificial Sequence: Synthetic oligonucleotide
auccugacugaagacguaa

SEQ ID NO: 1232805 - RNA, 19 nt, Artificial Sequence
  Description of Artificial Sequence: Synthetic oligonucleotide
ccagggucuagcaggagac

SEQ ID NO: 1232806 - RNA, 19 nt, Artificial Sequence
  Description of Artificial Sequence: Synthetic oligonucleotide
gcguaauugggcaugaucu

SEQ ID NO: 1232807 - RNA, 19 nt, Artificial Sequence
  Description of Artificial Sequence: Synthetic oligonucleotide
ggaauccagggacaucaac

SEQ ID NO: 1232808 - RNA, 19 nt, Artificial Sequence
  Description of Artificial Sequence: Synthetic oligonucleotide
cccaugaucauugaaaucu

SEQ ID NO: 1232809 - RNA, 19 nt, Artificial Sequence
  Description of Artificial Sequence: Synthetic oligonucleotide
aaggacgauggaccuucuu

SEQ ID NO: 1232810 - RNA, 19 nt, Artificial Sequence
  Description of Artificial Sequence: Synthetic oligonucleotide
accacacuaucuccaggaa

SEQ ID NO: 1232811 - RNA, 19 nt, Artificial Sequence
  Description of Artificial Sequence: Synthetic oligonucleotide
cagccauuccgaagucggc

SEQ ID NO: 1232812 - RNA, 19 nt, Artificial Sequence
  Description of Artificial Sequence: Synthetic oligonucleotide
gcaucgcagaaccugacaa

SEQ ID NO: 1232813 - RNA, 19 nt, Artificial Sequence
  Description of Artificial Sequence: Synthetic oligonucleotide
cauacuccgccugggcagc

SEQ ID NO: 1232814 - RNA, 19 nt, Artificial Sequence
  Description of Artificial Sequence: Synthetic oligonucleotide
agguaggauguguccuuga

SEQ ID NO: 1232815 - RNA, 19 nt, Artificial Sequence
  Description of Artificial Sequence: Synthetic oligonucleotide
uacugcgaccggcuggcua

SEQ ID NO: 1232816 - RNA, 19 nt, Artificial Sequence
  Description of Artificial Sequence: Synthetic oligonucleotide
gccauuccgaagucggcgc

SEQ ID NO: 1232817 - RNA, 19 nt, Artificial Sequence
  Description of Artificial Sequence: Synthetic oligonucleotide
caggcauaguuggugucac

SEQ ID NO: 1232818 - RNA, 19 nt, Artificial Sequence
  Description of Artificial Sequence: Synthetic oligonucleotide
ggcacggcgcuuguugucg

SEQ ID NO: 1232819 - RNA, 19 nt, Artificial Sequence
  Description of Artificial Sequence: Synthetic oligonucleotide
ggcuguuagcuuuccucgc

SEQ ID NO: 1232820 - RNA, 19 nt, Artificial Sequence
  Description of Artificial Sequence: Synthetic oligonucleotide
gacgauggaccuucuugcu

SEQ ID NO: 1232821 - RNA, 19 nt, Artificial Sequence
  Description of Artificial Sequence: Synthetic oligonucleotide
caucauaggcaccuccaua

SEQ ID NO: 1232822 - RNA, 19 nt, Artificial Sequence
  Description of Artificial Sequence: Synthetic oligonucleotide
caucgcagaaccugacaaa

SEQ ID NO: 1232823 - RNA, 19 nt, Artificial Sequence
  Description of Artificial Sequence: Synthetic oligonucleotide
uggcacucucggacuggag

SEQ ID NO: 1232824 - RNA, 19 nt, Artificial Sequence
  Description of Artificial Sequence: Synthetic oligonucleotide
augacuccggaugcuguga

SEQ ID NO: 1232825 - RNA, 19 nt, Artificial Sequence
  Description of Artificial Sequence: Synthetic oligonucleotide
ccaaagggacgauuguguc

SEQ ID NO: 1232826 - RNA, 19 nt, Artificial Sequence
  Description of Artificial Sequence: Synthetic oligonucleotide
ccacaaacccucucacggc

SEQ ID NO: 1232827 - RNA, 19 nt, Artificial Sequence
  Description of Artificial Sequence: Synthetic oligonucleotide
caaugggauauuugcgugu

SEQ ID NO: 1232828 - RNA, 19 nt, Artificial Sequence
  Description of Artificial Sequence: Synthetic oligonucleotide
gucgaugcgaucguuuacu

SEQ ID NO: 1232829 - RNA, 19 nt, Artificial Sequence
  Description of Artificial Sequence: Synthetic oligonucleotide
gcacaguugccucagcaaa

SEQ ID NO: 1232830 - RNA, 19 nt, Artificial Sequence
  Description of Artificial Sequence: Synthetic oligonucleotide
cucucggacuggagcuggg

SEQ ID NO: 1232831 - RNA, 19 nt, Artificial Sequence
  Description of Artificial Sequence: Synthetic oligonucleotide
ccaugccggauaaugccgc

SEQ ID NO: 1232832 - RNA, 19 nt, Artificial Sequence
  Description of Artificial Sequence: Synthetic oligonucleotide
ugcgcccaugacugcaauc

SEQ ID NO: 1232833 - RNA, 19 nt, Artificial Sequence
  Description of Artificial Sequence: Synthetic oligonucleotide
ccauauuccugugcugugc

SEQ ID NO: 1232834 - RNA, 19 nt, Artificial Sequence
  Description of Artificial Sequence: Synthetic oligonucleotide
gaugcggcgcuggccuccg

SEQ ID NO: 1232835 - RNA, 19 nt, Artificial Sequence
  Description of Artificial Sequence: Synthetic oligonucleotide
uggcgaacuucuccacaua

SEQ ID NO: 1232836 - RNA, 19 nt, Artificial Sequence
  Description of Artificial Sequence: Synthetic oligonucleotide
ccaaggacgauggaccuuc

SEQ ID NO: 1232837 - RNA, 19 nt, Artificial Sequence
  Description of Artificial Sequence: Synthetic oligonucleotide
cucaucaaucacugagugu

SEQ ID NO: 1232838 - RNA, 19 nt, Artificial Sequence
  Description of Artificial Sequence: Synthetic oligonucleotide
cacucuccacgaagcugcc

SEQ ID NO: 1232839 - RNA, 19 nt, Artificial Sequence
  Description of Artificial Sequence: Synthetic oligonucleotide
ggcuaccuugggcugguug

SEQ ID NO: 1232840 - RNA, 19 nt, Artificial Sequence
  Description of Artificial Sequence: Synthetic oligonucleotide
uccuggauccgggcgcccc

SEQ ID NO: 1232841 - RNA, 19 nt, Artificial Sequence
  Description of Artificial Sequence: Synthetic oligonucleotide
gacugugauuuugggcaca

SEQ ID NO: 1232842 - RNA, 19 nt, Artificial Sequence
  Description of Artificial Sequence: Synthetic oligonucleotide
cugugggccacaccugaca

SEQ ID NO: 1232843 - RNA, 19 nt, Artificial Sequence
  Description of Artificial Sequence: Synthetic oligonucleotide
gucauggcacucucggacu

SEQ ID NO: 1232844 - RNA, 19 nt, Artificial Sequence
  Description of Artificial Sequence: Synthetic oligonucleotide
ucacggcugcagggaaagg

SEQ ID NO: 1232845 - RNA, 19 nt, Artificial Sequence
  Description of Artificial Sequence: Synthetic oligonucleotide
gccauauuccugugcugug

SEQ ID NO: 1232846 - RNA, 19 nt, Artificial Sequence
  Description of Artificial Sequence: Synthetic oligonucleotide
ucucggacuggagcugggu

SEQ ID NO: 1232847 - RNA, 19 nt, Artificial Sequence
  Description of Artificial Sequence: Synthetic oligonucleotide
gaagucuguuagggcagga

SEQ ID NO: 1232848 - RNA, 19 nt, Artificial Sequence
  Description of Artificial Sequence: Synthetic oligonucleotide
agaacucgcgcagguuaca

SEQ ID NO: 1232849 - RNA, 19 nt, Artificial Sequence
  Description of Artificial Sequence: Synthetic oligonucleotide
cacaaacccucucacggcu

SEQ ID NO: 1232850 - RNA, 19 nt, Artificial Sequence
  Description of Artificial Sequence: Synthetic oligonucleotide
ggagaguagacagccccac

SEQ ID NO: 1232851 - RNA, 19 nt, Artificial Sequence
  Description of Artificial Sequence: Synthetic oligonucleotide
caguggugugggucuuggc

SEQ ID NO: 1232852 - RNA, 19 nt, Artificial Sequence
  Description of Artificial Sequence: Synthetic oligonucleotide
uugccucagcaaacgcaua

SEQ ID NO: 1232853 - RNA, 19 nt, Artificial Sequence
  Description of Artificial Sequence: Synthetic oligonucleotide
agcaggagacugauccgcu

SEQ ID NO: 1232854 - RNA, 19 nt, Artificial Sequence
  Description of Artificial Sequence: Synthetic oligonucleotide
ccacagcacccuuugcgcc

SEQ ID NO: 1232855 - RNA, 19 nt, Artificial Sequence
  Description of Artificial Sequence: Synthetic oligonucleotide
gucauucaguccaaucacu

SEQ ID NO: 1232856 - RNA, 19 nt, Artificial Sequence
  Description of Artificial Sequence: Synthetic oligonucleotide
ucggccccguccagugacc

SEQ ID NO: 1232857 - RNA, 19 nt, Artificial Sequence
  Description of Artificial Sequence: Synthetic oligonucleotide
cugcgcgucgaugcggcgc

SEQ ID NO: 1232858 - RNA, 19 nt, Artificial Sequence
  Description of Artificial Sequence: Synthetic oligonucleotide
uguugucgaugcgaucguu

SEQ ID NO: 1232859 - RNA, 19 nt, Artificial Sequence
  Description of Artificial Sequence: Synthetic oligonucleotide
gguuggcgaacuucuccac

SEQ ID NO: 1232860 - RNA, 19 nt, Artificial Sequence
  Description of Artificial Sequence: Synthetic oligonucleotide
gggacgauuguguccagcu

SEQ ID NO: 1232861 - RNA, 19 nt, Artificial Sequence
  Description of Artificial Sequence: Synthetic oligonucleotide
gagugacaucuucauuggu

SEQ ID NO: 1232862 - RNA, 19 nt, Artificial Sequence
  Description of Artificial Sequence: Synthetic oligonucleotide
uccauugauucggccccgu

SEQ ID NO: 1232863 - RNA, 19 nt, Artificial Sequence
  Description of Artificial Sequence: Synthetic oligonucleotide
gcagguuacacagggcauc

SEQ ID NO: 1232864 - RNA, 19 nt, Artificial Sequence
  Description of Artificial Sequence: Synthetic oligonucleotide
agggaugacuccggaugcu

SEQ ID NO: 1232865 - RNA, 19 nt, Artificial Sequence
  Description of Artificial Sequence: Synthetic oligonucleotide
ccaagcacccugaggcuac

SEQ ID NO: 1232866 - RNA, 19 nt, Artificial Sequence
  Description of Artificial Sequence: Synthetic oligonucleotide
augggauauuugcguguuu

SEQ ID NO: 1232867 - RNA, 19 nt, Artificial Sequence
  Description of Artificial Sequence: Synthetic oligonucleotide
gagccuugcugcagccgcc

SEQ ID NO: 1232868 - RNA, 19 nt, Artificial Sequence
  Description of Artificial Sequence: Synthetic oligonucleotide
auucggccccguccaguga

SEQ ID NO: 1232869 - RNA, 19 nt, Artificial Sequence
  Description of Artificial Sequence: Synthetic oligonucleotide
ggacgauuguguccagcuc

SEQ ID NO: 1232870 - RNA, 19 nt, Artificial Sequence
  Description of Artificial Sequence: Synthetic oligonucleotide
gugcugcgcgucgaugcgg

SEQ ID NO: 1232871 - RNA, 19 nt, Artificial Sequence
  Description of Artificial Sequence: Synthetic oligonucleotide
acggcgcuuguugucgaug

SEQ ID NO: 1232872 - RNA, 19 nt, Artificial Sequence
  Description of Artificial Sequence: Synthetic oligonucleotide
cuguuagggcaggagagua

SEQ ID NO: 1232873 - RNA, 19 nt, Artificial Sequence
  Description of Artificial Sequence: Synthetic oligonucleotide
augccgccauauuccugug

SEQ ID NO: 1232874 - RNA, 19 nt, Artificial Sequence
  Description of Artificial Sequence: Synthetic oligonucleotide
caaaagugaugagugggau

SEQ ID NO: 1232875 - RNA, 19 nt, Artificial Sequence
  Description of Artificial Sequence: Synthetic oligonucleotide
ggcccaugaucauugaaau

SEQ ID NO: 1232876 - RNA, 19 nt, Artificial Sequence
  Description of Artificial Sequence: Synthetic oligonucleotide
augggcccaugaucauuga

SEQ ID NO: 1232877 - RNA, 19 nt, Artificial Sequence
  Description of Artificial Sequence: Synthetic oligonucleotide
cgaugcgaucguuuacugc

SEQ ID NO: 1232878 - RNA, 19 nt, Artificial Sequence
  Description of Artificial Sequence: Synthetic oligonucleotide
cugcguagccagccaagga

SEQ ID NO: 1232879 - RNA, 19 nt, Artificial Sequence
  Description of Artificial Sequence: Synthetic oligonucleotide
cacucucggacuggagcug

SEQ ID NO: 1232880 - RNA, 19 nt, Artificial Sequence
  Description of Artificial Sequence: Synthetic oligonucleotide
gccgacaauuccaacgcuc

SEQ ID NO: 1232881 - RNA, 19 nt, Artificial Sequence
  Description of Artificial Sequence: Synthetic oligonucleotide
augcgaucguuuacugcga

SEQ ID NO: 1232882 - RNA, 19 nt, Artificial Sequence
  Description of Artificial Sequence: Synthetic oligonucleotide
cagaucuuuugggcaugug

SEQ ID NO: 1232883 - RNA, 19 nt, Artificial Sequence
  Description of Artificial Sequence: Synthetic oligonucleotide
acugcgggucguggugcgg

SEQ ID NO: 1232884 - RNA, 19 nt, Artificial Sequence
  Description of Artificial Sequence: Synthetic oligonucleotide
gcccaugaucauugaaauc

SEQ ID NO: 1232885 - RNA, 19 nt, Artificial Sequence
  Description of Artificial Sequence: Synthetic oligonucleotide
ccaugacugcaaucucggc

SEQ ID NO: 1232886 - RNA, 19 nt, Artificial Sequence
  Description of Artificial Sequence: Synthetic oligonucleotide
ccccagagucauucagucc

SEQ ID NO: 1232887 - RNA, 19 nt, Artificial Sequence
  Description of Artificial Sequence: Synthetic oligonucleotide
gccgccauauuccugugcu

SEQ ID NO: 1232888 - RNA, 19 nt, Artificial Sequence
  Description of Artificial Sequence: Synthetic oligonucleotide
agguuacacagggcaucca

SEQ ID NO: 1232889 - RNA, 19 nt, Artificial Sequence
  Description of Artificial Sequence: Synthetic oligonucleotide
cucucacggcugcagggaa

SEQ ID NO: 1232890 - RNA, 19 nt, Artificial Sequence
  Description of Artificial Sequence: Synthetic oligonucleotide
uugcguaauugggcaugau

SEQ ID NO: 1232891 - RNA, 19 nt, Artificial Sequence
  Description of Artificial Sequence: Synthetic oligonucleotide
caucaaucacugaguguau

SEQ ID NO: 1232892 - RNA, 19 nt, Artificial Sequence
  Description of Artificial Sequence: Synthetic oligonucleotide
guugucgaugcgaucguuu

SEQ ID NO: 1232893 - RNA, 19 nt, Artificial Sequence
  Description of Artificial Sequence: Synthetic oligonucleotide
guccaagcacccugaggcu

SEQ ID NO: 1232894 - RNA, 19 nt, Artificial Sequence
  Description of Artificial Sequence: Synthetic oligonucleotide
gggucauggcacucucgga

SEQ ID NO: 1232895 - RNA, 19 nt, Artificial Sequence
  Description of Artificial Sequence: Synthetic oligonucleotide
ccugguccaugauuuugca

SEQ ID NO: 1232896 - RNA, 19 nt, Artificial Sequence
  Description of Artificial Sequence: Synthetic oligonucleotide
gccgcagcugagaacccug

SEQ ID NO: 1232897 - RNA, 19 nt, Artificial Sequence
  Description of Artificial Sequence: Synthetic oligonucleotide
agcgcggcacggcgcuugu

SEQ ID NO: 1232898 - RNA, 19 nt, Artificial Sequence
  Description of Artificial Sequence: Synthetic oligonucleotide
cgggucguggugcggaggc

SEQ ID NO: 1232899 - RNA, 19 nt, Artificial Sequence
  Description of Artificial Sequence: Synthetic oligonucleotide
agcacccuuugcgcccaug

SEQ ID NO: 1232900 - RNA, 19 nt, Artificial Sequence
  Description of Artificial Sequence: Synthetic oligonucleotide
cugagggaugacuccggau

SEQ ID NO: 1232901 - RNA, 19 nt, Artificial Sequence
  Description of Artificial Sequence: Synthetic oligonucleotide
uuacugcgaccggcuggcu

SEQ ID NO: 1232902 - RNA, 19 nt, Artificial Sequence
  Description of Artificial Sequence: Synthetic oligonucleotide
ccguccagugaccacacua

SEQ ID NO: 1232903 - RNA, 19 nt, Artificial Sequence
  Description of Artificial Sequence: Synthetic oligonucleotide
cguuuacugcgaccggcug

SEQ ID NO: 1232904 - RNA, 19 nt, Artificial Sequence
  Description of Artificial Sequence: Synthetic oligonucleotide
gccucagcaaacgcauaga

SEQ ID NO: 1232905 - RNA, 19 nt, Artificial Sequence
  Description of Artificial Sequence: Synthetic oligonucleotide
ucggcgcaucugugcucca

SEQ ID NO: 1232906 - RNA, 19 nt, Artificial Sequence
  Description of Artificial Sequence: Synthetic oligonucleotide
cagcgcggcacggcgcuug

SEQ ID NO: 1232907 - RNA, 19 nt, Artificial Sequence
  Description of Artificial Sequence: Synthetic oligonucleotide
ccaugaaugugaagucugu

SEQ ID NO: 1232908 - RNA, 19 nt, Artificial Sequence
  Description of Artificial Sequence: Synthetic oligonucleotide
cuguuagcuuuccucgcuu

SEQ ID NO: 1232909 - RNA, 19 nt, Artificial Sequence
  Description of Artificial Sequence: Synthetic oligonucleotide
gaagguguuuggagcucau

SEQ ID NO: 1232910 - RNA, 19 nt, Artificial Sequence
  Description of Artificial Sequence: Synthetic oligonucleotide
gcugcgcgucgaugcggcg

SEQ ID NO: 1232911 - RNA, 19 nt, Artificial Sequence
  Description of Artificial Sequence: Synthetic oligonucleotide
gcacguguagaggauggcu

SEQ ID NO: 1232912 - RNA, 19 nt, Artificial Sequence
  Description of Artificial Sequence: Synthetic oligonucleotide
ccauugauucggccccguc

SEQ ID NO: 1232913 - RNA, 19 nt, Artificial Sequence
  Description of Artificial Sequence: Synthetic oligonucleotide
ccgccauauuccugugcug

SEQ ID NO: 1232914 - RNA, 19 nt, Artificial Sequence
  Description of Artificial Sequence: Synthetic oligonucleotide
cuccgcccagcagcgcggc

SEQ ID NO: 1232915 - RNA, 19 nt, Artificial Sequence
  Description of Artificial Sequence: Synthetic oligonucleotide
gcgucgaugcggcgcuggc

SEQ ID NO: 1232916 - RNA, 19 nt, Artificial Sequence
  Description of Artificial Sequence: Synthetic oligonucleotide
cgagcacguguagaggaug

SEQ ID NO: 1232917 - RNA, 19 nt, Artificial Sequence
  Description of Artificial Sequence: Synthetic oligonucleotide
gcaaacgcauagagcagcu

SEQ ID NO: 1232918 - RNA, 19 nt, Artificial Sequence
  Description of Artificial Sequence: Synthetic oligonucleotide
cgaccggcuggcuacaaaa

SEQ ID NO: 1232919 - RNA, 19 nt, Artificial Sequence
  Description of Artificial Sequence: Synthetic oligonucleotide
ccacucuuauggccugguc

SEQ ID NO: 1232920 - RNA, 19 nt, Artificial Sequence
  Description of Artificial Sequence: Synthetic oligonucleotide
ugcgaccggcuggcuacaa

SEQ ID NO: 1232921 - RNA, 19 nt, Artificial Sequence
  Description of Artificial Sequence: Synthetic oligonucleotide
acgaagcugccagggucua

SEQ ID NO: 1232922 - RNA, 19 nt, Artificial Sequence
  Description of Artificial Sequence: Synthetic oligonucleotide
cguaaaccaaucuuccauu

SEQ ID NO: 1232923 - RNA, 19 nt, Artificial Sequence
  Description of Artificial Sequence: Synthetic oligonucleotide
gcgaacuucuccacauacu

SEQ ID NO: 1232924 - RNA, 19 nt, Artificial Sequence
  Description of Artificial Sequence: Synthetic oligonucleotide
ccaacgcuccucccauuca

SEQ ID NO: 1232925 - RNA, 19 nt, Artificial Sequence
  Description of Artificial Sequence: Synthetic oligonucleotide
cgcgcagguuacacagggc

SEQ ID NO: 1232926 - RNA, 19 nt, Artificial Sequence
  Description of Artificial Sequence: Synthetic oligonucleotide
ccauuccgaagucggcgca

SEQ ID NO: 1232927 - RNA, 19 nt, Artificial Sequence
  Description of Artificial Sequence: Synthetic oligonucleotide
ccccguccagugaccacac

SEQ ID NO: 1232928 - RNA, 19 nt, Artificial Sequence
  Description of Artificial Sequence: Synthetic oligonucleotide
caaggacgauggaccuucu

SEQ ID NO: 1232929 - RNA, 19 nt, Artificial Sequence
  Description of Artificial Sequence: Synthetic oligonucleotide
ccucucacggcugcaggga

SEQ ID NO: 1232930 - RNA, 19 nt, Artificial Sequence
  Description of Artificial Sequence: Synthetic oligonucleotide
cauuccgaagucggcgcau

SEQ ID NO: 1232931 - RNA, 19 nt, Artificial Sequence
  Description of Artificial Sequence: Synthetic oligonucleotide
ccggauaaugccgccauau

SEQ ID NO: 1232932 - RNA, 19 nt, Artificial Sequence
  Description of Artificial Sequence: Synthetic oligonucleotide
gcacggcgcuuguugucga

SEQ ID NO: 1232933 - RNA, 19 nt, Artificial Sequence
  Description of Artificial Sequence: Synthetic oligonucleotide
cguccagugaccacacuau

SEQ ID NO: 1232934 - RNA, 19 nt, Artificial Sequence
  Description of Artificial Sequence: Synthetic oligonucleotide
gcagaucuuuugggcaugu

SEQ ID NO: 1232935 - RNA, 19 nt, Artificial Sequence
  Description of Artificial Sequence: Synthetic oligonucleotide
cagggucuagcaggagacu

SEQ ID NO: 1232936 - RNA, 19 nt, Artificial Sequence
  Description of Artificial Sequence: Synthetic oligonucleotide
ggaaaggguuggcgaacuu

SEQ ID NO: 1232937 - RNA, 19 nt, Artificial Sequence
  Description of Artificial Sequence: Synthetic oligonucleotide
ccgcagcugagaacccuga

SEQ ID NO: 1232938 - RNA, 19 nt, Artificial Sequence
  Description of Artificial Sequence: Synthetic oligonucleotide
gcgaccggcuggcuacaaa

SEQ ID NO: 1232939 - RNA, 19 nt, Artificial Sequence
  Description of Artificial Sequence: Synthetic oligonucleotide
cgcgucgaugcggcgcugg

SEQ ID NO: 1232940 - RNA, 19 nt, Artificial Sequence
  Description of Artificial Sequence: Synthetic oligonucleotide
gccggauaaugccgccaua

SEQ ID NO: 1232941 - RNA, 19 nt, Artificial Sequence
  Description of Artificial Sequence: Synthetic oligonucleotide
ggccagugauaaacaggua

SEQ ID NO: 1232942 - RNA, 19 nt, Artificial Sequence
  Description of Artificial Sequence: Synthetic oligonucleotide
cuccggaugcugugacauu

SEQ ID NO: 1232943 - RNA, 19 nt, Artificial Sequence
  Description of Artificial Sequence: Synthetic oligonucleotide
cacggcgcuuguugucgau

SEQ ID NO: 1232944 - RNA, 19 nt, Artificial Sequence
  Description of Artificial Sequence: Synthetic oligonucleotide
gauccgcucccuggcuguu

SEQ ID NO: 1232945 - RNA, 19 nt, Artificial Sequence
  Description of Artificial Sequence: Synthetic oligonucleotide
cggcacggcgcuuguuguc

SEQ ID NO: 1232946 - RNA, 19 nt, Artificial Sequence
  Description of Artificial Sequence: Synthetic oligonucleotide
caccuccauaggccuuccu

SEQ ID NO: 1232947 - RNA, 19 nt, Artificial Sequence
  Description of Artificial Sequence: Synthetic oligonucleotide
ccucgcuugugcugcgcgu

SEQ ID NO: 1232948 - RNA, 19 nt, Artificial Sequence
  Description of Artificial Sequence: Synthetic oligonucleotide
ggcggucacuggggucaug

SEQ ID NO: 1232949 - RNA, 19 nt, Artificial Sequence
  Description of Artificial Sequence: Synthetic oligonucleotide
cggcgcaucugugcuccac

SEQ ID NO: 1232950 - RNA, 19 nt, Artificial Sequence
  Description of Artificial Sequence: Synthetic oligonucleotide
cggauaaugccgccauauu

SEQ ID NO: 1232951 - RNA, 19 nt, Artificial Sequence
  Description of Artificial Sequence: Synthetic oligonucleotide
gcgcgucgaugcggcgcug

SEQ ID NO: 1232952 - RNA, 19 nt, Artificial Sequence
  Description of Artificial Sequence: Synthetic oligonucleotide
cggccccguccagugacca

SEQ ID NO: 1232953 - RNA, 19 nt, Artificial Sequence
  Description of Artificial Sequence: Synthetic oligonucleotide
cccguccagugaccacacu

SEQ ID NO: 1232954 - RNA, 19 nt, Artificial Sequence
  Description of Artificial Sequence: Synthetic oligonucleotide
gcagcgcggcacggcgcuu

SEQ ID NO: 1232955 - RNA, 19 nt, Artificial Sequence
  Description of Artificial Sequence: Synthetic oligonucleotide
gcgcggcacggcgcuuguu

SEQ ID NO: 1232956 - RNA, 19 nt, Artificial Sequence
  Description of Artificial Sequence: Synthetic oligonucleotide
ucucagaauacacagaagg

SEQ ID NO: 1232957 - RNA, 19 nt, Artificial Sequence
  Description of Artificial Sequence: Synthetic oligonucleotide
ucaauaauauuuaugggcc

SEQ ID NO: 1232958 - RNA, 19 nt, Artificial Sequence
  Description of Artificial Sequence: Synthetic oligonucleotide
agcacuagaagacaggacc

SEQ ID NO: 1232959 - RNA, 19 nt, Artificial Sequence
  Description of Artificial Sequence: Synthetic oligonucleotide
uacaguauagaaagggugg

SEQ ID NO: 1232960 - RNA, 19 nt, Artificial Sequence
  Description of Artificial Sequence: Synthetic oligonucleotide
aauacuaagggaaaggcug

SEQ ID NO: 1232961 - RNA, 19 nt, Artificial Sequence
  Description of Artificial Sequence: Synthetic oligonucleotide
ucuauaaguugacaaagug

SEQ ID NO: 1232962 - RNA, 19 nt, Artificial Sequence
  Description of Artificial Sequence: Synthetic oligonucleotide
uuugcuucgaucuuuguac

SEQ ID NO: 1232963 - RNA, 19 nt, Artificial Sequence
  Description of Artificial Sequence: Synthetic oligonucleotide
uguuuaacgaaaguggucc

SEQ ID NO: 1232964 - RNA, 19 nt, Artificial Sequence
  Description of Artificial Sequence: Synthetic oligonucleotide
uuacaguauagaaagggug

SEQ ID NO: 1232965 - RNA, 19 nt, Artificial Sequence
  Description of Artificial Sequence: Synthetic oligonucleotide
ugagagaggguucuuagcc

SEQ ID NO: 1232966 - RNA, 19 nt, Artificial Sequence
  Description of Artificial Sequence: Synthetic oligonucleotide
ugucaauaauauuuauggg

SEQ ID NO: 1232967 - RNA, 19 nt, Artificial Sequence
  Description of Artificial Sequence: Synthetic oligonucleotide
cagaggaucagacaaaggc

SEQ ID NO: 1232968 - RNA, 19 nt, Artificial Sequence
  Description of Artificial Sequence: Synthetic oligonucleotide
uaucccaacaucaugccug

SEQ ID NO: 1232969 - RNA, 19 nt, Artificial Sequence
  Description of Artificial Sequence: Synthetic oligonucleotide
cuaaucucagaacaacugg

SEQ ID NO: 1232970 - RNA, 19 nt, Artificial Sequence
  Description of Artificial Sequence: Synthetic oligonucleotide
aaaggcaaugcccucugag

SEQ ID NO: 1232971 - RNA, 19 nt, Artificial Sequence
  Description of Artificial Sequence: Synthetic oligonucleotide
uuuggggccaugcugacug

SEQ ID NO: 1232972 - RNA, 19 nt, Artificial Sequence
  Description of Artificial Sequence: Synthetic oligonucleotide
aaaggacgagacucgugcc

SEQ ID NO: 1232973 - RNA, 19 nt, Artificial Sequence
  Description of Artificial Sequence: Synthetic oligonucleotide
aaaugagugacucgaggcu

SEQ ID NO: 1232974 - RNA, 19 nt, Artificial Sequence
  Description of Artificial Sequence: Synthetic oligonucleotide
auuucacuaauucuuguca

SEQ ID NO: 1232975 - RNA, 19 nt, Artificial Sequence
  Description of Artificial Sequence: Synthetic oligonucleotide
gagucuguuucuuuuaaug

SEQ ID NO: 1232976 - RNA, 19 nt, Artificial Sequence
  Description of Artificial Sequence: Synthetic oligonucleotide
uacuuauagaaguccauca

SEQ ID NO: 1232977 - RNA, 19 nt, Artificial Sequence
  Description of Artificial Sequence: Synthetic oligonucleotide
acacacaacgucucgcacc

SEQ ID NO: 1232978 - RNA, 19 nt, Artificial Sequence
  Description of Artificial Sequence: Synthetic oligonucleotide
aacgaaagugguccucugg

SEQ ID NO: 1232979 - RNA, 19 nt, Artificial Sequence
  Description of Artificial Sequence: Synthetic oligonucleotide
gaauuguugccuuuaauaa

SEQ ID NO: 1232980 - RNA, 19 nt, Artificial Sequence
  Description of Artificial Sequence: Synthetic oligonucleotide
cauggaauaacucgugagc

SEQ ID NO: 1232981 - RNA, 19 nt, Artificial Sequence
  Description of Artificial Sequence: Synthetic oligonucleotide
aucaaaucgaacaaggacu

SEQ ID NO: 1232982 - RNA, 19 nt, Artificial Sequence
  Description of Artificial Sequence: Synthetic oligonucleotide
agugacucgaggcuggcgg

SEQ ID NO: 1232983 - RNA, 19 nt, Artificial Sequence
  Description of Artificial Sequence: Synthetic oligonucleotide
agaacucgcucauagaaca

SEQ ID NO: 1232984 - RNA, 19 nt, Artificial Sequence
  Description of Artificial Sequence: Synthetic oligonucleotide
caaaggacgagacucgugc

SEQ ID NO: 1232985 - RNA, 19 nt, Artificial Sequence
  Description of Artificial Sequence: Synthetic oligonucleotide
  modified_base (16)..(16): a, c, u, g, unknown or other
uucuuuaucccggacngug

SEQ ID NO: 1232986 - RNA, 19 nt, Artificial Sequence
  Description of Artificial Sequence: Synthetic oligonucleotide
accauauuacuagugaguc

SEQ ID NO: 1232987 - RNA, 19 nt, Artificial Sequence
  Description of Artificial Sequence: Synthetic oligonucleotide
aguugucacacacaacguc

SEQ ID NO: 1232988 - RNA, 19 nt, Artificial Sequence
  Description of Artificial Sequence: Synthetic oligonucleotide
uaaguugacaaagugucca

SEQ ID NO: 1232989 - RNA, 19 nt, Artificial Sequence
  Description of Artificial Sequence: Synthetic oligonucleotide
aacaccuagcauauuacag

SEQ ID NO: 1232990 - RNA, 19 nt, Artificial Sequence
  Description of Artificial Sequence: Synthetic oligonucleotide
gauacuauccucacaugag

SEQ ID NO: 1232991 - RNA, 19 nt, Artificial Sequence
  Description of Artificial Sequence: Synthetic oligonucleotide
auggauacuauccucacau

SEQ ID NO: 1232992 - RNA, 19 nt, Artificial Sequence
  Description of Artificial Sequence: Synthetic oligonucleotide
aacugcacgugcucaugcc

SEQ ID NO: 1232993 - RNA, 19 nt, Artificial Sequence
  Description of Artificial Sequence: Synthetic oligonucleotide
aucggaaauccacagccac

SEQ ID NO: 1232994 - RNA, 19 nt, Artificial Sequence
  Description of Artificial Sequence: Synthetic oligonucleotide
aacucgcucauagaacagc

SEQ ID NO: 1232995 - RNA, 19 nt, Artificial Sequence
  Description of Artificial Sequence: Synthetic oligonucleotide
ucaaaucgaacaaggacuc

SEQ ID NO: 1232996 - RNA, 19 nt, Artificial Sequence
  Description of Artificial Sequence: Synthetic oligonucleotide
aagguaucaaaucgaacaa

SEQ ID NO: 1232997 - RNA, 19 nt, Artificial Sequence
  Description of Artificial Sequence: Synthetic oligonucleotide
uggaauacuaagggaaagg

SEQ ID NO: 1232998 - RNA, 19 nt, Artificial Sequence
  Description of Artificial Sequence: Synthetic oligonucleotide
cucagaauacacagaaggc

SEQ ID NO: 1232999 - RNA, 19 nt, Artificial Sequence
  Description of Artificial Sequence: Synthetic oligonucleotide
acuauccucacaugaggac

SEQ ID NO: 1233000 - RNA, 19 nt, Artificial Sequence
  Description of Artificial Sequence: Synthetic oligonucleotide
aguauagaaaggguggcuc

SEQ ID NO: 1233001 - RNA, 19 nt, Artificial Sequence
  Description of Artificial Sequence: Synthetic oligonucleotide
acauggaauaacucgugag

SEQ ID NO: 1233002 - RNA, 19 nt, Artificial Sequence
  Description of Artificial Sequence: Synthetic oligonucleotide
ucagaugagaugaaaugau

SEQ ID NO: 1233003 - RNA, 19 nt, Artificial Sequence
  Description of Artificial Sequence: Synthetic oligonucleotide
caaggaacugggauggacg

SEQ ID NO: 1233004 - RNA, 19 nt, Artificial Sequence
  Description of Artificial Sequence: Synthetic oligonucleotide
cagaauacacagaaggcug

SEQ ID NO: 1233005 - RNA, 19 nt, Artificial Sequence
  Description of Artificial Sequence: Synthetic oligonucleotide
ugcucaugccgcuucaagg

SEQ ID NO: 1233006 - RNA, 19 nt, Artificial Sequence
  Description of Artificial Sequence: Synthetic oligonucleotide
agugucaucggaaauccac

SEQ ID NO: 1233007 - RNA, 19 nt, Artificial Sequence
  Description of Artificial Sequence: Synthetic oligonucleotide
gacaacugccaucaaucgg

SEQ ID NO: 1233008 - RNA, 19 nt, Artificial Sequence
  Description of Artificial Sequence: Synthetic oligonucleotide
aaguugacaaaguguccag

SEQ ID NO: 1233009 - RNA, 19 nt, Artificial Sequence
  Description of Artificial Sequence: Synthetic oligonucleotide
auaucuaugcugaaauguc

SEQ ID NO: 1233010 - RNA, 19 nt, Artificial Sequence
  Description of Artificial Sequence: Synthetic oligonucleotide
aaucgaacaaggacucugg

SEQ ID NO: 1233011 - RNA, 19 nt, Artificial Sequence
  Description of Artificial Sequence: Synthetic oligonucleotide
acuagaagacaggaccucc

SEQ ID NO: 1233012 - RNA, 19 nt, Artificial Sequence
  Description of Artificial Sequence: Synthetic oligonucleotide
aaugagugacucgaggcug

SEQ ID NO: 1233013 - RNA, 19 nt, Artificial Sequence
  Description of Artificial Sequence: Synthetic oligonucleotide
cuagcauauuacaguauag

SEQ ID NO: 1233014 - RNA, 19 nt, Artificial Sequence
  Description of Artificial Sequence: Synthetic oligonucleotide
cagcuuagcauccaagacc

SEQ ID NO: 1233015 - RNA, 19 nt, Artificial Sequence
  Description of Artificial Sequence: Synthetic oligonucleotide
cuucaaaggacgagacucg

SEQ ID NO: 1233016 - RNA, 19 nt, Artificial Sequence
  Description of Artificial Sequence: Synthetic oligonucleotide
agugauuggacguggggug

SEQ ID NO: 1233017 - RNA, 19 nt, Artificial Sequence
  Description of Artificial Sequence: Synthetic oligonucleotide
acagaacucgcucauagaa

SEQ ID NO: 1233018 - RNA, 19 nt, Artificial Sequence
  Description of Artificial Sequence: Synthetic oligonucleotide
aauggauacuauccucaca

SEQ ID NO: 1233019 - RNA, 19 nt, Artificial Sequence
  Description of Artificial Sequence: Synthetic oligonucleotide
agggaaugaacaucaaaca

SEQ ID NO: 1233020 - RNA, 19 nt, Artificial Sequence
  Description of Artificial Sequence: Synthetic oligonucleotide
aaggcaaugcccucugaga

SEQ ID NO: 1233021 - RNA, 19 nt, Artificial Sequence
  Description of Artificial Sequence: Synthetic oligonucleotide
auaaguugacaaagugucc

SEQ ID NO: 1233022 - RNA, 19 nt, Artificial Sequence
  Description of Artificial Sequence: Synthetic oligonucleotide
gacucuagguucucacugg

SEQ ID NO: 1233023 - RNA, 19 nt, Artificial Sequence
  Description of Artificial Sequence: Synthetic oligonucleotide
acaccuagcauauuacagu

SEQ ID NO: 1233024 - RNA, 19 nt, Artificial Sequence
  Description of Artificial Sequence: Synthetic oligonucleotide
aggguucuuagccgaaggc

SEQ ID NO: 1233025 - RNA, 19 nt, Artificial Sequence
  Description of Artificial Sequence: Synthetic oligonucleotide
cuaugcugaaaugucagag

SEQ ID NO: 1233026 - RNA, 19 nt, Artificial Sequence
  Description of Artificial Sequence: Synthetic oligonucleotide
cagguaagcacuagaagac

SEQ ID NO: 1233027 - RNA, 19 nt, Artificial Sequence
  Description of Artificial Sequence: Synthetic oligonucleotide
ugucaucggaaauccacag

SEQ ID NO: 1233028 - RNA, 19 nt, Artificial Sequence
  Description of Artificial Sequence: Synthetic oligonucleotide
acgacaacugccaucaauc

SEQ ID NO: 1233029 - RNA, 19 nt, Artificial Sequence
  Description of Artificial Sequence: Synthetic oligonucleotide
caugccuaaucucagaaca

SEQ ID NO: 1233030 - RNA, 19 nt, Artificial Sequence
  Description of Artificial Sequence: Synthetic oligonucleotide
uguggcaggucacaugucu

SEQ ID NO: 1233031 - RNA, 19 nt, Artificial Sequence
  Description of Artificial Sequence: Synthetic oligonucleotide
uaagcacuagaagacagga

SEQ ID NO: 1233032 - RNA, 19 nt, Artificial Sequence
  Description of Artificial Sequence: Synthetic oligonucleotide
cucaagacauccagcaggc

SEQ ID NO: 1233033 - RNA, 19 nt, Artificial Sequence
  Description of Artificial Sequence: Synthetic oligonucleotide
ucagaccuggcuuuugggc

SEQ ID NO: 1233034 - RNA, 19 nt, Artificial Sequence
  Description of Artificial Sequence: Synthetic oligonucleotide
ucaugccgcuucaagggcg

SEQ ID NO: 1233035 - RNA, 19 nt, Artificial Sequence
  Description of Artificial Sequence: Synthetic oligonucleotide
cucguuaaacugcacgugc

SEQ ID NO: 1233036 - RNA, 19 nt, Artificial Sequence
  Description of Artificial Sequence: Synthetic oligonucleotide
uuucacuaauucuugucaa

SEQ ID NO: 1233037 - RNA, 19 nt, Artificial Sequence
  Description of Artificial Sequence: Synthetic oligonucleotide
acuaauucuugucaauaau

SEQ ID NO: 1233038 - RNA, 19 nt, Artificial Sequence
  Description of Artificial Sequence: Synthetic oligonucleotide
cauagaacagcagguaagc

SEQ ID NO: 1233039 - RNA, 19 nt, Artificial Sequence
  Description of Artificial Sequence: Synthetic oligonucleotide
aaccauauuacuagugagu

SEQ ID NO: 1233040 - RNA, 19 nt, Artificial Sequence
  Description of Artificial Sequence: Synthetic oligonucleotide
uuggcuugcacguguacgc

SEQ ID NO: 1233041 - RNA, 19 nt, Artificial Sequence
  Description of Artificial Sequence: Synthetic oligonucleotide
uuuuaaugaccugugucac

SEQ ID NO: 1233042 - RNA, 19 nt, Artificial Sequence
  Description of Artificial Sequence: Synthetic oligonucleotide
ugugucacaauggauacua

SEQ ID NO: 1233043 - RNA, 19 nt, Artificial Sequence
  Description of Artificial Sequence: Synthetic oligonucleotide
ucgaacaaggacucuggug

SEQ ID NO: 1233044 - RNA, 19 nt, Artificial Sequence
  Description of Artificial Sequence: Synthetic oligonucleotide
cacacaacgucucgcaccg

SEQ ID NO: 1233045 - RNA, 19 nt, Artificial Sequence
  Description of Artificial Sequence: Synthetic oligonucleotide
ucguucaucuuccagugau

SEQ ID NO: 1233046 - RNA, 19 nt, Artificial Sequence
  Description of Artificial Sequence: Synthetic oligonucleotide
agcuucaauuguuuaacga

SEQ ID NO: 1233047 - RNA, 19 nt, Artificial Sequence
  Description of Artificial Sequence: Synthetic oligonucleotide
agaugagaugaaaugauga

SEQ ID NO: 1233048 - RNA, 19 nt, Artificial Sequence
  Description of Artificial Sequence: Synthetic oligonucleotide
ugacauggaauaacucgug

SEQ ID NO: 1233049 - RNA, 19 nt, Artificial Sequence
  Description of Artificial Sequence: Synthetic oligonucleotide
uuguuuaacgaaagugguc

SEQ ID NO: 1233050 - RNA, 19 nt, Artificial Sequence
  Description of Artificial Sequence: Synthetic oligonucleotide
guauagaaaggguggcucc

SEQ ID NO: 1233051 - RNA, 19 nt, Artificial Sequence
  Description of Artificial Sequence: Synthetic oligonucleotide
auuguuuaacgaaaguggu

SEQ ID NO: 1233052 - RNA, 19 nt, Artificial Sequence
  Description of Artificial Sequence: Synthetic oligonucleotide
aagggcgugccauggcugg

SEQ ID NO: 1233053 - RNA, 19 nt, Artificial Sequence
  Description of Artificial Sequence: Synthetic oligonucleotide
acuuauagaaguccaucau

SEQ ID NO: 1233054 - RNA, 19 nt, Artificial Sequence
  Description of Artificial Sequence: Synthetic oligonucleotide
acaacugccaucaaucgga

SEQ ID NO: 1233055 - RNA, 19 nt, Artificial Sequence
  Description of Artificial Sequence: Synthetic oligonucleotide
ugguugcugguugagagag

SEQ ID NO: 1233056 - RNA, 19 nt, Artificial Sequence
  Description of Artificial Sequence: Synthetic oligonucleotide
cuaauucuugucaauaaua

SEQ ID NO: 1233057 - RNA, 19 nt, Artificial Sequence
  Description of Artificial Sequence: Synthetic oligonucleotide
agccgcuggagauggauac

SEQ ID NO: 1233058 - RNA, 19 nt, Artificial Sequence
  Description of Artificial Sequence: Synthetic oligonucleotide
uuaacgaaagugguccucu

SEQ ID NO: 1233059 - RNA, 19 nt, Artificial Sequence
  Description of Artificial Sequence: Synthetic oligonucleotide
ucuugggucaugccuaauc

SEQ ID NO: 1233060 - RNA, 19 nt, Artificial Sequence
  Description of Artificial Sequence: Synthetic oligonucleotide
accgucuauaaguugacaa

SEQ ID NO: 1233061 - RNA, 19 nt, Artificial Sequence
  Description of Artificial Sequence: Synthetic oligonucleotide
cuugcaaaccauauuacua

SEQ ID NO: 1233062 - RNA, 19 nt, Artificial Sequence
  Description of Artificial Sequence: Synthetic oligonucleotide
accgacucagaugagauga

SEQ ID NO: 1233063 - RNA, 19 nt, Artificial Sequence
  Description of Artificial Sequence: Synthetic oligonucleotide
gcagguaagcacuagaaga

SEQ ID NO: 1233064 - RNA, 19 nt, Artificial Sequence
  Description of Artificial Sequence: Synthetic oligonucleotide
uagugagucuuccauggaa

SEQ ID NO: 1233065 - RNA, 19 nt, Artificial Sequence
  Description of Artificial Sequence: Synthetic oligonucleotide
  modified_base (4)..(4): a, c, u, g, unknown or other
gacnguggaccucaccaug

SEQ ID NO: 1233066 - RNA, 19 nt, Artificial Sequence
  Description of Artificial Sequence: Synthetic oligonucleotide
uccagugaugaggugauga

SEQ ID NO: 1233067 - RNA, 19 nt, Artificial Sequence
  Description of Artificial Sequence: Synthetic oligonucleotide
agugcaugucuccauggug

SEQ ID NO: 1233068 - RNA, 19 nt, Artificial Sequence
  Description of Artificial Sequence: Synthetic oligonucleotide
uauuuaugggccuccuuau

SEQ ID NO: 1233069 - RNA, 19 nt, Artificial Sequence
  Description of Artificial Sequence: Synthetic oligonucleotide
ucguuaaacugcacgugcu

SEQ ID NO: 1233070 - RNA, 19 nt, Artificial Sequence
  Description of Artificial Sequence: Synthetic oligonucleotide
acgaaagugguccucuggu

SEQ ID NO: 1233071 - RNA, 19 nt, Artificial Sequence
  Description of Artificial Sequence: Synthetic oligonucleotide
caaagguaucaaaucgaac

SEQ ID NO: 1233072 - RNA, 19 nt, Artificial Sequence
  Description of Artificial Sequence: Synthetic oligonucleotide
cucgcaccgacucagauga

SEQ ID NO: 1233073 - RNA, 19 nt, Artificial Sequence
  Description of Artificial Sequence: Synthetic oligonucleotide
ucaaaggacgagacucgug

SEQ ID NO: 1233074 - RNA, 19 nt, Artificial Sequence
  Description of Artificial Sequence: Synthetic oligonucleotide
acaauggauacuauccuca

SEQ ID NO: 1233075 - RNA, 19 nt, Artificial Sequence
  Description of Artificial Sequence: Synthetic oligonucleotide
aggcgguacuuauagaagu

SEQ ID NO: 1233076 - RNA, 19 nt, Artificial Sequence
  Description of Artificial Sequence: Synthetic oligonucleotide
uguguccuguaguuccagg

SEQ ID NO: 1233077 - RNA, 19 nt, Artificial Sequence
  Description of Artificial Sequence: Synthetic oligonucleotide
aagcacuagaagacaggac

SEQ ID NO: 1233078 - RNA, 19 nt, Artificial Sequence
  Description of Artificial Sequence: Synthetic oligonucleotide
ucaagggcgugccauggcu

SEQ ID NO: 1233079 - RNA, 19 nt, Artificial Sequence
  Description of Artificial Sequence: Synthetic oligonucleotide
cuauaaguugacaaagugu

SEQ ID NO: 1233080 - RNA, 19 nt, Artificial Sequence
  Description of Artificial Sequence: Synthetic oligonucleotide
gaacaccuagcauauuaca

SEQ ID NO: 1233081 - RNA, 19 nt, Artificial Sequence
  Description of Artificial Sequence: Synthetic oligonucleotide
agcuuagcauccaagaccu

SEQ ID NO: 1233082 - RNA, 19 nt, Artificial Sequence
  Description of Artificial Sequence: Synthetic oligonucleotide
gcuggagauggauacagag

SEQ ID NO: 1233083 - RNA, 19 nt, Artificial Sequence
  Description of Artificial Sequence: Synthetic oligonucleotide
guaagcacuagaagacagg

SEQ ID NO: 1233084 - RNA, 19 nt, Artificial Sequence
  Description of Artificial Sequence: Synthetic oligonucleotide
ugguggacgacaacugcca

SEQ ID NO: 1233085 - RNA, 19 nt, Artificial Sequence
  Description of Artificial Sequence: Synthetic oligonucleotide
uuaugggccuccuuauuaa

SEQ ID NO: 1233086 - RNA, 19 nt, Artificial Sequence
  Description of Artificial Sequence: Synthetic oligonucleotide
ggaauacuaagggaaaggc

SEQ ID NO: 1233087 - RNA, 19 nt, Artificial Sequence
  Description of Artificial Sequence: Synthetic oligonucleotide
uguacauccucaagacauc

SEQ ID NO: 1233088 - RNA, 19 nt, Artificial Sequence
  Description of Artificial Sequence: Synthetic oligonucleotide
uuuugggccgauugugugu

SEQ ID NO: 1233089 - RNA, 19 nt, Artificial Sequence
  Description of Artificial Sequence: Synthetic oligonucleotide
gcucaugccgcuucaaggg

SEQ ID NO: 1233090 - RNA, 19 nt, Artificial Sequence
  Description of Artificial Sequence: Synthetic oligonucleotide
uccagugauuggacguggg

SEQ ID NO: 1233091 - RNA, 19 nt, Artificial Sequence
  Description of Artificial Sequence: Synthetic oligonucleotide
cagucaacgcuccuuuugc

SEQ ID NO: 1233092 - RNA, 19 nt, Artificial Sequence
  Description of Artificial Sequence: Synthetic oligonucleotide
agaggaucagacaaaggca

SEQ ID NO: 1233093 - RNA, 19 nt, Artificial Sequence
  Description of Artificial Sequence: Synthetic oligonucleotide
ucaucaggaacucguuaaa

SEQ ID NO: 1233094 - RNA, 19 nt, Artificial Sequence
  Description of Artificial Sequence: Synthetic oligonucleotide
uuaaacugcacgugcucau

SEQ ID NO: 1233095 - RNA, 19 nt, Artificial Sequence
  Description of Artificial Sequence: Synthetic oligonucleotide
ucacuaauucuugucaaua

SEQ ID NO: 1233096 - RNA, 19 nt, Artificial Sequence
  Description of Artificial Sequence: Synthetic oligonucleotide
ugugacucuugggucaugc

SEQ ID NO: 1233097 - RNA, 19 nt, Artificial Sequence
  Description of Artificial Sequence: Synthetic oligonucleotide
caugguggacgacaacugc

SEQ ID NO: 1233098 - RNA, 19 nt, Artificial Sequence
  Description of Artificial Sequence: Synthetic oligonucleotide
aaucucagaacaacuggaa

SEQ ID NO: 1233099 - RNA, 19 nt, Artificial Sequence
  Description of Artificial Sequence: Synthetic oligonucleotide
  modified_base (13)..(13): a, c, u, g, unknown or other
uuuaucccggacnguggac

SEQ ID NO: 1233100 - RNA, 19 nt, Artificial Sequence
  Description of Artificial Sequence: Synthetic oligonucleotide
ucaugccuaaucucagaac

SEQ ID NO: 1233101 - RNA, 19 nt, Artificial Sequence
  Description of Artificial Sequence: Synthetic oligonucleotide
ggacagaacucgcucauag

SEQ ID NO: 1233102 - RNA, 19 nt, Artificial Sequence
  Description of Artificial Sequence: Synthetic oligonucleotide
cagaacucgcucauagaac

SEQ ID NO: 1233103 - RNA, 19 nt, Artificial Sequence
  Description of Artificial Sequence: Synthetic oligonucleotide
aacaaggacucuggugcuc

SEQ ID NO: 1233104 - RNA, 19 nt, Artificial Sequence
  Description of Artificial Sequence: Synthetic oligonucleotide
uauagaaaggguggcuccu

SEQ ID NO: 1233105 - RNA, 19 nt, Artificial Sequence
  Description of Artificial Sequence: Synthetic oligonucleotide
uggacgagggcuaucccaa

SEQ ID NO: 1233106 - RNA, 19 nt, Artificial Sequence
  Description of Artificial Sequence: Synthetic oligonucleotide
gaggagacccucucgugug

SEQ ID NO: 1233107 - RNA, 19 nt, Artificial Sequence
  Description of Artificial Sequence: Synthetic oligonucleotide
ucucgcaccgacucagaug

SEQ ID NO: 1233108 - RNA, 19 nt, Artificial Sequence
  Description of Artificial Sequence: Synthetic oligonucleotide
gaccucacuccucagugac

SEQ ID NO: 1233109 - RNA, 19 nt, Artificial Sequence
  Description of Artificial Sequence: Synthetic oligonucleotide
ucggaaauccacagccacu

SEQ ID NO: 1233110 - RNA, 19 nt, Artificial Sequence
  Description of Artificial Sequence: Synthetic oligonucleotide
ugcuucgaucuuuguacag

SEQ ID NO: 1233111 - RNA, 19 nt, Artificial Sequence
  Description of Artificial Sequence: Synthetic oligonucleotide
acguguacgcguggcaugc

SEQ ID NO: 1233112 - RNA, 19 nt, Artificial Sequence
  Description of Artificial Sequence: Synthetic oligonucleotide
uacauccucaagacaucca

SEQ ID NO: 1233113 - RNA, 19 nt, Artificial Sequence
  Description of Artificial Sequence: Synthetic oligonucleotide
caauggauacuauccucac

SEQ ID NO: 1233114 - RNA, 19 nt, Artificial Sequence
  Description of Artificial Sequence: Synthetic oligonucleotide
acucgugccaccuguacau

SEQ ID NO: 1233115 - RNA, 19 nt, Artificial Sequence
  Description of Artificial Sequence: Synthetic oligonucleotide
  modified_base (3)..(3): a, c, u, g, unknown or other
acnguggaccucaccaugg

SEQ ID NO: 1233116 - RNA, 19 nt, Artificial Sequence
  Description of Artificial Sequence: Synthetic oligonucleotide
auggacgagggcuauccca

SEQ ID NO: 1233117 - RNA, 19 nt, Artificial Sequence
  Description of Artificial Sequence: Synthetic oligonucleotide
guggaccucaccaugggcc

SEQ ID NO: 1233118 - RNA, 19 nt, Artificial Sequence
  Description of Artificial Sequence: Synthetic oligonucleotide
gaggcgguacuuauagaag

SEQ ID NO: 1233119 - RNA, 19 nt, Artificial Sequence
  Description of Artificial Sequence: Synthetic oligonucleotide
uuuaacgaaagugguccuc

SEQ ID NO: 1233120 - RNA, 19 nt, Artificial Sequence
  Description of Artificial Sequence: Synthetic oligonucleotide
cucagaccuggcuuuuggg

SEQ ID NO: 1233121 - RNA, 19 nt, Artificial Sequence
  Description of Artificial Sequence: Synthetic oligonucleotide
guacuuauagaaguccauc

SEQ ID NO: 1233122 - RNA, 19 nt, Artificial Sequence
  Description of Artificial Sequence: Synthetic oligonucleotide
ucggacagugucaucggaa

SEQ ID NO: 1233123 - RNA, 19 nt, Artificial Sequence
  Description of Artificial Sequence: Synthetic oligonucleotide
cuggaauacuaagggaaag

SEQ ID NO: 1233124 - RNA, 19 nt, Artificial Sequence
  Description of Artificial Sequence: Synthetic oligonucleotide
uggaccucaccaugggccc

SEQ ID NO: 1233125 - RNA, 19 nt, Artificial Sequence
  Description of Artificial Sequence: Synthetic oligonucleotide
gguaagcacuagaagacag

SEQ ID NO: 1233126 - RNA, 19 nt, Artificial Sequence
  Description of Artificial Sequence: Synthetic oligonucleotide
uugcuucgaucuuuguaca

SEQ ID NO: 1233127 - RNA, 19 nt, Artificial Sequence
  Description of Artificial Sequence: Synthetic oligonucleotide
gucaaagguaucaaaucga

SEQ ID NO: 1233128 - RNA, 19 nt, Artificial Sequence
  Description of Artificial Sequence: Synthetic oligonucleotide
gugaccgucuauaaguuga

SEQ ID NO: 1233129 - RNA, 19 nt, Artificial Sequence
  Description of Artificial Sequence: Synthetic oligonucleotide
ucgugccaccuguacaucc

SEQ ID NO: 1233130 - RNA, 19 nt, Artificial Sequence
  Description of Artificial Sequence: Synthetic oligonucleotide
uggauacuauccucacaug

SEQ ID NO: 1233131 - RNA, 19 nt, Artificial Sequence
  Description of Artificial Sequence: Synthetic oligonucleotide
cugccaucaaucggaaggg

SEQ ID NO: 1233132 - RNA, 19 nt, Artificial Sequence
  Description of Artificial Sequence: Synthetic oligonucleotide
acguggggugaggagaccc

SEQ ID NO: 1233133 - RNA, 19 nt, Artificial Sequence
  Description of Artificial Sequence: Synthetic oligonucleotide
ccaucaaucggaagggccc

SEQ ID NO: 1233134 - RNA, 19 nt, Artificial Sequence
  Description of Artificial Sequence: Synthetic oligonucleotide
guuaaacugcacgugcuca

SEQ ID NO: 1233135 - RNA, 19 nt, Artificial Sequence
  Description of Artificial Sequence: Synthetic oligonucleotide
ugaccgucuauaaguugac

SEQ ID NO: 1233136 - RNA, 19 nt, Artificial Sequence
  Description of Artificial Sequence: Synthetic oligonucleotide
gagggcuaucccaacauca

SEQ ID NO: 1233137 - RNA, 19 nt, Artificial Sequence
  Description of Artificial Sequence: Synthetic oligonucleotide
uaauauuuaugggccuccu

SEQ ID NO: 1233138 - RNA, 19 nt, Artificial Sequence
  Description of Artificial Sequence: Synthetic oligonucleotide
gcaggacaaagcuuucagg

SEQ ID NO: 1233139 - RNA, 19 nt, Artificial Sequence
  Description of Artificial Sequence: Synthetic oligonucleotide
ggguucuuagccgaaggcg

SEQ ID NO: 1233140 - RNA, 19 nt, Artificial Sequence
  Description of Artificial Sequence: Synthetic oligonucleotide
ugacugcugcuccagggaa

SEQ ID NO: 1233141 - RNA, 19 nt, Artificial Sequence
  Description of Artificial Sequence: Synthetic oligonucleotide
ugcugguugagagaggguu

SEQ ID NO: 1233142 - RNA, 19 nt, Artificial Sequence
  Description of Artificial Sequence: Synthetic oligonucleotide
cugcacgugcucaugccgc

SEQ ID NO: 1233143 - RNA, 19 nt, Artificial Sequence
  Description of Artificial Sequence: Synthetic oligonucleotide
agugguccucugguguucc

SEQ ID NO: 1233144 - RNA, 19 nt, Artificial Sequence
  Description of Artificial Sequence: Synthetic oligonucleotide
uaacgaaagugguccucug

SEQ ID NO: 1233145 - RNA, 19 nt, Artificial Sequence
  Description of Artificial Sequence: Synthetic oligonucleotide
aagugguccucugguguuc

SEQ ID NO: 1233146 - RNA, 19 nt, Artificial Sequence
  Description of Artificial Sequence: Synthetic oligonucleotide
aguccaucaucaggaacuc

SEQ ID NO: 1233147 - RNA, 19 nt, Artificial Sequence
  Description of Artificial Sequence: Synthetic oligonucleotide
ucugacuugcagugauccu

SEQ ID NO: 1233148 - RNA, 19 nt, Artificial Sequence
  Description of Artificial Sequence: Synthetic oligonucleotide
aacgucucgcaccgacuca

SEQ ID NO: 1233149 - RNA, 19 nt, Artificial Sequence
  Description of Artificial Sequence: Synthetic oligonucleotide
uucaagggcgugccauggc

SEQ ID NO: 1233150 - RNA, 19 nt, Artificial Sequence
  Description of Artificial Sequence: Synthetic oligonucleotide
acucguuaaacugcacgug

SEQ ID NO: 1233151 - RNA, 19 nt, Artificial Sequence
  Description of Artificial Sequence: Synthetic oligonucleotide
cugaaaugucagaggauca

SEQ ID NO: 1233152 - RNA, 19 nt, Artificial Sequence
  Description of Artificial Sequence: Synthetic oligonucleotide
cacuaauucuugucaauaa

SEQ ID NO: 1233153 - RNA, 19 nt, Artificial Sequence
  Description of Artificial Sequence: Synthetic oligonucleotide
uugggucaugccuaaucuc

SEQ ID NO: 1233154 - RNA, 19 nt, Artificial Sequence
  Description of Artificial Sequence: Synthetic oligonucleotide
gaauacuaagggaaaggcu

SEQ ID NO: 1233155 - RNA, 19 nt, Artificial Sequence
  Description of Artificial Sequence: Synthetic oligonucleotide
cuaggccugucacuccucc

SEQ ID NO: 1233156 - RNA, 19 nt, Artificial Sequence
  Description of Artificial Sequence: Synthetic oligonucleotide
uggcuuuugggccgauugu

SEQ ID NO: 1233157 - RNA, 19 nt, Artificial Sequence
  Description of Artificial Sequence: Synthetic oligonucleotide
uuugggccgauuguguguc

SEQ ID NO: 1233158 - RNA, 19 nt, Artificial Sequence
  Description of Artificial Sequence: Synthetic oligonucleotide
uucaaaggacgagacucgu

SEQ ID NO: 1233159 - RNA, 19 nt, Artificial Sequence
  Description of Artificial Sequence: Synthetic oligonucleotide
ggugaugacauggaauaac

SEQ ID NO: 1233160 - RNA, 19 nt, Artificial Sequence
  Description of Artificial Sequence: Synthetic oligonucleotide
cauauuacuagugagucuu

SEQ ID NO: 1233161 - RNA, 19 nt, Artificial Sequence
  Description of Artificial Sequence: Synthetic oligonucleotide
agcgcugcguaggacuggc

SEQ ID NO: 1233162 - RNA, 19 nt, Artificial Sequence
  Description of Artificial Sequence: Synthetic oligonucleotide
aucgaacaaggacucuggu

SEQ ID NO: 1233163 - RNA, 19 nt, Artificial Sequence
  Description of Artificial Sequence: Synthetic oligonucleotide
  modified_base (11)..(11): a, c, u, g, unknown or other
uaucccggacnguggaccu

SEQ ID NO: 1233164 - RNA, 19 nt, Artificial Sequence
  Description of Artificial Sequence: Synthetic oligonucleotide
ugcacguguacgcguggca

SEQ ID NO: 1233165 - RNA, 19 nt, Artificial Sequence
  Description of Artificial Sequence: Synthetic oligonucleotide
gauggacgagggcuauccc

SEQ ID NO: 1233166 - RNA, 19 nt, Artificial Sequence
  Description of Artificial Sequence: Synthetic oligonucleotide
cucgcucauagaacagcag

SEQ ID NO: 1233167 - RNA, 19 nt, Artificial Sequence
  Description of Artificial Sequence: Synthetic oligonucleotide
agucaacgcuccuuuugcu

SEQ ID NO: 1233168 - RNA, 19 nt, Artificial Sequence
  Description of Artificial Sequence: Synthetic oligonucleotide
caaguggcagcuggaauac

SEQ ID NO: 1233169 - RNA, 19 nt, Artificial Sequence
  Description of Artificial Sequence: Synthetic oligonucleotide
gacucgugccaccuguaca

SEQ ID NO: 1233170 - RNA, 19 nt, Artificial Sequence
  Description of Artificial Sequence: Synthetic oligonucleotide
auagaacagcagguaagca

SEQ ID NO: 1233171 - RNA, 19 nt, Artificial Sequence
  Description of Artificial Sequence: Synthetic oligonucleotide
cagagugcaugucuccaug

SEQ ID NO: 1233172 - RNA, 19 nt, Artificial Sequence
  Description of Artificial Sequence: Synthetic oligonucleotide
gaacucgcucauagaacag

SEQ ID NO: 1233173 - RNA, 19 nt, Artificial Sequence
  Description of Artificial Sequence: Synthetic oligonucleotide
aaggcggugaccgucuaua

SEQ ID NO: 1233174 - RNA, 19 nt, Artificial Sequence
  Description of Artificial Sequence: Synthetic oligonucleotide
ggauacagaggcacugagg

SEQ ID NO: 1233175 - RNA, 19 nt, Artificial Sequence
  Description of Artificial Sequence: Synthetic oligonucleotide
aggaacucguuaaacugca

SEQ ID NO: 1233176 - RNA, 19 nt, Artificial Sequence
  Description of Artificial Sequence: Synthetic oligonucleotide
uggcuugcacguguacgcg

SEQ ID NO: 1233177 - RNA, 19 nt, Artificial Sequence
  Description of Artificial Sequence: Synthetic oligonucleotide
caucaaucggaagggcccc

SEQ ID NO: 1233178 - RNA, 19 nt, Artificial Sequence
  Description of Artificial Sequence: Synthetic oligonucleotide
ggaucagacaaaggcaaug

SEQ ID NO: 1233179 - RNA, 19 nt, Artificial Sequence
  Description of Artificial Sequence: Synthetic oligonucleotide
aauaacucgugagcaucuu

SEQ ID NO: 1233180 - RNA, 19 nt, Artificial Sequence
  Description of Artificial Sequence: Synthetic oligonucleotide
ucuuagccgaaggcgguga

SEQ ID NO: 1233181 - RNA, 19 nt, Artificial Sequence
  Description of Artificial Sequence: Synthetic oligonucleotide
gugcucaugccgcuucaag

SEQ ID NO: 1233182 - RNA, 19 nt, Artificial Sequence
  Description of Artificial Sequence: Synthetic oligonucleotide
ucguguggcaggucacaug

SEQ ID NO: 1233183 - RNA, 19 nt, Artificial Sequence
  Description of Artificial Sequence: Synthetic oligonucleotide
agguaagcacuagaagaca

SEQ ID NO: 1233184 - RNA, 19 nt, Artificial Sequence
  Description of Artificial Sequence: Synthetic oligonucleotide
cuugcacguguacgcgugg

SEQ ID NO: 1233185 - RNA, 19 nt, Artificial Sequence
  Description of Artificial Sequence: Synthetic oligonucleotide
gacgagggcuaucccaaca

SEQ ID NO: 1233186 - RNA, 19 nt, Artificial Sequence
  Description of Artificial Sequence: Synthetic oligonucleotide
acgagggcuaucccaacau

SEQ ID NO: 1233187 - RNA, 19 nt, Artificial Sequence
  Description of Artificial Sequence: Synthetic oligonucleotide
gcagcuuagcauccaagac

SEQ ID NO: 1233188 - RNA, 19 nt, Artificial Sequence
  Description of Artificial Sequence: Synthetic oligonucleotide
acucgcucauagaacagca

SEQ ID NO: 1233189 - RNA, 19 nt, Artificial Sequence
  Description of Artificial Sequence: Synthetic oligonucleotide
uucuuagccgaaggcggug

SEQ ID NO: 1233190 - RNA, 19 nt, Artificial Sequence
  Description of Artificial Sequence: Synthetic oligonucleotide
ggauggacgagggcuaucc

SEQ ID NO: 1233191 - RNA, 19 nt, Artificial Sequence
  Description of Artificial Sequence: Synthetic oligonucleotide
cuugggucaugccuaaucu

SEQ ID NO: 1233192 - RNA, 19 nt, Artificial Sequence
  Description of Artificial Sequence: Synthetic oligonucleotide
uguacgcguggcaugccuu

SEQ ID NO: 1233193 - RNA, 19 nt, Artificial Sequence
  Description of Artificial Sequence: Synthetic oligonucleotide
gcaaaccauauuacuagug

SEQ ID NO: 1233194 - RNA, 19 nt, Artificial Sequence
  Description of Artificial Sequence: Synthetic oligonucleotide
caagggcgugccauggcug

SEQ ID NO: 1233195 - RNA, 19 nt, Artificial Sequence
  Description of Artificial Sequence: Synthetic oligonucleotide
uugugucccaggaggcggu

SEQ ID NO: 1233196 - RNA, 19 nt, Artificial Sequence
  Description of Artificial Sequence: Synthetic oligonucleotide
cgucuauaaguugacaaag

SEQ ID NO: 1233197 - RNA, 19 nt, Artificial Sequence
  Description of Artificial Sequence: Synthetic oligonucleotide
auccucacaugaggacacc

SEQ ID NO: 1233198 - RNA, 19 nt, Artificial Sequence
  Description of Artificial Sequence: Synthetic oligonucleotide
gagggguuggcuugcacgu

SEQ ID NO: 1233199 - RNA, 19 nt, Artificial Sequence
  Description of Artificial Sequence: Synthetic oligonucleotide
guggacgacaacugccauc

SEQ ID NO: 1233200 - RNA, 19 nt, Artificial Sequence
  Description of Artificial Sequence: Synthetic oligonucleotide
ugcacgugcucaugccgcu

SEQ ID NO: 1233201 - RNA, 19 nt, Artificial Sequence
  Description of Artificial Sequence: Synthetic oligonucleotide
  modified_base (9)..(9): a, c, u, g, unknown or other
ucccggacnguggaccuca

SEQ ID NO: 1233202 - RNA, 19 nt, Artificial Sequence
  Description of Artificial Sequence: Synthetic oligonucleotide
gcucacagugcuugcaaac

SEQ ID NO: 1233203 - RNA, 19 nt, Artificial Sequence
  Description of Artificial Sequence: Synthetic oligonucleotide
aggucacaugucugggagu

SEQ ID NO: 1233204 - RNA, 19 nt, Artificial Sequence
  Description of Artificial Sequence: Synthetic oligonucleotide
cuccugccuccuuuugacc

SEQ ID NO: 1233205 - RNA, 19 nt, Artificial Sequence
  Description of Artificial Sequence: Synthetic oligonucleotide
uacuaagggaaaggcuguc

SEQ ID NO: 1233206 - RNA, 19 nt, Artificial Sequence
  Description of Artificial Sequence: Synthetic oligonucleotide
gguccucugguguuccacc

SEQ ID NO: 1233207 - RNA, 19 nt, Artificial Sequence
  Description of Artificial Sequence: Synthetic oligonucleotide
uugcacguguacgcguggc

SEQ ID NO: 1233208 - RNA, 19 nt, Artificial Sequence
  Description of Artificial Sequence: Synthetic oligonucleotide
acaugucugggagucacuu

SEQ ID NO: 1233209 - RNA, 19 nt, Artificial Sequence
  Description of Artificial Sequence: Synthetic oligonucleotide
ugccuucuuuaucccggac

SEQ ID NO: 1233210 - RNA, 19 nt, Artificial Sequence
  Description of Artificial Sequence: Synthetic oligonucleotide
  modified_base (19)..(19): a, c, u, g, unknown or other
gccuucuuuaucccggacn

SEQ ID NO: 1233211 - RNA, 19 nt, Artificial Sequence
  Description of Artificial Sequence: Synthetic oligonucleotide
aggcacugaggcagcuucc

SEQ ID NO: 1233212 - RNA, 19 nt, Artificial Sequence
  Description of Artificial Sequence: Synthetic oligonucleotide
gaaaggguguugagacuuc

SEQ ID NO: 1233213 - RNA, 19 nt, Artificial Sequence
  Description of Artificial Sequence: Synthetic oligonucleotide
cuuagccgaaggcggugac

SEQ ID NO: 1233214 - RNA, 19 nt, Artificial Sequence
  Description of Artificial Sequence: Synthetic oligonucleotide
ucguacucccgccccugcu

SEQ ID NO: 1233215 - RNA, 19 nt, Artificial Sequence
  Description of Artificial Sequence: Synthetic oligonucleotide
cugcguaggacuggcuccc

SEQ ID NO: 1233216 - RNA, 19 nt, Artificial Sequence
  Description of Artificial Sequence: Synthetic oligonucleotide
gcgguacuuauagaagucc

SEQ ID NO: 1233217 - RNA, 19 nt, Artificial Sequence
  Description of Artificial Sequence: Synthetic oligonucleotide
ggucacaugucugggaguc

SEQ ID NO: 1233218 - RNA, 19 nt, Artificial Sequence
  Description of Artificial Sequence: Synthetic oligonucleotide
ccagugauuggacgugggg

SEQ ID NO: 1233219 - RNA, 19 nt, Artificial Sequence
  Description of Artificial Sequence: Synthetic oligonucleotide
cugguacacccuggcagcg

SEQ ID NO: 1233220 - RNA, 19 nt, Artificial Sequence
  Description of Artificial Sequence: Synthetic oligonucleotide
cucucguguggcaggucac

SEQ ID NO: 1233221 - RNA, 19 nt, Artificial Sequence
  Description of Artificial Sequence: Synthetic oligonucleotide
cucgugagcaucuugucuu

SEQ ID NO: 1233222 - RNA, 19 nt, Artificial Sequence
  Description of Artificial Sequence: Synthetic oligonucleotide
guuuaacgaaagugguccu

SEQ ID NO: 1233223 - RNA, 19 nt, Artificial Sequence
  Description of Artificial Sequence: Synthetic oligonucleotide
gucuauaaguugacaaagu

SEQ ID NO: 1233224 - RNA, 19 nt, Artificial Sequence
  Description of Artificial Sequence: Synthetic oligonucleotide
ucaagacauccagcaggca

SEQ ID NO: 1233225 - RNA, 19 nt, Artificial Sequence
  Description of Artificial Sequence: Synthetic oligonucleotide
gacuggcucccacguggag

SEQ ID NO: 1233226 - RNA, 19 nt, Artificial Sequence
  Description of Artificial Sequence: Synthetic oligonucleotide
agacauccagcaggcagcu

SEQ ID NO: 1233227 - RNA, 19 nt, Artificial Sequence
  Description of Artificial Sequence: Synthetic oligonucleotide
ugccgcuucaagggcgugc

SEQ ID NO: 1233228 - RNA, 19 nt, Artificial Sequence
  Description of Artificial Sequence: Synthetic oligonucleotide
cuagaagacaggaccuccu

SEQ ID NO: 1233229 - RNA, 19 nt, Artificial Sequence
  Description of Artificial Sequence: Synthetic oligonucleotide
guccaucaucaggaacucg

SEQ ID NO: 1233230 - RNA, 19 nt, Artificial Sequence
  Description of Artificial Sequence: Synthetic oligonucleotide
cuccagcccucguacuccc

SEQ ID NO: 1233231 - RNA, 19 nt, Artificial Sequence
  Description of Artificial Sequence: Synthetic oligonucleotide
ccuagcauauuacaguaua

SEQ ID NO: 1233232 - RNA, 19 nt, Artificial Sequence
  Description of Artificial Sequence: Synthetic oligonucleotide
cuggcggucucguucaucu

SEQ ID NO: 1233233 - RNA, 19 nt, Artificial Sequence
  Description of Artificial Sequence: Synthetic oligonucleotide
guacgcguggcaugccuuc

SEQ ID NO: 1233234 - RNA, 19 nt, Artificial Sequence
  Description of Artificial Sequence: Synthetic oligonucleotide
gcuugcaaaccauauuacu

SEQ ID NO: 1233235 - RNA, 19 nt, Artificial Sequence
  Description of Artificial Sequence: Synthetic oligonucleotide
gagugcaugucuccauggu

SEQ ID NO: 1233236 - RNA, 19 nt, Artificial Sequence
  Description of Artificial Sequence: Synthetic oligonucleotide
cuagugagucuuccaugga

SEQ ID NO: 1233237 - RNA, 19 nt, Artificial Sequence
  Description of Artificial Sequence: Synthetic oligonucleotide
cacgugcucaugccgcuuc

SEQ ID NO: 1233238 - RNA, 19 nt, Artificial Sequence
  Description of Artificial Sequence: Synthetic oligonucleotide
ugggccgauuguguguccu

SEQ ID NO: 1233239 - RNA, 19 nt, Artificial Sequence
  Description of Artificial Sequence: Synthetic oligonucleotide
  modified_base (10)..(10): a, c, u, g, unknown or other
aucccggacnguggaccuc

SEQ ID NO: 1233240 - RNA, 19 nt, Artificial Sequence
  Description of Artificial Sequence: Synthetic oligonucleotide
acgagacucgugccaccug

SEQ ID NO: 1233241 - RNA, 19 nt, Artificial Sequence
  Description of Artificial Sequence: Synthetic oligonucleotide
agggcuaucccaacaucau

SEQ ID NO: 1233242 - RNA, 19 nt, Artificial Sequence
  Description of Artificial Sequence: Synthetic oligonucleotide
cagcccucguacucccgcc

SEQ ID NO: 1233243 - RNA, 19 nt, Artificial Sequence
  Description of Artificial Sequence: Synthetic oligonucleotide
cguaggacuggcucccacg

SEQ ID NO: 1233244 - RNA, 19 nt, Artificial Sequence
  Description of Artificial Sequence: Synthetic oligonucleotide
gaccgucuauaaguugaca

SEQ ID NO: 1233245 - RNA, 19 nt, Artificial Sequence
  Description of Artificial Sequence: Synthetic oligonucleotide
aggugaugacauggaauaa

SEQ ID NO: 1233246 - RNA, 19 nt, Artificial Sequence
  Description of Artificial Sequence: Synthetic oligonucleotide
acaacgucucgcaccgacu

SEQ ID NO: 1233247 - RNA, 19 nt, Artificial Sequence
  Description of Artificial Sequence: Synthetic oligonucleotide
ggucaugccuaaucucaga

SEQ ID NO: 1233248 - RNA, 19 nt, Artificial Sequence
  Description of Artificial Sequence: Synthetic oligonucleotide
gucuucaaaggacgagacu

SEQ ID NO: 1233249 - RNA, 19 nt, Artificial Sequence
  Description of Artificial Sequence: Synthetic oligonucleotide
gugauuggacgugggguga

SEQ ID NO: 1233250 - RNA, 19 nt, Artificial Sequence
  Description of Artificial Sequence: Synthetic oligonucleotide
cucaccaugggcccaggcu

SEQ ID NO: 1233251 - RNA, 19 nt, Artificial Sequence
  Description of Artificial Sequence: Synthetic oligonucleotide
uugggccgauugugugucc

SEQ ID NO: 1233252 - RNA, 19 nt, Artificial Sequence
  Description of Artificial Sequence: Synthetic oligonucleotide
cagugauuggacguggggu

SEQ ID NO: 1233253 - RNA, 19 nt, Artificial Sequence
  Description of Artificial Sequence: Synthetic oligonucleotide
cucgaggcuggcggucucg

SEQ ID NO: 1233254 - RNA, 19 nt, Artificial Sequence
  Description of Artificial Sequence: Synthetic oligonucleotide
acgugcucaugccgcuuca

SEQ ID NO: 1233255 - RNA, 19 nt, Artificial Sequence
  Description of Artificial Sequence: Synthetic oligonucleotide
cuaucccaacaucaugccu

SEQ ID NO: 1233256 - RNA, 19 nt, Artificial Sequence
  Description of Artificial Sequence: Synthetic oligonucleotide
uacgcguggcaugccuucu

SEQ ID NO: 1233257 - RNA, 19 nt, Artificial Sequence
  Description of Artificial Sequence: Synthetic oligonucleotide
  modified_base (6)..(6): a, c, u, g, unknown or other
cggacnguggaccucacca

SEQ ID NO: 1233258 - RNA, 19 nt, Artificial Sequence
  Description of Artificial Sequence: Synthetic oligonucleotide
aggcggugaccgucuauaa

SEQ ID NO: 1233259 - RNA, 19 nt, Artificial Sequence
  Description of Artificial Sequence: Synthetic oligonucleotide
caagaccucacuccucagu

SEQ ID NO: 1233260 - RNA, 19 nt, Artificial Sequence
  Description of Artificial Sequence: Synthetic oligonucleotide
aucaaucggaagggccccu

SEQ ID NO: 1233261 - RNA, 19 nt, Artificial Sequence
  Description of Artificial Sequence: Synthetic oligonucleotide
gcuugcacguguacgcgug

SEQ ID NO: 1233262 - RNA, 19 nt, Artificial Sequence
  Description of Artificial Sequence: Synthetic oligonucleotide
caguugucacacacaacgu

SEQ ID NO: 1233263 - RNA, 19 nt, Artificial Sequence
  Description of Artificial Sequence: Synthetic oligonucleotide
gucaacgcuccuuuugcuu

SEQ ID NO: 1233264 - RNA, 19 nt, Artificial Sequence
  Description of Artificial Sequence: Synthetic oligonucleotide
ggaaaggguguugagacuu

SEQ ID NO: 1233265 - RNA, 19 nt, Artificial Sequence
  Description of Artificial Sequence: Synthetic oligonucleotide
ucgcaccgacucagaugag

SEQ ID NO: 1233266 - RNA, 19 nt, Artificial Sequence
  Description of Artificial Sequence: Synthetic oligonucleotide
cgaaagugguccucuggug

SEQ ID NO: 1233267 - RNA, 19 nt, Artificial Sequence
  Description of Artificial Sequence: Synthetic oligonucleotide
cucguucaucuuccaguga

SEQ ID NO: 1233268 - RNA, 19 nt, Artificial Sequence
  Description of Artificial Sequence: Synthetic oligonucleotide
gcggucucguucaucuucc

SEQ ID NO: 1233269 - RNA, 19 nt, Artificial Sequence
  Description of Artificial Sequence: Synthetic oligonucleotide
caacugccaucaaucggaa

SEQ ID NO: 1233270 - RNA, 19 nt, Artificial Sequence
  Description of Artificial Sequence: Synthetic oligonucleotide
gguuggcuugcacguguac

SEQ ID NO: 1233271 - RNA, 19 nt, Artificial Sequence
  Description of Artificial Sequence: Synthetic oligonucleotide
ggccugucacuccuccagc

SEQ ID NO: 1233272 - RNA, 19 nt, Artificial Sequence
  Description of Artificial Sequence: Synthetic oligonucleotide
cguuaaacugcacgugcuc

SEQ ID NO: 1233273 - RNA, 19 nt, Artificial Sequence
  Description of Artificial Sequence: Synthetic oligonucleotide
gacgagacucgugccaccu

SEQ ID NO: 1233274 - RNA, 19 nt, Artificial Sequence
  Description of Artificial Sequence: Synthetic oligonucleotide
gacguggggugaggagacc

SEQ ID NO: 1233275 - RNA, 19 nt, Artificial Sequence
  Description of Artificial Sequence: Synthetic oligonucleotide
cucugggcuaggccuguca

SEQ ID NO: 1233276 - RNA, 19 nt, Artificial Sequence
  Description of Artificial Sequence: Synthetic oligonucleotide
ccgcuggagauggauacag

SEQ ID NO: 1233277 - RNA, 19 nt, Artificial Sequence
  Description of Artificial Sequence: Synthetic oligonucleotide
agggguuggcuugcacgug

SEQ ID NO: 1233278 - RNA, 19 nt, Artificial Sequence
  Description of Artificial Sequence: Synthetic oligonucleotide
cagugucaucggaaaucca

SEQ ID NO: 1233279 - RNA, 19 nt, Artificial Sequence
  Description of Artificial Sequence: Synthetic oligonucleotide
ccagcccucguacucccgc

SEQ ID NO: 1233280 - RNA, 19 nt, Artificial Sequence
  Description of Artificial Sequence: Synthetic oligonucleotide
gccgcuucaagggcgugcc

SEQ ID NO: 1233281 - RNA, 19 nt, Artificial Sequence
  Description of Artificial Sequence: Synthetic oligonucleotide
gugccauggcuggaccagc

SEQ ID NO: 1233282 - RNA, 19 nt, Artificial Sequence
  Description of Artificial Sequence: Synthetic oligonucleotide
uacucccgccccugcugcu

SEQ ID NO: 1233283 - RNA, 19 nt, Artificial Sequence
  Description of Artificial Sequence: Synthetic oligonucleotide
gguugagagaggguucuua

SEQ ID NO: 1233284 - RNA, 19 nt, Artificial Sequence
  Description of Artificial Sequence: Synthetic oligonucleotide
cgguacuuauagaagucca

SEQ ID NO: 1233285 - RNA, 19 nt, Artificial Sequence
  Description of Artificial Sequence: Synthetic oligonucleotide
guucuuagccgaaggcggu

SEQ ID NO: 1233286 - RNA, 19 nt, Artificial Sequence
  Description of Artificial Sequence: Synthetic oligonucleotide
gguacuuauagaaguccau

SEQ ID NO: 1233287 - RNA, 19 nt, Artificial Sequence
  Description of Artificial Sequence: Synthetic oligonucleotide
guguacgcguggcaugccu

SEQ ID NO: 1233288 - RNA, 19 nt, Artificial Sequence
  Description of Artificial Sequence: Synthetic oligonucleotide
ccucucguguggcagguca

SEQ ID NO: 1233289 - RNA, 19 nt, Artificial Sequence
  Description of Artificial Sequence: Synthetic oligonucleotide
gguacacccuggcagcgcu

SEQ ID NO: 1233290 - RNA, 19 nt, Artificial Sequence
  Description of Artificial Sequence: Synthetic oligonucleotide
ggcgugccauggcuggacc

SEQ ID NO: 1233291 - RNA, 19 nt, Artificial Sequence
  Description of Artificial Sequence: Synthetic oligonucleotide
cucugagaacaccuagcau

SEQ ID NO: 1233292 - RNA, 19 nt, Artificial Sequence
  Description of Artificial Sequence: Synthetic oligonucleotide
ggaacucguuaaacugcac

SEQ ID NO: 1233293 - RNA, 19 nt, Artificial Sequence
  Description of Artificial Sequence: Synthetic oligonucleotide
acccucucguguggcaggu

SEQ ID NO: 1233294 - RNA, 19 nt, Artificial Sequence
  Description of Artificial Sequence: Synthetic oligonucleotide
ggccuuucggacaguguca

SEQ ID NO: 1233295 - RNA, 19 nt, Artificial Sequence
  Description of Artificial Sequence: Synthetic oligonucleotide
caugccgcuucaagggcgu

SEQ ID NO: 1233296 - RNA, 19 nt, Artificial Sequence
  Description of Artificial Sequence: Synthetic oligonucleotide
gucacaugucugggaguca

SEQ ID NO: 1233297 - RNA, 19 nt, Artificial Sequence
  Description of Artificial Sequence: Synthetic oligonucleotide
gcacuagaagacaggaccu

SEQ ID NO: 1233298 - RNA, 19 nt, Artificial Sequence
  Description of Artificial Sequence: Synthetic oligonucleotide
gggccgauuguguguccug

SEQ ID NO: 1233299 - RNA, 19 nt, Artificial Sequence
  Description of Artificial Sequence: Synthetic oligonucleotide
gcagcgcugcguaggacug

SEQ ID NO: 1233300 - RNA, 19 nt, Artificial Sequence
  Description of Artificial Sequence: Synthetic oligonucleotide
cucgugccaccuguacauc

SEQ ID NO: 1233301 - RNA, 19 nt, Artificial Sequence
  Description of Artificial Sequence: Synthetic oligonucleotide
  modified_base (7)..(7): a, c, u, g, unknown or other
ccggacnguggaccucacc

SEQ ID NO: 1233302 - RNA, 19 nt, Artificial Sequence
  Description of Artificial Sequence: Synthetic oligonucleotide
ggagucuguuucuuuuaau

SEQ ID NO: 1233303 - RNA, 19 nt, Artificial Sequence
  Description of Artificial Sequence: Synthetic oligonucleotide
acgcguggcaugccuucuu

SEQ ID NO: 1233304 - RNA, 19 nt, Artificial Sequence
  Description of Artificial Sequence: Synthetic oligonucleotide
gaaggcggugaccgucuau

SEQ ID NO: 1233305 - RNA, 19 nt, Artificial Sequence
  Description of Artificial Sequence: Synthetic oligonucleotide
ccauauuacuagugagucu

SEQ ID NO: 1233306 - RNA, 19 nt, Artificial Sequence
  Description of Artificial Sequence: Synthetic oligonucleotide
gaccugugucacaauggau

SEQ ID NO: 1233307 - RNA, 19 nt, Artificial Sequence
  Description of Artificial Sequence: Synthetic oligonucleotide
ggacgagggcuaucccaac

SEQ ID NO: 1233308 - RNA, 19 nt, Artificial Sequence
  Description of Artificial Sequence: Synthetic oligonucleotide
  modified_base (5)..(5): a, c, u, g, unknown or other
ggacnguggaccucaccau

SEQ ID NO: 1233309 - RNA, 19 nt, Artificial Sequence
  Description of Artificial Sequence: Synthetic oligonucleotide
gcccucguacucccgcccc

SEQ ID NO: 1233310 - RNA, 19 nt, Artificial Sequence
  Description of Artificial Sequence: Synthetic oligonucleotide
cugggcuaggccugucacu

SEQ ID NO: 1233311 - RNA, 19 nt, Artificial Sequence
  Description of Artificial Sequence: Synthetic oligonucleotide
gucucgcaccgacucagau

SEQ ID NO: 1233312 - RNA, 19 nt, Artificial Sequence
  Description of Artificial Sequence: Synthetic oligonucleotide
ggcuaggccugucacuccu

SEQ ID NO: 1233313 - RNA, 19 nt, Artificial Sequence
  Description of Artificial Sequence: Synthetic oligonucleotide
gggguuggcuugcacgugu

SEQ ID NO: 1233314 - RNA, 19 nt, Artificial Sequence
  Description of Artificial Sequence: Synthetic oligonucleotide
uggcggucucguucaucuu

SEQ ID NO: 1233315 - RNA, 19 nt, Artificial Sequence
  Description of Artificial Sequence: Synthetic oligonucleotide
cgcugcguaggacuggcuc

SEQ ID NO: 1233316 - RNA, 19 nt, Artificial Sequence
  Description of Artificial Sequence: Synthetic oligonucleotide
cacguggagccugcucuca

SEQ ID NO: 1233317 - RNA, 19 nt, Artificial Sequence
  Description of Artificial Sequence: Synthetic oligonucleotide
gaccuggcuuuugggccga

SEQ ID NO: 1233318 - RNA, 19 nt, Artificial Sequence
  Description of Artificial Sequence: Synthetic oligonucleotide
cacaugucugggagucacu

SEQ ID NO: 1233319 - RNA, 19 nt, Artificial Sequence
  Description of Artificial Sequence: Synthetic oligonucleotide
ggcucccacguggagccug

SEQ ID NO: 1233320 - RNA, 19 nt, Artificial Sequence
  Description of Artificial Sequence: Synthetic oligonucleotide
gcguaggacuggcucccac

SEQ ID NO: 1233321 - RNA, 19 nt, Artificial Sequence
  Description of Artificial Sequence: Synthetic oligonucleotide
cugugacucuugggucaug

SEQ ID NO: 1233322 - RNA, 19 nt, Artificial Sequence
  Description of Artificial Sequence: Synthetic oligonucleotide
ggcucuagagggguuggcu

SEQ ID NO: 1233323 - RNA, 19 nt, Artificial Sequence
  Description of Artificial Sequence: Synthetic oligonucleotide
agggcgugccauggcugga

SEQ ID NO: 1233324 - RNA, 19 nt, Artificial Sequence
  Description of Artificial Sequence: Synthetic oligonucleotide
ggcuugcacguguacgcgu

SEQ ID NO: 1233325 - RNA, 19 nt, Artificial Sequence
  Description of Artificial Sequence: Synthetic oligonucleotide
ccacugguugcugguugag

SEQ ID NO: 1233326 - RNA, 19 nt, Artificial Sequence
  Description of Artificial Sequence: Synthetic oligonucleotide
cugugucacaauggauacu

SEQ ID NO: 1233327 - RNA, 19 nt, Artificial Sequence
  Description of Artificial Sequence: Synthetic oligonucleotide
augccgcuucaagggcgug

SEQ ID NO: 1233328 - RNA, 19 nt, Artificial Sequence
  Description of Artificial Sequence: Synthetic oligonucleotide
ccuuucggacagugucauc

SEQ ID NO: 1233329 - RNA, 19 nt, Artificial Sequence
  Description of Artificial Sequence: Synthetic oligonucleotide
acacaacgucucgcaccga

SEQ ID NO: 1233330 - RNA, 19 nt, Artificial Sequence
  Description of Artificial Sequence: Synthetic oligonucleotide
gcucccacguggagccugc

SEQ ID NO: 1233331 - RNA, 19 nt, Artificial Sequence
  Description of Artificial Sequence: Synthetic oligonucleotide
ggacuggcucccacgugga

SEQ ID NO: 1233332 - RNA, 19 nt, Artificial Sequence
  Description of Artificial Sequence: Synthetic oligonucleotide
gguggacgacaacugccau

SEQ ID NO: 1233333 - RNA, 19 nt, Artificial Sequence
  Description of Artificial Sequence: Synthetic oligonucleotide
cucguguggcaggucacau

SEQ ID NO: 1233334 - RNA, 19 nt, Artificial Sequence
  Description of Artificial Sequence: Synthetic oligonucleotide
ggccgauuguguguccugu

SEQ ID NO: 1233335 - RNA, 19 nt, Artificial Sequence
  Description of Artificial Sequence: Synthetic oligonucleotide
gcguggcaugccuucuuua

SEQ ID NO: 1233336 - RNA, 19 nt, Artificial Sequence
  Description of Artificial Sequence: Synthetic oligonucleotide
gccgcuggagauggauaca

SEQ ID NO: 1233337 - RNA, 19 nt, Artificial Sequence
  Description of Artificial Sequence: Synthetic oligonucleotide
ggaccucaccaugggccca

SEQ ID NO: 1233338 - RNA, 19 nt, Artificial Sequence
  Description of Artificial Sequence: Synthetic oligonucleotide
gcuaggccugucacuccuc

SEQ ID NO: 1233339 - RNA, 19 nt, Artificial Sequence
  Description of Artificial Sequence: Synthetic oligonucleotide
gcacguguacgcguggcau

SEQ ID NO: 1233340 - RNA, 19 nt, Artificial Sequence
  Description of Artificial Sequence: Synthetic oligonucleotide
cgcaccgacucagaugaga

SEQ ID NO: 1233341 - RNA, 19 nt, Artificial Sequence
  Description of Artificial Sequence: Synthetic oligonucleotide
gccuuucggacagugucau

SEQ ID NO: 1233342 - RNA, 19 nt, Artificial Sequence
  Description of Artificial Sequence: Synthetic oligonucleotide
ccagagugcaugucuccau

SEQ ID NO: 1233343 - RNA, 19 nt, Artificial Sequence
  Description of Artificial Sequence: Synthetic oligonucleotide
cguguacgcguggcaugcc

SEQ ID NO: 1233344 - RNA, 19 nt, Artificial Sequence
  Description of Artificial Sequence: Synthetic oligonucleotide
  modified_base (8)..(8): a, c, u, g, unknown or other
cccggacnguggaccucac

SEQ ID NO: 1233345 - RNA, 19 nt, Artificial Sequence
  Description of Artificial Sequence: Synthetic oligonucleotide
ggguuggcuugcacgugua

SEQ ID NO: 1233346 - RNA, 19 nt, Artificial Sequence
  Description of Artificial Sequence: Synthetic oligonucleotide
cgucucgcaccgacucaga

SEQ ID NO: 1233347 - RNA, 19 nt, Artificial Sequence
  Description of Artificial Sequence: Synthetic oligonucleotide
cucuugggucaugccuaau

SEQ ID NO: 1233348 - RNA, 19 nt, Artificial Sequence
  Description of Artificial Sequence: Synthetic oligonucleotide
cggugaccgucuauaaguu

SEQ ID NO: 1233349 - RNA, 19 nt, Artificial Sequence
  Description of Artificial Sequence: Synthetic oligonucleotide
cccucucguguggcagguc

SEQ ID NO: 1233350 - RNA, 19 nt, Artificial Sequence
  Description of Artificial Sequence: Synthetic oligonucleotide
cgaaggcggugaccgucua

SEQ ID NO: 1233351 - RNA, 19 nt, Artificial Sequence
  Description of Artificial Sequence: Synthetic oligonucleotide
cgcguggcaugccuucuuu

SEQ ID NO: 1233352 - RNA, 19 nt, Artificial Sequence
  Description of Artificial Sequence: Synthetic oligonucleotide
gcgcugcguaggacuggcu

SEQ ID NO: 1233353 - RNA, 19 nt, Artificial Sequence
  Description of Artificial Sequence: Synthetic oligonucleotide
ggcuggccuuucggacagu

SEQ ID NO: 1233354 - RNA, 19 nt, Artificial Sequence
  Description of Artificial Sequence: Synthetic oligonucleotide
agugacacagcacaaagcc

SEQ ID NO: 1233355 - RNA, 19 nt, Artificial Sequence
  Description of Artificial Sequence: Synthetic oligonucleotide
gauagaauggaucacccgg

SEQ ID NO: 1233356 - RNA, 19 nt, Artificial Sequence
  Description of Artificial Sequence: Synthetic oligonucleotide
auuaaagauaaauacucuc

SEQ ID NO: 1233357 - RNA, 19 nt, Artificial Sequence
  Description of Artificial Sequence: Synthetic oligonucleotide
agaaguaaaccccaugccc

SEQ ID NO: 1233358 - RNA, 19 nt, Artificial Sequence
  Description of Artificial Sequence: Synthetic oligonucleotide
uuaaagauaaauacucuca

SEQ ID NO: 1233359 - RNA, 19 nt, Artificial Sequence
  Description of Artificial Sequence: Synthetic oligonucleotide
aagaaguaaaccccaugcc

SEQ ID NO: 1233360 - RNA, 19 nt, Artificial Sequence
  Description of Artificial Sequence: Synthetic oligonucleotide
uugauuuacauccagugcu

SEQ ID NO: 1233361 - RNA, 19 nt, Artificial Sequence
  Description of Artificial Sequence: Synthetic oligonucleotide
gauaaauacucucagagaa

SEQ ID NO: 1233362 - RNA, 19 nt, Artificial Sequence
  Description of Artificial Sequence: Synthetic oligonucleotide
gaagaaguaaaccccaugc

SEQ ID NO: 1233363 - RNA, 19 nt, Artificial Sequence
  Description of Artificial Sequence: Synthetic oligonucleotide
ugcacuaucucccuagagg

SEQ ID NO: 1233364 - RNA, 19 nt, Artificial Sequence
  Description of Artificial Sequence: Synthetic oligonucleotide
agggauguaaugcucaucg

SEQ ID NO: 1233365 - RNA, 19 nt, Artificial Sequence
  Description of Artificial Sequence: Synthetic oligonucleotide
aauacucucagagaagaag

SEQ ID NO: 1233366 - RNA, 19 nt, Artificial Sequence
  Description of Artificial Sequence: Synthetic oligonucleotide
auguauauguguuugugag

SEQ ID NO: 1233367 - RNA, 19 nt, Artificial Sequence
  Description of Artificial Sequence: Synthetic oligonucleotide
uugaggauagaauggauca

SEQ ID NO: 1233368 - RNA, 19 nt, Artificial Sequence
  Description of Artificial Sequence: Synthetic oligonucleotide
ucaaagagcgaggagaugc

SEQ ID NO: 1233369 - RNA, 19 nt, Artificial Sequence
  Description of Artificial Sequence: Synthetic oligonucleotide
aggaguugaggauagaaug

SEQ ID NO: 1233370 - RNA, 19 nt, Artificial Sequence
  Description of Artificial Sequence: Synthetic oligonucleotide
aagcuugucaaacuggcga

SEQ ID NO: 1233371 - RNA, 19 nt, Artificial Sequence
  Description of Artificial Sequence: Synthetic oligonucleotide
aggagauguaaucuggccg

SEQ ID NO: 1233372 - RNA, 19 nt, Artificial Sequence
  Description of Artificial Sequence: Synthetic oligonucleotide
uccaugcucagacagguag

SEQ ID NO: 1233373 - RNA, 19 nt, Artificial Sequence
  Description of Artificial Sequence: Synthetic oligonucleotide
ucaaacuggcgacaggucc

SEQ ID NO: 1233374 - RNA, 19 nt, Artificial Sequence
  Description of Artificial Sequence: Synthetic oligonucleotide
uuuaguguaaggagggagu

SEQ ID NO: 1233375 - RNA, 19 nt, Artificial Sequence
  Description of Artificial Sequence: Synthetic oligonucleotide
ugugagugauuucugaggu

SEQ ID NO: 1233376 - RNA, 19 nt, Artificial Sequence
  Description of Artificial Sequence: Synthetic oligonucleotide
ucuucuacgaugcccucgg

SEQ ID NO: 1233377 - RNA, 19 nt, Artificial Sequence
  Description of Artificial Sequence: Synthetic oligonucleotide
uaaauacucucagagaaga

SEQ ID NO: 1233378 - RNA, 19 nt, Artificial Sequence
  Description of Artificial Sequence: Synthetic oligonucleotide
ugagugauuucugaggucc

SEQ ID NO: 1233379 - RNA, 19 nt, Artificial Sequence
  Description of Artificial Sequence: Synthetic oligonucleotide
auucagacguuccaagagg

SEQ ID NO: 1233380 - RNA, 19 nt, Artificial Sequence
  Description of Artificial Sequence: Synthetic oligonucleotide
aaauuguccuugaagaugu

SEQ ID NO: 1233381 - RNA, 19 nt, Artificial Sequence
  Description of Artificial Sequence: Synthetic oligonucleotide
aaacacggaguaugucugc

SEQ ID NO: 1233382 - RNA, 19 nt, Artificial Sequence
  Description of Artificial Sequence: Synthetic oligonucleotide
aauccacuggcccaguugu

SEQ ID NO: 1233383 - RNA, 19 nt, Artificial Sequence
  Description of Artificial Sequence: Synthetic oligonucleotide
aagcccucuagacugucac

SEQ ID NO: 1233384 - RNA, 19 nt, Artificial Sequence
  Description of Artificial Sequence: Synthetic oligonucleotide
ucuacgaugcccucggggc

SEQ ID NO: 1233385 - RNA, 19 nt, Artificial Sequence
  Description of Artificial Sequence: Synthetic oligonucleotide
accucuuuaguguaaggag

SEQ ID NO: 1233386 - RNA, 19 nt, Artificial Sequence
  Description of Artificial Sequence: Synthetic oligonucleotide
cucgaacccaaucugauug

SEQ ID NO: 1233387 - RNA, 19 nt, Artificial Sequence
  Description of Artificial Sequence: Synthetic oligonucleotide
gucugcacuaguuucuugg

SEQ ID NO: 1233388 - RNA, 19 nt, Artificial Sequence
  Description of Artificial Sequence: Synthetic oligonucleotide
aucugauugccgcacuggc

SEQ ID NO: 1233389 - RNA, 19 nt, Artificial Sequence
  Description of Artificial Sequence: Synthetic oligonucleotide
aguuguugccagcuccucc

SEQ ID NO: 1233390 - RNA, 19 nt, Artificial Sequence
  Description of Artificial Sequence: Synthetic oligonucleotide
ucugggucaaccucuuuag

SEQ ID NO: 1233391 - RNA, 19 nt, Artificial Sequence
  Description of Artificial Sequence: Synthetic oligonucleotide
agauaaauacucucagaga

SEQ ID NO: 1233392 - RNA, 19 nt, Artificial Sequence
  Description of Artificial Sequence: Synthetic oligonucleotide
uguaaucuggccguguggc

SEQ ID NO: 1233393 - RNA, 19 nt, Artificial Sequence
  Description of Artificial Sequence: Synthetic oligonucleotide
ugaucugugcucugagggg

SEQ ID NO: 1233394 - RNA, 19 nt, Artificial Sequence
  Description of Artificial Sequence: Synthetic oligonucleotide
augguacucaucaaucagc

SEQ ID NO: 1233395 - RNA, 19 nt, Artificial Sequence
  Description of Artificial Sequence: Synthetic oligonucleotide
ugcacuaguuucuuggggu

SEQ ID NO: 1233396 - RNA, 19 nt, Artificial Sequence
  Description of Artificial Sequence: Synthetic oligonucleotide
aaucugauugccgcacugg

SEQ ID NO: 1233397 - RNA, 19 nt, Artificial Sequence
  Description of Artificial Sequence: Synthetic oligonucleotide
agcuugucaaacuggcgac

SEQ ID NO: 1233398 - RNA, 19 nt, Artificial Sequence
  Description of Artificial Sequence: Synthetic oligonucleotide
guaccugucauucagacgu

SEQ ID NO: 1233399 - RNA, 19 nt, Artificial Sequence
  Description of Artificial Sequence: Synthetic oligonucleotide
ucugcacuaguuucuuggg

SEQ ID NO: 1233400 - RNA, 19 nt, Artificial Sequence
  Description of Artificial Sequence: Synthetic oligonucleotide
ucagacaucggcguugcag

SEQ ID NO: 1233401 - RNA, 19 nt, Artificial Sequence
  Description of Artificial Sequence: Synthetic oligonucleotide
ugguacucaucaaucagcu

SEQ ID NO: 1233402 - RNA, 19 nt, Artificial Sequence
  Description of Artificial Sequence: Synthetic oligonucleotide
cauucagacguuccaagag

SEQ ID NO: 1233403 - RNA, 19 nt, Artificial Sequence
  Description of Artificial Sequence: Synthetic oligonucleotide
gauguaaucuggccgugug

SEQ ID NO: 1233404 - RNA, 19 nt, Artificial Sequence
  Description of Artificial Sequence: Synthetic oligonucleotide
aaccucuuuaguguaagga

SEQ ID NO: 1233405 - RNA, 19 nt, Artificial Sequence
  Description of Artificial Sequence: Synthetic oligonucleotide
uguagggugaugauuucuc

SEQ ID NO: 1233406 - RNA, 19 nt, Artificial Sequence
  Description of Artificial Sequence: Synthetic oligonucleotide
gaugauuucucucggcauc

SEQ ID NO: 1233407 - RNA, 19 nt, Artificial Sequence
  Description of Artificial Sequence: Synthetic oligonucleotide
ugcaugguacucaucaauc

SEQ ID NO: 1233408 - RNA, 19 nt, Artificial Sequence
  Description of Artificial Sequence: Synthetic oligonucleotide
caaacuggcgacagguccg

SEQ ID NO: 1233409 - RNA, 19 nt, Artificial Sequence
  Description of Artificial Sequence: Synthetic oligonucleotide
uguaaugcucaucgucugc

SEQ ID NO: 1233410 - RNA, 19 nt, Artificial Sequence
  Description of Artificial Sequence: Synthetic oligonucleotide
caugguacucaucaaucag

SEQ ID NO: 1233411 - RNA, 19 nt, Artificial Sequence
  Description of Artificial Sequence: Synthetic oligonucleotide
gaggauagaauggaucacc

SEQ ID NO: 1233412 - RNA, 19 nt, Artificial Sequence
  Description of Artificial Sequence: Synthetic oligonucleotide
cucuuguggaccugggugg

SEQ ID NO: 1233413 - RNA, 19 nt, Artificial Sequence
  Description of Artificial Sequence: Synthetic oligonucleotide
uucagacguuccaagaggu

SEQ ID NO: 1233414 - RNA, 19 nt, Artificial Sequence
  Description of Artificial Sequence: Synthetic oligonucleotide
aggauagaauggaucaccc

SEQ ID NO: 1233415 - RNA, 19 nt, Artificial Sequence
  Description of Artificial Sequence: Synthetic oligonucleotide
ugucaaacuggcgacaggu

SEQ ID NO: 1233416 - RNA, 19 nt, Artificial Sequence
  Description of Artificial Sequence: Synthetic oligonucleotide
ucugcauucugggucaacc

SEQ ID NO: 1233417 - RNA, 19 nt, Artificial Sequence
  Description of Artificial Sequence: Synthetic oligonucleotide
acuaguuucuugggguacc

SEQ ID NO: 1233418 - RNA, 19 nt, Artificial Sequence
  Description of Artificial Sequence: Synthetic oligonucleotide
aacucuucuacgaugcccu

SEQ ID NO: 1233419 - RNA, 19 nt, Artificial Sequence
  Description of Artificial Sequence: Synthetic oligonucleotide
gaaguaaaccccaugccca

SEQ ID NO: 1233420 - RNA, 19 nt, Artificial Sequence
  Description of Artificial Sequence: Synthetic oligonucleotide
ucauucagacguuccaaga

SEQ ID NO: 1233421 - RNA, 19 nt, Artificial Sequence
  Description of Artificial Sequence: Synthetic oligonucleotide
cugguugggaaacacggag

SEQ ID NO: 1233422 - RNA, 19 nt, Artificial Sequence
  Description of Artificial Sequence: Synthetic oligonucleotide
cagacaucggcguugcagc

SEQ ID NO: 1233423 - RNA, 19 nt, Artificial Sequence
  Description of Artificial Sequence: Synthetic oligonucleotide
uggguuguagagcuuggca

SEQ ID NO: 1233424 - RNA, 19 nt, Artificial Sequence
  Description of Artificial Sequence: Synthetic oligonucleotide
auagaauggaucacccggg

SEQ ID NO: 1233425 - RNA, 19 nt, Artificial Sequence
  Description of Artificial Sequence: Synthetic oligonucleotide
aaaagacguccuugcgguc

SEQ ID NO: 1233426 - RNA, 19 nt, Artificial Sequence
  Description of Artificial Sequence: Synthetic oligonucleotide
agcccgagggauguaaugc

SEQ ID NO: 1233427 - RNA, 19 nt, Artificial Sequence
  Description of Artificial Sequence: Synthetic oligonucleotide
uuuacauccagugcuuuau

SEQ ID NO: 1233428 - RNA, 19 nt, Artificial Sequence
  Description of Artificial Sequence: Synthetic oligonucleotide
aauggaucacccggggcuc

SEQ ID NO: 1233429 - RNA, 19 nt, Artificial Sequence
  Description of Artificial Sequence: Synthetic oligonucleotide
auguaaucuggccgugugg

SEQ ID NO: 1233430 - RNA, 19 nt, Artificial Sequence
  Description of Artificial Sequence: Synthetic oligonucleotide
aaagacguccuugcgguca

SEQ ID NO: 1233431 - RNA, 19 nt, Artificial Sequence
  Description of Artificial Sequence: Synthetic oligonucleotide
uuucuugggguaccuguca

SEQ ID NO: 1233432 - RNA, 19 nt, Artificial Sequence
  Description of Artificial Sequence: Synthetic oligonucleotide
ugcugcacuaucucccuag

SEQ ID NO: 1233433 - RNA, 19 nt, Artificial Sequence
  Description of Artificial Sequence: Synthetic oligonucleotide
ucaaccucuuuaguguaag

SEQ ID NO: 1233434 - RNA, 19 nt, Artificial Sequence
  Description of Artificial Sequence: Synthetic oligonucleotide
ucgucugccugguagaaaa

SEQ ID NO: 1233435 - RNA, 19 nt, Artificial Sequence
  Description of Artificial Sequence: Synthetic oligonucleotide
augcucaucgucugccugg

SEQ ID NO: 1233436 - RNA, 19 nt, Artificial Sequence
  Description of Artificial Sequence: Synthetic oligonucleotide
ucuggguuguagagcuugg

SEQ ID NO: 1233437 - RNA, 19 nt, Artificial Sequence
  Description of Artificial Sequence: Synthetic oligonucleotide
guaugucugcacuaguuuc

SEQ ID NO: 1233438 - RNA, 19 nt, Artificial Sequence
  Description of Artificial Sequence: Synthetic oligonucleotide
ucugccucccgaucuauga

SEQ ID NO: 1233439 - RNA, 19 nt, Artificial Sequence
  Description of Artificial Sequence: Synthetic oligonucleotide
guuccaagagguaggagcc

SEQ ID NO: 1233440 - RNA, 19 nt, Artificial Sequence
  Description of Artificial Sequence: Synthetic oligonucleotide
uaaaccccaugcccaagcc

SEQ ID NO: 1233441 - RNA, 19 nt, Artificial Sequence
  Description of Artificial Sequence: Synthetic oligonucleotide
gaauccacuggcccaguug

SEQ ID NO: 1233442 - RNA, 19 nt, Artificial Sequence
  Description of Artificial Sequence: Synthetic oligonucleotide
augauuucucucggcaucg

SEQ ID NO: 1233443 - RNA, 19 nt, Artificial Sequence
  Description of Artificial Sequence: Synthetic oligonucleotide
caucgcuccucagacaucg

SEQ ID NO: 1233444 - RNA, 19 nt, Artificial Sequence
  Description of Artificial Sequence: Synthetic oligonucleotide
ugaugccaugcucagcaca

SEQ ID NO: 1233445 - RNA, 19 nt, Artificial Sequence
  Description of Artificial Sequence: Synthetic oligonucleotide
ccucuuuaguguaaggagg

SEQ ID NO: 1233446 - RNA, 19 nt, Artificial Sequence
  Description of Artificial Sequence: Synthetic oligonucleotide
auacucucagagaagaagu

SEQ ID NO: 1233447 - RNA, 19 nt, Artificial Sequence
  Description of Artificial Sequence: Synthetic oligonucleotide
agacaucggcguugcagcc

SEQ ID NO: 1233448 - RNA, 19 nt, Artificial Sequence
  Description of Artificial Sequence: Synthetic oligonucleotide
ucagcacacagcuguuucc

SEQ ID NO: 1233449 - RNA, 19 nt, Artificial Sequence
  Description of Artificial Sequence: Synthetic oligonucleotide
ucggcaucgcuccucagac

SEQ ID NO: 1233450 - RNA, 19 nt, Artificial Sequence
  Description of Artificial Sequence: Synthetic oligonucleotide
cagacguuccaagagguag

SEQ ID NO: 1233451 - RNA, 19 nt, Artificial Sequence
  Description of Artificial Sequence: Synthetic oligonucleotide
gauguaaugcucaucgucu

SEQ ID NO: 1233452 - RNA, 19 nt, Artificial Sequence
  Description of Artificial Sequence: Synthetic oligonucleotide
gaagcuugucaaacuggcg

SEQ ID NO: 1233453 - RNA, 19 nt, Artificial Sequence
  Description of Artificial Sequence: Synthetic oligonucleotide
ucuagacugucacugccau

SEQ ID NO: 1233454 - RNA, 19 nt, Artificial Sequence
  Description of Artificial Sequence: Synthetic oligonucleotide
gaauggaucacccggggcu

SEQ ID NO: 1233455 - RNA, 19 nt, Artificial Sequence
  Description of Artificial Sequence: Synthetic oligonucleotide
cagguccguucaaagagcg

SEQ ID NO: 1233456 - RNA, 19 nt, Artificial Sequence
  Description of Artificial Sequence: Synthetic oligonucleotide
cagcaauggagugacacag

SEQ ID NO: 1233457 - RNA, 19 nt, Artificial Sequence
  Description of Artificial Sequence: Synthetic oligonucleotide
acucguucacugcuccugg

SEQ ID NO: 1233458 - RNA, 19 nt, Artificial Sequence
  Description of Artificial Sequence: Synthetic oligonucleotide
ugcccaagccaacggacag

SEQ ID NO: 1233459 - RNA, 19 nt, Artificial Sequence
  Description of Artificial Sequence: Synthetic oligonucleotide
ugauuuacauccagugcuu

SEQ ID NO: 1233460 - RNA, 19 nt, Artificial Sequence
  Description of Artificial Sequence: Synthetic oligonucleotide
uguccuggggacucguuca

SEQ ID NO: 1233461 - RNA, 19 nt, Artificial Sequence
  Description of Artificial Sequence: Synthetic oligonucleotide
guaaaccccaugcccaagc

SEQ ID NO: 1233462 - RNA, 19 nt, Artificial Sequence
  Description of Artificial Sequence: Synthetic oligonucleotide
acuggcgacagguccguuc

SEQ ID NO: 1233463 - RNA, 19 nt, Artificial Sequence
  Description of Artificial Sequence: Synthetic oligonucleotide
guaaugcucaucgucugcc

SEQ ID NO: 1233464 - RNA, 19 nt, Artificial Sequence
  Description of Artificial Sequence: Synthetic oligonucleotide
gaacugcuccaugaaagcc

SEQ ID NO: 1233465 - RNA, 19 nt, Artificial Sequence
  Description of Artificial Sequence: Synthetic oligonucleotide
aagacguccuugcggucag

SEQ ID NO: 1233466 - RNA, 19 nt, Artificial Sequence
  Description of Artificial Sequence: Synthetic oligonucleotide
gugaugauuucucucggca

SEQ ID NO: 1233467 - RNA, 19 nt, Artificial Sequence
  Description of Artificial Sequence: Synthetic oligonucleotide
ugaugauuucucucggcau

SEQ ID NO: 1233468 - RNA, 19 nt, Artificial Sequence
  Description of Artificial Sequence: Synthetic oligonucleotide
aaguaaaccccaugcccaa

SEQ ID NO: 1233469 - RNA, 19 nt, Artificial Sequence
  Description of Artificial Sequence: Synthetic oligonucleotide
guugaggauagaauggauc

SEQ ID NO: 1233470 - RNA, 19 nt, Artificial Sequence
  Description of Artificial Sequence: Synthetic oligonucleotide
ugggaaacacggaguaugu

SEQ ID NO: 1233471 - RNA, 19 nt, Artificial Sequence
  Description of Artificial Sequence: Synthetic oligonucleotide
gaacccaaucugauugccg

SEQ ID NO: 1233472 - RNA, 19 nt, Artificial Sequence
  Description of Artificial Sequence: Synthetic oligonucleotide
ugggccaaccaguaaggca

SEQ ID NO: 1233473 - RNA, 19 nt, Artificial Sequence
  Description of Artificial Sequence: Synthetic oligonucleotide
acagguccguucaaagagc

SEQ ID NO: 1233474 - RNA, 19 nt, Artificial Sequence
  Description of Artificial Sequence: Synthetic oligonucleotide
acaucggcguugcagccuc

SEQ ID NO: 1233475 - RNA, 19 nt, Artificial Sequence
  Description of Artificial Sequence: Synthetic oligonucleotide
ugguugggaaacacggagu

SEQ ID NO: 1233476 - RNA, 19 nt, Artificial Sequence
  Description of Artificial Sequence: Synthetic oligonucleotide
cugcacuaguuucuugggg

SEQ ID NO: 1233477 - RNA, 19 nt, Artificial Sequence
  Description of Artificial Sequence: Synthetic oligonucleotide
aagccucccguuuccgaag

SEQ ID NO: 1233478 - RNA, 19 nt, Artificial Sequence
  Description of Artificial Sequence: Synthetic oligonucleotide
uuccggaacugcuccauga

SEQ ID NO: 1233479 - RNA, 19 nt, Artificial Sequence
  Description of Artificial Sequence: Synthetic oligonucleotide
acguccuugcggucagugc

SEQ ID NO: 1233480 - RNA, 19 nt, Artificial Sequence
  Description of Artificial Sequence: Synthetic oligonucleotide
ucgaacccaaucugauugc

SEQ ID NO: 1233481 - RNA, 19 nt, Artificial Sequence
  Description of Artificial Sequence: Synthetic oligonucleotide
caugcccaagccaacggac

SEQ ID NO: 1233482 - RNA, 19 nt, Artificial Sequence
  Description of Artificial Sequence: Synthetic oligonucleotide
acuguagggugaugauuuc

SEQ ID NO: 1233483 - RNA, 19 nt, Artificial Sequence
  Description of Artificial Sequence: Synthetic oligonucleotide
uagggugaugauuucucuc

SEQ ID NO: 1233484 - RNA, 19 nt, Artificial Sequence
  Description of Artificial Sequence: Synthetic oligonucleotide
cguuccaagagguaggagc

SEQ ID NO: 1233485 - RNA, 19 nt, Artificial Sequence
  Description of Artificial Sequence: Synthetic oligonucleotide
gguccguucaaagagcgag

SEQ ID NO: 1233486 - RNA, 19 nt, Artificial Sequence
  Description of Artificial Sequence: Synthetic oligonucleotide
acagcgcauguauaugugu

SEQ ID NO: 1233487 - RNA, 19 nt, Artificial Sequence
  Description of Artificial Sequence: Synthetic oligonucleotide
uggggacucguucacugcu

SEQ ID NO: 1233488 - RNA, 19 nt, Artificial Sequence
  Description of Artificial Sequence: Synthetic oligonucleotide
ugccucccgaucuaugaug

SEQ ID NO: 1233489 - RNA, 19 nt, Artificial Sequence
  Description of Artificial Sequence: Synthetic oligonucleotide
uacucucagagaagaagua

SEQ ID NO: 1233490 - RNA, 19 nt, Artificial Sequence
  Description of Artificial Sequence: Synthetic oligonucleotide
gggccaaccaguaaggcag

SEQ ID NO: 1233491 - RNA, 19 nt, Artificial Sequence
  Description of Artificial Sequence: Synthetic oligonucleotide
gaguugaggauagaaugga

SEQ ID NO: 1233492 - RNA, 19 nt, Artificial Sequence
  Description of Artificial Sequence: Synthetic oligonucleotide
aacacggaguaugucugca

SEQ ID NO: 1233493 - RNA, 19 nt, Artificial Sequence
  Description of Artificial Sequence: Synthetic oligonucleotide
aucucauccugguugggaa

SEQ ID NO: 1233494 - RNA, 19 nt, Artificial Sequence
  Description of Artificial Sequence: Synthetic oligonucleotide
agacguuccaagagguagg

SEQ ID NO: 1233495 - RNA, 19 nt, Artificial Sequence
  Description of Artificial Sequence: Synthetic oligonucleotide
uccguucaaagagcgagga

SEQ ID NO: 1233496 - RNA, 19 nt, Artificial Sequence
  Description of Artificial Sequence: Synthetic oligonucleotide
uagggcuggaccaccacau

SEQ ID NO: 1233497 - RNA, 19 nt, Artificial Sequence
  Description of Artificial Sequence: Synthetic oligonucleotide
augagggucuguguccugg

SEQ ID NO: 1233498 - RNA, 19 nt, Artificial Sequence
  Description of Artificial Sequence: Synthetic oligonucleotide
auuuacauccagugcuuua

SEQ ID NO: 1233499 - RNA, 19 nt, Artificial Sequence
  Description of Artificial Sequence: Synthetic oligonucleotide
agcaauggagugacacagc

SEQ ID NO: 1233500 - RNA, 19 nt, Artificial Sequence
  Description of Artificial Sequence: Synthetic oligonucleotide
gguaccugucauucagacg

SEQ ID NO: 1233501 - RNA, 19 nt, Artificial Sequence
  Description of Artificial Sequence: Synthetic oligonucleotide
caaccucuuuaguguaagg

SEQ ID NO: 1233502 - RNA, 19 nt, Artificial Sequence
  Description of Artificial Sequence: Synthetic oligonucleotide
agccucccguuuccgaagc

SEQ ID NO: 1233503 - RNA, 19 nt, Artificial Sequence
  Description of Artificial Sequence: Synthetic oligonucleotide
ucguucacugcuccugggu

SEQ ID NO: 1233504 - RNA, 19 nt, Artificial Sequence
  Description of Artificial Sequence: Synthetic oligonucleotide
aaccccaugcccaagccaa

SEQ ID NO: 1233505 - RNA, 19 nt, Artificial Sequence
  Description of Artificial Sequence: Synthetic oligonucleotide
acggacagcgcauguauau

SEQ ID NO: 1233506 - RNA, 19 nt, Artificial Sequence
  Description of Artificial Sequence: Synthetic oligonucleotide
uuccgaagcuugucaaacu

SEQ ID NO: 1233507 - RNA, 19 nt, Artificial Sequence
  Description of Artificial Sequence: Synthetic oligonucleotide
ugcagacucuuguggaccu

SEQ ID NO: 1233508 - RNA, 19 nt, Artificial Sequence
  Description of Artificial Sequence: Synthetic oligonucleotide
gguggcgaacucuucuacg

SEQ ID NO: 1233509 - RNA, 19 nt, Artificial Sequence
  Description of Artificial Sequence: Synthetic oligonucleotide
uaaugcucaucgucugccu

SEQ ID NO: 1233510 - RNA, 19 nt, Artificial Sequence
  Description of Artificial Sequence: Synthetic oligonucleotide
uuaguguaaggagggaguu

SEQ ID NO: 1233511 - RNA, 19 nt, Artificial Sequence
  Description of Artificial Sequence: Synthetic oligonucleotide
caauggagugacacagcac

SEQ ID NO: 1233512 - RNA, 19 nt, Artificial Sequence
  Description of Artificial Sequence: Synthetic oligonucleotide
uuucucccugggagaaucc

SEQ ID NO: 1233513 - RNA, 19 nt, Artificial Sequence
  Description of Artificial Sequence: Synthetic oligonucleotide
ugaggucccugaucugugc

SEQ ID NO: 1233514 - RNA, 19 nt, Artificial Sequence
  Description of Artificial Sequence: Synthetic oligonucleotide
ggaaacacggaguaugucu

SEQ ID NO: 1233515 - RNA, 19 nt, Artificial Sequence
  Description of Artificial Sequence: Synthetic oligonucleotide
aacucgaacccaaucugau

SEQ ID NO: 1233516 - RNA, 19 nt, Artificial Sequence
  Description of Artificial Sequence: Synthetic oligonucleotide
uauguguuugugagugauu

SEQ ID NO: 1233517 - RNA, 19 nt, Artificial Sequence
  Description of Artificial Sequence: Synthetic oligonucleotide
guggcgaacucuucuacga

SEQ ID NO: 1233518 - RNA, 19 nt, Artificial Sequence
  Description of Artificial Sequence: Synthetic oligonucleotide
agagcuuggcauaggagga

SEQ ID NO: 1233519 - RNA, 19 nt, Artificial Sequence
  Description of Artificial Sequence: Synthetic oligonucleotide
uccaugaaagccucccguu

SEQ ID NO: 1233520 - RNA, 19 nt, Artificial Sequence
  Description of Artificial Sequence: Synthetic oligonucleotide
ugccccaggagauguaauc

SEQ ID NO: 1233521 - RNA, 19 nt, Artificial Sequence
  Description of Artificial Sequence: Synthetic oligonucleotide
uccucagacaucggcguug

SEQ ID NO: 1233522 - RNA, 19 nt, Artificial Sequence
  Description of Artificial Sequence: Synthetic oligonucleotide
cuguuuccagaacucgaac

SEQ ID NO: 1233523 - RNA, 19 nt, Artificial Sequence
  Description of Artificial Sequence: Synthetic oligonucleotide
agggucuguguccugggga

SEQ ID NO: 1233524 - RNA, 19 nt, Artificial Sequence
  Description of Artificial Sequence: Synthetic oligonucleotide
uucuugggguaccugucau

SEQ ID NO: 1233525 - RNA, 19 nt, Artificial Sequence
  Description of Artificial Sequence: Synthetic oligonucleotide
uaguguaaggagggaguug

SEQ ID NO: 1233526 - RNA, 19 nt, Artificial Sequence
  Description of Artificial Sequence: Synthetic oligonucleotide
uucccggauccucugcaga

SEQ ID NO: 1233527 - RNA, 19 nt, Artificial Sequence
  Description of Artificial Sequence: Synthetic oligonucleotide
aaauacucucagagaagaa

SEQ ID NO: 1233528 - RNA, 19 nt, Artificial Sequence
  Description of Artificial Sequence: Synthetic oligonucleotide
gacagcgcauguauaugug

SEQ ID NO: 1233529 - RNA, 19 nt, Artificial Sequence
  Description of Artificial Sequence: Synthetic oligonucleotide
ggagaugcuggugugguug

SEQ ID NO: 1233530 - RNA, 19 nt, Artificial Sequence
  Description of Artificial Sequence: Synthetic oligonucleotide
gaacucgaacccaaucuga

SEQ ID NO: 1233531 - RNA, 19 nt, Artificial Sequence
  Description of Artificial Sequence: Synthetic oligonucleotide
aaccaguaaggcagaugag

SEQ ID NO: 1233532 - RNA, 19 nt, Artificial Sequence
  Description of Artificial Sequence: Synthetic oligonucleotide
ucccggauccucugcagac

SEQ ID NO: 1233533 - RNA, 19 nt, Artificial Sequence
  Description of Artificial Sequence: Synthetic oligonucleotide
aauuguccuugaagauguc

SEQ ID NO: 1233534 - RNA, 19 nt, Artificial Sequence
  Description of Artificial Sequence: Synthetic oligonucleotide
ugccgcacuggcccaacug

SEQ ID NO: 1233535 - RNA, 19 nt, Artificial Sequence
  Description of Artificial Sequence: Synthetic oligonucleotide
gaucacccggggcuccagg

SEQ ID NO: 1233536 - RNA, 19 nt, Artificial Sequence
  Description of Artificial Sequence: Synthetic oligonucleotide
uguagggcuggaccaccac

SEQ ID NO: 1233537 - RNA, 19 nt, Artificial Sequence
  Description of Artificial Sequence: Synthetic oligonucleotide
uuacauccagugcuuuauu

SEQ ID NO: 1233538 - RNA, 19 nt, Artificial Sequence
  Description of Artificial Sequence: Synthetic oligonucleotide
cagaacucgaacccaaucu

SEQ ID NO: 1233539 - RNA, 19 nt, Artificial Sequence
  Description of Artificial Sequence: Synthetic oligonucleotide
gccugggccaaccaguaag

SEQ ID NO: 1233540 - RNA, 19 nt, Artificial Sequence
  Description of Artificial Sequence: Synthetic oligonucleotide
cuacacagucugcauucug

SEQ ID NO: 1233541 - RNA, 19 nt, Artificial Sequence
  Description of Artificial Sequence: Synthetic oligonucleotide
ucagacguuccaagaggua

SEQ ID NO: 1233542 - RNA, 19 nt, Artificial Sequence
  Description of Artificial Sequence: Synthetic oligonucleotide
agaugagggucuguguccu

SEQ ID NO: 1233543 - RNA, 19 nt, Artificial Sequence
  Description of Artificial Sequence: Synthetic oligonucleotide
gggugaugauuucucucgg

SEQ ID NO: 1233544 - RNA, 19 nt, Artificial Sequence
  Description of Artificial Sequence: Synthetic oligonucleotide
cucguucacugcuccuggg

SEQ ID NO: 1233545 - RNA, 19 nt, Artificial Sequence
  Description of Artificial Sequence: Synthetic oligonucleotide
cgaagcuugucaaacuggc

SEQ ID NO: 1233546 - RNA, 19 nt, Artificial Sequence
  Description of Artificial Sequence: Synthetic oligonucleotide
guaggagcccaagccagag

SEQ ID NO: 1233547 - RNA, 19 nt, Artificial Sequence
  Description of Artificial Sequence: Synthetic oligonucleotide
cugcacuaucucccuagag

SEQ ID NO: 1233548 - RNA, 19 nt, Artificial Sequence
  Description of Artificial Sequence: Synthetic oligonucleotide
auccugguugggaaacacg

SEQ ID NO: 1233549 - RNA, 19 nt, Artificial Sequence
  Description of Artificial Sequence: Synthetic oligonucleotide
agcgcauguauauguguuu

SEQ ID NO: 1233550 - RNA, 19 nt, Artificial Sequence
  Description of Artificial Sequence: Synthetic oligonucleotide
guccguucaaagagcgagg

SEQ ID NO: 1233551 - RNA, 19 nt, Artificial Sequence
  Description of Artificial Sequence: Synthetic oligonucleotide
cugucauucagacguucca

SEQ ID NO: 1233552 - RNA, 19 nt, Artificial Sequence
  Description of Artificial Sequence: Synthetic oligonucleotide
cugaggucccugaucugug

SEQ ID NO: 1233553 - RNA, 19 nt, Artificial Sequence
  Description of Artificial Sequence: Synthetic oligonucleotide
ggagauguaaucuggccgu

SEQ ID NO: 1233554 - RNA, 19 nt, Artificial Sequence
  Description of Artificial Sequence: Synthetic oligonucleotide
ucggcguugcagccucucc

SEQ ID NO: 1233555 - RNA, 19 nt, Artificial Sequence
  Description of Artificial Sequence: Synthetic oligonucleotide
aaacuggcgacagguccgu

SEQ ID NO: 1233556 - RNA, 19 nt, Artificial Sequence
  Description of Artificial Sequence: Synthetic oligonucleotide
caugcucagcacacagcug

SEQ ID NO: 1233557 - RNA, 19 nt, Artificial Sequence
  Description of Artificial Sequence: Synthetic oligonucleotide
uugcggucagugcccucgg

SEQ ID NO: 1233558 - RNA, 19 nt, Artificial Sequence
  Description of Artificial Sequence: Synthetic oligonucleotide
cucuagacugucacugcca

SEQ ID NO: 1233559 - RNA, 19 nt, Artificial Sequence
  Description of Artificial Sequence: Synthetic oligonucleotide
uggcgaacucuucuacgau

SEQ ID NO: 1233560 - RNA, 19 nt, Artificial Sequence
  Description of Artificial Sequence: Synthetic oligonucleotide
gcgaacucuucuacgaugc

SEQ ID NO: 1233561 - RNA, 19 nt, Artificial Sequence
  Description of Artificial Sequence: Synthetic oligonucleotide
aguaaaccccaugcccaag

SEQ ID NO: 1233562 - RNA, 19 nt, Artificial Sequence
  Description of Artificial Sequence: Synthetic oligonucleotide
guagggcuggaccaccaca

SEQ ID NO: 1233563 - RNA, 19 nt, Artificial Sequence
  Description of Artificial Sequence: Synthetic oligonucleotide
cucccgaucuaugauguca

SEQ ID NO: 1233564 - RNA, 19 nt, Artificial Sequence
  Description of Artificial Sequence: Synthetic oligonucleotide
acucgaacccaaucugauu

SEQ ID NO: 1233565 - RNA, 19 nt, Artificial Sequence
  Description of Artificial Sequence: Synthetic oligonucleotide
gagauguaaucuggccgug

SEQ ID NO: 1233566 - RNA, 19 nt, Artificial Sequence
  Description of Artificial Sequence: Synthetic oligonucleotide
gcaugguacucaucaauca

SEQ ID NO: 1233567 - RNA, 19 nt, Artificial Sequence
  Description of Artificial Sequence: Synthetic oligonucleotide
accuggaugcuggcugggc

SEQ ID NO: 1233568 - RNA, 19 nt, Artificial Sequence
  Description of Artificial Sequence: Synthetic oligonucleotide
uuguggaccuggguggggu

SEQ ID NO: 1233569 - RNA, 19 nt, Artificial Sequence
  Description of Artificial Sequence: Synthetic oligonucleotide
ggguaccugucauucagac

SEQ ID NO: 1233570 - RNA, 19 nt, Artificial Sequence
  Description of Artificial Sequence: Synthetic oligonucleotide
auggaucacccggggcucc

SEQ ID NO: 1233571 - RNA, 19 nt, Artificial Sequence
  Description of Artificial Sequence: Synthetic oligonucleotide
guuucuugggguaccuguc

SEQ ID NO: 1233572 - RNA, 19 nt, Artificial Sequence
  Description of Artificial Sequence: Synthetic oligonucleotide
ccaggagauguaaucuggc

SEQ ID NO: 1233573 - RNA, 19 nt, Artificial Sequence
  Description of Artificial Sequence: Synthetic oligonucleotide
acccaaucugauugccgca

SEQ ID NO: 1233574 - RNA, 19 nt, Artificial Sequence
  Description of Artificial Sequence: Synthetic oligonucleotide
gacguccuugcggucagug

SEQ ID NO: 1233575 - RNA, 19 nt, Artificial Sequence
  Description of Artificial Sequence: Synthetic oligonucleotide
cacuaguuucuugggguac

SEQ ID NO: 1233576 - RNA, 19 nt, Artificial Sequence
  Description of Artificial Sequence: Synthetic oligonucleotide
uucugaggucccugaucug

SEQ ID NO: 1233577 - RNA, 19 nt, Artificial Sequence
  Description of Artificial Sequence: Synthetic oligonucleotide
ugauuucucucggcaucgc

SEQ ID NO: 1233578 - RNA, 19 nt, Artificial Sequence
  Description of Artificial Sequence: Synthetic oligonucleotide
ugauugccgcacuggccca

SEQ ID NO: 1233579 - RNA, 19 nt, Artificial Sequence
  Description of Artificial Sequence: Synthetic oligonucleotide
agcacagcccgagggaugu

SEQ ID NO: 1233580 - RNA, 19 nt, Artificial Sequence
  Description of Artificial Sequence: Synthetic oligonucleotide
acggaguaugucugcacua

SEQ ID NO: 1233581 - RNA, 19 nt, Artificial Sequence
  Description of Artificial Sequence: Synthetic oligonucleotide
gugagugauuucugagguc

SEQ ID NO: 1233582 - RNA, 19 nt, Artificial Sequence
  Description of Artificial Sequence: Synthetic oligonucleotide
cagcacaaagcccucuaga

SEQ ID NO: 1233583 - RNA, 19 nt, Artificial Sequence
  Description of Artificial Sequence: Synthetic oligonucleotide
gauuucucucggcaucgcu

SEQ ID NO: 1233584 - RNA, 19 nt, Artificial Sequence
  Description of Artificial Sequence: Synthetic oligonucleotide
gcuccaugaaagccucccg

SEQ ID NO: 1233585 - RNA, 19 nt, Artificial Sequence
  Description of Artificial Sequence: Synthetic oligonucleotide
cuggcgacagguccguuca

SEQ ID NO: 1233586 - RNA, 19 nt, Artificial Sequence
  Description of Artificial Sequence: Synthetic oligonucleotide
ucgguggcgaacucuucua

SEQ ID NO: 1233587 - RNA, 19 nt, Artificial Sequence
  Description of Artificial Sequence: Synthetic oligonucleotide
agauguaaucuggccgugu

SEQ ID NO: 1233588 - RNA, 19 nt, Artificial Sequence
  Description of Artificial Sequence: Synthetic oligonucleotide
aguugaggauagaauggau

SEQ ID NO: 1233589 - RNA, 19 nt, Artificial Sequence
  Description of Artificial Sequence: Synthetic oligonucleotide
gaugagggucuguguccug

SEQ ID NO: 1233590 - RNA, 19 nt, Artificial Sequence
  Description of Artificial Sequence: Synthetic oligonucleotide
gcacuaucucccuagaggu

SEQ ID NO: 1233591 - RNA, 19 nt, Artificial Sequence
  Description of Artificial Sequence: Synthetic oligonucleotide
uaguuucuugggguaccug

SEQ ID NO: 1233592 - RNA, 19 nt, Artificial Sequence
  Description of Artificial Sequence: Synthetic oligonucleotide
cacuggcccaguuguugcc

SEQ ID NO: 1233593 - RNA, 19 nt, Artificial Sequence
  Description of Artificial Sequence: Synthetic oligonucleotide
ccucuagacugucacugcc

SEQ ID NO: 1233594 - RNA, 19 nt, Artificial Sequence
  Description of Artificial Sequence: Synthetic oligonucleotide
gucagugcccucgguggcg

SEQ ID NO: 1233595 - RNA, 19 nt, Artificial Sequence
  Description of Artificial Sequence: Synthetic oligonucleotide
ccaagccagagccuguccc

SEQ ID NO: 1233596 - RNA, 19 nt, Artificial Sequence
  Description of Artificial Sequence: Synthetic oligonucleotide
gccgccgaccgcuagcgcg

SEQ ID NO: 1233597 - RNA, 19 nt, Artificial Sequence
  Description of Artificial Sequence: Synthetic oligonucleotide
agugcccucgguggcgaac

SEQ ID NO: 1233598 - RNA, 19 nt, Artificial Sequence
  Description of Artificial Sequence: Synthetic oligonucleotide
acuacacagucugcauucu

SEQ ID NO: 1233599 - RNA, 19 nt, Artificial Sequence
  Description of Artificial Sequence: Synthetic oligonucleotide
cuaucucccuagagguguc

SEQ ID NO: 1233600 - RNA, 19 nt, Artificial Sequence
  Description of Artificial Sequence: Synthetic oligonucleotide
ugggugccccaggagaugu

SEQ ID NO: 1233601 - RNA, 19 nt, Artificial Sequence
  Description of Artificial Sequence: Synthetic oligonucleotide
cucggggcugaugccaugc

SEQ ID NO: 1233602 - RNA, 19 nt, Artificial Sequence
  Description of Artificial Sequence: Synthetic oligonucleotide
cagcccgagggauguaaug

SEQ ID NO: 1233603 - RNA, 19 nt, Artificial Sequence
  Description of Artificial Sequence: Synthetic oligonucleotide
cccaagccaacggacagcg

SEQ ID NO: 1233604 - RNA, 19 nt, Artificial Sequence
  Description of Artificial Sequence: Synthetic oligonucleotide
gaggaguugaggauagaau

SEQ ID NO: 1233605 - RNA, 19 nt, Artificial Sequence
  Description of Artificial Sequence: Synthetic oligonucleotide
gggacucguucacugcucc

SEQ ID NO: 1233606 - RNA, 19 nt, Artificial Sequence
  Description of Artificial Sequence: Synthetic oligonucleotide
guagggugaugauuucucu

SEQ ID NO: 1233607 - RNA, 19 nt, Artificial Sequence
  Description of Artificial Sequence: Synthetic oligonucleotide
cuucuacgaugcccucggg

SEQ ID NO: 1233608 - RNA, 19 nt, Artificial Sequence
  Description of Artificial Sequence: Synthetic oligonucleotide
cucggcaucgcuccucaga

SEQ ID NO: 1233609 - RNA, 19 nt, Artificial Sequence
  Description of Artificial Sequence: Synthetic oligonucleotide
gcccucuagacugucacug

SEQ ID NO: 1233610 - RNA, 19 nt, Artificial Sequence
  Description of Artificial Sequence: Synthetic oligonucleotide
cucccuagagguguccauc

SEQ ID NO: 1233611 - RNA, 19 nt, Artificial Sequence
  Description of Artificial Sequence: Synthetic oligonucleotide
agacugucacugccaucug

SEQ ID NO: 1233612 - RNA, 19 nt, Artificial Sequence
  Description of Artificial Sequence: Synthetic oligonucleotide
uuguugccagcuccuccuc

SEQ ID NO: 1233613 - RNA, 19 nt, Artificial Sequence
  Description of Artificial Sequence: Synthetic oligonucleotide
auugccgcacuggcccaac

SEQ ID NO: 1233614 - RNA, 19 nt, Artificial Sequence
  Description of Artificial Sequence: Synthetic oligonucleotide
cugggccaaccaguaaggc

SEQ ID NO: 1233615 - RNA, 19 nt, Artificial Sequence
  Description of Artificial Sequence: Synthetic oligonucleotide
gcgcauguauauguguuug

SEQ ID NO: 1233616 - RNA, 19 nt, Artificial Sequence
  Description of Artificial Sequence: Synthetic oligonucleotide
aggggcagucagcuaggca

SEQ ID NO: 1233617 - RNA, 19 nt, Artificial Sequence
  Description of Artificial Sequence: Synthetic oligonucleotide
cuuguggaccugggugggg

SEQ ID NO: 1233618 - RNA, 19 nt, Artificial Sequence
  Description of Artificial Sequence: Synthetic oligonucleotide
caccacuacacagucugca

SEQ ID NO: 1233619 - RNA, 19 nt, Artificial Sequence
  Description of Artificial Sequence: Synthetic oligonucleotide
gauuucugaggucccugau

SEQ ID NO: 1233620 - RNA, 19 nt, Artificial Sequence
  Description of Artificial Sequence: Synthetic oligonucleotide
ggaggaguugaggauagaa

SEQ ID NO: 1233621 - RNA, 19 nt, Artificial Sequence
  Description of Artificial Sequence: Synthetic oligonucleotide
ccuggggacucguucacug

SEQ ID NO: 1233622 - RNA, 19 nt, Artificial Sequence
  Description of Artificial Sequence: Synthetic oligonucleotide
cuagagguguccaucucau

SEQ ID NO: 1233623 - RNA, 19 nt, Artificial Sequence
  Description of Artificial Sequence: Synthetic oligonucleotide
uucucucggcaucgcuccu

SEQ ID NO: 1233624 - RNA, 19 nt, Artificial Sequence
  Description of Artificial Sequence: Synthetic oligonucleotide
aucucccuagaggugucca

SEQ ID NO: 1233625 - RNA, 19 nt, Artificial Sequence
  Description of Artificial Sequence: Synthetic oligonucleotide
ucggggcugaugccaugcu

SEQ ID NO: 1233626 - RNA, 19 nt, Artificial Sequence
  Description of Artificial Sequence: Synthetic oligonucleotide
gggcuggaccaccacauca

SEQ ID NO: 1233627 - RNA, 19 nt, Artificial Sequence
  Description of Artificial Sequence: Synthetic oligonucleotide
gaguaugucugcacuaguu

SEQ ID NO: 1233628 - RNA, 19 nt, Artificial Sequence
  Description of Artificial Sequence: Synthetic oligonucleotide
aacggacagcgcauguaua

SEQ ID NO: 1233629 - RNA, 19 nt, Artificial Sequence
  Description of Artificial Sequence: Synthetic oligonucleotide
guccuugcggucagugccc

SEQ ID NO: 1233630 - RNA, 19 nt, Artificial Sequence
  Description of Artificial Sequence: Synthetic oligonucleotide
augcccaagccaacggaca

SEQ ID NO: 1233631 - RNA, 19 nt, Artificial Sequence
  Description of Artificial Sequence: Synthetic oligonucleotide
ccagaacucgaacccaauc

SEQ ID NO: 1233632 - RNA, 19 nt, Artificial Sequence
  Description of Artificial Sequence: Synthetic oligonucleotide
ggggcugaugccaugcuca

SEQ ID NO: 1233633 - RNA, 19 nt, Artificial Sequence
  Description of Artificial Sequence: Synthetic oligonucleotide
ggacagcgcauguauaugu

SEQ ID NO: 1233634 - RNA, 19 nt, Artificial Sequence
  Description of Artificial Sequence: Synthetic oligonucleotide
augcucagacagguagaug

SEQ ID NO: 1233635 - RNA, 19 nt, Artificial Sequence
  Description of Artificial Sequence: Synthetic oligonucleotide
gacucuuguggaccugggu

SEQ ID NO: 1233636 - RNA, 19 nt, Artificial Sequence
  Description of Artificial Sequence: Synthetic oligonucleotide
acguuccaagagguaggag

SEQ ID NO: 1233637 - RNA, 19 nt, Artificial Sequence
  Description of Artificial Sequence: Synthetic oligonucleotide
ccuagagguguccaucuca

SEQ ID NO: 1233638 - RNA, 19 nt, Artificial Sequence
  Description of Artificial Sequence: Synthetic oligonucleotide
caaagagcgaggagaugcu

SEQ ID NO: 1233639 - RNA, 19 nt, Artificial Sequence
  Description of Artificial Sequence: Synthetic oligonucleotide
ccacuggcccaguuguugc

SEQ ID NO: 1233640 - RNA, 19 nt, Artificial Sequence
  Description of Artificial Sequence: Synthetic oligonucleotide
ccguguggcugcaugguac

SEQ ID NO: 1233641 - RNA, 19 nt, Artificial Sequence
  Description of Artificial Sequence: Synthetic oligonucleotide
uguguccuggggacucguu

SEQ ID NO: 1233642 - RNA, 19 nt, Artificial Sequence
  Description of Artificial Sequence: Synthetic oligonucleotide
cacggaguaugucugcacu

SEQ ID NO: 1233643 - RNA, 19 nt, Artificial Sequence
  Description of Artificial Sequence: Synthetic oligonucleotide
ggucagugcccucgguggc

SEQ ID NO: 1233644 - RNA, 19 nt, Artificial Sequence
  Description of Artificial Sequence: Synthetic oligonucleotide
uaccugucauucagacguu

SEQ ID NO: 1233645 - RNA, 19 nt, Artificial Sequence
  Description of Artificial Sequence: Synthetic oligonucleotide
gagcgaggagaugcuggug

SEQ ID NO: 1233646 - RNA, 19 nt, Artificial Sequence
  Description of Artificial Sequence: Synthetic oligonucleotide
agucagcuaggcagggccu

SEQ ID NO: 1233647 - RNA, 19 nt, Artificial Sequence
  Description of Artificial Sequence: Synthetic oligonucleotide
gcggucagugcccucggug

SEQ ID NO: 1233648 - RNA, 19 nt, Artificial Sequence
  Description of Artificial Sequence: Synthetic oligonucleotide
guccuggggacucguucac

SEQ ID NO: 1233649 - RNA, 19 nt, Artificial Sequence
  Description of Artificial Sequence: Synthetic oligonucleotide
ccccaggagauguaaucug

SEQ ID NO: 1233650 - RNA, 19 nt, Artificial Sequence
  Description of Artificial Sequence: Synthetic oligonucleotide
ggcaucgcuccucagacau

SEQ ID NO: 1233651 - RNA, 19 nt, Artificial Sequence
  Description of Artificial Sequence: Synthetic oligonucleotide
guaaucuggccguguggcu

SEQ ID NO: 1233652 - RNA, 19 nt, Artificial Sequence
  Description of Artificial Sequence: Synthetic oligonucleotide
ggcuggaccaccacaucac

SEQ ID NO: 1233653 - RNA, 19 nt, Artificial Sequence
  Description of Artificial Sequence: Synthetic oligonucleotide
auggagugacacagcacaa

SEQ ID NO: 1233654 - RNA, 19 nt, Artificial Sequence
  Description of Artificial Sequence: Synthetic oligonucleotide
gaccaccacaucacucauc

SEQ ID NO: 1233655 - RNA, 19 nt, Artificial Sequence
  Description of Artificial Sequence: Synthetic oligonucleotide
ggucaaccucuuuagugua

SEQ ID NO: 1233656 - RNA, 19 nt, Artificial Sequence
  Description of Artificial Sequence: Synthetic oligonucleotide
caacggacagcgcauguau

SEQ ID NO: 1233657 - RNA, 19 nt, Artificial Sequence
  Description of Artificial Sequence: Synthetic oligonucleotide
uccuggggacucguucacu

SEQ ID NO: 1233658 - RNA, 19 nt, Artificial Sequence
  Description of Artificial Sequence: Synthetic oligonucleotide
agccaacggacagcgcaug

SEQ ID NO: 1233659 - RNA, 19 nt, Artificial Sequence
  Description of Artificial Sequence: Synthetic oligonucleotide
gaaguuggccagcuuccuu

SEQ ID NO: 1233660 - RNA, 19 nt, Artificial Sequence
  Description of Artificial Sequence: Synthetic oligonucleotide
gcgaggagaugcuggugug

SEQ ID NO: 1233661 - RNA, 19 nt, Artificial Sequence
  Description of Artificial Sequence: Synthetic oligonucleotide
cucgguggcgaacucuucu

SEQ ID NO: 1233662 - RNA, 19 nt, Artificial Sequence
  Description of Artificial Sequence: Synthetic oligonucleotide
guaaggcagaugagggucu

SEQ ID NO: 1233663 - RNA, 19 nt, Artificial Sequence
  Description of Artificial Sequence: Synthetic oligonucleotide
uccuugcggucagugcccu

SEQ ID NO: 1233664 - RNA, 19 nt, Artificial Sequence
  Description of Artificial Sequence: Synthetic oligonucleotide
ccgagggauguaaugcuca

SEQ ID NO: 1233665 - RNA, 19 nt, Artificial Sequence
  Description of Artificial Sequence: Synthetic oligonucleotide
ggggaugaaguuggccagc

SEQ ID NO: 1233666 - RNA, 19 nt, Artificial Sequence
  Description of Artificial Sequence: Synthetic oligonucleotide
cagcgcauguauauguguu

SEQ ID NO: 1233667 - RNA, 19 nt, Artificial Sequence
  Description of Artificial Sequence: Synthetic oligonucleotide
aucgcuccucagacaucgg

SEQ ID NO: 1233668 - RNA, 19 nt, Artificial Sequence
  Description of Artificial Sequence: Synthetic oligonucleotide
cccgagggauguaaugcuc

SEQ ID NO: 1233669 - RNA, 19 nt, Artificial Sequence
  Description of Artificial Sequence: Synthetic oligonucleotide
cggaguaugucugcacuag

SEQ ID NO: 1233670 - RNA, 19 nt, Artificial Sequence
  Description of Artificial Sequence: Synthetic oligonucleotide
ccguucaaagagcgaggag

SEQ ID NO: 1233671 - RNA, 19 nt, Artificial Sequence
  Description of Artificial Sequence: Synthetic oligonucleotide
gcacuaguuucuuggggua

SEQ ID NO: 1233672 - RNA, 19 nt, Artificial Sequence
  Description of Artificial Sequence: Synthetic oligonucleotide
uggcugcaugguacucauc

SEQ ID NO: 1233673 - RNA, 19 nt, Artificial Sequence
  Description of Artificial Sequence: Synthetic oligonucleotide
guggcugcaugguacucau

SEQ ID NO: 1233674 - RNA, 19 nt, Artificial Sequence
  Description of Artificial Sequence: Synthetic oligonucleotide
gacaucggcguugcagccu

SEQ ID NO: 1233675 - RNA, 19 nt, Artificial Sequence
  Description of Artificial Sequence: Synthetic oligonucleotide
cugggugccccaggagaug

SEQ ID NO: 1233676 - RNA, 19 nt, Artificial Sequence
  Description of Artificial Sequence: Synthetic oligonucleotide
uggcgacagguccguucaa

SEQ ID NO: 1233677 - RNA, 19 nt, Artificial Sequence
  Description of Artificial Sequence: Synthetic oligonucleotide
gcugcacuaucucccuaga

SEQ ID NO: 1233678 - RNA, 19 nt, Artificial Sequence
  Description of Artificial Sequence: Synthetic oligonucleotide
cgaacccaaucugauugcc

SEQ ID NO: 1233679 - RNA, 19 nt, Artificial Sequence
  Description of Artificial Sequence: Synthetic oligonucleotide
cguugcagccucucccgcc

SEQ ID NO: 1233680 - RNA, 19 nt, Artificial Sequence
  Description of Artificial Sequence: Synthetic oligonucleotide
agguccguucaaagagcga

SEQ ID NO: 1233681 - RNA, 19 nt, Artificial Sequence
  Description of Artificial Sequence: Synthetic oligonucleotide
agggaguuguagggcugga

SEQ ID NO: 1233682 - RNA, 19 nt, Artificial Sequence
  Description of Artificial Sequence: Synthetic oligonucleotide
cuacgaugcccucggggcu

SEQ ID NO: 1233683 - RNA, 19 nt, Artificial Sequence
  Description of Artificial Sequence: Synthetic oligonucleotide
gauugccgcacuggcccaa

SEQ ID NO: 1233684 - RNA, 19 nt, Artificial Sequence
  Description of Artificial Sequence: Synthetic oligonucleotide
ccugguugggaaacacgga

SEQ ID NO: 1233685 - RNA, 19 nt, Artificial Sequence
  Description of Artificial Sequence: Synthetic oligonucleotide
acagcccgagggauguaau

SEQ ID NO: 1233686 - RNA, 19 nt, Artificial Sequence
  Description of Artificial Sequence: Synthetic oligonucleotide
cuaguuucuugggguaccu

SEQ ID NO: 1233687 - RNA, 19 nt, Artificial Sequence
  Description of Artificial Sequence: Synthetic oligonucleotide
cacagcccgagggauguaa

SEQ ID NO: 1233688 - RNA, 19 nt, Artificial Sequence
  Description of Artificial Sequence: Synthetic oligonucleotide
ccgaucuaugaugucaaaa

SEQ ID NO: 1233689 - RNA, 19 nt, Artificial Sequence
  Description of Artificial Sequence: Synthetic oligonucleotide
ccguuuccgaagcuuguca

SEQ ID NO: 1233690 - RNA, 19 nt, Artificial Sequence
  Description of Artificial Sequence: Synthetic oligonucleotide
cgaacucuucuacgaugcc

SEQ ID NO: 1233691 - RNA, 19 nt, Artificial Sequence
  Description of Artificial Sequence: Synthetic oligonucleotide
gcuccugggugccccagga

SEQ ID NO: 1233692 - RNA, 19 nt, Artificial Sequence
  Description of Artificial Sequence: Synthetic oligonucleotide
cacugccaucugccucccg

SEQ ID NO: 1233693 - RNA, 19 nt, Artificial Sequence
  Description of Artificial Sequence: Synthetic oligonucleotide
cccaagccagagccugucc

SEQ ID NO: 1233694 - RNA, 19 nt, Artificial Sequence
  Description of Artificial Sequence: Synthetic oligonucleotide
ccgccgaccgcuagcgcgc

SEQ ID NO: 1233695 - RNA, 19 nt, Artificial Sequence
  Description of Artificial Sequence: Synthetic oligonucleotide
ggugccccaggagauguaa

SEQ ID NO: 1233696 - RNA, 19 nt, Artificial Sequence
  Description of Artificial Sequence: Synthetic oligonucleotide
gcguugcagccucucccgc

SEQ ID NO: 1233697 - RNA, 19 nt, Artificial Sequence
  Description of Artificial Sequence: Synthetic oligonucleotide
gcccaagccaacggacagc

SEQ ID NO: 1233698 - RNA, 19 nt, Artificial Sequence
  Description of Artificial Sequence: Synthetic oligonucleotide
cguuuccgaagcuugucaa

SEQ ID NO: 1233699 - RNA, 19 nt, Artificial Sequence
  Description of Artificial Sequence: Synthetic oligonucleotide
gcaccacuacacagucugc

SEQ ID NO: 1233700 - RNA, 19 nt, Artificial Sequence
  Description of Artificial Sequence: Synthetic oligonucleotide
gggguaccugucauucaga

SEQ ID NO: 1233701 - RNA, 19 nt, Artificial Sequence
  Description of Artificial Sequence: Synthetic oligonucleotide
ggcgacagguccguucaaa

SEQ ID NO: 1233702 - RNA, 19 nt, Artificial Sequence
  Description of Artificial Sequence: Synthetic oligonucleotide
ggggacucguucacugcuc

SEQ ID NO: 1233703 - RNA, 19 nt, Artificial Sequence
  Description of Artificial Sequence: Synthetic oligonucleotide
aacuggcgacagguccguu

SEQ ID NO: 1233704 - RNA, 19 nt, Artificial Sequence
  Description of Artificial Sequence: Synthetic oligonucleotide
gcagacucuuguggaccug

SEQ ID NO: 1233705 - RNA, 19 nt, Artificial Sequence
  Description of Artificial Sequence: Synthetic oligonucleotide
gggaugaaguuggccagcu

SEQ ID NO: 1233706 - RNA, 19 nt, Artificial Sequence
  Description of Artificial Sequence: Synthetic oligonucleotide
cccuagagguguccaucuc

SEQ ID NO: 1233707 - RNA, 19 nt, Artificial Sequence
  Description of Artificial Sequence: Synthetic oligonucleotide
cgguggcgaacucuucuac

SEQ ID NO: 1233708 - RNA, 19 nt, Artificial Sequence
  Description of Artificial Sequence: Synthetic oligonucleotide
cccguuuccgaagcuuguc

SEQ ID NO: 1233709 - RNA, 19 nt, Artificial Sequence
  Description of Artificial Sequence: Synthetic oligonucleotide
guguaaggagggaguugua

SEQ ID NO: 1233710 - RNA, 19 nt, Artificial Sequence
  Description of Artificial Sequence: Synthetic oligonucleotide
cugccucccgaucuaugau

SEQ ID NO: 1233711 - RNA, 19 nt, Artificial Sequence
  Description of Artificial Sequence: Synthetic oligonucleotide
cagcgccgccgaccgcuag

SEQ ID NO: 1233712 - RNA, 19 nt, Artificial Sequence
  Description of Artificial Sequence: Synthetic oligonucleotide
cggacagcgcauguauaug

SEQ ID NO: 1233713 - RNA, 19 nt, Artificial Sequence
  Description of Artificial Sequence: Synthetic oligonucleotide
cacucaucucauccugguu

SEQ ID NO: 1233714 - RNA, 19 nt, Artificial Sequence
  Description of Artificial Sequence: Synthetic oligonucleotide
agacguccuugcggucagu

SEQ ID NO: 1233715 - RNA, 19 nt, Artificial Sequence
  Description of Artificial Sequence: Synthetic oligonucleotide
ccucccgaucuaugauguc

SEQ ID NO: 1233716 - RNA, 19 nt, Artificial Sequence
  Description of Artificial Sequence: Synthetic oligonucleotide
ggacucguucacugcuccu

SEQ ID NO: 1233717 - RNA, 19 nt, Artificial Sequence
  Description of Artificial Sequence: Synthetic oligonucleotide
aucuggccguguggcugca

SEQ ID NO: 1233718 - RNA, 19 nt, Artificial Sequence
  Description of Artificial Sequence: Synthetic oligonucleotide
ccucgguggcgaacucuuc

SEQ ID NO: 1233719 - RNA, 19 nt, Artificial Sequence
  Description of Artificial Sequence: Synthetic oligonucleotide
gccguguggcugcauggua

SEQ ID NO: 1233720 - RNA, 19 nt, Artificial Sequence
  Description of Artificial Sequence: Synthetic oligonucleotide
gcccaagccagagccuguc

SEQ ID NO: 1233721 - RNA, 19 nt, Artificial Sequence
  Description of Artificial Sequence: Synthetic oligonucleotide
gccaacggacagcgcaugu

SEQ ID NO: 1233722 - RNA, 19 nt, Artificial Sequence
  Description of Artificial Sequence: Synthetic oligonucleotide
ccaugaaagccucccguuu

SEQ ID NO: 1233723 - RNA, 19 nt, Artificial Sequence
  Description of Artificial Sequence: Synthetic oligonucleotide
ccacuacacagucugcauu

SEQ ID NO: 1233724 - RNA, 19 nt, Artificial Sequence
  Description of Artificial Sequence: Synthetic oligonucleotide
cuccucagacaucggcguu

SEQ ID NO: 1233725 - RNA, 19 nt, Artificial Sequence
  Description of Artificial Sequence: Synthetic oligonucleotide
ccaacggacagcgcaugua

SEQ ID NO: 1233726 - RNA, 19 nt, Artificial Sequence
  Description of Artificial Sequence: Synthetic oligonucleotide
gcaucgcuccucagacauc

SEQ ID NO: 1233727 - RNA, 19 nt, Artificial Sequence
  Description of Artificial Sequence: Synthetic oligonucleotide
ccugggugccccaggagau

SEQ ID NO: 1233728 - RNA, 19 nt, Artificial Sequence
  Description of Artificial Sequence: Synthetic oligonucleotide
cccgaucuaugaugucaaa

SEQ ID NO: 1233729 - RNA, 19 nt, Artificial Sequence
  Description of Artificial Sequence: Synthetic oligonucleotide
ggccugggccaaccaguaa

SEQ ID NO: 1233730 - RNA, 19 nt, Artificial Sequence
  Description of Artificial Sequence: Synthetic oligonucleotide
caucugccucccgaucuau

SEQ ID NO: 1233731 - RNA, 19 nt, Artificial Sequence
  Description of Artificial Sequence: Synthetic oligonucleotide
gugccccaggagauguaau

SEQ ID NO: 1233732 - RNA, 19 nt, Artificial Sequence
  Description of Artificial Sequence: Synthetic oligonucleotide
ggccguguggcugcauggu

SEQ ID NO: 1233733 - RNA, 19 nt, Artificial Sequence
  Description of Artificial Sequence: Synthetic oligonucleotide
gggccccaggggaugaagu

SEQ ID NO: 1233734 - RNA, 19 nt, Artificial Sequence
  Description of Artificial Sequence: Synthetic oligonucleotide
gcuuggcauaggaggaguu

SEQ ID NO: 1233735 - RNA, 19 nt, Artificial Sequence
  Description of Artificial Sequence: Synthetic oligonucleotide
cagugcccucgguggcgaa

SEQ ID NO: 1233736 - RNA, 19 nt, Artificial Sequence
  Description of Artificial Sequence: Synthetic oligonucleotide
ccucucccgccagcagcgc

SEQ ID NO: 1233737 - RNA, 19 nt, Artificial Sequence
  Description of Artificial Sequence: Synthetic oligonucleotide
cgagggauguaaugcucau

SEQ ID NO: 1233738 - RNA, 19 nt, Artificial Sequence
  Description of Artificial Sequence: Synthetic oligonucleotide
gcucaucgucugccuggua

SEQ ID NO: 1233739 - RNA, 19 nt, Artificial Sequence
  Description of Artificial Sequence: Synthetic oligonucleotide
cugggccccaggggaugaa

SEQ ID NO: 1233740 - RNA, 19 nt, Artificial Sequence
  Description of Artificial Sequence: Synthetic oligonucleotide
cggcaucgcuccucagaca

SEQ ID NO: 1233741 - RNA, 19 nt, Artificial Sequence
  Description of Artificial Sequence: Synthetic oligonucleotide
ccccagcaauggagugaca

SEQ ID NO: 1233742 - RNA, 19 nt, Artificial Sequence
  Description of Artificial Sequence: Synthetic oligonucleotide
gggugccccaggagaugua

SEQ ID NO: 1233743 - RNA, 19 nt, Artificial Sequence
  Description of Artificial Sequence: Synthetic oligonucleotide
cgccgccgaccgcuagcgc

SEQ ID NO: 1233744 - RNA, 19 nt, Artificial Sequence
  Description of Artificial Sequence: Synthetic oligonucleotide
gcacagcccgagggaugua

SEQ ID NO: 1233745 - RNA, 19 nt, Artificial Sequence
  Description of Artificial Sequence: Synthetic oligonucleotide
cgccgaccgcuagcgcgcu

SEQ ID NO: 1233746 - RNA, 19 nt, Artificial Sequence
  Description of Artificial Sequence: Synthetic oligonucleotide
uuugagaccccacaaaugg

SEQ ID NO: 1233747 - RNA, 19 nt, Artificial Sequence
  Description of Artificial Sequence: Synthetic oligonucleotide
ucuuguagccaucagauac

SEQ ID NO: 1233748 - RNA, 19 nt, Artificial Sequence
  Description of Artificial Sequence: Synthetic oligonucleotide
cuuauagacauuuuccgug

SEQ ID NO: 1233749 - RNA, 19 nt, Artificial Sequence
  Description of Artificial Sequence: Synthetic oligonucleotide
agauacguaguucuccagc

SEQ ID NO: 1233750 - RNA, 19 nt, Artificial Sequence
  Description of Artificial Sequence: Synthetic oligonucleotide
ucgaaauagccuuuggcag

SEQ ID NO: 1233751 - RNA, 19 nt, Artificial Sequence
  Description of Artificial Sequence: Synthetic oligonucleotide
aucgaaauagccuuuggca

SEQ ID NO: 1233752 - RNA, 19 nt, Artificial Sequence
  Description of Artificial Sequence: Synthetic oligonucleotide
uuuaccagagcaucgaaau

SEQ ID NO: 1233753 - RNA, 19 nt, Artificial Sequence
  Description of Artificial Sequence: Synthetic oligonucleotide
ugacaggguacuaggaagg

SEQ ID NO: 1233754 - RNA, 19 nt, Artificial Sequence
  Description of Artificial Sequence: Synthetic oligonucleotide
cagugcagcacucagauac

SEQ ID NO: 1233755 - RNA, 19 nt, Artificial Sequence
  Description of Artificial Sequence: Synthetic oligonucleotide
uagacauuuuccgugagcc

SEQ ID NO: 1233756 - RNA, 19 nt, Artificial Sequence
  Description of Artificial Sequence: Synthetic oligonucleotide
uaccagagcaucgaaauag

SEQ ID NO: 1233757 - RNA, 19 nt, Artificial Sequence
  Description of Artificial Sequence: Synthetic oligonucleotide
ucuuauagacauuuuccgu

SEQ ID NO: 1233758 - RNA, 19 nt, Artificial Sequence
  Description of Artificial Sequence: Synthetic oligonucleotide
aucagauacguaguucucc

SEQ ID NO: 1233759 - RNA, 19 nt, Artificial Sequence
  Description of Artificial Sequence: Synthetic oligonucleotide
uuauagacauuuuccguga

SEQ ID NO: 1233760 - RNA, 19 nt, Artificial Sequence
  Description of Artificial Sequence: Synthetic oligonucleotide
uuuagcaucucuuccaguu

SEQ ID NO: 1233761 - RNA, 19 nt, Artificial Sequence
  Description of Artificial Sequence: Synthetic oligonucleotide
aaaccaacgagagcugagg

SEQ ID NO: 1233762 - RNA, 19 nt, Artificial Sequence
  Description of Artificial Sequence: Synthetic oligonucleotide
cuuguagccaucagauacg

SEQ ID NO: 1233763 - RNA, 19 nt, Artificial Sequence
  Description of Artificial Sequence: Synthetic oligonucleotide
uguccgaguacuucugagg

SEQ ID NO: 1233764 - RNA, 19 nt, Artificial Sequence
  Description of Artificial Sequence: Synthetic oligonucleotide
gaaauagccuuuggcagcg

SEQ ID NO: 1233765 - RNA, 19 nt, Artificial Sequence
  Description of Artificial Sequence: Synthetic oligonucleotide
agagcaucgaaauagccuu

SEQ ID NO: 1233766 - RNA, 19 nt, Artificial Sequence
  Description of Artificial Sequence: Synthetic oligonucleotide
ugaaguugcggaagcuggg

SEQ ID NO: 1233767 - RNA, 19 nt, Artificial Sequence
  Description of Artificial Sequence: Synthetic oligonucleotide
uggagcuugaacguggcag

SEQ ID NO: 1233768 - RNA, 19 nt, Artificial Sequence
  Description of Artificial Sequence: Synthetic oligonucleotide
uacuaggaaggauggagcc

SEQ ID NO: 1233769 - RNA, 19 nt, Artificial Sequence
  Description of Artificial Sequence: Synthetic oligonucleotide
guccgaguacuucugaggg

SEQ ID NO: 1233770 - RNA, 19 nt, Artificial Sequence
  Description of Artificial Sequence: Synthetic oligonucleotide
guacgagucgcucagcuug

SEQ ID NO: 1233771 - RNA, 19 nt, Artificial Sequence
  Description of Artificial Sequence: Synthetic oligonucleotide
aacaaccccgggaacaaac

SEQ ID NO: 1233772 - RNA, 19 nt, Artificial Sequence
  Description of Artificial Sequence: Synthetic oligonucleotide
aguuccuuagagcccuggc

SEQ ID NO: 1233773 - RNA, 19 nt, Artificial Sequence
  Description of Artificial Sequence: Synthetic oligonucleotide
ucucacucucgccauagug

SEQ ID NO: 1233774 - RNA, 19 nt, Artificial Sequence
  Description of Artificial Sequence: Synthetic oligonucleotide
agaguucuuggccacagca

SEQ ID NO: 1233775 - RNA, 19 nt, Artificial Sequence
  Description of Artificial Sequence: Synthetic oligonucleotide
aguguguuggaguacgagu

SEQ ID NO: 1233776 - RNA, 19 nt, Artificial Sequence
  Description of Artificial Sequence: Synthetic oligonucleotide
caucgaaauagccuuuggc

SEQ ID NO: 1233777 - RNA, 19 nt, Artificial Sequence
  Description of Artificial Sequence: Synthetic oligonucleotide
uggacuucggccaucugga

SEQ ID NO: 1233778 - RNA, 19 nt, Artificial Sequence
  Description of Artificial Sequence: Synthetic oligonucleotide
caucuuuaccagagcaucg

SEQ ID NO: 1233779 - RNA, 19 nt, Artificial Sequence
  Description of Artificial Sequence: Synthetic oligonucleotide
ucacucucgccauagugcc

SEQ ID NO: 1233780 - RNA, 19 nt, Artificial Sequence
  Description of Artificial Sequence: Synthetic oligonucleotide
ggaacggccacacuguagg

SEQ ID NO: 1233781 - RNA, 19 nt, Artificial Sequence
  Description of Artificial Sequence: Synthetic oligonucleotide
aaauggugccagcucaggu

SEQ ID NO: 1233782 - RNA, 19 nt, Artificial Sequence
  Description of Artificial Sequence: Synthetic oligonucleotide
ucaggcacuagcaggguga

SEQ ID NO: 1233783 - RNA, 19 nt, Artificial Sequence
  Description of Artificial Sequence: Synthetic oligonucleotide
aaaccagccccgcauuuug

SEQ ID NO: 1233784 - RNA, 19 nt, Artificial Sequence
  Description of Artificial Sequence: Synthetic oligonucleotide
acuuccgucacuguccagg

SEQ ID NO: 1233785 - RNA, 19 nt, Artificial Sequence
  Description of Artificial Sequence: Synthetic oligonucleotide
uauagacauuuuccgugag

SEQ ID NO: 1233786 - RNA, 19 nt, Artificial Sequence
  Description of Artificial Sequence: Synthetic oligonucleotide
cauagugccagccgucacg

SEQ ID NO: 1233787 - RNA, 19 nt, Artificial Sequence
  Description of Artificial Sequence: Synthetic oligonucleotide
acaccagcgugccacugcc

SEQ ID NO: 1233788 - RNA, 19 nt, Artificial Sequence
  Description of Artificial Sequence: Synthetic oligonucleotide
cccguagucauccagaccc

SEQ ID NO: 1233789 - RNA, 19 nt, Artificial Sequence
  Description of Artificial Sequence: Synthetic oligonucleotide
ugggcuagcagcuccuugc

SEQ ID NO: 1233790 - RNA, 19 nt, Artificial Sequence
  Description of Artificial Sequence: Synthetic oligonucleotide
ggucuuauagacauuuucc

SEQ ID NO: 1233791 - RNA, 19 nt, Artificial Sequence
  Description of Artificial Sequence: Synthetic oligonucleotide
ucuuacggagcuucuucag

SEQ ID NO: 1233792 - RNA, 19 nt, Artificial Sequence
  Description of Artificial Sequence: Synthetic oligonucleotide
cucagccugacacuugucc

SEQ ID NO: 1233793 - RNA, 19 nt, Artificial Sequence
  Description of Artificial Sequence: Synthetic oligonucleotide
gguacuaggaaggauggag

SEQ ID NO: 1233794 - RNA, 19 nt, Artificial Sequence
  Description of Artificial Sequence: Synthetic oligonucleotide
cuuugagaccccacaaaug

SEQ ID NO: 1233795 - RNA, 19 nt, Artificial Sequence
  Description of Artificial Sequence: Synthetic oligonucleotide
agcagaaccuccuccgcuc

SEQ ID NO: 1233796 - RNA, 19 nt, Artificial Sequence
  Description of Artificial Sequence: Synthetic oligonucleotide
aaccaacgagagcugagga

SEQ ID NO: 1233797 - RNA, 19 nt, Artificial Sequence
  Description of Artificial Sequence: Synthetic oligonucleotide
uucuuacggagcuucuuca

SEQ ID NO: 1233798 - RNA, 19 nt, Artificial Sequence
  Description of Artificial Sequence: Synthetic oligonucleotide
cuuacggagcuucuucagc

SEQ ID NO: 1233799 - RNA, 19 nt, Artificial Sequence
  Description of Artificial Sequence: Synthetic oligonucleotide
gcagcacucagauaccugg

SEQ ID NO: 1233800 - RNA, 19 nt, Artificial Sequence
  Description of Artificial Sequence: Synthetic oligonucleotide
cuggcaaggguuuggcucc

SEQ ID NO: 1233801 - RNA, 19 nt, Artificial Sequence
  Description of Artificial Sequence: Synthetic oligonucleotide
ugguaagcagcagaguucu

SEQ ID NO: 1233802 - RNA, 19 nt, Artificial Sequence
  Description of Artificial Sequence: Synthetic oligonucleotide
aaguguguuggaguacgag

SEQ ID NO: 1233803 - RNA, 19 nt, Artificial Sequence
  Description of Artificial Sequence: Synthetic oligonucleotide
accaacgagagcugaggag

SEQ ID NO: 1233804 - RNA, 19 nt, Artificial Sequence
  Description of Artificial Sequence: Synthetic oligonucleotide
auuuuccgugagccggugc

SEQ ID NO: 1233805 - RNA, 19 nt, Artificial Sequence
  Description of Artificial Sequence: Synthetic oligonucleotide
cagagcaucuccuuugcuc

SEQ ID NO: 1233806 - RNA, 19 nt, Artificial Sequence
  Description of Artificial Sequence: Synthetic oligonucleotide
auacguaguucuccagcuc

SEQ ID NO: 1233807 - RNA, 19 nt, Artificial Sequence
  Description of Artificial Sequence: Synthetic oligonucleotide
uuacguucuaggccagcug

SEQ ID NO: 1233808 - RNA, 19 nt, Artificial Sequence
  Description of Artificial Sequence: Synthetic oligonucleotide
cuucuuacggagcuucuuc

SEQ ID NO: 1233809 - RNA, 19 nt, Artificial Sequence
  Description of Artificial Sequence: Synthetic oligonucleotide
gauacguaguucuccagcu

SEQ ID NO: 1233810 - RNA, 19 nt, Artificial Sequence
  Description of Artificial Sequence: Synthetic oligonucleotide
auagugccagccgucacgg

SEQ ID NO: 1233811 - RNA, 19 nt, Artificial Sequence
  Description of Artificial Sequence: Synthetic oligonucleotide
gaucaccaacuugaaaggc

SEQ ID NO: 1233812 - RNA, 19 nt, Artificial Sequence
  Description of Artificial Sequence: Synthetic oligonucleotide
aaguugcggaagcuggggu

SEQ ID NO: 1233813 - RNA, 19 nt, Artificial Sequence
  Description of Artificial Sequence: Synthetic oligonucleotide
ggaaguguguuggaguacg

SEQ ID NO: 1233814 - RNA, 19 nt, Artificial Sequence
  Description of Artificial Sequence: Synthetic oligonucleotide
uccccaaguuccuuagagc

SEQ ID NO: 1233815 - RNA, 19 nt, Artificial Sequence
  Description of Artificial Sequence: Synthetic oligonucleotide
ugcaucuccuccgagcgug

SEQ ID NO: 1233816 - RNA, 19 nt, Artificial Sequence
  Description of Artificial Sequence: Synthetic oligonucleotide
gaagcagaaccuccuccgc

SEQ ID NO: 1233817 - RNA, 19 nt, Artificial Sequence
  Description of Artificial Sequence: Synthetic oligonucleotide
guacuaggaaggauggagc

SEQ ID NO: 1233818 - RNA, 19 nt, Artificial Sequence
  Description of Artificial Sequence: Synthetic oligonucleotide
acgugccguagucaggagg

SEQ ID NO: 1233819 - RNA, 19 nt, Artificial Sequence
  Description of Artificial Sequence: Synthetic oligonucleotide
uugagaccccacaaauggu

SEQ ID NO: 1233820 - RNA, 19 nt, Artificial Sequence
  Description of Artificial Sequence: Synthetic oligonucleotide
gacagcgcggucuggaauc

SEQ ID NO: 1233821 - RNA, 19 nt, Artificial Sequence
  Description of Artificial Sequence: Synthetic oligonucleotide
gguuuucucacucucgcca

SEQ ID NO: 1233822 - RNA, 19 nt, Artificial Sequence
  Description of Artificial Sequence: Synthetic oligonucleotide
caacgagagcugaggaggg

SEQ ID NO: 1233823 - RNA, 19 nt, Artificial Sequence
  Description of Artificial Sequence: Synthetic oligonucleotide
agcguccucacacugugga

SEQ ID NO: 1233824 - RNA, 19 nt, Artificial Sequence
  Description of Artificial Sequence: Synthetic oligonucleotide
aggguacuaggaaggaugg

SEQ ID NO: 1233825 - RNA, 19 nt, Artificial Sequence
  Description of Artificial Sequence: Synthetic oligonucleotide
ucccuuggcucuucuuacg

SEQ ID NO: 1233826 - RNA, 19 nt, Artificial Sequence
  Description of Artificial Sequence: Synthetic oligonucleotide
cacaaauggugccagcuca

SEQ ID NO: 1233827 - RNA, 19 nt, Artificial Sequence
  Description of Artificial Sequence: Synthetic oligonucleotide
ggcauagcuguucuucggg

SEQ ID NO: 1233828 - RNA, 19 nt, Artificial Sequence
  Description of Artificial Sequence: Synthetic oligonucleotide
gggaacaaaccaacgagag

SEQ ID NO: 1233829 - RNA, 19 nt, Artificial Sequence
  Description of Artificial Sequence: Synthetic oligonucleotide
ugccauggagcuugaacgu

SEQ ID NO: 1233830 - RNA, 19 nt, Artificial Sequence
  Description of Artificial Sequence: Synthetic oligonucleotide
agaaggcaggaacggccac

SEQ ID NO: 1233831 - RNA, 19 nt, Artificial Sequence
  Description of Artificial Sequence: Synthetic oligonucleotide
ccaacgagagcugaggagg

SEQ ID NO: 1233832 - RNA, 19 nt, Artificial Sequence
  Description of Artificial Sequence: Synthetic oligonucleotide
ucugccgguggacuucggc

SEQ ID NO: 1233833 - RNA, 19 nt, Artificial Sequence
  Description of Artificial Sequence: Synthetic oligonucleotide
ggaaggauggagccguugc

SEQ ID NO: 1233834 - RNA, 19 nt, Artificial Sequence
  Description of Artificial Sequence: Synthetic oligonucleotide
cugccgguggacuucggcc

SEQ ID NO: 1233835 - RNA, 19 nt, Artificial Sequence
  Description of Artificial Sequence: Synthetic oligonucleotide
acgggaaguguguuggagu

SEQ ID NO: 1233836 - RNA, 19 nt, Artificial Sequence
  Description of Artificial Sequence: Synthetic oligonucleotide
uuaccagagcaucgaaaua

SEQ ID NO: 1233837 - RNA, 19 nt, Artificial Sequence
  Description of Artificial Sequence: Synthetic oligonucleotide
augugcaaccugucacuuc

SEQ ID NO: 1233838 - RNA, 19 nt, Artificial Sequence
  Description of Artificial Sequence: Synthetic oligonucleotide
agugcagcacucagauacc

SEQ ID NO: 1233839 - RNA, 19 nt, Artificial Sequence
  Description of Artificial Sequence: Synthetic oligonucleotide
ucucugcuugaaagucccg

SEQ ID NO: 1233840 - RNA, 19 nt, Artificial Sequence
  Description of Artificial Sequence: Synthetic oligonucleotide
ucacccugcuuguugcuga

SEQ ID NO: 1233841 - RNA, 19 nt, Artificial Sequence
  Description of Artificial Sequence: Synthetic oligonucleotide
ggaacaaaccaacgagagc

SEQ ID NO: 1233842 - RNA, 19 nt, Artificial Sequence
  Description of Artificial Sequence: Synthetic oligonucleotide
guguguuggaguacgaguc

SEQ ID NO: 1233843 - RNA, 19 nt, Artificial Sequence
  Description of Artificial Sequence: Synthetic oligonucleotide
cauggagcuugaacguggc

SEQ ID NO: 1233844 - RNA, 19 nt, Artificial Sequence
  Description of Artificial Sequence: Synthetic oligonucleotide
uacgagucgcucagcuugc

SEQ ID NO: 1233845 - RNA, 19 nt, Artificial Sequence
  Description of Artificial Sequence: Synthetic oligonucleotide
ugagaugaccagguuggac

SEQ ID NO: 1233846 - RNA, 19 nt, Artificial Sequence
  Description of Artificial Sequence: Synthetic oligonucleotide
uuugacccgcaugcggccg

SEQ ID NO: 1233847 - RNA, 19 nt, Artificial Sequence
  Description of Artificial Sequence: Synthetic oligonucleotide
cuugcgcacgggaagugug

SEQ ID NO: 1233848 - RNA, 19 nt, Artificial Sequence
  Description of Artificial Sequence: Synthetic oligonucleotide
cuuugacccgcaugcggcc

SEQ ID NO: 1233849 - RNA, 19 nt, Artificial Sequence
  Description of Artificial Sequence: Synthetic oligonucleotide
gaacggccacacuguaggg

SEQ ID NO: 1233850 - RNA, 19 nt, Artificial Sequence
  Description of Artificial Sequence: Synthetic oligonucleotide
aucuuuaccagagcaucga

SEQ ID NO: 1233851 - RNA, 19 nt, Artificial Sequence
  Description of Artificial Sequence: Synthetic oligonucleotide
acccgaguguaggagaaag

SEQ ID NO: 1233852 - RNA, 19 nt, Artificial Sequence
  Description of Artificial Sequence: Synthetic oligonucleotide
ugccgguggacuucggcca

SEQ ID NO: 1233853 - RNA, 19 nt, Artificial Sequence
  Description of Artificial Sequence: Synthetic oligonucleotide
cugucuuguagccaucaga

SEQ ID NO: 1233854 - RNA, 19 nt, Artificial Sequence
  Description of Artificial Sequence: Synthetic oligonucleotide
gccguuacguucuaggcca

SEQ ID NO: 1233855 - RNA, 19 nt, Artificial Sequence
  Description of Artificial Sequence: Synthetic oligonucleotide
ugacacuuguccagagcau

SEQ ID NO: 1233856 - RNA, 19 nt, Artificial Sequence
  Description of Artificial Sequence: Synthetic oligonucleotide
ugggaucaccaacuugaaa

SEQ ID NO: 1233857 - RNA, 19 nt, Artificial Sequence
  Description of Artificial Sequence: Synthetic oligonucleotide
uuguagccaucagauacgu

SEQ ID NO: 1233858 - RNA, 19 nt, Artificial Sequence
  Description of Artificial Sequence: Synthetic oligonucleotide
ggcuuugacccgcaugcgg

SEQ ID NO: 1233859 - RNA, 19 nt, Artificial Sequence
  Description of Artificial Sequence: Synthetic oligonucleotide
gaagaggacguccccaagu

SEQ ID NO: 1233860 - RNA, 19 nt, Artificial Sequence
  Description of Artificial Sequence: Synthetic oligonucleotide
acaaauggugccagcucag

SEQ ID NO: 1233861 - RNA, 19 nt, Artificial Sequence
  Description of Artificial Sequence: Synthetic oligonucleotide
caccaacuugaaaggcagg

SEQ ID NO: 1233862 - RNA, 19 nt, Artificial Sequence
  Description of Artificial Sequence: Synthetic oligonucleotide
gucaccagccgcgugggag

SEQ ID NO: 1233863 - RNA, 19 nt, Artificial Sequence
  Description of Artificial Sequence: Synthetic oligonucleotide
ccgggaacaaaccaacgag

SEQ ID NO: 1233864 - RNA, 19 nt, Artificial Sequence
  Description of Artificial Sequence: Synthetic oligonucleotide
acguucuaggccagcugcc

SEQ ID NO: 1233865 - RNA, 19 nt, Artificial Sequence
  Description of Artificial Sequence: Synthetic oligonucleotide
cagcgaaggugacaccugc

SEQ ID NO: 1233866 - RNA, 19 nt, Artificial Sequence
  Description of Artificial Sequence: Synthetic oligonucleotide
uccgaguacuucugagggu

SEQ ID NO: 1233867 - RNA, 19 nt, Artificial Sequence
  Description of Artificial Sequence: Synthetic oligonucleotide
acaaaccaacgagagcuga

SEQ ID NO: 1233868 - RNA, 19 nt, Artificial Sequence
  Description of Artificial Sequence: Synthetic oligonucleotide
ccauggagcuugaacgugg

SEQ ID NO: 1233869 - RNA, 19 nt, Artificial Sequence
  Description of Artificial Sequence: Synthetic oligonucleotide
gaagagcucuucagagcag

SEQ ID NO: 1233870 - RNA, 19 nt, Artificial Sequence
  Description of Artificial Sequence: Synthetic oligonucleotide
accccgggaacaaaccaac

SEQ ID NO: 1233871 - RNA, 19 nt, Artificial Sequence
  Description of Artificial Sequence: Synthetic oligonucleotide
acguccccaaguuccuuag

SEQ ID NO: 1233872 - RNA, 19 nt, Artificial Sequence
  Description of Artificial Sequence: Synthetic oligonucleotide
gucccggccgucugggugg

SEQ ID NO: 1233873 - RNA, 19 nt, Artificial Sequence
  Description of Artificial Sequence: Synthetic oligonucleotide
gcuuucucguaguucuucc

SEQ ID NO: 1233874 - RNA, 19 nt, Artificial Sequence
  Description of Artificial Sequence: Synthetic oligonucleotide
cuuagagcccuggcucucg

SEQ ID NO: 1233875 - RNA, 19 nt, Artificial Sequence
  Description of Artificial Sequence: Synthetic oligonucleotide
aguugcggaagcugggguu

SEQ ID NO: 1233876 - RNA, 19 nt, Artificial Sequence
  Description of Artificial Sequence: Synthetic oligonucleotide
ggccguuacguucuaggcc

SEQ ID NO: 1233877 - RNA, 19 nt, Artificial Sequence
  Description of Artificial Sequence: Synthetic oligonucleotide
cauccagacccugagagaa

SEQ ID NO: 1233878 - RNA, 19 nt, Artificial Sequence
  Description of Artificial Sequence: Synthetic oligonucleotide
cgaaauagccuuuggcagc

SEQ ID NO: 1233879 - RNA, 19 nt, Artificial Sequence
  Description of Artificial Sequence: Synthetic oligonucleotide
ugcugucuuguagccauca

SEQ ID NO: 1233880 - RNA, 19 nt, Artificial Sequence
  Description of Artificial Sequence: Synthetic oligonucleotide
aaccagccccgcauuuugg

SEQ ID NO: 1233881 - RNA, 19 nt, Artificial Sequence
  Description of Artificial Sequence: Synthetic oligonucleotide
uugcgcacgggaagugugu

SEQ ID NO: 1233882 - RNA, 19 nt, Artificial Sequence
  Description of Artificial Sequence: Synthetic oligonucleotide
gcggucuggaaucuuguug

SEQ ID NO: 1233883 - RNA, 19 nt, Artificial Sequence
  Description of Artificial Sequence: Synthetic oligonucleotide
ucggugagugcugucuugu

SEQ ID NO: 1233884 - RNA, 19 nt, Artificial Sequence
  Description of Artificial Sequence: Synthetic oligonucleotide
gcaucgaaauagccuuugg

SEQ ID NO: 1233885 - RNA, 19 nt, Artificial Sequence
  Description of Artificial Sequence: Synthetic oligonucleotide
gugguaagcagcagaguuc

SEQ ID NO: 1233886 - RNA, 19 nt, Artificial Sequence
  Description of Artificial Sequence: Synthetic oligonucleotide
uguagggucucugcuugaa

SEQ ID NO: 1233887 - RNA, 19 nt, Artificial Sequence
  Description of Artificial Sequence: Synthetic oligonucleotide
aaccccgggaacaaaccaa

SEQ ID NO: 1233888 - RNA, 19 nt, Artificial Sequence
  Description of Artificial Sequence: Synthetic oligonucleotide
agccgcgugggagaaaaug

SEQ ID NO: 1233889 - RNA, 19 nt, Artificial Sequence
  Description of Artificial Sequence: Synthetic oligonucleotide
ggggucagcguccucacac

SEQ ID NO: 1233890 - RNA, 19 nt, Artificial Sequence
  Description of Artificial Sequence: Synthetic oligonucleotide
acguaguucuccagcucac

SEQ ID NO: 1233891 - RNA, 19 nt, Artificial Sequence
  Description of Artificial Sequence: Synthetic oligonucleotide
gcggccguuacguucuagg

SEQ ID NO: 1233892 - RNA, 19 nt, Artificial Sequence
  Description of Artificial Sequence: Synthetic oligonucleotide
cacgggaaguguguuggag

SEQ ID NO: 1233893 - RNA, 19 nt, Artificial Sequence
  Description of Artificial Sequence: Synthetic oligonucleotide
aguacgagucgcucagcuu

SEQ ID NO: 1233894 - RNA, 19 nt, Artificial Sequence
  Description of Artificial Sequence: Synthetic oligonucleotide
gccgcgugggagaaaaugg

SEQ ID NO: 1233895 - RNA, 19 nt, Artificial Sequence
  Description of Artificial Sequence: Synthetic oligonucleotide
agcuggacagcgcggucug

SEQ ID NO: 1233896 - RNA, 19 nt, Artificial Sequence
  Description of Artificial Sequence: Synthetic oligonucleotide
ucuugcgcacgggaagugu

SEQ ID NO: 1233897 - RNA, 19 nt, Artificial Sequence
  Description of Artificial Sequence: Synthetic oligonucleotide
uggcuuugacccgcaugcg

SEQ ID NO: 1233898 - RNA, 19 nt, Artificial Sequence
  Description of Artificial Sequence: Synthetic oligonucleotide
gcuuugacccgcaugcggc

SEQ ID NO: 1233899 - RNA, 19 nt, Artificial Sequence
  Description of Artificial Sequence: Synthetic oligonucleotide
cagaccgugccccguaguc

SEQ ID NO: 1233900 - RNA, 19 nt, Artificial Sequence
  Description of Artificial Sequence: Synthetic oligonucleotide
aacgagagcugaggaggga

SEQ ID NO: 1233901 - RNA, 19 nt, Artificial Sequence
  Description of Artificial Sequence: Synthetic oligonucleotide
agguuggacuuggaggcug

SEQ ID NO: 1233902 - RNA, 19 nt, Artificial Sequence
  Description of Artificial Sequence: Synthetic oligonucleotide
uguagccaucagauacgua

SEQ ID NO: 1233903 - RNA, 19 nt, Artificial Sequence
  Description of Artificial Sequence: Synthetic oligonucleotide
cucauugugaaaagacuuu

SEQ ID NO: 1233904 - RNA, 19 nt, Artificial Sequence
  Description of Artificial Sequence: Synthetic oligonucleotide
aggaacggccacacuguag

SEQ ID NO: 1233905 - RNA, 19 nt, Artificial Sequence
  Description of Artificial Sequence: Synthetic oligonucleotide
cagaguucuuggccacagc

SEQ ID NO: 1233906 - RNA, 19 nt, Artificial Sequence
  Description of Artificial Sequence: Synthetic oligonucleotide
uugacccgcaugcggccgu

SEQ ID NO: 1233907 - RNA, 19 nt, Artificial Sequence
  Description of Artificial Sequence: Synthetic oligonucleotide
cuuguccgaguacuucuga

SEQ ID NO: 1233908 - RNA, 19 nt, Artificial Sequence
  Description of Artificial Sequence: Synthetic oligonucleotide
cuuccgucacuguccagga

SEQ ID NO: 1233909 - RNA, 19 nt, Artificial Sequence
  Description of Artificial Sequence: Synthetic oligonucleotide
acauuuuccgugagccggu

SEQ ID NO: 1233910 - RNA, 19 nt, Artificial Sequence
  Description of Artificial Sequence: Synthetic oligonucleotide
uuccgucacuguccaggac

SEQ ID NO: 1233911 - RNA, 19 nt, Artificial Sequence
  Description of Artificial Sequence: Synthetic oligonucleotide
gacgugccguagucaggag

SEQ ID NO: 1233912 - RNA, 19 nt, Artificial Sequence
  Description of Artificial Sequence: Synthetic oligonucleotide
caaccccgggaacaaacca

SEQ ID NO: 1233913 - RNA, 19 nt, Artificial Sequence
  Description of Artificial Sequence: Synthetic oligonucleotide
acgagagcugaggagggaa

SEQ ID NO: 1233914 - RNA, 19 nt, Artificial Sequence
  Description of Artificial Sequence: Synthetic oligonucleotide
agcgcggucuggaaucuug

SEQ ID NO: 1233915 - RNA, 19 nt, Artificial Sequence
  Description of Artificial Sequence: Synthetic oligonucleotide
aaacaaccccgggaacaaa

SEQ ID NO: 1233916 - RNA, 19 nt, Artificial Sequence
  Description of Artificial Sequence: Synthetic oligonucleotide
ccaacuugaaaggcaggag

SEQ ID NO: 1233917 - RNA, 19 nt, Artificial Sequence
  Description of Artificial Sequence: Synthetic oligonucleotide
agaccgugccccguaguca

SEQ ID NO: 1233918 - RNA, 19 nt, Artificial Sequence
  Description of Artificial Sequence: Synthetic oligonucleotide
cagauaccuggaguccagc

SEQ ID NO: 1233919 - RNA, 19 nt, Artificial Sequence
  Description of Artificial Sequence: Synthetic oligonucleotide
cuccgcuccucggugagug

SEQ ID NO: 1233920 - RNA, 19 nt, Artificial Sequence
  Description of Artificial Sequence: Synthetic oligonucleotide
caugcggccguuacguucu

SEQ ID NO: 1233921 - RNA, 19 nt, Artificial Sequence
  Description of Artificial Sequence: Synthetic oligonucleotide
acagaccgugccccguagu

SEQ ID NO: 1233922 - RNA, 19 nt, Artificial Sequence
  Description of Artificial Sequence: Synthetic oligonucleotide
gaaguguguuggaguacga

SEQ ID NO: 1233923 - RNA, 19 nt, Artificial Sequence
  Description of Artificial Sequence: Synthetic oligonucleotide
guuacguucuaggccagcu

SEQ ID NO: 1233924 - RNA, 19 nt, Artificial Sequence
  Description of Artificial Sequence: Synthetic oligonucleotide
cucacccugcuuguugcug

SEQ ID NO: 1233925 - RNA, 19 nt, Artificial Sequence
  Description of Artificial Sequence: Synthetic oligonucleotide
ggucagcguccucacacug

SEQ ID NO: 1233926 - RNA, 19 nt, Artificial Sequence
  Description of Artificial Sequence: Synthetic oligonucleotide
ggcacuggcaaggguuugg

SEQ ID NO: 1233927 - RNA, 19 nt, Artificial Sequence
  Description of Artificial Sequence: Synthetic oligonucleotide
cccgaguguaggagaaagg

SEQ ID NO: 1233928 - RNA, 19 nt, Artificial Sequence
  Description of Artificial Sequence: Synthetic oligonucleotide
cuugaaagucccggccguc

SEQ ID NO: 1233929 - RNA, 19 nt, Artificial Sequence
  Description of Artificial Sequence: Synthetic oligonucleotide
cacagaccgugccccguag

SEQ ID NO: 1233930 - RNA, 19 nt, Artificial Sequence
  Description of Artificial Sequence: Synthetic oligonucleotide
ccgcgugggagaaaauggc

SEQ ID NO: 1233931 - RNA, 19 nt, Artificial Sequence
  Description of Artificial Sequence: Synthetic oligonucleotide
aggacgugccguagucagg

SEQ ID NO: 1233932 - RNA, 19 nt, Artificial Sequence
  Description of Artificial Sequence: Synthetic oligonucleotide
aaauagccuuuggcagcga

SEQ ID NO: 1233933 - RNA, 19 nt, Artificial Sequence
  Description of Artificial Sequence: Synthetic oligonucleotide
uggggucagcguccucaca

SEQ ID NO: 1233934 - RNA, 19 nt, Artificial Sequence
  Description of Artificial Sequence: Synthetic oligonucleotide
guagggucucugcuugaaa

SEQ ID NO: 1233935 - RNA, 19 nt, Artificial Sequence
  Description of Artificial Sequence: Synthetic oligonucleotide
cacgcucuugcgcacggga

SEQ ID NO: 1233936 - RNA, 19 nt, Artificial Sequence
  Description of Artificial Sequence: Synthetic oligonucleotide
gcaugcggccguuacguuc

SEQ ID NO: 1233937 - RNA, 19 nt, Artificial Sequence
  Description of Artificial Sequence: Synthetic oligonucleotide
ggacgugccguagucagga

SEQ ID NO: 1233938 - RNA, 19 nt, Artificial Sequence
  Description of Artificial Sequence: Synthetic oligonucleotide
gggucucugcuugaaaguc

SEQ ID NO: 1233939 - RNA, 19 nt, Artificial Sequence
  Description of Artificial Sequence: Synthetic oligonucleotide
caaguuccuuagagcccug

SEQ ID NO: 1233940 - RNA, 19 nt, Artificial Sequence
  Description of Artificial Sequence: Synthetic oligonucleotide
gugcaaccugucacuuccg

SEQ ID NO: 1233941 - RNA, 19 nt, Artificial Sequence
  Description of Artificial Sequence: Synthetic oligonucleotide
cauuuuccgugagccggug

SEQ ID NO: 1233942 - RNA, 19 nt, Artificial Sequence
  Description of Artificial Sequence: Synthetic oligonucleotide
agccgucacgggccucagg

SEQ ID NO: 1233943 - RNA, 19 nt, Artificial Sequence
  Description of Artificial Sequence: Synthetic oligonucleotide
gcucacagaccgugccccg

SEQ ID NO: 1233944 - RNA, 19 nt, Artificial Sequence
  Description of Artificial Sequence: Synthetic oligonucleotide
ccacaaauggugccagcuc

SEQ ID NO: 1233945 - RNA, 19 nt, Artificial Sequence
  Description of Artificial Sequence: Synthetic oligonucleotide
gaccgugccccguagucau

SEQ ID NO: 1233946 - RNA, 19 nt, Artificial Sequence
  Description of Artificial Sequence: Synthetic oligonucleotide
gggaggacgugccguaguc

SEQ ID NO: 1233947 - RNA, 19 nt, Artificial Sequence
  Description of Artificial Sequence: Synthetic oligonucleotide
uugcggaagcugggguuga

SEQ ID NO: 1233948 - RNA, 19 nt, Artificial Sequence
  Description of Artificial Sequence: Synthetic oligonucleotide
ggucacgcucuugcgcacg

SEQ ID NO: 1233949 - RNA, 19 nt, Artificial Sequence
  Description of Artificial Sequence: Synthetic oligonucleotide
ugcggccguuacguucuag

SEQ ID NO: 1233950 - RNA, 19 nt, Artificial Sequence
  Description of Artificial Sequence: Synthetic oligonucleotide
cucuugcgcacgggaagug

SEQ ID NO: 1233951 - RNA, 19 nt, Artificial Sequence
  Description of Artificial Sequence: Synthetic oligonucleotide
aggacguccccaaguuccu

SEQ ID NO: 1233952 - RNA, 19 nt, Artificial Sequence
  Description of Artificial Sequence: Synthetic oligonucleotide
cucucgccauagugccagc

SEQ ID NO: 1233953 - RNA, 19 nt, Artificial Sequence
  Description of Artificial Sequence: Synthetic oligonucleotide
ugcgcacgggaaguguguu

SEQ ID NO: 1233954 - RNA, 19 nt, Artificial Sequence
  Description of Artificial Sequence: Synthetic oligonucleotide
cuugaacguggcagugucu

SEQ ID NO: 1233955 - RNA, 19 nt, Artificial Sequence
  Description of Artificial Sequence: Synthetic oligonucleotide
cagcuccuuguccgaguac

SEQ ID NO: 1233956 - RNA, 19 nt, Artificial Sequence
  Description of Artificial Sequence: Synthetic oligonucleotide
cagcaccauggacccuggg

SEQ ID NO: 1233957 - RNA, 19 nt, Artificial Sequence
  Description of Artificial Sequence: Synthetic oligonucleotide
cggugcaucuccuccgagc

SEQ ID NO: 1233958 - RNA, 19 nt, Artificial Sequence
  Description of Artificial Sequence: Synthetic oligonucleotide
cuguagggucucugcuuga

SEQ ID NO: 1233959 - RNA, 19 nt, Artificial Sequence
  Description of Artificial Sequence: Synthetic oligonucleotide
gccgucuggguggggaagg

SEQ ID NO: 1233960 - RNA, 19 nt, Artificial Sequence
  Description of Artificial Sequence: Synthetic oligonucleotide
ggcagcgaaggugacaccu

SEQ ID NO: 1233961 - RNA, 19 nt, Artificial Sequence
  Description of Artificial Sequence: Synthetic oligonucleotide
cggccguuacguucuaggc

SEQ ID NO: 1233962 - RNA, 19 nt, Artificial Sequence
  Description of Artificial Sequence: Synthetic oligonucleotide
cacucucgccauagugcca

SEQ ID NO: 1233963 - RNA, 19 nt, Artificial Sequence
  Description of Artificial Sequence: Synthetic oligonucleotide
gcuugaaagucccggccgu

SEQ ID NO: 1233964 - RNA, 19 nt, Artificial Sequence
  Description of Artificial Sequence: Synthetic oligonucleotide
cgucacgggccucaggcac

SEQ ID NO: 1233965 - RNA, 19 nt, Artificial Sequence
  Description of Artificial Sequence: Synthetic oligonucleotide
cccgcaugcggccguuacg

SEQ ID NO: 1233966 - RNA, 19 nt, Artificial Sequence
  Description of Artificial Sequence: Synthetic oligonucleotide
aggcaggaacggccacacu

SEQ ID NO: 1233967 - RNA, 19 nt, Artificial Sequence
  Description of Artificial Sequence: Synthetic oligonucleotide
ucccggccgucuggguggg

SEQ ID NO: 1233968 - RNA, 19 nt, Artificial Sequence
  Description of Artificial Sequence: Synthetic oligonucleotide
gcgcacgggaaguguguug

SEQ ID NO: 1233969 - RNA, 19 nt, Artificial Sequence
  Description of Artificial Sequence: Synthetic oligonucleotide
gcguccucacacuguggac

SEQ ID NO: 1233970 - RNA, 19 nt, Artificial Sequence
  Description of Artificial Sequence: Synthetic oligonucleotide
ugccuggggucagcguccu

SEQ ID NO: 1233971 - RNA, 19 nt, Artificial Sequence
  Description of Artificial Sequence: Synthetic oligonucleotide
ccaaguuccuuagagcccu

SEQ ID NO: 1233972 - RNA, 19 nt, Artificial Sequence
  Description of Artificial Sequence: Synthetic oligonucleotide
ccgugccccguagucaucc

SEQ ID NO: 1233973 - RNA, 19 nt, Artificial Sequence
  Description of Artificial Sequence: Synthetic oligonucleotide
gucagcguccucacacugu

SEQ ID NO: 1233974 - RNA, 19 nt, Artificial Sequence
  Description of Artificial Sequence: Synthetic oligonucleotide
ggacccgaguguaggagaa

SEQ ID NO: 1233975 - RNA, 19 nt, Artificial Sequence
  Description of Artificial Sequence: Synthetic oligonucleotide
aggcacuagcagggugaug

SEQ ID NO: 1233976 - RNA, 19 nt, Artificial Sequence
  Description of Artificial Sequence: Synthetic oligonucleotide
cagccccgcauuuugguuu

SEQ ID NO: 1233977 - RNA, 19 nt, Artificial Sequence
  Description of Artificial Sequence: Synthetic oligonucleotide
caggaacggccacacugua

SEQ ID NO: 1233978 - RNA, 19 nt, Artificial Sequence
  Description of Artificial Sequence: Synthetic oligonucleotide
gacccgaguguaggagaaa

SEQ ID NO: 1233979 - RNA, 19 nt, Artificial Sequence
  Description of Artificial Sequence: Synthetic oligonucleotide
gguggacuucggccaucug

SEQ ID NO: 1233980 - RNA, 19 nt, Artificial Sequence
  Description of Artificial Sequence: Synthetic oligonucleotide
gggacggccaggucguccu

SEQ ID NO: 1233981 - RNA, 19 nt, Artificial Sequence
  Description of Artificial Sequence: Synthetic oligonucleotide
gcaggaacggccacacugu

SEQ ID NO: 1233982 - RNA, 19 nt, Artificial Sequence
  Description of Artificial Sequence: Synthetic oligonucleotide
accgugccccguagucauc

SEQ ID NO: 1233983 - RNA, 19 nt, Artificial Sequence
  Description of Artificial Sequence: Synthetic oligonucleotide
ggccgucuggguggggaag

SEQ ID NO: 1233984 - RNA, 19 nt, Artificial Sequence
  Description of Artificial Sequence: Synthetic oligonucleotide
ggguacuaggaaggaugga

SEQ ID NO: 1233985 - RNA, 19 nt, Artificial Sequence
  Description of Artificial Sequence: Synthetic oligonucleotide
gcggaagcugggguugaac

SEQ ID NO: 1233986 - RNA, 19 nt, Artificial Sequence
  Description of Artificial Sequence: Synthetic oligonucleotide
ccguuacguucuaggccag

SEQ ID NO: 1233987 - RNA, 19 nt, Artificial Sequence
  Description of Artificial Sequence: Synthetic oligonucleotide
gagcaucgaaauagccuuu

SEQ ID NO: 1233988 - RNA, 19 nt, Artificial Sequence
  Description of Artificial Sequence: Synthetic oligonucleotide
caccagcgugccacugcca

SEQ ID NO: 1233989 - RNA, 19 nt, Artificial Sequence
  Description of Artificial Sequence: Synthetic oligonucleotide
gcacgggaaguguguugga

SEQ ID NO: 1233990 - RNA, 19 nt, Artificial Sequence
  Description of Artificial Sequence: Synthetic oligonucleotide
cgggccucaggcacuagca

SEQ ID NO: 1233991 - RNA, 19 nt, Artificial Sequence
  Description of Artificial Sequence: Synthetic oligonucleotide
ggagccguugcugcuggcu

SEQ ID NO: 1233992 - RNA, 19 nt, Artificial Sequence
  Description of Artificial Sequence: Synthetic oligonucleotide
ggcaaggguuuggcuccag

SEQ ID NO: 1233993 - RNA, 19 nt, Artificial Sequence
  Description of Artificial Sequence: Synthetic oligonucleotide
ccagccgcgugggagaaaa

SEQ ID NO: 1233994 - RNA, 19 nt, Artificial Sequence
  Description of Artificial Sequence: Synthetic oligonucleotide
ugacccgcaugcggccguu

SEQ ID NO: 1233995 - RNA, 19 nt, Artificial Sequence
  Description of Artificial Sequence: Synthetic oligonucleotide
cgccauagugccagccguc

SEQ ID NO: 1233996 - RNA, 19 nt, Artificial Sequence
  Description of Artificial Sequence: Synthetic oligonucleotide
cguuacguucuaggccagc

SEQ ID NO: 1233997 - RNA, 19 nt, Artificial Sequence
  Description of Artificial Sequence: Synthetic oligonucleotide
gcgugggagaaaauggcuu

SEQ ID NO: 1233998 - RNA, 19 nt, Artificial Sequence
  Description of Artificial Sequence: Synthetic oligonucleotide
ccggugcaucuccuccgag

SEQ ID NO: 1233999 - RNA, 19 nt, Artificial Sequence
  Description of Artificial Sequence: Synthetic oligonucleotide
ccgaguacuucugaggguu

SEQ ID NO: 1234000 - RNA, 19 nt, Artificial Sequence
  Description of Artificial Sequence: Synthetic oligonucleotide
gccguugcugcuggcuauc

SEQ ID NO: 1234001 - RNA, 19 nt, Artificial Sequence
  Description of Artificial Sequence: Synthetic oligonucleotide
ccagccgucacgggccuca

SEQ ID NO: 1234002 - RNA, 19 nt, Artificial Sequence
  Description of Artificial Sequence: Synthetic oligonucleotide
cuccaggaauggggucuga

SEQ ID NO: 1234003 - RNA, 19 nt, Artificial Sequence
  Description of Artificial Sequence: Synthetic oligonucleotide
augcggccguuacguucua

SEQ ID NO: 1234004 - RNA, 19 nt, Artificial Sequence
  Description of Artificial Sequence: Synthetic oligonucleotide
cacccugcuuguugcugau

SEQ ID NO: 1234005 - RNA, 19 nt, Artificial Sequence
  Description of Artificial Sequence: Synthetic oligonucleotide
ccgucacgggccucaggca

SEQ ID NO: 1234006 - RNA, 19 nt, Artificial Sequence
  Description of Artificial Sequence: Synthetic oligonucleotide
caccagccgcgugggagaa

SEQ ID NO: 1234007 - RNA, 19 nt, Artificial Sequence
  Description of Artificial Sequence: Synthetic oligonucleotide
accagccgcgugggagaaa

SEQ ID NO: 1234008 - RNA, 19 nt, Artificial Sequence
  Description of Artificial Sequence: Synthetic oligonucleotide
ccgcaugcggccguuacgu

SEQ ID NO: 1234009 - RNA, 19 nt, Artificial Sequence
  Description of Artificial Sequence: Synthetic oligonucleotide
gacccgcaugcggccguua

SEQ ID NO: 1234010 - RNA, 19 nt, Artificial Sequence
  Description of Artificial Sequence: Synthetic oligonucleotide
ccguagucauccagacccu

SEQ ID NO: 1234011 - RNA, 19 nt, Artificial Sequence
  Description of Artificial Sequence: Synthetic oligonucleotide
ccggccgucugggugggga

SEQ ID NO: 1234012 - RNA, 19 nt, Artificial Sequence
  Description of Artificial Sequence: Synthetic oligonucleotide
cccgggaggacgugccgua

SEQ ID NO: 1234013 - RNA, 19 nt, Artificial Sequence
  Description of Artificial Sequence: Synthetic oligonucleotide
cguccccaaguuccuuaga

SEQ ID NO: 1234014 - RNA, 19 nt, Artificial Sequence
  Description of Artificial Sequence: Synthetic oligonucleotide
ccagccccgcauuuugguu

SEQ ID NO: 1234015 - RNA, 19 nt, Artificial Sequence
  Description of Artificial Sequence: Synthetic oligonucleotide
gguaagcagcagaguucuu

SEQ ID NO: 1234016 - RNA, 19 nt, Artificial Sequence
  Description of Artificial Sequence: Synthetic oligonucleotide
cggugagugcugucuugua

SEQ ID NO: 1234017 - RNA, 19 nt, Artificial Sequence
  Description of Artificial Sequence: Synthetic oligonucleotide
cagccgcgugggagaaaau

SEQ ID NO: 1234018 - RNA, 19 nt, Artificial Sequence
  Description of Artificial Sequence: Synthetic oligonucleotide
gccuggggucagcguccuc

SEQ ID NO: 1234019 - RNA, 19 nt, Artificial Sequence
  Description of Artificial Sequence: Synthetic oligonucleotide
ggacggccaggucguccuu

SEQ ID NO: 1234020 - RNA, 19 nt, Artificial Sequence
  Description of Artificial Sequence: Synthetic oligonucleotide
ccguugcugcuggcuaucu

SEQ ID NO: 1234021 - RNA, 19 nt, Artificial Sequence
  Description of Artificial Sequence: Synthetic oligonucleotide
cgcggucuggaaucuuguu

SEQ ID NO: 1234022 - RNA, 19 nt, Artificial Sequence
  Description of Artificial Sequence: Synthetic oligonucleotide
cgagucgcucagcuugcuu

SEQ ID NO: 1234023 - RNA, 19 nt, Artificial Sequence
  Description of Artificial Sequence: Synthetic oligonucleotide
cccggccgucugggugggg

SEQ ID NO: 1234024 - RNA, 19 nt, Artificial Sequence
  Description of Artificial Sequence: Synthetic oligonucleotide
cagcgcggucuggaaucuu

SEQ ID NO: 1234025 - RNA, 19 nt, Artificial Sequence
  Description of Artificial Sequence: Synthetic oligonucleotide
cgcaugcggccguuacguu

SEQ ID NO: 1234026 - RNA, 19 nt, Artificial Sequence
  Description of Artificial Sequence: Synthetic oligonucleotide
aaccgcaugaaccaguacc

SEQ ID NO: 1234027 - RNA, 19 nt, Artificial Sequence
  Description of Artificial Sequence: Synthetic oligonucleotide
gacauagcuaaccagagag

SEQ ID NO: 1234028 - RNA, 19 nt, Artificial Sequence
  Description of Artificial Sequence: Synthetic oligonucleotide
gaaguuaugaugcugaaga

SEQ ID NO: 1234029 - RNA, 19 nt, Artificial Sequence
  Description of Artificial Sequence: Synthetic oligonucleotide
uaauuauucacgucgacca

SEQ ID NO: 1234030 - RNA, 19 nt, Artificial Sequence
  Description of Artificial Sequence: Synthetic oligonucleotide
auucacgucgaccagugcc

SEQ ID NO: 1234031 - RNA, 19 nt, Artificial Sequence
  Description of Artificial Sequence: Synthetic oligonucleotide
auaauuauucacgucgacc

SEQ ID NO: 1234032 - RNA, 19 nt, Artificial Sequence
  Description of Artificial Sequence: Synthetic oligonucleotide
auuugcaccaccauggugg

SEQ ID NO: 1234033 - RNA, 19 nt, Artificial Sequence
  Description of Artificial Sequence: Synthetic oligonucleotide
uguuggaucgucaacccag

SEQ ID NO: 1234034 - RNA, 19 nt, Artificial Sequence
  Description of Artificial Sequence: Synthetic oligonucleotide
aaugcuaccuccugcaaga

SEQ ID NO: 1234035 - RNA, 19 nt, Artificial Sequence
  Description of Artificial Sequence: Synthetic oligonucleotide
aaacucucuacaaagaacu

SEQ ID NO: 1234036 - RNA, 19 nt, Artificial Sequence
  Description of Artificial Sequence: Synthetic oligonucleotide
uuagcacuggccuaggacc

SEQ ID NO: 1234037 - RNA, 19 nt, Artificial Sequence
  Description of Artificial Sequence: Synthetic oligonucleotide
guuggaagguaccagaagc

SEQ ID NO: 1234038 - RNA, 19 nt, Artificial Sequence
  Description of Artificial Sequence: Synthetic oligonucleotide
aaugguguagucacgugac

SEQ ID NO: 1234039 - RNA, 19 nt, Artificial Sequence
  Description of Artificial Sequence: Synthetic oligonucleotide
gauugugugggcgaagucg

SEQ ID NO: 1234040 - RNA, 19 nt, Artificial Sequence
  Description of Artificial Sequence: Synthetic oligonucleotide
gaaggugaguaccacaggc

SEQ ID NO: 1234041 - RNA, 19 nt, Artificial Sequence
  Description of Artificial Sequence: Synthetic oligonucleotide
uuagugacauagcuaacca

SEQ ID NO: 1234042 - RNA, 19 nt, Artificial Sequence
  Description of Artificial Sequence: Synthetic oligonucleotide
uguagagucacauuugguu

SEQ ID NO: 1234043 - RNA, 19 nt, Artificial Sequence
  Description of Artificial Sequence: Synthetic oligonucleotide
gaaccaguaccacaggaag

SEQ ID NO: 1234044 - RNA, 19 nt, Artificial Sequence
  Description of Artificial Sequence: Synthetic oligonucleotide
aauuauucacgucgaccag

SEQ ID NO: 1234045 - RNA, 19 nt, Artificial Sequence
  Description of Artificial Sequence: Synthetic oligonucleotide
uggaguucggcgcacagcc

SEQ ID NO: 1234046 - RNA, 19 nt, Artificial Sequence
  Description of Artificial Sequence: Synthetic oligonucleotide
aguggaguaguccccaagg

SEQ ID NO: 1234047 - RNA, 19 nt, Artificial Sequence
  Description of Artificial Sequence: Synthetic oligonucleotide
uaaugguguagucacguga

SEQ ID NO: 1234048 - RNA, 19 nt, Artificial Sequence
  Description of Artificial Sequence: Synthetic oligonucleotide
agguuagugacauagcuaa

SEQ ID NO: 1234049 - RNA, 19 nt, Artificial Sequence
  Description of Artificial Sequence: Synthetic oligonucleotide
ugaaaugcuaccuccugca

SEQ ID NO: 1234050 - RNA, 19 nt, Artificial Sequence
  Description of Artificial Sequence: Synthetic oligonucleotide
uagguaucuaccuaucaga

SEQ ID NO: 1234051 - RNA, 19 nt, Artificial Sequence
  Description of Artificial Sequence: Synthetic oligonucleotide
gaacacacacuguagaguc

SEQ ID NO: 1234052 - RNA, 19 nt, Artificial Sequence
  Description of Artificial Sequence: Synthetic oligonucleotide
guagagucacauuugguug

SEQ ID NO: 1234053 - RNA, 19 nt, Artificial Sequence
  Description of Artificial Sequence: Synthetic oligonucleotide
aggauuugcaccaccaugg

SEQ ID NO: 1234054 - RNA, 19 nt, Artificial Sequence
  Description of Artificial Sequence: Synthetic oligonucleotide
cuagguaucuaccuaucag

SEQ ID NO: 1234055 - RNA, 19 nt, Artificial Sequence
  Description of Artificial Sequence: Synthetic oligonucleotide
ucucuagaaagccacuaac

SEQ ID NO: 1234056 - RNA, 19 nt, Artificial Sequence
  Description of Artificial Sequence: Synthetic oligonucleotide
gucaagaugaaaugcuacc

SEQ ID NO: 1234057 - RNA, 19 nt, Artificial Sequence
  Description of Artificial Sequence: Synthetic oligonucleotide
uuuaaugguguagucacgu

SEQ ID NO: 1234058 - RNA, 19 nt, Artificial Sequence
  Description of Artificial Sequence: Synthetic oligonucleotide
uuauucacgucgaccagug

SEQ ID NO: 1234059 - RNA, 19 nt, Artificial Sequence
  Description of Artificial Sequence: Synthetic oligonucleotide
guuagugacauagcuaacc

SEQ ID NO: 1234060 - RNA, 19 nt, Artificial Sequence
  Description of Artificial Sequence: Synthetic oligonucleotide
uuguguacggccucuaccu

SEQ ID NO: 1234061 - RNA, 19 nt, Artificial Sequence
  Description of Artificial Sequence: Synthetic oligonucleotide
gaggagaggggccaccucg

SEQ ID NO: 1234062 - RNA, 19 nt, Artificial Sequence
  Description of Artificial Sequence: Synthetic oligonucleotide
cauguguccucccaugagg

SEQ ID NO: 1234063 - RNA, 19 nt, Artificial Sequence
  Description of Artificial Sequence: Synthetic oligonucleotide
gauguuggaucgucaaccc

SEQ ID NO: 1234064 - RNA, 19 nt, Artificial Sequence
  Description of Artificial Sequence: Synthetic oligonucleotide
ucaagaugaaaugcuaccu

SEQ ID NO: 1234065 - RNA, 19 nt, Artificial Sequence
  Description of Artificial Sequence: Synthetic oligonucleotide
aggugaguaccacaggcuc

SEQ ID NO: 1234066 - RNA, 19 nt, Artificial Sequence
  Description of Artificial Sequence: Synthetic oligonucleotide
agugccaccagagugacca

SEQ ID NO: 1234067 - RNA, 19 nt, Artificial Sequence
  Description of Artificial Sequence: Synthetic oligonucleotide
ucgucaacccagaacacac

SEQ ID NO: 1234068 - RNA, 19 nt, Artificial Sequence
  Description of Artificial Sequence: Synthetic oligonucleotide
ggaucgucaacccagaaca

SEQ ID NO: 1234069 - RNA, 19 nt, Artificial Sequence
  Description of Artificial Sequence: Synthetic oligonucleotide
uguuggguuagcacuggcc

SEQ ID NO: 1234070 - RNA, 19 nt, Artificial Sequence
  Description of Artificial Sequence: Synthetic oligonucleotide
acaguuuucaaacucucua

SEQ ID NO: 1234071 - RNA, 19 nt, Artificial Sequence
  Description of Artificial Sequence: Synthetic oligonucleotide
ucccggauccagcacauag

SEQ ID NO: 1234072 - RNA, 19 nt, Artificial Sequence
  Description of Artificial Sequence: Synthetic oligonucleotide
acuuuugauugugugggcg

SEQ ID NO: 1234073 - RNA, 19 nt, Artificial Sequence
  Description of Artificial Sequence: Synthetic oligonucleotide
acggucuggaguucggcgc

SEQ ID NO: 1234074 - RNA, 19 nt, Artificial Sequence
  Description of Artificial Sequence: Synthetic oligonucleotide
ugcgacuggaagaagugcu

SEQ ID NO: 1234075 - RNA, 19 nt, Artificial Sequence
  Description of Artificial Sequence: Synthetic oligonucleotide
auagcuaaccagagagucc

SEQ ID NO: 1234076 - RNA, 19 nt, Artificial Sequence
  Description of Artificial Sequence: Synthetic oligonucleotide
uccuacaguuuucaaacuc

SEQ ID NO: 1234077 - RNA, 19 nt, Artificial Sequence
  Description of Artificial Sequence: Synthetic oligonucleotide
gaagauggcacuggugcgg

SEQ ID NO: 1234078 - RNA, 19 nt, Artificial Sequence
  Description of Artificial Sequence: Synthetic oligonucleotide
agagauuguagcccucgag

SEQ ID NO: 1234079 - RNA, 19 nt, Artificial Sequence
  Description of Artificial Sequence: Synthetic oligonucleotide
cuuuaaugguguagucacg

SEQ ID NO: 1234080 - RNA, 19 nt, Artificial Sequence
  Description of Artificial Sequence: Synthetic oligonucleotide
aagauggcacuggugcggc

SEQ ID NO: 1234081 - RNA, 19 nt, Artificial Sequence
  Description of Artificial Sequence: Synthetic oligonucleotide
ucuucagaggagaggggcc

SEQ ID NO: 1234082 - RNA, 19 nt, Artificial Sequence
  Description of Artificial Sequence: Synthetic oligonucleotide
gagguagugcuuguguacg

SEQ ID NO: 1234083 - RNA, 19 nt, Artificial Sequence
  Description of Artificial Sequence: Synthetic oligonucleotide
aaaccccagcccacgaugc

SEQ ID NO: 1234084 - RNA, 19 nt, Artificial Sequence
  Description of Artificial Sequence: Synthetic oligonucleotide
cauagcuaaccagagaguc

SEQ ID NO: 1234085 - RNA, 19 nt, Artificial Sequence
  Description of Artificial Sequence: Synthetic oligonucleotide
aauguuggguuagcacugg

SEQ ID NO: 1234086 - RNA, 19 nt, Artificial Sequence
  Description of Artificial Sequence: Synthetic oligonucleotide
cuuguguacggccucuacc

SEQ ID NO: 1234087 - RNA, 19 nt, Artificial Sequence
  Description of Artificial Sequence: Synthetic oligonucleotide
auagagggguagaugacac

SEQ ID NO: 1234088 - RNA, 19 nt, Artificial Sequence
  Description of Artificial Sequence: Synthetic oligonucleotide
aaguggaguaguccccaag

SEQ ID NO: 1234089 - RNA, 19 nt, Artificial Sequence
  Description of Artificial Sequence: Synthetic oligonucleotide
uggaucgucaacccagaac

SEQ ID NO: 1234090 - RNA, 19 nt, Artificial Sequence
  Description of Artificial Sequence: Synthetic oligonucleotide
ugcggacagucucacagcc

SEQ ID NO: 1234091 - RNA, 19 nt, Artificial Sequence
  Description of Artificial Sequence: Synthetic oligonucleotide
uggccuaggaccccaagcu

SEQ ID NO: 1234092 - RNA, 19 nt, Artificial Sequence
  Description of Artificial Sequence: Synthetic oligonucleotide
agggguagaugacacgguc

SEQ ID NO: 1234093 - RNA, 19 nt, Artificial Sequence
  Description of Artificial Sequence: Synthetic oligonucleotide
ugugcuucggagacuagau

SEQ ID NO: 1234094 - RNA, 19 nt, Artificial Sequence
  Description of Artificial Sequence: Synthetic oligonucleotide
cugaggucaagaugaaaug

SEQ ID NO: 1234095 - RNA, 19 nt, Artificial Sequence
  Description of Artificial Sequence: Synthetic oligonucleotide
aggccagcuagguaucuac

SEQ ID NO: 1234096 - RNA, 19 nt, Artificial Sequence
  Description of Artificial Sequence: Synthetic oligonucleotide
uuaaugguguagucacgug

SEQ ID NO: 1234097 - RNA, 19 nt, Artificial Sequence
  Description of Artificial Sequence: Synthetic oligonucleotide
cagaauguuggguuagcac

SEQ ID NO: 1234098 - RNA, 19 nt, Artificial Sequence
  Description of Artificial Sequence: Synthetic oligonucleotide
ucgaggcccauccaggaga

SEQ ID NO: 1234099 - RNA, 19 nt, Artificial Sequence
  Description of Artificial Sequence: Synthetic oligonucleotide
ugacauagcuaaccagaga

SEQ ID NO: 1234100 - RNA, 19 nt, Artificial Sequence
  Description of Artificial Sequence: Synthetic oligonucleotide
gaguucggcgcacagccag

SEQ ID NO: 1234101 - RNA, 19 nt, Artificial Sequence
  Description of Artificial Sequence: Synthetic oligonucleotide
uggaaguggaguagucccc

SEQ ID NO: 1234102 - RNA, 19 nt, Artificial Sequence
  Description of Artificial Sequence: Synthetic oligonucleotide
guagagauuguagcccucg

SEQ ID NO: 1234103 - RNA, 19 nt, Artificial Sequence
  Description of Artificial Sequence: Synthetic oligonucleotide
agugcuuguguacggccuc

SEQ ID NO: 1234104 - RNA, 19 nt, Artificial Sequence
  Description of Artificial Sequence: Synthetic oligonucleotide
agucacgugacuuccuccu

SEQ ID NO: 1234105 - RNA, 19 nt, Artificial Sequence
  Description of Artificial Sequence: Synthetic oligonucleotide
gugacuuccuccuggagca

SEQ ID NO: 1234106 - RNA, 19 nt, Artificial Sequence
  Description of Artificial Sequence: Synthetic oligonucleotide
cauaauuauucacgucgac

SEQ ID NO: 1234107 - RNA, 19 nt, Artificial Sequence
  Description of Artificial Sequence: Synthetic oligonucleotide
cacauuugguuguggcugg

SEQ ID NO: 1234108 - RNA, 19 nt, Artificial Sequence
  Description of Artificial Sequence: Synthetic oligonucleotide
agguaucuaccuaucagag

SEQ ID NO: 1234109 - RNA, 19 nt, Artificial Sequence
  Description of Artificial Sequence: Synthetic oligonucleotide
ucucagcaaucuccuacag

SEQ ID NO: 1234110 - RNA, 19 nt, Artificial Sequence
  Description of Artificial Sequence: Synthetic oligonucleotide
auggggccacuuuugauug

SEQ ID NO: 1234111 - RNA, 19 nt, Artificial Sequence
  Description of Artificial Sequence: Synthetic oligonucleotide
ucggcgcacagccaggaug

SEQ ID NO: 1234112 - RNA, 19 nt, Artificial Sequence
  Description of Artificial Sequence: Synthetic oligonucleotide
cuacaguuuucaaacucuc

SEQ ID NO: 1234113 - RNA, 19 nt, Artificial Sequence
  Description of Artificial Sequence: Synthetic oligonucleotide
gaugcgacuggaagaagug

SEQ ID NO: 1234114 - RNA, 19 nt, Artificial Sequence
  Description of Artificial Sequence: Synthetic oligonucleotide
uguccucccaugaggaggu

SEQ ID NO: 1234115 - RNA, 19 nt, Artificial Sequence
  Description of Artificial Sequence: Synthetic oligonucleotide
aucuaccuaucagagcaac

SEQ ID NO: 1234116 - RNA, 19 nt, Artificial Sequence
  Description of Artificial Sequence: Synthetic oligonucleotide
uaccuaucagagcaacagu

SEQ ID NO: 1234117 - RNA, 19 nt, Artificial Sequence
  Description of Artificial Sequence: Synthetic oligonucleotide
gugaguaccacaggcuccg

SEQ ID NO: 1234118 - RNA, 19 nt, Artificial Sequence
  Description of Artificial Sequence: Synthetic oligonucleotide
guaccacaggcuccgagag

SEQ ID NO: 1234119 - RNA, 19 nt, Artificial Sequence
  Description of Artificial Sequence: Synthetic oligonucleotide
acacagcccacguaggaca

SEQ ID NO: 1234120 - RNA, 19 nt, Artificial Sequence
  Description of Artificial Sequence: Synthetic oligonucleotide
auguuggguuagcacuggc

SEQ ID NO: 1234121 - RNA, 19 nt, Artificial Sequence
  Description of Artificial Sequence: Synthetic oligonucleotide
auuauucacgucgaccagu

SEQ ID NO: 1234122 - RNA, 19 nt, Artificial Sequence
  Description of Artificial Sequence: Synthetic oligonucleotide
ugacacagcccacguagga

SEQ ID NO: 1234123 - RNA, 19 nt, Artificial Sequence
  Description of Artificial Sequence: Synthetic oligonucleotide
cuagaaagccacuaaccaa

SEQ ID NO: 1234124 - RNA, 19 nt, Artificial Sequence
  Description of Artificial Sequence: Synthetic oligonucleotide
agcaaagguaggcagcaau

SEQ ID NO: 1234125 - RNA, 19 nt, Artificial Sequence
  Description of Artificial Sequence: Synthetic oligonucleotide
augcgacuggaagaagugc

SEQ ID NO: 1234126 - RNA, 19 nt, Artificial Sequence
  Description of Artificial Sequence: Synthetic oligonucleotide
caguccuaucccuccaagg

SEQ ID NO: 1234127 - RNA, 19 nt, Artificial Sequence
  Description of Artificial Sequence: Synthetic oligonucleotide
ucagaauguuggguuagca

SEQ ID NO: 1234128 - RNA, 19 nt, Artificial Sequence
  Description of Artificial Sequence: Synthetic oligonucleotide
uugacgcuguccgaguugc

SEQ ID NO: 1234129 - RNA, 19 nt, Artificial Sequence
  Description of Artificial Sequence: Synthetic oligonucleotide
gugacauagcuaaccagag

SEQ ID NO: 1234130 - RNA, 19 nt, Artificial Sequence
  Description of Artificial Sequence: Synthetic oligonucleotide
uuugcaccaccaugguggc

SEQ ID NO: 1234131 - RNA, 19 nt, Artificial Sequence
  Description of Artificial Sequence: Synthetic oligonucleotide
uugauugugugggcgaagu

SEQ ID NO: 1234132 - RNA, 19 nt, Artificial Sequence
  Description of Artificial Sequence: Synthetic oligonucleotide
aggucagauggcugcacag

SEQ ID NO: 1234133 - RNA, 19 nt, Artificial Sequence
  Description of Artificial Sequence: Synthetic oligonucleotide
agguagugcuuguguacgg

SEQ ID NO: 1234134 - RNA, 19 nt, Artificial Sequence
  Description of Artificial Sequence: Synthetic oligonucleotide
guguccucccaugaggagg

SEQ ID NO: 1234135 - RNA, 19 nt, Artificial Sequence
  Description of Artificial Sequence: Synthetic oligonucleotide
cacggucuggaguucggcg

SEQ ID NO: 1234136 - RNA, 19 nt, Artificial Sequence
  Description of Artificial Sequence: Synthetic oligonucleotide
uucggagacuagaucugga

SEQ ID NO: 1234137 - RNA, 19 nt, Artificial Sequence
  Description of Artificial Sequence: Synthetic oligonucleotide
uguggcgguggccuagaug

SEQ ID NO: 1234138 - RNA, 19 nt, Artificial Sequence
  Description of Artificial Sequence: Synthetic oligonucleotide
cuuuugauugugugggcga

SEQ ID NO: 1234139 - RNA, 19 nt, Artificial Sequence
  Description of Artificial Sequence: Synthetic oligonucleotide
gacaaguuggaagguacca

SEQ ID NO: 1234140 - RNA, 19 nt, Artificial Sequence
  Description of Artificial Sequence: Synthetic oligonucleotide
uuugauugugugggcgaag

SEQ ID NO: 1234141 - RNA, 19 nt, Artificial Sequence
  Description of Artificial Sequence: Synthetic oligonucleotide
ucggagacuagaucuggaa

SEQ ID NO: 1234142 - RNA, 19 nt, Artificial Sequence
  Description of Artificial Sequence: Synthetic oligonucleotide
ggcgguagagauuguagcc

SEQ ID NO: 1234143 - RNA, 19 nt, Artificial Sequence
  Description of Artificial Sequence: Synthetic oligonucleotide
gauccagcacauagagggg

SEQ ID NO: 1234144 - RNA, 19 nt, Artificial Sequence
  Description of Artificial Sequence: Synthetic oligonucleotide
uagagauuguagcccucga

SEQ ID NO: 1234145 - RNA, 19 nt, Artificial Sequence
  Description of Artificial Sequence: Synthetic oligonucleotide
ugugugggcgaagucgcag

SEQ ID NO: 1234146 - RNA, 19 nt, Artificial Sequence
  Description of Artificial Sequence: Synthetic oligonucleotide
guguacggccucuaccucc

SEQ ID NO: 1234147 - RNA, 19 nt, Artificial Sequence
  Description of Artificial Sequence: Synthetic oligonucleotide
guggaguaguccccaaggc

SEQ ID NO: 1234148 - RNA, 19 nt, Artificial Sequence
  Description of Artificial Sequence: Synthetic oligonucleotide
agacgccaugcaugugucc

SEQ ID NO: 1234149 - RNA, 19 nt, Artificial Sequence
  Description of Artificial Sequence: Synthetic oligonucleotide
uggaaccgcaugaaccagu

SEQ ID NO: 1234150 - RNA, 19 nt, Artificial Sequence
  Description of Artificial Sequence: Synthetic oligonucleotide
gguaucuaccuaucagagc

SEQ ID NO: 1234151 - RNA, 19 nt, Artificial Sequence
  Description of Artificial Sequence: Synthetic oligonucleotide
cuugauguuggaucgucaa

SEQ ID NO: 1234152 - RNA, 19 nt, Artificial Sequence
  Description of Artificial Sequence: Synthetic oligonucleotide
agagagucccggauccagc

SEQ ID NO: 1234153 - RNA, 19 nt, Artificial Sequence
  Description of Artificial Sequence: Synthetic oligonucleotide
agagucccggauccagcac

SEQ ID NO: 1234154 - RNA, 19 nt, Artificial Sequence
  Description of Artificial Sequence: Synthetic oligonucleotide
ugacacggucuggaguucg

SEQ ID NO: 1234155 - RNA, 19 nt, Artificial Sequence
  Description of Artificial Sequence: Synthetic oligonucleotide
uggggccauaauuauucac

SEQ ID NO: 1234156 - RNA, 19 nt, Artificial Sequence
  Description of Artificial Sequence: Synthetic oligonucleotide
ugugggcgaagucgcagga

SEQ ID NO: 1234157 - RNA, 19 nt, Artificial Sequence
  Description of Artificial Sequence: Synthetic oligonucleotide
cuaaccaaccaaggcuggg

SEQ ID NO: 1234158 - RNA, 19 nt, Artificial Sequence
  Description of Artificial Sequence: Synthetic oligonucleotide
uuuugauugugugggcgaa

SEQ ID NO: 1234159 - RNA, 19 nt, Artificial Sequence
  Description of Artificial Sequence: Synthetic oligonucleotide
agcaacaguccuaucccuc

SEQ ID NO: 1234160 - RNA, 19 nt, Artificial Sequence
  Description of Artificial Sequence: Synthetic oligonucleotide
agacacaagccagagcaga

SEQ ID NO: 1234161 - RNA, 19 nt, Artificial Sequence
  Description of Artificial Sequence: Synthetic oligonucleotide
guagaugacacggucugga

SEQ ID NO: 1234162 - RNA, 19 nt, Artificial Sequence
  Description of Artificial Sequence: Synthetic oligonucleotide
gugugggcgaagucgcagg

SEQ ID NO: 1234163 - RNA, 19 nt, Artificial Sequence
  Description of Artificial Sequence: Synthetic oligonucleotide
uucagaauguuggguuagc

SEQ ID NO: 1234164 - RNA, 19 nt, Artificial Sequence
  Description of Artificial Sequence: Synthetic oligonucleotide
aucagagcaacaguccuau

SEQ ID NO: 1234165 - RNA, 19 nt, Artificial Sequence
  Description of Artificial Sequence: Synthetic oligonucleotide
acaggcuccgagagguugc

SEQ ID NO: 1234166 - RNA, 19 nt, Artificial Sequence
  Description of Artificial Sequence: Synthetic oligonucleotide
ugggcgaagucgcaggauu

SEQ ID NO: 1234167 - RNA, 19 nt, Artificial Sequence
  Description of Artificial Sequence: Synthetic oligonucleotide
uaucuaccuaucagagcaa

SEQ ID NO: 1234168 - RNA, 19 nt, Artificial Sequence
  Description of Artificial Sequence: Synthetic oligonucleotide
gccuagaugcgacuggaag

SEQ ID NO: 1234169 - RNA, 19 nt, Artificial Sequence
  Description of Artificial Sequence: Synthetic oligonucleotide
uauucacgucgaccagugc

SEQ ID NO: 1234170 - RNA, 19 nt, Artificial Sequence
  Description of Artificial Sequence: Synthetic oligonucleotide
uuaugaugcugaagaggua

SEQ ID NO: 1234171 - RNA, 19 nt, Artificial Sequence
  Description of Artificial Sequence: Synthetic oligonucleotide
guggccuagaugcgacugg

SEQ ID NO: 1234172 - RNA, 19 nt, Artificial Sequence
  Description of Artificial Sequence: Synthetic oligonucleotide
acguaggugccgaagaccu

SEQ ID NO: 1234173 - RNA, 19 nt, Artificial Sequence
  Description of Artificial Sequence: Synthetic oligonucleotide
uccgagagguugcuaacuu

SEQ ID NO: 1234174 - RNA, 19 nt, Artificial Sequence
  Description of Artificial Sequence: Synthetic oligonucleotide
gagucccggauccagcaca

SEQ ID NO: 1234175 - RNA, 19 nt, Artificial Sequence
  Description of Artificial Sequence: Synthetic oligonucleotide
cuagaugcgacuggaagaa

SEQ ID NO: 1234176 - RNA, 19 nt, Artificial Sequence
  Description of Artificial Sequence: Synthetic oligonucleotide
ggcugcuugauguuggauc

SEQ ID NO: 1234177 - RNA, 19 nt, Artificial Sequence
  Description of Artificial Sequence: Synthetic oligonucleotide
cuugacgcuguccgaguug

SEQ ID NO: 1234178 - RNA, 19 nt, Artificial Sequence
  Description of Artificial Sequence: Synthetic oligonucleotide
ugauugugugggcgaaguc

SEQ ID NO: 1234179 - RNA, 19 nt, Artificial Sequence
  Description of Artificial Sequence: Synthetic oligonucleotide
aucgucaacccagaacaca

SEQ ID NO: 1234180 - RNA, 19 nt, Artificial Sequence
  Description of Artificial Sequence: Synthetic oligonucleotide
gacacagcccacguaggac

SEQ ID NO: 1234181 - RNA, 19 nt, Artificial Sequence
  Description of Artificial Sequence: Synthetic oligonucleotide
accgcaugaaccaguacca

SEQ ID NO: 1234182 - RNA, 19 nt, Artificial Sequence
  Description of Artificial Sequence: Synthetic oligonucleotide
gguguagucacgugacuuc

SEQ ID NO: 1234183 - RNA, 19 nt, Artificial Sequence
  Description of Artificial Sequence: Synthetic oligonucleotide
agugugagguagugcuugu

SEQ ID NO: 1234184 - RNA, 19 nt, Artificial Sequence
  Description of Artificial Sequence: Synthetic oligonucleotide
aggaaguuaugaugcugaa

SEQ ID NO: 1234185 - RNA, 19 nt, Artificial Sequence
  Description of Artificial Sequence: Synthetic oligonucleotide
cuaaccagagagucccgga

SEQ ID NO: 1234186 - RNA, 19 nt, Artificial Sequence
  Description of Artificial Sequence: Synthetic oligonucleotide
cuuggaaggaaguuaugau

SEQ ID NO: 1234187 - RNA, 19 nt, Artificial Sequence
  Description of Artificial Sequence: Synthetic oligonucleotide
cugcggacagucucacagc

SEQ ID NO: 1234188 - RNA, 19 nt, Artificial Sequence
  Description of Artificial Sequence: Synthetic oligonucleotide
acacacuguagagucacau

SEQ ID NO: 1234189 - RNA, 19 nt, Artificial Sequence
  Description of Artificial Sequence: Synthetic oligonucleotide
augguguagucacgugacu

SEQ ID NO: 1234190 - RNA, 19 nt, Artificial Sequence
  Description of Artificial Sequence: Synthetic oligonucleotide
acauagcuaaccagagagu

SEQ ID NO: 1234191 - RNA, 19 nt, Artificial Sequence
  Description of Artificial Sequence: Synthetic oligonucleotide
cacuggugcggcaggcugc

SEQ ID NO: 1234192 - RNA, 19 nt, Artificial Sequence
  Description of Artificial Sequence: Synthetic oligonucleotide
agcacauagagggguagau

SEQ ID NO: 1234193 - RNA, 19 nt, Artificial Sequence
  Description of Artificial Sequence: Synthetic oligonucleotide
uuggaucgucaacccagaa

SEQ ID NO: 1234194 - RNA, 19 nt, Artificial Sequence
  Description of Artificial Sequence: Synthetic oligonucleotide
agagucacauuugguugug

SEQ ID NO: 1234195 - RNA, 19 nt, Artificial Sequence
  Description of Artificial Sequence: Synthetic oligonucleotide
caggaugucugcgugucuc

SEQ ID NO: 1234196 - RNA, 19 nt, Artificial Sequence
  Description of Artificial Sequence: Synthetic oligonucleotide
gacacggucuggaguucgg

SEQ ID NO: 1234197 - RNA, 19 nt, Artificial Sequence
  Description of Artificial Sequence: Synthetic oligonucleotide
gucacauuugguuguggcu

SEQ ID NO: 1234198 - RNA, 19 nt, Artificial Sequence
  Description of Artificial Sequence: Synthetic oligonucleotide
uggccuagaugcgacugga

SEQ ID NO: 1234199 - RNA, 19 nt, Artificial Sequence
  Description of Artificial Sequence: Synthetic oligonucleotide
ccggauccagcacauagag

SEQ ID NO: 1234200 - RNA, 19 nt, Artificial Sequence
  Description of Artificial Sequence: Synthetic oligonucleotide
ccuagaugcgacuggaaga

SEQ ID NO: 1234201 - RNA, 19 nt, Artificial Sequence
  Description of Artificial Sequence: Synthetic oligonucleotide
agccuuggaaggaaguuau

SEQ ID NO: 1234202 - RNA, 19 nt, Artificial Sequence
  Description of Artificial Sequence: Synthetic oligonucleotide
gaucgucaacccagaacac

SEQ ID NO: 1234203 - RNA, 19 nt, Artificial Sequence
  Description of Artificial Sequence: Synthetic oligonucleotide
caaaguaggucagauggcu

SEQ ID NO: 1234204 - RNA, 19 nt, Artificial Sequence
  Description of Artificial Sequence: Synthetic oligonucleotide
gacgcuguccgaguugcuc

SEQ ID NO: 1234205 - RNA, 19 nt, Artificial Sequence
  Description of Artificial Sequence: Synthetic oligonucleotide
gugagguagugcuugugua

SEQ ID NO: 1234206 - RNA, 19 nt, Artificial Sequence
  Description of Artificial Sequence: Synthetic oligonucleotide
uugugugggcgaagucgca

SEQ ID NO: 1234207 - RNA, 19 nt, Artificial Sequence
  Description of Artificial Sequence: Synthetic oligonucleotide
cccagaacacacacuguag

SEQ ID NO: 1234208 - RNA, 19 nt, Artificial Sequence
  Description of Artificial Sequence: Synthetic oligonucleotide
cccacguaggacaggagug

SEQ ID NO: 1234209 - RNA, 19 nt, Artificial Sequence
  Description of Artificial Sequence: Synthetic oligonucleotide
ggugaguaccacaggcucc

SEQ ID NO: 1234210 - RNA, 19 nt, Artificial Sequence
  Description of Artificial Sequence: Synthetic oligonucleotide
agugcugccgccggagcug

SEQ ID NO: 1234211 - RNA, 19 nt, Artificial Sequence
  Description of Artificial Sequence: Synthetic oligonucleotide
agggcuaggggagccccac

SEQ ID NO: 1234212 - RNA, 19 nt, Artificial Sequence
  Description of Artificial Sequence: Synthetic oligonucleotide
gaaccgcaugaaccaguac

SEQ ID NO: 1234213 - RNA, 19 nt, Artificial Sequence
  Description of Artificial Sequence: Synthetic oligonucleotide
agggacguaggugccgaag

SEQ ID NO: 1234214 - RNA, 19 nt, Artificial Sequence
  Description of Artificial Sequence: Synthetic oligonucleotide
cagacgccaugcauguguc

SEQ ID NO: 1234215 - RNA, 19 nt, Artificial Sequence
  Description of Artificial Sequence: Synthetic oligonucleotide
gcuagguaucuaccuauca

SEQ ID NO: 1234216 - RNA, 19 nt, Artificial Sequence
  Description of Artificial Sequence: Synthetic oligonucleotide
gguagaugacacggucugg

SEQ ID NO: 1234217 - RNA, 19 nt, Artificial Sequence
  Description of Artificial Sequence: Synthetic oligonucleotide
acgugacuuccuccuggag

SEQ ID NO: 1234218 - RNA, 19 nt, Artificial Sequence
  Description of Artificial Sequence: Synthetic oligonucleotide
gucacgugacuuccuccug

SEQ ID NO: 1234219 - RNA, 19 nt, Artificial Sequence
  Description of Artificial Sequence: Synthetic oligonucleotide
cuggaguucggcgcacagc

SEQ ID NO: 1234220 - RNA, 19 nt, Artificial Sequence
  Description of Artificial Sequence: Synthetic oligonucleotide
guccccaaggccagcuagg

SEQ ID NO: 1234221 - RNA, 19 nt, Artificial Sequence
  Description of Artificial Sequence: Synthetic oligonucleotide
gacgccaugcauguguccu

SEQ ID NO: 1234222 - RNA, 19 nt, Artificial Sequence
  Description of Artificial Sequence: Synthetic oligonucleotide
aggucaagaugaaaugcua

SEQ ID NO: 1234223 - RNA, 19 nt, Artificial Sequence
  Description of Artificial Sequence: Synthetic oligonucleotide
cuagaucuggaaguggagu

SEQ ID NO: 1234224 - RNA, 19 nt, Artificial Sequence
  Description of Artificial Sequence: Synthetic oligonucleotide
cauuugguuguggcuggug

SEQ ID NO: 1234225 - RNA, 19 nt, Artificial Sequence
  Description of Artificial Sequence: Synthetic oligonucleotide
cuggaaccgcaugaaccag

SEQ ID NO: 1234226 - RNA, 19 nt, Artificial Sequence
  Description of Artificial Sequence: Synthetic oligonucleotide
gggccuucucuagaaagcc

SEQ ID NO: 1234227 - RNA, 19 nt, Artificial Sequence
  Description of Artificial Sequence: Synthetic oligonucleotide
gccaccucgggccuggaac

SEQ ID NO: 1234228 - RNA, 19 nt, Artificial Sequence
  Description of Artificial Sequence: Synthetic oligonucleotide
cacguaggacaggagugug

SEQ ID NO: 1234229 - RNA, 19 nt, Artificial Sequence
  Description of Artificial Sequence: Synthetic oligonucleotide
gugugcuucggagacuaga

SEQ ID NO: 1234230 - RNA, 19 nt, Artificial Sequence
  Description of Artificial Sequence: Synthetic oligonucleotide
augacacggucuggaguuc

SEQ ID NO: 1234231 - RNA, 19 nt, Artificial Sequence
  Description of Artificial Sequence: Synthetic oligonucleotide
aguucggcgcacagccagg

SEQ ID NO: 1234232 - RNA, 19 nt, Artificial Sequence
  Description of Artificial Sequence: Synthetic oligonucleotide
ucucugcggacagucucac

SEQ ID NO: 1234233 - RNA, 19 nt, Artificial Sequence
  Description of Artificial Sequence: Synthetic oligonucleotide
ugaagaggcccagguuagu

SEQ ID NO: 1234234 - RNA, 19 nt, Artificial Sequence
  Description of Artificial Sequence: Synthetic oligonucleotide
gccuaggaccccaagcugc

SEQ ID NO: 1234235 - RNA, 19 nt, Artificial Sequence
  Description of Artificial Sequence: Synthetic oligonucleotide
cauggcagugugcuucgga

SEQ ID NO: 1234236 - RNA, 19 nt, Artificial Sequence
  Description of Artificial Sequence: Synthetic oligonucleotide
gggacguaggugccgaaga

SEQ ID NO: 1234237 - RNA, 19 nt, Artificial Sequence
  Description of Artificial Sequence: Synthetic oligonucleotide
ggacguaggugccgaagac

SEQ ID NO: 1234238 - RNA, 19 nt, Artificial Sequence
  Description of Artificial Sequence: Synthetic oligonucleotide
guuggaucgucaacccaga

SEQ ID NO: 1234239 - RNA, 19 nt, Artificial Sequence
  Description of Artificial Sequence: Synthetic oligonucleotide
cccaacuugaaggcugagg

SEQ ID NO: 1234240 - RNA, 19 nt, Artificial Sequence
  Description of Artificial Sequence: Synthetic oligonucleotide
gguggccuagaugcgacug

SEQ ID NO: 1234241 - RNA, 19 nt, Artificial Sequence
  Description of Artificial Sequence: Synthetic oligonucleotide
cggagacuagaucuggaag

SEQ ID NO: 1234242 - RNA, 19 nt, Artificial Sequence
  Description of Artificial Sequence: Synthetic oligonucleotide
agguucaugugcacuuuaa

SEQ ID NO: 1234243 - RNA, 19 nt, Artificial Sequence
  Description of Artificial Sequence: Synthetic oligonucleotide
gcacuuuaaugguguaguc

SEQ ID NO: 1234244 - RNA, 19 nt, Artificial Sequence
  Description of Artificial Sequence: Synthetic oligonucleotide
ggcuccgagagguugcuaa

SEQ ID NO: 1234245 - RNA, 19 nt, Artificial Sequence
  Description of Artificial Sequence: Synthetic oligonucleotide
aaggccagcuagguaucua

SEQ ID NO: 1234246 - RNA, 19 nt, Artificial Sequence
  Description of Artificial Sequence: Synthetic oligonucleotide
ccacuaaccaaccaaggcu

SEQ ID NO: 1234247 - RNA, 19 nt, Artificial Sequence
  Description of Artificial Sequence: Synthetic oligonucleotide
agcguccuccccaacuuga

SEQ ID NO: 1234248 - RNA, 19 nt, Artificial Sequence
  Description of Artificial Sequence: Synthetic oligonucleotide
gcacauagagggguagaug

SEQ ID NO: 1234249 - RNA, 19 nt, Artificial Sequence
  Description of Artificial Sequence: Synthetic oligonucleotide
cacgugacuuccuccugga

SEQ ID NO: 1234250 - RNA, 19 nt, Artificial Sequence
  Description of Artificial Sequence: Synthetic oligonucleotide
agcuaaccagagagucccg

SEQ ID NO: 1234251 - RNA, 19 nt, Artificial Sequence
  Description of Artificial Sequence: Synthetic oligonucleotide
ccaccucgggccuggaacc

SEQ ID NO: 1234252 - RNA, 19 nt, Artificial Sequence
  Description of Artificial Sequence: Synthetic oligonucleotide
gucucugcggacagucuca

SEQ ID NO: 1234253 - RNA, 19 nt, Artificial Sequence
  Description of Artificial Sequence: Synthetic oligonucleotide
caacaguccuaucccucca

SEQ ID NO: 1234254 - RNA, 19 nt, Artificial Sequence
  Description of Artificial Sequence: Synthetic oligonucleotide
cccagguuagugacauagc

SEQ ID NO: 1234255 - RNA, 19 nt, Artificial Sequence
  Description of Artificial Sequence: Synthetic oligonucleotide
acuggugcggcaggcugcu

SEQ ID NO: 1234256 - RNA, 19 nt, Artificial Sequence
  Description of Artificial Sequence: Synthetic oligonucleotide
gggccauaauuauucacgu

SEQ ID NO: 1234257 - RNA, 19 nt, Artificial Sequence
  Description of Artificial Sequence: Synthetic oligonucleotide
uaggugccgaagaccucua

SEQ ID NO: 1234258 - RNA, 19 nt, Artificial Sequence
  Description of Artificial Sequence: Synthetic oligonucleotide
gcuaggggagccccacagc

SEQ ID NO: 1234259 - RNA, 19 nt, Artificial Sequence
  Description of Artificial Sequence: Synthetic oligonucleotide
cagcuagguaucuaccuau

SEQ ID NO: 1234260 - RNA, 19 nt, Artificial Sequence
  Description of Artificial Sequence: Synthetic oligonucleotide
ggcgaagucgcaggauuug

SEQ ID NO: 1234261 - RNA, 19 nt, Artificial Sequence
  Description of Artificial Sequence: Synthetic oligonucleotide
gucgaccagugccaccaga

SEQ ID NO: 1234262 - RNA, 19 nt, Artificial Sequence
  Description of Artificial Sequence: Synthetic oligonucleotide
ugacgcuguccgaguugcu

SEQ ID NO: 1234263 - RNA, 19 nt, Artificial Sequence
  Description of Artificial Sequence: Synthetic oligonucleotide
gcccucgaggcccauccag

SEQ ID NO: 1234264 - RNA, 19 nt, Artificial Sequence
  Description of Artificial Sequence: Synthetic oligonucleotide
cuaggaccccaagcugcag

SEQ ID NO: 1234265 - RNA, 19 nt, Artificial Sequence
  Description of Artificial Sequence: Synthetic oligonucleotide
ccagguuagugacauagcu

SEQ ID NO: 1234266 - RNA, 19 nt, Artificial Sequence
  Description of Artificial Sequence: Synthetic oligonucleotide
gcuuguguacggccucuac

SEQ ID NO: 1234267 - RNA, 19 nt, Artificial Sequence
  Description of Artificial Sequence: Synthetic oligonucleotide
gcgaagucgcaggauuugc

SEQ ID NO: 1234268 - RNA, 19 nt, Artificial Sequence
  Description of Artificial Sequence: Synthetic oligonucleotide
cccaaggccagcuagguau

SEQ ID NO: 1234269 - RNA, 19 nt, Artificial Sequence
  Description of Artificial Sequence: Synthetic oligonucleotide
gguuagugacauagcuaac

SEQ ID NO: 1234270 - RNA, 19 nt, Artificial Sequence
  Description of Artificial Sequence: Synthetic oligonucleotide
caccucgggccuggaaccg

SEQ ID NO: 1234271 - RNA, 19 nt, Artificial Sequence
  Description of Artificial Sequence: Synthetic oligonucleotide
cuaucccuccaaggaccag

SEQ ID NO: 1234272 - RNA, 19 nt, Artificial Sequence
  Description of Artificial Sequence: Synthetic oligonucleotide
ggugcggcaggcugcuuca

SEQ ID NO: 1234273 - RNA, 19 nt, Artificial Sequence
  Description of Artificial Sequence: Synthetic oligonucleotide
gcuccgagagguugcuaac

SEQ ID NO: 1234274 - RNA, 19 nt, Artificial Sequence
  Description of Artificial Sequence: Synthetic oligonucleotide
gcaucagauaacaacugau

SEQ ID NO: 1234275 - RNA, 19 nt, Artificial Sequence
  Description of Artificial Sequence: Synthetic oligonucleotide
ggagcuugacgcuguccga

SEQ ID NO: 1234276 - RNA, 19 nt, Artificial Sequence
  Description of Artificial Sequence: Synthetic oligonucleotide
cugcgugucucugcggaca

SEQ ID NO: 1234277 - RNA, 19 nt, Artificial Sequence
  Description of Artificial Sequence: Synthetic oligonucleotide
cagguucaugugcacuuua

SEQ ID NO: 1234278 - RNA, 19 nt, Artificial Sequence
  Description of Artificial Sequence: Synthetic oligonucleotide
guucggcgcacagccagga

SEQ ID NO: 1234279 - RNA, 19 nt, Artificial Sequence
  Description of Artificial Sequence: Synthetic oligonucleotide
agucccggauccagcacau

SEQ ID NO: 1234280 - RNA, 19 nt, Artificial Sequence
  Description of Artificial Sequence: Synthetic oligonucleotide
gcuugauguuggaucguca

SEQ ID NO: 1234281 - RNA, 19 nt, Artificial Sequence
  Description of Artificial Sequence: Synthetic oligonucleotide
ugcuuguguacggccucua

SEQ ID NO: 1234282 - RNA, 19 nt, Artificial Sequence
  Description of Artificial Sequence: Synthetic oligonucleotide
ggucuucagaauguugggu

SEQ ID NO: 1234283 - RNA, 19 nt, Artificial Sequence
  Description of Artificial Sequence: Synthetic oligonucleotide
gacaggagugugagguagu

SEQ ID NO: 1234284 - RNA, 19 nt, Artificial Sequence
  Description of Artificial Sequence: Synthetic oligonucleotide
ccgccagugccacaggcuc

SEQ ID NO: 1234285 - RNA, 19 nt, Artificial Sequence
  Description of Artificial Sequence: Synthetic oligonucleotide
gguagagauuguagcccuc

SEQ ID NO: 1234286 - RNA, 19 nt, Artificial Sequence
  Description of Artificial Sequence: Synthetic oligonucleotide
ggauuugcaccaccauggu

SEQ ID NO: 1234287 - RNA, 19 nt, Artificial Sequence
  Description of Artificial Sequence: Synthetic oligonucleotide
ugacuuccuccuggagcaa

SEQ ID NO: 1234288 - RNA, 19 nt, Artificial Sequence
  Description of Artificial Sequence: Synthetic oligonucleotide
gguggagggcuaggggagc

SEQ ID NO: 1234289 - RNA, 19 nt, Artificial Sequence
  Description of Artificial Sequence: Synthetic oligonucleotide
cccaagcugcagguggagg

SEQ ID NO: 1234290 - RNA, 19 nt, Artificial Sequence
  Description of Artificial Sequence: Synthetic oligonucleotide
gcccacguaggacaggagu

SEQ ID NO: 1234291 - RNA, 19 nt, Artificial Sequence
  Description of Artificial Sequence: Synthetic oligonucleotide
ggaaccgcaugaaccagua

SEQ ID NO: 1234292 - RNA, 19 nt, Artificial Sequence
  Description of Artificial Sequence: Synthetic oligonucleotide
cgugucucugcggacaguc

SEQ ID NO: 1234293 - RNA, 19 nt, Artificial Sequence
  Description of Artificial Sequence: Synthetic oligonucleotide
cccggauccagcacauaga

SEQ ID NO: 1234294 - RNA, 19 nt, Artificial Sequence
  Description of Artificial Sequence: Synthetic oligonucleotide
gccagugccacaggcucac

SEQ ID NO: 1234295 - RNA, 19 nt, Artificial Sequence
  Description of Artificial Sequence: Synthetic oligonucleotide
augcuaccuccugcaagaa

SEQ ID NO: 1234296 - RNA, 19 nt, Artificial Sequence
  Description of Artificial Sequence: Synthetic oligonucleotide
ccaugcauguguccuccca

SEQ ID NO: 1234297 - RNA, 19 nt, Artificial Sequence
  Description of Artificial Sequence: Synthetic oligonucleotide
cgaagucgcaggauuugca

SEQ ID NO: 1234298 - RNA, 19 nt, Artificial Sequence
  Description of Artificial Sequence: Synthetic oligonucleotide
cuccgagagguugcuaacu

SEQ ID NO: 1234299 - RNA, 19 nt, Artificial Sequence
  Description of Artificial Sequence: Synthetic oligonucleotide
gccuuggaaggaaguuaug

SEQ ID NO: 1234300 - RNA, 19 nt, Artificial Sequence
  Description of Artificial Sequence: Synthetic oligonucleotide
gucuggaguucggcgcaca

SEQ ID NO: 1234301 - RNA, 19 nt, Artificial Sequence
  Description of Artificial Sequence: Synthetic oligonucleotide
ggcacagcaccaagccaca

SEQ ID NO: 1234302 - RNA, 19 nt, Artificial Sequence
  Description of Artificial Sequence: Synthetic oligonucleotide
gcgguggccuagaugcgac

SEQ ID NO: 1234303 - RNA, 19 nt, Artificial Sequence
  Description of Artificial Sequence: Synthetic oligonucleotide
ccgcaugaaccaguaccac

SEQ ID NO: 1234304 - RNA, 19 nt, Artificial Sequence
  Description of Artificial Sequence: Synthetic oligonucleotide
cgucaacccagaacacaca

SEQ ID NO: 1234305 - RNA, 19 nt, Artificial Sequence
  Description of Artificial Sequence: Synthetic oligonucleotide
ccauggcaucagauaacaa

SEQ ID NO: 1234306 - RNA, 19 nt, Artificial Sequence
  Description of Artificial Sequence: Synthetic oligonucleotide
cguaggugccgaagaccuc

SEQ ID NO: 1234307 - RNA, 19 nt, Artificial Sequence
  Description of Artificial Sequence: Synthetic oligonucleotide
cagggacguaggugccgaa

SEQ ID NO: 1234308 - RNA, 19 nt, Artificial Sequence
  Description of Artificial Sequence: Synthetic oligonucleotide
gcuguccgaguugcucuuc

SEQ ID NO: 1234309 - RNA, 19 nt, Artificial Sequence
  Description of Artificial Sequence: Synthetic oligonucleotide
gcuugacgcuguccgaguu

SEQ ID NO: 1234310 - RNA, 19 nt, Artificial Sequence
  Description of Artificial Sequence: Synthetic oligonucleotide
cugcuugauguuggaucgu

SEQ ID NO: 1234311 - RNA, 19 nt, Artificial Sequence
  Description of Artificial Sequence: Synthetic oligonucleotide
ccgcugucuuggucuucag

SEQ ID NO: 1234312 - RNA, 19 nt, Artificial Sequence
  Description of Artificial Sequence: Synthetic oligonucleotide
ggccuagaugcgacuggaa

SEQ ID NO: 1234313 - RNA, 19 nt, Artificial Sequence
  Description of Artificial Sequence: Synthetic oligonucleotide
gcaggaugucugcgugucu

SEQ ID NO: 1234314 - RNA, 19 nt, Artificial Sequence
  Description of Artificial Sequence: Synthetic oligonucleotide
ccacguaggacaggagugu

SEQ ID NO: 1234315 - RNA, 19 nt, Artificial Sequence
  Description of Artificial Sequence: Synthetic oligonucleotide
gugggcgaagucgcaggau

SEQ ID NO: 1234316 - RNA, 19 nt, Artificial Sequence
  Description of Artificial Sequence: Synthetic oligonucleotide
ggagugugagguagugcuu

SEQ ID NO: 1234317 - RNA, 19 nt, Artificial Sequence
  Description of Artificial Sequence: Synthetic oligonucleotide
caggcuccgagagguugcu

SEQ ID NO: 1234318 - RNA, 19 nt, Artificial Sequence
  Description of Artificial Sequence: Synthetic oligonucleotide
ccccaacuugaaggcugag

SEQ ID NO: 1234319 - RNA, 19 nt, Artificial Sequence
  Description of Artificial Sequence: Synthetic oligonucleotide
gcguccuccccaacuugaa

SEQ ID NO: 1234320 - RNA, 19 nt, Artificial Sequence
  Description of Artificial Sequence: Synthetic oligonucleotide
ccgagagguugcuaacuuu

SEQ ID NO: 1234321 - RNA, 19 nt, Artificial Sequence
  Description of Artificial Sequence: Synthetic oligonucleotide
gggccacuuuugauugugu

SEQ ID NO: 1234322 - RNA, 19 nt, Artificial Sequence
  Description of Artificial Sequence: Synthetic oligonucleotide
gcagguucaugugcacuuu

SEQ ID NO: 1234323 - RNA, 19 nt, Artificial Sequence
  Description of Artificial Sequence: Synthetic oligonucleotide
gggcgaagucgcaggauuu

SEQ ID NO: 1234324 - RNA, 19 nt, Artificial Sequence
  Description of Artificial Sequence: Synthetic oligonucleotide
guacggccucuaccuccau

SEQ ID NO: 1234325 - RNA, 19 nt, Artificial Sequence
  Description of Artificial Sequence: Synthetic oligonucleotide
ccccaaggccagcuaggua

SEQ ID NO: 1234326 - RNA, 19 nt, Artificial Sequence
  Description of Artificial Sequence: Synthetic oligonucleotide
gcgugucucugcggacagu

SEQ ID NO: 1234327 - RNA, 19 nt, Artificial Sequence
  Description of Artificial Sequence: Synthetic oligonucleotide
cgguggccuagaugcgacu

SEQ ID NO: 1234328 - RNA, 19 nt, Artificial Sequence
  Description of Artificial Sequence: Synthetic oligonucleotide
cuggugcggcaggcugcuu

SEQ ID NO: 1234329 - RNA, 19 nt, Artificial Sequence
  Description of Artificial Sequence: Synthetic oligonucleotide
aaaugaaccauucugagag

SEQ ID NO: 1234330 - RNA, 19 nt, Artificial Sequence
  Description of Artificial Sequence: Synthetic oligonucleotide
uuuguauugaaucagggcc

SEQ ID NO: 1234331 - RNA, 19 nt, Artificial Sequence
  Description of Artificial Sequence: Synthetic oligonucleotide
aauugcaaagucuuacugg

SEQ ID NO: 1234332 - RNA, 19 nt, Artificial Sequence
  Description of Artificial Sequence: Synthetic oligonucleotide
aaugucaacagcuaagaga

SEQ ID NO: 1234333 - RNA, 19 nt, Artificial Sequence
  Description of Artificial Sequence: Synthetic oligonucleotide
uaaaagauaugaaaagggc

SEQ ID NO: 1234334 - RNA, 19 nt, Artificial Sequence
  Description of Artificial Sequence: Synthetic oligonucleotide
auuuguauugaaucagggc

SEQ ID NO: 1234335 - RNA, 19 nt, Artificial Sequence
  Description of Artificial Sequence: Synthetic oligonucleotide
ucuaauaauuuacaccaag

SEQ ID NO: 1234336 - RNA, 19 nt, Artificial Sequence
  Description of Artificial Sequence: Synthetic oligonucleotide
uacugaagaaucuucacag

SEQ ID NO: 1234337 - RNA, 19 nt, Artificial Sequence
  Description of Artificial Sequence: Synthetic oligonucleotide
augcaauggaguuuguucc

SEQ ID NO: 1234338 - RNA, 19 nt, Artificial Sequence
  Description of Artificial Sequence: Synthetic oligonucleotide
auccuaguaacugacaugc

SEQ ID NO: 1234339 - RNA, 19 nt, Artificial Sequence
  Description of Artificial Sequence: Synthetic oligonucleotide
auagacacagcugucagcc

SEQ ID NO: 1234340 - RNA, 19 nt, Artificial Sequence
  Description of Artificial Sequence: Synthetic oligonucleotide
uucacgauggcgcucaugc

SEQ ID NO: 1234341 - RNA, 19 nt, Artificial Sequence
  Description of Artificial Sequence: Synthetic oligonucleotide
agaaccaacaucuccaaug

SEQ ID NO: 1234342 - RNA, 19 nt, Artificial Sequence
  Description of Artificial Sequence: Synthetic oligonucleotide
uguauuccaaaacaguggu

SEQ ID NO: 1234343 - RNA, 19 nt, Artificial Sequence
  Description of Artificial Sequence: Synthetic oligonucleotide
aagaggagaucauagauuu

SEQ ID NO: 1234344 - RNA, 19 nt, Artificial Sequence
  Description of Artificial Sequence: Synthetic oligonucleotide
cuauuaaauccacacgugg

SEQ ID NO: 1234345 - RNA, 19 nt, Artificial Sequence
  Description of Artificial Sequence: Synthetic oligonucleotide
uuuagugugucucuuuugu

SEQ ID NO: 1234346 - RNA, 19 nt, Artificial Sequence
  Description of Artificial Sequence: Synthetic oligonucleotide
acagauucgacaucaaugu

SEQ ID NO: 1234347 - RNA, 19 nt, Artificial Sequence
  Description of Artificial Sequence: Synthetic oligonucleotide
aaaaugaaccauucugaga

SEQ ID NO: 1234348 - RNA, 19 nt, Artificial Sequence
  Description of Artificial Sequence: Synthetic oligonucleotide
uauugaauugcaaagucuu

SEQ ID NO: 1234349 - RNA, 19 nt, Artificial Sequence
  Description of Artificial Sequence: Synthetic oligonucleotide
uacaagauugcuugaaaca

SEQ ID NO: 1234350 - RNA, 19 nt, Artificial Sequence
  Description of Artificial Sequence: Synthetic oligonucleotide
uggccuucgaucuuagugg

SEQ ID NO: 1234351 - RNA, 19 nt, Artificial Sequence
  Description of Artificial Sequence: Synthetic oligonucleotide
guuccggacacauucauag

SEQ ID NO: 1234352 - RNA, 19 nt, Artificial Sequence
  Description of Artificial Sequence: Synthetic oligonucleotide
aaaucuccgguaccugagc

SEQ ID NO: 1234353 - RNA, 19 nt, Artificial Sequence
  Description of Artificial Sequence: Synthetic oligonucleotide
uggagauuuguauugaauc

SEQ ID NO: 1234354 - RNA, 19 nt, Artificial Sequence
  Description of Artificial Sequence: Synthetic oligonucleotide
uguuaauaggggauagagc

SEQ ID NO: 1234355 - RNA, 19 nt, Artificial Sequence
  Description of Artificial Sequence: Synthetic oligonucleotide
gaggacaccaaguuuaaac

SEQ ID NO: 1234356 - RNA, 19 nt, Artificial Sequence
  Description of Artificial Sequence: Synthetic oligonucleotide
uuagugguauccuaguaac

SEQ ID NO: 1234357 - RNA, 19 nt, Artificial Sequence
  Description of Artificial Sequence: Synthetic oligonucleotide
cugaagaaucuucacagcc

SEQ ID NO: 1234358 - RNA, 19 nt, Artificial Sequence
  Description of Artificial Sequence: Synthetic oligonucleotide
uaacugacaugcaauggag

SEQ ID NO: 1234359 - RNA, 19 nt, Artificial Sequence
  Description of Artificial Sequence: Synthetic oligonucleotide
aucagggccauauaaaaga

SEQ ID NO: 1234360 - RNA, 19 nt, Artificial Sequence
  Description of Artificial Sequence: Synthetic oligonucleotide
cuucuauuaaauccacacg

SEQ ID NO: 1234361 - RNA, 19 nt, Artificial Sequence
  Description of Artificial Sequence: Synthetic oligonucleotide
gauuuguauugaaucaggg

SEQ ID NO: 1234362 - RNA, 19 nt, Artificial Sequence
  Description of Artificial Sequence: Synthetic oligonucleotide
acagcacacccacaggucc

SEQ ID NO: 1234363 - RNA, 19 nt, Artificial Sequence
  Description of Artificial Sequence: Synthetic oligonucleotide
uuauuaaugaaggcagaag

SEQ ID NO: 1234364 - RNA, 19 nt, Artificial Sequence
  Description of Artificial Sequence: Synthetic oligonucleotide
aagaugaguucuaccaggc

SEQ ID NO: 1234365 - RNA, 19 nt, Artificial Sequence
  Description of Artificial Sequence: Synthetic oligonucleotide
uuuagggacaccagcacac

SEQ ID NO: 1234366 - RNA, 19 nt, Artificial Sequence
  Description of Artificial Sequence: Synthetic oligonucleotide
aguucacccauauccaggg

SEQ ID NO: 1234367 - RNA, 19 nt, Artificial Sequence
  Description of Artificial Sequence: Synthetic oligonucleotide
uauuccaaaacagugguau

SEQ ID NO: 1234368 - RNA, 19 nt, Artificial Sequence
  Description of Artificial Sequence: Synthetic oligonucleotide
uugucuaaggagaugguuc

SEQ ID NO: 1234369 - RNA, 19 nt, Artificial Sequence
  Description of Artificial Sequence: Synthetic oligonucleotide
uuguauugaaucagggcca

SEQ ID NO: 1234370 - RNA, 19 nt, Artificial Sequence
  Description of Artificial Sequence: Synthetic oligonucleotide
aaagucuuacuggguaagc

SEQ ID NO: 1234371 - RNA, 19 nt, Artificial Sequence
  Description of Artificial Sequence: Synthetic oligonucleotide
aagucuuacuggguaagcg

SEQ ID NO: 1234372 - RNA, 19 nt, Artificial Sequence
  Description of Artificial Sequence: Synthetic oligonucleotide
agaggauacagauucgaca

SEQ ID NO: 1234373 - RNA, 19 nt, Artificial Sequence
  Description of Artificial Sequence: Synthetic oligonucleotide
uuuucaaaucuccgguacc

SEQ ID NO: 1234374 - RNA, 19 nt, Artificial Sequence
  Description of Artificial Sequence: Synthetic oligonucleotide
auguuaauaggggauagag

SEQ ID NO: 1234375 - RNA, 19 nt, Artificial Sequence
  Description of Artificial Sequence: Synthetic oligonucleotide
agcuuauuaaugaaggcag

SEQ ID NO: 1234376 - RNA, 19 nt, Artificial Sequence
  Description of Artificial Sequence: Synthetic oligonucleotide
aggaguucgauuccagagg

SEQ ID NO: 1234377 - RNA, 19 nt, Artificial Sequence
  Description of Artificial Sequence: Synthetic oligonucleotide
ucuaaggagaugguucacg

SEQ ID NO: 1234378 - RNA, 19 nt, Artificial Sequence
  Description of Artificial Sequence: Synthetic oligonucleotide
gagauuuguauugaaucag

SEQ ID NO: 1234379 - RNA, 19 nt, Artificial Sequence
  Description of Artificial Sequence: Synthetic oligonucleotide
agggugucccaguucaugc

SEQ ID NO: 1234380 - RNA, 19 nt, Artificial Sequence
  Description of Artificial Sequence: Synthetic oligonucleotide
cuauccacugcauuuguac

SEQ ID NO: 1234381 - RNA, 19 nt, Artificial Sequence
  Description of Artificial Sequence: Synthetic oligonucleotide
gauagugucugagaugagc

SEQ ID NO: 1234382 - RNA, 19 nt, Artificial Sequence
  Description of Artificial Sequence: Synthetic oligonucleotide
auaaacaggucacgagcac

SEQ ID NO: 1234383 - RNA, 19 nt, Artificial Sequence
  Description of Artificial Sequence: Synthetic oligonucleotide
aguucuaccaggcccagcu

SEQ ID NO: 1234384 - RNA, 19 nt, Artificial Sequence
  Description of Artificial Sequence: Synthetic oligonucleotide
ugaaucagggccauauaaa

SEQ ID NO: 1234385 - RNA, 19 nt, Artificial Sequence
  Description of Artificial Sequence: Synthetic oligonucleotide
cacuguacuauuuugcauc

SEQ ID NO: 1234386 - RNA, 19 nt, Artificial Sequence
  Description of Artificial Sequence: Synthetic oligonucleotide
ugucuaaggagaugguuca

SEQ ID NO: 1234387 - RNA, 19 nt, Artificial Sequence
  Description of Artificial Sequence: Synthetic oligonucleotide
ucugucaauugccugucug

SEQ ID NO: 1234388 - RNA, 19 nt, Artificial Sequence
  Description of Artificial Sequence: Synthetic oligonucleotide
uccggacacauucauagac

SEQ ID NO: 1234389 - RNA, 19 nt, Artificial Sequence
  Description of Artificial Sequence: Synthetic oligonucleotide
uugaauugcaaagucuuac

SEQ ID NO: 1234390 - RNA, 19 nt, Artificial Sequence
  Description of Artificial Sequence: Synthetic oligonucleotide
uaguaacugacaugcaaug

SEQ ID NO: 1234391 - RNA, 19 nt, Artificial Sequence
  Description of Artificial Sequence: Synthetic oligonucleotide
ugaauugcaaagucuuacu

SEQ ID NO: 1234392 - RNA, 19 nt, Artificial Sequence
  Description of Artificial Sequence: Synthetic oligonucleotide
auaugaaaagggcagguuu

SEQ ID NO: 1234393 - RNA, 19 nt, Artificial Sequence
  Description of Artificial Sequence: Synthetic oligonucleotide
ugcaauggaguuuguuccg

SEQ ID NO: 1234394 - RNA, 19 nt, Artificial Sequence
  Description of Artificial Sequence: Synthetic oligonucleotide
aaaagggcagguuucuuuu

SEQ ID NO: 1234395 - RNA, 19 nt, Artificial Sequence
  Description of Artificial Sequence: Synthetic oligonucleotide
agugguauccuaguaacug

SEQ ID NO: 1234396 - RNA, 19 nt, Artificial Sequence
  Description of Artificial Sequence: Synthetic oligonucleotide
aagagagucacuccacgau

SEQ ID NO: 1234397 - RNA, 19 nt, Artificial Sequence
  Description of Artificial Sequence: Synthetic oligonucleotide
uggaguuuguuccggacac

SEQ ID NO: 1234398 - RNA, 19 nt, Artificial Sequence
  Description of Artificial Sequence: Synthetic oligonucleotide
uggguaagcgaucuucagc

SEQ ID NO: 1234399 - RNA, 19 nt, Artificial Sequence
  Description of Artificial Sequence: Synthetic oligonucleotide
agaugaguucuaccaggcc

SEQ ID NO: 1234400 - RNA, 19 nt, Artificial Sequence
  Description of Artificial Sequence: Synthetic oligonucleotide
gaucuuagugguauccuag

SEQ ID NO: 1234401 - RNA, 19 nt, Artificial Sequence
  Description of Artificial Sequence: Synthetic oligonucleotide
aagguaaugaauauccaua

SEQ ID NO: 1234402 - RNA, 19 nt, Artificial Sequence
  Description of Artificial Sequence: Synthetic oligonucleotide
uaagcgaucuucagccaag

SEQ ID NO: 1234403 - RNA, 19 nt, Artificial Sequence
  Description of Artificial Sequence: Synthetic oligonucleotide
aguaacugacaugcaaugg

SEQ ID NO: 1234404 - RNA, 19 nt, Artificial Sequence
  Description of Artificial Sequence: Synthetic oligonucleotide
guacaagauugcuugaaac

SEQ ID NO: 1234405 - RNA, 19 nt, Artificial Sequence
  Description of Artificial Sequence: Synthetic oligonucleotide
uggaguuucuaauaauuua

SEQ ID NO: 1234406 - RNA, 19 nt, Artificial Sequence
  Description of Artificial Sequence: Synthetic oligonucleotide
agugucugagaugagcuuc

SEQ ID NO: 1234407 - RNA, 19 nt, Artificial Sequence
  Description of Artificial Sequence: Synthetic oligonucleotide
acuaauggagcacuccacu

SEQ ID NO: 1234408 - RNA, 19 nt, Artificial Sequence
  Description of Artificial Sequence: Synthetic oligonucleotide
ucuuucaggcuucugggaa

SEQ ID NO: 1234409 - RNA, 19 nt, Artificial Sequence
  Description of Artificial Sequence: Synthetic oligonucleotide
uauccuaguaacugacaug

SEQ ID NO: 1234410 - RNA, 19 nt, Artificial Sequence
  Description of Artificial Sequence: Synthetic oligonucleotide
uccucuguugaaccugagg

SEQ ID NO: 1234411 - RNA, 19 nt, Artificial Sequence
  Description of Artificial Sequence: Synthetic oligonucleotide
uauugaaucagggccauau

SEQ ID NO: 1234412 - RNA, 19 nt, Artificial Sequence
  Description of Artificial Sequence: Synthetic oligonucleotide
agauuuguauugaaucagg

SEQ ID NO: 1234413 - RNA, 19 nt, Artificial Sequence
  Description of Artificial Sequence: Synthetic oligonucleotide
caucaaagaauuuauugaa

SEQ ID NO: 1234414 - RNA, 19 nt, Artificial Sequence
  Description of Artificial Sequence: Synthetic oligonucleotide
guaaguaagaagagcauca

SEQ ID NO: 1234415 - RNA, 19 nt, Artificial Sequence
  Description of Artificial Sequence: Synthetic oligonucleotide
caggaguucgauuccagag

SEQ ID NO: 1234416 - RNA, 19 nt, Artificial Sequence
  Description of Artificial Sequence: Synthetic oligonucleotide
ucaaaucuccgguaccuga

SEQ ID NO: 1234417 - RNA, 19 nt, Artificial Sequence
  Description of Artificial Sequence: Synthetic oligonucleotide
ggcaagguaaugaauaucc

SEQ ID NO: 1234418 - RNA, 19 nt, Artificial Sequence
  Description of Artificial Sequence: Synthetic oligonucleotide
ugguauuuucugcugaaua

SEQ ID NO: 1234419 - RNA, 19 nt, Artificial Sequence
  Description of Artificial Sequence: Synthetic oligonucleotide
ggguaagcgaucuucagcc

SEQ ID NO: 1234420 - RNA, 19 nt, Artificial Sequence
  Description of Artificial Sequence: Synthetic oligonucleotide
auuugguauuuucugcuga

SEQ ID NO: 1234421 - RNA, 19 nt, Artificial Sequence
  Description of Artificial Sequence: Synthetic oligonucleotide
agauucgacaucaauguca

SEQ ID NO: 1234422 - RNA, 19 nt, Artificial Sequence
  Description of Artificial Sequence: Synthetic oligonucleotide
gauucgacaucaaugucac

SEQ ID NO: 1234423 - RNA, 19 nt, Artificial Sequence
  Description of Artificial Sequence: Synthetic oligonucleotide
aaucuccgguaccugagca

SEQ ID NO: 1234424 - RNA, 19 nt, Artificial Sequence
  Description of Artificial Sequence: Synthetic oligonucleotide
cuggagcauagaaaguucc

SEQ ID NO: 1234425 - RNA, 19 nt, Artificial Sequence
  Description of Artificial Sequence: Synthetic oligonucleotide
agagagucacuccacgaug

SEQ ID NO: 1234426 - RNA, 19 nt, Artificial Sequence
  Description of Artificial Sequence: Synthetic oligonucleotide
agaaaguuccaaggcuugc

SEQ ID NO: 1234427 - RNA, 19 nt, Artificial Sequence
  Description of Artificial Sequence: Synthetic oligonucleotide
agucuuacuggguaagcga

SEQ ID NO: 1234428 - RNA, 19 nt, Artificial Sequence
  Description of Artificial Sequence: Synthetic oligonucleotide
cauucugagagaaccaaca

SEQ ID NO: 1234429 - RNA, 19 nt, Artificial Sequence
  Description of Artificial Sequence: Synthetic oligonucleotide
acacuaauggagcacucca

SEQ ID NO: 1234430 - RNA, 19 nt, Artificial Sequence
  Description of Artificial Sequence: Synthetic oligonucleotide
uaaacaggucacgagcacc

SEQ ID NO: 1234431 - RNA, 19 nt, Artificial Sequence
  Description of Artificial Sequence: Synthetic oligonucleotide
uuaaauccacacguggaga

SEQ ID NO: 1234432 - RNA, 19 nt, Artificial Sequence
  Description of Artificial Sequence: Synthetic oligonucleotide
uuaauaggggauagagcaa

SEQ ID NO: 1234433 - RNA, 19 nt, Artificial Sequence
  Description of Artificial Sequence: Synthetic oligonucleotide
acagcuaagagaaaggcuu

SEQ ID NO: 1234434 - RNA, 19 nt, Artificial Sequence
  Description of Artificial Sequence: Synthetic oligonucleotide
ugguauccuaguaacugac

SEQ ID NO: 1234435 - RNA, 19 nt, Artificial Sequence
  Description of Artificial Sequence: Synthetic oligonucleotide
ucgagugaggacaccaagu

SEQ ID NO: 1234436 - RNA, 19 nt, Artificial Sequence
  Description of Artificial Sequence: Synthetic oligonucleotide
uucgaucuuagugguaucc

SEQ ID NO: 1234437 - RNA, 19 nt, Artificial Sequence
  Description of Artificial Sequence: Synthetic oligonucleotide
acuguacuauuuugcauca

SEQ ID NO: 1234438 - RNA, 19 nt, Artificial Sequence
  Description of Artificial Sequence: Synthetic oligonucleotide
cagcaaaagcuucauuuag

SEQ ID NO: 1234439 - RNA, 19 nt, Artificial Sequence
  Description of Artificial Sequence: Synthetic oligonucleotide
aucacugauagugucugag

SEQ ID NO: 1234440 - RNA, 19 nt, Artificial Sequence
  Description of Artificial Sequence: Synthetic oligonucleotide
aaagguuuagggacaccag

SEQ ID NO: 1234441 - RNA, 19 nt, Artificial Sequence
  Description of Artificial Sequence: Synthetic oligonucleotide
cacguggagauuuguauug

SEQ ID NO: 1234442 - RNA, 19 nt, Artificial Sequence
  Description of Artificial Sequence: Synthetic oligonucleotide
caguucacccauauccagg

SEQ ID NO: 1234443 - RNA, 19 nt, Artificial Sequence
  Description of Artificial Sequence: Synthetic oligonucleotide
acgagcaccaaugucaaca

SEQ ID NO: 1234444 - RNA, 19 nt, Artificial Sequence
  Description of Artificial Sequence: Synthetic oligonucleotide
uccagaggauacagauucg

SEQ ID NO: 1234445 - RNA, 19 nt, Artificial Sequence
  Description of Artificial Sequence: Synthetic oligonucleotide
uuuguacaagauugcuuga

SEQ ID NO: 1234446 - RNA, 19 nt, Artificial Sequence
  Description of Artificial Sequence: Synthetic oligonucleotide
ggccauauaaaagauauga

SEQ ID NO: 1234447 - RNA, 19 nt, Artificial Sequence
  Description of Artificial Sequence: Synthetic oligonucleotide
ggagauuuguauugaauca

SEQ ID NO: 1234448 - RNA, 19 nt, Artificial Sequence
  Description of Artificial Sequence: Synthetic oligonucleotide
aaguggucuugcuggagca

SEQ ID NO: 1234449 - RNA, 19 nt, Artificial Sequence
  Description of Artificial Sequence: Synthetic oligonucleotide
gucacgagcaccaauguca

SEQ ID NO: 1234450 - RNA, 19 nt, Artificial Sequence
  Description of Artificial Sequence: Synthetic oligonucleotide
uggagcauagaaaguucca

SEQ ID NO: 1234451 - RNA, 19 nt, Artificial Sequence
  Description of Artificial Sequence: Synthetic oligonucleotide
ugggaaacaacaggaggag

SEQ ID NO: 1234452 - RNA, 19 nt, Artificial Sequence
  Description of Artificial Sequence: Synthetic oligonucleotide
guaggauuccugcaacagc

SEQ ID NO: 1234453 - RNA, 19 nt, Artificial Sequence
  Description of Artificial Sequence: Synthetic oligonucleotide
acaccaagccaaaaugaac

SEQ ID NO: 1234454 - RNA, 19 nt, Artificial Sequence
  Description of Artificial Sequence: Synthetic oligonucleotide
guaagaagagcaucacuga

SEQ ID NO: 1234455 - RNA, 19 nt, Artificial Sequence
  Description of Artificial Sequence: Synthetic oligonucleotide
uggagcacuccacugugca

SEQ ID NO: 1234456 - RNA, 19 nt, Artificial Sequence
  Description of Artificial Sequence: Synthetic oligonucleotide
caggucacgagcaccaaug

SEQ ID NO: 1234457 - RNA, 19 nt, Artificial Sequence
  Description of Artificial Sequence: Synthetic oligonucleotide
auagugucugagaugagcu

SEQ ID NO: 1234458 - RNA, 19 nt, Artificial Sequence
  Description of Artificial Sequence: Synthetic oligonucleotide
uaggggauagagcaauguc

SEQ ID NO: 1234459 - RNA, 19 nt, Artificial Sequence
  Description of Artificial Sequence: Synthetic oligonucleotide
ccauaaacaggucacgagc

SEQ ID NO: 1234460 - RNA, 19 nt, Artificial Sequence
  Description of Artificial Sequence: Synthetic oligonucleotide
augucacaugcucuucuuc

SEQ ID NO: 1234461 - RNA, 19 nt, Artificial Sequence
  Description of Artificial Sequence: Synthetic oligonucleotide
agugaggacaccaaguuua

SEQ ID NO: 1234462 - RNA, 19 nt, Artificial Sequence
  Description of Artificial Sequence: Synthetic oligonucleotide
ucacugauagugucugaga

SEQ ID NO: 1234463 - RNA, 19 nt, Artificial Sequence
  Description of Artificial Sequence: Synthetic oligonucleotide
ggagaucauagauuucucc

SEQ ID NO: 1234464 - RNA, 19 nt, Artificial Sequence
  Description of Artificial Sequence: Synthetic oligonucleotide
guaccugagcaaguggugg

SEQ ID NO: 1234465 - RNA, 19 nt, Artificial Sequence
  Description of Artificial Sequence: Synthetic oligonucleotide
ugagcuucauagagaauua

SEQ ID NO: 1234466 - RNA, 19 nt, Artificial Sequence
  Description of Artificial Sequence: Synthetic oligonucleotide
aaaucuccuggcauacuug

SEQ ID NO: 1234467 - RNA, 19 nt, Artificial Sequence
  Description of Artificial Sequence: Synthetic oligonucleotide
ucuccgguaccugagcaag

SEQ ID NO: 1234468 - RNA, 19 nt, Artificial Sequence
  Description of Artificial Sequence: Synthetic oligonucleotide
cauucaccucaucacagug

SEQ ID NO: 1234469 - RNA, 19 nt, Artificial Sequence
  Description of Artificial Sequence: Synthetic oligonucleotide
cugacaaagcacugcuggc

SEQ ID NO: 1234470 - RNA, 19 nt, Artificial Sequence
  Description of Artificial Sequence: Synthetic oligonucleotide
agcuggauguuaauagggg

SEQ ID NO: 1234471 - RNA, 19 nt, Artificial Sequence
  Description of Artificial Sequence: Synthetic oligonucleotide
caccucaucacaguggaug

SEQ ID NO: 1234472 - RNA, 19 nt, Artificial Sequence
  Description of Artificial Sequence: Synthetic oligonucleotide
gcgaucuucagccaagagc

SEQ ID NO: 1234473 - RNA, 19 nt, Artificial Sequence
  Description of Artificial Sequence: Synthetic oligonucleotide
aauugccugucuguuagaa

SEQ ID NO: 1234474 - RNA, 19 nt, Artificial Sequence
  Description of Artificial Sequence: Synthetic oligonucleotide
ugagcuuccccaccaggcu

SEQ ID NO: 1234475 - RNA, 19 nt, Artificial Sequence
  Description of Artificial Sequence: Synthetic oligonucleotide
uccacacuaauggagcacu

SEQ ID NO: 1234476 - RNA, 19 nt, Artificial Sequence
  Description of Artificial Sequence: Synthetic oligonucleotide
gcuuggauccaguggaagg

SEQ ID NO: 1234477 - RNA, 19 nt, Artificial Sequence
  Description of Artificial Sequence: Synthetic oligonucleotide
cuaaggagaugguucacga

SEQ ID NO: 1234478 - RNA, 19 nt, Artificial Sequence
  Description of Artificial Sequence: Synthetic oligonucleotide
aucuuagugguauccuagu

SEQ ID NO: 1234479 - RNA, 19 nt, Artificial Sequence
  Description of Artificial Sequence: Synthetic oligonucleotide
caccaaguuuaaacaacag

SEQ ID NO: 1234480 - RNA, 19 nt, Artificial Sequence
  Description of Artificial Sequence: Synthetic oligonucleotide
uuagugugucucuuuuguc

SEQ ID NO: 1234481 - RNA, 19 nt, Artificial Sequence
  Description of Artificial Sequence: Synthetic oligonucleotide
cacacuguacuauuuugca

SEQ ID NO: 1234482 - RNA, 19 nt, Artificial Sequence
  Description of Artificial Sequence: Synthetic oligonucleotide
uuugucuaaggagaugguu

SEQ ID NO: 1234483 - RNA, 19 nt, Artificial Sequence
  Description of Artificial Sequence: Synthetic oligonucleotide
caaagucuuacuggguaag

SEQ ID NO: 1234484 - RNA, 19 nt, Artificial Sequence
  Description of Artificial Sequence: Synthetic oligonucleotide
cuugccacuucagccaggg

SEQ ID NO: 1234485 - RNA, 19 nt, Artificial Sequence
  Description of Artificial Sequence: Synthetic oligonucleotide
cagaggauacagauucgac

SEQ ID NO: 1234486 - RNA, 19 nt, Artificial Sequence
  Description of Artificial Sequence: Synthetic oligonucleotide
ucaggguguuuauugcuuc

SEQ ID NO: 1234487 - RNA, 19 nt, Artificial Sequence
  Description of Artificial Sequence: Synthetic oligonucleotide
caucacaguggauguacug

SEQ ID NO: 1234488 - RNA, 19 nt, Artificial Sequence
  Description of Artificial Sequence: Synthetic oligonucleotide
uagugguauccuaguaacu

SEQ ID NO: 1234489 - RNA, 19 nt, Artificial Sequence
  Description of Artificial Sequence: Synthetic oligonucleotide
ucacgagcaccaaugucaa

SEQ ID NO: 1234490 - RNA, 19 nt, Artificial Sequence
  Description of Artificial Sequence: Synthetic oligonucleotide
uuugcucagcacacacugu

SEQ ID NO: 1234491 - RNA, 19 nt, Artificial Sequence
  Description of Artificial Sequence: Synthetic oligonucleotide
auggcgcucaugcugacaa

SEQ ID NO: 1234492 - RNA, 19 nt, Artificial Sequence
  Description of Artificial Sequence: Synthetic oligonucleotide
ucuuacuggguaagcgauc

SEQ ID NO: 1234493 - RNA, 19 nt, Artificial Sequence
  Description of Artificial Sequence: Synthetic oligonucleotide
cacuaauggagcacuccac

SEQ ID NO: 1234494 - RNA, 19 nt, Artificial Sequence
  Description of Artificial Sequence: Synthetic oligonucleotide
cuuauuaaugaaggcagaa

SEQ ID NO: 1234495 - RNA, 19 nt, Artificial Sequence
  Description of Artificial Sequence: Synthetic oligonucleotide
cucgagugaggacaccaag

SEQ ID NO: 1234496 - RNA, 19 nt, Artificial Sequence
  Description of Artificial Sequence: Synthetic oligonucleotide
acacuguacuauuuugcau

SEQ ID NO: 1234497 - RNA, 19 nt, Artificial Sequence
  Description of Artificial Sequence: Synthetic oligonucleotide
gugucucuuuuguccaagg

SEQ ID NO: 1234498 - RNA, 19 nt, Artificial Sequence
  Description of Artificial Sequence: Synthetic oligonucleotide
cccggaaagguuuagggac

SEQ ID NO: 1234499 - RNA, 19 nt, Artificial Sequence
  Description of Artificial Sequence: Synthetic oligonucleotide
cacacuaauggagcacucc

SEQ ID NO: 1234500 - RNA, 19 nt, Artificial Sequence
  Description of Artificial Sequence: Synthetic oligonucleotide
aguucgauuccagaggaua

SEQ ID NO: 1234501 - RNA, 19 nt, Artificial Sequence
  Description of Artificial Sequence: Synthetic oligonucleotide
uugcaaagucuuacugggu

SEQ ID NO: 1234502 - RNA, 19 nt, Artificial Sequence
  Description of Artificial Sequence: Synthetic oligonucleotide
ucauuuagugugucucuuu

SEQ ID NO: 1234503 - RNA, 19 nt, Artificial Sequence
  Description of Artificial Sequence: Synthetic oligonucleotide
agggcaagguaaugaauau

SEQ ID NO: 1234504 - RNA, 19 nt, Artificial Sequence
  Description of Artificial Sequence: Synthetic oligonucleotide
ucuguuagaaggguccauu

SEQ ID NO: 1234505 - RNA, 19 nt, Artificial Sequence
  Description of Artificial Sequence: Synthetic oligonucleotide
auguacuggaagaugaguu

SEQ ID NO: 1234506 - RNA, 19 nt, Artificial Sequence
  Description of Artificial Sequence: Synthetic oligonucleotide
cuggguaagcgaucuucag

SEQ ID NO: 1234507 - RNA, 19 nt, Artificial Sequence
  Description of Artificial Sequence: Synthetic oligonucleotide
gauguuaauaggggauaga

SEQ ID NO: 1234508 - RNA, 19 nt, Artificial Sequence
  Description of Artificial Sequence: Synthetic oligonucleotide
agguuuagggacaccagca

SEQ ID NO: 1234509 - RNA, 19 nt, Artificial Sequence
  Description of Artificial Sequence: Synthetic oligonucleotide
gugguauccuaguaacuga

SEQ ID NO: 1234510 - RNA, 19 nt, Artificial Sequence
  Description of Artificial Sequence: Synthetic oligonucleotide
ugauagugucugagaugag

SEQ ID NO: 1234511 - RNA, 19 nt, Artificial Sequence
  Description of Artificial Sequence: Synthetic oligonucleotide
cagggcaagguaaugaaua

SEQ ID NO: 1234512 - RNA, 19 nt, Artificial Sequence
  Description of Artificial Sequence: Synthetic oligonucleotide
guucgauuccagaggauac

SEQ ID NO: 1234513 - RNA, 19 nt, Artificial Sequence
  Description of Artificial Sequence: Synthetic oligonucleotide
aaccauucugagagaacca

SEQ ID NO: 1234514 - RNA, 19 nt, Artificial Sequence
  Description of Artificial Sequence: Synthetic oligonucleotide
auaggggauagagcaaugu

SEQ ID NO: 1234515 - RNA, 19 nt, Artificial Sequence
  Description of Artificial Sequence: Synthetic oligonucleotide
aaccugaggaagaggagau

SEQ ID NO: 1234516 - RNA, 19 nt, Artificial Sequence
  Description of Artificial Sequence: Synthetic oligonucleotide
uccucgagugaggacacca

SEQ ID NO: 1234517 - RNA, 19 nt, Artificial Sequence
  Description of Artificial Sequence: Synthetic oligonucleotide
gagaauuacugaagaaucu

SEQ ID NO: 1234518 - RNA, 19 nt, Artificial Sequence
  Description of Artificial Sequence: Synthetic oligonucleotide
ugauggccuucgaucuuag

SEQ ID NO: 1234519 - RNA, 19 nt, Artificial Sequence
  Description of Artificial Sequence: Synthetic oligonucleotide
ucgaucuuagugguauccu

SEQ ID NO: 1234520 - RNA, 19 nt, Artificial Sequence
  Description of Artificial Sequence: Synthetic oligonucleotide
ggauagagcaaugucaaaa

SEQ ID NO: 1234521 - RNA, 19 nt, Artificial Sequence
  Description of Artificial Sequence: Synthetic oligonucleotide
gagagucacuccacgauga

SEQ ID NO: 1234522 - RNA, 19 nt, Artificial Sequence
  Description of Artificial Sequence: Synthetic oligonucleotide
uccgguaccugagcaagug

SEQ ID NO: 1234523 - RNA, 19 nt, Artificial Sequence
  Description of Artificial Sequence: Synthetic oligonucleotide
augaguucuaccaggccca

SEQ ID NO: 1234524 - RNA, 19 nt, Artificial Sequence
  Description of Artificial Sequence: Synthetic oligonucleotide
uguauugaaucagggccau

SEQ ID NO: 1234525 - RNA, 19 nt, Artificial Sequence
  Description of Artificial Sequence: Synthetic oligonucleotide
ugguucacgauggcgcuca

SEQ ID NO: 1234526 - RNA, 19 nt, Artificial Sequence
  Description of Artificial Sequence: Synthetic oligonucleotide
uucauuuagugugucucuu

SEQ ID NO: 1234527 - RNA, 19 nt, Artificial Sequence
  Description of Artificial Sequence: Synthetic oligonucleotide
agcgaucuucagccaagag

SEQ ID NO: 1234528 - RNA, 19 nt, Artificial Sequence
  Description of Artificial Sequence: Synthetic oligonucleotide
ggaguucgauuccagagga

SEQ ID NO: 1234529 - RNA, 19 nt, Artificial Sequence
  Description of Artificial Sequence: Synthetic oligonucleotide
guaagcgaucuucagccaa

SEQ ID NO: 1234530 - RNA, 19 nt, Artificial Sequence
  Description of Artificial Sequence: Synthetic oligonucleotide
gagugagccuuugucuaag

SEQ ID NO: 1234531 - RNA, 19 nt, Artificial Sequence
  Description of Artificial Sequence: Synthetic oligonucleotide
cuuggauccaguggaagga

SEQ ID NO: 1234532 - RNA, 19 nt, Artificial Sequence
  Description of Artificial Sequence: Synthetic oligonucleotide
ggauguuaauaggggauag

SEQ ID NO: 1234533 - RNA, 19 nt, Artificial Sequence
  Description of Artificial Sequence: Synthetic oligonucleotide
uagaaggguccauuuggua

SEQ ID NO: 1234534 - RNA, 19 nt, Artificial Sequence
  Description of Artificial Sequence: Synthetic oligonucleotide
aguggauguacuggaagau

SEQ ID NO: 1234535 - RNA, 19 nt, Artificial Sequence
  Description of Artificial Sequence: Synthetic oligonucleotide
uccuaguaacugacaugca

SEQ ID NO: 1234536 - RNA, 19 nt, Artificial Sequence
  Description of Artificial Sequence: Synthetic oligonucleotide
caagagagucacuccacga

SEQ ID NO: 1234537 - RNA, 19 nt, Artificial Sequence
  Description of Artificial Sequence: Synthetic oligonucleotide
agagcaucacugauagugu

SEQ ID NO: 1234538 - RNA, 19 nt, Artificial Sequence
  Description of Artificial Sequence: Synthetic oligonucleotide
ugucaauugccugucuguu

SEQ ID NO: 1234539 - RNA, 19 nt, Artificial Sequence
  Description of Artificial Sequence: Synthetic oligonucleotide
ucucucuggagugagccuu

SEQ ID NO: 1234540 - RNA, 19 nt, Artificial Sequence
  Description of Artificial Sequence: Synthetic oligonucleotide
cuugggccaagagagucac

SEQ ID NO: 1234541 - RNA, 19 nt, Artificial Sequence
  Description of Artificial Sequence: Synthetic oligonucleotide
uuccggacacauucauaga

SEQ ID NO: 1234542 - RNA, 19 nt, Artificial Sequence
  Description of Artificial Sequence: Synthetic oligonucleotide
agcuauccacugcauuugu

SEQ ID NO: 1234543 - RNA, 19 nt, Artificial Sequence
  Description of Artificial Sequence: Synthetic oligonucleotide
ggucucuguauuccaaaac

SEQ ID NO: 1234544 - RNA, 19 nt, Artificial Sequence
  Description of Artificial Sequence: Synthetic oligonucleotide
ggaggagcuauccacugca

SEQ ID NO: 1234545 - RNA, 19 nt, Artificial Sequence
  Description of Artificial Sequence: Synthetic oligonucleotide
auccagggcaagguaauga

SEQ ID NO: 1234546 - RNA, 19 nt, Artificial Sequence
  Description of Artificial Sequence: Synthetic oligonucleotide
cuauuuugcaucaguuccu

SEQ ID NO: 1234547 - RNA, 19 nt, Artificial Sequence
  Description of Artificial Sequence: Synthetic oligonucleotide
gguuuagggacaccagcac

SEQ ID NO: 1234548 - RNA, 19 nt, Artificial Sequence
  Description of Artificial Sequence: Synthetic oligonucleotide
acccacagguccucuguug

SEQ ID NO: 1234549 - RNA, 19 nt, Artificial Sequence
  Description of Artificial Sequence: Synthetic oligonucleotide
uuagggacaccagcacaca

SEQ ID NO: 1234550 - RNA, 19 nt, Artificial Sequence
  Description of Artificial Sequence: Synthetic oligonucleotide
acuggguaagcgaucuuca

SEQ ID NO: 1234551 - RNA, 19 nt, Artificial Sequence
  Description of Artificial Sequence: Synthetic oligonucleotide
cagauucgacaucaauguc

SEQ ID NO: 1234552 - RNA, 19 nt, Artificial Sequence
  Description of Artificial Sequence: Synthetic oligonucleotide
uccauuugcucagcacaca

SEQ ID NO: 1234553 - RNA, 19 nt, Artificial Sequence
  Description of Artificial Sequence: Synthetic oligonucleotide
uucugucaauugccugucu

SEQ ID NO: 1234554 - RNA, 19 nt, Artificial Sequence
  Description of Artificial Sequence: Synthetic oligonucleotide
ucacuccacgaugagcuuc

SEQ ID NO: 1234555 - RNA, 19 nt, Artificial Sequence
  Description of Artificial Sequence: Synthetic oligonucleotide
gaugguucacgauggcgcu

SEQ ID NO: 1234556 - RNA, 19 nt, Artificial Sequence
  Description of Artificial Sequence: Synthetic oligonucleotide
agaggagaucauagauuuc

SEQ ID NO: 1234557 - RNA, 19 nt, Artificial Sequence
  Description of Artificial Sequence: Synthetic oligonucleotide
cugagagaaccaacaucuc

SEQ ID NO: 1234558 - RNA, 19 nt, Artificial Sequence
  Description of Artificial Sequence: Synthetic oligonucleotide
auugaauugcaaagucuua

SEQ ID NO: 1234559 - RNA, 19 nt, Artificial Sequence
  Description of Artificial Sequence: Synthetic oligonucleotide
aagcgaucuucagccaaga

SEQ ID NO: 1234560 - RNA, 19 nt, Artificial Sequence
  Description of Artificial Sequence: Synthetic oligonucleotide
gaaggguccauuugguauu

SEQ ID NO: 1234561 - RNA, 19 nt, Artificial Sequence
  Description of Artificial Sequence: Synthetic oligonucleotide
aucauagauuucuccucuu

SEQ ID NO: 1234562 - RNA, 19 nt, Artificial Sequence
  Description of Artificial Sequence: Synthetic oligonucleotide
gugagccuuugucuaagga

SEQ ID NO: 1234563 - RNA, 19 nt, Artificial Sequence
  Description of Artificial Sequence: Synthetic oligonucleotide
acaggucacgagcaccaau

SEQ ID NO: 1234564 - RNA, 19 nt, Artificial Sequence
  Description of Artificial Sequence: Synthetic oligonucleotide
ugaguucuaccaggcccag

SEQ ID NO: 1234565 - RNA, 19 nt, Artificial Sequence
  Description of Artificial Sequence: Synthetic oligonucleotide
agugagucucgaaaaguuu

SEQ ID NO: 1234566 - RNA, 19 nt, Artificial Sequence
  Description of Artificial Sequence: Synthetic oligonucleotide
cuggauguuaauaggggau

SEQ ID NO: 1234567 - RNA, 19 nt, Artificial Sequence
  Description of Artificial Sequence: Synthetic oligonucleotide
cuuucaggcuucugggaaa

SEQ ID NO: 1234568 - RNA, 19 nt, Artificial Sequence
  Description of Artificial Sequence: Synthetic oligonucleotide
caucaaugucacaugcucu

SEQ ID NO: 1234569 - RNA, 19 nt, Artificial Sequence
  Description of Artificial Sequence: Synthetic oligonucleotide
aggagcuauccacugcauu

SEQ ID NO: 1234570 - RNA, 19 nt, Artificial Sequence
  Description of Artificial Sequence: Synthetic oligonucleotide
gcaauggaguuuguuccgg

SEQ ID NO: 1234571 - RNA, 19 nt, Artificial Sequence
  Description of Artificial Sequence: Synthetic oligonucleotide
cauuuguacaagauugcuu

SEQ ID NO: 1234572 - RNA, 19 nt, Artificial Sequence
  Description of Artificial Sequence: Synthetic oligonucleotide
ggccaagagagucacucca

SEQ ID NO: 1234573 - RNA, 19 nt, Artificial Sequence
  Description of Artificial Sequence: Synthetic oligonucleotide
ggcgcucaugcugacaaag

SEQ ID NO: 1234574 - RNA, 19 nt, Artificial Sequence
  Description of Artificial Sequence: Synthetic oligonucleotide
cuuacuggguaagcgaucu

SEQ ID NO: 1234575 - RNA, 19 nt, Artificial Sequence
  Description of Artificial Sequence: Synthetic oligonucleotide
cgacaucaaugucacaugc

SEQ ID NO: 1234576 - RNA, 19 nt, Artificial Sequence
  Description of Artificial Sequence: Synthetic oligonucleotide
caacagcugauggccuucg

SEQ ID NO: 1234577 - RNA, 19 nt, Artificial Sequence
  Description of Artificial Sequence: Synthetic oligonucleotide
agcuuccccaccaggcuuc

SEQ ID NO: 1234578 - RNA, 19 nt, Artificial Sequence
  Description of Artificial Sequence: Synthetic oligonucleotide
cgaucuucagccaagagcu

SEQ ID NO: 1234579 - RNA, 19 nt, Artificial Sequence
  Description of Artificial Sequence: Synthetic oligonucleotide
aucuccgguaccugagcaa

SEQ ID NO: 1234580 - RNA, 19 nt, Artificial Sequence
  Description of Artificial Sequence: Synthetic oligonucleotide
uccacacguggagauuugu

SEQ ID NO: 1234581 - RNA, 19 nt, Artificial Sequence
  Description of Artificial Sequence: Synthetic oligonucleotide
ggguccauuugguauuuuc

SEQ ID NO: 1234582 - RNA, 19 nt, Artificial Sequence
  Description of Artificial Sequence: Synthetic oligonucleotide
cacacguggagauuuguau

SEQ ID NO: 1234583 - RNA, 19 nt, Artificial Sequence
  Description of Artificial Sequence: Synthetic oligonucleotide
caauggaguuuguuccgga

SEQ ID NO: 1234584 - RNA, 19 nt, Artificial Sequence
  Description of Artificial Sequence: Synthetic oligonucleotide
ccuaguaacugacaugcaa

SEQ ID NO: 1234585 - RNA, 19 nt, Artificial Sequence
  Description of Artificial Sequence: Synthetic oligonucleotide
gucaauugccugucuguua

SEQ ID NO: 1234586 - RNA, 19 nt, Artificial Sequence
  Description of Artificial Sequence: Synthetic oligonucleotide
cacugauagugucugagau

SEQ ID NO: 1234587 - RNA, 19 nt, Artificial Sequence
  Description of Artificial Sequence: Synthetic oligonucleotide
ugaaaagggcagguuucuu

SEQ ID NO: 1234588 - RNA, 19 nt, Artificial Sequence
  Description of Artificial Sequence: Synthetic oligonucleotide
cugucaauugccugucugu

SEQ ID NO: 1234589 - RNA, 19 nt, Artificial Sequence
  Description of Artificial Sequence: Synthetic oligonucleotide
ugaggcccggaaagguuua

SEQ ID NO: 1234590 - RNA, 19 nt, Artificial Sequence
  Description of Artificial Sequence: Synthetic oligonucleotide
acguggagauuuguauuga

SEQ ID NO: 1234591 - RNA, 19 nt, Artificial Sequence
  Description of Artificial Sequence: Synthetic oligonucleotide
aggcccggaaagguuuagg

SEQ ID NO: 1234592 - RNA, 19 nt, Artificial Sequence
  Description of Artificial Sequence: Synthetic oligonucleotide
gguaccugagcaaguggug

SEQ ID NO: 1234593 - RNA, 19 nt, Artificial Sequence
  Description of Artificial Sequence: Synthetic oligonucleotide
ggagcauagaaaguuccaa

SEQ ID NO: 1234594 - RNA, 19 nt, Artificial Sequence
  Description of Artificial Sequence: Synthetic oligonucleotide
gcaaagucuuacuggguaa

SEQ ID NO: 1234595 - RNA, 19 nt, Artificial Sequence
  Description of Artificial Sequence: Synthetic oligonucleotide
ggagcugacagauguauuu

SEQ ID NO: 1234596 - RNA, 19 nt, Artificial Sequence
  Description of Artificial Sequence: Synthetic oligonucleotide
gccauauaaaagauaugaa

SEQ ID NO: 1234597 - RNA, 19 nt, Artificial Sequence
  Description of Artificial Sequence: Synthetic oligonucleotide
caacaggaggagcuaucca

SEQ ID NO: 1234598 - RNA, 19 nt, Artificial Sequence
  Description of Artificial Sequence: Synthetic oligonucleotide
aggguguuuauugcuucau

SEQ ID NO: 1234599 - RNA, 19 nt, Artificial Sequence
  Description of Artificial Sequence: Synthetic oligonucleotide
gaguuuguuccggacacau

SEQ ID NO: 1234600 - RNA, 19 nt, Artificial Sequence
  Description of Artificial Sequence: Synthetic oligonucleotide
agcuaagagaaaggcuuuu

SEQ ID NO: 1234601 - RNA, 19 nt, Artificial Sequence
  Description of Artificial Sequence: Synthetic oligonucleotide
ggucacgagcaccaauguc

SEQ ID NO: 1234602 - RNA, 19 nt, Artificial Sequence
  Description of Artificial Sequence: Synthetic oligonucleotide
gugagucucgaaaaguuuu

SEQ ID NO: 1234603 - RNA, 19 nt, Artificial Sequence
  Description of Artificial Sequence: Synthetic oligonucleotide
gggccaagagagucacucc

SEQ ID NO: 1234604 - RNA, 19 nt, Artificial Sequence
  Description of Artificial Sequence: Synthetic oligonucleotide
aacaggucacgagcaccaa

SEQ ID NO: 1234605 - RNA, 19 nt, Artificial Sequence
  Description of Artificial Sequence: Synthetic oligonucleotide
gcuuauuaaugaaggcaga

SEQ ID NO: 1234606 - RNA, 19 nt, Artificial Sequence
  Description of Artificial Sequence: Synthetic oligonucleotide
gagugaggacaccaaguuu

SEQ ID NO: 1234607 - RNA, 19 nt, Artificial Sequence
  Description of Artificial Sequence: Synthetic oligonucleotide
cacaguggauguacuggaa

SEQ ID NO: 1234608 - RNA, 19 nt, Artificial Sequence
  Description of Artificial Sequence: Synthetic oligonucleotide
gauuccugcaacagcugau

SEQ ID NO: 1234609 - RNA, 19 nt, Artificial Sequence
  Description of Artificial Sequence: Synthetic oligonucleotide
gguaagcgaucuucagcca

SEQ ID NO: 1234610 - RNA, 19 nt, Artificial Sequence
  Description of Artificial Sequence: Synthetic oligonucleotide
gucuaaggagaugguucac

SEQ ID NO: 1234611 - RNA, 19 nt, Artificial Sequence
  Description of Artificial Sequence: Synthetic oligonucleotide
gguauccuaguaacugaca

SEQ ID NO: 1234612 - RNA, 19 nt, Artificial Sequence
  Description of Artificial Sequence: Synthetic oligonucleotide
gaggcccggaaagguuuag

SEQ ID NO: 1234613 - RNA, 19 nt, Artificial Sequence
  Description of Artificial Sequence: Synthetic oligonucleotide
gaguucuaccaggcccagc

SEQ ID NO: 1234614 - RNA, 19 nt, Artificial Sequence
  Description of Artificial Sequence: Synthetic oligonucleotide
guggagauuuguauugaau

SEQ ID NO: 1234615 - RNA, 19 nt, Artificial Sequence
  Description of Artificial Sequence: Synthetic oligonucleotide
uugguugcugcagcuuauu

SEQ ID NO: 1234616 - RNA, 19 nt, Artificial Sequence
  Description of Artificial Sequence: Synthetic oligonucleotide
gucuuacuggguaagcgau

SEQ ID NO: 1234617 - RNA, 19 nt, Artificial Sequence
  Description of Artificial Sequence: Synthetic oligonucleotide
ggagcacuccacugugcac

SEQ ID NO: 1234618 - RNA, 19 nt, Artificial Sequence
  Description of Artificial Sequence: Synthetic oligonucleotide
guucacgauggcgcucaug

SEQ ID NO: 1234619 - RNA, 19 nt, Artificial Sequence
  Description of Artificial Sequence: Synthetic oligonucleotide
cacgagcaccaaugucaac

SEQ ID NO: 1234620 - RNA, 19 nt, Artificial Sequence
  Description of Artificial Sequence: Synthetic oligonucleotide
cuugccucaagcugugcuu

SEQ ID NO: 1234621 - RNA, 19 nt, Artificial Sequence
  Description of Artificial Sequence: Synthetic oligonucleotide
caauugccugucuguuaga

SEQ ID NO: 1234622 - RNA, 19 nt, Artificial Sequence
  Description of Artificial Sequence: Synthetic oligonucleotide
ccgguaccugagcaagugg

SEQ ID NO: 1234623 - RNA, 19 nt, Artificial Sequence
  Description of Artificial Sequence: Synthetic oligonucleotide
gggcaagguaaugaauauc

SEQ ID NO: 1234624 - RNA, 19 nt, Artificial Sequence
  Description of Artificial Sequence: Synthetic oligonucleotide
cagcccacaaucaguuugu

SEQ ID NO: 1234625 - RNA, 19 nt, Artificial Sequence
  Description of Artificial Sequence: Synthetic oligonucleotide
ggcccaggaguucgauucc

SEQ ID NO: 1234626 - RNA, 19 nt, Artificial Sequence
  Description of Artificial Sequence: Synthetic oligonucleotide
gaagagcaucacugauagu

SEQ ID NO: 1234627 - RNA, 19 nt, Artificial Sequence
  Description of Artificial Sequence: Synthetic oligonucleotide
cugauggccuucgaucuua

SEQ ID NO: 1234628 - RNA, 19 nt, Artificial Sequence
  Description of Artificial Sequence: Synthetic oligonucleotide
aguuuguuccggacacauu

SEQ ID NO: 1234629 - RNA, 19 nt, Artificial Sequence
  Description of Artificial Sequence: Synthetic oligonucleotide
aggagcugacagauguauu

SEQ ID NO: 1234630 - RNA, 19 nt, Artificial Sequence
  Description of Artificial Sequence: Synthetic oligonucleotide
uggcgcucaugcugacaaa

SEQ ID NO: 1234631 - RNA, 19 nt, Artificial Sequence
  Description of Artificial Sequence: Synthetic oligonucleotide
ccggaaagguuuagggaca

SEQ ID NO: 1234632 - RNA, 19 nt, Artificial Sequence
  Description of Artificial Sequence: Synthetic oligonucleotide
cugaggcccggaaagguuu

SEQ ID NO: 1234633 - RNA, 19 nt, Artificial Sequence
  Description of Artificial Sequence: Synthetic oligonucleotide
gcucaggguguuuauugcu

SEQ ID NO: 1234634 - RNA, 19 nt, Artificial Sequence
  Description of Artificial Sequence: Synthetic oligonucleotide
caacucuuucagugagucu

SEQ ID NO: 1234635 - RNA, 19 nt, Artificial Sequence
  Description of Artificial Sequence: Synthetic oligonucleotide
gcuguccucgagugaggac

SEQ ID NO: 1234636 - RNA, 19 nt, Artificial Sequence
  Description of Artificial Sequence: Synthetic oligonucleotide
ccaggaguucgauuccaga

SEQ ID NO: 1234637 - RNA, 19 nt, Artificial Sequence
  Description of Artificial Sequence: Synthetic oligonucleotide
ccacacuaauggagcacuc

SEQ ID NO: 1234638 - RNA, 19 nt, Artificial Sequence
  Description of Artificial Sequence: Synthetic oligonucleotide
cagcuaagagaaaggcuuu

SEQ ID NO: 1234639 - RNA, 19 nt, Artificial Sequence
  Description of Artificial Sequence: Synthetic oligonucleotide
ggccuucgaucuuaguggu

SEQ ID NO: 1234640 - RNA, 19 nt, Artificial Sequence
  Description of Artificial Sequence: Synthetic oligonucleotide
cugugcacacaugguaagu

SEQ ID NO: 1234641 - RNA, 19 nt, Artificial Sequence
  Description of Artificial Sequence: Synthetic oligonucleotide
guccucgagugaggacacc

SEQ ID NO: 1234642 - RNA, 19 nt, Artificial Sequence
  Description of Artificial Sequence: Synthetic oligonucleotide
guauugaaucagggccaua

SEQ ID NO: 1234643 - RNA, 19 nt, Artificial Sequence
  Description of Artificial Sequence: Synthetic oligonucleotide
gggugucccaguucaugcu

SEQ ID NO: 1234644 - RNA, 19 nt, Artificial Sequence
  Description of Artificial Sequence: Synthetic oligonucleotide
cgaucuuagugguauccua

SEQ ID NO: 1234645 - RNA, 19 nt, Artificial Sequence
  Description of Artificial Sequence: Synthetic oligonucleotide
ggguguuuauugcuucauu

SEQ ID NO: 1234646 - RNA, 19 nt, Artificial Sequence
  Description of Artificial Sequence: Synthetic oligonucleotide
gaguucgauuccagaggau

SEQ ID NO: 1234647 - RNA, 19 nt, Artificial Sequence
  Description of Artificial Sequence: Synthetic oligonucleotide
gaggagcuauccacugcau

SEQ ID NO: 1234648 - RNA, 19 nt, Artificial Sequence
  Description of Artificial Sequence: Synthetic oligonucleotide
ccacacguggagauuugua

SEQ ID NO: 1234649 - RNA, 19 nt, Artificial Sequence
  Description of Artificial Sequence: Synthetic oligonucleotide
cgauuccagaggauacaga

SEQ ID NO: 1234650 - RNA, 19 nt, Artificial Sequence
  Description of Artificial Sequence: Synthetic oligonucleotide
cuccgguaccugagcaagu

SEQ ID NO: 1234651 - RNA, 19 nt, Artificial Sequence
  Description of Artificial Sequence: Synthetic oligonucleotide
ccucgagugaggacaccaa

SEQ ID NO: 1234652 - RNA, 19 nt, Artificial Sequence
  Description of Artificial Sequence: Synthetic oligonucleotide
cuccaauguccuguccccu

SEQ ID NO: 1234653 - RNA, 19 nt, Artificial Sequence
  Description of Artificial Sequence: Synthetic oligonucleotide
gucacuccacgaugagcuu

SEQ ID NO: 1234654 - RNA, 19 nt, Artificial Sequence
  Description of Artificial Sequence: Synthetic oligonucleotide
cgguaccugagcaaguggu

SEQ ID NO: 1234655 - RNA, 19 nt, Artificial Sequence
  Description of Artificial Sequence: Synthetic oligonucleotide
aggguccauuugguauuuu

SEQ ID NO: 1234656 - RNA, 19 nt, Artificial Sequence
  Description of Artificial Sequence: Synthetic oligonucleotide
ccucaagcugugcuucucu

SEQ ID NO: 1234657 - RNA, 19 nt, Artificial Sequence
  Description of Artificial Sequence: Synthetic oligonucleotide
ggcuugccucaagcugugc

SEQ ID NO: 1234658 - RNA, 19 nt, Artificial Sequence
  Description of Artificial Sequence: Synthetic oligonucleotide
gccugucuguuagaagggu

SEQ ID NO: 1234659 - RNA, 19 nt, Artificial Sequence
  Description of Artificial Sequence: Synthetic oligonucleotide
cgauggcgcucaugcugac

SEQ ID NO: 1234660 - RNA, 19 nt, Artificial Sequence
  Description of Artificial Sequence: Synthetic oligonucleotide
cagccaagagcuggauguu

SEQ ID NO: 1234661 - RNA, 19 nt, Artificial Sequence
  Description of Artificial Sequence: Synthetic oligonucleotide
gccuucgaucuuaguggua

SEQ ID NO: 1234662 - RNA, 19 nt, Artificial Sequence
  Description of Artificial Sequence: Synthetic oligonucleotide
gguucacgauggcgcucau

SEQ ID NO: 1234663 - RNA, 19 nt, Artificial Sequence
  Description of Artificial Sequence: Synthetic oligonucleotide
ccuguccccugcaguacuu

SEQ ID NO: 1234664 - RNA, 19 nt, Artificial Sequence
  Description of Artificial Sequence: Synthetic oligonucleotide
aacguauuuacacauauuc

SEQ ID NO: 1234665 - RNA, 19 nt, Artificial Sequence
  Description of Artificial Sequence: Synthetic oligonucleotide
aauaccaacugcuauauag

SEQ ID NO: 1234666 - RNA, 19 nt, Artificial Sequence
  Description of Artificial Sequence: Synthetic oligonucleotide
uuugguaggaauuaaaucc

SEQ ID NO: 1234667 - RNA, 19 nt, Artificial Sequence
  Description of Artificial Sequence: Synthetic oligonucleotide
aauaauaguuuucuguuag

SEQ ID NO: 1234668 - RNA, 19 nt, Artificial Sequence
  Description of Artificial Sequence: Synthetic oligonucleotide
gauacaauaagcuuuuccc

SEQ ID NO: 1234669 - RNA, 19 nt, Artificial Sequence
  Description of Artificial Sequence: Synthetic oligonucleotide
ugaucaauauaaauaauag

SEQ ID NO: 1234670 - RNA, 19 nt, Artificial Sequence
  Description of Artificial Sequence: Synthetic oligonucleotide
agcauuaucaaucugaacu

SEQ ID NO: 1234671 - RNA, 19 nt, Artificial Sequence
  Description of Artificial Sequence: Synthetic oligonucleotide
uaaauuuaagcaauguaag

SEQ ID NO: 1234672 - RNA, 19 nt, Artificial Sequence
  Description of Artificial Sequence: Synthetic oligonucleotide
uauuguuaguuuaagauga

SEQ ID NO: 1234673 - RNA, 19 nt, Artificial Sequence
  Description of Artificial Sequence: Synthetic oligonucleotide
aggaagacaauauuaaaac

SEQ ID NO: 1234674 - RNA, 19 nt, Artificial Sequence
  Description of Artificial Sequence: Synthetic oligonucleotide
aauaaaacccgcaagagcu

SEQ ID NO: 1234675 - RNA, 19 nt, Artificial Sequence
  Description of Artificial Sequence: Synthetic oligonucleotide
acugucuugcauuaaaucg

SEQ ID NO: 1234676 - RNA, 19 nt, Artificial Sequence
  Description of Artificial Sequence: Synthetic oligonucleotide
uguacaauuaauuuacaga

SEQ ID NO: 1234677 - RNA, 19 nt, Artificial Sequence
  Description of Artificial Sequence: Synthetic oligonucleotide
uuagaaacuauuugguagg

SEQ ID NO: 1234678 - RNA, 19 nt, Artificial Sequence
  Description of Artificial Sequence: Synthetic oligonucleotide
uguauuguuaguuuaagau

SEQ ID NO: 1234679 - RNA, 19 nt, Artificial Sequence
  Description of Artificial Sequence: Synthetic oligonucleotide
auaagauaaacugaagaac

SEQ ID NO: 1234680 - RNA, 19 nt, Artificial Sequence
  Description of Artificial Sequence: Synthetic oligonucleotide
aaaucgaucucucacagaa

SEQ ID NO: 1234681 - RNA, 19 nt, Artificial Sequence
  Description of Artificial Sequence: Synthetic oligonucleotide
uuugcaucucgauacaagg

SEQ ID NO: 1234682 - RNA, 19 nt, Artificial Sequence
  Description of Artificial Sequence: Synthetic oligonucleotide
ucuaauguaauaguuaccu

SEQ ID NO: 1234683 - RNA, 19 nt, Artificial Sequence
  Description of Artificial Sequence: Synthetic oligonucleotide
uucauuggauacaauaagc

SEQ ID NO: 1234684 - RNA, 19 nt, Artificial Sequence
  Description of Artificial Sequence: Synthetic oligonucleotide
aagacauauuguucuacgg

SEQ ID NO: 1234685 - RNA, 19 nt, Artificial Sequence
  Description of Artificial Sequence: Synthetic oligonucleotide
auuugguaggaauuaaauc

SEQ ID NO: 1234686 - RNA, 19 nt, Artificial Sequence
  Description of Artificial Sequence: Synthetic oligonucleotide
aacguaguuucauucuuac

SEQ ID NO: 1234687 - RNA, 19 nt, Artificial Sequence
  Description of Artificial Sequence: Synthetic oligonucleotide
gauaagauaaacugaagaa

SEQ ID NO: 1234688 - RNA, 19 nt, Artificial Sequence
  Description of Artificial Sequence: Synthetic oligonucleotide
agauaagauaaacugaaga

SEQ ID NO: 1234689 - RNA, 19 nt, Artificial Sequence
  Description of Artificial Sequence: Synthetic oligonucleotide
uuuacagucaucucuguac

SEQ ID NO: 1234690 - RNA, 19 nt, Artificial Sequence
  Description of Artificial Sequence: Synthetic oligonucleotide
aacugucuugcauuaaauc

SEQ ID NO: 1234691 - RNA, 19 nt, Artificial Sequence
  Description of Artificial Sequence: Synthetic oligonucleotide
cuaaauuuaagcaauguaa

SEQ ID NO: 1234692 - RNA, 19 nt, Artificial Sequence
  Description of Artificial Sequence: Synthetic oligonucleotide
uaagacauauuguucuacg

SEQ ID NO: 1234693 - RNA, 19 nt, Artificial Sequence
  Description of Artificial Sequence: Synthetic oligonucleotide
uuaaaucgaucucucacag

SEQ ID NO: 1234694 - RNA, 19 nt, Artificial Sequence
  Description of Artificial Sequence: Synthetic oligonucleotide
aaggcuauuaagcuuaaaa

SEQ ID NO: 1234695 - RNA, 19 nt, Artificial Sequence
  Description of Artificial Sequence: Synthetic oligonucleotide
aaugauuuaacaugaccaa

SEQ ID NO: 1234696 - RNA, 19 nt, Artificial Sequence
  Description of Artificial Sequence: Synthetic oligonucleotide
aucaauauaaauaauaguu

SEQ ID NO: 1234697 - RNA, 19 nt, Artificial Sequence
  Description of Artificial Sequence: Synthetic oligonucleotide
uaauaaaacccgcaagagc

SEQ ID NO: 1234698 - RNA, 19 nt, Artificial Sequence
  Description of Artificial Sequence: Synthetic oligonucleotide
uuagcugccauucuagucu

SEQ ID NO: 1234699 - RNA, 19 nt, Artificial Sequence
  Description of Artificial Sequence: Synthetic oligonucleotide
uucacaagaaggcaagcag

SEQ ID NO: 1234700 - RNA, 19 nt, Artificial Sequence
  Description of Artificial Sequence: Synthetic oligonucleotide
cuugaguuuacucauguac

SEQ ID NO: 1234701 - RNA, 19 nt, Artificial Sequence
  Description of Artificial Sequence: Synthetic oligonucleotide
cuuuucgauacuaugcugc

SEQ ID NO: 1234702 - RNA, 19 nt, Artificial Sequence
  Description of Artificial Sequence: Synthetic oligonucleotide
aacaugaccaauaaaauuu

SEQ ID NO: 1234703 - RNA, 19 nt, Artificial Sequence
  Description of Artificial Sequence: Synthetic oligonucleotide
uauaggagucaauucaaag

SEQ ID NO: 1234704 - RNA, 19 nt, Artificial Sequence
  Description of Artificial Sequence: Synthetic oligonucleotide
aggcuauuaagcuuaaaag

SEQ ID NO: 1234705 - RNA, 19 nt, Artificial Sequence
  Description of Artificial Sequence: Synthetic oligonucleotide
uuaacagauuuucucaacu

SEQ ID NO: 1234706 - RNA, 19 nt, Artificial Sequence
  Description of Artificial Sequence: Synthetic oligonucleotide
guacuuuuaauaaaacccg

SEQ ID NO: 1234707 - RNA, 19 nt, Artificial Sequence
  Description of Artificial Sequence: Synthetic oligonucleotide
uauuguucuacggauauug

SEQ ID NO: 1234708 - RNA, 19 nt, Artificial Sequence
  Description of Artificial Sequence: Synthetic oligonucleotide
ucuguaucgugucauaaga

SEQ ID NO: 1234709 - RNA, 19 nt, Artificial Sequence
  Description of Artificial Sequence: Synthetic oligonucleotide
ucauuggauacaauaagcu

SEQ ID NO: 1234710 - RNA, 19 nt, Artificial Sequence
  Description of Artificial Sequence: Synthetic oligonucleotide
caaugauuuaacaugacca

SEQ ID NO: 1234711 - RNA, 19 nt, Artificial Sequence
  Description of Artificial Sequence: Synthetic oligonucleotide
guauuguuaguuuaagaug

SEQ ID NO: 1234712 - RNA, 19 nt, Artificial Sequence
  Description of Artificial Sequence: Synthetic oligonucleotide
uguaaccaggacaugaacu

SEQ ID NO: 1234713 - RNA, 19 nt, Artificial Sequence
  Description of Artificial Sequence: Synthetic oligonucleotide
ucugcguccaguaggacag

SEQ ID NO: 1234714 - RNA, 19 nt, Artificial Sequence
  Description of Artificial Sequence: Synthetic oligonucleotide
ucuuacuacuuccuguugc

SEQ ID NO: 1234715 - RNA, 19 nt, Artificial Sequence
  Description of Artificial Sequence: Synthetic oligonucleotide
uacgaaguaucuuauuuug

SEQ ID NO: 1234716 - RNA, 19 nt, Artificial Sequence
  Description of Artificial Sequence: Synthetic oligonucleotide
auuaaaucgaucucucaca

SEQ ID NO: 1234717 - RNA, 19 nt, Artificial Sequence
  Description of Artificial Sequence: Synthetic oligonucleotide
uguaucgugucauaagaca

SEQ ID NO: 1234718 - RNA, 19 nt, Artificial Sequence
  Description of Artificial Sequence: Synthetic oligonucleotide
uuaacgcuuguauuguuag

SEQ ID NO: 1234719 - RNA, 19 nt, Artificial Sequence
  Description of Artificial Sequence: Synthetic oligonucleotide
uuaacaugaccaauaaaau

SEQ ID NO: 1234720 - RNA, 19 nt, Artificial Sequence
  Description of Artificial Sequence: Synthetic oligonucleotide
guuaguuuaagaugaugcc

SEQ ID NO: 1234721 - RNA, 19 nt, Artificial Sequence
  Description of Artificial Sequence: Synthetic oligonucleotide
ucucuguacacguuugagg

SEQ ID NO: 1234722 - RNA, 19 nt, Artificial Sequence
  Description of Artificial Sequence: Synthetic oligonucleotide
cauuaaaucgaucucucac

SEQ ID NO: 1234723 - RNA, 19 nt, Artificial Sequence
  Description of Artificial Sequence: Synthetic oligonucleotide
uguucuacggauauugcuc

SEQ ID NO: 1234724 - RNA, 19 nt, Artificial Sequence
  Description of Artificial Sequence: Synthetic oligonucleotide
acaagagggacguaaaacu

SEQ ID NO: 1234725 - RNA, 19 nt, Artificial Sequence
  Description of Artificial Sequence: Synthetic oligonucleotide
uuuugcaucucgauacaag

SEQ ID NO: 1234726 - RNA, 19 nt, Artificial Sequence
  Description of Artificial Sequence: Synthetic oligonucleotide
aggaauuaaauccuugagu

SEQ ID NO: 1234727 - RNA, 19 nt, Artificial Sequence
  Description of Artificial Sequence: Synthetic oligonucleotide
acaauauuaaaacuuucaa

SEQ ID NO: 1234728 - RNA, 19 nt, Artificial Sequence
  Description of Artificial Sequence: Synthetic oligonucleotide
uuaguuuaagaugaugcca

SEQ ID NO: 1234729 - RNA, 19 nt, Artificial Sequence
  Description of Artificial Sequence: Synthetic oligonucleotide
ucccuuuucgauacuaugc

SEQ ID NO: 1234730 - RNA, 19 nt, Artificial Sequence
  Description of Artificial Sequence: Synthetic oligonucleotide
uauauaggagucaauucaa

SEQ ID NO: 1234731 - RNA, 19 nt, Artificial Sequence
  Description of Artificial Sequence: Synthetic oligonucleotide
uguucuaauguaauaguua

SEQ ID NO: 1234732 - RNA, 19 nt, Artificial Sequence
  Description of Artificial Sequence: Synthetic oligonucleotide
uaguuuaagaugaugccaa

SEQ ID NO: 1234733 - RNA, 19 nt, Artificial Sequence
  Description of Artificial Sequence: Synthetic oligonucleotide
ugucaaauuuaucauccac

SEQ ID NO: 1234734 - RNA, 19 nt, Artificial Sequence
  Description of Artificial Sequence: Synthetic oligonucleotide
aaaagacaggucuuuaguu

SEQ ID NO: 1234735 - RNA, 19 nt, Artificial Sequence
  Description of Artificial Sequence: Synthetic oligonucleotide
uugacuacgaaguaucuua

SEQ ID NO: 1234736 - RNA, 19 nt, Artificial Sequence
  Description of Artificial Sequence: Synthetic oligonucleotide
aauccuugaguuuacucau

SEQ ID NO: 1234737 - RNA, 19 nt, Artificial Sequence
  Description of Artificial Sequence: Synthetic oligonucleotide
uuccugaacauccaaucug

SEQ ID NO: 1234738 - RNA, 19 nt, Artificial Sequence
  Description of Artificial Sequence: Synthetic oligonucleotide
uacauagacccuuaauuac

SEQ ID NO: 1234739 - RNA, 19 nt, Artificial Sequence
  Description of Artificial Sequence: Synthetic oligonucleotide
ugaacggcauuuaaagcug

SEQ ID NO: 1234740 - RNA, 19 nt, Artificial Sequence
  Description of Artificial Sequence: Synthetic oligonucleotide
cucauaaauacugauggac

SEQ ID NO: 1234741 - RNA, 19 nt, Artificial Sequence
  Description of Artificial Sequence: Synthetic oligonucleotide
guauuccacaguuuaacgc

SEQ ID NO: 1234742 - RNA, 19 nt, Artificial Sequence
  Description of Artificial Sequence: Synthetic oligonucleotide
gauacuaugcugcaaacgu

SEQ ID NO: 1234743 - RNA, 19 nt, Artificial Sequence
  Description of Artificial Sequence: Synthetic oligonucleotide
uucgauacuaugcugcaaa

SEQ ID NO: 1234744 - RNA, 19 nt, Artificial Sequence
  Description of Artificial Sequence: Synthetic oligonucleotide
guuaugaaauuuugcaaac

SEQ ID NO: 1234745 - RNA, 19 nt, Artificial Sequence
  Description of Artificial Sequence: Synthetic oligonucleotide
uguuacuugagugcuaaca

SEQ ID NO: 1234746 - RNA, 19 nt, Artificial Sequence
  Description of Artificial Sequence: Synthetic oligonucleotide
aacagauuuucucaacuuu

SEQ ID NO: 1234747 - RNA, 19 nt, Artificial Sequence
  Description of Artificial Sequence: Synthetic oligonucleotide
ugcugccucauuaaaagac

SEQ ID NO: 1234748 - RNA, 19 nt, Artificial Sequence
  Description of Artificial Sequence: Synthetic oligonucleotide
uguaauaguuaccuuugau

SEQ ID NO: 1234749 - RNA, 19 nt, Artificial Sequence
  Description of Artificial Sequence: Synthetic oligonucleotide
uccaguaggacagugcaag

SEQ ID NO: 1234750 - RNA, 19 nt, Artificial Sequence
  Description of Artificial Sequence: Synthetic oligonucleotide
aucgaucucucacagaagu

SEQ ID NO: 1234751 - RNA, 19 nt, Artificial Sequence
  Description of Artificial Sequence: Synthetic oligonucleotide
acguaaaacuccuggaucu

SEQ ID NO: 1234752 - RNA, 19 nt, Artificial Sequence
  Description of Artificial Sequence: Synthetic oligonucleotide
acuacgaaguaucuuauuu

SEQ ID NO: 1234753 - RNA, 19 nt, Artificial Sequence
  Description of Artificial Sequence: Synthetic oligonucleotide
ugguugguuaucuuguuac

SEQ ID NO: 1234754 - RNA, 19 nt, Artificial Sequence
  Description of Artificial Sequence: Synthetic oligonucleotide
ugcaucucgauacaaggaa

SEQ ID NO: 1234755 - RNA, 19 nt, Artificial Sequence
  Description of Artificial Sequence: Synthetic oligonucleotide
cauucuagucucugaacgg

SEQ ID NO: 1234756 - RNA, 19 nt, Artificial Sequence
  Description of Artificial Sequence: Synthetic oligonucleotide
agacauauuguucuacgga

SEQ ID NO: 1234757 - RNA, 19 nt, Artificial Sequence
  Description of Artificial Sequence: Synthetic oligonucleotide
agcucuguaaugaacucgc

SEQ ID NO: 1234758 - RNA, 19 nt, Artificial Sequence
  Description of Artificial Sequence: Synthetic oligonucleotide
aauaguuaccuuugaucaa

SEQ ID NO: 1234759 - RNA, 19 nt, Artificial Sequence
  Description of Artificial Sequence: Synthetic oligonucleotide
uccuuaguuuacuauaaaa

SEQ ID NO: 1234760 - RNA, 19 nt, Artificial Sequence
  Description of Artificial Sequence: Synthetic oligonucleotide
uaguuaacuucacuaacaa

SEQ ID NO: 1234761 - RNA, 19 nt, Artificial Sequence
  Description of Artificial Sequence: Synthetic oligonucleotide
uguucacuacacaagcaac

SEQ ID NO: 1234762 - RNA, 19 nt, Artificial Sequence
  Description of Artificial Sequence: Synthetic oligonucleotide
aguuugucaaauuuaucau

SEQ ID NO: 1234763 - RNA, 19 nt, Artificial Sequence
  Description of Artificial Sequence: Synthetic oligonucleotide
ucugaacggcauuuaaagc

SEQ ID NO: 1234764 - RNA, 19 nt, Artificial Sequence
  Description of Artificial Sequence: Synthetic oligonucleotide
auaagacauauuguucuac

SEQ ID NO: 1234765 - RNA, 19 nt, Artificial Sequence
  Description of Artificial Sequence: Synthetic oligonucleotide
uaacaugaccaauaaaauu

SEQ ID NO: 1234766 - RNA, 19 nt, Artificial Sequence
  Description of Artificial Sequence: Synthetic oligonucleotide
uccugaacauccaaucugu

SEQ ID NO: 1234767 - RNA, 19 nt, Artificial Sequence
  Description of Artificial Sequence: Synthetic oligonucleotide
ugcaaacguaguuucauuc

SEQ ID NO: 1234768 - RNA, 19 nt, Artificial Sequence
  Description of Artificial Sequence: Synthetic oligonucleotide
auuggauacaauaagcuuu

SEQ ID NO: 1234769 - RNA, 19 nt, Artificial Sequence
  Description of Artificial Sequence: Synthetic oligonucleotide
aguuuacaaugauuuaaca

SEQ ID NO: 1234770 - RNA, 19 nt, Artificial Sequence
  Description of Artificial Sequence: Synthetic oligonucleotide
ugccucauuaaaagacagg

SEQ ID NO: 1234771 - RNA, 19 nt, Artificial Sequence
  Description of Artificial Sequence: Synthetic oligonucleotide
ggcuauuaagcuuaaaaga

SEQ ID NO: 1234772 - RNA, 19 nt, Artificial Sequence
  Description of Artificial Sequence: Synthetic oligonucleotide
uacugauggacuuguaggu

SEQ ID NO: 1234773 - RNA, 19 nt, Artificial Sequence
  Description of Artificial Sequence: Synthetic oligonucleotide
uuuaacgcuuguauuguua

SEQ ID NO: 1234774 - RNA, 19 nt, Artificial Sequence
  Description of Artificial Sequence: Synthetic oligonucleotide
gaucaauauaaauaauagu

SEQ ID NO: 1234775 - RNA, 19 nt, Artificial Sequence
  Description of Artificial Sequence: Synthetic oligonucleotide
aagugcaaaaggcuauuaa

SEQ ID NO: 1234776 - RNA, 19 nt, Artificial Sequence
  Description of Artificial Sequence: Synthetic oligonucleotide
aaaggcuauugucaggguu

SEQ ID NO: 1234777 - RNA, 19 nt, Artificial Sequence
  Description of Artificial Sequence: Synthetic oligonucleotide
gaaacuauuugguaggaau

SEQ ID NO: 1234778 - RNA, 19 nt, Artificial Sequence
  Description of Artificial Sequence: Synthetic oligonucleotide
gcuauuaagcuuaaaagac

SEQ ID NO: 1234779 - RNA, 19 nt, Artificial Sequence
  Description of Artificial Sequence: Synthetic oligonucleotide
aacucgcagaacuucuugu

SEQ ID NO: 1234780 - RNA, 19 nt, Artificial Sequence
  Description of Artificial Sequence: Synthetic oligonucleotide
gacguaaaacuccuggauc

SEQ ID NO: 1234781 - RNA, 19 nt, Artificial Sequence
  Description of Artificial Sequence: Synthetic oligonucleotide
uaaauacugauggacuugu

SEQ ID NO: 1234782 - RNA, 19 nt, Artificial Sequence
  Description of Artificial Sequence: Synthetic oligonucleotide
cuaacaacuguaaaggcua

SEQ ID NO: 1234783 - RNA, 19 nt, Artificial Sequence
  Description of Artificial Sequence: Synthetic oligonucleotide
uuguucuacggauauugcu

SEQ ID NO: 1234784 - RNA, 19 nt, Artificial Sequence
  Description of Artificial Sequence: Synthetic oligonucleotide
uuacuugagugcuaacaac

SEQ ID NO: 1234785 - RNA, 19 nt, Artificial Sequence
  Description of Artificial Sequence: Synthetic oligonucleotide
acuaacaacuguaaaggcu

SEQ ID NO: 1234786 - RNA, 19 nt, Artificial Sequence
  Description of Artificial Sequence: Synthetic oligonucleotide
aagcauaccaaaucuuauu

SEQ ID NO: 1234787 - RNA, 19 nt, Artificial Sequence
  Description of Artificial Sequence: Synthetic oligonucleotide
guucuacggauauugcucc

SEQ ID NO: 1234788 - RNA, 19 nt, Artificial Sequence
  Description of Artificial Sequence: Synthetic oligonucleotide
uacucaguuuguucuaaug

SEQ ID NO: 1234789 - RNA, 19 nt, Artificial Sequence
  Description of Artificial Sequence: Synthetic oligonucleotide
aaccaaguuuuacagucau

SEQ ID NO: 1234790 - RNA, 19 nt, Artificial Sequence
  Description of Artificial Sequence: Synthetic oligonucleotide
cuguacacguuugagggcg

SEQ ID NO: 1234791 - RNA, 19 nt, Artificial Sequence
  Description of Artificial Sequence: Synthetic oligonucleotide
agauaaacugaagaacucu

SEQ ID NO: 1234792 - RNA, 19 nt, Artificial Sequence
  Description of Artificial Sequence: Synthetic oligonucleotide
uuuagcugccauucuaguc

SEQ ID NO: 1234793 - RNA, 19 nt, Artificial Sequence
  Description of Artificial Sequence: Synthetic oligonucleotide
cuuaaaaggcaguauucca

SEQ ID NO: 1234794 - RNA, 19 nt, Artificial Sequence
  Description of Artificial Sequence: Synthetic oligonucleotide
uaccaacugcuauauagga

SEQ ID NO: 1234795 - RNA, 19 nt, Artificial Sequence
  Description of Artificial Sequence: Synthetic oligonucleotide
uuuugacuacgaaguaucu

SEQ ID NO: 1234796 - RNA, 19 nt, Artificial Sequence
  Description of Artificial Sequence: Synthetic oligonucleotide
ucucauaaauacugaugga

SEQ ID NO: 1234797 - RNA, 19 nt, Artificial Sequence
  Description of Artificial Sequence: Synthetic oligonucleotide
uuacucauguacuuuuaau

SEQ ID NO: 1234798 - RNA, 19 nt, Artificial Sequence
  Description of Artificial Sequence: Synthetic oligonucleotide
ucauuaaaagacaggucuu

SEQ ID NO: 1234799 - RNA, 19 nt, Artificial Sequence
  Description of Artificial Sequence: Synthetic oligonucleotide
uuggauacaauaagcuuuu

SEQ ID NO: 1234800 - RNA, 19 nt, Artificial Sequence
  Description of Artificial Sequence: Synthetic oligonucleotide
gacccuuaauuacaagaug

SEQ ID NO: 1234801 - RNA, 19 nt, Artificial Sequence
  Description of Artificial Sequence: Synthetic oligonucleotide
auaaauacugauggacuug

SEQ ID NO: 1234802 - RNA, 19 nt, Artificial Sequence
  Description of Artificial Sequence: Synthetic oligonucleotide
cuguuaacagauuuucuca

SEQ ID NO: 1234803 - RNA, 19 nt, Artificial Sequence
  Description of Artificial Sequence: Synthetic oligonucleotide
augcugcaaacguaguuuc

SEQ ID NO: 1234804 - RNA, 19 nt, Artificial Sequence
  Description of Artificial Sequence: Synthetic oligonucleotide
ggauacaauaagcuuuucc

SEQ ID NO: 1234805 - RNA, 19 nt, Artificial Sequence
  Description of Artificial Sequence: Synthetic oligonucleotide
aacgcuuguauuguuaguu

SEQ ID NO: 1234806 - RNA, 19 nt, Artificial Sequence
  Description of Artificial Sequence: Synthetic oligonucleotide
cauauucacaagaaggcaa

SEQ ID NO: 1234807 - RNA, 19 nt, Artificial Sequence
  Description of Artificial Sequence: Synthetic oligonucleotide
ugcuauauaggagucaauu

SEQ ID NO: 1234808 - RNA, 19 nt, Artificial Sequence
  Description of Artificial Sequence: Synthetic oligonucleotide
auauucacaagaaggcaag

SEQ ID NO: 1234809 - RNA, 19 nt, Artificial Sequence
  Description of Artificial Sequence: Synthetic oligonucleotide
gguucccuuguauacauag

SEQ ID NO: 1234810 - RNA, 19 nt, Artificial Sequence
  Description of Artificial Sequence: Synthetic oligonucleotide
uugcaucucgauacaagga

SEQ ID NO: 1234811 - RNA, 19 nt, Artificial Sequence
  Description of Artificial Sequence: Synthetic oligonucleotide
auuguucuacggauauugc

SEQ ID NO: 1234812 - RNA, 19 nt, Artificial Sequence
  Description of Artificial Sequence: Synthetic oligonucleotide
uucccuuuucgauacuaug

SEQ ID NO: 1234813 - RNA, 19 nt, Artificial Sequence
  Description of Artificial Sequence: Synthetic oligonucleotide
uuaaacguauuuacacaua

SEQ ID NO: 1234814 - RNA, 19 nt, Artificial Sequence
  Description of Artificial Sequence: Synthetic oligonucleotide
aguacgaccuccaacagaa

SEQ ID NO: 1234815 - RNA, 19 nt, Artificial Sequence
  Description of Artificial Sequence: Synthetic oligonucleotide
acccuuaauuacaagaugu

SEQ ID NO: 1234816 - RNA, 19 nt, Artificial Sequence
  Description of Artificial Sequence: Synthetic oligonucleotide
auaauaguuuucuguuaga

SEQ ID NO: 1234817 - RNA, 19 nt, Artificial Sequence
  Description of Artificial Sequence: Synthetic oligonucleotide
ccauucuagucucugaacg

SEQ ID NO: 1234818 - RNA, 19 nt, Artificial Sequence
  Description of Artificial Sequence: Synthetic oligonucleotide
uucugcguccaguaggaca

SEQ ID NO: 1234819 - RNA, 19 nt, Artificial Sequence
  Description of Artificial Sequence: Synthetic oligonucleotide
auggcagcguuugauuugc

SEQ ID NO: 1234820 - RNA, 19 nt, Artificial Sequence
  Description of Artificial Sequence: Synthetic oligonucleotide
auccaaucuguaucguguc

SEQ ID NO: 1234821 - RNA, 19 nt, Artificial Sequence
  Description of Artificial Sequence: Synthetic oligonucleotide
gauggugaaucugauguca

SEQ ID NO: 1234822 - RNA, 19 nt, Artificial Sequence
  Description of Artificial Sequence: Synthetic oligonucleotide
auucuuacuacuuccuguu

SEQ ID NO: 1234823 - RNA, 19 nt, Artificial Sequence
  Description of Artificial Sequence: Synthetic oligonucleotide
cagauaagauaaacugaag

SEQ ID NO: 1234824 - RNA, 19 nt, Artificial Sequence
  Description of Artificial Sequence: Synthetic oligonucleotide
uuaaagcugcagcuucgug

SEQ ID NO: 1234825 - RNA, 19 nt, Artificial Sequence
  Description of Artificial Sequence: Synthetic oligonucleotide
uuguaaccaggacaugaac

SEQ ID NO: 1234826 - RNA, 19 nt, Artificial Sequence
  Description of Artificial Sequence: Synthetic oligonucleotide
cugucuugcauuaaaucga

SEQ ID NO: 1234827 - RNA, 19 nt, Artificial Sequence
  Description of Artificial Sequence: Synthetic oligonucleotide
acaugaacugucuugcauu

SEQ ID NO: 1234828 - RNA, 19 nt, Artificial Sequence
  Description of Artificial Sequence: Synthetic oligonucleotide
caagagggacguaaaacuc

SEQ ID NO: 1234829 - RNA, 19 nt, Artificial Sequence
  Description of Artificial Sequence: Synthetic oligonucleotide
uacaaugauuuaacaugac

SEQ ID NO: 1234830 - RNA, 19 nt, Artificial Sequence
  Description of Artificial Sequence: Synthetic oligonucleotide
ugagugcuaacaacuucca

SEQ ID NO: 1234831 - RNA, 19 nt, Artificial Sequence
  Description of Artificial Sequence: Synthetic oligonucleotide
aguacuugugguugguuau

SEQ ID NO: 1234832 - RNA, 19 nt, Artificial Sequence
  Description of Artificial Sequence: Synthetic oligonucleotide
acuuccagcgcuguuaaca

SEQ ID NO: 1234833 - RNA, 19 nt, Artificial Sequence
  Description of Artificial Sequence: Synthetic oligonucleotide
aaacuauuugguaggaauu

SEQ ID NO: 1234834 - RNA, 19 nt, Artificial Sequence
  Description of Artificial Sequence: Synthetic oligonucleotide
ugcuccuuaguuuacuaua

SEQ ID NO: 1234835 - RNA, 19 nt, Artificial Sequence
  Description of Artificial Sequence: Synthetic oligonucleotide
uggaccuaagauccaaaau

SEQ ID NO: 1234836 - RNA, 19 nt, Artificial Sequence
  Description of Artificial Sequence: Synthetic oligonucleotide
uuuuagcugccauucuagu

SEQ ID NO: 1234837 - RNA, 19 nt, Artificial Sequence
  Description of Artificial Sequence: Synthetic oligonucleotide
acauccaaucuguaucgug

SEQ ID NO: 1234838 - RNA, 19 nt, Artificial Sequence
  Description of Artificial Sequence: Synthetic oligonucleotide
ugaugccaacacaaauacc

SEQ ID NO: 1234839 - RNA, 19 nt, Artificial Sequence
  Description of Artificial Sequence: Synthetic oligonucleotide
aacuucacuaacaacugua

SEQ ID NO: 1234840 - RNA, 19 nt, Artificial Sequence
  Description of Artificial Sequence: Synthetic oligonucleotide
uuguuaguuuaagaugaug

SEQ ID NO: 1234841 - RNA, 19 nt, Artificial Sequence
  Description of Artificial Sequence: Synthetic oligonucleotide
gcuguuaacagauuuucuc

SEQ ID NO: 1234842 - RNA, 19 nt, Artificial Sequence
  Description of Artificial Sequence: Synthetic oligonucleotide
uguauacauagacccuuaa

SEQ ID NO: 1234843 - RNA, 19 nt, Artificial Sequence
  Description of Artificial Sequence: Synthetic oligonucleotide
gcaaacuacacauuuugca

SEQ ID NO: 1234844 - RNA, 19 nt, Artificial Sequence
  Description of Artificial Sequence: Synthetic oligonucleotide
uuugagggcgguucccuug

SEQ ID NO: 1234845 - RNA, 19 nt, Artificial Sequence
  Description of Artificial Sequence: Synthetic oligonucleotide
uaacagauuuucucaacuu

SEQ ID NO: 1234846 - RNA, 19 nt, Artificial Sequence
  Description of Artificial Sequence: Synthetic oligonucleotide
cugaacggcauuuaaagcu

SEQ ID NO: 1234847 - RNA, 19 nt, Artificial Sequence
  Description of Artificial Sequence: Synthetic oligonucleotide
ggaauuaaauccuugaguu

SEQ ID NO: 1234848 - RNA, 19 nt, Artificial Sequence
  Description of Artificial Sequence: Synthetic oligonucleotide
uugucaaauuuaucaucca

SEQ ID NO: 1234849 - RNA, 19 nt, Artificial Sequence
  Description of Artificial Sequence: Synthetic oligonucleotide
uucuuacuacuuccuguug

SEQ ID NO: 1234850 - RNA, 19 nt, Artificial Sequence
  Description of Artificial Sequence: Synthetic oligonucleotide
aguuuaacgcuuguauugu

SEQ ID NO: 1234851 - RNA, 19 nt, Artificial Sequence
  Description of Artificial Sequence: Synthetic oligonucleotide
auaguuaccuuugaucaau

SEQ ID NO: 1234852 - RNA, 19 nt, Artificial Sequence
  Description of Artificial Sequence: Synthetic oligonucleotide
ggaccuaagauccaaaaua

SEQ ID NO: 1234853 - RNA, 19 nt, Artificial Sequence
  Description of Artificial Sequence: Synthetic oligonucleotide
aaucuguaucgugucauaa

SEQ ID NO: 1234854 - RNA, 19 nt, Artificial Sequence
  Description of Artificial Sequence: Synthetic oligonucleotide
cuguaucgugucauaagac

SEQ ID NO: 1234855 - RNA, 19 nt, Artificial Sequence
  Description of Artificial Sequence: Synthetic oligonucleotide
aguuuguucuaauguaaua

SEQ ID NO: 1234856 - RNA, 19 nt, Artificial Sequence
  Description of Artificial Sequence: Synthetic oligonucleotide
uaucgugucauaagacaua

SEQ ID NO: 1234857 - RNA, 19 nt, Artificial Sequence
  Description of Artificial Sequence: Synthetic oligonucleotide
aucaacaagagggacguaa

SEQ ID NO: 1234858 - RNA, 19 nt, Artificial Sequence
  Description of Artificial Sequence: Synthetic oligonucleotide
uaaaucgaucucucacaga

SEQ ID NO: 1234859 - RNA, 19 nt, Artificial Sequence
  Description of Artificial Sequence: Synthetic oligonucleotide
auagacccuuaauuacaag

SEQ ID NO: 1234860 - RNA, 19 nt, Artificial Sequence
  Description of Artificial Sequence: Synthetic oligonucleotide
acugcuauauaggagucaa

SEQ ID NO: 1234861 - RNA, 19 nt, Artificial Sequence
  Description of Artificial Sequence: Synthetic oligonucleotide
gucauaagacauauuguuc

SEQ ID NO: 1234862 - RNA, 19 nt, Artificial Sequence
  Description of Artificial Sequence: Synthetic oligonucleotide
uguacacguuugagggcgg

SEQ ID NO: 1234863 - RNA, 19 nt, Artificial Sequence
  Description of Artificial Sequence: Synthetic oligonucleotide
uggugaaucugaugucagc

SEQ ID NO: 1234864 - RNA, 19 nt, Artificial Sequence
  Description of Artificial Sequence: Synthetic oligonucleotide
gcagcguuugauuugccag

SEQ ID NO: 1234865 - RNA, 19 nt, Artificial Sequence
  Description of Artificial Sequence: Synthetic oligonucleotide
uacggauauugcuccuuag

SEQ ID NO: 1234866 - RNA, 19 nt, Artificial Sequence
  Description of Artificial Sequence: Synthetic oligonucleotide
guucuacucaguuuguucu

SEQ ID NO: 1234867 - RNA, 19 nt, Artificial Sequence
  Description of Artificial Sequence: Synthetic oligonucleotide
acacguuugagggcgguuc

SEQ ID NO: 1234868 - RNA, 19 nt, Artificial Sequence
  Description of Artificial Sequence: Synthetic oligonucleotide
ugccgaaagaguucuuuaa

SEQ ID NO: 1234869 - RNA, 19 nt, Artificial Sequence
  Description of Artificial Sequence: Synthetic oligonucleotide
uaaaacccgcaagagcucu

SEQ ID NO: 1234870 - RNA, 19 nt, Artificial Sequence
  Description of Artificial Sequence: Synthetic oligonucleotide
ugacuacgaaguaucuuau

SEQ ID NO: 1234871 - RNA, 19 nt, Artificial Sequence
  Description of Artificial Sequence: Synthetic oligonucleotide
acguauuuacacauauuca

SEQ ID NO: 1234872 - RNA, 19 nt, Artificial Sequence
  Description of Artificial Sequence: Synthetic oligonucleotide
uuuaaagcugcagcuucgu

SEQ ID NO: 1234873 - RNA, 19 nt, Artificial Sequence
  Description of Artificial Sequence: Synthetic oligonucleotide
gcuauauaggagucaauuc

SEQ ID NO: 1234874 - RNA, 19 nt, Artificial Sequence
  Description of Artificial Sequence: Synthetic oligonucleotide
cacuacacaagcaacuuua

SEQ ID NO: 1234875 - RNA, 19 nt, Artificial Sequence
  Description of Artificial Sequence: Synthetic oligonucleotide
uuguauacauagacccuua

SEQ ID NO: 1234876 - RNA, 19 nt, Artificial Sequence
  Description of Artificial Sequence: Synthetic oligonucleotide
ucgauacuaugcugcaaac

SEQ ID NO: 1234877 - RNA, 19 nt, Artificial Sequence
  Description of Artificial Sequence: Synthetic oligonucleotide
ucgauacaaggaaaauaua

SEQ ID NO: 1234878 - RNA, 19 nt, Artificial Sequence
  Description of Artificial Sequence: Synthetic oligonucleotide
cauuagaaacuauuuggua

SEQ ID NO: 1234879 - RNA, 19 nt, Artificial Sequence
  Description of Artificial Sequence: Synthetic oligonucleotide
acuguacuuggaccuaaga

SEQ ID NO: 1234880 - RNA, 19 nt, Artificial Sequence
  Description of Artificial Sequence: Synthetic oligonucleotide
aaucgaucucucacagaag

SEQ ID NO: 1234881 - RNA, 19 nt, Artificial Sequence
  Description of Artificial Sequence: Synthetic oligonucleotide
cucaguuuguucuaaugua

SEQ ID NO: 1234882 - RNA, 19 nt, Artificial Sequence
  Description of Artificial Sequence: Synthetic oligonucleotide
auaaaacccgcaagagcuc

SEQ ID NO: 1234883 - RNA, 19 nt, Artificial Sequence
  Description of Artificial Sequence: Synthetic oligonucleotide
aacugcuauauaggaguca

SEQ ID NO: 1234884 - RNA, 19 nt, Artificial Sequence
  Description of Artificial Sequence: Synthetic oligonucleotide
cucauguacuuuuaauaaa

SEQ ID NO: 1234885 - RNA, 19 nt, Artificial Sequence
  Description of Artificial Sequence: Synthetic oligonucleotide
accaacugcuauauaggag

SEQ ID NO: 1234886 - RNA, 19 nt, Artificial Sequence
  Description of Artificial Sequence: Synthetic oligonucleotide
gaguacuugugguugguua

SEQ ID NO: 1234887 - RNA, 19 nt, Artificial Sequence
  Description of Artificial Sequence: Synthetic oligonucleotide
cagcucuguaaugaacucg

SEQ ID NO: 1234888 - RNA, 19 nt, Artificial Sequence
  Description of Artificial Sequence: Synthetic oligonucleotide
augauuuaacaugaccaau

SEQ ID NO: 1234889 - RNA, 19 nt, Artificial Sequence
  Description of Artificial Sequence: Synthetic oligonucleotide
ucacuacacaagcaacuuu

SEQ ID NO: 1234890 - RNA, 19 nt, Artificial Sequence
  Description of Artificial Sequence: Synthetic oligonucleotide
aggucuuuaguuugucaaa

SEQ ID NO: 1234891 - RNA, 19 nt, Artificial Sequence
  Description of Artificial Sequence: Synthetic oligonucleotide
acugauggacuuguaggug

SEQ ID NO: 1234892 - RNA, 19 nt, Artificial Sequence
  Description of Artificial Sequence: Synthetic oligonucleotide
uuugacuacgaaguaucuu

SEQ ID NO: 1234893 - RNA, 19 nt, Artificial Sequence
  Description of Artificial Sequence: Synthetic oligonucleotide
agaaggcaagcaguacgac

SEQ ID NO: 1234894 - RNA, 19 nt, Artificial Sequence
  Description of Artificial Sequence: Synthetic oligonucleotide
ccacauuagaaacuauuug

SEQ ID NO: 1234895 - RNA, 19 nt, Artificial Sequence
  Description of Artificial Sequence: Synthetic oligonucleotide
aaaguucuacucaguuugu

SEQ ID NO: 1234896 - RNA, 19 nt, Artificial Sequence
  Description of Artificial Sequence: Synthetic oligonucleotide
aguuaccuuugaucaauau

SEQ ID NO: 1234897 - RNA, 19 nt, Artificial Sequence
  Description of Artificial Sequence: Synthetic oligonucleotide
cuuccguggauggugaauc

SEQ ID NO: 1234898 - RNA, 19 nt, Artificial Sequence
  Description of Artificial Sequence: Synthetic oligonucleotide
uucacuacacaagcaacuu

SEQ ID NO: 1234899 - RNA, 19 nt, Artificial Sequence
  Description of Artificial Sequence: Synthetic oligonucleotide
acagauuuucucaacuuuu

SEQ ID NO: 1234900 - RNA, 19 nt, Artificial Sequence
  Description of Artificial Sequence: Synthetic oligonucleotide
uggaguuuuagcugccauu

SEQ ID NO: 1234901 - RNA, 19 nt, Artificial Sequence
  Description of Artificial Sequence: Synthetic oligonucleotide
cucgcagaacuucuuguuc

SEQ ID NO: 1234902 - RNA, 19 nt, Artificial Sequence
  Description of Artificial Sequence: Synthetic oligonucleotide
ucuacucaguuuguucuaa

SEQ ID NO: 1234903 - RNA, 19 nt, Artificial Sequence
  Description of Artificial Sequence: Synthetic oligonucleotide
ucgaucucucacagaaguc

SEQ ID NO: 1234904 - RNA, 19 nt, Artificial Sequence
  Description of Artificial Sequence: Synthetic oligonucleotide
uaacaacuguaaaggcuau

SEQ ID NO: 1234905 - RNA, 19 nt, Artificial Sequence
  Description of Artificial Sequence: Synthetic oligonucleotide
aucgugucauaagacauau

SEQ ID NO: 1234906 - RNA, 19 nt, Artificial Sequence
  Description of Artificial Sequence: Synthetic oligonucleotide
uaacgcuuguauuguuagu

SEQ ID NO: 1234907 - RNA, 19 nt, Artificial Sequence
  Description of Artificial Sequence: Synthetic oligonucleotide
guuagaaacuguacuugga

SEQ ID NO: 1234908 - RNA, 19 nt, Artificial Sequence
  Description of Artificial Sequence: Synthetic oligonucleotide
cacugaauggcagcguuug

SEQ ID NO: 1234909 - RNA, 19 nt, Artificial Sequence
  Description of Artificial Sequence: Synthetic oligonucleotide
cauagacccuuaauuacaa

SEQ ID NO: 1234910 - RNA, 19 nt, Artificial Sequence
  Description of Artificial Sequence: Synthetic oligonucleotide
cauucuuacuacuuccugu

SEQ ID NO: 1234911 - RNA, 19 nt, Artificial Sequence
  Description of Artificial Sequence: Synthetic oligonucleotide
aaacguaguuucauucuua

SEQ ID NO: 1234912 - RNA, 19 nt, Artificial Sequence
  Description of Artificial Sequence: Synthetic oligonucleotide
cuguaaugaacucgcagaa

SEQ ID NO: 1234913 - RNA, 19 nt, Artificial Sequence
  Description of Artificial Sequence: Synthetic oligonucleotide
aaagugcaaaaggcuauua

SEQ ID NO: 1234914 - RNA, 19 nt, Artificial Sequence
  Description of Artificial Sequence: Synthetic oligonucleotide
acggcauuuaaagcugcag

SEQ ID NO: 1234915 - RNA, 19 nt, Artificial Sequence
  Description of Artificial Sequence: Synthetic oligonucleotide
uguacacuucugcguccag

SEQ ID NO: 1234916 - RNA, 19 nt, Artificial Sequence
  Description of Artificial Sequence: Synthetic oligonucleotide
augaccaauaaaauuuauu

SEQ ID NO: 1234917 - RNA, 19 nt, Artificial Sequence
  Description of Artificial Sequence: Synthetic oligonucleotide
caucucgauacaaggaaaa

SEQ ID NO: 1234918 - RNA, 19 nt, Artificial Sequence
  Description of Artificial Sequence: Synthetic oligonucleotide
uugagggcgguucccuugu

SEQ ID NO: 1234919 - RNA, 19 nt, Artificial Sequence
  Description of Artificial Sequence: Synthetic oligonucleotide
ggugaaucugaugucagca

SEQ ID NO: 1234920 - RNA, 19 nt, Artificial Sequence
  Description of Artificial Sequence: Synthetic oligonucleotide
aaacuguacuuggaccuaa

SEQ ID NO: 1234921 - RNA, 19 nt, Artificial Sequence
  Description of Artificial Sequence: Synthetic oligonucleotide
uugccgaaagaguucuuua

SEQ ID NO: 1234922 - RNA, 19 nt, Artificial Sequence
  Description of Artificial Sequence: Synthetic oligonucleotide
aaauaccaacugcuauaua

SEQ ID NO: 1234923 - RNA, 19 nt, Artificial Sequence
  Description of Artificial Sequence: Synthetic oligonucleotide
acacuucugcguccaguag

SEQ ID NO: 1234924 - RNA, 19 nt, Artificial Sequence
  Description of Artificial Sequence: Synthetic oligonucleotide
gaacccgggacacuuccuc

SEQ ID NO: 1234925 - RNA, 19 nt, Artificial Sequence
  Description of Artificial Sequence: Synthetic oligonucleotide
ucuuguuacuugagugcua

SEQ ID NO: 1234926 - RNA, 19 nt, Artificial Sequence
  Description of Artificial Sequence: Synthetic oligonucleotide
aacccgcaagagcucugag

SEQ ID NO: 1234927 - RNA, 19 nt, Artificial Sequence
  Description of Artificial Sequence: Synthetic oligonucleotide
aacauccaaucuguaucgu

SEQ ID NO: 1234928 - RNA, 19 nt, Artificial Sequence
  Description of Artificial Sequence: Synthetic oligonucleotide
uucuacucaguuuguucua

SEQ ID NO: 1234929 - RNA, 19 nt, Artificial Sequence
  Description of Artificial Sequence: Synthetic oligonucleotide
gguaggaauuaaauccuug

SEQ ID NO: 1234930 - RNA, 19 nt, Artificial Sequence
  Description of Artificial Sequence: Synthetic oligonucleotide
acguaguuucauucuuacu

SEQ ID NO: 1234931 - RNA, 19 nt, Artificial Sequence
  Description of Artificial Sequence: Synthetic oligonucleotide
ugugaguccaagggcacau

SEQ ID NO: 1234932 - RNA, 19 nt, Artificial Sequence
  Description of Artificial Sequence: Synthetic oligonucleotide
aaacccgcaagagcucuga

SEQ ID NO: 1234933 - RNA, 19 nt, Artificial Sequence
  Description of Artificial Sequence: Synthetic oligonucleotide
gaacggcauuuaaagcugc

SEQ ID NO: 1234934 - RNA, 19 nt, Artificial Sequence
  Description of Artificial Sequence: Synthetic oligonucleotide
ggcaguauuccacaguuua

SEQ ID NO: 1234935 - RNA, 19 nt, Artificial Sequence
  Description of Artificial Sequence: Synthetic oligonucleotide
agagggacguaaaacuccu

SEQ ID NO: 1234936 - RNA, 19 nt, Artificial Sequence
  Description of Artificial Sequence: Synthetic oligonucleotide
cacguuugagggcgguucc

SEQ ID NO: 1234937 - RNA, 19 nt, Artificial Sequence
  Description of Artificial Sequence: Synthetic oligonucleotide
gaccuaagauccaaaauau

SEQ ID NO: 1234938 - RNA, 19 nt, Artificial Sequence
  Description of Artificial Sequence: Synthetic oligonucleotide
gaaccaaguuuuacaguca

SEQ ID NO: 1234939 - RNA, 19 nt, Artificial Sequence
  Description of Artificial Sequence: Synthetic oligonucleotide
cacaagaaggcaagcagua

SEQ ID NO: 1234940 - RNA, 19 nt, Artificial Sequence
  Description of Artificial Sequence: Synthetic oligonucleotide
ggcauuuaaagcugcagcu

SEQ ID NO: 1234941 - RNA, 19 nt, Artificial Sequence
  Description of Artificial Sequence: Synthetic oligonucleotide
acuucacuaacaacuguaa

SEQ ID NO: 1234942 - RNA, 19 nt, Artificial Sequence
  Description of Artificial Sequence: Synthetic oligonucleotide
cuuguuacuugagugcuaa

SEQ ID NO: 1234943 - RNA, 19 nt, Artificial Sequence
  Description of Artificial Sequence: Synthetic oligonucleotide
aguguucacuacacaagca

SEQ ID NO: 1234944 - RNA, 19 nt, Artificial Sequence
  Description of Artificial Sequence: Synthetic oligonucleotide
cacaguuuaacgcuuguau

SEQ ID NO: 1234945 - RNA, 19 nt, Artificial Sequence
  Description of Artificial Sequence: Synthetic oligonucleotide
agcguuugauuugccagug

SEQ ID NO: 1234946 - RNA, 19 nt, Artificial Sequence
  Description of Artificial Sequence: Synthetic oligonucleotide
cauauuguucuacggauau

SEQ ID NO: 1234947 - RNA, 19 nt, Artificial Sequence
  Description of Artificial Sequence: Synthetic oligonucleotide
uaguuaccuuugaucaaua

SEQ ID NO: 1234948 - RNA, 19 nt, Artificial Sequence
  Description of Artificial Sequence: Synthetic oligonucleotide
guaaaacuccuggaucuca

SEQ ID NO: 1234949 - RNA, 19 nt, Artificial Sequence
  Description of Artificial Sequence: Synthetic oligonucleotide
cguaguuucauucuuacua

SEQ ID NO: 1234950 - RNA, 19 nt, Artificial Sequence
  Description of Artificial Sequence: Synthetic oligonucleotide
acccgcaagagcucugagu

SEQ ID NO: 1234951 - RNA, 19 nt, Artificial Sequence
  Description of Artificial Sequence: Synthetic oligonucleotide
auuaagcuuaaaagacuaa

SEQ ID NO: 1234952 - RNA, 19 nt, Artificial Sequence
  Description of Artificial Sequence: Synthetic oligonucleotide
uugauuugccaguguucuc

SEQ ID NO: 1234953 - RNA, 19 nt, Artificial Sequence
  Description of Artificial Sequence: Synthetic oligonucleotide
acgaaguaucuuauuuuga

SEQ ID NO: 1234954 - RNA, 19 nt, Artificial Sequence
  Description of Artificial Sequence: Synthetic oligonucleotide
aaguucuacucaguuuguu

SEQ ID NO: 1234955 - RNA, 19 nt, Artificial Sequence
  Description of Artificial Sequence: Synthetic oligonucleotide
uucuacggauauugcuccu

SEQ ID NO: 1234956 - RNA, 19 nt, Artificial Sequence
  Description of Artificial Sequence: Synthetic oligonucleotide
aacggcauuuaaagcugca

SEQ ID NO: 1234957 - RNA, 19 nt, Artificial Sequence
  Description of Artificial Sequence: Synthetic oligonucleotide
uagucucugaacggcauuu

SEQ ID NO: 1234958 - RNA, 19 nt, Artificial Sequence
  Description of Artificial Sequence: Synthetic oligonucleotide
auauaggagucaauucaaa

SEQ ID NO: 1234959 - RNA, 19 nt, Artificial Sequence
  Description of Artificial Sequence: Synthetic oligonucleotide
aaaacccgcaagagcucug

SEQ ID NO: 1234960 - RNA, 19 nt, Artificial Sequence
  Description of Artificial Sequence: Synthetic oligonucleotide
uuucgauacuaugcugcaa

SEQ ID NO: 1234961 - RNA, 19 nt, Artificial Sequence
  Description of Artificial Sequence: Synthetic oligonucleotide
cauuuugcaucucgauaca

SEQ ID NO: 1234962 - RNA, 19 nt, Artificial Sequence
  Description of Artificial Sequence: Synthetic oligonucleotide
uuccguggauggugaaucu

SEQ ID NO: 1234963 - RNA, 19 nt, Artificial Sequence
  Description of Artificial Sequence: Synthetic oligonucleotide
acgcuuguauuguuaguuu

SEQ ID NO: 1234964 - RNA, 19 nt, Artificial Sequence
  Description of Artificial Sequence: Synthetic oligonucleotide
guauacauagacccuuaau

SEQ ID NO: 1234965 - RNA, 19 nt, Artificial Sequence
  Description of Artificial Sequence: Synthetic oligonucleotide
auuuugcaucucgauacaa

SEQ ID NO: 1234966 - RNA, 19 nt, Artificial Sequence
  Description of Artificial Sequence: Synthetic oligonucleotide
aggcaagcaguacgaccuc

SEQ ID NO: 1234967 - RNA, 19 nt, Artificial Sequence
  Description of Artificial Sequence: Synthetic oligonucleotide
ccaacugcuauauaggagu

SEQ ID NO: 1234968 - RNA, 19 nt, Artificial Sequence
  Description of Artificial Sequence: Synthetic oligonucleotide
ccuaagauccaaaauauuu

SEQ ID NO: 1234969 - RNA, 19 nt, Artificial Sequence
  Description of Artificial Sequence: Synthetic oligonucleotide
aucagacugugaguccaag

SEQ ID NO: 1234970 - RNA, 19 nt, Artificial Sequence
  Description of Artificial Sequence: Synthetic oligonucleotide
aucucgauacaaggaaaau

SEQ ID NO: 1234971 - RNA, 19 nt, Artificial Sequence
  Description of Artificial Sequence: Synthetic oligonucleotide
uuguuacuugagugcuaac

SEQ ID NO: 1234972 - RNA, 19 nt, Artificial Sequence
  Description of Artificial Sequence: Synthetic oligonucleotide
ucuacggauauugcuccuu

SEQ ID NO: 1234973 - RNA, 19 nt, Artificial Sequence
  Description of Artificial Sequence: Synthetic oligonucleotide
ucuuccguggauggugaau

SEQ ID NO: 1234974 - RNA, 19 nt, Artificial Sequence
  Description of Artificial Sequence: Synthetic oligonucleotide
cacaaauaccaacugcuau

SEQ ID NO: 1234975 - RNA, 19 nt, Artificial Sequence
  Description of Artificial Sequence: Synthetic oligonucleotide
guaucgugucauaagacau

SEQ ID NO: 1234976 - RNA, 19 nt, Artificial Sequence
  Description of Artificial Sequence: Synthetic oligonucleotide
ccuuuucgauacuaugcug

SEQ ID NO: 1234977 - RNA, 19 nt, Artificial Sequence
  Description of Artificial Sequence: Synthetic oligonucleotide
agggcgguucccuuguaua

SEQ ID NO: 1234978 - RNA, 19 nt, Artificial Sequence
  Description of Artificial Sequence: Synthetic oligonucleotide
caagcaacuuuaguuaacu

SEQ ID NO: 1234979 - RNA, 19 nt, Artificial Sequence
  Description of Artificial Sequence: Synthetic oligonucleotide
cggcauuuaaagcugcagc

SEQ ID NO: 1234980 - RNA, 19 nt, Artificial Sequence
  Description of Artificial Sequence: Synthetic oligonucleotide
aagcacugaauggcagcgu

SEQ ID NO: 1234981 - RNA, 19 nt, Artificial Sequence
  Description of Artificial Sequence: Synthetic oligonucleotide
cuacgaaguaucuuauuuu

SEQ ID NO: 1234982 - RNA, 19 nt, Artificial Sequence
  Description of Artificial Sequence: Synthetic oligonucleotide
ugcguccaguaggacagug

SEQ ID NO: 1234983 - RNA, 19 nt, Artificial Sequence
  Description of Artificial Sequence: Synthetic oligonucleotide
cugaacauccaaucuguau

SEQ ID NO: 1234984 - RNA, 19 nt, Artificial Sequence
  Description of Artificial Sequence: Synthetic oligonucleotide
acuugagugcuaacaacuu

SEQ ID NO: 1234985 - RNA, 19 nt, Artificial Sequence
  Description of Artificial Sequence: Synthetic oligonucleotide
gacagcgaaggugguggug

SEQ ID NO: 1234986 - RNA, 19 nt, Artificial Sequence
  Description of Artificial Sequence: Synthetic oligonucleotide
auacuaugcugcaaacgua

SEQ ID NO: 1234987 - RNA, 19 nt, Artificial Sequence
  Description of Artificial Sequence: Synthetic oligonucleotide
acuaugcugcaaacguagu

SEQ ID NO: 1234988 - RNA, 19 nt, Artificial Sequence
  Description of Artificial Sequence: Synthetic oligonucleotide
cuuguauacauagacccuu

SEQ ID NO: 1234989 - RNA, 19 nt, Artificial Sequence
  Description of Artificial Sequence: Synthetic oligonucleotide
gcaaacguaguuucauucu

SEQ ID NO: 1234990 - RNA, 19 nt, Artificial Sequence
  Description of Artificial Sequence: Synthetic oligonucleotide
aaauacugauggacuugua

SEQ ID NO: 1234991 - RNA, 19 nt, Artificial Sequence
  Description of Artificial Sequence: Synthetic oligonucleotide
caguacgaccuccaacaga

SEQ ID NO: 1234992 - RNA, 19 nt, Artificial Sequence
  Description of Artificial Sequence: Synthetic oligonucleotide
gcaauguaagaaaguuuac

SEQ ID NO: 1234993 - RNA, 19 nt, Artificial Sequence
  Description of Artificial Sequence: Synthetic oligonucleotide
cgauacuaugcugcaaacg

SEQ ID NO: 1234994 - RNA, 19 nt, Artificial Sequence
  Description of Artificial Sequence: Synthetic oligonucleotide
ugaguacuugugguugguu

SEQ ID NO: 1234995 - RNA, 19 nt, Artificial Sequence
  Description of Artificial Sequence: Synthetic oligonucleotide
cagucaucucuguacacgu

SEQ ID NO: 1234996 - RNA, 19 nt, Artificial Sequence
  Description of Artificial Sequence: Synthetic oligonucleotide
guucccuuguauacauaga

SEQ ID NO: 1234997 - RNA, 19 nt, Artificial Sequence
  Description of Artificial Sequence: Synthetic oligonucleotide
ccuguugccgaaagaguuc

SEQ ID NO: 1234998 - RNA, 19 nt, Artificial Sequence
  Description of Artificial Sequence: Synthetic oligonucleotide
gcaguacgaccuccaacag

SEQ ID NO: 1234999 - RNA, 19 nt, Artificial Sequence
  Description of Artificial Sequence: Synthetic oligonucleotide
agcgcuguuaacagauuuu

SEQ ID NO: 1235000 - RNA, 19 nt, Artificial Sequence
  Description of Artificial Sequence: Synthetic oligonucleotide
auauuguucuacggauauu

SEQ ID NO: 1235001 - RNA, 19 nt, Artificial Sequence
  Description of Artificial Sequence: Synthetic oligonucleotide
cuaauguaauaguuaccuu

SEQ ID NO: 1235002 - RNA, 19 nt, Artificial Sequence
  Description of Artificial Sequence: Synthetic oligonucleotide
ggcagcguuugauuugcca

SEQ ID NO: 1235003 - RNA, 19 nt, Artificial Sequence
  Description of Artificial Sequence: Synthetic oligonucleotide
accuaagauccaaaauauu

SEQ ID NO: 1235004 - RNA, 19 nt, Artificial Sequence
  Description of Artificial Sequence: Synthetic oligonucleotide
gaacauuccuaagacuguu

SEQ ID NO: 1235005 - RNA, 19 nt, Artificial Sequence
  Description of Artificial Sequence: Synthetic oligonucleotide
caaacguaguuucauucuu

SEQ ID NO: 1235006 - RNA, 19 nt, Artificial Sequence
  Description of Artificial Sequence: Synthetic oligonucleotide
cuccuuaguuuacuauaaa

SEQ ID NO: 1235007 - RNA, 19 nt, Artificial Sequence
  Description of Artificial Sequence: Synthetic oligonucleotide
guugguuaucuuguuacuu

SEQ ID NO: 1235008 - RNA, 19 nt, Artificial Sequence
  Description of Artificial Sequence: Synthetic oligonucleotide
cuacggauauugcuccuua

SEQ ID NO: 1235009 - RNA, 19 nt, Artificial Sequence
  Description of Artificial Sequence: Synthetic oligonucleotide
uggauacaauaagcuuuuc

SEQ ID NO: 1235010 - RNA, 19 nt, Artificial Sequence
  Description of Artificial Sequence: Synthetic oligonucleotide
ucgugucauaagacauauu

SEQ ID NO: 1235011 - RNA, 19 nt, Artificial Sequence
  Description of Artificial Sequence: Synthetic oligonucleotide
ggacguaaaacuccuggau

SEQ ID NO: 1235012 - RNA, 19 nt, Artificial Sequence
  Description of Artificial Sequence: Synthetic oligonucleotide
gugcaagcacugaauggca

SEQ ID NO: 1235013 - RNA, 19 nt, Artificial Sequence
  Description of Artificial Sequence: Synthetic oligonucleotide
gagggacguaaaacuccug

SEQ ID NO: 1235014 - RNA, 19 nt, Artificial Sequence
  Description of Artificial Sequence: Synthetic oligonucleotide
uggcagcguuugauuugcc

SEQ ID NO: 1235015 - RNA, 19 nt, Artificial Sequence
  Description of Artificial Sequence: Synthetic oligonucleotide
uguugccgaaagaguucuu

SEQ ID NO: 1235016 - RNA, 19 nt, Artificial Sequence
  Description of Artificial Sequence: Synthetic oligonucleotide
cccgcaagagcucugagua

SEQ ID NO: 1235017 - RNA, 19 nt, Artificial Sequence
  Description of Artificial Sequence: Synthetic oligonucleotide
gggcacauuguacacuucu

SEQ ID NO: 1235018 - RNA, 19 nt, Artificial Sequence
  Description of Artificial Sequence: Synthetic oligonucleotide
gcuccuuaguuuacuauaa

SEQ ID NO: 1235019 - RNA, 19 nt, Artificial Sequence
  Description of Artificial Sequence: Synthetic oligonucleotide
gacuacgaaguaucuuauu

SEQ ID NO: 1235020 - RNA, 19 nt, Artificial Sequence
  Description of Artificial Sequence: Synthetic oligonucleotide
cagcguuugauuugccagu

SEQ ID NO: 1235021 - RNA, 19 nt, Artificial Sequence
  Description of Artificial Sequence: Synthetic oligonucleotide
cuaugcugcaaacguaguu

SEQ ID NO: 1235022 - RNA, 19 nt, Artificial Sequence
  Description of Artificial Sequence: Synthetic oligonucleotide
gucuuuaguuugucaaauu

SEQ ID NO: 1235023 - RNA, 19 nt, Artificial Sequence
  Description of Artificial Sequence: Synthetic oligonucleotide
guaggacagugcaagcacu

SEQ ID NO: 1235024 - RNA, 19 nt, Artificial Sequence
  Description of Artificial Sequence: Synthetic oligonucleotide
uacacguuugagggcgguu

SEQ ID NO: 1235025 - RNA, 19 nt, Artificial Sequence
  Description of Artificial Sequence: Synthetic oligonucleotide
gguugguuaucuuguuacu

SEQ ID NO: 1235026 - RNA, 19 nt, Artificial Sequence
  Description of Artificial Sequence: Synthetic oligonucleotide
guuuaacgcuuguauuguu

SEQ ID NO: 1235027 - RNA, 19 nt, Artificial Sequence
  Description of Artificial Sequence: Synthetic oligonucleotide
guugccgaaagaguucuuu

SEQ ID NO: 1235028 - RNA, 19 nt, Artificial Sequence
  Description of Artificial Sequence: Synthetic oligonucleotide
caucagacugugaguccaa

SEQ ID NO: 1235029 - RNA, 19 nt, Artificial Sequence
  Description of Artificial Sequence: Synthetic oligonucleotide
gcgaaggugguggugucac

SEQ ID NO: 1235030 - RNA, 19 nt, Artificial Sequence
  Description of Artificial Sequence: Synthetic oligonucleotide
gcaucucgauacaaggaaa

SEQ ID NO: 1235031 - RNA, 19 nt, Artificial Sequence
  Description of Artificial Sequence: Synthetic oligonucleotide
cccuuaauuacaagaugua

SEQ ID NO: 1235032 - RNA, 19 nt, Artificial Sequence
  Description of Artificial Sequence: Synthetic oligonucleotide
guacacuucugcguccagu

SEQ ID NO: 1235033 - RNA, 19 nt, Artificial Sequence
  Description of Artificial Sequence: Synthetic oligonucleotide
gaggaacccgggacacuuc

SEQ ID NO: 1235034 - RNA, 19 nt, Artificial Sequence
  Description of Artificial Sequence: Synthetic oligonucleotide
cuucugcguccaguaggac

SEQ ID NO: 1235035 - RNA, 19 nt, Artificial Sequence
  Description of Artificial Sequence: Synthetic oligonucleotide
ugagggcgguucccuugua

SEQ ID NO: 1235036 - RNA, 19 nt, Artificial Sequence
  Description of Artificial Sequence: Synthetic oligonucleotide
cugugaguccaagggcaca

SEQ ID NO: 1235037 - RNA, 19 nt, Artificial Sequence
  Description of Artificial Sequence: Synthetic oligonucleotide
cccuuuucgauacuaugcu

SEQ ID NO: 1235038 - RNA, 19 nt, Artificial Sequence
  Description of Artificial Sequence: Synthetic oligonucleotide
ggcgguucccuuguauaca

SEQ ID NO: 1235039 - RNA, 19 nt, Artificial Sequence
  Description of Artificial Sequence: Synthetic oligonucleotide
gcguccaguaggacagugc

SEQ ID NO: 1235040 - RNA, 19 nt, Artificial Sequence
  Description of Artificial Sequence: Synthetic oligonucleotide
ccuuguauacauagacccu

SEQ ID NO: 1235041 - RNA, 19 nt, Artificial Sequence
  Description of Artificial Sequence: Synthetic oligonucleotide
gagggcgguucccuuguau

SEQ ID NO: 1235042 - RNA, 19 nt, Artificial Sequence
  Description of Artificial Sequence: Synthetic oligonucleotide
cuacucaguuuguucuaau

SEQ ID NO: 1235043 - RNA, 19 nt, Artificial Sequence
  Description of Artificial Sequence: Synthetic oligonucleotide
cuggaguuuuagcugccau

SEQ ID NO: 1235044 - RNA, 19 nt, Artificial Sequence
  Description of Artificial Sequence: Synthetic oligonucleotide
cuuguucauuggauacaau

SEQ ID NO: 1235045 - RNA, 19 nt, Artificial Sequence
  Description of Artificial Sequence: Synthetic oligonucleotide
caagggcacauuguacacu

SEQ ID NO: 1235046 - RNA, 19 nt, Artificial Sequence
  Description of Artificial Sequence: Synthetic oligonucleotide
guacgaccuccaacagaac

SEQ ID NO: 1235047 - RNA, 19 nt, Artificial Sequence
  Description of Artificial Sequence: Synthetic oligonucleotide
cagcgcuguuaacagauuu

SEQ ID NO: 1235048 - RNA, 19 nt, Artificial Sequence
  Description of Artificial Sequence: Synthetic oligonucleotide
gcuucguguugcugccuca

SEQ ID NO: 1235049 - RNA, 19 nt, Artificial Sequence
  Description of Artificial Sequence: Synthetic oligonucleotide
ccucuuccguggaugguga

SEQ ID NO: 1235050 - RNA, 19 nt, Artificial Sequence
  Description of Artificial Sequence: Synthetic oligonucleotide
cgcuuguauuguuaguuua

SEQ ID NO: 1235051 - RNA, 19 nt, Artificial Sequence
  Description of Artificial Sequence: Synthetic oligonucleotide
cucuuccguggauggugaa

SEQ ID NO: 1235052 - RNA, 19 nt, Artificial Sequence
  Description of Artificial Sequence: Synthetic oligonucleotide
cugcuauauaggagucaau

SEQ ID NO: 1235053 - RNA, 19 nt, Artificial Sequence
  Description of Artificial Sequence: Synthetic oligonucleotide
gcucuguaaugaacucgca

SEQ ID NO: 1235054 - RNA, 19 nt, Artificial Sequence
  Description of Artificial Sequence: Synthetic oligonucleotide
gcgguucccuuguauacau

SEQ ID NO: 1235055 - RNA, 19 nt, Artificial Sequence
  Description of Artificial Sequence: Synthetic oligonucleotide
cuucguguugcugccucau

SEQ ID NO: 1235056 - RNA, 19 nt, Artificial Sequence
  Description of Artificial Sequence: Synthetic oligonucleotide
guacacguuugagggcggu

SEQ ID NO: 1235057 - RNA, 19 nt, Artificial Sequence
  Description of Artificial Sequence: Synthetic oligonucleotide
gcguuugauuugccagugu

SEQ ID NO: 1235058 - RNA, 19 nt, Artificial Sequence
  Description of Artificial Sequence: Synthetic oligonucleotide
caucaacaagagggacgua

SEQ ID NO: 1235059 - RNA, 19 nt, Artificial Sequence
  Description of Artificial Sequence: Synthetic oligonucleotide
ggaacccgggacacuuccu

SEQ ID NO: 1235060 - RNA, 19 nt, Artificial Sequence
  Description of Artificial Sequence: Synthetic oligonucleotide
ccaggacaugaacugucuu

SEQ ID NO: 1235061 - RNA, 19 nt, Artificial Sequence
  Description of Artificial Sequence: Synthetic oligonucleotide
cgguucccuuguauacaua

SEQ ID NO: 1235062 - RNA, 19 nt, Artificial Sequence
  Description of Artificial Sequence: Synthetic oligonucleotide
aauagauucuuccaaacag

SEQ ID NO: 1235063 - RNA, 19 nt, Artificial Sequence
  Description of Artificial Sequence: Synthetic oligonucleotide
aacuuggucaguuucagac

SEQ ID NO: 1235064 - RNA, 19 nt, Artificial Sequence
  Description of Artificial Sequence: Synthetic oligonucleotide
ucgagcaucauacugaggg

SEQ ID NO: 1235065 - RNA, 19 nt, Artificial Sequence
  Description of Artificial Sequence: Synthetic oligonucleotide
aguagagucaaacagauca

SEQ ID NO: 1235066 - RNA, 19 nt, Artificial Sequence
  Description of Artificial Sequence: Synthetic oligonucleotide
uaagcagaaacauuugugg

SEQ ID NO: 1235067 - RNA, 19 nt, Artificial Sequence
  Description of Artificial Sequence: Synthetic oligonucleotide
aguuguggggcucagagcc

SEQ ID NO: 1235068 - RNA, 19 nt, Artificial Sequence
  Description of Artificial Sequence: Synthetic oligonucleotide
aaugaauuaucacuggccu

SEQ ID NO: 1235069 - RNA, 19 nt, Artificial Sequence
  Description of Artificial Sequence: Synthetic oligonucleotide
agcuuuauuagcugaaagc

SEQ ID NO: 1235070 - RNA, 19 nt, Artificial Sequence
  Description of Artificial Sequence: Synthetic oligonucleotide
uuuauuagcugaaagcucu

SEQ ID NO: 1235071 - RNA, 19 nt, Artificial Sequence
  Description of Artificial Sequence: Synthetic oligonucleotide
aauggcucgacaucucugg

SEQ ID NO: 1235072 - RNA, 19 nt, Artificial Sequence
  Description of Artificial Sequence: Synthetic oligonucleotide
aaguuuugcaguguucugc

SEQ ID NO: 1235073 - RNA, 19 nt, Artificial Sequence
  Description of Artificial Sequence: Synthetic oligonucleotide
ugucuuaauagauucuucc

SEQ ID NO: 1235074 - RNA, 19 nt, Artificial Sequence
  Description of Artificial Sequence: Synthetic oligonucleotide
uguugguagguuaaguugc

SEQ ID NO: 1235075 - RNA, 19 nt, Artificial Sequence
  Description of Artificial Sequence: Synthetic oligonucleotide
aaucugcucacagugaagg

SEQ ID NO: 1235076 - RNA, 19 nt, Artificial Sequence
  Description of Artificial Sequence: Synthetic oligonucleotide
cuuauggagggcaucauag

SEQ ID NO: 1235077 - RNA, 19 nt, Artificial Sequence
  Description of Artificial Sequence: Synthetic oligonucleotide
ucaaaguucgaauuuccug

SEQ ID NO: 1235078 - RNA, 19 nt, Artificial Sequence
  Description of Artificial Sequence: Synthetic oligonucleotide
agcuucaacaaccuugagg

SEQ ID NO: 1235079 - RNA, 19 nt, Artificial Sequence
  Description of Artificial Sequence: Synthetic oligonucleotide
ugaguuguggggcucagag

SEQ ID NO: 1235080 - RNA, 19 nt, Artificial Sequence
  Description of Artificial Sequence: Synthetic oligonucleotide
ugugaguccagcuuuugag

SEQ ID NO: 1235081 - RNA, 19 nt, Artificial Sequence
  Description of Artificial Sequence: Synthetic oligonucleotide
ucuuaauagauucuuccaa

SEQ ID NO: 1235082 - RNA, 19 nt, Artificial Sequence
  Description of Artificial Sequence: Synthetic oligonucleotide
uguuccauuaguaagucuu

SEQ ID NO: 1235083 - RNA, 19 nt, Artificial Sequence
  Description of Artificial Sequence: Synthetic oligonucleotide
ucucauuugucuuaauaga

SEQ ID NO: 1235084 - RNA, 19 nt, Artificial Sequence
  Description of Artificial Sequence: Synthetic oligonucleotide
aguuucagaccccugccgc

SEQ ID NO: 1235085 - RNA, 19 nt, Artificial Sequence
  Description of Artificial Sequence: Synthetic oligonucleotide
uguacucuaacugaaggug

SEQ ID NO: 1235086 - RNA, 19 nt, Artificial Sequence
  Description of Artificial Sequence: Synthetic oligonucleotide
auaagugcuacugucacag

SEQ ID NO: 1235087 - RNA, 19 nt, Artificial Sequence
  Description of Artificial Sequence: Synthetic oligonucleotide
ugaauuaucacuggccuca

SEQ ID NO: 1235088 - RNA, 19 nt, Artificial Sequence
  Description of Artificial Sequence: Synthetic oligonucleotide
guuugaauguccaucuucg

SEQ ID NO: 1235089 - RNA, 19 nt, Artificial Sequence
  Description of Artificial Sequence: Synthetic oligonucleotide
aguccuuaaccucucuagc

SEQ ID NO: 1235090 - RNA, 19 nt, Artificial Sequence
  Description of Artificial Sequence: Synthetic oligonucleotide
ucuguuuaucucuggaccc

SEQ ID NO: 1235091 - RNA, 19 nt, Artificial Sequence
  Description of Artificial Sequence: Synthetic oligonucleotide
aggaaauguaucucugacg

SEQ ID NO: 1235092 - RNA, 19 nt, Artificial Sequence
  Description of Artificial Sequence: Synthetic oligonucleotide
cauuaguaagucuugagga

SEQ ID NO: 1235093 - RNA, 19 nt, Artificial Sequence
  Description of Artificial Sequence: Synthetic oligonucleotide
acgucagagagcuauguag

SEQ ID NO: 1235094 - RNA, 19 nt, Artificial Sequence
  Description of Artificial Sequence: Synthetic oligonucleotide
uccuuaaccucucuagcag

SEQ ID NO: 1235095 - RNA, 19 nt, Artificial Sequence
  Description of Artificial Sequence: Synthetic oligonucleotide
cuuggucaguuucagaccc

SEQ ID NO: 1235096 - RNA, 19 nt, Artificial Sequence
  Description of Artificial Sequence: Synthetic oligonucleotide
ucaacaaccuugaggauuc

SEQ ID NO: 1235097 - RNA, 19 nt, Artificial Sequence
  Description of Artificial Sequence: Synthetic oligonucleotide
aagugcuacugucacagga

SEQ ID NO: 1235098 - RNA, 19 nt, Artificial Sequence
  Description of Artificial Sequence: Synthetic oligonucleotide
ucucaaaguucgaauuucc

SEQ ID NO: 1235099 - RNA, 19 nt, Artificial Sequence
  Description of Artificial Sequence: Synthetic oligonucleotide
auguugguagguuaaguug

SEQ ID NO: 1235100 - RNA, 19 nt, Artificial Sequence
  Description of Artificial Sequence: Synthetic oligonucleotide
uucgcaagcagucucugac

SEQ ID NO: 1235101 - RNA, 19 nt, Artificial Sequence
  Description of Artificial Sequence: Synthetic oligonucleotide
uccauuaguaagucuugag

SEQ ID NO: 1235102 - RNA, 19 nt, Artificial Sequence
  Description of Artificial Sequence: Synthetic oligonucleotide
ucuugaguuugaaugucca

SEQ ID NO: 1235103 - RNA, 19 nt, Artificial Sequence
  Description of Artificial Sequence: Synthetic oligonucleotide
uauggagggcaucauaguc

SEQ ID NO: 1235104 - RNA, 19 nt, Artificial Sequence
  Description of Artificial Sequence: Synthetic oligonucleotide
ucaacgucaguuccggaga

SEQ ID NO: 1235105 - RNA, 19 nt, Artificial Sequence
  Description of Artificial Sequence: Synthetic oligonucleotide
uccggcuaauuuuccaugg

SEQ ID NO: 1235106 - RNA, 19 nt, Artificial Sequence
  Description of Artificial Sequence: Synthetic oligonucleotide
cuuuauuagcugaaagcuc

SEQ ID NO: 1235107 - RNA, 19 nt, Artificial Sequence
  Description of Artificial Sequence: Synthetic oligonucleotide
gguguacucuaacugaagg

SEQ ID NO: 1235108 - RNA, 19 nt, Artificial Sequence
  Description of Artificial Sequence: Synthetic oligonucleotide
guuaaguugccuuccucag

SEQ ID NO: 1235109 - RNA, 19 nt, Artificial Sequence
  Description of Artificial Sequence: Synthetic oligonucleotide
ugcucagaggcacagcgug

SEQ ID NO: 1235110 - RNA, 19 nt, Artificial Sequence
  Description of Artificial Sequence: Synthetic oligonucleotide
auaagcagaaacauuugug

SEQ ID NO: 1235111 - RNA, 19 nt, Artificial Sequence
  Description of Artificial Sequence: Synthetic oligonucleotide
augaauuaucacuggccuc

SEQ ID NO: 1235112 - RNA, 19 nt, Artificial Sequence
  Description of Artificial Sequence: Synthetic oligonucleotide
aggagagggagucaacguc

SEQ ID NO: 1235113 - RNA, 19 nt, Artificial Sequence
  Description of Artificial Sequence: Synthetic oligonucleotide
agcaguucacucuggggac

SEQ ID NO: 1235114 - RNA, 19 nt, Artificial Sequence
  Description of Artificial Sequence: Synthetic oligonucleotide
gucaacgucaguuccggag

SEQ ID NO: 1235115 - RNA, 19 nt, Artificial Sequence
  Description of Artificial Sequence: Synthetic oligonucleotide
acuuaggugccauugccug

SEQ ID NO: 1235116 - RNA, 19 nt, Artificial Sequence
  Description of Artificial Sequence: Synthetic oligonucleotide
uagcugaaagcucuucuca

SEQ ID NO: 1235117 - RNA, 19 nt, Artificial Sequence
  Description of Artificial Sequence: Synthetic oligonucleotide
cucgacuuucauuucuucc

SEQ ID NO: 1235118 - RNA, 19 nt, Artificial Sequence
  Description of Artificial Sequence: Synthetic oligonucleotide
uggagagaaacuugcucag

SEQ ID NO: 1235119 - RNA, 19 nt, Artificial Sequence
  Description of Artificial Sequence: Synthetic oligonucleotide
ucuccggacaggaaggacu

SEQ ID NO: 1235120 - RNA, 19 nt, Artificial Sequence
  Description of Artificial Sequence: Synthetic oligonucleotide
caaccuugaggauucuucc

SEQ ID NO: 1235121 - RNA, 19 nt, Artificial Sequence
  Description of Artificial Sequence: Synthetic oligonucleotide
ucaucugacagugcgugag

SEQ ID NO: 1235122 - RNA, 19 nt, Artificial Sequence
  Description of Artificial Sequence: Synthetic oligonucleotide
ugaggaaaauggcucgaca

SEQ ID NO: 1235123 - RNA, 19 nt, Artificial Sequence
  Description of Artificial Sequence: Synthetic oligonucleotide
aguuucucaaaguucgaau

SEQ ID NO: 1235124 - RNA, 19 nt, Artificial Sequence
  Description of Artificial Sequence: Synthetic oligonucleotide
agcccuaguccuucgcucc

SEQ ID NO: 1235125 - RNA, 19 nt, Artificial Sequence
  Description of Artificial Sequence: Synthetic oligonucleotide
gaaacuuggucaguuucag

SEQ ID NO: 1235126 - RNA, 19 nt, Artificial Sequence
  Description of Artificial Sequence: Synthetic oligonucleotide
cuggagagaaacuugcuca

SEQ ID NO: 1235127 - RNA, 19 nt, Artificial Sequence
  Description of Artificial Sequence: Synthetic oligonucleotide
caguccuuaaccucucuag

SEQ ID NO: 1235128 - RNA, 19 nt, Artificial Sequence
  Description of Artificial Sequence: Synthetic oligonucleotide
uuugaauguccaucuucgc

SEQ ID NO: 1235129 - RNA, 19 nt, Artificial Sequence
  Description of Artificial Sequence: Synthetic oligonucleotide
acaggagagggagucaacg

SEQ ID NO: 1235130 - RNA, 19 nt, Artificial Sequence
  Description of Artificial Sequence: Synthetic oligonucleotide
agggagucaacgucaguuc

SEQ ID NO: 1235131 - RNA, 19 nt, Artificial Sequence
  Description of Artificial Sequence: Synthetic oligonucleotide
ggcuaaucugcuuauggag

SEQ ID NO: 1235132 - RNA, 19 nt, Artificial Sequence
  Description of Artificial Sequence: Synthetic oligonucleotide
cauuuguggaaacuugguc

SEQ ID NO: 1235133 - RNA, 19 nt, Artificial Sequence
  Description of Artificial Sequence: Synthetic oligonucleotide
uguguuagcugcucccuga

SEQ ID NO: 1235134 - RNA, 19 nt, Artificial Sequence
  Description of Artificial Sequence: Synthetic oligonucleotide
uuaaguugccuuccucagu

SEQ ID NO: 1235135 - RNA, 19 nt, Artificial Sequence
  Description of Artificial Sequence: Synthetic oligonucleotide
aggagcuuaucauucugug

SEQ ID NO: 1235136 - RNA, 19 nt, Artificial Sequence
  Description of Artificial Sequence: Synthetic oligonucleotide
ggugcucauguguugacgg

SEQ ID NO: 1235137 - RNA, 19 nt, Artificial Sequence
  Description of Artificial Sequence: Synthetic oligonucleotide
uuaggugccauugccugag

SEQ ID NO: 1235138 - RNA, 19 nt, Artificial Sequence
  Description of Artificial Sequence: Synthetic oligonucleotide
uccacuccggcuaauuuuc

SEQ ID NO: 1235139 - RNA, 19 nt, Artificial Sequence
  Description of Artificial Sequence: Synthetic oligonucleotide
caaaguucgaauuuccugu

SEQ ID NO: 1235140 - RNA, 19 nt, Artificial Sequence
  Description of Artificial Sequence: Synthetic oligonucleotide
ggaaauguaucucugacgu

SEQ ID NO: 1235141 - RNA, 19 nt, Artificial Sequence
  Description of Artificial Sequence: Synthetic oligonucleotide
aacccagucggcugggacu

SEQ ID NO: 1235142 - RNA, 19 nt, Artificial Sequence
  Description of Artificial Sequence: Synthetic oligonucleotide
uuuaucucuggacccuuuc

SEQ ID NO: 1235143 - RNA, 19 nt, Artificial Sequence
  Description of Artificial Sequence: Synthetic oligonucleotide
uucaacaaccuugaggauu

SEQ ID NO: 1235144 - RNA, 19 nt, Artificial Sequence
  Description of Artificial Sequence: Synthetic oligonucleotide
uuaucacuggccucaggac

SEQ ID NO: 1235145 - RNA, 19 nt, Artificial Sequence
  Description of Artificial Sequence: Synthetic oligonucleotide
gagcaucauacugagggcc

SEQ ID NO: 1235146 - RNA, 19 nt, Artificial Sequence
  Description of Artificial Sequence: Synthetic oligonucleotide
uuguguaguuuggugaucu

SEQ ID NO: 1235147 - RNA, 19 nt, Artificial Sequence
  Description of Artificial Sequence: Synthetic oligonucleotide
ccuuucucgagcaucauac

SEQ ID NO: 1235148 - RNA, 19 nt, Artificial Sequence
  Description of Artificial Sequence: Synthetic oligonucleotide
ucaguuccggagagcagag

SEQ ID NO: 1235149 - RNA, 19 nt, Artificial Sequence
  Description of Artificial Sequence: Synthetic oligonucleotide
cacugguguacucuaacug

SEQ ID NO: 1235150 - RNA, 19 nt, Artificial Sequence
  Description of Artificial Sequence: Synthetic oligonucleotide
guaagucuugaggaaaaug

SEQ ID NO: 1235151 - RNA, 19 nt, Artificial Sequence
  Description of Artificial Sequence: Synthetic oligonucleotide
gagucaacgucaguuccgg

SEQ ID NO: 1235152 - RNA, 19 nt, Artificial Sequence
  Description of Artificial Sequence: Synthetic oligonucleotide
ucggccacacaauugucca

SEQ ID NO: 1235153 - RNA, 19 nt, Artificial Sequence
  Description of Artificial Sequence: Synthetic oligonucleotide
ugcgugagcggcagaaggc

SEQ ID NO: 1235154 - RNA, 19 nt, Artificial Sequence
  Description of Artificial Sequence: Synthetic oligonucleotide
agaaacauuuguggaaacu

SEQ ID NO: 1235155 - RNA, 19 nt, Artificial Sequence
  Description of Artificial Sequence: Synthetic oligonucleotide
uuauggagggcaucauagu

SEQ ID NO: 1235156 - RNA, 19 nt, Artificial Sequence
  Description of Artificial Sequence: Synthetic oligonucleotide
uuuccggagcuucucauuu

SEQ ID NO: 1235157 - RNA, 19 nt, Artificial Sequence
  Description of Artificial Sequence: Synthetic oligonucleotide
cuggaggagcuuaucauuc

SEQ ID NO: 1235158 - RNA, 19 nt, Artificial Sequence
  Description of Artificial Sequence: Synthetic oligonucleotide
ucuggacccuuucucgagc

SEQ ID NO: 1235159 - RNA, 19 nt, Artificial Sequence
  Description of Artificial Sequence: Synthetic oligonucleotide
aguccuucgcuccagguuu

SEQ ID NO: 1235160 - RNA, 19 nt, Artificial Sequence
  Description of Artificial Sequence: Synthetic oligonucleotide
ucucaugaacccagucggc

SEQ ID NO: 1235161 - RNA, 19 nt, Artificial Sequence
  Description of Artificial Sequence: Synthetic oligonucleotide
gugcgugagcggcagaagg

SEQ ID NO: 1235162 - RNA, 19 nt, Artificial Sequence
  Description of Artificial Sequence: Synthetic oligonucleotide
aacgucaguuccggagagc

SEQ ID NO: 1235163 - RNA, 19 nt, Artificial Sequence
  Description of Artificial Sequence: Synthetic oligonucleotide
gcacuuuucagucucgcug

SEQ ID NO: 1235164 - RNA, 19 nt, Artificial Sequence
  Description of Artificial Sequence: Synthetic oligonucleotide
gguuaaguugccuuccuca

SEQ ID NO: 1235165 - RNA, 19 nt, Artificial Sequence
  Description of Artificial Sequence: Synthetic oligonucleotide
gaacacuggccgucugugg

SEQ ID NO: 1235166 - RNA, 19 nt, Artificial Sequence
  Description of Artificial Sequence: Synthetic oligonucleotide
uguuagcugcucccugaag

SEQ ID NO: 1235167 - RNA, 19 nt, Artificial Sequence
  Description of Artificial Sequence: Synthetic oligonucleotide
cugaccccggcuaaucugc

SEQ ID NO: 1235168 - RNA, 19 nt, Artificial Sequence
  Description of Artificial Sequence: Synthetic oligonucleotide
guacucuaacugaaggugc

SEQ ID NO: 1235169 - RNA, 19 nt, Artificial Sequence
  Description of Artificial Sequence: Synthetic oligonucleotide
agucucgcugucugguuuc

SEQ ID NO: 1235170 - RNA, 19 nt, Artificial Sequence
  Description of Artificial Sequence: Synthetic oligonucleotide
caucaucugacagugcgug

SEQ ID NO: 1235171 - RNA, 19 nt, Artificial Sequence
  Description of Artificial Sequence: Synthetic oligonucleotide
aaauggcucgacaucucug

SEQ ID NO: 1235172 - RNA, 19 nt, Artificial Sequence
  Description of Artificial Sequence: Synthetic oligonucleotide
aucugacagugcgugagcg

SEQ ID NO: 1235173 - RNA, 19 nt, Artificial Sequence
  Description of Artificial Sequence: Synthetic oligonucleotide
uccggagcuucucauuugu

SEQ ID NO: 1235174 - RNA, 19 nt, Artificial Sequence
  Description of Artificial Sequence: Synthetic oligonucleotide
gaguccagcuuuugaguug

SEQ ID NO: 1235175 - RNA, 19 nt, Artificial Sequence
  Description of Artificial Sequence: Synthetic oligonucleotide
ugggacugguggcauaagu

SEQ ID NO: 1235176 - RNA, 19 nt, Artificial Sequence
  Description of Artificial Sequence: Synthetic oligonucleotide
ucuguugccaucggaggga

SEQ ID NO: 1235177 - RNA, 19 nt, Artificial Sequence
  Description of Artificial Sequence: Synthetic oligonucleotide
agggccugauucugcuucc

SEQ ID NO: 1235178 - RNA, 19 nt, Artificial Sequence
  Description of Artificial Sequence: Synthetic oligonucleotide
acacaauuguccacaucac

SEQ ID NO: 1235179 - RNA, 19 nt, Artificial Sequence
  Description of Artificial Sequence: Synthetic oligonucleotide
guagguuaaguugccuucc

SEQ ID NO: 1235180 - RNA, 19 nt, Artificial Sequence
  Description of Artificial Sequence: Synthetic oligonucleotide
uggauguuccuggaugggc

SEQ ID NO: 1235181 - RNA, 19 nt, Artificial Sequence
  Description of Artificial Sequence: Synthetic oligonucleotide
ucucuggacccuuucucga

SEQ ID NO: 1235182 - RNA, 19 nt, Artificial Sequence
  Description of Artificial Sequence: Synthetic oligonucleotide
uaagugcuacugucacagg

SEQ ID NO: 1235183 - RNA, 19 nt, Artificial Sequence
  Description of Artificial Sequence: Synthetic oligonucleotide
caguuucagaccccugccg

SEQ ID NO: 1235184 - RNA, 19 nt, Artificial Sequence
  Description of Artificial Sequence: Synthetic oligonucleotide
ugccucgacuuucauuucu

SEQ ID NO: 1235185 - RNA, 19 nt, Artificial Sequence
  Description of Artificial Sequence: Synthetic oligonucleotide
guccuuaaccucucuagca

SEQ ID NO: 1235186 - RNA, 19 nt, Artificial Sequence
  Description of Artificial Sequence: Synthetic oligonucleotide
uuccauuaguaagucuuga

SEQ ID NO: 1235187 - RNA, 19 nt, Artificial Sequence
  Description of Artificial Sequence: Synthetic oligonucleotide
gacugagacccuccagaag

SEQ ID NO: 1235188 - RNA, 19 nt, Artificial Sequence
  Description of Artificial Sequence: Synthetic oligonucleotide
gauguugguagguuaaguu

SEQ ID NO: 1235189 - RNA, 19 nt, Artificial Sequence
  Description of Artificial Sequence: Synthetic oligonucleotide
ugguagguuaaguugccuu

SEQ ID NO: 1235190 - RNA, 19 nt, Artificial Sequence
  Description of Artificial Sequence: Synthetic oligonucleotide
cauaguccucaaucaggcc

SEQ ID NO: 1235191 - RNA, 19 nt, Artificial Sequence
  Description of Artificial Sequence: Synthetic oligonucleotide
ucaguccuuaaccucucua

SEQ ID NO: 1235192 - RNA, 19 nt, Artificial Sequence
  Description of Artificial Sequence: Synthetic oligonucleotide
agcagucucugaccccggc

SEQ ID NO: 1235193 - RNA, 19 nt, Artificial Sequence
  Description of Artificial Sequence: Synthetic oligonucleotide
uggugcucauguguugacg

SEQ ID NO: 1235194 - RNA, 19 nt, Artificial Sequence
  Description of Artificial Sequence: Synthetic oligonucleotide
uccuggacagagacucaag

SEQ ID NO: 1235195 - RNA, 19 nt, Artificial Sequence
  Description of Artificial Sequence: Synthetic oligonucleotide
gguggcauaagugcuacug

SEQ ID NO: 1235196 - RNA, 19 nt, Artificial Sequence
  Description of Artificial Sequence: Synthetic oligonucleotide
gguagguuaaguugccuuc

SEQ ID NO: 1235197 - RNA, 19 nt, Artificial Sequence
  Description of Artificial Sequence: Synthetic oligonucleotide
augaccaacugaucacaga

SEQ ID NO: 1235198 - RNA, 19 nt, Artificial Sequence
  Description of Artificial Sequence: Synthetic oligonucleotide
gggacaugguuccacuccg

SEQ ID NO: 1235199 - RNA, 19 nt, Artificial Sequence
  Description of Artificial Sequence: Synthetic oligonucleotide
acacuggccgucugugggg

SEQ ID NO: 1235200 - RNA, 19 nt, Artificial Sequence
  Description of Artificial Sequence: Synthetic oligonucleotide
guaucucugacgucagaga

SEQ ID NO: 1235201 - RNA, 19 nt, Artificial Sequence
  Description of Artificial Sequence: Synthetic oligonucleotide
gaguuguggggcucagagc

SEQ ID NO: 1235202 - RNA, 19 nt, Artificial Sequence
  Description of Artificial Sequence: Synthetic oligonucleotide
ugccugaguagagucaaac

SEQ ID NO: 1235203 - RNA, 19 nt, Artificial Sequence
  Description of Artificial Sequence: Synthetic oligonucleotide
acuccggcuaauuuuccau

SEQ ID NO: 1235204 - RNA, 19 nt, Artificial Sequence
  Description of Artificial Sequence: Synthetic oligonucleotide
gcuuaucauucugugagag

SEQ ID NO: 1235205 - RNA, 19 nt, Artificial Sequence
  Description of Artificial Sequence: Synthetic oligonucleotide
caugcaagugggacuggug

SEQ ID NO: 1235206 - RNA, 19 nt, Artificial Sequence
  Description of Artificial Sequence: Synthetic oligonucleotide
cuucgcuccagguuucguc

SEQ ID NO: 1235207 - RNA, 19 nt, Artificial Sequence
  Description of Artificial Sequence: Synthetic oligonucleotide
auugccugaguagagucaa

SEQ ID NO: 1235208 - RNA, 19 nt, Artificial Sequence
  Description of Artificial Sequence: Synthetic oligonucleotide
uauuagcugaaagcucuuc

SEQ ID NO: 1235209 - RNA, 19 nt, Artificial Sequence
  Description of Artificial Sequence: Synthetic oligonucleotide
uuccucaguccuuaaccuc

SEQ ID NO: 1235210 - RNA, 19 nt, Artificial Sequence
  Description of Artificial Sequence: Synthetic oligonucleotide
uuccggagagcagaggagu

SEQ ID NO: 1235211 - RNA, 19 nt, Artificial Sequence
  Description of Artificial Sequence: Synthetic oligonucleotide
ucaagacuugcagccuucc

SEQ ID NO: 1235212 - RNA, 19 nt, Artificial Sequence
  Description of Artificial Sequence: Synthetic oligonucleotide
uguuuccggagcuucucau

SEQ ID NO: 1235213 - RNA, 19 nt, Artificial Sequence
  Description of Artificial Sequence: Synthetic oligonucleotide
uuacacugguguacucuaa

SEQ ID NO: 1235214 - RNA, 19 nt, Artificial Sequence
  Description of Artificial Sequence: Synthetic oligonucleotide
agucggcugggacuggaug

SEQ ID NO: 1235215 - RNA, 19 nt, Artificial Sequence
  Description of Artificial Sequence: Synthetic oligonucleotide
guugguagguuaaguugcc

SEQ ID NO: 1235216 - RNA, 19 nt, Artificial Sequence
  Description of Artificial Sequence: Synthetic oligonucleotide
acgucaguuccggagagca

SEQ ID NO: 1235217 - RNA, 19 nt, Artificial Sequence
  Description of Artificial Sequence: Synthetic oligonucleotide
agaaacuugcucagaggca

SEQ ID NO: 1235218 - RNA, 19 nt, Artificial Sequence
  Description of Artificial Sequence: Synthetic oligonucleotide
acagagacucaaguaauuu

SEQ ID NO: 1235219 - RNA, 19 nt, Artificial Sequence
  Description of Artificial Sequence: Synthetic oligonucleotide
cucuggacccuuucucgag

SEQ ID NO: 1235220 - RNA, 19 nt, Artificial Sequence
  Description of Artificial Sequence: Synthetic oligonucleotide
gaccaacugaucacagaug

SEQ ID NO: 1235221 - RNA, 19 nt, Artificial Sequence
  Description of Artificial Sequence: Synthetic oligonucleotide
gaauuaucacuggccucag

SEQ ID NO: 1235222 - RNA, 19 nt, Artificial Sequence
  Description of Artificial Sequence: Synthetic oligonucleotide
cuccggcuaauuuuccaug

SEQ ID NO: 1235223 - RNA, 19 nt, Artificial Sequence
  Description of Artificial Sequence: Synthetic oligonucleotide
gggagucaacgucaguucc

SEQ ID NO: 1235224 - RNA, 19 nt, Artificial Sequence
  Description of Artificial Sequence: Synthetic oligonucleotide
caucugacagugcgugagc

SEQ ID NO: 1235225 - RNA, 19 nt, Artificial Sequence
  Description of Artificial Sequence: Synthetic oligonucleotide
ugacgucagagagcuaugu

SEQ ID NO: 1235226 - RNA, 19 nt, Artificial Sequence
  Description of Artificial Sequence: Synthetic oligonucleotide
uuugaguuguggggcucag

SEQ ID NO: 1235227 - RNA, 19 nt, Artificial Sequence
  Description of Artificial Sequence: Synthetic oligonucleotide
uuccggagcuucucauuug

SEQ ID NO: 1235228 - RNA, 19 nt, Artificial Sequence
  Description of Artificial Sequence: Synthetic oligonucleotide
caacgucaguuccggagag

SEQ ID NO: 1235229 - RNA, 19 nt, Artificial Sequence
  Description of Artificial Sequence: Synthetic oligonucleotide
ucagaggcacagcguguga

SEQ ID NO: 1235230 - RNA, 19 nt, Artificial Sequence
  Description of Artificial Sequence: Synthetic oligonucleotide
gacagugcgugagcggcag

SEQ ID NO: 1235231 - RNA, 19 nt, Artificial Sequence
  Description of Artificial Sequence: Synthetic oligonucleotide
ucauucugugagagcaguu

SEQ ID NO: 1235232 - RNA, 19 nt, Artificial Sequence
  Description of Artificial Sequence: Synthetic oligonucleotide
ggagucaacgucaguuccg

SEQ ID NO: 1235233 - RNA, 19 nt, Artificial Sequence
  Description of Artificial Sequence: Synthetic oligonucleotide
uuaaccucucuagcaguuc

SEQ ID NO: 1235234 - RNA, 19 nt, Artificial Sequence
  Description of Artificial Sequence: Synthetic oligonucleotide
uugcuggcccacauauggu

SEQ ID NO: 1235235 - RNA, 19 nt, Artificial Sequence
  Description of Artificial Sequence: Synthetic oligonucleotide
cucaagacuugcagccuuc

SEQ ID NO: 1235236 - RNA, 19 nt, Artificial Sequence
  Description of Artificial Sequence: Synthetic oligonucleotide
ugcagaaguuuugcagugu

SEQ ID NO: 1235237 - RNA, 19 nt, Artificial Sequence
  Description of Artificial Sequence: Synthetic oligonucleotide
cgucagagagcuauguagc

SEQ ID NO: 1235238 - RNA, 19 nt, Artificial Sequence
  Description of Artificial Sequence: Synthetic oligonucleotide
gcugacuuaggugccauug

SEQ ID NO: 1235239 - RNA, 19 nt, Artificial Sequence
  Description of Artificial Sequence: Synthetic oligonucleotide
acaagcuuuauuagcugaa

SEQ ID NO: 1235240 - RNA, 19 nt, Artificial Sequence
  Description of Artificial Sequence: Synthetic oligonucleotide
ccuuccuggacagagacuc

SEQ ID NO: 1235241 - RNA, 19 nt, Artificial Sequence
  Description of Artificial Sequence: Synthetic oligonucleotide
cagggcaugcaagugggac

SEQ ID NO: 1235242 - RNA, 19 nt, Artificial Sequence
  Description of Artificial Sequence: Synthetic oligonucleotide
guguacucuaacugaaggu

SEQ ID NO: 1235243 - RNA, 19 nt, Artificial Sequence
  Description of Artificial Sequence: Synthetic oligonucleotide
uguguaguuuggugaucuc

SEQ ID NO: 1235244 - RNA, 19 nt, Artificial Sequence
  Description of Artificial Sequence: Synthetic oligonucleotide
cucaaucaggcccagcaua

SEQ ID NO: 1235245 - RNA, 19 nt, Artificial Sequence
  Description of Artificial Sequence: Synthetic oligonucleotide
cugcucacagugaagggaa

SEQ ID NO: 1235246 - RNA, 19 nt, Artificial Sequence
  Description of Artificial Sequence: Synthetic oligonucleotide
caucucugggcacuuuuca

SEQ ID NO: 1235247 - RNA, 19 nt, Artificial Sequence
  Description of Artificial Sequence: Synthetic oligonucleotide
ggagcuuaucauucuguga

SEQ ID NO: 1235248 - RNA, 19 nt, Artificial Sequence
  Description of Artificial Sequence: Synthetic oligonucleotide
uugguagguuaaguugccu

SEQ ID NO: 1235249 - RNA, 19 nt, Artificial Sequence
  Description of Artificial Sequence: Synthetic oligonucleotide
aucggagggacuggaggag

SEQ ID NO: 1235250 - RNA, 19 nt, Artificial Sequence
  Description of Artificial Sequence: Synthetic oligonucleotide
cuguguuagcugcucccug

SEQ ID NO: 1235251 - RNA, 19 nt, Artificial Sequence
  Description of Artificial Sequence: Synthetic oligonucleotide
cugacgucagagagcuaug

SEQ ID NO: 1235252 - RNA, 19 nt, Artificial Sequence
  Description of Artificial Sequence: Synthetic oligonucleotide
cugguuucuggucuccgga

SEQ ID NO: 1235253 - RNA, 19 nt, Artificial Sequence
  Description of Artificial Sequence: Synthetic oligonucleotide
aaggugcucaagacuugca

SEQ ID NO: 1235254 - RNA, 19 nt, Artificial Sequence
  Description of Artificial Sequence: Synthetic oligonucleotide
aacaaccuugaggauucuu

SEQ ID NO: 1235255 - RNA, 19 nt, Artificial Sequence
  Description of Artificial Sequence: Synthetic oligonucleotide
ggacuggaggagcuuauca

SEQ ID NO: 1235256 - RNA, 19 nt, Artificial Sequence
  Description of Artificial Sequence: Synthetic oligonucleotide
cuguauguguuccauuagu

SEQ ID NO: 1235257 - RNA, 19 nt, Artificial Sequence
  Description of Artificial Sequence: Synthetic oligonucleotide
guagagucaaacagaucaa

SEQ ID NO: 1235258 - RNA, 19 nt, Artificial Sequence
  Description of Artificial Sequence: Synthetic oligonucleotide
auaugguggccagcaacca

SEQ ID NO: 1235259 - RNA, 19 nt, Artificial Sequence
  Description of Artificial Sequence: Synthetic oligonucleotide
uugccaucggagggacugg

SEQ ID NO: 1235260 - RNA, 19 nt, Artificial Sequence
  Description of Artificial Sequence: Synthetic oligonucleotide
gagggagucaacgucaguu

SEQ ID NO: 1235261 - RNA, 19 nt, Artificial Sequence
  Description of Artificial Sequence: Synthetic oligonucleotide
gacgucagagagcuaugua

SEQ ID NO: 1235262 - RNA, 19 nt, Artificial Sequence
  Description of Artificial Sequence: Synthetic oligonucleotide
gguuucgucuggccuuccg

SEQ ID NO: 1235263 - RNA, 19 nt, Artificial Sequence
  Description of Artificial Sequence: Synthetic oligonucleotide
ugagcggcagaaggcucag

SEQ ID NO: 1235264 - RNA, 19 nt, Artificial Sequence
  Description of Artificial Sequence: Synthetic oligonucleotide
auguaucucugacgucaga

SEQ ID NO: 1235265 - RNA, 19 nt, Artificial Sequence
  Description of Artificial Sequence: Synthetic oligonucleotide
gugaguccagcuuuugagu

SEQ ID NO: 1235266 - RNA, 19 nt, Artificial Sequence
  Description of Artificial Sequence: Synthetic oligonucleotide
uguuuaucucuggacccuu

SEQ ID NO: 1235267 - RNA, 19 nt, Artificial Sequence
  Description of Artificial Sequence: Synthetic oligonucleotide
uggggacaugguuccacuc

SEQ ID NO: 1235268 - RNA, 19 nt, Artificial Sequence
  Description of Artificial Sequence: Synthetic oligonucleotide
ggagagggagucaacguca

SEQ ID NO: 1235269 - RNA, 19 nt, Artificial Sequence
  Description of Artificial Sequence: Synthetic oligonucleotide
cagcgugugaacccuguga

SEQ ID NO: 1235270 - RNA, 19 nt, Artificial Sequence
  Description of Artificial Sequence: Synthetic oligonucleotide
uauguagcucugagccaua

SEQ ID NO: 1235271 - RNA, 19 nt, Artificial Sequence
  Description of Artificial Sequence: Synthetic oligonucleotide
ccucaggacaucuguugcc

SEQ ID NO: 1235272 - RNA, 19 nt, Artificial Sequence
  Description of Artificial Sequence: Synthetic oligonucleotide
ggaacacuggccgucugug

SEQ ID NO: 1235273 - RNA, 19 nt, Artificial Sequence
  Description of Artificial Sequence: Synthetic oligonucleotide
cuuuugaguuguggggcuc

SEQ ID NO: 1235274 - RNA, 19 nt, Artificial Sequence
  Description of Artificial Sequence: Synthetic oligonucleotide
agugcgugagcggcagaag

SEQ ID NO: 1235275 - RNA, 19 nt, Artificial Sequence
  Description of Artificial Sequence: Synthetic oligonucleotide
gucagagagcuauguagcu

SEQ ID NO: 1235276 - RNA, 19 nt, Artificial Sequence
  Description of Artificial Sequence: Synthetic oligonucleotide
cugucugguuucuggucuc

SEQ ID NO: 1235277 - RNA, 19 nt, Artificial Sequence
  Description of Artificial Sequence: Synthetic oligonucleotide
cacaauuguccacaucacu

SEQ ID NO: 1235278 - RNA, 19 nt, Artificial Sequence
  Description of Artificial Sequence: Synthetic oligonucleotide
uguggggacugagacccuc

SEQ ID NO: 1235279 - RNA, 19 nt, Artificial Sequence
  Description of Artificial Sequence: Synthetic oligonucleotide
agcuucucauuugucuuaa

SEQ ID NO: 1235280 - RNA, 19 nt, Artificial Sequence
  Description of Artificial Sequence: Synthetic oligonucleotide
ucagucucgcugucugguu

SEQ ID NO: 1235281 - RNA, 19 nt, Artificial Sequence
  Description of Artificial Sequence: Synthetic oligonucleotide
cuucaaaugccuugaucau

SEQ ID NO: 1235282 - RNA, 19 nt, Artificial Sequence
  Description of Artificial Sequence: Synthetic oligonucleotide
gacuuaggugccauugccu

SEQ ID NO: 1235283 - RNA, 19 nt, Artificial Sequence
  Description of Artificial Sequence: Synthetic oligonucleotide
cuauguagcucugagccau

SEQ ID NO: 1235284 - RNA, 19 nt, Artificial Sequence
  Description of Artificial Sequence: Synthetic oligonucleotide
gacugguggcauaagugcu

SEQ ID NO: 1235285 - RNA, 19 nt, Artificial Sequence
  Description of Artificial Sequence: Synthetic oligonucleotide
uggccucaggacaucuguu

SEQ ID NO: 1235286 - RNA, 19 nt, Artificial Sequence
  Description of Artificial Sequence: Synthetic oligonucleotide
agucaacgucaguuccgga

SEQ ID NO: 1235287 - RNA, 19 nt, Artificial Sequence
  Description of Artificial Sequence: Synthetic oligonucleotide
gagagcuauguagcucuga

SEQ ID NO: 1235288 - RNA, 19 nt, Artificial Sequence
  Description of Artificial Sequence: Synthetic oligonucleotide
gccugaguagagucaaaca

SEQ ID NO: 1235289 - RNA, 19 nt, Artificial Sequence
  Description of Artificial Sequence: Synthetic oligonucleotide
cuggacccuuucucgagca

SEQ ID NO: 1235290 - RNA, 19 nt, Artificial Sequence
  Description of Artificial Sequence: Synthetic oligonucleotide
cgcaagcagucucugaccc

SEQ ID NO: 1235291 - RNA, 19 nt, Artificial Sequence
  Description of Artificial Sequence: Synthetic oligonucleotide
ggagauguugguagguuaa

SEQ ID NO: 1235292 - RNA, 19 nt, Artificial Sequence
  Description of Artificial Sequence: Synthetic oligonucleotide
cacuccggcuaauuuucca

SEQ ID NO: 1235293 - RNA, 19 nt, Artificial Sequence
  Description of Artificial Sequence: Synthetic oligonucleotide
cuucgcaagcagucucuga

SEQ ID NO: 1235294 - RNA, 19 nt, Artificial Sequence
  Description of Artificial Sequence: Synthetic oligonucleotide
gcuauguagcucugagcca

SEQ ID NO: 1235295 - RNA, 19 nt, Artificial Sequence
  Description of Artificial Sequence: Synthetic oligonucleotide
aggugccauugccugagua

SEQ ID NO: 1235296 - RNA, 19 nt, Artificial Sequence
  Description of Artificial Sequence: Synthetic oligonucleotide
caguuucucaaaguucgaa

SEQ ID NO: 1235297 - RNA, 19 nt, Artificial Sequence
  Description of Artificial Sequence: Synthetic oligonucleotide
cuguuuccggagcuucuca

SEQ ID NO: 1235298 - RNA, 19 nt, Artificial Sequence
  Description of Artificial Sequence: Synthetic oligonucleotide
gcaaccacacagggcaugc

SEQ ID NO: 1235299 - RNA, 19 nt, Artificial Sequence
  Description of Artificial Sequence: Synthetic oligonucleotide
gacuugcagccuuccugga

SEQ ID NO: 1235300 - RNA, 19 nt, Artificial Sequence
  Description of Artificial Sequence: Synthetic oligonucleotide
gugagcggcagaaggcuca

SEQ ID NO: 1235301 - RNA, 19 nt, Artificial Sequence
  Description of Artificial Sequence: Synthetic oligonucleotide
agcccucggccacacaauu

SEQ ID NO: 1235302 - RNA, 19 nt, Artificial Sequence
  Description of Artificial Sequence: Synthetic oligonucleotide
ccaacugaucacagaugac

SEQ ID NO: 1235303 - RNA, 19 nt, Artificial Sequence
  Description of Artificial Sequence: Synthetic oligonucleotide
cuugaguuugaauguccau

SEQ ID NO: 1235304 - RNA, 19 nt, Artificial Sequence
  Description of Artificial Sequence: Synthetic oligonucleotide
gcugucugguuucuggucu

SEQ ID NO: 1235305 - RNA, 19 nt, Artificial Sequence
  Description of Artificial Sequence: Synthetic oligonucleotide
guguuagcugcucccugaa

SEQ ID NO: 1235306 - RNA, 19 nt, Artificial Sequence
  Description of Artificial Sequence: Synthetic oligonucleotide
agagagcuauguagcucug

SEQ ID NO: 1235307 - RNA, 19 nt, Artificial Sequence
  Description of Artificial Sequence: Synthetic oligonucleotide
auguagcucugagccauaa

SEQ ID NO: 1235308 - RNA, 19 nt, Artificial Sequence
  Description of Artificial Sequence: Synthetic oligonucleotide
aagcccucggccacacaau

SEQ ID NO: 1235309 - RNA, 19 nt, Artificial Sequence
  Description of Artificial Sequence: Synthetic oligonucleotide
ugaacccagucggcuggga

SEQ ID NO: 1235310 - RNA, 19 nt, Artificial Sequence
  Description of Artificial Sequence: Synthetic oligonucleotide
cucaugaacccagucggcu

SEQ ID NO: 1235311 - RNA, 19 nt, Artificial Sequence
  Description of Artificial Sequence: Synthetic oligonucleotide
agguuucgucuggccuucc

SEQ ID NO: 1235312 - RNA, 19 nt, Artificial Sequence
  Description of Artificial Sequence: Synthetic oligonucleotide
caguuccggagagcagagg

SEQ ID NO: 1235313 - RNA, 19 nt, Artificial Sequence
  Description of Artificial Sequence: Synthetic oligonucleotide
cagguuucgucuggccuuc

SEQ ID NO: 1235314 - RNA, 19 nt, Artificial Sequence
  Description of Artificial Sequence: Synthetic oligonucleotide
gacagagacucaaguaauu

SEQ ID NO: 1235315 - RNA, 19 nt, Artificial Sequence
  Description of Artificial Sequence: Synthetic oligonucleotide
gcucagagccucuugaguu

SEQ ID NO: 1235316 - RNA, 19 nt, Artificial Sequence
  Description of Artificial Sequence: Synthetic oligonucleotide
gagccucuugaguuugaau

SEQ ID NO: 1235317 - RNA, 19 nt, Artificial Sequence
  Description of Artificial Sequence: Synthetic oligonucleotide
gucuccggacaggaaggac

SEQ ID NO: 1235318 - RNA, 19 nt, Artificial Sequence
  Description of Artificial Sequence: Synthetic oligonucleotide
aguucacucuggggacaug

SEQ ID NO: 1235319 - RNA, 19 nt, Artificial Sequence
  Description of Artificial Sequence: Synthetic oligonucleotide
ucgacaucucugggcacuu

SEQ ID NO: 1235320 - RNA, 19 nt, Artificial Sequence
  Description of Artificial Sequence: Synthetic oligonucleotide
agacccuccagaagagcuu

SEQ ID NO: 1235321 - RNA, 19 nt, Artificial Sequence
  Description of Artificial Sequence: Synthetic oligonucleotide
agcugacuuaggugccauu

SEQ ID NO: 1235322 - RNA, 19 nt, Artificial Sequence
  Description of Artificial Sequence: Synthetic oligonucleotide
cagugcgugagcggcagaa

SEQ ID NO: 1235323 - RNA, 19 nt, Artificial Sequence
  Description of Artificial Sequence: Synthetic oligonucleotide
ccacuccggcuaauuuucc

SEQ ID NO: 1235324 - RNA, 19 nt, Artificial Sequence
  Description of Artificial Sequence: Synthetic oligonucleotide
ccuguacccugcucaguuc

SEQ ID NO: 1235325 - RNA, 19 nt, Artificial Sequence
  Description of Artificial Sequence: Synthetic oligonucleotide
cugcaaccuuucauuuucu

SEQ ID NO: 1235326 - RNA, 19 nt, Artificial Sequence
  Description of Artificial Sequence: Synthetic oligonucleotide
cagagccucuugaguuuga

SEQ ID NO: 1235327 - RNA, 19 nt, Artificial Sequence
  Description of Artificial Sequence: Synthetic oligonucleotide
cacagcgugugaacccugu

SEQ ID NO: 1235328 - RNA, 19 nt, Artificial Sequence
  Description of Artificial Sequence: Synthetic oligonucleotide
cuccggacaggaaggacuu

SEQ ID NO: 1235329 - RNA, 19 nt, Artificial Sequence
  Description of Artificial Sequence: Synthetic oligonucleotide
ggcaugcaagugggacugg

SEQ ID NO: 1235330 - RNA, 19 nt, Artificial Sequence
  Description of Artificial Sequence: Synthetic oligonucleotide
guccuucgcuccagguuuc

SEQ ID NO: 1235331 - RNA, 19 nt, Artificial Sequence
  Description of Artificial Sequence: Synthetic oligonucleotide
ggcagaaggcucaggagau

SEQ ID NO: 1235332 - RNA, 19 nt, Artificial Sequence
  Description of Artificial Sequence: Synthetic oligonucleotide
gggaacacuggccgucugu

SEQ ID NO: 1235333 - RNA, 19 nt, Artificial Sequence
  Description of Artificial Sequence: Synthetic oligonucleotide
gccaucggagggacuggag

SEQ ID NO: 1235334 - RNA, 19 nt, Artificial Sequence
  Description of Artificial Sequence: Synthetic oligonucleotide
caaccacacagggcaugca

SEQ ID NO: 1235335 - RNA, 19 nt, Artificial Sequence
  Description of Artificial Sequence: Synthetic oligonucleotide
gcucgacaucucugggcac

SEQ ID NO: 1235336 - RNA, 19 nt, Artificial Sequence
  Description of Artificial Sequence: Synthetic oligonucleotide
gccgucuguggggacugag

SEQ ID NO: 1235337 - RNA, 19 nt, Artificial Sequence
  Description of Artificial Sequence: Synthetic oligonucleotide
ccggcuaauuuuccaugga

SEQ ID NO: 1235338 - RNA, 19 nt, Artificial Sequence
  Description of Artificial Sequence: Synthetic oligonucleotide
cucaguccuuaaccucucu

SEQ ID NO: 1235339 - RNA, 19 nt, Artificial Sequence
  Description of Artificial Sequence: Synthetic oligonucleotide
ggucuccggacaggaagga

SEQ ID NO: 1235340 - RNA, 19 nt, Artificial Sequence
  Description of Artificial Sequence: Synthetic oligonucleotide
gcccucggccacacaauug

SEQ ID NO: 1235341 - RNA, 19 nt, Artificial Sequence
  Description of Artificial Sequence: Synthetic oligonucleotide
cgugagcggcagaaggcuc

SEQ ID NO: 1235342 - RNA, 19 nt, Artificial Sequence
  Description of Artificial Sequence: Synthetic oligonucleotide
ccgucuguggggacugaga

SEQ ID NO: 1235343 - RNA, 19 nt, Artificial Sequence
  Description of Artificial Sequence: Synthetic oligonucleotide
ugguuccacuccggcuaau

SEQ ID NO: 1235344 - RNA, 19 nt, Artificial Sequence
  Description of Artificial Sequence: Synthetic oligonucleotide
gccauugccugaguagagu

SEQ ID NO: 1235345 - RNA, 19 nt, Artificial Sequence
  Description of Artificial Sequence: Synthetic oligonucleotide
gcccuaguccuucgcucca

SEQ ID NO: 1235346 - RNA, 19 nt, Artificial Sequence
  Description of Artificial Sequence: Synthetic oligonucleotide
gcgugagcggcagaaggcu

SEQ ID NO: 1235347 - RNA, 19 nt, Artificial Sequence
  Description of Artificial Sequence: Synthetic oligonucleotide
cuggccgucuguggggacu

SEQ ID NO: 1235348 - RNA, 19 nt, Artificial Sequence
  Description of Artificial Sequence: Synthetic oligonucleotide
gucucugaccccggcuaau

SEQ ID NO: 1235349 - RNA, 19 nt, Artificial Sequence
  Description of Artificial Sequence: Synthetic oligonucleotide
gguuccacuccggcuaauu

SEQ ID NO: 1235350 - RNA, 19 nt, Artificial Sequence
  Description of Artificial Sequence: Synthetic oligonucleotide
ccucaaucaggcccagcau

SEQ ID NO: 1235351 - RNA, 19 nt, Artificial Sequence
  Description of Artificial Sequence: Synthetic oligonucleotide
cucugacgucagagagcua

SEQ ID NO: 1235352 - RNA, 19 nt, Artificial Sequence
  Description of Artificial Sequence: Synthetic oligonucleotide
caacaaccuugaggauucu

SEQ ID NO: 1235353 - RNA, 19 nt, Artificial Sequence
  Description of Artificial Sequence: Synthetic oligonucleotide
cccugugaguccagcuuuu

SEQ ID NO: 1235354 - RNA, 19 nt, Artificial Sequence
  Description of Artificial Sequence: Synthetic oligonucleotide
ggccgucuguggggacuga

SEQ ID NO: 1235355 - RNA, 19 nt, Artificial Sequence
  Description of Artificial Sequence: Synthetic oligonucleotide
ccccggcuaaucugcuuau

SEQ ID NO: 1235356 - RNA, 19 nt, Artificial Sequence
  Description of Artificial Sequence: Synthetic oligonucleotide
aauauagagaaagauaugc

SEQ ID NO: 1235357 - RNA, 19 nt, Artificial Sequence
  Description of Artificial Sequence: Synthetic oligonucleotide
ucauauuuauguaacgucg

SEQ ID NO: 1235358 - RNA, 19 nt, Artificial Sequence
  Description of Artificial Sequence: Synthetic oligonucleotide
aguauugaaauauagagaa

SEQ ID NO: 1235359 - RNA, 19 nt, Artificial Sequence
  Description of Artificial Sequence: Synthetic oligonucleotide
acauauuagacucaggaag

SEQ ID NO: 1235360 - RNA, 19 nt, Artificial Sequence
  Description of Artificial Sequence: Synthetic oligonucleotide
uuuaagucauugaagaggc

SEQ ID NO: 1235361 - RNA, 19 nt, Artificial Sequence
  Description of Artificial Sequence: Synthetic oligonucleotide
ugagcauaggcacugaggg

SEQ ID NO: 1235362 - RNA, 19 nt, Artificial Sequence
  Description of Artificial Sequence: Synthetic oligonucleotide
aaaugaagccauuagaaaa

SEQ ID NO: 1235363 - RNA, 19 nt, Artificial Sequence
  Description of Artificial Sequence: Synthetic oligonucleotide
guagugacggcuuugaagg

SEQ ID NO: 1235364 - RNA, 19 nt, Artificial Sequence
  Description of Artificial Sequence: Synthetic oligonucleotide
aaaagucucccauaacagg

SEQ ID NO: 1235365 - RNA, 19 nt, Artificial Sequence
  Description of Artificial Sequence: Synthetic oligonucleotide
acugauagcgcccaucacc

SEQ ID NO: 1235366 - RNA, 19 nt, Artificial Sequence
  Description of Artificial Sequence: Synthetic oligonucleotide
auacucaggagucacauuc

SEQ ID NO: 1235367 - RNA, 19 nt, Artificial Sequence
  Description of Artificial Sequence: Synthetic oligonucleotide
aauguggugaugccuaaag

SEQ ID NO: 1235368 - RNA, 19 nt, Artificial Sequence
  Description of Artificial Sequence: Synthetic oligonucleotide
auauuuauguaacgucgcc

SEQ ID NO: 1235369 - RNA, 19 nt, Artificial Sequence
  Description of Artificial Sequence: Synthetic oligonucleotide
uguaacgucgcccuguuca

SEQ ID NO: 1235370 - RNA, 19 nt, Artificial Sequence
  Description of Artificial Sequence: Synthetic oligonucleotide
agaaggaauaguccuuucc

SEQ ID NO: 1235371 - RNA, 19 nt, Artificial Sequence
  Description of Artificial Sequence: Synthetic oligonucleotide
auuagacucaggaagaagg

SEQ ID NO: 1235372 - RNA, 19 nt, Artificial Sequence
  Description of Artificial Sequence: Synthetic oligonucleotide
aagauaugcauuccccagg

SEQ ID NO: 1235373 - RNA, 19 nt, Artificial Sequence
  Description of Artificial Sequence: Synthetic oligonucleotide
aaugaagccauuagaaaag

SEQ ID NO: 1235374 - RNA, 19 nt, Artificial Sequence
  Description of Artificial Sequence: Synthetic oligonucleotide
aaaacaucucaagaugggg

SEQ ID NO: 1235375 - RNA, 19 nt, Artificial Sequence
  Description of Artificial Sequence: Synthetic oligonucleotide
aaaaugaagccauuagaaa

SEQ ID NO: 1235376 - RNA, 19 nt, Artificial Sequence
  Description of Artificial Sequence: Synthetic oligonucleotide
uuugcagugggugagagcu

SEQ ID NO: 1235377 - RNA, 19 nt, Artificial Sequence
  Description of Artificial Sequence: Synthetic oligonucleotide
uccauuagugcuuuguucu

SEQ ID NO: 1235378 - RNA, 19 nt, Artificial Sequence
  Description of Artificial Sequence: Synthetic oligonucleotide
ugcacuacauuguacacca

SEQ ID NO: 1235379 - RNA, 19 nt, Artificial Sequence
  Description of Artificial Sequence: Synthetic oligonucleotide
ugaacagggguagugacgg

SEQ ID NO: 1235380 - RNA, 19 nt, Artificial Sequence
  Description of Artificial Sequence: Synthetic oligonucleotide
aggacauccaucugcacgg

SEQ ID NO: 1235381 - RNA, 19 nt, Artificial Sequence
  Description of Artificial Sequence: Synthetic oligonucleotide
ugucaaaacaucucaagau

SEQ ID NO: 1235382 - RNA, 19 nt, Artificial Sequence
  Description of Artificial Sequence: Synthetic oligonucleotide
auuuauguaacgucgcccu

SEQ ID NO: 1235383 - RNA, 19 nt, Artificial Sequence
  Description of Artificial Sequence: Synthetic oligonucleotide
ucaagauggggaaaagucu

SEQ ID NO: 1235384 - RNA, 19 nt, Artificial Sequence
  Description of Artificial Sequence: Synthetic oligonucleotide
uugagcauaggcacugagg

SEQ ID NO: 1235385 - RNA, 19 nt, Artificial Sequence
  Description of Artificial Sequence: Synthetic oligonucleotide
cauauuuauguaacgucgc

SEQ ID NO: 1235386 - RNA, 19 nt, Artificial Sequence
  Description of Artificial Sequence: Synthetic oligonucleotide
uaugcauuccccaggauau

SEQ ID NO: 1235387 - RNA, 19 nt, Artificial Sequence
  Description of Artificial Sequence: Synthetic oligonucleotide
uggugaugccuaaaguugg

SEQ ID NO: 1235388 - RNA, 19 nt, Artificial Sequence
  Description of Artificial Sequence: Synthetic oligonucleotide
cucgaacuauguuacaggg

SEQ ID NO: 1235389 - RNA, 19 nt, Artificial Sequence
  Description of Artificial Sequence: Synthetic oligonucleotide
acugucaaaacaucucaag

SEQ ID NO: 1235390 - RNA, 19 nt, Artificial Sequence
  Description of Artificial Sequence: Synthetic oligonucleotide
acaaguuuugcagggagac

SEQ ID NO: 1235391 - RNA, 19 nt, Artificial Sequence
  Description of Artificial Sequence: Synthetic oligonucleotide
uuagacucaggaagaaggc

SEQ ID NO: 1235392 - RNA, 19 nt, Artificial Sequence
  Description of Artificial Sequence: Synthetic oligonucleotide
ugacaaguuuugcagggag

SEQ ID NO: 1235393 - RNA, 19 nt, Artificial Sequence
  Description of Artificial Sequence: Synthetic oligonucleotide
guacaccucacccagcugg

SEQ ID NO: 1235394 - RNA, 19 nt, Artificial Sequence
  Description of Artificial Sequence: Synthetic oligonucleotide
uuuccugucgaccuucucu

SEQ ID NO: 1235395 - RNA, 19 nt, Artificial Sequence
  Description of Artificial Sequence: Synthetic oligonucleotide
uccauucaccaccagcagg

SEQ ID NO: 1235396 - RNA, 19 nt, Artificial Sequence
  Description of Artificial Sequence: Synthetic oligonucleotide
uauuuauguaacgucgccc

SEQ ID NO: 1235397 - RNA, 19 nt, Artificial Sequence
  Description of Artificial Sequence: Synthetic oligonucleotide
cauugacaaguuuugcagg

SEQ ID NO: 1235398 - RNA, 19 nt, Artificial Sequence
  Description of Artificial Sequence: Synthetic oligonucleotide
agaacccaguacuuccucc

SEQ ID NO: 1235399 - RNA, 19 nt, Artificial Sequence
  Description of Artificial Sequence: Synthetic oligonucleotide
ucggaaucuaccaagccaa

SEQ ID NO: 1235400 - RNA, 19 nt, Artificial Sequence
  Description of Artificial Sequence: Synthetic oligonucleotide
aacaucucaagauggggaa

SEQ ID NO: 1235401 - RNA, 19 nt, Artificial Sequence
  Description of Artificial Sequence: Synthetic oligonucleotide
cauaacagggucccaacag

SEQ ID NO: 1235402 - RNA, 19 nt, Artificial Sequence
  Description of Artificial Sequence: Synthetic oligonucleotide
gaaagauaugcauucccca

SEQ ID NO: 1235403 - RNA, 19 nt, Artificial Sequence
  Description of Artificial Sequence: Synthetic oligonucleotide
cacacugcggucucgaagc

SEQ ID NO: 1235404 - RNA, 19 nt, Artificial Sequence
  Description of Artificial Sequence: Synthetic oligonucleotide
ugacugauagcgcccauca

SEQ ID NO: 1235405 - RNA, 19 nt, Artificial Sequence
  Description of Artificial Sequence: Synthetic oligonucleotide
accaucggaaucuaccaag

SEQ ID NO: 1235406 - RNA, 19 nt, Artificial Sequence
  Description of Artificial Sequence: Synthetic oligonucleotide
aaacaucucaagaugggga

SEQ ID NO: 1235407 - RNA, 19 nt, Artificial Sequence
  Description of Artificial Sequence: Synthetic oligonucleotide
cucaggaauagcgacagag

SEQ ID NO: 1235408 - RNA, 19 nt, Artificial Sequence
  Description of Artificial Sequence: Synthetic oligonucleotide
aucggaaucuaccaagcca

SEQ ID NO: 1235409 - RNA, 19 nt, Artificial Sequence
  Description of Artificial Sequence: Synthetic oligonucleotide
ggaaaagucucccauaaca

SEQ ID NO: 1235410 - RNA, 19 nt, Artificial Sequence
  Description of Artificial Sequence: Synthetic oligonucleotide
agaaugcucaucuccggag

SEQ ID NO: 1235411 - RNA, 19 nt, Artificial Sequence
  Description of Artificial Sequence: Synthetic oligonucleotide
gagaucuuaggguucuggc

SEQ ID NO: 1235412 - RNA, 19 nt, Artificial Sequence
  Description of Artificial Sequence: Synthetic oligonucleotide
cuugcugggagaucuuagg

SEQ ID NO: 1235413 - RNA, 19 nt, Artificial Sequence
  Description of Artificial Sequence: Synthetic oligonucleotide
cagcauuagagccugugcc

SEQ ID NO: 1235414 - RNA, 19 nt, Artificial Sequence
  Description of Artificial Sequence: Synthetic oligonucleotide
uccccaaugagcacgcccc

SEQ ID NO: 1235415 - RNA, 19 nt, Artificial Sequence
  Description of Artificial Sequence: Synthetic oligonucleotide
agaacggggaucuugggaa

SEQ ID NO: 1235416 - RNA, 19 nt, Artificial Sequence
  Description of Artificial Sequence: Synthetic oligonucleotide
aaugagcacgccccagcuc

SEQ ID NO: 1235417 - RNA, 19 nt, Artificial Sequence
  Description of Artificial Sequence: Synthetic oligonucleotide
guugggcucaggaauagcg

SEQ ID NO: 1235418 - RNA, 19 nt, Artificial Sequence
  Description of Artificial Sequence: Synthetic oligonucleotide
uucacgacacccaggugag

SEQ ID NO: 1235419 - RNA, 19 nt, Artificial Sequence
  Description of Artificial Sequence: Synthetic oligonucleotide
uggcgaagcaccauugaca

SEQ ID NO: 1235420 - RNA, 19 nt, Artificial Sequence
  Description of Artificial Sequence: Synthetic oligonucleotide
gaugaacagggguagugac

SEQ ID NO: 1235421 - RNA, 19 nt, Artificial Sequence
  Description of Artificial Sequence: Synthetic oligonucleotide
ugaugccuaaaguugggcu

SEQ ID NO: 1235422 - RNA, 19 nt, Artificial Sequence
  Description of Artificial Sequence: Synthetic oligonucleotide
agcaaggaccaucggaauc

SEQ ID NO: 1235423 - RNA, 19 nt, Artificial Sequence
  Description of Artificial Sequence: Synthetic oligonucleotide
aauagcgacagagucccca

SEQ ID NO: 1235424 - RNA, 19 nt, Artificial Sequence
  Description of Artificial Sequence: Synthetic oligonucleotide
uauuagacucaggaagaag

SEQ ID NO: 1235425 - RNA, 19 nt, Artificial Sequence
  Description of Artificial Sequence: Synthetic oligonucleotide
cuagugaggaauuccagga

SEQ ID NO: 1235426 - RNA, 19 nt, Artificial Sequence
  Description of Artificial Sequence: Synthetic oligonucleotide
ucgaacuauguuacagggc

SEQ ID NO: 1235427 - RNA, 19 nt, Artificial Sequence
  Description of Artificial Sequence: Synthetic oligonucleotide
gguagugacggcuuugaag

SEQ ID NO: 1235428 - RNA, 19 nt, Artificial Sequence
  Description of Artificial Sequence: Synthetic oligonucleotide
acaagucuccauucacgac

SEQ ID NO: 1235429 - RNA, 19 nt, Artificial Sequence
  Description of Artificial Sequence: Synthetic oligonucleotide
auaugcauuccccaggaua

SEQ ID NO: 1235430 - RNA, 19 nt, Artificial Sequence
  Description of Artificial Sequence: Synthetic oligonucleotide
uuggguuuugucuuccccu

SEQ ID NO: 1235431 - RNA, 19 nt, Artificial Sequence
  Description of Artificial Sequence: Synthetic oligonucleotide
cuugggaacugucaaaaca

SEQ ID NO: 1235432 - RNA, 19 nt, Artificial Sequence
  Description of Artificial Sequence: Synthetic oligonucleotide
ucucugcuugagcauaggc

SEQ ID NO: 1235433 - RNA, 19 nt, Artificial Sequence
  Description of Artificial Sequence: Synthetic oligonucleotide
uuguacaccaucacugcau

SEQ ID NO: 1235434 - RNA, 19 nt, Artificial Sequence
  Description of Artificial Sequence: Synthetic oligonucleotide
uacauacauauuagacuca

SEQ ID NO: 1235435 - RNA, 19 nt, Artificial Sequence
  Description of Artificial Sequence: Synthetic oligonucleotide
uuccugucgaccuucucug

SEQ ID NO: 1235436 - RNA, 19 nt, Artificial Sequence
  Description of Artificial Sequence: Synthetic oligonucleotide
uuuauguaacgucgcccug

SEQ ID NO: 1235437 - RNA, 19 nt, Artificial Sequence
  Description of Artificial Sequence: Synthetic oligonucleotide
ggaauagcgacagaguccc

SEQ ID NO: 1235438 - RNA, 19 nt, Artificial Sequence
  Description of Artificial Sequence: Synthetic oligonucleotide
auauagagaaagauaugca

SEQ ID NO: 1235439 - RNA, 19 nt, Artificial Sequence
  Description of Artificial Sequence: Synthetic oligonucleotide
agacaagucuccauucacg

SEQ ID NO: 1235440 - RNA, 19 nt, Artificial Sequence
  Description of Artificial Sequence: Synthetic oligonucleotide
aauaguccuuucccuugug

SEQ ID NO: 1235441 - RNA, 19 nt, Artificial Sequence
  Description of Artificial Sequence: Synthetic oligonucleotide
gccauuagaaaaguuaagc

SEQ ID NO: 1235442 - RNA, 19 nt, Artificial Sequence
  Description of Artificial Sequence: Synthetic oligonucleotide
ucucccauaacaggguccc

SEQ ID NO: 1235443 - RNA, 19 nt, Artificial Sequence
  Description of Artificial Sequence: Synthetic oligonucleotide
ccauugacaaguuuugcag

SEQ ID NO: 1235444 - RNA, 19 nt, Artificial Sequence
  Description of Artificial Sequence: Synthetic oligonucleotide
auugcuggacgcuuuccug

SEQ ID NO: 1235445 - RNA, 19 nt, Artificial Sequence
  Description of Artificial Sequence: Synthetic oligonucleotide
uccacccgaacacuggaga

SEQ ID NO: 1235446 - RNA, 19 nt, Artificial Sequence
  Description of Artificial Sequence: Synthetic oligonucleotide
auagcaaggaccaucggaa

SEQ ID NO: 1235447 - RNA, 19 nt, Artificial Sequence
  Description of Artificial Sequence: Synthetic oligonucleotide
ggcugguuagccuagugag

SEQ ID NO: 1235448 - RNA, 19 nt, Artificial Sequence
  Description of Artificial Sequence: Synthetic oligonucleotide
uuccauucaccaccagcag

SEQ ID NO: 1235449 - RNA, 19 nt, Artificial Sequence
  Description of Artificial Sequence: Synthetic oligonucleotide
aggagcggccaucaaggac

SEQ ID NO: 1235450 - RNA, 19 nt, Artificial Sequence
  Description of Artificial Sequence: Synthetic oligonucleotide
uuauguaacgucgcccugu

SEQ ID NO: 1235451 - RNA, 19 nt, Artificial Sequence
  Description of Artificial Sequence: Synthetic oligonucleotide
cugucaaaacaucucaaga

SEQ ID NO: 1235452 - RNA, 19 nt, Artificial Sequence
  Description of Artificial Sequence: Synthetic oligonucleotide
cauagcaaggaccaucgga

SEQ ID NO: 1235453 - RNA, 19 nt, Artificial Sequence
  Description of Artificial Sequence: Synthetic oligonucleotide
acagaguccccaaugagca

SEQ ID NO: 1235454 - RNA, 19 nt, Artificial Sequence
  Description of Artificial Sequence: Synthetic oligonucleotide
agucucccauaacaggguc

SEQ ID NO: 1235455 - RNA, 19 nt, Artificial Sequence
  Description of Artificial Sequence: Synthetic oligonucleotide
gacauggcgagaaugcuca

SEQ ID NO: 1235456 - RNA, 19 nt, Artificial Sequence
  Description of Artificial Sequence: Synthetic oligonucleotide
accaggagcggccaucaag

SEQ ID NO: 1235457 - RNA, 19 nt, Artificial Sequence
  Description of Artificial Sequence: Synthetic oligonucleotide
ugacauggcgagaaugcuc

SEQ ID NO: 1235458 - RNA, 19 nt, Artificial Sequence
  Description of Artificial Sequence: Synthetic oligonucleotide
agugacggcuuugaagggg

SEQ ID NO: 1235459 - RNA, 19 nt, Artificial Sequence
  Description of Artificial Sequence: Synthetic oligonucleotide
cuauguuacagggcagagg

SEQ ID NO: 1235460 - RNA, 19 nt, Artificial Sequence
  Description of Artificial Sequence: Synthetic oligonucleotide
cuggacgcaagcuucccag

SEQ ID NO: 1235461 - RNA, 19 nt, Artificial Sequence
  Description of Artificial Sequence: Synthetic oligonucleotide
aacgucgcccuguucagau

SEQ ID NO: 1235462 - RNA, 19 nt, Artificial Sequence
  Description of Artificial Sequence: Synthetic oligonucleotide
gagaugaacagggguagug

SEQ ID NO: 1235463 - RNA, 19 nt, Artificial Sequence
  Description of Artificial Sequence: Synthetic oligonucleotide
aacccucuagggccucccc

SEQ ID NO: 1235464 - RNA, 19 nt, Artificial Sequence
  Description of Artificial Sequence: Synthetic oligonucleotide
aacagggguagugacggcu

SEQ ID NO: 1235465 - RNA, 19 nt, Artificial Sequence
  Description of Artificial Sequence: Synthetic oligonucleotide
agcgacagaguccccaaug

SEQ ID NO: 1235466 - RNA, 19 nt, Artificial Sequence
  Description of Artificial Sequence: Synthetic oligonucleotide
uguacaccaucacugcaua

SEQ ID NO: 1235467 - RNA, 19 nt, Artificial Sequence
  Description of Artificial Sequence: Synthetic oligonucleotide
aaacccucuagggccuccc

SEQ ID NO: 1235468 - RNA, 19 nt, Artificial Sequence
  Description of Artificial Sequence: Synthetic oligonucleotide
acccgaacacuggagaagg

SEQ ID NO: 1235469 - RNA, 19 nt, Artificial Sequence
  Description of Artificial Sequence: Synthetic oligonucleotide
acugcggucucgaagccac

SEQ ID NO: 1235470 - RNA, 19 nt, Artificial Sequence
  Description of Artificial Sequence: Synthetic oligonucleotide
ccaacaguuccauuagugc

SEQ ID NO: 1235471 - RNA, 19 nt, Artificial Sequence
  Description of Artificial Sequence: Synthetic oligonucleotide
ucucaagauggggaaaagu

SEQ ID NO: 1235472 - RNA, 19 nt, Artificial Sequence
  Description of Artificial Sequence: Synthetic oligonucleotide
aggugugggcagcagcaac

SEQ ID NO: 1235473 - RNA, 19 nt, Artificial Sequence
  Description of Artificial Sequence: Synthetic oligonucleotide
uuaagucauugaagaggca

SEQ ID NO: 1235474 - RNA, 19 nt, Artificial Sequence
  Description of Artificial Sequence: Synthetic oligonucleotide
aaaggaggcucgaacuaug

SEQ ID NO: 1235475 - RNA, 19 nt, Artificial Sequence
  Description of Artificial Sequence: Synthetic oligonucleotide
ggcgagaaugcucaucucc

SEQ ID NO: 1235476 - RNA, 19 nt, Artificial Sequence
  Description of Artificial Sequence: Synthetic oligonucleotide
aguuccauuagugcuuugu

SEQ ID NO: 1235477 - RNA, 19 nt, Artificial Sequence
  Description of Artificial Sequence: Synthetic oligonucleotide
gcucgaacuauguuacagg

SEQ ID NO: 1235478 - RNA, 19 nt, Artificial Sequence
  Description of Artificial Sequence: Synthetic oligonucleotide
cugauagcgcccaucacca

SEQ ID NO: 1235479 - RNA, 19 nt, Artificial Sequence
  Description of Artificial Sequence: Synthetic oligonucleotide
aacaguuccauuagugcuu

SEQ ID NO: 1235480 - RNA, 19 nt, Artificial Sequence
  Description of Artificial Sequence: Synthetic oligonucleotide
uagccugucggacacuguc

SEQ ID NO: 1235481 - RNA, 19 nt, Artificial Sequence
  Description of Artificial Sequence: Synthetic oligonucleotide
uuuugcagugggugagagc

SEQ ID NO: 1235482 - RNA, 19 nt, Artificial Sequence
  Description of Artificial Sequence: Synthetic oligonucleotide
agcaccauugacaaguuuu

SEQ ID NO: 1235483 - RNA, 19 nt, Artificial Sequence
  Description of Artificial Sequence: Synthetic oligonucleotide
uccauaccaauuccugcaa

SEQ ID NO: 1235484 - RNA, 19 nt, Artificial Sequence
  Description of Artificial Sequence: Synthetic oligonucleotide
ugcucaucuccggagucgg

SEQ ID NO: 1235485 - RNA, 19 nt, Artificial Sequence
  Description of Artificial Sequence: Synthetic oligonucleotide
uugcuggacgcuuuccugu

SEQ ID NO: 1235486 - RNA, 19 nt, Artificial Sequence
  Description of Artificial Sequence: Synthetic oligonucleotide
gagaaugcucaucuccgga

SEQ ID NO: 1235487 - RNA, 19 nt, Artificial Sequence
  Description of Artificial Sequence: Synthetic oligonucleotide
gaacccaguacuuccucca

SEQ ID NO: 1235488 - RNA, 19 nt, Artificial Sequence
  Description of Artificial Sequence: Synthetic oligonucleotide
caucggaaucuaccaagcc

SEQ ID NO: 1235489 - RNA, 19 nt, Artificial Sequence
  Description of Artificial Sequence: Synthetic oligonucleotide
agaccugcuucgcuucuuc

SEQ ID NO: 1235490 - RNA, 19 nt, Artificial Sequence
  Description of Artificial Sequence: Synthetic oligonucleotide
aggcguuuccacccgaaca

SEQ ID NO: 1235491 - RNA, 19 nt, Artificial Sequence
  Description of Artificial Sequence: Synthetic oligonucleotide
ugggcuggacgcaagcuuc

SEQ ID NO: 1235492 - RNA, 19 nt, Artificial Sequence
  Description of Artificial Sequence: Synthetic oligonucleotide
gagccugugccucacccug

SEQ ID NO: 1235493 - RNA, 19 nt, Artificial Sequence
  Description of Artificial Sequence: Synthetic oligonucleotide
agccaaaugugaaggggac

SEQ ID NO: 1235494 - RNA, 19 nt, Artificial Sequence
  Description of Artificial Sequence: Synthetic oligonucleotide
ggcugcuagaguucugugg

SEQ ID NO: 1235495 - RNA, 19 nt, Artificial Sequence
  Description of Artificial Sequence: Synthetic oligonucleotide
ucaucuccggagucggucu

SEQ ID NO: 1235496 - RNA, 19 nt, Artificial Sequence
  Description of Artificial Sequence: Synthetic oligonucleotide
ugugcucaguggcuugcgc

SEQ ID NO: 1235497 - RNA, 19 nt, Artificial Sequence
  Description of Artificial Sequence: Synthetic oligonucleotide
cugcacuacauuguacacc

SEQ ID NO: 1235498 - RNA, 19 nt, Artificial Sequence
  Description of Artificial Sequence: Synthetic oligonucleotide
cuguucagaugaaggucgg

SEQ ID NO: 1235499 - RNA, 19 nt, Artificial Sequence
  Description of Artificial Sequence: Synthetic oligonucleotide
guaacgucgcccuguucag

SEQ ID NO: 1235500 - RNA, 19 nt, Artificial Sequence
  Description of Artificial Sequence: Synthetic oligonucleotide
gagcauaggcacugagggc

SEQ ID NO: 1235501 - RNA, 19 nt, Artificial Sequence
  Description of Artificial Sequence: Synthetic oligonucleotide
aaguugggcucaggaauag

SEQ ID NO: 1235502 - RNA, 19 nt, Artificial Sequence
  Description of Artificial Sequence: Synthetic oligonucleotide
gugggugagagcuccugag

SEQ ID NO: 1235503 - RNA, 19 nt, Artificial Sequence
  Description of Artificial Sequence: Synthetic oligonucleotide
uuccacccgaacacuggag

SEQ ID NO: 1235504 - RNA, 19 nt, Artificial Sequence
  Description of Artificial Sequence: Synthetic oligonucleotide
aaaguugggcucaggaaua

SEQ ID NO: 1235505 - RNA, 19 nt, Artificial Sequence
  Description of Artificial Sequence: Synthetic oligonucleotide
caggugagcuuaucucugg

SEQ ID NO: 1235506 - RNA, 19 nt, Artificial Sequence
  Description of Artificial Sequence: Synthetic oligonucleotide
aggucgggauugcuggacg

SEQ ID NO: 1235507 - RNA, 19 nt, Artificial Sequence
  Description of Artificial Sequence: Synthetic oligonucleotide
agaugaacagggguaguga

SEQ ID NO: 1235508 - RNA, 19 nt, Artificial Sequence
  Description of Artificial Sequence: Synthetic oligonucleotide
ugaagccauuagaaaaguu

SEQ ID NO: 1235509 - RNA, 19 nt, Artificial Sequence
  Description of Artificial Sequence: Synthetic oligonucleotide
aucuuaggguucuggccag

SEQ ID NO: 1235510 - RNA, 19 nt, Artificial Sequence
  Description of Artificial Sequence: Synthetic oligonucleotide
aacugucaaaacaucucaa

SEQ ID NO: 1235511 - RNA, 19 nt, Artificial Sequence
  Description of Artificial Sequence: Synthetic oligonucleotide
caggauauaccaggagcgg

SEQ ID NO: 1235512 - RNA, 19 nt, Artificial Sequence
  Description of Artificial Sequence: Synthetic oligonucleotide
cuccauucacgacacccag

SEQ ID NO: 1235513 - RNA, 19 nt, Artificial Sequence
  Description of Artificial Sequence: Synthetic oligonucleotide
cuggcgaagcaccauugac

SEQ ID NO: 1235514 - RNA, 19 nt, Artificial Sequence
  Description of Artificial Sequence: Synthetic oligonucleotide
gcaagaacggggaucuugg

SEQ ID NO: 1235515 - RNA, 19 nt, Artificial Sequence
  Description of Artificial Sequence: Synthetic oligonucleotide
acccaguacuuccuccauc

SEQ ID NO: 1235516 - RNA, 19 nt, Artificial Sequence
  Description of Artificial Sequence: Synthetic oligonucleotide
acacugcggucucgaagcc

SEQ ID NO: 1235517 - RNA, 19 nt, Artificial Sequence
  Description of Artificial Sequence: Synthetic oligonucleotide
ucuagggccuccccauaac

SEQ ID NO: 1235518 - RNA, 19 nt, Artificial Sequence
  Description of Artificial Sequence: Synthetic oligonucleotide
gcggccaucaaggacaucc

SEQ ID NO: 1235519 - RNA, 19 nt, Artificial Sequence
  Description of Artificial Sequence: Synthetic oligonucleotide
agaggcugacugauagcgc

SEQ ID NO: 1235520 - RNA, 19 nt, Artificial Sequence
  Description of Artificial Sequence: Synthetic oligonucleotide
gacgcuuuccugucgaccu

SEQ ID NO: 1235521 - RNA, 19 nt, Artificial Sequence
  Description of Artificial Sequence: Synthetic oligonucleotide
ccaugcaggguccagugcg

SEQ ID NO: 1235522 - RNA, 19 nt, Artificial Sequence
  Description of Artificial Sequence: Synthetic oligonucleotide
uauguaacgucgcccuguu

SEQ ID NO: 1235523 - RNA, 19 nt, Artificial Sequence
  Description of Artificial Sequence: Synthetic oligonucleotide
aguugggcucaggaauagc

SEQ ID NO: 1235524 - RNA, 19 nt, Artificial Sequence
  Description of Artificial Sequence: Synthetic oligonucleotide
auagcgcccaucaccacag

SEQ ID NO: 1235525 - RNA, 19 nt, Artificial Sequence
  Description of Artificial Sequence: Synthetic oligonucleotide
caacaguuccauuagugcu

SEQ ID NO: 1235526 - RNA, 19 nt, Artificial Sequence
  Description of Artificial Sequence: Synthetic oligonucleotide
ccuuuaagucauugaagag

SEQ ID NO: 1235527 - RNA, 19 nt, Artificial Sequence
  Description of Artificial Sequence: Synthetic oligonucleotide
uucccuugugccgaaugug

SEQ ID NO: 1235528 - RNA, 19 nt, Artificial Sequence
  Description of Artificial Sequence: Synthetic oligonucleotide
ucgaccuucucugcuugag

SEQ ID NO: 1235529 - RNA, 19 nt, Artificial Sequence
  Description of Artificial Sequence: Synthetic oligonucleotide
uagggccuccccauaacuc

SEQ ID NO: 1235530 - RNA, 19 nt, Artificial Sequence
  Description of Artificial Sequence: Synthetic oligonucleotide
uugacaaguuuugcaggga

SEQ ID NO: 1235531 - RNA, 19 nt, Artificial Sequence
  Description of Artificial Sequence: Synthetic oligonucleotide
gugccgaauguggugaugc

SEQ ID NO: 1235532 - RNA, 19 nt, Artificial Sequence
  Description of Artificial Sequence: Synthetic oligonucleotide
ggauauaccaggagcggcc

SEQ ID NO: 1235533 - RNA, 19 nt, Artificial Sequence
  Description of Artificial Sequence: Synthetic oligonucleotide
aagucucccauaacagggu

SEQ ID NO: 1235534 - RNA, 19 nt, Artificial Sequence
  Description of Artificial Sequence: Synthetic oligonucleotide
cugguuagccuagugagga

SEQ ID NO: 1235535 - RNA, 19 nt, Artificial Sequence
  Description of Artificial Sequence: Synthetic oligonucleotide
cuaccaagccaaaugugaa

SEQ ID NO: 1235536 - RNA, 19 nt, Artificial Sequence
  Description of Artificial Sequence: Synthetic oligonucleotide
auaccaauuccugcaauuu

SEQ ID NO: 1235537 - RNA, 19 nt, Artificial Sequence
  Description of Artificial Sequence: Synthetic oligonucleotide
uuagccuagugaggaauuc

SEQ ID NO: 1235538 - RNA, 19 nt, Artificial Sequence
  Description of Artificial Sequence: Synthetic oligonucleotide
cgaacuauguuacagggca

SEQ ID NO: 1235539 - RNA, 19 nt, Artificial Sequence
  Description of Artificial Sequence: Synthetic oligonucleotide
ggccaacuuagccugucgg

SEQ ID NO: 1235540 - RNA, 19 nt, Artificial Sequence
  Description of Artificial Sequence: Synthetic oligonucleotide
uacaccucacccagcuggu

SEQ ID NO: 1235541 - RNA, 19 nt, Artificial Sequence
  Description of Artificial Sequence: Synthetic oligonucleotide
uggcuugcgcuccaagguc

SEQ ID NO: 1235542 - RNA, 19 nt, Artificial Sequence
  Description of Artificial Sequence: Synthetic oligonucleotide
ggugagagcuccugagaag

SEQ ID NO: 1235543 - RNA, 19 nt, Artificial Sequence
  Description of Artificial Sequence: Synthetic oligonucleotide
ggcucgaacuauguuacag

SEQ ID NO: 1235544 - RNA, 19 nt, Artificial Sequence
  Description of Artificial Sequence: Synthetic oligonucleotide
auauuagacucaggaagaa

SEQ ID NO: 1235545 - RNA, 19 nt, Artificial Sequence
  Description of Artificial Sequence: Synthetic oligonucleotide
guacaccaucacugcauag

SEQ ID NO: 1235546 - RNA, 19 nt, Artificial Sequence
  Description of Artificial Sequence: Synthetic oligonucleotide
cccaacaguuccauuagug

SEQ ID NO: 1235547 - RNA, 19 nt, Artificial Sequence
  Description of Artificial Sequence: Synthetic oligonucleotide
uggggaaaagucucccaua

SEQ ID NO: 1235548 - RNA, 19 nt, Artificial Sequence
  Description of Artificial Sequence: Synthetic oligonucleotide
auagcgacagaguccccaa

SEQ ID NO: 1235549 - RNA, 19 nt, Artificial Sequence
  Description of Artificial Sequence: Synthetic oligonucleotide
gauugcuggacgcuuuccu

SEQ ID NO: 1235550 - RNA, 19 nt, Artificial Sequence
  Description of Artificial Sequence: Synthetic oligonucleotide
ucccauaacagggucccaa

SEQ ID NO: 1235551 - RNA, 19 nt, Artificial Sequence
  Description of Artificial Sequence: Synthetic oligonucleotide
uucucugcuugagcauagg

SEQ ID NO: 1235552 - RNA, 19 nt, Artificial Sequence
  Description of Artificial Sequence: Synthetic oligonucleotide
gauauaccaggagcggcca

SEQ ID NO: 1235553 - RNA, 19 nt, Artificial Sequence
  Description of Artificial Sequence: Synthetic oligonucleotide
aucuaccaagccaaaugug

SEQ ID NO: 1235554 - RNA, 19 nt, Artificial Sequence
  Description of Artificial Sequence: Synthetic oligonucleotide
augccuaaaguugggcuca

SEQ ID NO: 1235555 - RNA, 19 nt, Artificial Sequence
  Description of Artificial Sequence: Synthetic oligonucleotide
ggagcggccaucaaggaca

SEQ ID NO: 1235556 - RNA, 19 nt, Artificial Sequence
  Description of Artificial Sequence: Synthetic oligonucleotide
gaacggggaucuugggaac

SEQ ID NO: 1235557 - RNA, 19 nt, Artificial Sequence
  Description of Artificial Sequence: Synthetic oligonucleotide
ggccaguauugaaauauag

SEQ ID NO: 1235558 - RNA, 19 nt, Artificial Sequence
  Description of Artificial Sequence: Synthetic oligonucleotide
agucuccauucacgacacc

SEQ ID NO: 1235559 - RNA, 19 nt, Artificial Sequence
  Description of Artificial Sequence: Synthetic oligonucleotide
aacggggaucuugggaacu

SEQ ID NO: 1235560 - RNA, 19 nt, Artificial Sequence
  Description of Artificial Sequence: Synthetic oligonucleotide
ugccgaauguggugaugcc

SEQ ID NO: 1235561 - RNA, 19 nt, Artificial Sequence
  Description of Artificial Sequence: Synthetic oligonucleotide
aucucaagauggggaaaag

SEQ ID NO: 1235562 - RNA, 19 nt, Artificial Sequence
  Description of Artificial Sequence: Synthetic oligonucleotide
gucucgaagccacgguggc

SEQ ID NO: 1235563 - RNA, 19 nt, Artificial Sequence
  Description of Artificial Sequence: Synthetic oligonucleotide
ucggucugcagcuggcgaa

SEQ ID NO: 1235564 - RNA, 19 nt, Artificial Sequence
  Description of Artificial Sequence: Synthetic oligonucleotide
cuuaucucugggccuccac

SEQ ID NO: 1235565 - RNA, 19 nt, Artificial Sequence
  Description of Artificial Sequence: Synthetic oligonucleotide
ggcgaagcaccauugacaa

SEQ ID NO: 1235566 - RNA, 19 nt, Artificial Sequence
  Description of Artificial Sequence: Synthetic oligonucleotide
caacuuagccugucggaca

SEQ ID NO: 1235567 - RNA, 19 nt, Artificial Sequence
  Description of Artificial Sequence: Synthetic oligonucleotide
aggcugacugauagcgccc

SEQ ID NO: 1235568 - RNA, 19 nt, Artificial Sequence
  Description of Artificial Sequence: Synthetic oligonucleotide
gaaugcucaucuccggagu

SEQ ID NO: 1235569 - RNA, 19 nt, Artificial Sequence
  Description of Artificial Sequence: Synthetic oligonucleotide
ggcucaggaauagcgacag

SEQ ID NO: 1235570 - RNA, 19 nt, Artificial Sequence
  Description of Artificial Sequence: Synthetic oligonucleotide
gaggaauuccaggaguugu

SEQ ID NO: 1235571 - RNA, 19 nt, Artificial Sequence
  Description of Artificial Sequence: Synthetic oligonucleotide
uguucucguugccggggcu

SEQ ID NO: 1235572 - RNA, 19 nt, Artificial Sequence
  Description of Artificial Sequence: Synthetic oligonucleotide
ggaccaucggaaucuacca

SEQ ID NO: 1235573 - RNA, 19 nt, Artificial Sequence
  Description of Artificial Sequence: Synthetic oligonucleotide
cccagaggcugacugauag

SEQ ID NO: 1235574 - RNA, 19 nt, Artificial Sequence
  Description of Artificial Sequence: Synthetic oligonucleotide
gcccagaugggcuggacgc

SEQ ID NO: 1235575 - RNA, 19 nt, Artificial Sequence
  Description of Artificial Sequence: Synthetic oligonucleotide
gacugauagcgcccaucac

SEQ ID NO: 1235576 - RNA, 19 nt, Artificial Sequence
  Description of Artificial Sequence: Synthetic oligonucleotide
uagcaaggaccaucggaau

SEQ ID NO: 1235577 - RNA, 19 nt, Artificial Sequence
  Description of Artificial Sequence: Synthetic oligonucleotide
auguaacgucgcccuguuc

SEQ ID NO: 1235578 - RNA, 19 nt, Artificial Sequence
  Description of Artificial Sequence: Synthetic oligonucleotide
gagcuuaucucugggccuc

SEQ ID NO: 1235579 - RNA, 19 nt, Artificial Sequence
  Description of Artificial Sequence: Synthetic oligonucleotide
ccaucacugcauagcaagg

SEQ ID NO: 1235580 - RNA, 19 nt, Artificial Sequence
  Description of Artificial Sequence: Synthetic oligonucleotide
uccugucgaccuucucugc

SEQ ID NO: 1235581 - RNA, 19 nt, Artificial Sequence
  Description of Artificial Sequence: Synthetic oligonucleotide
gaccaucggaaucuaccaa

SEQ ID NO: 1235582 - RNA, 19 nt, Artificial Sequence
  Description of Artificial Sequence: Synthetic oligonucleotide
gaggcguuuccacccgaac

SEQ ID NO: 1235583 - RNA, 19 nt, Artificial Sequence
  Description of Artificial Sequence: Synthetic oligonucleotide
cucaucuccggagucgguc

SEQ ID NO: 1235584 - RNA, 19 nt, Artificial Sequence
  Description of Artificial Sequence: Synthetic oligonucleotide
cagaaggcugguuagccua

SEQ ID NO: 1235585 - RNA, 19 nt, Artificial Sequence
  Description of Artificial Sequence: Synthetic oligonucleotide
cacggucuucuccauacca

SEQ ID NO: 1235586 - RNA, 19 nt, Artificial Sequence
  Description of Artificial Sequence: Synthetic oligonucleotide
uggcugcuagaguucugug

SEQ ID NO: 1235587 - RNA, 19 nt, Artificial Sequence
  Description of Artificial Sequence: Synthetic oligonucleotide
cacccgaacacuggagaag

SEQ ID NO: 1235588 - RNA, 19 nt, Artificial Sequence
  Description of Artificial Sequence: Synthetic oligonucleotide
ugcuagaguucuguggcuu

SEQ ID NO: 1235589 - RNA, 19 nt, Artificial Sequence
  Description of Artificial Sequence: Synthetic oligonucleotide
ccuaaaguugggcucagga

SEQ ID NO: 1235590 - RNA, 19 nt, Artificial Sequence
  Description of Artificial Sequence: Synthetic oligonucleotide
uccaugacauggcgagaau

SEQ ID NO: 1235591 - RNA, 19 nt, Artificial Sequence
  Description of Artificial Sequence: Synthetic oligonucleotide
ggcaagaacggggaucuug

SEQ ID NO: 1235592 - RNA, 19 nt, Artificial Sequence
  Description of Artificial Sequence: Synthetic oligonucleotide
agcuuaucucugggccucc

SEQ ID NO: 1235593 - RNA, 19 nt, Artificial Sequence
  Description of Artificial Sequence: Synthetic oligonucleotide
ggggacuuucuccucugag

SEQ ID NO: 1235594 - RNA, 19 nt, Artificial Sequence
  Description of Artificial Sequence: Synthetic oligonucleotide
gaaggucgggauugcugga

SEQ ID NO: 1235595 - RNA, 19 nt, Artificial Sequence
  Description of Artificial Sequence: Synthetic oligonucleotide
ugcuggacgcuuuccuguc

SEQ ID NO: 1235596 - RNA, 19 nt, Artificial Sequence
  Description of Artificial Sequence: Synthetic oligonucleotide
ggagaggcguuuccacccg

SEQ ID NO: 1235597 - RNA, 19 nt, Artificial Sequence
  Description of Artificial Sequence: Synthetic oligonucleotide
gccaguauugaaauauaga

SEQ ID NO: 1235598 - RNA, 19 nt, Artificial Sequence
  Description of Artificial Sequence: Synthetic oligonucleotide
auaccaggagcggccauca

SEQ ID NO: 1235599 - RNA, 19 nt, Artificial Sequence
  Description of Artificial Sequence: Synthetic oligonucleotide
gcugguuagccuagugagg

SEQ ID NO: 1235600 - RNA, 19 nt, Artificial Sequence
  Description of Artificial Sequence: Synthetic oligonucleotide
gaacagggguagugacggc

SEQ ID NO: 1235601 - RNA, 19 nt, Artificial Sequence
  Description of Artificial Sequence: Synthetic oligonucleotide
ucgcccuguucagaugaag

SEQ ID NO: 1235602 - RNA, 19 nt, Artificial Sequence
  Description of Artificial Sequence: Synthetic oligonucleotide
ggcugccugagagaaaccc

SEQ ID NO: 1235603 - RNA, 19 nt, Artificial Sequence
  Description of Artificial Sequence: Synthetic oligonucleotide
cuccagaaggcugguuagc

SEQ ID NO: 1235604 - RNA, 19 nt, Artificial Sequence
  Description of Artificial Sequence: Synthetic oligonucleotide
acgcaagcuucccagcaua

SEQ ID NO: 1235605 - RNA, 19 nt, Artificial Sequence
  Description of Artificial Sequence: Synthetic oligonucleotide
ugagcacgccccagcucug

SEQ ID NO: 1235606 - RNA, 19 nt, Artificial Sequence
  Description of Artificial Sequence: Synthetic oligonucleotide
ugguuagccuagugaggaa

SEQ ID NO: 1235607 - RNA, 19 nt, Artificial Sequence
  Description of Artificial Sequence: Synthetic oligonucleotide
ccaacuuagccugucggac

SEQ ID NO: 1235608 - RNA, 19 nt, Artificial Sequence
  Description of Artificial Sequence: Synthetic oligonucleotide
ccaaugagcacgccccagc

SEQ ID NO: 1235609 - RNA, 19 nt, Artificial Sequence
  Description of Artificial Sequence: Synthetic oligonucleotide
cugacugauagcgcccauc

SEQ ID NO: 1235610 - RNA, 19 nt, Artificial Sequence
  Description of Artificial Sequence: Synthetic oligonucleotide
guggcuugcgcuccaaggu

SEQ ID NO: 1235611 - RNA, 19 nt, Artificial Sequence
  Description of Artificial Sequence: Synthetic oligonucleotide
cauaccaauuccugcaauu

SEQ ID NO: 1235612 - RNA, 19 nt, Artificial Sequence
  Description of Artificial Sequence: Synthetic oligonucleotide
cauucacgacacccaggug

SEQ ID NO: 1235613 - RNA, 19 nt, Artificial Sequence
  Description of Artificial Sequence: Synthetic oligonucleotide
cgcccuguucagaugaagg

SEQ ID NO: 1235614 - RNA, 19 nt, Artificial Sequence
  Description of Artificial Sequence: Synthetic oligonucleotide
gggugagagcuccugagaa

SEQ ID NO: 1235615 - RNA, 19 nt, Artificial Sequence
  Description of Artificial Sequence: Synthetic oligonucleotide
acaucucaagauggggaaa

SEQ ID NO: 1235616 - RNA, 19 nt, Artificial Sequence
  Description of Artificial Sequence: Synthetic oligonucleotide
agccucugggcuauacuca

SEQ ID NO: 1235617 - RNA, 19 nt, Artificial Sequence
  Description of Artificial Sequence: Synthetic oligonucleotide
ggucgggauugcuggacgc

SEQ ID NO: 1235618 - RNA, 19 nt, Artificial Sequence
  Description of Artificial Sequence: Synthetic oligonucleotide
uaacgucgcccuguucaga

SEQ ID NO: 1235619 - RNA, 19 nt, Artificial Sequence
  Description of Artificial Sequence: Synthetic oligonucleotide
uagcgcccaucaccacagg

SEQ ID NO: 1235620 - RNA, 19 nt, Artificial Sequence
  Description of Artificial Sequence: Synthetic oligonucleotide
uggacgcuuuccugucgac

SEQ ID NO: 1235621 - RNA, 19 nt, Artificial Sequence
  Description of Artificial Sequence: Synthetic oligonucleotide
ggccaugcaggguccagug

SEQ ID NO: 1235622 - RNA, 19 nt, Artificial Sequence
  Description of Artificial Sequence: Synthetic oligonucleotide
ugccuaaaguugggcucag

SEQ ID NO: 1235623 - RNA, 19 nt, Artificial Sequence
  Description of Artificial Sequence: Synthetic oligonucleotide
gguccagugcggcugccug

SEQ ID NO: 1235624 - RNA, 19 nt, Artificial Sequence
  Description of Artificial Sequence: Synthetic oligonucleotide
cuauacucaggagucacau

SEQ ID NO: 1235625 - RNA, 19 nt, Artificial Sequence
  Description of Artificial Sequence: Synthetic oligonucleotide
cuggacgcuuuccugucga

SEQ ID NO: 1235626 - RNA, 19 nt, Artificial Sequence
  Description of Artificial Sequence: Synthetic oligonucleotide
gccaacuuagccugucgga

SEQ ID NO: 1235627 - RNA, 19 nt, Artificial Sequence
  Description of Artificial Sequence: Synthetic oligonucleotide
gcuggacgcuuuccugucg

SEQ ID NO: 1235628 - RNA, 19 nt, Artificial Sequence
  Description of Artificial Sequence: Synthetic oligonucleotide
caucuccggagucggucug

SEQ ID NO: 1235629 - RNA, 19 nt, Artificial Sequence
  Description of Artificial Sequence: Synthetic oligonucleotide
gcgacagaguccccaauga

SEQ ID NO: 1235630 - RNA, 19 nt, Artificial Sequence
  Description of Artificial Sequence: Synthetic oligonucleotide
agggguagugacggcuuug

SEQ ID NO: 1235631 - RNA, 19 nt, Artificial Sequence
  Description of Artificial Sequence: Synthetic oligonucleotide
acggggaucuugggaacug

SEQ ID NO: 1235632 - RNA, 19 nt, Artificial Sequence
  Description of Artificial Sequence: Synthetic oligonucleotide
gaauguggugaugccuaaa

SEQ ID NO: 1235633 - RNA, 19 nt, Artificial Sequence
  Description of Artificial Sequence: Synthetic oligonucleotide
gcggcugccugagagaaac

SEQ ID NO: 1235634 - RNA, 19 nt, Artificial Sequence
  Description of Artificial Sequence: Synthetic oligonucleotide
gcaagaccugcuucgcuuc

SEQ ID NO: 1235635 - RNA, 19 nt, Artificial Sequence
  Description of Artificial Sequence: Synthetic oligonucleotide
ucgggauugcuggacgcuu

SEQ ID NO: 1235636 - RNA, 19 nt, Artificial Sequence
  Description of Artificial Sequence: Synthetic oligonucleotide
cccauaacagggucccaac

SEQ ID NO: 1235637 - RNA, 19 nt, Artificial Sequence
  Description of Artificial Sequence: Synthetic oligonucleotide
aagaccugcuucgcuucuu

SEQ ID NO: 1235638 - RNA, 19 nt, Artificial Sequence
  Description of Artificial Sequence: Synthetic oligonucleotide
aggcucgaacuauguuaca

SEQ ID NO: 1235639 - RNA, 19 nt, Artificial Sequence
  Description of Artificial Sequence: Synthetic oligonucleotide
ggacgcuuuccugucgacc

SEQ ID NO: 1235640 - RNA, 19 nt, Artificial Sequence
  Description of Artificial Sequence: Synthetic oligonucleotide
uggcgagaaugcucaucuc

SEQ ID NO: 1235641 - RNA, 19 nt, Artificial Sequence
  Description of Artificial Sequence: Synthetic oligonucleotide
gcaaggaccaucggaaucu

SEQ ID NO: 1235642 - RNA, 19 nt, Artificial Sequence
  Description of Artificial Sequence: Synthetic oligonucleotide
acgucgcccuguucagaug

SEQ ID NO: 1235643 - RNA, 19 nt, Artificial Sequence
  Description of Artificial Sequence: Synthetic oligonucleotide
gaauagcgacagagucccc

SEQ ID NO: 1235644 - RNA, 19 nt, Artificial Sequence
  Description of Artificial Sequence: Synthetic oligonucleotide
cugcggucucgaagccacg

SEQ ID NO: 1235645 - RNA, 19 nt, Artificial Sequence
  Description of Artificial Sequence: Synthetic oligonucleotide
gacgcaagcuucccagcau

SEQ ID NO: 1235646 - RNA, 19 nt, Artificial Sequence
  Description of Artificial Sequence: Synthetic oligonucleotide
ggauugcuggacgcuuucc

SEQ ID NO: 1235647 - RNA, 19 nt, Artificial Sequence
  Description of Artificial Sequence: Synthetic oligonucleotide
agccugugccucacccugg

SEQ ID NO: 1235648 - RNA, 19 nt, Artificial Sequence
  Description of Artificial Sequence: Synthetic oligonucleotide
cacgacacccaggugagcu

SEQ ID NO: 1235649 - RNA, 19 nt, Artificial Sequence
  Description of Artificial Sequence: Synthetic oligonucleotide
acgacacccaggugagcuu

SEQ ID NO: 1235650 - RNA, 19 nt, Artificial Sequence
  Description of Artificial Sequence: Synthetic oligonucleotide
cccauaacucucuucauau

SEQ ID NO: 1235651 - RNA, 19 nt, Artificial Sequence
  Description of Artificial Sequence: Synthetic oligonucleotide
cuagggccuccccauaacu

SEQ ID NO: 1235652 - RNA, 19 nt, Artificial Sequence
  Description of Artificial Sequence: Synthetic oligonucleotide
ucacgacacccaggugagc

SEQ ID NO: 1235653 - RNA, 19 nt, Artificial Sequence
  Description of Artificial Sequence: Synthetic oligonucleotide
ugcggcugccugagagaaa

SEQ ID NO: 1235654 - RNA, 19 nt, Artificial Sequence
  Description of Artificial Sequence: Synthetic oligonucleotide
gagcacgccccagcucugc

SEQ ID NO: 1235655 - RNA, 19 nt, Artificial Sequence
  Description of Artificial Sequence: Synthetic oligonucleotide
guccagugcggcugccuga

SEQ ID NO: 1235656 - RNA, 19 nt, Artificial Sequence
  Description of Artificial Sequence: Synthetic oligonucleotide
cuccggagucggucugcag

SEQ ID NO: 1235657 - RNA, 19 nt, Artificial Sequence
  Description of Artificial Sequence: Synthetic oligonucleotide
cagcucugcacuacauugu

SEQ ID NO: 1235658 - RNA, 19 nt, Artificial Sequence
  Description of Artificial Sequence: Synthetic oligonucleotide
ccauaacagggucccaaca

SEQ ID NO: 1235659 - RNA, 19 nt, Artificial Sequence
  Description of Artificial Sequence: Synthetic oligonucleotide
caguuccauuagugcuuug

SEQ ID NO: 1235660 - RNA, 19 nt, Artificial Sequence
  Description of Artificial Sequence: Synthetic oligonucleotide
gcgaagcaccauugacaag

SEQ ID NO: 1235661 - RNA, 19 nt, Artificial Sequence
  Description of Artificial Sequence: Synthetic oligonucleotide
cacccaggugagcuuaucu

SEQ ID NO: 1235662 - RNA, 19 nt, Artificial Sequence
  Description of Artificial Sequence: Synthetic oligonucleotide
acgcuuuccugucgaccuu

SEQ ID NO: 1235663 - RNA, 19 nt, Artificial Sequence
  Description of Artificial Sequence: Synthetic oligonucleotide
acuuagccugucggacacu

SEQ ID NO: 1235664 - RNA, 19 nt, Artificial Sequence
  Description of Artificial Sequence: Synthetic oligonucleotide
ggcuugcgcuccaagguca

SEQ ID NO: 1235665 - RNA, 19 nt, Artificial Sequence
  Description of Artificial Sequence: Synthetic oligonucleotide
cuuaggguucuggccagua

SEQ ID NO: 1235666 - RNA, 19 nt, Artificial Sequence
  Description of Artificial Sequence: Synthetic oligonucleotide
gggguagugacggcuuuga

SEQ ID NO: 1235667 - RNA, 19 nt, Artificial Sequence
  Description of Artificial Sequence: Synthetic oligonucleotide
cagcugguuccaggcuucc

SEQ ID NO: 1235668 - RNA, 19 nt, Artificial Sequence
  Description of Artificial Sequence: Synthetic oligonucleotide
caaguuuugcagggagacu

SEQ ID NO: 1235669 - RNA, 19 nt, Artificial Sequence
  Description of Artificial Sequence: Synthetic oligonucleotide
augcauuccccaggauaua

SEQ ID NO: 1235670 - RNA, 19 nt, Artificial Sequence
  Description of Artificial Sequence: Synthetic oligonucleotide
gccuaaaguugggcucagg

SEQ ID NO: 1235671 - RNA, 19 nt, Artificial Sequence
  Description of Artificial Sequence: Synthetic oligonucleotide
cugcuagaguucuguggcu

SEQ ID NO: 1235672 - RNA, 19 nt, Artificial Sequence
  Description of Artificial Sequence: Synthetic oligonucleotide
ggaaucuaccaagccaaau

SEQ ID NO: 1235673 - RNA, 19 nt, Artificial Sequence
  Description of Artificial Sequence: Synthetic oligonucleotide
ggcugacugauagcgccca

SEQ ID NO: 1235674 - RNA, 19 nt, Artificial Sequence
  Description of Artificial Sequence: Synthetic oligonucleotide
cacgccccagcucugcacu

SEQ ID NO: 1235675 - RNA, 19 nt, Artificial Sequence
  Description of Artificial Sequence: Synthetic oligonucleotide
cacugcggucucgaagcca

SEQ ID NO: 1235676 - RNA, 19 nt, Artificial Sequence
  Description of Artificial Sequence: Synthetic oligonucleotide
gggcuggacgcaagcuucc

SEQ ID NO: 1235677 - RNA, 19 nt, Artificial Sequence
  Description of Artificial Sequence: Synthetic oligonucleotide
cgucgcccuguucagauga

SEQ ID NO: 1235678 - RNA, 19 nt, Artificial Sequence
  Description of Artificial Sequence: Synthetic oligonucleotide
ggcuggacgcaagcuuccc

SEQ ID NO: 1235679 - RNA, 19 nt, Artificial Sequence
  Description of Artificial Sequence: Synthetic oligonucleotide
cccaaugagcacgccccag

SEQ ID NO: 1235680 - RNA, 19 nt, Artificial Sequence
  Description of Artificial Sequence: Synthetic oligonucleotide
cggggcucuggccaugcag

SEQ ID NO: 1235681 - RNA, 19 nt, Artificial Sequence
  Description of Artificial Sequence: Synthetic oligonucleotide
ccacccgaacacuggagaa

SEQ ID NO: 1235682 - RNA, 19 nt, Artificial Sequence
  Description of Artificial Sequence: Synthetic oligonucleotide
ggguagugacggcuuugaa

SEQ ID NO: 1235683 - RNA, 19 nt, Artificial Sequence
  Description of Artificial Sequence: Synthetic oligonucleotide
gcugccugagagaaacccu

SEQ ID NO: 1235684 - RNA, 19 nt, Artificial Sequence
  Description of Artificial Sequence: Synthetic oligonucleotide
caaggaccaucggaaucua

SEQ ID NO: 1235685 - RNA, 19 nt, Artificial Sequence
  Description of Artificial Sequence: Synthetic oligonucleotide
gccgaauguggugaugccu

SEQ ID NO: 1235686 - RNA, 19 nt, Artificial Sequence
  Description of Artificial Sequence: Synthetic oligonucleotide
agcggccaucaaggacauc

SEQ ID NO: 1235687 - RNA, 19 nt, Artificial Sequence
  Description of Artificial Sequence: Synthetic oligonucleotide
gcuugcgcuccaaggucac

SEQ ID NO: 1235688 - RNA, 19 nt, Artificial Sequence
  Description of Artificial Sequence: Synthetic oligonucleotide
cugcacggucuucuccaua

SEQ ID NO: 1235689 - RNA, 19 nt, Artificial Sequence
  Description of Artificial Sequence: Synthetic oligonucleotide
gcucaggaauagcgacaga

SEQ ID NO: 1235690 - RNA, 19 nt, Artificial Sequence
  Description of Artificial Sequence: Synthetic oligonucleotide
ggagaugaacagggguagu

SEQ ID NO: 1235691 - RNA, 19 nt, Artificial Sequence
  Description of Artificial Sequence: Synthetic oligonucleotide
cguugccggggcucuggcc

SEQ ID NO: 1235692 - RNA, 19 nt, Artificial Sequence
  Description of Artificial Sequence: Synthetic oligonucleotide
ggccaucaaggacauccau

SEQ ID NO: 1235693 - RNA, 19 nt, Artificial Sequence
  Description of Artificial Sequence: Synthetic oligonucleotide
cucccauaacaggguccca

SEQ ID NO: 1235694 - RNA, 19 nt, Artificial Sequence
  Description of Artificial Sequence: Synthetic oligonucleotide
gcuuaucucugggccucca

SEQ ID NO: 1235695 - RNA, 19 nt, Artificial Sequence
  Description of Artificial Sequence: Synthetic oligonucleotide
gucgcccuguucagaugaa

SEQ ID NO: 1235696 - RNA, 19 nt, Artificial Sequence
  Description of Artificial Sequence: Synthetic oligonucleotide
cccgaacacuggagaagga

SEQ ID NO: 1235697 - RNA, 19 nt, Artificial Sequence
  Description of Artificial Sequence: Synthetic oligonucleotide
cccuugugccgaauguggu

SEQ ID NO: 1235698 - RNA, 19 nt, Artificial Sequence
  Description of Artificial Sequence: Synthetic oligonucleotide
ggaccagaacccaguacuu

SEQ ID NO: 1235699 - RNA, 19 nt, Artificial Sequence
  Description of Artificial Sequence: Synthetic oligonucleotide
ccauaccaauuccugcaau

SEQ ID NO: 1235700 - RNA, 19 nt, Artificial Sequence
  Description of Artificial Sequence: Synthetic oligonucleotide
cacggccaacuuagccugu

SEQ ID NO: 1235701 - RNA, 19 nt, Artificial Sequence
  Description of Artificial Sequence: Synthetic oligonucleotide
aggcaagaacggggaucuu

SEQ ID NO: 1235702 - RNA, 19 nt, Artificial Sequence
  Description of Artificial Sequence: Synthetic oligonucleotide
cccagaugggcuggacgca

SEQ ID NO: 1235703 - RNA, 19 nt, Artificial Sequence
  Description of Artificial Sequence: Synthetic oligonucleotide
gccuuccccuucagcauua

SEQ ID NO: 1235704 - RNA, 19 nt, Artificial Sequence
  Description of Artificial Sequence: Synthetic oligonucleotide
cagcaacguccccuuucuu

SEQ ID NO: 1235705 - RNA, 19 nt, Artificial Sequence
  Description of Artificial Sequence: Synthetic oligonucleotide
gcucaucuccggagucggu

SEQ ID NO: 1235706 - RNA, 19 nt, Artificial Sequence
  Description of Artificial Sequence: Synthetic oligonucleotide
aggacuauggccuugaggc

SEQ ID NO: 1235707 - RNA, 19 nt, Artificial Sequence
  Description of Artificial Sequence: Synthetic oligonucleotide
gaauauaacacacaaagac

SEQ ID NO: 1235708 - RNA, 19 nt, Artificial Sequence
  Description of Artificial Sequence: Synthetic oligonucleotide
uuaagugugacaaauauaa

SEQ ID NO: 1235709 - RNA, 19 nt, Artificial Sequence
  Description of Artificial Sequence: Synthetic oligonucleotide
auugaauugccauauacgg

SEQ ID NO: 1235710 - RNA, 19 nt, Artificial Sequence
  Description of Artificial Sequence: Synthetic oligonucleotide
acuguaaacucuaagauac

SEQ ID NO: 1235711 - RNA, 19 nt, Artificial Sequence
  Description of Artificial Sequence: Synthetic oligonucleotide
ugaauugccauauacggcc

SEQ ID NO: 1235712 - RNA, 19 nt, Artificial Sequence
  Description of Artificial Sequence: Synthetic oligonucleotide
uguaaaguuccuuugacga

SEQ ID NO: 1235713 - RNA, 19 nt, Artificial Sequence
  Description of Artificial Sequence: Synthetic oligonucleotide
aacacacaaagacucgacc

SEQ ID NO: 1235714 - RNA, 19 nt, Artificial Sequence
  Description of Artificial Sequence: Synthetic oligonucleotide
ucuaaacaagaacaaauug

SEQ ID NO: 1235715 - RNA, 19 nt, Artificial Sequence
  Description of Artificial Sequence: Synthetic oligonucleotide
uauacggccaguuaaaacu

SEQ ID NO: 1235716 - RNA, 19 nt, Artificial Sequence
  Description of Artificial Sequence: Synthetic oligonucleotide
agauaaaccauuaacuucg

SEQ ID NO: 1235717 - RNA, 19 nt, Artificial Sequence
  Description of Artificial Sequence: Synthetic oligonucleotide
aauuguaggcuccuagcac

SEQ ID NO: 1235718 - RNA, 19 nt, Artificial Sequence
  Description of Artificial Sequence: Synthetic oligonucleotide
ucuuggaagauccuuaugu

SEQ ID NO: 1235719 - RNA, 19 nt, Artificial Sequence
  Description of Artificial Sequence: Synthetic oligonucleotide
uuuacuauaucaguguggc

SEQ ID NO: 1235720 - RNA, 19 nt, Artificial Sequence
  Description of Artificial Sequence: Synthetic oligonucleotide
aaacaauugcucuaugacu

SEQ ID NO: 1235721 - RNA, 19 nt, Artificial Sequence
  Description of Artificial Sequence: Synthetic oligonucleotide
uaaacaagaacaaauugua

SEQ ID NO: 1235722 - RNA, 19 nt, Artificial Sequence
  Description of Artificial Sequence: Synthetic oligonucleotide
ucagauaucaaauaauauu

SEQ ID NO: 1235723 - RNA, 19 nt, Artificial Sequence
  Description of Artificial Sequence: Synthetic oligonucleotide
uacuauaucaguguggcgc

SEQ ID NO: 1235724 - RNA, 19 nt, Artificial Sequence
  Description of Artificial Sequence: Synthetic oligonucleotide
uugauggaaagacagugag

SEQ ID NO: 1235725 - RNA, 19 nt, Artificial Sequence
  Description of Artificial Sequence: Synthetic oligonucleotide
aacaauugcucuaugacug

SEQ ID NO: 1235726 - RNA, 19 nt, Artificial Sequence
  Description of Artificial Sequence: Synthetic oligonucleotide
uaaacaggcaaauacacua

SEQ ID NO: 1235727 - RNA, 19 nt, Artificial Sequence
  Description of Artificial Sequence: Synthetic oligonucleotide
uuaauuucugaauacuuuc

SEQ ID NO: 1235728 - RNA, 19 nt, Artificial Sequence
  Description of Artificial Sequence: Synthetic oligonucleotide
uucacaguccauuaaauuc

SEQ ID NO: 1235729 - RNA, 19 nt, Artificial Sequence
  Description of Artificial Sequence: Synthetic oligonucleotide
ucuuaaugcauucuguaaa

SEQ ID NO: 1235730 - RNA, 19 nt, Artificial Sequence
  Description of Artificial Sequence: Synthetic oligonucleotide
aaauuguaggcuccuagca

SEQ ID NO: 1235731 - RNA, 19 nt, Artificial Sequence
  Description of Artificial Sequence: Synthetic oligonucleotide
uuggaagauccuuaugugg

SEQ ID NO: 1235732 - RNA, 19 nt, Artificial Sequence
  Description of Artificial Sequence: Synthetic oligonucleotide
aacauaucccggaugaggg

SEQ ID NO: 1235733 - RNA, 19 nt, Artificial Sequence
  Description of Artificial Sequence: Synthetic oligonucleotide
acuagucuaccuuugaaca

SEQ ID NO: 1235734 - RNA, 19 nt, Artificial Sequence
  Description of Artificial Sequence: Synthetic oligonucleotide
agggaggcgaagcaaaagc

SEQ ID NO: 1235735 - RNA, 19 nt, Artificial Sequence
  Description of Artificial Sequence: Synthetic oligonucleotide
cauauaugaaccagaacug

SEQ ID NO: 1235736 - RNA, 19 nt, Artificial Sequence
  Description of Artificial Sequence: Synthetic oligonucleotide
aauacacuagucuaccuuu

SEQ ID NO: 1235737 - RNA, 19 nt, Artificial Sequence
  Description of Artificial Sequence: Synthetic oligonucleotide
agaauaagggacuggacca

SEQ ID NO: 1235738 - RNA, 19 nt, Artificial Sequence
  Description of Artificial Sequence: Synthetic oligonucleotide
uccuaaaccauagauaaac

SEQ ID NO: 1235739 - RNA, 19 nt, Artificial Sequence
  Description of Artificial Sequence: Synthetic oligonucleotide
auagauaaaccauuaacuu

SEQ ID NO: 1235740 - RNA, 19 nt, Artificial Sequence
  Description of Artificial Sequence: Synthetic oligonucleotide
uuccaaagcacacugggac

SEQ ID NO: 1235741 - RNA, 19 nt, Artificial Sequence
  Description of Artificial Sequence: Synthetic oligonucleotide
uagauaaaccauuaacuuc

SEQ ID NO: 1235742 - RNA, 19 nt, Artificial Sequence
  Description of Artificial Sequence: Synthetic oligonucleotide
uuugaacaaacugauugag

SEQ ID NO: 1235743 - RNA, 19 nt, Artificial Sequence
  Description of Artificial Sequence: Synthetic oligonucleotide
ugcaaaaugaucccuuuuc

SEQ ID NO: 1235744 - RNA, 19 nt, Artificial Sequence
  Description of Artificial Sequence: Synthetic oligonucleotide
caucagacagaccacaggc

SEQ ID NO: 1235745 - RNA, 19 nt, Artificial Sequence
  Description of Artificial Sequence: Synthetic oligonucleotide
auauacggccaguuaaaac

SEQ ID NO: 1235746 - RNA, 19 nt, Artificial Sequence
  Description of Artificial Sequence: Synthetic oligonucleotide
aacguacucuuccaaagca

SEQ ID NO: 1235747 - RNA, 19 nt, Artificial Sequence
  Description of Artificial Sequence: Synthetic oligonucleotide
uugaauugccauauacggc

SEQ ID NO: 1235748 - RNA, 19 nt, Artificial Sequence
  Description of Artificial Sequence: Synthetic oligonucleotide
ugaauacuuucaauuuucc

SEQ ID NO: 1235749 - RNA, 19 nt, Artificial Sequence
  Description of Artificial Sequence: Synthetic oligonucleotide
acaaauuguaggcuccuag

SEQ ID NO: 1235750 - RNA, 19 nt, Artificial Sequence
  Description of Artificial Sequence: Synthetic oligonucleotide
aguaaugucagggagggca

SEQ ID NO: 1235751 - RNA, 19 nt, Artificial Sequence
  Description of Artificial Sequence: Synthetic oligonucleotide
caaagacucgaccaaacag

SEQ ID NO: 1235752 - RNA, 19 nt, Artificial Sequence
  Description of Artificial Sequence: Synthetic oligonucleotide
aaggcgaccacccggucgg

SEQ ID NO: 1235753 - RNA, 19 nt, Artificial Sequence
  Description of Artificial Sequence: Synthetic oligonucleotide
acuuaagugugacaaauau

SEQ ID NO: 1235754 - RNA, 19 nt, Artificial Sequence
  Description of Artificial Sequence: Synthetic oligonucleotide
aaagacucgaccaaacagu

SEQ ID NO: 1235755 - RNA, 19 nt, Artificial Sequence
  Description of Artificial Sequence: Synthetic oligonucleotide
gacucgaccaaacaguuca

SEQ ID NO: 1235756 - RNA, 19 nt, Artificial Sequence
  Description of Artificial Sequence: Synthetic oligonucleotide
uauaccucuuucaucugcc

SEQ ID NO: 1235757 - RNA, 19 nt, Artificial Sequence
  Description of Artificial Sequence: Synthetic oligonucleotide
aaaggcgaccacccggucg

SEQ ID NO: 1235758 - RNA, 19 nt, Artificial Sequence
  Description of Artificial Sequence: Synthetic oligonucleotide
uguaaacucuaagauacug

SEQ ID NO: 1235759 - RNA, 19 nt, Artificial Sequence
  Description of Artificial Sequence: Synthetic oligonucleotide
aacuguaaacucuaagaua

SEQ ID NO: 1235760 - RNA, 19 nt, Artificial Sequence
  Description of Artificial Sequence: Synthetic oligonucleotide
acacccaaauuaaacaggc

SEQ ID NO: 1235761 - RNA, 19 nt, Artificial Sequence
  Description of Artificial Sequence: Synthetic oligonucleotide
cuaacguacucuuccaaag

SEQ ID NO: 1235762 - RNA, 19 nt, Artificial Sequence
  Description of Artificial Sequence: Synthetic oligonucleotide
ucuguaaaguuccuuugac

SEQ ID NO: 1235763 - RNA, 19 nt, Artificial Sequence
  Description of Artificial Sequence: Synthetic oligonucleotide
uggcuuuacuauaucagug

SEQ ID NO: 1235764 - RNA, 19 nt, Artificial Sequence
  Description of Artificial Sequence: Synthetic oligonucleotide
cuguaaaguuccuuugacg

SEQ ID NO: 1235765 - RNA, 19 nt, Artificial Sequence
  Description of Artificial Sequence: Synthetic oligonucleotide
auaaaccauuaacuucggc

SEQ ID NO: 1235766 - RNA, 19 nt, Artificial Sequence
  Description of Artificial Sequence: Synthetic oligonucleotide
uguaacauccuuucucaac

SEQ ID NO: 1235767 - RNA, 19 nt, Artificial Sequence
  Description of Artificial Sequence: Synthetic oligonucleotide
auugcucuaugacugagga

SEQ ID NO: 1235768 - RNA, 19 nt, Artificial Sequence
  Description of Artificial Sequence: Synthetic oligonucleotide
caaauuguaggcuccuagc

SEQ ID NO: 1235769 - RNA, 19 nt, Artificial Sequence
  Description of Artificial Sequence: Synthetic oligonucleotide
gaaauguugcaacuuaaaa

SEQ ID NO: 1235770 - RNA, 19 nt, Artificial Sequence
  Description of Artificial Sequence: Synthetic oligonucleotide
aaccacaacauggaaaagu

SEQ ID NO: 1235771 - RNA, 19 nt, Artificial Sequence
  Description of Artificial Sequence: Synthetic oligonucleotide
auuguaggcuccuagcaca

SEQ ID NO: 1235772 - RNA, 19 nt, Artificial Sequence
  Description of Artificial Sequence: Synthetic oligonucleotide
ccuuugaacaaacugauug

SEQ ID NO: 1235773 - RNA, 19 nt, Artificial Sequence
  Description of Artificial Sequence: Synthetic oligonucleotide
agcggaaucgacgugcagc

SEQ ID NO: 1235774 - RNA, 19 nt, Artificial Sequence
  Description of Artificial Sequence: Synthetic oligonucleotide
acccaaauuaaacaggcaa

SEQ ID NO: 1235775 - RNA, 19 nt, Artificial Sequence
  Description of Artificial Sequence: Synthetic oligonucleotide
ggaguaaacaaauggggcc

SEQ ID NO: 1235776 - RNA, 19 nt, Artificial Sequence
  Description of Artificial Sequence: Synthetic oligonucleotide
ucccagaucagcaucucug

SEQ ID NO: 1235777 - RNA, 19 nt, Artificial Sequence
  Description of Artificial Sequence: Synthetic oligonucleotide
ugcgcugcauucaacacga

SEQ ID NO: 1235778 - RNA, 19 nt, Artificial Sequence
  Description of Artificial Sequence: Synthetic oligonucleotide
auuaagcaaacaaaaccag

SEQ ID NO: 1235779 - RNA, 19 nt, Artificial Sequence
  Description of Artificial Sequence: Synthetic oligonucleotide
ucugccuaaaucaggcaga

SEQ ID NO: 1235780 - RNA, 19 nt, Artificial Sequence
  Description of Artificial Sequence: Synthetic oligonucleotide
ggcuacaucagacagacca

SEQ ID NO: 1235781 - RNA, 19 nt, Artificial Sequence
  Description of Artificial Sequence: Synthetic oligonucleotide
gaguaaacaaauggggccc

SEQ ID NO: 1235782 - RNA, 19 nt, Artificial Sequence
  Description of Artificial Sequence: Synthetic oligonucleotide
cagcuugauggaaagacag

SEQ ID NO: 1235783 - RNA, 19 nt, Artificial Sequence
  Description of Artificial Sequence: Synthetic oligonucleotide
ugaaauucacaguccauua

SEQ ID NO: 1235784 - RNA, 19 nt, Artificial Sequence
  Description of Artificial Sequence: Synthetic oligonucleotide
agcacuuugcaaaaugauc

SEQ ID NO: 1235785 - RNA, 19 nt, Artificial Sequence
  Description of Artificial Sequence: Synthetic oligonucleotide
cuuggaauauaacacacaa

SEQ ID NO: 1235786 - RNA, 19 nt, Artificial Sequence
  Description of Artificial Sequence: Synthetic oligonucleotide
ucuaugacugaggaggaga

SEQ ID NO: 1235787 - RNA, 19 nt, Artificial Sequence
  Description of Artificial Sequence: Synthetic oligonucleotide
cuuggaagauccuuaugug

SEQ ID NO: 1235788 - RNA, 19 nt, Artificial Sequence
  Description of Artificial Sequence: Synthetic oligonucleotide
aauugcucuaugacugagg

SEQ ID NO: 1235789 - RNA, 19 nt, Artificial Sequence
  Description of Artificial Sequence: Synthetic oligonucleotide
ccuuaugugguccauaaag

SEQ ID NO: 1235790 - RNA, 19 nt, Artificial Sequence
  Description of Artificial Sequence: Synthetic oligonucleotide
ucuaacguacucuuccaaa

SEQ ID NO: 1235791 - RNA, 19 nt, Artificial Sequence
  Description of Artificial Sequence: Synthetic oligonucleotide
cacuagucuaccuuugaac

SEQ ID NO: 1235792 - RNA, 19 nt, Artificial Sequence
  Description of Artificial Sequence: Synthetic oligonucleotide
ugauugaggggaguaaaca

SEQ ID NO: 1235793 - RNA, 19 nt, Artificial Sequence
  Description of Artificial Sequence: Synthetic oligonucleotide
auaccucuuucaucugccc

SEQ ID NO: 1235794 - RNA, 19 nt, Artificial Sequence
  Description of Artificial Sequence: Synthetic oligonucleotide
ugacgagucucucucacuc

SEQ ID NO: 1235795 - RNA, 19 nt, Artificial Sequence
  Description of Artificial Sequence: Synthetic oligonucleotide
uuaaaacugcugccggaca

SEQ ID NO: 1235796 - RNA, 19 nt, Artificial Sequence
  Description of Artificial Sequence: Synthetic oligonucleotide
cucugccuaaaucaggcag

SEQ ID NO: 1235797 - RNA, 19 nt, Artificial Sequence
  Description of Artificial Sequence: Synthetic oligonucleotide
aguaaacaaauggggcccc

SEQ ID NO: 1235798 - RNA, 19 nt, Artificial Sequence
  Description of Artificial Sequence: Synthetic oligonucleotide
acuggcuucuaacguacuc

SEQ ID NO: 1235799 - RNA, 19 nt, Artificial Sequence
  Description of Artificial Sequence: Synthetic oligonucleotide
uacucagcggaaucgacgu

SEQ ID NO: 1235800 - RNA, 19 nt, Artificial Sequence
  Description of Artificial Sequence: Synthetic oligonucleotide
gauugaggggaguaaacaa

SEQ ID NO: 1235801 - RNA, 19 nt, Artificial Sequence
  Description of Artificial Sequence: Synthetic oligonucleotide
uuccgaaccgcguuggcug

SEQ ID NO: 1235802 - RNA, 19 nt, Artificial Sequence
  Description of Artificial Sequence: Synthetic oligonucleotide
uuacuauaucaguguggcg

SEQ ID NO: 1235803 - RNA, 19 nt, Artificial Sequence
  Description of Artificial Sequence: Synthetic oligonucleotide
aguucaguuauuauaacuu

SEQ ID NO: 1235804 - RNA, 19 nt, Artificial Sequence
  Description of Artificial Sequence: Synthetic oligonucleotide
acaacauggaaaaguaaug

SEQ ID NO: 1235805 - RNA, 19 nt, Artificial Sequence
  Description of Artificial Sequence: Synthetic oligonucleotide
cugcauucaacacgaacag

SEQ ID NO: 1235806 - RNA, 19 nt, Artificial Sequence
  Description of Artificial Sequence: Synthetic oligonucleotide
acuauaucaguguggcgcu

SEQ ID NO: 1235807 - RNA, 19 nt, Artificial Sequence
  Description of Artificial Sequence: Synthetic oligonucleotide
acaauaccuucccuaagca

SEQ ID NO: 1235808 - RNA, 19 nt, Artificial Sequence
  Description of Artificial Sequence: Synthetic oligonucleotide
gaagauccuuauguggucc

SEQ ID NO: 1235809 - RNA, 19 nt, Artificial Sequence
  Description of Artificial Sequence: Synthetic oligonucleotide
aaccgcguuggcugguugg

SEQ ID NO: 1235810 - RNA, 19 nt, Artificial Sequence
  Description of Artificial Sequence: Synthetic oligonucleotide
aagcagguuucagauauca

SEQ ID NO: 1235811 - RNA, 19 nt, Artificial Sequence
  Description of Artificial Sequence: Synthetic oligonucleotide
cuaugacugaggaggagac

SEQ ID NO: 1235812 - RNA, 19 nt, Artificial Sequence
  Description of Artificial Sequence: Synthetic oligonucleotide
auaccuucccuaagcaggc

SEQ ID NO: 1235813 - RNA, 19 nt, Artificial Sequence
  Description of Artificial Sequence: Synthetic oligonucleotide
ugaauacaaucuuuucuua

SEQ ID NO: 1235814 - RNA, 19 nt, Artificial Sequence
  Description of Artificial Sequence: Synthetic oligonucleotide
uucuuauaccucuuucauc

SEQ ID NO: 1235815 - RNA, 19 nt, Artificial Sequence
  Description of Artificial Sequence: Synthetic oligonucleotide
gaagcgugcagaccagcag

SEQ ID NO: 1235816 - RNA, 19 nt, Artificial Sequence
  Description of Artificial Sequence: Synthetic oligonucleotide
gauaaaccauuaacuucgg

SEQ ID NO: 1235817 - RNA, 19 nt, Artificial Sequence
  Description of Artificial Sequence: Synthetic oligonucleotide
aaggagcggggcgacaugg

SEQ ID NO: 1235818 - RNA, 19 nt, Artificial Sequence
  Description of Artificial Sequence: Synthetic oligonucleotide
aguuaaaacugcugccgga

SEQ ID NO: 1235819 - RNA, 19 nt, Artificial Sequence
  Description of Artificial Sequence: Synthetic oligonucleotide
ugggacuuuuccugcaagc

SEQ ID NO: 1235820 - RNA, 19 nt, Artificial Sequence
  Description of Artificial Sequence: Synthetic oligonucleotide
aagauccuuauguggucca

SEQ ID NO: 1235821 - RNA, 19 nt, Artificial Sequence
  Description of Artificial Sequence: Synthetic oligonucleotide
uaucuacagagagaaggug

SEQ ID NO: 1235822 - RNA, 19 nt, Artificial Sequence
  Description of Artificial Sequence: Synthetic oligonucleotide
agcuguacucagcggaauc

SEQ ID NO: 1235823 - RNA, 19 nt, Artificial Sequence
  Description of Artificial Sequence: Synthetic oligonucleotide
auaacacacaaagacucga

SEQ ID NO: 1235824 - RNA, 19 nt, Artificial Sequence
  Description of Artificial Sequence: Synthetic oligonucleotide
auucacaguccauuaaauu

SEQ ID NO: 1235825 - RNA, 19 nt, Artificial Sequence
  Description of Artificial Sequence: Synthetic oligonucleotide
uuguaggcuccuagcacag

SEQ ID NO: 1235826 - RNA, 19 nt, Artificial Sequence
  Description of Artificial Sequence: Synthetic oligonucleotide
ucucucucucuccauuucu

SEQ ID NO: 1235827 - RNA, 19 nt, Artificial Sequence
  Description of Artificial Sequence: Synthetic oligonucleotide
ucccuaagcaggcacuuaa

SEQ ID NO: 1235828 - RNA, 19 nt, Artificial Sequence
  Description of Artificial Sequence: Synthetic oligonucleotide
acaggcaaauacacuaguc

SEQ ID NO: 1235829 - RNA, 19 nt, Artificial Sequence
  Description of Artificial Sequence: Synthetic oligonucleotide
guacucagcggaaucgacg

SEQ ID NO: 1235830 - RNA, 19 nt, Artificial Sequence
  Description of Artificial Sequence: Synthetic oligonucleotide
acucccucucucucucucc

SEQ ID NO: 1235831 - RNA, 19 nt, Artificial Sequence
  Description of Artificial Sequence: Synthetic oligonucleotide
cugcgcugcauucaacacg

SEQ ID NO: 1235832 - RNA, 19 nt, Artificial Sequence
  Description of Artificial Sequence: Synthetic oligonucleotide
gguuucagauaucaaauaa

SEQ ID NO: 1235833 - RNA, 19 nt, Artificial Sequence
  Description of Artificial Sequence: Synthetic oligonucleotide
guaaacucuaagauacuga

SEQ ID NO: 1235834 - RNA, 19 nt, Artificial Sequence
  Description of Artificial Sequence: Synthetic oligonucleotide
guagacuucccagaucagc

SEQ ID NO: 1235835 - RNA, 19 nt, Artificial Sequence
  Description of Artificial Sequence: Synthetic oligonucleotide
cugauugaggggaguaaac

SEQ ID NO: 1235836 - RNA, 19 nt, Artificial Sequence
  Description of Artificial Sequence: Synthetic oligonucleotide
auacuuuucacaauaccuu

SEQ ID NO: 1235837 - RNA, 19 nt, Artificial Sequence
  Description of Artificial Sequence: Synthetic oligonucleotide
ucgaccaaacaguucaguu

SEQ ID NO: 1235838 - RNA, 19 nt, Artificial Sequence
  Description of Artificial Sequence: Synthetic oligonucleotide
cucagcggaaucgacgugc

SEQ ID NO: 1235839 - RNA, 19 nt, Artificial Sequence
  Description of Artificial Sequence: Synthetic oligonucleotide
auccuuaugugguccauaa

SEQ ID NO: 1235840 - RNA, 19 nt, Artificial Sequence
  Description of Artificial Sequence: Synthetic oligonucleotide
aggcacuuaagugugacaa

SEQ ID NO: 1235841 - RNA, 19 nt, Artificial Sequence
  Description of Artificial Sequence: Synthetic oligonucleotide
uagucuaccuuugaacaaa

SEQ ID NO: 1235842 - RNA, 19 nt, Artificial Sequence
  Description of Artificial Sequence: Synthetic oligonucleotide
ggaaucgacgugcagcgcc

SEQ ID NO: 1235843 - RNA, 19 nt, Artificial Sequence
  Description of Artificial Sequence: Synthetic oligonucleotide
aaguaaugucagggagggc

SEQ ID NO: 1235844 - RNA, 19 nt, Artificial Sequence
  Description of Artificial Sequence: Synthetic oligonucleotide
gggaguaaacaaauggggc

SEQ ID NO: 1235845 - RNA, 19 nt, Artificial Sequence
  Description of Artificial Sequence: Synthetic oligonucleotide
cuuaagugugacaaauaua

SEQ ID NO: 1235846 - RNA, 19 nt, Artificial Sequence
  Description of Artificial Sequence: Synthetic oligonucleotide
acguacucuuccaaagcac

SEQ ID NO: 1235847 - RNA, 19 nt, Artificial Sequence
  Description of Artificial Sequence: Synthetic oligonucleotide
cacaacauggaaaaguaau

SEQ ID NO: 1235848 - RNA, 19 nt, Artificial Sequence
  Description of Artificial Sequence: Synthetic oligonucleotide
accauagauaaaccauuaa

SEQ ID NO: 1235849 - RNA, 19 nt, Artificial Sequence
  Description of Artificial Sequence: Synthetic oligonucleotide
cugaauacaaucuuuucuu

SEQ ID NO: 1235850 - RNA, 19 nt, Artificial Sequence
  Description of Artificial Sequence: Synthetic oligonucleotide
aaccauagauaaaccauua

SEQ ID NO: 1235851 - RNA, 19 nt, Artificial Sequence
  Description of Artificial Sequence: Synthetic oligonucleotide
uugcucuaugacugaggag

SEQ ID NO: 1235852 - RNA, 19 nt, Artificial Sequence
  Description of Artificial Sequence: Synthetic oligonucleotide
agucuaccuuugaacaaac

SEQ ID NO: 1235853 - RNA, 19 nt, Artificial Sequence
  Description of Artificial Sequence: Synthetic oligonucleotide
gcggaaucgacgugcagcg

SEQ ID NO: 1235854 - RNA, 19 nt, Artificial Sequence
  Description of Artificial Sequence: Synthetic oligonucleotide
uccuuugacgagucucucu

SEQ ID NO: 1235855 - RNA, 19 nt, Artificial Sequence
  Description of Artificial Sequence: Synthetic oligonucleotide
ugcauucaacacgaacagc

SEQ ID NO: 1235856 - RNA, 19 nt, Artificial Sequence
  Description of Artificial Sequence: Synthetic oligonucleotide
gacuucccagaucagcauc

SEQ ID NO: 1235857 - RNA, 19 nt, Artificial Sequence
  Description of Artificial Sequence: Synthetic oligonucleotide
aauaagggacuggaccaaa

SEQ ID NO: 1235858 - RNA, 19 nt, Artificial Sequence
  Description of Artificial Sequence: Synthetic oligonucleotide
ucagcggaaucgacgugca

SEQ ID NO: 1235859 - RNA, 19 nt, Artificial Sequence
  Description of Artificial Sequence: Synthetic oligonucleotide
acacuagucuaccuuugaa

SEQ ID NO: 1235860 - RNA, 19 nt, Artificial Sequence
  Description of Artificial Sequence: Synthetic oligonucleotide
acccggucggccgacaugg

SEQ ID NO: 1235861 - RNA, 19 nt, Artificial Sequence
  Description of Artificial Sequence: Synthetic oligonucleotide
guaaugucagggagggcag

SEQ ID NO: 1235862 - RNA, 19 nt, Artificial Sequence
  Description of Artificial Sequence: Synthetic oligonucleotide
aagacucgaccaaacaguu

SEQ ID NO: 1235863 - RNA, 19 nt, Artificial Sequence
  Description of Artificial Sequence: Synthetic oligonucleotide
auaaaggcgaccacccggu

SEQ ID NO: 1235864 - RNA, 19 nt, Artificial Sequence
  Description of Artificial Sequence: Synthetic oligonucleotide
uuuccgaaccgcguuggcu

SEQ ID NO: 1235865 - RNA, 19 nt, Artificial Sequence
  Description of Artificial Sequence: Synthetic oligonucleotide
cuuauaccucuuucaucug

SEQ ID NO: 1235866 - RNA, 19 nt, Artificial Sequence
  Description of Artificial Sequence: Synthetic oligonucleotide
uccgaaccgcguuggcugg

SEQ ID NO: 1235867 - RNA, 19 nt, Artificial Sequence
  Description of Artificial Sequence: Synthetic oligonucleotide
uauaucaguguggcgcuuc

SEQ ID NO: 1235868 - RNA, 19 nt, Artificial Sequence
  Description of Artificial Sequence: Synthetic oligonucleotide
aacugauugaggggaguaa

SEQ ID NO: 1235869 - RNA, 19 nt, Artificial Sequence
  Description of Artificial Sequence: Synthetic oligonucleotide
ugacaaauauaagggccuc

SEQ ID NO: 1235870 - RNA, 19 nt, Artificial Sequence
  Description of Artificial Sequence: Synthetic oligonucleotide
acugauugaggggaguaaa

SEQ ID NO: 1235871 - RNA, 19 nt, Artificial Sequence
  Description of Artificial Sequence: Synthetic oligonucleotide
uucucaacagaaggaaauu

SEQ ID NO: 1235872 - RNA, 19 nt, Artificial Sequence
  Description of Artificial Sequence: Synthetic oligonucleotide
agggacuggaccaaauagu

SEQ ID NO: 1235873 - RNA, 19 nt, Artificial Sequence
  Description of Artificial Sequence: Synthetic oligonucleotide
uuccuggaaaauccauuuu

SEQ ID NO: 1235874 - RNA, 19 nt, Artificial Sequence
  Description of Artificial Sequence: Synthetic oligonucleotide
caggcaaauacacuagucu

SEQ ID NO: 1235875 - RNA, 19 nt, Artificial Sequence
  Description of Artificial Sequence: Synthetic oligonucleotide
aagcacacugggacuuuuc

SEQ ID NO: 1235876 - RNA, 19 nt, Artificial Sequence
  Description of Artificial Sequence: Synthetic oligonucleotide
cuagucuaccuuugaacaa

SEQ ID NO: 1235877 - RNA, 19 nt, Artificial Sequence
  Description of Artificial Sequence: Synthetic oligonucleotide
agaccgugcggagggaagg

SEQ ID NO: 1235878 - RNA, 19 nt, Artificial Sequence
  Description of Artificial Sequence: Synthetic oligonucleotide
uggcuucuaacguacucuu

SEQ ID NO: 1235879 - RNA, 19 nt, Artificial Sequence
  Description of Artificial Sequence: Synthetic oligonucleotide
ugccauauacggccaguua

SEQ ID NO: 1235880 - RNA, 19 nt, Artificial Sequence
  Description of Artificial Sequence: Synthetic oligonucleotide
ugagggucagauggagagc

SEQ ID NO: 1235881 - RNA, 19 nt, Artificial Sequence
  Description of Artificial Sequence: Synthetic oligonucleotide
cugccuaaaucaggcagag

SEQ ID NO: 1235882 - RNA, 19 nt, Artificial Sequence
  Description of Artificial Sequence: Synthetic oligonucleotide
cacugcgcugcauucaaca

SEQ ID NO: 1235883 - RNA, 19 nt, Artificial Sequence
  Description of Artificial Sequence: Synthetic oligonucleotide
ugacugaggaggagaccgu

SEQ ID NO: 1235884 - RNA, 19 nt, Artificial Sequence
  Description of Artificial Sequence: Synthetic oligonucleotide
gccauauacggccaguuaa

SEQ ID NO: 1235885 - RNA, 19 nt, Artificial Sequence
  Description of Artificial Sequence: Synthetic oligonucleotide
uccuuaugugguccauaaa

SEQ ID NO: 1235886 - RNA, 19 nt, Artificial Sequence
  Description of Artificial Sequence: Synthetic oligonucleotide
auacacuagucuaccuuug

SEQ ID NO: 1235887 - RNA, 19 nt, Artificial Sequence
  Description of Artificial Sequence: Synthetic oligonucleotide
uacucccucucucucucuc

SEQ ID NO: 1235888 - RNA, 19 nt, Artificial Sequence
  Description of Artificial Sequence: Synthetic oligonucleotide
ccggacaguaacauauccc

SEQ ID NO: 1235889 - RNA, 19 nt, Artificial Sequence
  Description of Artificial Sequence: Synthetic oligonucleotide
ggcagcuguacucagcgga

SEQ ID NO: 1235890 - RNA, 19 nt, Artificial Sequence
  Description of Artificial Sequence: Synthetic oligonucleotide
aacaaauuguaggcuccua

SEQ ID NO: 1235891 - RNA, 19 nt, Artificial Sequence
  Description of Artificial Sequence: Synthetic oligonucleotide
ucccucauuuuaagauuaa

SEQ ID NO: 1235892 - RNA, 19 nt, Artificial Sequence
  Description of Artificial Sequence: Synthetic oligonucleotide
agcacugcgcugcauucaa

SEQ ID NO: 1235893 - RNA, 19 nt, Artificial Sequence
  Description of Artificial Sequence: Synthetic oligonucleotide
aggcgaagcaaaagcuuuc

SEQ ID NO: 1235894 - RNA, 19 nt, Artificial Sequence
  Description of Artificial Sequence: Synthetic oligonucleotide
cauuaaauucuuccccucu

SEQ ID NO: 1235895 - RNA, 19 nt, Artificial Sequence
  Description of Artificial Sequence: Synthetic oligonucleotide
gugacaaauauaagggccu

SEQ ID NO: 1235896 - RNA, 19 nt, Artificial Sequence
  Description of Artificial Sequence: Synthetic oligonucleotide
cuacaucagacagaccaca

SEQ ID NO: 1235897 - RNA, 19 nt, Artificial Sequence
  Description of Artificial Sequence: Synthetic oligonucleotide
gauggagagcucugccuaa

SEQ ID NO: 1235898 - RNA, 19 nt, Artificial Sequence
  Description of Artificial Sequence: Synthetic oligonucleotide
gcgaagcaaaagcuuuccg

SEQ ID NO: 1235899 - RNA, 19 nt, Artificial Sequence
  Description of Artificial Sequence: Synthetic oligonucleotide
ggcgcuuccuaaaccauag

SEQ ID NO: 1235900 - RNA, 19 nt, Artificial Sequence
  Description of Artificial Sequence: Synthetic oligonucleotide
guaucuacagagagaaggu

SEQ ID NO: 1235901 - RNA, 19 nt, Artificial Sequence
  Description of Artificial Sequence: Synthetic oligonucleotide
gaauaagggacuggaccaa

SEQ ID NO: 1235902 - RNA, 19 nt, Artificial Sequence
  Description of Artificial Sequence: Synthetic oligonucleotide
aucagacagaccacaggca

SEQ ID NO: 1235903 - RNA, 19 nt, Artificial Sequence
  Description of Artificial Sequence: Synthetic oligonucleotide
gagggucagauggagagcu

SEQ ID NO: 1235904 - RNA, 19 nt, Artificial Sequence
  Description of Artificial Sequence: Synthetic oligonucleotide
agacucgaccaaacaguuc

SEQ ID NO: 1235905 - RNA, 19 nt, Artificial Sequence
  Description of Artificial Sequence: Synthetic oligonucleotide
uggagagcucugccuaaau

SEQ ID NO: 1235906 - RNA, 19 nt, Artificial Sequence
  Description of Artificial Sequence: Synthetic oligonucleotide
gaauugccauauacggcca

SEQ ID NO: 1235907 - RNA, 19 nt, Artificial Sequence
  Description of Artificial Sequence: Synthetic oligonucleotide
ucgacgugcagcgccuuga

SEQ ID NO: 1235908 - RNA, 19 nt, Artificial Sequence
  Description of Artificial Sequence: Synthetic oligonucleotide
ggaagauccuuaugugguc

SEQ ID NO: 1235909 - RNA, 19 nt, Artificial Sequence
  Description of Artificial Sequence: Synthetic oligonucleotide
gagaccgugcggagggaag

SEQ ID NO: 1235910 - RNA, 19 nt, Artificial Sequence
  Description of Artificial Sequence: Synthetic oligonucleotide
ugccggacaguaacauauc

SEQ ID NO: 1235911 - RNA, 19 nt, Artificial Sequence
  Description of Artificial Sequence: Synthetic oligonucleotide
ugggugaagcgugcagacc

SEQ ID NO: 1235912 - RNA, 19 nt, Artificial Sequence
  Description of Artificial Sequence: Synthetic oligonucleotide
gaccgugcggagggaaggg

SEQ ID NO: 1235913 - RNA, 19 nt, Artificial Sequence
  Description of Artificial Sequence: Synthetic oligonucleotide
uacuggcuucuaacguacu

SEQ ID NO: 1235914 - RNA, 19 nt, Artificial Sequence
  Description of Artificial Sequence: Synthetic oligonucleotide
ggcuuuacuauaucagugu

SEQ ID NO: 1235915 - RNA, 19 nt, Artificial Sequence
  Description of Artificial Sequence: Synthetic oligonucleotide
cugccggacaguaacauau

SEQ ID NO: 1235916 - RNA, 19 nt, Artificial Sequence
  Description of Artificial Sequence: Synthetic oligonucleotide
accgcguuggcugguuggg

SEQ ID NO: 1235917 - RNA, 19 nt, Artificial Sequence
  Description of Artificial Sequence: Synthetic oligonucleotide
acaggacuauggccuugag

SEQ ID NO: 1235918 - RNA, 19 nt, Artificial Sequence
  Description of Artificial Sequence: Synthetic oligonucleotide
cucucucucucuccauuuc

SEQ ID NO: 1235919 - RNA, 19 nt, Artificial Sequence
  Description of Artificial Sequence: Synthetic oligonucleotide
ucucucucccucuccucuc

SEQ ID NO: 1235920 - RNA, 19 nt, Artificial Sequence
  Description of Artificial Sequence: Synthetic oligonucleotide
cuuugacgagucucucuca

SEQ ID NO: 1235921 - RNA, 19 nt, Artificial Sequence
  Description of Artificial Sequence: Synthetic oligonucleotide
cucuaugacugaggaggag

SEQ ID NO: 1235922 - RNA, 19 nt, Artificial Sequence
  Description of Artificial Sequence: Synthetic oligonucleotide
agcuugauggaaagacagu

SEQ ID NO: 1235923 - RNA, 19 nt, Artificial Sequence
  Description of Artificial Sequence: Synthetic oligonucleotide
cccaaauuaaacaggcaaa

SEQ ID NO: 1235924 - RNA, 19 nt, Artificial Sequence
  Description of Artificial Sequence: Synthetic oligonucleotide
aguagacuucccagaucag

SEQ ID NO: 1235925 - RNA, 19 nt, Artificial Sequence
  Description of Artificial Sequence: Synthetic oligonucleotide
acucagcggaaucgacgug

SEQ ID NO: 1235926 - RNA, 19 nt, Artificial Sequence
  Description of Artificial Sequence: Synthetic oligonucleotide
ggcgaagcaaaagcuuucc

SEQ ID NO: 1235927 - RNA, 19 nt, Artificial Sequence
  Description of Artificial Sequence: Synthetic oligonucleotide
ccgacaugggugaagcgug

SEQ ID NO: 1235928 - RNA, 19 nt, Artificial Sequence
  Description of Artificial Sequence: Synthetic oligonucleotide
uaaaggcgaccacccgguc

SEQ ID NO: 1235929 - RNA, 19 nt, Artificial Sequence
  Description of Artificial Sequence: Synthetic oligonucleotide
aucgacgugcagcgccuug

SEQ ID NO: 1235930 - RNA, 19 nt, Artificial Sequence
  Description of Artificial Sequence: Synthetic oligonucleotide
gaaccgcguuggcugguug

SEQ ID NO: 1235931 - RNA, 19 nt, Artificial Sequence
  Description of Artificial Sequence: Synthetic oligonucleotide
uugccauauacggccaguu

SEQ ID NO: 1235932 - RNA, 19 nt, Artificial Sequence
  Description of Artificial Sequence: Synthetic oligonucleotide
cgaagcaaaagcuuuccga

SEQ ID NO: 1235933 - RNA, 19 nt, Artificial Sequence
  Description of Artificial Sequence: Synthetic oligonucleotide
cacccaaauuaaacaggca

SEQ ID NO: 1235934 - RNA, 19 nt, Artificial Sequence
  Description of Artificial Sequence: Synthetic oligonucleotide
gacaaauauaagggccucu

SEQ ID NO: 1235935 - RNA, 19 nt, Artificial Sequence
  Description of Artificial Sequence: Synthetic oligonucleotide
ucggccgacaugggugaag

SEQ ID NO: 1235936 - RNA, 19 nt, Artificial Sequence
  Description of Artificial Sequence: Synthetic oligonucleotide
cauauacggccaguuaaaa

SEQ ID NO: 1235937 - RNA, 19 nt, Artificial Sequence
  Description of Artificial Sequence: Synthetic oligonucleotide
gaacaaauuguaggcuccu

SEQ ID NO: 1235938 - RNA, 19 nt, Artificial Sequence
  Description of Artificial Sequence: Synthetic oligonucleotide
cuaaaucaggcagaguuuu

SEQ ID NO: 1235939 - RNA, 19 nt, Artificial Sequence
  Description of Artificial Sequence: Synthetic oligonucleotide
ggaggagaccgugcggagg

SEQ ID NO: 1235940 - RNA, 19 nt, Artificial Sequence
  Description of Artificial Sequence: Synthetic oligonucleotide
uuccuuugacgagucucuc

SEQ ID NO: 1235941 - RNA, 19 nt, Artificial Sequence
  Description of Artificial Sequence: Synthetic oligonucleotide
uaucaguguggcgcuuccu

SEQ ID NO: 1235942 - RNA, 19 nt, Artificial Sequence
  Description of Artificial Sequence: Synthetic oligonucleotide
gcgaccacccggucggccg

SEQ ID NO: 1235943 - RNA, 19 nt, Artificial Sequence
  Description of Artificial Sequence: Synthetic oligonucleotide
uguaggcuccuagcacaga

SEQ ID NO: 1235944 - RNA, 19 nt, Artificial Sequence
  Description of Artificial Sequence: Synthetic oligonucleotide
agcgugcagaccagcagca

SEQ ID NO: 1235945 - RNA, 19 nt, Artificial Sequence
  Description of Artificial Sequence: Synthetic oligonucleotide
gugcggagggaagggaggc

SEQ ID NO: 1235946 - RNA, 19 nt, Artificial Sequence
  Description of Artificial Sequence: Synthetic oligonucleotide
gacgagucucucucacucu

SEQ ID NO: 1235947 - RNA, 19 nt, Artificial Sequence
  Description of Artificial Sequence: Synthetic oligonucleotide
cuggcuucuaacguacucu

SEQ ID NO: 1235948 - RNA, 19 nt, Artificial Sequence
  Description of Artificial Sequence: Synthetic oligonucleotide
gggacuggaccaaauagua

SEQ ID NO: 1235949 - RNA, 19 nt, Artificial Sequence
  Description of Artificial Sequence: Synthetic oligonucleotide
cgugcagaccagcagcagc

SEQ ID NO: 1235950 - RNA, 19 nt, Artificial Sequence
  Description of Artificial Sequence: Synthetic oligonucleotide
agauccuuaugugguccau

SEQ ID NO: 1235951 - RNA, 19 nt, Artificial Sequence
  Description of Artificial Sequence: Synthetic oligonucleotide
cucccucucucucucucca

SEQ ID NO: 1235952 - RNA, 19 nt, Artificial Sequence
  Description of Artificial Sequence: Synthetic oligonucleotide
ccauauacggccaguuaaa

SEQ ID NO: 1235953 - RNA, 19 nt, Artificial Sequence
  Description of Artificial Sequence: Synthetic oligonucleotide
ugccuaaaucaggcagagu

SEQ ID NO: 1235954 - RNA, 19 nt, Artificial Sequence
  Description of Artificial Sequence: Synthetic oligonucleotide
ggacuauggccuugaggca

SEQ ID NO: 1235955 - RNA, 19 nt, Artificial Sequence
  Description of Artificial Sequence: Synthetic oligonucleotide
ggcacuuaagugugacaaa

SEQ ID NO: 1235956 - RNA, 19 nt, Artificial Sequence
  Description of Artificial Sequence: Synthetic oligonucleotide
gcagcuuggaaagucuaaa

SEQ ID NO: 1235957 - RNA, 19 nt, Artificial Sequence
  Description of Artificial Sequence: Synthetic oligonucleotide
gaaucgacgugcagcgccu

SEQ ID NO: 1235958 - RNA, 19 nt, Artificial Sequence
  Description of Artificial Sequence: Synthetic oligonucleotide
caguguggcgcuuccuaaa

SEQ ID NO: 1235959 - RNA, 19 nt, Artificial Sequence
  Description of Artificial Sequence: Synthetic oligonucleotide
uaccuucccuaagcaggca

SEQ ID NO: 1235960 - RNA, 19 nt, Artificial Sequence
  Description of Artificial Sequence: Synthetic oligonucleotide
cgugcggagggaagggagg

SEQ ID NO: 1235961 - RNA, 19 nt, Artificial Sequence
  Description of Artificial Sequence: Synthetic oligonucleotide
cacuugcucuuggaagauc

SEQ ID NO: 1235962 - RNA, 19 nt, Artificial Sequence
  Description of Artificial Sequence: Synthetic oligonucleotide
caaauauaagggccucuuu

SEQ ID NO: 1235963 - RNA, 19 nt, Artificial Sequence
  Description of Artificial Sequence: Synthetic oligonucleotide
ccgugcggagggaagggag

SEQ ID NO: 1235964 - RNA, 19 nt, Artificial Sequence
  Description of Artificial Sequence: Synthetic oligonucleotide
cagcggaaucgacgugcag

SEQ ID NO: 1235965 - RNA, 19 nt, Artificial Sequence
  Description of Artificial Sequence: Synthetic oligonucleotide
ucccucucucucucuccau

SEQ ID NO: 1235966 - RNA, 19 nt, Artificial Sequence
  Description of Artificial Sequence: Synthetic oligonucleotide
ggucggccgacauggguga

SEQ ID NO: 1235967 - RNA, 19 nt, Artificial Sequence
  Description of Artificial Sequence: Synthetic oligonucleotide
gcuccuagcacagagcuuu

SEQ ID NO: 1235968 - RNA, 19 nt, Artificial Sequence
  Description of Artificial Sequence: Synthetic oligonucleotide
cgcugcauucaacacgaac

SEQ ID NO: 1235969 - RNA, 19 nt, Artificial Sequence
  Description of Artificial Sequence: Synthetic oligonucleotide
ggcgacauggaggggcaug

SEQ ID NO: 1235970 - RNA, 19 nt, Artificial Sequence
  Description of Artificial Sequence: Synthetic oligonucleotide
aaucgacgugcagcgccuu

SEQ ID NO: 1235971 - RNA, 19 nt, Artificial Sequence
  Description of Artificial Sequence: Synthetic oligonucleotide
cugcugccggacaguaaca

SEQ ID NO: 1235972 - RNA, 19 nt, Artificial Sequence
  Description of Artificial Sequence: Synthetic oligonucleotide
cacccggucggccgacaug

SEQ ID NO: 1235973 - RNA, 19 nt, Artificial Sequence
  Description of Artificial Sequence: Synthetic oligonucleotide
accgugcggagggaaggga

SEQ ID NO: 1235974 - RNA, 19 nt, Artificial Sequence
  Description of Artificial Sequence: Synthetic oligonucleotide
cggucggccgacaugggug

SEQ ID NO: 1235975 - RNA, 19 nt, Artificial Sequence
  Description of Artificial Sequence: Synthetic oligonucleotide
ccuaagcaggcacuuaagu

SEQ ID NO: 1235976 - RNA, 19 nt, Artificial Sequence
  Description of Artificial Sequence: Synthetic oligonucleotide
caaacugauugaggggagu

SEQ ID NO: 1235977 - RNA, 19 nt, Artificial Sequence
  Description of Artificial Sequence: Synthetic oligonucleotide
cuggaccaaauaguagacu

SEQ ID NO: 1235978 - RNA, 19 nt, Artificial Sequence
  Description of Artificial Sequence: Synthetic oligonucleotide
ccauuaacuucggcucccc

SEQ ID NO: 1235979 - RNA, 19 nt, Artificial Sequence
  Description of Artificial Sequence: Synthetic oligonucleotide
gggaggcgaagcaaaagcu

SEQ ID NO: 1235980 - RNA, 19 nt, Artificial Sequence
  Description of Artificial Sequence: Synthetic oligonucleotide
gggguggcuuuacuauauc

SEQ ID NO: 1235981 - RNA, 19 nt, Artificial Sequence
  Description of Artificial Sequence: Synthetic oligonucleotide
gccgacaugggugaagcgu

SEQ ID NO: 1235982 - RNA, 19 nt, Artificial Sequence
  Description of Artificial Sequence: Synthetic oligonucleotide
cccgcuggcucagagagga

SEQ ID NO: 1235983 - RNA, 19 nt, Artificial Sequence
  Description of Artificial Sequence: Synthetic oligonucleotide
ggcuucuaacguacucuuc

SEQ ID NO: 1235984 - RNA, 19 nt, Artificial Sequence
  Description of Artificial Sequence: Synthetic oligonucleotide
gcucuuggaagauccuuau

SEQ ID NO: 1235985 - RNA, 19 nt, Artificial Sequence
  Description of Artificial Sequence: Synthetic oligonucleotide
cucgaccaaacaguucagu

SEQ ID NO: 1235986 - RNA, 19 nt, Artificial Sequence
  Description of Artificial Sequence: Synthetic oligonucleotide
agcaaggagcggggcgaca

SEQ ID NO: 1235987 - RNA, 19 nt, Artificial Sequence
  Description of Artificial Sequence: Synthetic oligonucleotide
aggcgaccacccggucggc

SEQ ID NO: 1235988 - RNA, 19 nt, Artificial Sequence
  Description of Artificial Sequence: Synthetic oligonucleotide
gcagcuguacucagcggaa

SEQ ID NO: 1235989 - RNA, 19 nt, Artificial Sequence
  Description of Artificial Sequence: Synthetic oligonucleotide
gcugccggacaguaacaua

SEQ ID NO: 1235990 - RNA, 19 nt, Artificial Sequence
  Description of Artificial Sequence: Synthetic oligonucleotide
cggccgacaugggugaagc

SEQ ID NO: 1235991 - RNA, 19 nt, Artificial Sequence
  Description of Artificial Sequence: Synthetic oligonucleotide
gcgcuuccuaaaccauaga

SEQ ID NO: 1235992 - RNA, 19 nt, Artificial Sequence
  Description of Artificial Sequence: Synthetic oligonucleotide
gaccacccggucggccgac

SEQ ID NO: 1235993 - RNA, 19 nt, Artificial Sequence
  Description of Artificial Sequence: Synthetic oligonucleotide
cuacucccucucucucucu

SEQ ID NO: 1235994 - RNA, 19 nt, Artificial Sequence
  Description of Artificial Sequence: Synthetic oligonucleotide
cgacgugcagcgccuugag

SEQ ID NO: 1235995 - RNA, 19 nt, Artificial Sequence
  Description of Artificial Sequence: Synthetic oligonucleotide
ccccgcuggcucagagagg

SEQ ID NO: 1235996 - RNA, 19 nt, Artificial Sequence
  Description of Artificial Sequence: Synthetic oligonucleotide
ggcgaccacccggucggcc

SEQ ID NO: 1235997 - RNA, 19 nt, Artificial Sequence
  Description of Artificial Sequence: Synthetic oligonucleotide
guggcgcuuccuaaaccau

SEQ ID NO: 1235998 - RNA, 19 nt, Artificial Sequence
  Description of Artificial Sequence: Synthetic oligonucleotide
ccgcguuggcugguugggg

SEQ ID NO: 1235999 - RNA, 19 nt, Artificial Sequence
  Description of Artificial Sequence: Synthetic oligonucleotide
accacccggucggccgaca

SEQ ID NO: 1236000 - RNA, 19 nt, Artificial Sequence
  Description of Artificial Sequence: Synthetic oligonucleotide
gcacugcgcugcauucaac

SEQ ID NO: 1236001 - RNA, 19 nt, Artificial Sequence
  Description of Artificial Sequence: Synthetic oligonucleotide
gggcuacaucagacagacc

SEQ ID NO: 1236002 - RNA, 19 nt, Artificial Sequence
  Description of Artificial Sequence: Synthetic oligonucleotide
cccggucggccgacauggg

SEQ ID NO: 1236003 - RNA, 19 nt, Artificial Sequence
  Description of Artificial Sequence: Synthetic oligonucleotide
cuauaucaguguggcgcuu

SEQ ID NO: 1236004 - RNA, 19 nt, Artificial Sequence
  Description of Artificial Sequence: Synthetic oligonucleotide
cagcuguacucagcggaau

SEQ ID NO: 1236005 - RNA, 19 nt, Artificial Sequence
  Description of Artificial Sequence: Synthetic oligonucleotide
ccucucucucucuccauuu

SEQ ID NO: 1236006 - RNA, 19 nt, Artificial Sequence
  Description of Artificial Sequence: Synthetic oligonucleotide
cuccuagcacagagcuuuu

SEQ ID NO: 1236007 - RNA, 19 nt, Artificial Sequence
  Description of Artificial Sequence: Synthetic oligonucleotide
cggaaucgacgugcagcgc

SEQ ID NO: 1236008 - RNA, 19 nt, Artificial Sequence
  Description of Artificial Sequence: Synthetic oligonucleotide
gucggccgacaugggugaa

SEQ ID NO: 1236009 - RNA, 19 nt, Artificial Sequence
  Description of Artificial Sequence: Synthetic oligonucleotide
cgcguuggcugguuggggu

SEQ ID NO: 1236010 - RNA, 19 nt, Artificial Sequence
  Description of Artificial Sequence: Synthetic oligonucleotide
ccgcuggcucagagaggac

SEQ ID NO: 1236011 - RNA, 19 nt, Artificial Sequence
  Description of Artificial Sequence: Synthetic oligonucleotide
cccucucucucucuccauu

SEQ ID NO: 1236012 - RNA, 19 nt, Artificial Sequence
  Description of Artificial Sequence: Synthetic oligonucleotide
ccggucggccgacaugggu

SEQ ID NO: 1236013 - RNA, 19 nt, Artificial Sequence
  Description of Artificial Sequence: Synthetic oligonucleotide
cgaccacccggucggccga

SEQ ID NO: 1236014 - RNA, 19 nt, Artificial Sequence
  Description of Artificial Sequence: Synthetic oligonucleotide
cgagucucucucacucuuu

SEQ ID NO: 1236015 - RNA, 19 nt, Artificial Sequence
  Description of Artificial Sequence: Synthetic oligonucleotide
gcgcugcauucaacacgaa

SEQ ID NO: 1236016 - RNA, 19 nt, Artificial Sequence
  Description of Artificial Sequence: Synthetic oligonucleotide
ccacccggucggccgacau

SEQ ID NO: 1236017 - RNA, 19 nt, Artificial Sequence
  Description of Artificial Sequence: Synthetic oligonucleotide
ccgaaccgcguuggcuggu

SEQ ID NO: 1236018 - RNA, 19 nt, Artificial Sequence
  Description of Artificial Sequence: Synthetic oligonucleotide
cgaaccgcguuggcugguu

SEQ ID NO: 1236019 - RNA, 19 nt, Artificial Sequence
  Description of Artificial Sequence: Synthetic oligonucleotide
ugugauaacagucaggucu

SEQ ID NO: 1236020 - RNA, 19 nt, Artificial Sequence
  Description of Artificial Sequence: Synthetic oligonucleotide
aaugacguccacuacucgc

SEQ ID NO: 1236021 - RNA, 19 nt, Artificial Sequence
  Description of Artificial Sequence: Synthetic oligonucleotide
gaucugaacacgcagacgg

SEQ ID NO: 1236022 - RNA, 19 nt, Artificial Sequence
  Description of Artificial Sequence: Synthetic oligonucleotide
gaauauagcccauauaggc

SEQ ID NO: 1236023 - RNA, 19 nt, Artificial Sequence
  Description of Artificial Sequence: Synthetic oligonucleotide
cauaguaucccauacgggc

SEQ ID NO: 1236024 - RNA, 19 nt, Artificial Sequence
  Description of Artificial Sequence: Synthetic oligonucleotide
ugugauaccuccaaugucu

SEQ ID NO: 1236025 - RNA, 19 nt, Artificial Sequence
  Description of Artificial Sequence: Synthetic oligonucleotide
agguuuaagccucuggcgc

SEQ ID NO: 1236026 - RNA, 19 nt, Artificial Sequence
  Description of Artificial Sequence: Synthetic oligonucleotide
agucaaauacugcacugcc

SEQ ID NO: 1236027 - RNA, 19 nt, Artificial Sequence
  Description of Artificial Sequence: Synthetic oligonucleotide
ugagaugugagcacguugc

SEQ ID NO: 1236028 - RNA, 19 nt, Artificial Sequence
  Description of Artificial Sequence: Synthetic oligonucleotide
uuugccugaauauagccca

SEQ ID NO: 1236029 - RNA, 19 nt, Artificial Sequence
  Description of Artificial Sequence: Synthetic oligonucleotide
agagccgucauccauauga

SEQ ID NO: 1236030 - RNA, 19 nt, Artificial Sequence
  Description of Artificial Sequence: Synthetic oligonucleotide
ugaacacgcagacggaugg

SEQ ID NO: 1236031 - RNA, 19 nt, Artificial Sequence
  Description of Artificial Sequence: Synthetic oligonucleotide
ugaaucuggaacugaacag

SEQ ID NO: 1236032 - RNA, 19 nt, Artificial Sequence
  Description of Artificial Sequence: Synthetic oligonucleotide
uacucauauacacugccgc

SEQ ID NO: 1236033 - RNA, 19 nt, Artificial Sequence
  Description of Artificial Sequence: Synthetic oligonucleotide
gaugugagcacguugccgc

SEQ ID NO: 1236034 - RNA, 19 nt, Artificial Sequence
  Description of Artificial Sequence: Synthetic oligonucleotide
uuuauuguggggcacucac

SEQ ID NO: 1236035 - RNA, 19 nt, Artificial Sequence
  Description of Artificial Sequence: Synthetic oligonucleotide
aggauaacuggguaccggc

SEQ ID NO: 1236036 - RNA, 19 nt, Artificial Sequence
  Description of Artificial Sequence: Synthetic oligonucleotide
agagcagacagaguuaugg

SEQ ID NO: 1236037 - RNA, 19 nt, Artificial Sequence
  Description of Artificial Sequence: Synthetic oligonucleotide
gaacgcaagcaauagauga

SEQ ID NO: 1236038 - RNA, 19 nt, Artificial Sequence
  Description of Artificial Sequence: Synthetic oligonucleotide
ucauaguaucccauacggg

SEQ ID NO: 1236039 - RNA, 19 nt, Artificial Sequence
  Description of Artificial Sequence: Synthetic oligonucleotide
aauacugcacugcccugac

SEQ ID NO: 1236040 - RNA, 19 nt, Artificial Sequence
  Description of Artificial Sequence: Synthetic oligonucleotide
agaguuauggcccgcgggg

SEQ ID NO: 1236041 - RNA, 19 nt, Artificial Sequence
  Description of Artificial Sequence: Synthetic oligonucleotide
uugucaugcagguuccugg

SEQ ID NO: 1236042 - RNA, 19 nt, Artificial Sequence
  Description of Artificial Sequence: Synthetic oligonucleotide
acgaagauccgacagguug

SEQ ID NO: 1236043 - RNA, 19 nt, Artificial Sequence
  Description of Artificial Sequence: Synthetic oligonucleotide
ucggacuauaccaucaccu

SEQ ID NO: 1236044 - RNA, 19 nt, Artificial Sequence
  Description of Artificial Sequence: Synthetic oligonucleotide
guuaagugggaugucacgg

SEQ ID NO: 1236045 - RNA, 19 nt, Artificial Sequence
  Description of Artificial Sequence: Synthetic oligonucleotide
uucccacccaaauucacgg

SEQ ID NO: 1236046 - RNA, 19 nt, Artificial Sequence
  Description of Artificial Sequence: Synthetic oligonucleotide
acguccaagccauacugcc

SEQ ID NO: 1236047 - RNA, 19 nt, Artificial Sequence
  Description of Artificial Sequence: Synthetic oligonucleotide
acucauauacacugccgcg

SEQ ID NO: 1236048 - RNA, 19 nt, Artificial Sequence
  Description of Artificial Sequence: Synthetic oligonucleotide
ggaauuacuacacgcacag

SEQ ID NO: 1236049 - RNA, 19 nt, Artificial Sequence
  Description of Artificial Sequence: Synthetic oligonucleotide
cacgucaccaggauggagg

SEQ ID NO: 1236050 - RNA, 19 nt, Artificial Sequence
  Description of Artificial Sequence: Synthetic oligonucleotide
cagcacgucaccaggaugg

SEQ ID NO: 1236051 - RNA, 19 nt, Artificial Sequence
  Description of Artificial Sequence: Synthetic oligonucleotide
aaaacaccggugugauaac

SEQ ID NO: 1236052 - RNA, 19 nt, Artificial Sequence
  Description of Artificial Sequence: Synthetic oligonucleotide
cccugaaccaguuugaagg

SEQ ID NO: 1236053 - RNA, 19 nt, Artificial Sequence
  Description of Artificial Sequence: Synthetic oligonucleotide
gaugggagagccgucaucc

SEQ ID NO: 1236054 - RNA, 19 nt, Artificial Sequence
  Description of Artificial Sequence: Synthetic oligonucleotide
ugcagugugguagagugag

SEQ ID NO: 1236055 - RNA, 19 nt, Artificial Sequence
  Description of Artificial Sequence: Synthetic oligonucleotide
cuggauacccuucugguug

SEQ ID NO: 1236056 - RNA, 19 nt, Artificial Sequence
  Description of Artificial Sequence: Synthetic oligonucleotide
aucccauacgggcauugcc

SEQ ID NO: 1236057 - RNA, 19 nt, Artificial Sequence
  Description of Artificial Sequence: Synthetic oligonucleotide
agagccuugucucaauuca

SEQ ID NO: 1236058 - RNA, 19 nt, Artificial Sequence
  Description of Artificial Sequence: Synthetic oligonucleotide
uuaagugggaugucacggc

SEQ ID NO: 1236059 - RNA, 19 nt, Artificial Sequence
  Description of Artificial Sequence: Synthetic oligonucleotide
uggugugauaccuccaaug

SEQ ID NO: 1236060 - RNA, 19 nt, Artificial Sequence
  Description of Artificial Sequence: Synthetic oligonucleotide
gacuauaccaucaccuccc

SEQ ID NO: 1236061 - RNA, 19 nt, Artificial Sequence
  Description of Artificial Sequence: Synthetic oligonucleotide
uaagugggaugucacggcc

SEQ ID NO: 1236062 - RNA, 19 nt, Artificial Sequence
  Description of Artificial Sequence: Synthetic oligonucleotide
agucaugugacuguguaca

SEQ ID NO: 1236063 - RNA, 19 nt, Artificial Sequence
  Description of Artificial Sequence: Synthetic oligonucleotide
agcgacgcaggauaacugg

SEQ ID NO: 1236064 - RNA, 19 nt, Artificial Sequence
  Description of Artificial Sequence: Synthetic oligonucleotide
gaugucacggcccacuaga

SEQ ID NO: 1236065 - RNA, 19 nt, Artificial Sequence
  Description of Artificial Sequence: Synthetic oligonucleotide
aagccuucagaaugacguc

SEQ ID NO: 1236066 - RNA, 19 nt, Artificial Sequence
  Description of Artificial Sequence: Synthetic oligonucleotide
aacgcaagcaauagaugag

SEQ ID NO: 1236067 - RNA, 19 nt, Artificial Sequence
  Description of Artificial Sequence: Synthetic oligonucleotide
agccuucagaaugacgucc

SEQ ID NO: 1236068 - RNA, 19 nt, Artificial Sequence
  Description of Artificial Sequence: Synthetic oligonucleotide
agaaugacguccacuacuc

SEQ ID NO: 1236069 - RNA, 19 nt, Artificial Sequence
  Description of Artificial Sequence: Synthetic oligonucleotide
gauaccuccaaugucugca

SEQ ID NO: 1236070 - RNA, 19 nt, Artificial Sequence
  Description of Artificial Sequence: Synthetic oligonucleotide
uagagaacgcaagcaauag

SEQ ID NO: 1236071 - RNA, 19 nt, Artificial Sequence
  Description of Artificial Sequence: Synthetic oligonucleotide
acuauaccaucaccucccc

SEQ ID NO: 1236072 - RNA, 19 nt, Artificial Sequence
  Description of Artificial Sequence: Synthetic oligonucleotide
ugcuaguucagcguuugcc

SEQ ID NO: 1236073 - RNA, 19 nt, Artificial Sequence
  Description of Artificial Sequence: Synthetic oligonucleotide
cuguguacaccacugcgcc

SEQ ID NO: 1236074 - RNA, 19 nt, Artificial Sequence
  Description of Artificial Sequence: Synthetic oligonucleotide
ggagguuuaagccucuggc

SEQ ID NO: 1236075 - RNA, 19 nt, Artificial Sequence
  Description of Artificial Sequence: Synthetic oligonucleotide
uucagcguuugccugaaua

SEQ ID NO: 1236076 - RNA, 19 nt, Artificial Sequence
  Description of Artificial Sequence: Synthetic oligonucleotide
auguccccgggauacacgg

SEQ ID NO: 1236077 - RNA, 19 nt, Artificial Sequence
  Description of Artificial Sequence: Synthetic oligonucleotide
auucacgguucgcccaucc

SEQ ID NO: 1236078 - RNA, 19 nt, Artificial Sequence
  Description of Artificial Sequence: Synthetic oligonucleotide
agcaaggcaacccugguua

SEQ ID NO: 1236079 - RNA, 19 nt, Artificial Sequence
  Description of Artificial Sequence: Synthetic oligonucleotide
acaggaaaagucgaggcgu

SEQ ID NO: 1236080 - RNA, 19 nt, Artificial Sequence
  Description of Artificial Sequence: Synthetic oligonucleotide
ucugaugaggagguuuaag

SEQ ID NO: 1236081 - RNA, 19 nt, Artificial Sequence
  Description of Artificial Sequence: Synthetic oligonucleotide
aagaccagcucucggacua

SEQ ID NO: 1236082 - RNA, 19 nt, Artificial Sequence
  Description of Artificial Sequence: Synthetic oligonucleotide
accaguuugaaggacagaa

SEQ ID NO: 1236083 - RNA, 19 nt, Artificial Sequence
  Description of Artificial Sequence: Synthetic oligonucleotide
aaauucacgguucgcccau

SEQ ID NO: 1236084 - RNA, 19 nt, Artificial Sequence
  Description of Artificial Sequence: Synthetic oligonucleotide
ugaugcguguguuagucau

SEQ ID NO: 1236085 - RNA, 19 nt, Artificial Sequence
  Description of Artificial Sequence: Synthetic oligonucleotide
cugggaaggcugcaaauag

SEQ ID NO: 1236086 - RNA, 19 nt, Artificial Sequence
  Description of Artificial Sequence: Synthetic oligonucleotide
uccgugaugcguguguuag

SEQ ID NO: 1236087 - RNA, 19 nt, Artificial Sequence
  Description of Artificial Sequence: Synthetic oligonucleotide
cucauauacacugccgcgc

SEQ ID NO: 1236088 - RNA, 19 nt, Artificial Sequence
  Description of Artificial Sequence: Synthetic oligonucleotide
aacaccggugugauaacag

SEQ ID NO: 1236089 - RNA, 19 nt, Artificial Sequence
  Description of Artificial Sequence: Synthetic oligonucleotide
uagaacacgggccgugucu

SEQ ID NO: 1236090 - RNA, 19 nt, Artificial Sequence
  Description of Artificial Sequence: Synthetic oligonucleotide
uguuagucaugugacugug

SEQ ID NO: 1236091 - RNA, 19 nt, Artificial Sequence
  Description of Artificial Sequence: Synthetic oligonucleotide
ugggaaggcugcaaauagc

SEQ ID NO: 1236092 - RNA, 19 nt, Artificial Sequence
  Description of Artificial Sequence: Synthetic oligonucleotide
ugcugaaucuggaacugaa

SEQ ID NO: 1236093 - RNA, 19 nt, Artificial Sequence
  Description of Artificial Sequence: Synthetic oligonucleotide
uggauacccuucugguugg

SEQ ID NO: 1236094 - RNA, 19 nt, Artificial Sequence
  Description of Artificial Sequence: Synthetic oligonucleotide
aguuauggcccgcggggcg

SEQ ID NO: 1236095 - RNA, 19 nt, Artificial Sequence
  Description of Artificial Sequence: Synthetic oligonucleotide
guuugccugaauauagccc

SEQ ID NO: 1236096 - RNA, 19 nt, Artificial Sequence
  Description of Artificial Sequence: Synthetic oligonucleotide
gaaugacguccacuacucg

SEQ ID NO: 1236097 - RNA, 19 nt, Artificial Sequence
  Description of Artificial Sequence: Synthetic oligonucleotide
gaaauguggggagcauugg

SEQ ID NO: 1236098 - RNA, 19 nt, Artificial Sequence
  Description of Artificial Sequence: Synthetic oligonucleotide
uuauuguggggcacucaca

SEQ ID NO: 1236099 - RNA, 19 nt, Artificial Sequence
  Description of Artificial Sequence: Synthetic oligonucleotide
gauacacggucacagaggu

SEQ ID NO: 1236100 - RNA, 19 nt, Artificial Sequence
  Description of Artificial Sequence: Synthetic oligonucleotide
guacucauauacacugccg

SEQ ID NO: 1236101 - RNA, 19 nt, Artificial Sequence
  Description of Artificial Sequence: Synthetic oligonucleotide
agcguuugccugaauauag

SEQ ID NO: 1236102 - RNA, 19 nt, Artificial Sequence
  Description of Artificial Sequence: Synthetic oligonucleotide
gguuaagugggaugucacg

SEQ ID NO: 1236103 - RNA, 19 nt, Artificial Sequence
  Description of Artificial Sequence: Synthetic oligonucleotide
agaugugagcacguugccg

SEQ ID NO: 1236104 - RNA, 19 nt, Artificial Sequence
  Description of Artificial Sequence: Synthetic oligonucleotide
agauccgacagguugucau

SEQ ID NO: 1236105 - RNA, 19 nt, Artificial Sequence
  Description of Artificial Sequence: Synthetic oligonucleotide
cagacagaguuauggcccg

SEQ ID NO: 1236106 - RNA, 19 nt, Artificial Sequence
  Description of Artificial Sequence: Synthetic oligonucleotide
agagaacgcaagcaauaga

SEQ ID NO: 1236107 - RNA, 19 nt, Artificial Sequence
  Description of Artificial Sequence: Synthetic oligonucleotide
auacugcccgaucagcucu

SEQ ID NO: 1236108 - RNA, 19 nt, Artificial Sequence
  Description of Artificial Sequence: Synthetic oligonucleotide
gccgucauccauaugaucc

SEQ ID NO: 1236109 - RNA, 19 nt, Artificial Sequence
  Description of Artificial Sequence: Synthetic oligonucleotide
gauccgacagguugucaug

SEQ ID NO: 1236110 - RNA, 19 nt, Artificial Sequence
  Description of Artificial Sequence: Synthetic oligonucleotide
ucccugaaccaguuugaag

SEQ ID NO: 1236111 - RNA, 19 nt, Artificial Sequence
  Description of Artificial Sequence: Synthetic oligonucleotide
uccacuacucgcugagaug

SEQ ID NO: 1236112 - RNA, 19 nt, Artificial Sequence
  Description of Artificial Sequence: Synthetic oligonucleotide
ugucaccgcuucuuccugg

SEQ ID NO: 1236113 - RNA, 19 nt, Artificial Sequence
  Description of Artificial Sequence: Synthetic oligonucleotide
gggauacacggucacagag

SEQ ID NO: 1236114 - RNA, 19 nt, Artificial Sequence
  Description of Artificial Sequence: Synthetic oligonucleotide
cauccauaugauccucugc

SEQ ID NO: 1236115 - RNA, 19 nt, Artificial Sequence
  Description of Artificial Sequence: Synthetic oligonucleotide
cagaguuauggcccgcggg

SEQ ID NO: 1236116 - RNA, 19 nt, Artificial Sequence
  Description of Artificial Sequence: Synthetic oligonucleotide
ugucaugcagguuccuggu

SEQ ID NO: 1236117 - RNA, 19 nt, Artificial Sequence
  Description of Artificial Sequence: Synthetic oligonucleotide
ucgaggcguucuuugaugu

SEQ ID NO: 1236118 - RNA, 19 nt, Artificial Sequence
  Description of Artificial Sequence: Synthetic oligonucleotide
ggacuauaccaucaccucc

SEQ ID NO: 1236119 - RNA, 19 nt, Artificial Sequence
  Description of Artificial Sequence: Synthetic oligonucleotide
ucaaagcgacgcaggauaa

SEQ ID NO: 1236120 - RNA, 19 nt, Artificial Sequence
  Description of Artificial Sequence: Synthetic oligonucleotide
agaucuugcccggugcccg

SEQ ID NO: 1236121 - RNA, 19 nt, Artificial Sequence
  Description of Artificial Sequence: Synthetic oligonucleotide
ucucggacuauaccaucac

SEQ ID NO: 1236122 - RNA, 19 nt, Artificial Sequence
  Description of Artificial Sequence: Synthetic oligonucleotide
aacuggguaccggcucucc

SEQ ID NO: 1236123 - RNA, 19 nt, Artificial Sequence
  Description of Artificial Sequence: Synthetic oligonucleotide
ugagauugccaaacaccuc

SEQ ID NO: 1236124 - RNA, 19 nt, Artificial Sequence
  Description of Artificial Sequence: Synthetic oligonucleotide
ugucucauaguaucccaua

SEQ ID NO: 1236125 - RNA, 19 nt, Artificial Sequence
  Description of Artificial Sequence: Synthetic oligonucleotide
gagaugugagcacguugcc

SEQ ID NO: 1236126 - RNA, 19 nt, Artificial Sequence
  Description of Artificial Sequence: Synthetic oligonucleotide
auaguaucccauacgggca

SEQ ID NO: 1236127 - RNA, 19 nt, Artificial Sequence
  Description of Artificial Sequence: Synthetic oligonucleotide
gagaacgcaagcaauagau

SEQ ID NO: 1236128 - RNA, 19 nt, Artificial Sequence
  Description of Artificial Sequence: Synthetic oligonucleotide
aacacgcagacggauggga

SEQ ID NO: 1236129 - RNA, 19 nt, Artificial Sequence
  Description of Artificial Sequence: Synthetic oligonucleotide
ggcaacccugguuaagugg

SEQ ID NO: 1236130 - RNA, 19 nt, Artificial Sequence
  Description of Artificial Sequence: Synthetic oligonucleotide
aaacaccggugugauaaca

SEQ ID NO: 1236131 - RNA, 19 nt, Artificial Sequence
  Description of Artificial Sequence: Synthetic oligonucleotide
cacccaaauucacgguucg

SEQ ID NO: 1236132 - RNA, 19 nt, Artificial Sequence
  Description of Artificial Sequence: Synthetic oligonucleotide
uaguaucccauacgggcau

SEQ ID NO: 1236133 - RNA, 19 nt, Artificial Sequence
  Description of Artificial Sequence: Synthetic oligonucleotide
ugucacggcccacuagaga

SEQ ID NO: 1236134 - RNA, 19 nt, Artificial Sequence
  Description of Artificial Sequence: Synthetic oligonucleotide
gcccauauaggccugcacc

SEQ ID NO: 1236135 - RNA, 19 nt, Artificial Sequence
  Description of Artificial Sequence: Synthetic oligonucleotide
cauagccccaccgccaggg

SEQ ID NO: 1236136 - RNA, 19 nt, Artificial Sequence
  Description of Artificial Sequence: Synthetic oligonucleotide
cucggacuauaccaucacc

SEQ ID NO: 1236137 - RNA, 19 nt, Artificial Sequence
  Description of Artificial Sequence: Synthetic oligonucleotide
agcccauauaggccugcac

SEQ ID NO: 1236138 - RNA, 19 nt, Artificial Sequence
  Description of Artificial Sequence: Synthetic oligonucleotide
gcaacccugguuaaguggg

SEQ ID NO: 1236139 - RNA, 19 nt, Artificial Sequence
  Description of Artificial Sequence: Synthetic oligonucleotide
cauacugcccgaucagcuc

SEQ ID NO: 1236140 - RNA, 19 nt, Artificial Sequence
  Description of Artificial Sequence: Synthetic oligonucleotide
ucacgguucgcccauccuu

SEQ ID NO: 1236141 - RNA, 19 nt, Artificial Sequence
  Description of Artificial Sequence: Synthetic oligonucleotide
cacacagcuuccugggcgc

SEQ ID NO: 1236142 - RNA, 19 nt, Artificial Sequence
  Description of Artificial Sequence: Synthetic oligonucleotide
cauacgggcauugcccagg

SEQ ID NO: 1236143 - RNA, 19 nt, Artificial Sequence
  Description of Artificial Sequence: Synthetic oligonucleotide
gguuuaagccucuggcgcc

SEQ ID NO: 1236144 - RNA, 19 nt, Artificial Sequence
  Description of Artificial Sequence: Synthetic oligonucleotide
agguuccugguuccacuac

SEQ ID NO: 1236145 - RNA, 19 nt, Artificial Sequence
  Description of Artificial Sequence: Synthetic oligonucleotide
auagaugagagcagacaga

SEQ ID NO: 1236146 - RNA, 19 nt, Artificial Sequence
  Description of Artificial Sequence: Synthetic oligonucleotide
auacgggcauugcccaggg

SEQ ID NO: 1236147 - RNA, 19 nt, Artificial Sequence
  Description of Artificial Sequence: Synthetic oligonucleotide
cagcucucggacuauacca

SEQ ID NO: 1236148 - RNA, 19 nt, Artificial Sequence
  Description of Artificial Sequence: Synthetic oligonucleotide
gcaagcaauagaugagagc

SEQ ID NO: 1236149 - RNA, 19 nt, Artificial Sequence
  Description of Artificial Sequence: Synthetic oligonucleotide
cuauaccaucaccuccccg

SEQ ID NO: 1236150 - RNA, 19 nt, Artificial Sequence
  Description of Artificial Sequence: Synthetic oligonucleotide
uguguacaccacugcgccc

SEQ ID NO: 1236151 - RNA, 19 nt, Artificial Sequence
  Description of Artificial Sequence: Synthetic oligonucleotide
agguugucaugcagguucc

SEQ ID NO: 1236152 - RNA, 19 nt, Artificial Sequence
  Description of Artificial Sequence: Synthetic oligonucleotide
ggauacacggucacagagg

SEQ ID NO: 1236153 - RNA, 19 nt, Artificial Sequence
  Description of Artificial Sequence: Synthetic oligonucleotide
gucgaggcguucuuugaug

SEQ ID NO: 1236154 - RNA, 19 nt, Artificial Sequence
  Description of Artificial Sequence: Synthetic oligonucleotide
caaauucacgguucgccca

SEQ ID NO: 1236155 - RNA, 19 nt, Artificial Sequence
  Description of Artificial Sequence: Synthetic oligonucleotide
ucgcccauccuuucugaug

SEQ ID NO: 1236156 - RNA, 19 nt, Artificial Sequence
  Description of Artificial Sequence: Synthetic oligonucleotide
guaccggcucuccagaauc

SEQ ID NO: 1236157 - RNA, 19 nt, Artificial Sequence
  Description of Artificial Sequence: Synthetic oligonucleotide
acaccggugugauaacagu

SEQ ID NO: 1236158 - RNA, 19 nt, Artificial Sequence
  Description of Artificial Sequence: Synthetic oligonucleotide
acugccgcgcucugggaag

SEQ ID NO: 1236159 - RNA, 19 nt, Artificial Sequence
  Description of Artificial Sequence: Synthetic oligonucleotide
uuccaaaagcucgaagcau

SEQ ID NO: 1236160 - RNA, 19 nt, Artificial Sequence
  Description of Artificial Sequence: Synthetic oligonucleotide
gaaggcccgacgcucggug

SEQ ID NO: 1236161 - RNA, 19 nt, Artificial Sequence
  Description of Artificial Sequence: Synthetic oligonucleotide
uggaagacgccucccugaa

SEQ ID NO: 1236162 - RNA, 19 nt, Artificial Sequence
  Description of Artificial Sequence: Synthetic oligonucleotide
auagcccauauaggccugc

SEQ ID NO: 1236163 - RNA, 19 nt, Artificial Sequence
  Description of Artificial Sequence: Synthetic oligonucleotide
acugcuaguucagcguuug

SEQ ID NO: 1236164 - RNA, 19 nt, Artificial Sequence
  Description of Artificial Sequence: Synthetic oligonucleotide
aaacggcacccuccuguug

SEQ ID NO: 1236165 - RNA, 19 nt, Artificial Sequence
  Description of Artificial Sequence: Synthetic oligonucleotide
caccggugugauaacaguc

SEQ ID NO: 1236166 - RNA, 19 nt, Artificial Sequence
  Description of Artificial Sequence: Synthetic oligonucleotide
cuccgggucuccauagccc

SEQ ID NO: 1236167 - RNA, 19 nt, Artificial Sequence
  Description of Artificial Sequence: Synthetic oligonucleotide
cucaauucaaagcgacgca

SEQ ID NO: 1236168 - RNA, 19 nt, Artificial Sequence
  Description of Artificial Sequence: Synthetic oligonucleotide
gugugauaccuccaauguc

SEQ ID NO: 1236169 - RNA, 19 nt, Artificial Sequence
  Description of Artificial Sequence: Synthetic oligonucleotide
augcguguguuagucaugu

SEQ ID NO: 1236170 - RNA, 19 nt, Artificial Sequence
  Description of Artificial Sequence: Synthetic oligonucleotide
acgcaagcaauagaugaga

SEQ ID NO: 1236171 - RNA, 19 nt, Artificial Sequence
  Description of Artificial Sequence: Synthetic oligonucleotide
guugucaugcagguuccug

SEQ ID NO: 1236172 - RNA, 19 nt, Artificial Sequence
  Description of Artificial Sequence: Synthetic oligonucleotide
ucuuuauuguggggcacuc

SEQ ID NO: 1236173 - RNA, 19 nt, Artificial Sequence
  Description of Artificial Sequence: Synthetic oligonucleotide
auaugauccucugcagaca

SEQ ID NO: 1236174 - RNA, 19 nt, Artificial Sequence
  Description of Artificial Sequence: Synthetic oligonucleotide
aauucacgguucgcccauc

SEQ ID NO: 1236175 - RNA, 19 nt, Artificial Sequence
  Description of Artificial Sequence: Synthetic oligonucleotide
acccaaauucacgguucgc

SEQ ID NO: 1236176 - RNA, 19 nt, Artificial Sequence
  Description of Artificial Sequence: Synthetic oligonucleotide
acgcagacggaugggagag

SEQ ID NO: 1236177 - RNA, 19 nt, Artificial Sequence
  Description of Artificial Sequence: Synthetic oligonucleotide
auaccaucaccuccccgga

SEQ ID NO: 1236178 - RNA, 19 nt, Artificial Sequence
  Description of Artificial Sequence: Synthetic oligonucleotide
uugcagugugguagaguga

SEQ ID NO: 1236179 - RNA, 19 nt, Artificial Sequence
  Description of Artificial Sequence: Synthetic oligonucleotide
cguguguuagucaugugac

SEQ ID NO: 1236180 - RNA, 19 nt, Artificial Sequence
  Description of Artificial Sequence: Synthetic oligonucleotide
cucucggacuauaccauca

SEQ ID NO: 1236181 - RNA, 19 nt, Artificial Sequence
  Description of Artificial Sequence: Synthetic oligonucleotide
acccugguuaagugggaug

SEQ ID NO: 1236182 - RNA, 19 nt, Artificial Sequence
  Description of Artificial Sequence: Synthetic oligonucleotide
gaacacgcagacggauggg

SEQ ID NO: 1236183 - RNA, 19 nt, Artificial Sequence
  Description of Artificial Sequence: Synthetic oligonucleotide
agucgaggcguucuuugau

SEQ ID NO: 1236184 - RNA, 19 nt, Artificial Sequence
  Description of Artificial Sequence: Synthetic oligonucleotide
gcguguguuagucauguga

SEQ ID NO: 1236185 - RNA, 19 nt, Artificial Sequence
  Description of Artificial Sequence: Synthetic oligonucleotide
acuacucgcugagauguga

SEQ ID NO: 1236186 - RNA, 19 nt, Artificial Sequence
  Description of Artificial Sequence: Synthetic oligonucleotide
uucacgguucgcccauccu

SEQ ID NO: 1236187 - RNA, 19 nt, Artificial Sequence
  Description of Artificial Sequence: Synthetic oligonucleotide
acgucaccaggauggaggu

SEQ ID NO: 1236188 - RNA, 19 nt, Artificial Sequence
  Description of Artificial Sequence: Synthetic oligonucleotide
ugaggagguuuaagccucu

SEQ ID NO: 1236189 - RNA, 19 nt, Artificial Sequence
  Description of Artificial Sequence: Synthetic oligonucleotide
cccaaauucacgguucgcc

SEQ ID NO: 1236190 - RNA, 19 nt, Artificial Sequence
  Description of Artificial Sequence: Synthetic oligonucleotide
caugccaaccagguccagc

SEQ ID NO: 1236191 - RNA, 19 nt, Artificial Sequence
  Description of Artificial Sequence: Synthetic oligonucleotide
gaugcguguguuagucaug

SEQ ID NO: 1236192 - RNA, 19 nt, Artificial Sequence
  Description of Artificial Sequence: Synthetic oligonucleotide
aggaaaagucgaggcguuc

SEQ ID NO: 1236193 - RNA, 19 nt, Artificial Sequence
  Description of Artificial Sequence: Synthetic oligonucleotide
agcgcccguaccaccagcc

SEQ ID NO: 1236194 - RNA, 19 nt, Artificial Sequence
  Description of Artificial Sequence: Synthetic oligonucleotide
ugggcacgaagauccgaca

SEQ ID NO: 1236195 - RNA, 19 nt, Artificial Sequence
  Description of Artificial Sequence: Synthetic oligonucleotide
guguacaccacugcgccca

SEQ ID NO: 1236196 - RNA, 19 nt, Artificial Sequence
  Description of Artificial Sequence: Synthetic oligonucleotide
cagugugguagagugagga

SEQ ID NO: 1236197 - RNA, 19 nt, Artificial Sequence
  Description of Artificial Sequence: Synthetic oligonucleotide
ugguagagugaggaggcau

SEQ ID NO: 1236198 - RNA, 19 nt, Artificial Sequence
  Description of Artificial Sequence: Synthetic oligonucleotide
gaguuauggcccgcggggc

SEQ ID NO: 1236199 - RNA, 19 nt, Artificial Sequence
  Description of Artificial Sequence: Synthetic oligonucleotide
agacagaguuauggcccgc

SEQ ID NO: 1236200 - RNA, 19 nt, Artificial Sequence
  Description of Artificial Sequence: Synthetic oligonucleotide
gacgcaggauaacugggua

SEQ ID NO: 1236201 - RNA, 19 nt, Artificial Sequence
  Description of Artificial Sequence: Synthetic oligonucleotide
uccgacagguugucaugca

SEQ ID NO: 1236202 - RNA, 19 nt, Artificial Sequence
  Description of Artificial Sequence: Synthetic oligonucleotide
ggugugauaccuccaaugu

SEQ ID NO: 1236203 - RNA, 19 nt, Artificial Sequence
  Description of Artificial Sequence: Synthetic oligonucleotide
gggcacgaagauccgacag

SEQ ID NO: 1236204 - RNA, 19 nt, Artificial Sequence
  Description of Artificial Sequence: Synthetic oligonucleotide
cguuugccugaauauagcc

SEQ ID NO: 1236205 - RNA, 19 nt, Artificial Sequence
  Description of Artificial Sequence: Synthetic oligonucleotide
cuacacgcacaggagcaag

SEQ ID NO: 1236206 - RNA, 19 nt, Artificial Sequence
  Description of Artificial Sequence: Synthetic oligonucleotide
acgcacaggagcaaggcaa

SEQ ID NO: 1236207 - RNA, 19 nt, Artificial Sequence
  Description of Artificial Sequence: Synthetic oligonucleotide
cugaaccaguuugaaggac

SEQ ID NO: 1236208 - RNA, 19 nt, Artificial Sequence
  Description of Artificial Sequence: Synthetic oligonucleotide
aaggcccgacgcucgguga

SEQ ID NO: 1236209 - RNA, 19 nt, Artificial Sequence
  Description of Artificial Sequence: Synthetic oligonucleotide
gaagauccgacagguuguc

SEQ ID NO: 1236210 - RNA, 19 nt, Artificial Sequence
  Description of Artificial Sequence: Synthetic oligonucleotide
gccgggagguuccaaaagc

SEQ ID NO: 1236211 - RNA, 19 nt, Artificial Sequence
  Description of Artificial Sequence: Synthetic oligonucleotide
gaugguugcugagcagcac

SEQ ID NO: 1236212 - RNA, 19 nt, Artificial Sequence
  Description of Artificial Sequence: Synthetic oligonucleotide
cagacggaugggagagccg

SEQ ID NO: 1236213 - RNA, 19 nt, Artificial Sequence
  Description of Artificial Sequence: Synthetic oligonucleotide
gugauaccuccaaugucug

SEQ ID NO: 1236214 - RNA, 19 nt, Artificial Sequence
  Description of Artificial Sequence: Synthetic oligonucleotide
acgguucgcccauccuuuc

SEQ ID NO: 1236215 - RNA, 19 nt, Artificial Sequence
  Description of Artificial Sequence: Synthetic oligonucleotide
agcagcacgucaccaggau

SEQ ID NO: 1236216 - RNA, 19 nt, Artificial Sequence
  Description of Artificial Sequence: Synthetic oligonucleotide
ggcguugagauugccaaac

SEQ ID NO: 1236217 - RNA, 19 nt, Artificial Sequence
  Description of Artificial Sequence: Synthetic oligonucleotide
caucaccuccccggaagcg

SEQ ID NO: 1236218 - RNA, 19 nt, Artificial Sequence
  Description of Artificial Sequence: Synthetic oligonucleotide
uuuaagccucuggcgccag

SEQ ID NO: 1236219 - RNA, 19 nt, Artificial Sequence
  Description of Artificial Sequence: Synthetic oligonucleotide
aagauccgacagguuguca

SEQ ID NO: 1236220 - RNA, 19 nt, Artificial Sequence
  Description of Artificial Sequence: Synthetic oligonucleotide
caaggcaacccugguuaag

SEQ ID NO: 1236221 - RNA, 19 nt, Artificial Sequence
  Description of Artificial Sequence: Synthetic oligonucleotide
aggcccgacgcucggugag

SEQ ID NO: 1236222 - RNA, 19 nt, Artificial Sequence
  Description of Artificial Sequence: Synthetic oligonucleotide
acacgcagacggaugggag

SEQ ID NO: 1236223 - RNA, 19 nt, Artificial Sequence
  Description of Artificial Sequence: Synthetic oligonucleotide
guccccgggauacacgguc

SEQ ID NO: 1236224 - RNA, 19 nt, Artificial Sequence
  Description of Artificial Sequence: Synthetic oligonucleotide
cauauacacugccgcgcuc

SEQ ID NO: 1236225 - RNA, 19 nt, Artificial Sequence
  Description of Artificial Sequence: Synthetic oligonucleotide
gcuaguucagcguuugccu

SEQ ID NO: 1236226 - RNA, 19 nt, Artificial Sequence
  Description of Artificial Sequence: Synthetic oligonucleotide
guguuagucaugugacugu

SEQ ID NO: 1236227 - RNA, 19 nt, Artificial Sequence
  Description of Artificial Sequence: Synthetic oligonucleotide
gaacugcuaguucagcguu

SEQ ID NO: 1236228 - RNA, 19 nt, Artificial Sequence
  Description of Artificial Sequence: Synthetic oligonucleotide
acugcccgaucagcucucc

SEQ ID NO: 1236229 - RNA, 19 nt, Artificial Sequence
  Description of Artificial Sequence: Synthetic oligonucleotide
cacgcagacggaugggaga

SEQ ID NO: 1236230 - RNA, 19 nt, Artificial Sequence
  Description of Artificial Sequence: Synthetic oligonucleotide
ugcguguguuagucaugug

SEQ ID NO: 1236231 - RNA, 19 nt, Artificial Sequence
  Description of Artificial Sequence: Synthetic oligonucleotide
caaagcgacgcaggauaac

SEQ ID NO: 1236232 - RNA, 19 nt, Artificial Sequence
  Description of Artificial Sequence: Synthetic oligonucleotide
gcucggugagcacggacag

SEQ ID NO: 1236233 - RNA, 19 nt, Artificial Sequence
  Description of Artificial Sequence: Synthetic oligonucleotide
gcagacggaugggagagcc

SEQ ID NO: 1236234 - RNA, 19 nt, Artificial Sequence
  Description of Artificial Sequence: Synthetic oligonucleotide
guuuaagccucuggcgcca

SEQ ID NO: 1236235 - RNA, 19 nt, Artificial Sequence
  Description of Artificial Sequence: Synthetic oligonucleotide
uucgcccauccuuucugau

SEQ ID NO: 1236236 - RNA, 19 nt, Artificial Sequence
  Description of Artificial Sequence: Synthetic oligonucleotide
gugaugcguguguuaguca

SEQ ID NO: 1236237 - RNA, 19 nt, Artificial Sequence
  Description of Artificial Sequence: Synthetic oligonucleotide
ccguaaggcuggaaggccc

SEQ ID NO: 1236238 - RNA, 19 nt, Artificial Sequence
  Description of Artificial Sequence: Synthetic oligonucleotide
augggagagccgucaucca

SEQ ID NO: 1236239 - RNA, 19 nt, Artificial Sequence
  Description of Artificial Sequence: Synthetic oligonucleotide
cugcacugcccugacucag

SEQ ID NO: 1236240 - RNA, 19 nt, Artificial Sequence
  Description of Artificial Sequence: Synthetic oligonucleotide
uacugcccgaucagcucuc

SEQ ID NO: 1236241 - RNA, 19 nt, Artificial Sequence
  Description of Artificial Sequence: Synthetic oligonucleotide
aacugcuaguucagcguuu

SEQ ID NO: 1236242 - RNA, 19 nt, Artificial Sequence
  Description of Artificial Sequence: Synthetic oligonucleotide
cacugcgcccaugccaacc

SEQ ID NO: 1236243 - RNA, 19 nt, Artificial Sequence
  Description of Artificial Sequence: Synthetic oligonucleotide
cugcuaguucagcguuugc

SEQ ID NO: 1236244 - RNA, 19 nt, Artificial Sequence
  Description of Artificial Sequence: Synthetic oligonucleotide
cgcaagcaauagaugagag

SEQ ID NO: 1236245 - RNA, 19 nt, Artificial Sequence
  Description of Artificial Sequence: Synthetic oligonucleotide
cacuacucgcugagaugug

SEQ ID NO: 1236246 - RNA, 19 nt, Artificial Sequence
  Description of Artificial Sequence: Synthetic oligonucleotide
ggccguaaggcuggaaggc

SEQ ID NO: 1236247 - RNA, 19 nt, Artificial Sequence
  Description of Artificial Sequence: Synthetic oligonucleotide
uguccccgggauacacggu

SEQ ID NO: 1236248 - RNA, 19 nt, Artificial Sequence
  Description of Artificial Sequence: Synthetic oligonucleotide
gaggagguuuaagccucug

SEQ ID NO: 1236249 - RNA, 19 nt, Artificial Sequence
  Description of Artificial Sequence: Synthetic oligonucleotide
ccgaaagaccagcucucgg

SEQ ID NO: 1236250 - RNA, 19 nt, Artificial Sequence
  Description of Artificial Sequence: Synthetic oligonucleotide
guugccgcccaccacugcu

SEQ ID NO: 1236251 - RNA, 19 nt, Artificial Sequence
  Description of Artificial Sequence: Synthetic oligonucleotide
gcgacgcaggauaacuggg

SEQ ID NO: 1236252 - RNA, 19 nt, Artificial Sequence
  Description of Artificial Sequence: Synthetic oligonucleotide
ccggaagcggccucggccc

SEQ ID NO: 1236253 - RNA, 19 nt, Artificial Sequence
  Description of Artificial Sequence: Synthetic oligonucleotide
gcguucuuugauguuggug

SEQ ID NO: 1236254 - RNA, 19 nt, Artificial Sequence
  Description of Artificial Sequence: Synthetic oligonucleotide
gcagcacgucaccaggaug

SEQ ID NO: 1236255 - RNA, 19 nt, Artificial Sequence
  Description of Artificial Sequence: Synthetic oligonucleotide
gcuccuaagugcugaaucu

SEQ ID NO: 1236256 - RNA, 19 nt, Artificial Sequence
  Description of Artificial Sequence: Synthetic oligonucleotide
uagcccauauaggccugca

SEQ ID NO: 1236257 - RNA, 19 nt, Artificial Sequence
  Description of Artificial Sequence: Synthetic oligonucleotide
gugagcacguugccgccca

SEQ ID NO: 1236258 - RNA, 19 nt, Artificial Sequence
  Description of Artificial Sequence: Synthetic oligonucleotide
ggagguuccaaaagcucga

SEQ ID NO: 1236259 - RNA, 19 nt, Artificial Sequence
  Description of Artificial Sequence: Synthetic oligonucleotide
cagaagauguccccgggau

SEQ ID NO: 1236260 - RNA, 19 nt, Artificial Sequence
  Description of Artificial Sequence: Synthetic oligonucleotide
ccggugugauaacagucag

SEQ ID NO: 1236261 - RNA, 19 nt, Artificial Sequence
  Description of Artificial Sequence: Synthetic oligonucleotide
gaaucuccggguccgugau

SEQ ID NO: 1236262 - RNA, 19 nt, Artificial Sequence
  Description of Artificial Sequence: Synthetic oligonucleotide
cgcggcgguacucauauac

SEQ ID NO: 1236263 - RNA, 19 nt, Artificial Sequence
  Description of Artificial Sequence: Synthetic oligonucleotide
cacgcacaggagcaaggca

SEQ ID NO: 1236264 - RNA, 19 nt, Artificial Sequence
  Description of Artificial Sequence: Synthetic oligonucleotide
cagaaucuccggguccgug

SEQ ID NO: 1236265 - RNA, 19 nt, Artificial Sequence
  Description of Artificial Sequence: Synthetic oligonucleotide
cgaaagaccagcucucgga

SEQ ID NO: 1236266 - RNA, 19 nt, Artificial Sequence
  Description of Artificial Sequence: Synthetic oligonucleotide
ccgacagguugucaugcag

SEQ ID NO: 1236267 - RNA, 19 nt, Artificial Sequence
  Description of Artificial Sequence: Synthetic oligonucleotide
acggcccacuagagaacgc

SEQ ID NO: 1236268 - RNA, 19 nt, Artificial Sequence
  Description of Artificial Sequence: Synthetic oligonucleotide
ccccguagaggccguaagg

SEQ ID NO: 1236269 - RNA, 19 nt, Artificial Sequence
  Description of Artificial Sequence: Synthetic oligonucleotide
gcguuugccugaauauagc

SEQ ID NO: 1236270 - RNA, 19 nt, Artificial Sequence
  Description of Artificial Sequence: Synthetic oligonucleotide
gcagaagauguccccggga

SEQ ID NO: 1236271 - RNA, 19 nt, Artificial Sequence
  Description of Artificial Sequence: Synthetic oligonucleotide
ccagagaucuugcccggug

SEQ ID NO: 1236272 - RNA, 19 nt, Artificial Sequence
  Description of Artificial Sequence: Synthetic oligonucleotide
gcccacuagagaacgcaag

SEQ ID NO: 1236273 - RNA, 19 nt, Artificial Sequence
  Description of Artificial Sequence: Synthetic oligonucleotide
ggaaaagucgaggcguucu

SEQ ID NO: 1236274 - RNA, 19 nt, Artificial Sequence
  Description of Artificial Sequence: Synthetic oligonucleotide
cagucaggucuggaagaug

SEQ ID NO: 1236275 - RNA, 19 nt, Artificial Sequence
  Description of Artificial Sequence: Synthetic oligonucleotide
cugcccgaucagcucuccc

SEQ ID NO: 1236276 - RNA, 19 nt, Artificial Sequence
  Description of Artificial Sequence: Synthetic oligonucleotide
ccgacgcucggugagcacg

SEQ ID NO: 1236277 - RNA, 19 nt, Artificial Sequence
  Description of Artificial Sequence: Synthetic oligonucleotide
guuccacuacagccagaga

SEQ ID NO: 1236278 - RNA, 19 nt, Artificial Sequence
  Description of Artificial Sequence: Synthetic oligonucleotide
cggacuauaccaucaccuc

SEQ ID NO: 1236279 - RNA, 19 nt, Artificial Sequence
  Description of Artificial Sequence: Synthetic oligonucleotide
ugagcacguugccgcccac

SEQ ID NO: 1236280 - RNA, 19 nt, Artificial Sequence
  Description of Artificial Sequence: Synthetic oligonucleotide
gccguaaggcuggaaggcc

SEQ ID NO: 1236281 - RNA, 19 nt, Artificial Sequence
  Description of Artificial Sequence: Synthetic oligonucleotide
gauacccuucugguuggcu

SEQ ID NO: 1236282 - RNA, 19 nt, Artificial Sequence
  Description of Artificial Sequence: Synthetic oligonucleotide
cggcgguacucauauacac

SEQ ID NO: 1236283 - RNA, 19 nt, Artificial Sequence
  Description of Artificial Sequence: Synthetic oligonucleotide
caccgccagggguguaaag

SEQ ID NO: 1236284 - RNA, 19 nt, Artificial Sequence
  Description of Artificial Sequence: Synthetic oligonucleotide
cugucucauaguaucccau

SEQ ID NO: 1236285 - RNA, 19 nt, Artificial Sequence
  Description of Artificial Sequence: Synthetic oligonucleotide
uccccggaagcggccucgg

SEQ ID NO: 1236286 - RNA, 19 nt, Artificial Sequence
  Description of Artificial Sequence: Synthetic oligonucleotide
gcucucggacuauaccauc

SEQ ID NO: 1236287 - RNA, 19 nt, Artificial Sequence
  Description of Artificial Sequence: Synthetic oligonucleotide
uggcccgcggggcguugag

SEQ ID NO: 1236288 - RNA, 19 nt, Artificial Sequence
  Description of Artificial Sequence: Synthetic oligonucleotide
agcacgucaccaggaugga

SEQ ID NO: 1236289 - RNA, 19 nt, Artificial Sequence
  Description of Artificial Sequence: Synthetic oligonucleotide
gccgugucuggccuggcca

SEQ ID NO: 1236290 - RNA, 19 nt, Artificial Sequence
  Description of Artificial Sequence: Synthetic oligonucleotide
cugcgcccaugccaaccag

SEQ ID NO: 1236291 - RNA, 19 nt, Artificial Sequence
  Description of Artificial Sequence: Synthetic oligonucleotide
cccgaaagaccagcucucg

SEQ ID NO: 1236292 - RNA, 19 nt, Artificial Sequence
  Description of Artificial Sequence: Synthetic oligonucleotide
ggaugguugcugagcagca

SEQ ID NO: 1236293 - RNA, 19 nt, Artificial Sequence
  Description of Artificial Sequence: Synthetic oligonucleotide
ggaagacgccucccugaac

SEQ ID NO: 1236294 - RNA, 19 nt, Artificial Sequence
  Description of Artificial Sequence: Synthetic oligonucleotide
gacggaugggagagccguc

SEQ ID NO: 1236295 - RNA, 19 nt, Artificial Sequence
  Description of Artificial Sequence: Synthetic oligonucleotide
gcagugugguagagugagg

SEQ ID NO: 1236296 - RNA, 19 nt, Artificial Sequence
  Description of Artificial Sequence: Synthetic oligonucleotide
gcguugagauugccaaaca

SEQ ID NO: 1236297 - RNA, 19 nt, Artificial Sequence
  Description of Artificial Sequence: Synthetic oligonucleotide
cagcguuugccugaauaua

SEQ ID NO: 1236298 - RNA, 19 nt, Artificial Sequence
  Description of Artificial Sequence: Synthetic oligonucleotide
cauggcgcccaggugcaca

SEQ ID NO: 1236299 - RNA, 19 nt, Artificial Sequence
  Description of Artificial Sequence: Synthetic oligonucleotide
gacgccucccugaaccagu

SEQ ID NO: 1236300 - RNA, 19 nt, Artificial Sequence
  Description of Artificial Sequence: Synthetic oligonucleotide
cagcuuccugggcgcggcg

SEQ ID NO: 1236301 - RNA, 19 nt, Artificial Sequence
  Description of Artificial Sequence: Synthetic oligonucleotide
ccacuacucgcugagaugu

SEQ ID NO: 1236302 - RNA, 19 nt, Artificial Sequence
  Description of Artificial Sequence: Synthetic oligonucleotide
acguugccgcccaccacug

SEQ ID NO: 1236303 - RNA, 19 nt, Artificial Sequence
  Description of Artificial Sequence: Synthetic oligonucleotide
cacgguucgcccauccuuu

SEQ ID NO: 1236304 - RNA, 19 nt, Artificial Sequence
  Description of Artificial Sequence: Synthetic oligonucleotide
acgggccgugucuggccug

SEQ ID NO: 1236305 - RNA, 19 nt, Artificial Sequence
  Description of Artificial Sequence: Synthetic oligonucleotide
ccucccugaaccaguuuga

SEQ ID NO: 1236306 - RNA, 19 nt, Artificial Sequence
  Description of Artificial Sequence: Synthetic oligonucleotide
uggcgcccaggugcacagg

SEQ ID NO: 1236307 - RNA, 19 nt, Artificial Sequence
  Description of Artificial Sequence: Synthetic oligonucleotide
ggcgcggcgguacucauau

SEQ ID NO: 1236308 - RNA, 19 nt, Artificial Sequence
  Description of Artificial Sequence: Synthetic oligonucleotide
cgacgcucggugagcacgg

SEQ ID NO: 1236309 - RNA, 19 nt, Artificial Sequence
  Description of Artificial Sequence: Synthetic oligonucleotide
uauggcccgcggggcguug

SEQ ID NO: 1236310 - RNA, 19 nt, Artificial Sequence
  Description of Artificial Sequence: Synthetic oligonucleotide
caggaaaagucgaggcguu

SEQ ID NO: 1236311 - RNA, 19 nt, Artificial Sequence
  Description of Artificial Sequence: Synthetic oligonucleotide
ggcgguacucauauacacu

SEQ ID NO: 1236312 - RNA, 19 nt, Artificial Sequence
  Description of Artificial Sequence: Synthetic oligonucleotide
gcaaggcaacccugguuaa

SEQ ID NO: 1236313 - RNA, 19 nt, Artificial Sequence
  Description of Artificial Sequence: Synthetic oligonucleotide
guuauggcccgcggggcgu

SEQ ID NO: 1236314 - RNA, 19 nt, Artificial Sequence
  Description of Artificial Sequence: Synthetic oligonucleotide
agaccagcucucggacuau

SEQ ID NO: 1236315 - RNA, 19 nt, Artificial Sequence
  Description of Artificial Sequence: Synthetic oligonucleotide
ccgcgcucugggaaggcug

SEQ ID NO: 1236316 - RNA, 19 nt, Artificial Sequence
  Description of Artificial Sequence: Synthetic oligonucleotide
uuauggcccgcggggcguu

SEQ ID NO: 1236317 - RNA, 19 nt, Artificial Sequence
  Description of Artificial Sequence: Synthetic oligonucleotide
gcggcgguacucauauaca

SEQ ID NO: 1236318 - RNA, 19 nt, Artificial Sequence
  Description of Artificial Sequence: Synthetic oligonucleotide
cugggcgcggcgguacuca

SEQ ID NO: 1236319 - RNA, 19 nt, Artificial Sequence
  Description of Artificial Sequence: Synthetic oligonucleotide
cuggugugauaccuccaau

SEQ ID NO: 1236320 - RNA, 19 nt, Artificial Sequence
  Description of Artificial Sequence: Synthetic oligonucleotide
cgaagauccgacagguugu

SEQ ID NO: 1236321 - RNA, 19 nt, Artificial Sequence
  Description of Artificial Sequence: Synthetic oligonucleotide
gggcguugagauugccaaa

SEQ ID NO: 1236322 - RNA, 19 nt, Artificial Sequence
  Description of Artificial Sequence: Synthetic oligonucleotide
ggauacccuucugguuggc

SEQ ID NO: 1236323 - RNA, 19 nt, Artificial Sequence
  Description of Artificial Sequence: Synthetic oligonucleotide
cacauagaacacgggccgu

SEQ ID NO: 1236324 - RNA, 19 nt, Artificial Sequence
  Description of Artificial Sequence: Synthetic oligonucleotide
gguaccggcucuccagaau

SEQ ID NO: 1236325 - RNA, 19 nt, Artificial Sequence
  Description of Artificial Sequence: Synthetic oligonucleotide
gcccugggaggcagaacag

SEQ ID NO: 1236326 - RNA, 19 nt, Artificial Sequence
  Description of Artificial Sequence: Synthetic oligonucleotide
ccugccgggagguuccaaa

SEQ ID NO: 1236327 - RNA, 19 nt, Artificial Sequence
  Description of Artificial Sequence: Synthetic oligonucleotide
gcacguugccgcccaccac

SEQ ID NO: 1236328 - RNA, 19 nt, Artificial Sequence
  Description of Artificial Sequence: Synthetic oligonucleotide
ccgggagguuccaaaagcu

SEQ ID NO: 1236329 - RNA, 19 nt, Artificial Sequence
  Description of Artificial Sequence: Synthetic oligonucleotide
gugcccucggcuggccaca

SEQ ID NO: 1236330 - RNA, 19 nt, Artificial Sequence
  Description of Artificial Sequence: Synthetic oligonucleotide
auggcccgcggggcguuga

SEQ ID NO: 1236331 - RNA, 19 nt, Artificial Sequence
  Description of Artificial Sequence: Synthetic oligonucleotide
cucuggcgccaggcucucc

SEQ ID NO: 1236332 - RNA, 19 nt, Artificial Sequence
  Description of Artificial Sequence: Synthetic oligonucleotide
acgccucccugaaccaguu

SEQ ID NO: 1236333 - RNA, 19 nt, Artificial Sequence
  Description of Artificial Sequence: Synthetic oligonucleotide
ggcccgacgcucggugagc

SEQ ID NO: 1236334 - RNA, 19 nt, Artificial Sequence
  Description of Artificial Sequence: Synthetic oligonucleotide
gcauagagccuggugugau

SEQ ID NO: 1236335 - RNA, 19 nt, Artificial Sequence
  Description of Artificial Sequence: Synthetic oligonucleotide
ugcccucggcuggccacau

SEQ ID NO: 1236336 - RNA, 19 nt, Artificial Sequence
  Description of Artificial Sequence: Synthetic oligonucleotide
ggcguucuuugauguuggu

SEQ ID NO: 1236337 - RNA, 19 nt, Artificial Sequence
  Description of Artificial Sequence: Synthetic oligonucleotide
gcgcccguaccaccagcca

SEQ ID NO: 1236338 - RNA, 19 nt, Artificial Sequence
  Description of Artificial Sequence: Synthetic oligonucleotide
cacuacagccagagaucuu

SEQ ID NO: 1236339 - RNA, 19 nt, Artificial Sequence
  Description of Artificial Sequence: Synthetic oligonucleotide
gggauggguccaagaugga

SEQ ID NO: 1236340 - RNA, 19 nt, Artificial Sequence
  Description of Artificial Sequence: Synthetic oligonucleotide
ccgcuucuuccuggaagac

SEQ ID NO: 1236341 - RNA, 19 nt, Artificial Sequence
  Description of Artificial Sequence: Synthetic oligonucleotide
ccgugucuggccuggccaa

SEQ ID NO: 1236342 - RNA, 19 nt, Artificial Sequence
  Description of Artificial Sequence: Synthetic oligonucleotide
gcccgcggggcguugagau

SEQ ID NO: 1236343 - RNA, 19 nt, Artificial Sequence
  Description of Artificial Sequence: Synthetic oligonucleotide
cgacgcaggauaacugggu

SEQ ID NO: 1236344 - RNA, 19 nt, Artificial Sequence
  Description of Artificial Sequence: Synthetic oligonucleotide
cccgacgcucggugagcac

SEQ ID NO: 1236345 - RNA, 19 nt, Artificial Sequence
  Description of Artificial Sequence: Synthetic oligonucleotide
cgggccgugucuggccugg

SEQ ID NO: 1236346 - RNA, 19 nt, Artificial Sequence
  Description of Artificial Sequence: Synthetic oligonucleotide
cgcggggcguugagauugc

SEQ ID NO: 1236347 - RNA, 19 nt, Artificial Sequence
  Description of Artificial Sequence: Synthetic oligonucleotide
ccaccagccacugucucau

SEQ ID NO: 1236348 - RNA, 19 nt, Artificial Sequence
  Description of Artificial Sequence: Synthetic oligonucleotide
cggaagcggccucggcccc

SEQ ID NO: 1236349 - RNA, 19 nt, Artificial Sequence
  Description of Artificial Sequence: Synthetic oligonucleotide
ccacugcgcccaugccaac

SEQ ID NO: 1236350 - RNA, 19 nt, Artificial Sequence
  Description of Artificial Sequence: Synthetic oligonucleotide
cgcagacggaugggagagc

SEQ ID NO: 1236351 - RNA, 19 nt, Artificial Sequence
  Description of Artificial Sequence: Synthetic oligonucleotide
cccgggauacacggucaca

SEQ ID NO: 1236352 - RNA, 19 nt, Artificial Sequence
  Description of Artificial Sequence: Synthetic oligonucleotide
ccugggcgcggcgguacuc

SEQ ID NO: 1236353 - RNA, 19 nt, Artificial Sequence
  Description of Artificial Sequence: Synthetic oligonucleotide
cacggacagcagcgccucu

SEQ ID NO: 1236354 - RNA, 19 nt, Artificial Sequence
  Description of Artificial Sequence: Synthetic oligonucleotide
ccgugaugcguguguuagu

SEQ ID NO: 1236355 - RNA, 19 nt, Artificial Sequence
  Description of Artificial Sequence: Synthetic oligonucleotide
gccagagaucuugcccggu

SEQ ID NO: 1236356 - RNA, 19 nt, Artificial Sequence
  Description of Artificial Sequence: Synthetic oligonucleotide
ggcccgcggggcguugaga

SEQ ID NO: 1236357 - RNA, 19 nt, Artificial Sequence
  Description of Artificial Sequence: Synthetic oligonucleotide
gggccgugucuggccuggc

SEQ ID NO: 1236358 - RNA, 19 nt, Artificial Sequence
  Description of Artificial Sequence: Synthetic oligonucleotide
gccgcgcucugggaaggcu

SEQ ID NO: 1236359 - RNA, 19 nt, Artificial Sequence
  Description of Artificial Sequence: Synthetic oligonucleotide
gggcgcggcgguacucaua

SEQ ID NO: 1236360 - RNA, 19 nt, Artificial Sequence
  Description of Artificial Sequence: Synthetic oligonucleotide
cgguucgcccauccuuucu

SEQ ID NO: 1236361 - RNA, 19 nt, Artificial Sequence
  Description of Artificial Sequence: Synthetic oligonucleotide
ccggguccgugaugcgugu

SEQ ID NO: 1236362 - RNA, 19 nt, Artificial Sequence
  Description of Artificial Sequence: Synthetic oligonucleotide
gcgcggcgguacucauaua

SEQ ID NO: 1236363 - RNA, 19 nt, Artificial Sequence
  Description of Artificial Sequence: Synthetic oligonucleotide
ccguaccaccagccacugu

SEQ ID NO: 1236364 - RNA, 19 nt, Artificial Sequence
  Description of Artificial Sequence: Synthetic oligonucleotide
ccccaccgccaggggugua

SEQ ID NO: 1236365 - RNA, 19 nt, Artificial Sequence
  Description of Artificial Sequence: Synthetic oligonucleotide
aacuucaauucuuuaaucc

SEQ ID NO: 1236366 - RNA, 19 nt, Artificial Sequence
  Description of Artificial Sequence: Synthetic oligonucleotide
uagaaagugaauuaagucg

SEQ ID NO: 1236367 - RNA, 19 nt, Artificial Sequence
  Description of Artificial Sequence: Synthetic oligonucleotide
agaacaaaggaucaauugc

SEQ ID NO: 1236368 - RNA, 19 nt, Artificial Sequence
  Description of Artificial Sequence: Synthetic oligonucleotide
auaaauacagcgaauaggc

SEQ ID NO: 1236369 - RNA, 19 nt, Artificial Sequence
  Description of Artificial Sequence: Synthetic oligonucleotide
ucuucaguaacuuauagca

SEQ ID NO: 1236370 - RNA, 19 nt, Artificial Sequence
  Description of Artificial Sequence: Synthetic oligonucleotide
aaaauugugaucugaccac

SEQ ID NO: 1236371 - RNA, 19 nt, Artificial Sequence
  Description of Artificial Sequence: Synthetic oligonucleotide
agcaaaacccucuagaaag

SEQ ID NO: 1236372 - RNA, 19 nt, Artificial Sequence
  Description of Artificial Sequence: Synthetic oligonucleotide
aaugacuguacauuugaag

SEQ ID NO: 1236373 - RNA, 19 nt, Artificial Sequence
  Description of Artificial Sequence: Synthetic oligonucleotide
ucugaaagaacaaaggauc

SEQ ID NO: 1236374 - RNA, 19 nt, Artificial Sequence
  Description of Artificial Sequence: Synthetic oligonucleotide
uaacuuauagcaaagugac

SEQ ID NO: 1236375 - RNA, 19 nt, Artificial Sequence
  Description of Artificial Sequence: Synthetic oligonucleotide
agaagcauaagucuuuuag

SEQ ID NO: 1236376 - RNA, 19 nt, Artificial Sequence
  Description of Artificial Sequence: Synthetic oligonucleotide
uucacagucaguaucggag

SEQ ID NO: 1236377 - RNA, 19 nt, Artificial Sequence
  Description of Artificial Sequence: Synthetic oligonucleotide
ucugaauccgguuugucgg

SEQ ID NO: 1236378 - RNA, 19 nt, Artificial Sequence
  Description of Artificial Sequence: Synthetic oligonucleotide
uggaagugaaagauggucg

SEQ ID NO: 1236379 - RNA, 19 nt, Artificial Sequence
  Description of Artificial Sequence: Synthetic oligonucleotide
cuuguuuagccucaaaugc

SEQ ID NO: 1236380 - RNA, 19 nt, Artificial Sequence
  Description of Artificial Sequence: Synthetic oligonucleotide
acuuauagcaaagugacag

SEQ ID NO: 1236381 - RNA, 19 nt, Artificial Sequence
  Description of Artificial Sequence: Synthetic oligonucleotide
aauucuuuaaucccaguaa

SEQ ID NO: 1236382 - RNA, 19 nt, Artificial Sequence
  Description of Artificial Sequence: Synthetic oligonucleotide
uaaguuuuaaucccucugc

SEQ ID NO: 1236383 - RNA, 19 nt, Artificial Sequence
  Description of Artificial Sequence: Synthetic oligonucleotide
uuuaccauccaugauaucu

SEQ ID NO: 1236384 - RNA, 19 nt, Artificial Sequence
  Description of Artificial Sequence: Synthetic oligonucleotide
ucaaaugcaggcaauauua

SEQ ID NO: 1236385 - RNA, 19 nt, Artificial Sequence
  Description of Artificial Sequence: Synthetic oligonucleotide
uagcgauuuugcuagaugg

SEQ ID NO: 1236386 - RNA, 19 nt, Artificial Sequence
  Description of Artificial Sequence: Synthetic oligonucleotide
auuucaagggguuccgugc

SEQ ID NO: 1236387 - RNA, 19 nt, Artificial Sequence
  Description of Artificial Sequence: Synthetic oligonucleotide
aaaacagaugaauuucuga

SEQ ID NO: 1236388 - RNA, 19 nt, Artificial Sequence
  Description of Artificial Sequence: Synthetic oligonucleotide
aaagugaauuaagucgugc

SEQ ID NO: 1236389 - RNA, 19 nt, Artificial Sequence
  Description of Artificial Sequence: Synthetic oligonucleotide
acaugguucaauuugguca

SEQ ID NO: 1236390 - RNA, 19 nt, Artificial Sequence
  Description of Artificial Sequence: Synthetic oligonucleotide
aguaacuuauagcaaagug

SEQ ID NO: 1236391 - RNA, 19 nt, Artificial Sequence
  Description of Artificial Sequence: Synthetic oligonucleotide
uaugcagguuauuucaagg

SEQ ID NO: 1236392 - RNA, 19 nt, Artificial Sequence
  Description of Artificial Sequence: Synthetic oligonucleotide
ugaauaucugaacaaacuc

SEQ ID NO: 1236393 - RNA, 19 nt, Artificial Sequence
  Description of Artificial Sequence: Synthetic oligonucleotide
ucuuguuuagccucaaaug

SEQ ID NO: 1236394 - RNA, 19 nt, Artificial Sequence
  Description of Artificial Sequence: Synthetic oligonucleotide
uuuagaaaacagaugaauu

SEQ ID NO: 1236395 - RNA, 19 nt, Artificial Sequence
  Description of Artificial Sequence: Synthetic oligonucleotide
gaauaucugaacaaacucc

SEQ ID NO: 1236396 - RNA, 19 nt, Artificial Sequence
  Description of Artificial Sequence: Synthetic oligonucleotide
uccuuuaaacacaucacug

SEQ ID NO: 1236397 - RNA, 19 nt, Artificial Sequence
  Description of Artificial Sequence: Synthetic oligonucleotide
ugccaugucacuaaucuga

SEQ ID NO: 1236398 - RNA, 19 nt, Artificial Sequence
  Description of Artificial Sequence: Synthetic oligonucleotide
uucugaaagaacaaaggau

SEQ ID NO: 1236399 - RNA, 19 nt, Artificial Sequence
  Description of Artificial Sequence: Synthetic oligonucleotide
auaaagguucuccuuggac

SEQ ID NO: 1236400 - RNA, 19 nt, Artificial Sequence
  Description of Artificial Sequence: Synthetic oligonucleotide
acugagacccaccuguuac

SEQ ID NO: 1236401 - RNA, 19 nt, Artificial Sequence
  Description of Artificial Sequence: Synthetic oligonucleotide
ugaauuaagucgugcgacg

SEQ ID NO: 1236402 - RNA, 19 nt, Artificial Sequence
  Description of Artificial Sequence: Synthetic oligonucleotide
agcagcaacacuuuuguca

SEQ ID NO: 1236403 - RNA, 19 nt, Artificial Sequence
  Description of Artificial Sequence: Synthetic oligonucleotide
ucugcuugaugacuacucg

SEQ ID NO: 1236404 - RNA, 19 nt, Artificial Sequence
  Description of Artificial Sequence: Synthetic oligonucleotide
aaagacgucuuaguuauug

SEQ ID NO: 1236405 - RNA, 19 nt, Artificial Sequence
  Description of Artificial Sequence: Synthetic oligonucleotide
uucaguaacuuauagcaaa

SEQ ID NO: 1236406 - RNA, 19 nt, Artificial Sequence
  Description of Artificial Sequence: Synthetic oligonucleotide
ucaaaauugugaucugacc

SEQ ID NO: 1236407 - RNA, 19 nt, Artificial Sequence
  Description of Artificial Sequence: Synthetic oligonucleotide
uuugcuagauggaugcagc

SEQ ID NO: 1236408 - RNA, 19 nt, Artificial Sequence
  Description of Artificial Sequence: Synthetic oligonucleotide
ugaggaacacuuuauucug

SEQ ID NO: 1236409 - RNA, 19 nt, Artificial Sequence
  Description of Artificial Sequence: Synthetic oligonucleotide
ugauauuccagagaugaac

SEQ ID NO: 1236410 - RNA, 19 nt, Artificial Sequence
  Description of Artificial Sequence: Synthetic oligonucleotide
uuguuuagccucaaaugca

SEQ ID NO: 1236411 - RNA, 19 nt, Artificial Sequence
  Description of Artificial Sequence: Synthetic oligonucleotide
cuuuguaauacacuuguca

SEQ ID NO: 1236412 - RNA, 19 nt, Artificial Sequence
  Description of Artificial Sequence: Synthetic oligonucleotide
aauacacuugucaaccuug

SEQ ID NO: 1236413 - RNA, 19 nt, Artificial Sequence
  Description of Artificial Sequence: Synthetic oligonucleotide
guagagauucucccaaagg

SEQ ID NO: 1236414 - RNA, 19 nt, Artificial Sequence
  Description of Artificial Sequence: Synthetic oligonucleotide
uuaaaaggucagcugugcc

SEQ ID NO: 1236415 - RNA, 19 nt, Artificial Sequence
  Description of Artificial Sequence: Synthetic oligonucleotide
cuuauagcaaagugacagg

SEQ ID NO: 1236416 - RNA, 19 nt, Artificial Sequence
  Description of Artificial Sequence: Synthetic oligonucleotide
agaaccuuguuucuugaug

SEQ ID NO: 1236417 - RNA, 19 nt, Artificial Sequence
  Description of Artificial Sequence: Synthetic oligonucleotide
guaacuuauagcaaaguga

SEQ ID NO: 1236418 - RNA, 19 nt, Artificial Sequence
  Description of Artificial Sequence: Synthetic oligonucleotide
auguaugcagguuauuuca

SEQ ID NO: 1236419 - RNA, 19 nt, Artificial Sequence
  Description of Artificial Sequence: Synthetic oligonucleotide
uaaauacagcgaauaggcc

SEQ ID NO: 1236420 - RNA, 19 nt, Artificial Sequence
  Description of Artificial Sequence: Synthetic oligonucleotide
guaaguuuuaaucccucug

SEQ ID NO: 1236421 - RNA, 19 nt, Artificial Sequence
  Description of Artificial Sequence: Synthetic oligonucleotide
uauuccagagaugaacugc

SEQ ID NO: 1236422 - RNA, 19 nt, Artificial Sequence
  Description of Artificial Sequence: Synthetic oligonucleotide
agugacuaucucaaugacc

SEQ ID NO: 1236423 - RNA, 19 nt, Artificial Sequence
  Description of Artificial Sequence: Synthetic oligonucleotide
cucugaauccgguuugucg

SEQ ID NO: 1236424 - RNA, 19 nt, Artificial Sequence
  Description of Artificial Sequence: Synthetic oligonucleotide
agaaagugaauuaagucgu

SEQ ID NO: 1236425 - RNA, 19 nt, Artificial Sequence
  Description of Artificial Sequence: Synthetic oligonucleotide
uuuucaagcacggcccucg

SEQ ID NO: 1236426 - RNA, 19 nt, Artificial Sequence
  Description of Artificial Sequence: Synthetic oligonucleotide
gcauagaggaauuagcuug

SEQ ID NO: 1236427 - RNA, 19 nt, Artificial Sequence
  Description of Artificial Sequence: Synthetic oligonucleotide
agugaauuaagucgugcga

SEQ ID NO: 1236428 - RNA, 19 nt, Artificial Sequence
  Description of Artificial Sequence: Synthetic oligonucleotide
uauuucaagggguuccgug

SEQ ID NO: 1236429 - RNA, 19 nt, Artificial Sequence
  Description of Artificial Sequence: Synthetic oligonucleotide
uuagcgauuuugcuagaug

SEQ ID NO: 1236430 - RNA, 19 nt, Artificial Sequence
  Description of Artificial Sequence: Synthetic oligonucleotide
uuuaaaaggucagcugugc

SEQ ID NO: 1236431 - RNA, 19 nt, Artificial Sequence
  Description of Artificial Sequence: Synthetic oligonucleotide
uucuuuaaucccaguaaac

SEQ ID NO: 1236432 - RNA, 19 nt, Artificial Sequence
  Description of Artificial Sequence: Synthetic oligonucleotide
ucaagcacggcccucgcca

SEQ ID NO: 1236433 - RNA, 19 nt, Artificial Sequence
  Description of Artificial Sequence: Synthetic oligonucleotide
caugguugcaagaaccuug

SEQ ID NO: 1236434 - RNA, 19 nt, Artificial Sequence
  Description of Artificial Sequence: Synthetic oligonucleotide
aguagagauucucccaaag

SEQ ID NO: 1236435 - RNA, 19 nt, Artificial Sequence
  Description of Artificial Sequence: Synthetic oligonucleotide
acuggcugaauaucugaac

SEQ ID NO: 1236436 - RNA, 19 nt, Artificial Sequence
  Description of Artificial Sequence: Synthetic oligonucleotide
caugguucaauuuggucac

SEQ ID NO: 1236437 - RNA, 19 nt, Artificial Sequence
  Description of Artificial Sequence: Synthetic oligonucleotide
agacccaccuguuacuuuc

SEQ ID NO: 1236438 - RNA, 19 nt, Artificial Sequence
  Description of Artificial Sequence: Synthetic oligonucleotide
uuggucacaucugugagug

SEQ ID NO: 1236439 - RNA, 19 nt, Artificial Sequence
  Description of Artificial Sequence: Synthetic oligonucleotide
agagaugaacugcaggcug

SEQ ID NO: 1236440 - RNA, 19 nt, Artificial Sequence
  Description of Artificial Sequence: Synthetic oligonucleotide
cucgccacggccaugcugg

SEQ ID NO: 1236441 - RNA, 19 nt, Artificial Sequence
  Description of Artificial Sequence: Synthetic oligonucleotide
ugccacaugauauuccaga

SEQ ID NO: 1236442 - RNA, 19 nt, Artificial Sequence
  Description of Artificial Sequence: Synthetic oligonucleotide
accacgagagccaucaugg

SEQ ID NO: 1236443 - RNA, 19 nt, Artificial Sequence
  Description of Artificial Sequence: Synthetic oligonucleotide
acauguuccguccgugucg

SEQ ID NO: 1236444 - RNA, 19 nt, Artificial Sequence
  Description of Artificial Sequence: Synthetic oligonucleotide
ucuuaguuauugucuggag

SEQ ID NO: 1236445 - RNA, 19 nt, Artificial Sequence
  Description of Artificial Sequence: Synthetic oligonucleotide
ugaaaugucucuucugcau

SEQ ID NO: 1236446 - RNA, 19 nt, Artificial Sequence
  Description of Artificial Sequence: Synthetic oligonucleotide
cagauaaagguucuccuug

SEQ ID NO: 1236447 - RNA, 19 nt, Artificial Sequence
  Description of Artificial Sequence: Synthetic oligonucleotide
ucaguaucggaggugagca

SEQ ID NO: 1236448 - RNA, 19 nt, Artificial Sequence
  Description of Artificial Sequence: Synthetic oligonucleotide
uuugucgggcuuuaaagau

SEQ ID NO: 1236449 - RNA, 19 nt, Artificial Sequence
  Description of Artificial Sequence: Synthetic oligonucleotide
cucucauccggucaaacac

SEQ ID NO: 1236450 - RNA, 19 nt, Artificial Sequence
  Description of Artificial Sequence: Synthetic oligonucleotide
uugucaaccuugaggaaca

SEQ ID NO: 1236451 - RNA, 19 nt, Artificial Sequence
  Description of Artificial Sequence: Synthetic oligonucleotide
ucugcaaagacgucuuagu

SEQ ID NO: 1236452 - RNA, 19 nt, Artificial Sequence
  Description of Artificial Sequence: Synthetic oligonucleotide
acuaaucugagauucccaa

SEQ ID NO: 1236453 - RNA, 19 nt, Artificial Sequence
  Description of Artificial Sequence: Synthetic oligonucleotide
aaccuuguuucuugauguc

SEQ ID NO: 1236454 - RNA, 19 nt, Artificial Sequence
  Description of Artificial Sequence: Synthetic oligonucleotide
ccaguaaacacgcugacag

SEQ ID NO: 1236455 - RNA, 19 nt, Artificial Sequence
  Description of Artificial Sequence: Synthetic oligonucleotide
uggaucuuaucuuuguaau

SEQ ID NO: 1236456 - RNA, 19 nt, Artificial Sequence
  Description of Artificial Sequence: Synthetic oligonucleotide
uuucaagggguuccgugcc

SEQ ID NO: 1236457 - RNA, 19 nt, Artificial Sequence
  Description of Artificial Sequence: Synthetic oligonucleotide
ugcaaagacgucuuaguua

SEQ ID NO: 1236458 - RNA, 19 nt, Artificial Sequence
  Description of Artificial Sequence: Synthetic oligonucleotide
gaugaauuucugaaagaac

SEQ ID NO: 1236459 - RNA, 19 nt, Artificial Sequence
  Description of Artificial Sequence: Synthetic oligonucleotide
ugacuacucggucugccag

SEQ ID NO: 1236460 - RNA, 19 nt, Artificial Sequence
  Description of Artificial Sequence: Synthetic oligonucleotide
uugcauuauucuucauggg

SEQ ID NO: 1236461 - RNA, 19 nt, Artificial Sequence
  Description of Artificial Sequence: Synthetic oligonucleotide
gguuugucgggcuuuaaag

SEQ ID NO: 1236462 - RNA, 19 nt, Artificial Sequence
  Description of Artificial Sequence: Synthetic oligonucleotide
ucaaugucucagcagcaga

SEQ ID NO: 1236463 - RNA, 19 nt, Artificial Sequence
  Description of Artificial Sequence: Synthetic oligonucleotide
cauguaugcagguuauuuc

SEQ ID NO: 1236464 - RNA, 19 nt, Artificial Sequence
  Description of Artificial Sequence: Synthetic oligonucleotide
uuagaugugcaaacuccac

SEQ ID NO: 1236465 - RNA, 19 nt, Artificial Sequence
  Description of Artificial Sequence: Synthetic oligonucleotide
aguaaguuuuaaucccucu

SEQ ID NO: 1236466 - RNA, 19 nt, Artificial Sequence
  Description of Artificial Sequence: Synthetic oligonucleotide
ucacuaaucugagauuccc

SEQ ID NO: 1236467 - RNA, 19 nt, Artificial Sequence
  Description of Artificial Sequence: Synthetic oligonucleotide
ucgugcgacguuuucagug

SEQ ID NO: 1236468 - RNA, 19 nt, Artificial Sequence
  Description of Artificial Sequence: Synthetic oligonucleotide
uuuccuuagcgauuuugcu

SEQ ID NO: 1236469 - RNA, 19 nt, Artificial Sequence
  Description of Artificial Sequence: Synthetic oligonucleotide
guuccguccgugucgagcg

SEQ ID NO: 1236470 - RNA, 19 nt, Artificial Sequence
  Description of Artificial Sequence: Synthetic oligonucleotide
cuuugaagccgugaggagc

SEQ ID NO: 1236471 - RNA, 19 nt, Artificial Sequence
  Description of Artificial Sequence: Synthetic oligonucleotide
uccgugucgagcgaucucg

SEQ ID NO: 1236472 - RNA, 19 nt, Artificial Sequence
  Description of Artificial Sequence: Synthetic oligonucleotide
cuugucaaccuugaggaac

SEQ ID NO: 1236473 - RNA, 19 nt, Artificial Sequence
  Description of Artificial Sequence: Synthetic oligonucleotide
gaauuagcuuguuuauuuc

SEQ ID NO: 1236474 - RNA, 19 nt, Artificial Sequence
  Description of Artificial Sequence: Synthetic oligonucleotide
acgucuuaguuauugucug

SEQ ID NO: 1236475 - RNA, 19 nt, Artificial Sequence
  Description of Artificial Sequence: Synthetic oligonucleotide
uugcuagauggaugcagcg

SEQ ID NO: 1236476 - RNA, 19 nt, Artificial Sequence
  Description of Artificial Sequence: Synthetic oligonucleotide
cuuuugucacugaggagag

SEQ ID NO: 1236477 - RNA, 19 nt, Artificial Sequence
  Description of Artificial Sequence: Synthetic oligonucleotide
aaauugugaucugaccacu

SEQ ID NO: 1236478 - RNA, 19 nt, Artificial Sequence
  Description of Artificial Sequence: Synthetic oligonucleotide
uugugaucugaccacucga

SEQ ID NO: 1236479 - RNA, 19 nt, Artificial Sequence
  Description of Artificial Sequence: Synthetic oligonucleotide
ucugaacaaacuccugaaa

SEQ ID NO: 1236480 - RNA, 19 nt, Artificial Sequence
  Description of Artificial Sequence: Synthetic oligonucleotide
cugcuugaugacuacucgg

SEQ ID NO: 1236481 - RNA, 19 nt, Artificial Sequence
  Description of Artificial Sequence: Synthetic oligonucleotide
ugucgagcgaucucguucu

SEQ ID NO: 1236482 - RNA, 19 nt, Artificial Sequence
  Description of Artificial Sequence: Synthetic oligonucleotide
ugucaaaauugugaucuga

SEQ ID NO: 1236483 - RNA, 19 nt, Artificial Sequence
  Description of Artificial Sequence: Synthetic oligonucleotide
guuauuucaagggguuccg

SEQ ID NO: 1236484 - RNA, 19 nt, Artificial Sequence
  Description of Artificial Sequence: Synthetic oligonucleotide
aaugaucugugggccaguc

SEQ ID NO: 1236485 - RNA, 19 nt, Artificial Sequence
  Description of Artificial Sequence: Synthetic oligonucleotide
ugacuguacauuugaagua

SEQ ID NO: 1236486 - RNA, 19 nt, Artificial Sequence
  Description of Artificial Sequence: Synthetic oligonucleotide
guaugcagguuauuucaag

SEQ ID NO: 1236487 - RNA, 19 nt, Artificial Sequence
  Description of Artificial Sequence: Synthetic oligonucleotide
cagaaaugaucugugggcc

SEQ ID NO: 1236488 - RNA, 19 nt, Artificial Sequence
  Description of Artificial Sequence: Synthetic oligonucleotide
cugacagaugaccugucag

SEQ ID NO: 1236489 - RNA, 19 nt, Artificial Sequence
  Description of Artificial Sequence: Synthetic oligonucleotide
uccugaaaagcuuguuuac

SEQ ID NO: 1236490 - RNA, 19 nt, Artificial Sequence
  Description of Artificial Sequence: Synthetic oligonucleotide
gaaccuuguuucuugaugu

SEQ ID NO: 1236491 - RNA, 19 nt, Artificial Sequence
  Description of Artificial Sequence: Synthetic oligonucleotide
ugugaucugaccacucgau

SEQ ID NO: 1236492 - RNA, 19 nt, Artificial Sequence
  Description of Artificial Sequence: Synthetic oligonucleotide
aaacccucuagaaagugaa

SEQ ID NO: 1236493 - RNA, 19 nt, Artificial Sequence
  Description of Artificial Sequence: Synthetic oligonucleotide
aaaacccucuagaaaguga

SEQ ID NO: 1236494 - RNA, 19 nt, Artificial Sequence
  Description of Artificial Sequence: Synthetic oligonucleotide
ucucauccggucaaacacu

SEQ ID NO: 1236495 - RNA, 19 nt, Artificial Sequence
  Description of Artificial Sequence: Synthetic oligonucleotide
uguaugcagguuauuucaa

SEQ ID NO: 1236496 - RNA, 19 nt, Artificial Sequence
  Description of Artificial Sequence: Synthetic oligonucleotide
gguuuuaccauccaugaua

SEQ ID NO: 1236497 - RNA, 19 nt, Artificial Sequence
  Description of Artificial Sequence: Synthetic oligonucleotide
uuaccauccaugauaucuu

SEQ ID NO: 1236498 - RNA, 19 nt, Artificial Sequence
  Description of Artificial Sequence: Synthetic oligonucleotide
gugaauuaagucgugcgac

SEQ ID NO: 1236499 - RNA, 19 nt, Artificial Sequence
  Description of Artificial Sequence: Synthetic oligonucleotide
uacacuugucaaccuugag

SEQ ID NO: 1236500 - RNA, 19 nt, Artificial Sequence
  Description of Artificial Sequence: Synthetic oligonucleotide
ugucgggcuuuaaagauuu

SEQ ID NO: 1236501 - RNA, 19 nt, Artificial Sequence
  Description of Artificial Sequence: Synthetic oligonucleotide
aauuaagucgugcgacguu

SEQ ID NO: 1236502 - RNA, 19 nt, Artificial Sequence
  Description of Artificial Sequence: Synthetic oligonucleotide
ugaaagaacaaaggaucaa

SEQ ID NO: 1236503 - RNA, 19 nt, Artificial Sequence
  Description of Artificial Sequence: Synthetic oligonucleotide
cuggcugaauaucugaaca

SEQ ID NO: 1236504 - RNA, 19 nt, Artificial Sequence
  Description of Artificial Sequence: Synthetic oligonucleotide
gaccacgagagccaucaug

SEQ ID NO: 1236505 - RNA, 19 nt, Artificial Sequence
  Description of Artificial Sequence: Synthetic oligonucleotide
gaacaaaggaucaauugcu

SEQ ID NO: 1236506 - RNA, 19 nt, Artificial Sequence
  Description of Artificial Sequence: Synthetic oligonucleotide
gucaaaauugugaucugac

SEQ ID NO: 1236507 - RNA, 19 nt, Artificial Sequence
  Description of Artificial Sequence: Synthetic oligonucleotide
uuuuagcuguuuugaaaau

SEQ ID NO: 1236508 - RNA, 19 nt, Artificial Sequence
  Description of Artificial Sequence: Synthetic oligonucleotide
caugucacuaaucugagau

SEQ ID NO: 1236509 - RNA, 19 nt, Artificial Sequence
  Description of Artificial Sequence: Synthetic oligonucleotide
ggucguacuucucuccucg

SEQ ID NO: 1236510 - RNA, 19 nt, Artificial Sequence
  Description of Artificial Sequence: Synthetic oligonucleotide
gcauuauucuucaugggcc

SEQ ID NO: 1236511 - RNA, 19 nt, Artificial Sequence
  Description of Artificial Sequence: Synthetic oligonucleotide
agcgucaaugucucagcag

SEQ ID NO: 1236512 - RNA, 19 nt, Artificial Sequence
  Description of Artificial Sequence: Synthetic oligonucleotide
gguuauuucaagggguucc

SEQ ID NO: 1236513 - RNA, 19 nt, Artificial Sequence
  Description of Artificial Sequence: Synthetic oligonucleotide
agauucccaagccucacaa

SEQ ID NO: 1236514 - RNA, 19 nt, Artificial Sequence
  Description of Artificial Sequence: Synthetic oligonucleotide
ugucacuaucugcuugaug

SEQ ID NO: 1236515 - RNA, 19 nt, Artificial Sequence
  Description of Artificial Sequence: Synthetic oligonucleotide
cagguuuuaccauccauga

SEQ ID NO: 1236516 - RNA, 19 nt, Artificial Sequence
  Description of Artificial Sequence: Synthetic oligonucleotide
agcuguuuugaaaaugacu

SEQ ID NO: 1236517 - RNA, 19 nt, Artificial Sequence
  Description of Artificial Sequence: Synthetic oligonucleotide
ucgucacugagacccaccu

SEQ ID NO: 1236518 - RNA, 19 nt, Artificial Sequence
  Description of Artificial Sequence: Synthetic oligonucleotide
cugaauaucugaacaaacu

SEQ ID NO: 1236519 - RNA, 19 nt, Artificial Sequence
  Description of Artificial Sequence: Synthetic oligonucleotide
uggcugaauaucugaacaa

SEQ ID NO: 1236520 - RNA, 19 nt, Artificial Sequence
  Description of Artificial Sequence: Synthetic oligonucleotide
ugggccagucaccugaaau

SEQ ID NO: 1236521 - RNA, 19 nt, Artificial Sequence
  Description of Artificial Sequence: Synthetic oligonucleotide
ucccguuagaugugcaaac

SEQ ID NO: 1236522 - RNA, 19 nt, Artificial Sequence
  Description of Artificial Sequence: Synthetic oligonucleotide
gaugacuacucggucugcc

SEQ ID NO: 1236523 - RNA, 19 nt, Artificial Sequence
  Description of Artificial Sequence: Synthetic oligonucleotide
ucaccugaaaugucucuuc

SEQ ID NO: 1236524 - RNA, 19 nt, Artificial Sequence
  Description of Artificial Sequence: Synthetic oligonucleotide
ggcuuuaaagauuucaggu

SEQ ID NO: 1236525 - RNA, 19 nt, Artificial Sequence
  Description of Artificial Sequence: Synthetic oligonucleotide
uugccaugucacuaaucug

SEQ ID NO: 1236526 - RNA, 19 nt, Artificial Sequence
  Description of Artificial Sequence: Synthetic oligonucleotide
uccggucaaacacuccuuc

SEQ ID NO: 1236527 - RNA, 19 nt, Artificial Sequence
  Description of Artificial Sequence: Synthetic oligonucleotide
uuuugucugucucccguua

SEQ ID NO: 1236528 - RNA, 19 nt, Artificial Sequence
  Description of Artificial Sequence: Synthetic oligonucleotide
gagcuggaccacgagagcc

SEQ ID NO: 1236529 - RNA, 19 nt, Artificial Sequence
  Description of Artificial Sequence: Synthetic oligonucleotide
auuccagagaugaacugca

SEQ ID NO: 1236530 - RNA, 19 nt, Artificial Sequence
  Description of Artificial Sequence: Synthetic oligonucleotide
aggagcaucauggugcccu

SEQ ID NO: 1236531 - RNA, 19 nt, Artificial Sequence
  Description of Artificial Sequence: Synthetic oligonucleotide
cguuagaugugcaaacucc

SEQ ID NO: 1236532 - RNA, 19 nt, Artificial Sequence
  Description of Artificial Sequence: Synthetic oligonucleotide
uguuccguccgugucgagc

SEQ ID NO: 1236533 - RNA, 19 nt, Artificial Sequence
  Description of Artificial Sequence: Synthetic oligonucleotide
uucgucacugagacccacc

SEQ ID NO: 1236534 - RNA, 19 nt, Artificial Sequence
  Description of Artificial Sequence: Synthetic oligonucleotide
uuaaucccucugcagcaaa

SEQ ID NO: 1236535 - RNA, 19 nt, Artificial Sequence
  Description of Artificial Sequence: Synthetic oligonucleotide
gaccacucgauuccacaug

SEQ ID NO: 1236536 - RNA, 19 nt, Artificial Sequence
  Description of Artificial Sequence: Synthetic oligonucleotide
gaagccgugaggagcauca

SEQ ID NO: 1236537 - RNA, 19 nt, Artificial Sequence
  Description of Artificial Sequence: Synthetic oligonucleotide
augucucagcagcagaaau

SEQ ID NO: 1236538 - RNA, 19 nt, Artificial Sequence
  Description of Artificial Sequence: Synthetic oligonucleotide
auuaagucgugcgacguuu

SEQ ID NO: 1236539 - RNA, 19 nt, Artificial Sequence
  Description of Artificial Sequence: Synthetic oligonucleotide
aacuuauagcaaagugaca

SEQ ID NO: 1236540 - RNA, 19 nt, Artificial Sequence
  Description of Artificial Sequence: Synthetic oligonucleotide
ugcgacguuuucaguggcc

SEQ ID NO: 1236541 - RNA, 19 nt, Artificial Sequence
  Description of Artificial Sequence: Synthetic oligonucleotide
uagaggaauuagcuuguuu

SEQ ID NO: 1236542 - RNA, 19 nt, Artificial Sequence
  Description of Artificial Sequence: Synthetic oligonucleotide
gacuaucucaaugaccuua

SEQ ID NO: 1236543 - RNA, 19 nt, Artificial Sequence
  Description of Artificial Sequence: Synthetic oligonucleotide
auggucguacuucucuccu

SEQ ID NO: 1236544 - RNA, 19 nt, Artificial Sequence
  Description of Artificial Sequence: Synthetic oligonucleotide
uuuucgucacugagaccca

SEQ ID NO: 1236545 - RNA, 19 nt, Artificial Sequence
  Description of Artificial Sequence: Synthetic oligonucleotide
agguuauuucaagggguuc

SEQ ID NO: 1236546 - RNA, 19 nt, Artificial Sequence
  Description of Artificial Sequence: Synthetic oligonucleotide
gucaguaucggaggugagc

SEQ ID NO: 1236547 - RNA, 19 nt, Artificial Sequence
  Description of Artificial Sequence: Synthetic oligonucleotide
ugcaauuguuucuccuguc

SEQ ID NO: 1236548 - RNA, 19 nt, Artificial Sequence
  Description of Artificial Sequence: Synthetic oligonucleotide
acguccagguuuuccuuag

SEQ ID NO: 1236549 - RNA, 19 nt, Artificial Sequence
  Description of Artificial Sequence: Synthetic oligonucleotide
cuugaugacuacucggucu

SEQ ID NO: 1236550 - RNA, 19 nt, Artificial Sequence
  Description of Artificial Sequence: Synthetic oligonucleotide
gacgucuuaguuauugucu

SEQ ID NO: 1236551 - RNA, 19 nt, Artificial Sequence
  Description of Artificial Sequence: Synthetic oligonucleotide
ucauccggucaaacacucc

SEQ ID NO: 1236552 - RNA, 19 nt, Artificial Sequence
  Description of Artificial Sequence: Synthetic oligonucleotide
aguaucggaggugagcaaa

SEQ ID NO: 1236553 - RNA, 19 nt, Artificial Sequence
  Description of Artificial Sequence: Synthetic oligonucleotide
aaaacacguccagguuuuc

SEQ ID NO: 1236554 - RNA, 19 nt, Artificial Sequence
  Description of Artificial Sequence: Synthetic oligonucleotide
augacuacucggucugcca

SEQ ID NO: 1236555 - RNA, 19 nt, Artificial Sequence
  Description of Artificial Sequence: Synthetic oligonucleotide
gugucgagcgaucucguuc

SEQ ID NO: 1236556 - RNA, 19 nt, Artificial Sequence
  Description of Artificial Sequence: Synthetic oligonucleotide
caaaacccucuagaaagug

SEQ ID NO: 1236557 - RNA, 19 nt, Artificial Sequence
  Description of Artificial Sequence: Synthetic oligonucleotide
uuauugucuggagcuggug

SEQ ID NO: 1236558 - RNA, 19 nt, Artificial Sequence
  Description of Artificial Sequence: Synthetic oligonucleotide
ucaagggguuccgugccag

SEQ ID NO: 1236559 - RNA, 19 nt, Artificial Sequence
  Description of Artificial Sequence: Synthetic oligonucleotide
cuuuagaaaacagaugaau

SEQ ID NO: 1236560 - RNA, 19 nt, Artificial Sequence
  Description of Artificial Sequence: Synthetic oligonucleotide
cugaaaugucucuucugca

SEQ ID NO: 1236561 - RNA, 19 nt, Artificial Sequence
  Description of Artificial Sequence: Synthetic oligonucleotide
ucguacuucucuccucguc

SEQ ID NO: 1236562 - RNA, 19 nt, Artificial Sequence
  Description of Artificial Sequence: Synthetic oligonucleotide
ucaaaucauuuugucuguc

SEQ ID NO: 1236563 - RNA, 19 nt, Artificial Sequence
  Description of Artificial Sequence: Synthetic oligonucleotide
uugucgggcuuuaaagauu

SEQ ID NO: 1236564 - RNA, 19 nt, Artificial Sequence
  Description of Artificial Sequence: Synthetic oligonucleotide
gcauaagucuuuuagcugu

SEQ ID NO: 1236565 - RNA, 19 nt, Artificial Sequence
  Description of Artificial Sequence: Synthetic oligonucleotide
gucuuaguuauugucugga

SEQ ID NO: 1236566 - RNA, 19 nt, Artificial Sequence
  Description of Artificial Sequence: Synthetic oligonucleotide
gauuccacaugguucaauu

SEQ ID NO: 1236567 - RNA, 19 nt, Artificial Sequence
  Description of Artificial Sequence: Synthetic oligonucleotide
acagcgaauaggccauccu

SEQ ID NO: 1236568 - RNA, 19 nt, Artificial Sequence
  Description of Artificial Sequence: Synthetic oligonucleotide
uguuacuuuccaccuucuu

SEQ ID NO: 1236569 - RNA, 19 nt, Artificial Sequence
  Description of Artificial Sequence: Synthetic oligonucleotide
guaaacacgcugacagaug

SEQ ID NO: 1236570 - RNA, 19 nt, Artificial Sequence
  Description of Artificial Sequence: Synthetic oligonucleotide
uacagcgaauaggccaucc

SEQ ID NO: 1236571 - RNA, 19 nt, Artificial Sequence
  Description of Artificial Sequence: Synthetic oligonucleotide
ugacaggagcuggaccacg

SEQ ID NO: 1236572 - RNA, 19 nt, Artificial Sequence
  Description of Artificial Sequence: Synthetic oligonucleotide
acuguacauuugaaguaag

SEQ ID NO: 1236573 - RNA, 19 nt, Artificial Sequence
  Description of Artificial Sequence: Synthetic oligonucleotide
gagauucucccaaagggcu

SEQ ID NO: 1236574 - RNA, 19 nt, Artificial Sequence
  Description of Artificial Sequence: Synthetic oligonucleotide
uaucggaggugagcaaagc

SEQ ID NO: 1236575 - RNA, 19 nt, Artificial Sequence
  Description of Artificial Sequence: Synthetic oligonucleotide
ucucuucugcauguaugca

SEQ ID NO: 1236576 - RNA, 19 nt, Artificial Sequence
  Description of Artificial Sequence: Synthetic oligonucleotide
agcguugccaugucacuaa

SEQ ID NO: 1236577 - RNA, 19 nt, Artificial Sequence
  Description of Artificial Sequence: Synthetic oligonucleotide
guaucggaggugagcaaag

SEQ ID NO: 1236578 - RNA, 19 nt, Artificial Sequence
  Description of Artificial Sequence: Synthetic oligonucleotide
uuaagucgugcgacguuuu

SEQ ID NO: 1236579 - RNA, 19 nt, Artificial Sequence
  Description of Artificial Sequence: Synthetic oligonucleotide
cugcacaacuccuguuuug

SEQ ID NO: 1236580 - RNA, 19 nt, Artificial Sequence
  Description of Artificial Sequence: Synthetic oligonucleotide
ugaauccgguuugucgggc

SEQ ID NO: 1236581 - RNA, 19 nt, Artificial Sequence
  Description of Artificial Sequence: Synthetic oligonucleotide
caagccucacaaaacacgu

SEQ ID NO: 1236582 - RNA, 19 nt, Artificial Sequence
  Description of Artificial Sequence: Synthetic oligonucleotide
caaaugcaggcaauauuaa

SEQ ID NO: 1236583 - RNA, 19 nt, Artificial Sequence
  Description of Artificial Sequence: Synthetic oligonucleotide
acccucuagaaagugaauu

SEQ ID NO: 1236584 - RNA, 19 nt, Artificial Sequence
  Description of Artificial Sequence: Synthetic oligonucleotide
gcaaagacgucuuaguuau

SEQ ID NO: 1236585 - RNA, 19 nt, Artificial Sequence
  Description of Artificial Sequence: Synthetic oligonucleotide
gucacuaaucugagauucc

SEQ ID NO: 1236586 - RNA, 19 nt, Artificial Sequence
  Description of Artificial Sequence: Synthetic oligonucleotide
agccgugaggagcaucaug

SEQ ID NO: 1236587 - RNA, 19 nt, Artificial Sequence
  Description of Artificial Sequence: Synthetic oligonucleotide
ugagauucccaagccucac

SEQ ID NO: 1236588 - RNA, 19 nt, Artificial Sequence
  Description of Artificial Sequence: Synthetic oligonucleotide
augucacuaaucugagauu

SEQ ID NO: 1236589 - RNA, 19 nt, Artificial Sequence
  Description of Artificial Sequence: Synthetic oligonucleotide
acuaucucaaugaccuuau

SEQ ID NO: 1236590 - RNA, 19 nt, Artificial Sequence
  Description of Artificial Sequence: Synthetic oligonucleotide
ggugcccuuuucaagcacg

SEQ ID NO: 1236591 - RNA, 19 nt, Artificial Sequence
  Description of Artificial Sequence: Synthetic oligonucleotide
cacuaaucugagauuccca

SEQ ID NO: 1236592 - RNA, 19 nt, Artificial Sequence
  Description of Artificial Sequence: Synthetic oligonucleotide
ugucuuguuuagccucaaa

SEQ ID NO: 1236593 - RNA, 19 nt, Artificial Sequence
  Description of Artificial Sequence: Synthetic oligonucleotide
acagucaguaucggaggug

SEQ ID NO: 1236594 - RNA, 19 nt, Artificial Sequence
  Description of Artificial Sequence: Synthetic oligonucleotide
gagauucccaagccucaca

SEQ ID NO: 1236595 - RNA, 19 nt, Artificial Sequence
  Description of Artificial Sequence: Synthetic oligonucleotide
agguuuuaccauccaugau

SEQ ID NO: 1236596 - RNA, 19 nt, Artificial Sequence
  Description of Artificial Sequence: Synthetic oligonucleotide
augguugcaagaaccuugu

SEQ ID NO: 1236597 - RNA, 19 nt, Artificial Sequence
  Description of Artificial Sequence: Synthetic oligonucleotide
ugucucccguuagaugugc

SEQ ID NO: 1236598 - RNA, 19 nt, Artificial Sequence
  Description of Artificial Sequence: Synthetic oligonucleotide
gaauuaagucgugcgacgu

SEQ ID NO: 1236599 - RNA, 19 nt, Artificial Sequence
  Description of Artificial Sequence: Synthetic oligonucleotide
augucucuucugcauguau

SEQ ID NO: 1236600 - RNA, 19 nt, Artificial Sequence
  Description of Artificial Sequence: Synthetic oligonucleotide
cauuauucuucaugggccu

SEQ ID NO: 1236601 - RNA, 19 nt, Artificial Sequence
  Description of Artificial Sequence: Synthetic oligonucleotide
agcgauuuugcuagaugga

SEQ ID NO: 1236602 - RNA, 19 nt, Artificial Sequence
  Description of Artificial Sequence: Synthetic oligonucleotide
cauagaggaauuagcuugu

SEQ ID NO: 1236603 - RNA, 19 nt, Artificial Sequence
  Description of Artificial Sequence: Synthetic oligonucleotide
uaccauccaugauaucuuu

SEQ ID NO: 1236604 - RNA, 19 nt, Artificial Sequence
  Description of Artificial Sequence: Synthetic oligonucleotide
auacacuugucaaccuuga

SEQ ID NO: 1236605 - RNA, 19 nt, Artificial Sequence
  Description of Artificial Sequence: Synthetic oligonucleotide
aggaauuagcuuguuuauu

SEQ ID NO: 1236606 - RNA, 19 nt, Artificial Sequence
  Description of Artificial Sequence: Synthetic oligonucleotide
cugaccacucgauuccaca

SEQ ID NO: 1236607 - RNA, 19 nt, Artificial Sequence
  Description of Artificial Sequence: Synthetic oligonucleotide
aagggguuccgugccagau

SEQ ID NO: 1236608 - RNA, 19 nt, Artificial Sequence
  Description of Artificial Sequence: Synthetic oligonucleotide
gagcgaucucguucucuug

SEQ ID NO: 1236609 - RNA, 19 nt, Artificial Sequence
  Description of Artificial Sequence: Synthetic oligonucleotide
ccauccuggacauguuccg

SEQ ID NO: 1236610 - RNA, 19 nt, Artificial Sequence
  Description of Artificial Sequence: Synthetic oligonucleotide
uagcagcguugccauguca

SEQ ID NO: 1236611 - RNA, 19 nt, Artificial Sequence
  Description of Artificial Sequence: Synthetic oligonucleotide
acuacucggucugccagca

SEQ ID NO: 1236612 - RNA, 19 nt, Artificial Sequence
  Description of Artificial Sequence: Synthetic oligonucleotide
aguggccccucuccucuag

SEQ ID NO: 1236613 - RNA, 19 nt, Artificial Sequence
  Description of Artificial Sequence: Synthetic oligonucleotide
guaauacacuugucaaccu

SEQ ID NO: 1236614 - RNA, 19 nt, Artificial Sequence
  Description of Artificial Sequence: Synthetic oligonucleotide
cauuuugucugucucccgu

SEQ ID NO: 1236615 - RNA, 19 nt, Artificial Sequence
  Description of Artificial Sequence: Synthetic oligonucleotide
cagucaguaucggagguga

SEQ ID NO: 1236616 - RNA, 19 nt, Artificial Sequence
  Description of Artificial Sequence: Synthetic oligonucleotide
cauccggucaaacacuccu

SEQ ID NO: 1236617 - RNA, 19 nt, Artificial Sequence
  Description of Artificial Sequence: Synthetic oligonucleotide
uuucgucacugagacccac

SEQ ID NO: 1236618 - RNA, 19 nt, Artificial Sequence
  Description of Artificial Sequence: Synthetic oligonucleotide
cacugaucucucguagcag

SEQ ID NO: 1236619 - RNA, 19 nt, Artificial Sequence
  Description of Artificial Sequence: Synthetic oligonucleotide
ggaagugaaagauggucgu

SEQ ID NO: 1236620 - RNA, 19 nt, Artificial Sequence
  Description of Artificial Sequence: Synthetic oligonucleotide
uggucguacuucucuccuc

SEQ ID NO: 1236621 - RNA, 19 nt, Artificial Sequence
  Description of Artificial Sequence: Synthetic oligonucleotide
cgugcgacguuuucagugg

SEQ ID NO: 1236622 - RNA, 19 nt, Artificial Sequence
  Description of Artificial Sequence: Synthetic oligonucleotide
cuaucucaaugaccuuauc

SEQ ID NO: 1236623 - RNA, 19 nt, Artificial Sequence
  Description of Artificial Sequence: Synthetic oligonucleotide
gguugcaagaaccuuguuu

SEQ ID NO: 1236624 - RNA, 19 nt, Artificial Sequence
  Description of Artificial Sequence: Synthetic oligonucleotide
agcugggaugccugagaca

SEQ ID NO: 1236625 - RNA, 19 nt, Artificial Sequence
  Description of Artificial Sequence: Synthetic oligonucleotide
caguaaacacgcugacaga

SEQ ID NO: 1236626 - RNA, 19 nt, Artificial Sequence
  Description of Artificial Sequence: Synthetic oligonucleotide
cgauuuugcuagauggaug

SEQ ID NO: 1236627 - RNA, 19 nt, Artificial Sequence
  Description of Artificial Sequence: Synthetic oligonucleotide
gaagugaaagauggucgua

SEQ ID NO: 1236628 - RNA, 19 nt, Artificial Sequence
  Description of Artificial Sequence: Synthetic oligonucleotide
acauuugaaguaaguuuua

SEQ ID NO: 1236629 - RNA, 19 nt, Artificial Sequence
  Description of Artificial Sequence: Synthetic oligonucleotide
cuguacauuugaaguaagu

SEQ ID NO: 1236630 - RNA, 19 nt, Artificial Sequence
  Description of Artificial Sequence: Synthetic oligonucleotide
acguuuucaguggccccuc

SEQ ID NO: 1236631 - RNA, 19 nt, Artificial Sequence
  Description of Artificial Sequence: Synthetic oligonucleotide
ucgagcgaucucguucucu

SEQ ID NO: 1236632 - RNA, 19 nt, Artificial Sequence
  Description of Artificial Sequence: Synthetic oligonucleotide
gugcgacguuuucaguggc

SEQ ID NO: 1236633 - RNA, 19 nt, Artificial Sequence
  Description of Artificial Sequence: Synthetic oligonucleotide
ugcccuuuucaagcacggc

SEQ ID NO: 1236634 - RNA, 19 nt, Artificial Sequence
  Description of Artificial Sequence: Synthetic oligonucleotide
caagcacggcccucgccac

SEQ ID NO: 1236635 - RNA, 19 nt, Artificial Sequence
  Description of Artificial Sequence: Synthetic oligonucleotide
gacaugucuuugaagccgu

SEQ ID NO: 1236636 - RNA, 19 nt, Artificial Sequence
  Description of Artificial Sequence: Synthetic oligonucleotide
aacccucuagaaagugaau

SEQ ID NO: 1236637 - RNA, 19 nt, Artificial Sequence
  Description of Artificial Sequence: Synthetic oligonucleotide
cuaucuuggccugcuccuc

SEQ ID NO: 1236638 - RNA, 19 nt, Artificial Sequence
  Description of Artificial Sequence: Synthetic oligonucleotide
auacagcgaauaggccauc

SEQ ID NO: 1236639 - RNA, 19 nt, Artificial Sequence
  Description of Artificial Sequence: Synthetic oligonucleotide
gcgacguuuucaguggccc

SEQ ID NO: 1236640 - RNA, 19 nt, Artificial Sequence
  Description of Artificial Sequence: Synthetic oligonucleotide
cgucuuaguuauugucugg

SEQ ID NO: 1236641 - RNA, 19 nt, Artificial Sequence
  Description of Artificial Sequence: Synthetic oligonucleotide
auaagucuuuuagcuguuu

SEQ ID NO: 1236642 - RNA, 19 nt, Artificial Sequence
  Description of Artificial Sequence: Synthetic oligonucleotide
gacccaccuguuacuuucc

SEQ ID NO: 1236643 - RNA, 19 nt, Artificial Sequence
  Description of Artificial Sequence: Synthetic oligonucleotide
augauauuccagagaugaa

SEQ ID NO: 1236644 - RNA, 19 nt, Artificial Sequence
  Description of Artificial Sequence: Synthetic oligonucleotide
gccaugucacuaaucugag

SEQ ID NO: 1236645 - RNA, 19 nt, Artificial Sequence
  Description of Artificial Sequence: Synthetic oligonucleotide
caggagaagcauaagucuu

SEQ ID NO: 1236646 - RNA, 19 nt, Artificial Sequence
  Description of Artificial Sequence: Synthetic oligonucleotide
gcaauuguuucuccugucu

SEQ ID NO: 1236647 - RNA, 19 nt, Artificial Sequence
  Description of Artificial Sequence: Synthetic oligonucleotide
ggcugaauaucugaacaaa

SEQ ID NO: 1236648 - RNA, 19 nt, Artificial Sequence
  Description of Artificial Sequence: Synthetic oligonucleotide
gaucucucguagcagcguu

SEQ ID NO: 1236649 - RNA, 19 nt, Artificial Sequence
  Description of Artificial Sequence: Synthetic oligonucleotide
agccuggcggccugcacaa

SEQ ID NO: 1236650 - RNA, 19 nt, Artificial Sequence
  Description of Artificial Sequence: Synthetic oligonucleotide
ccguuagaugugcaaacuc

SEQ ID NO: 1236651 - RNA, 19 nt, Artificial Sequence
  Description of Artificial Sequence: Synthetic oligonucleotide
cauguuccguccgugucga

SEQ ID NO: 1236652 - RNA, 19 nt, Artificial Sequence
  Description of Artificial Sequence: Synthetic oligonucleotide
guagcagcguugccauguc

SEQ ID NO: 1236653 - RNA, 19 nt, Artificial Sequence
  Description of Artificial Sequence: Synthetic oligonucleotide
cacucucauccggucaaac

SEQ ID NO: 1236654 - RNA, 19 nt, Artificial Sequence
  Description of Artificial Sequence: Synthetic oligonucleotide
agucaguaucggaggugag

SEQ ID NO: 1236655 - RNA, 19 nt, Artificial Sequence
  Description of Artificial Sequence: Synthetic oligonucleotide
aucugaccacucgauucca

SEQ ID NO: 1236656 - RNA, 19 nt, Artificial Sequence
  Description of Artificial Sequence: Synthetic oligonucleotide
gcugacagaugaccuguca

SEQ ID NO: 1236657 - RNA, 19 nt, Artificial Sequence
  Description of Artificial Sequence: Synthetic oligonucleotide
gaauccgguuugucgggcu

SEQ ID NO: 1236658 - RNA, 19 nt, Artificial Sequence
  Description of Artificial Sequence: Synthetic oligonucleotide
gcgaauaggccauccugga

SEQ ID NO: 1236659 - RNA, 19 nt, Artificial Sequence
  Description of Artificial Sequence: Synthetic oligonucleotide
ccaggagaagcauaagucu

SEQ ID NO: 1236660 - RNA, 19 nt, Artificial Sequence
  Description of Artificial Sequence: Synthetic oligonucleotide
agggguuccgugccagaua

SEQ ID NO: 1236661 - RNA, 19 nt, Artificial Sequence
  Description of Artificial Sequence: Synthetic oligonucleotide
gugaaagauggucguacuu

SEQ ID NO: 1236662 - RNA, 19 nt, Artificial Sequence
  Description of Artificial Sequence: Synthetic oligonucleotide
gccagauaaagguucuccu

SEQ ID NO: 1236663 - RNA, 19 nt, Artificial Sequence
  Description of Artificial Sequence: Synthetic oligonucleotide
uuccguccgugucgagcga

SEQ ID NO: 1236664 - RNA, 19 nt, Artificial Sequence
  Description of Artificial Sequence: Synthetic oligonucleotide
ccucgucuuccuuuaaaca

SEQ ID NO: 1236665 - RNA, 19 nt, Artificial Sequence
  Description of Artificial Sequence: Synthetic oligonucleotide
gccuuggaagugaaagaug

SEQ ID NO: 1236666 - RNA, 19 nt, Artificial Sequence
  Description of Artificial Sequence: Synthetic oligonucleotide
auagaggaauuagcuuguu

SEQ ID NO: 1236667 - RNA, 19 nt, Artificial Sequence
  Description of Artificial Sequence: Synthetic oligonucleotide
cagguuauuucaagggguu

SEQ ID NO: 1236668 - RNA, 19 nt, Artificial Sequence
  Description of Artificial Sequence: Synthetic oligonucleotide
ugguugcaagaaccuuguu

SEQ ID NO: 1236669 - RNA, 19 nt, Artificial Sequence
  Description of Artificial Sequence: Synthetic oligonucleotide
agaugaccugucaguuucu

SEQ ID NO: 1236670 - RNA, 19 nt, Artificial Sequence
  Description of Artificial Sequence: Synthetic oligonucleotide
cucguagcagcguugccau

SEQ ID NO: 1236671 - RNA, 19 nt, Artificial Sequence
  Description of Artificial Sequence: Synthetic oligonucleotide
cccucuagaaagugaauua

SEQ ID NO: 1236672 - RNA, 19 nt, Artificial Sequence
  Description of Artificial Sequence: Synthetic oligonucleotide
ggcauagaggaauuagcuu

SEQ ID NO: 1236673 - RNA, 19 nt, Artificial Sequence
  Description of Artificial Sequence: Synthetic oligonucleotide
caccugaaaugucucuucu

SEQ ID NO: 1236674 - RNA, 19 nt, Artificial Sequence
  Description of Artificial Sequence: Synthetic oligonucleotide
cuacucggucugccagcag

SEQ ID NO: 1236675 - RNA, 19 nt, Artificial Sequence
  Description of Artificial Sequence: Synthetic oligonucleotide
acaugucuuugaagccgug

SEQ ID NO: 1236676 - RNA, 19 nt, Artificial Sequence
  Description of Artificial Sequence: Synthetic oligonucleotide
cagagaugaacugcaggcu

SEQ ID NO: 1236677 - RNA, 19 nt, Artificial Sequence
  Description of Artificial Sequence: Synthetic oligonucleotide
cugagacccaccuguuacu

SEQ ID NO: 1236678 - RNA, 19 nt, Artificial Sequence
  Description of Artificial Sequence: Synthetic oligonucleotide
cacucgauuccacaugguu

SEQ ID NO: 1236679 - RNA, 19 nt, Artificial Sequence
  Description of Artificial Sequence: Synthetic oligonucleotide
ucgauuccacaugguucaa

SEQ ID NO: 1236680 - RNA, 19 nt, Artificial Sequence
  Description of Artificial Sequence: Synthetic oligonucleotide
ccucuagaaagugaauuaa

SEQ ID NO: 1236681 - RNA, 19 nt, Artificial Sequence
  Description of Artificial Sequence: Synthetic oligonucleotide
caguaacuuauagcaaagu

SEQ ID NO: 1236682 - RNA, 19 nt, Artificial Sequence
  Description of Artificial Sequence: Synthetic oligonucleotide
ccugagacaugucuuugaa

SEQ ID NO: 1236683 - RNA, 19 nt, Artificial Sequence
  Description of Artificial Sequence: Synthetic oligonucleotide
uccgguuugucgggcuuua

SEQ ID NO: 1236684 - RNA, 19 nt, Artificial Sequence
  Description of Artificial Sequence: Synthetic oligonucleotide
uccguccgugucgagcgau

SEQ ID NO: 1236685 - RNA, 19 nt, Artificial Sequence
  Description of Artificial Sequence: Synthetic oligonucleotide
caugggccuuggaagugaa

SEQ ID NO: 1236686 - RNA, 19 nt, Artificial Sequence
  Description of Artificial Sequence: Synthetic oligonucleotide
guccgugucgagcgaucuc

SEQ ID NO: 1236687 - RNA, 19 nt, Artificial Sequence
  Description of Artificial Sequence: Synthetic oligonucleotide
cuccugucuuguuuagccu

SEQ ID NO: 1236688 - RNA, 19 nt, Artificial Sequence
  Description of Artificial Sequence: Synthetic oligonucleotide
aagccgugaggagcaucau

SEQ ID NO: 1236689 - RNA, 19 nt, Artificial Sequence
  Description of Artificial Sequence: Synthetic oligonucleotide
auguuccguccgugucgag

SEQ ID NO: 1236690 - RNA, 19 nt, Artificial Sequence
  Description of Artificial Sequence: Synthetic oligonucleotide
gugaucugaccacucgauu

SEQ ID NO: 1236691 - RNA, 19 nt, Artificial Sequence
  Description of Artificial Sequence: Synthetic oligonucleotide
cugcauguaugcagguuau

SEQ ID NO: 1236692 - RNA, 19 nt, Artificial Sequence
  Description of Artificial Sequence: Synthetic oligonucleotide
agccucaaaugcaggcaau

SEQ ID NO: 1236693 - RNA, 19 nt, Artificial Sequence
  Description of Artificial Sequence: Synthetic oligonucleotide
cuuagcgauuuugcuagau

SEQ ID NO: 1236694 - RNA, 19 nt, Artificial Sequence
  Description of Artificial Sequence: Synthetic oligonucleotide
caagggguuccgugccaga

SEQ ID NO: 1236695 - RNA, 19 nt, Artificial Sequence
  Description of Artificial Sequence: Synthetic oligonucleotide
cuguuacuuuccaccuucu

SEQ ID NO: 1236696 - RNA, 19 nt, Artificial Sequence
  Description of Artificial Sequence: Synthetic oligonucleotide
cacugagacccaccuguua

SEQ ID NO: 1236697 - RNA, 19 nt, Artificial Sequence
  Description of Artificial Sequence: Synthetic oligonucleotide
gccucacaaaacacgucca

SEQ ID NO: 1236698 - RNA, 19 nt, Artificial Sequence
  Description of Artificial Sequence: Synthetic oligonucleotide
gcgauuuugcuagauggau

SEQ ID NO: 1236699 - RNA, 19 nt, Artificial Sequence
  Description of Artificial Sequence: Synthetic oligonucleotide
cagcguugccaugucacua

SEQ ID NO: 1236700 - RNA, 19 nt, Artificial Sequence
  Description of Artificial Sequence: Synthetic oligonucleotide
gaccuuauccagggccacu

SEQ ID NO: 1236701 - RNA, 19 nt, Artificial Sequence
  Description of Artificial Sequence: Synthetic oligonucleotide
gcaaaacccucuagaaagu

SEQ ID NO: 1236702 - RNA, 19 nt, Artificial Sequence
  Description of Artificial Sequence: Synthetic oligonucleotide
ggccccucuccucuaguaa

SEQ ID NO: 1236703 - RNA, 19 nt, Artificial Sequence
  Description of Artificial Sequence: Synthetic oligonucleotide
gucgagcgaucucguucuc

SEQ ID NO: 1236704 - RNA, 19 nt, Artificial Sequence
  Description of Artificial Sequence: Synthetic oligonucleotide
gucguacuucucuccucgu

SEQ ID NO: 1236705 - RNA, 19 nt, Artificial Sequence
  Description of Artificial Sequence: Synthetic oligonucleotide
ccaugucacuaaucugaga

SEQ ID NO: 1236706 - RNA, 19 nt, Artificial Sequence
  Description of Artificial Sequence: Synthetic oligonucleotide
cguugccaugucacuaauc

SEQ ID NO: 1236707 - RNA, 19 nt, Artificial Sequence
  Description of Artificial Sequence: Synthetic oligonucleotide
gucucccguuagaugugca

SEQ ID NO: 1236708 - RNA, 19 nt, Artificial Sequence
  Description of Artificial Sequence: Synthetic oligonucleotide
ccucgccacggccaugcug

SEQ ID NO: 1236709 - RNA, 19 nt, Artificial Sequence
  Description of Artificial Sequence: Synthetic oligonucleotide
gucgugcgacguuuucagu

SEQ ID NO: 1236710 - RNA, 19 nt, Artificial Sequence
  Description of Artificial Sequence: Synthetic oligonucleotide
gccucaaaugcaggcaaua

SEQ ID NO: 1236711 - RNA, 19 nt, Artificial Sequence
  Description of Artificial Sequence: Synthetic oligonucleotide
ggagaagcauaagucuuuu

SEQ ID NO: 1236712 - RNA, 19 nt, Artificial Sequence
  Description of Artificial Sequence: Synthetic oligonucleotide
gucgggcuuuaaagauuuc

SEQ ID NO: 1236713 - RNA, 19 nt, Artificial Sequence
  Description of Artificial Sequence: Synthetic oligonucleotide
ccuugaggaacacuuuauu

SEQ ID NO: 1236714 - RNA, 19 nt, Artificial Sequence
  Description of Artificial Sequence: Synthetic oligonucleotide
ccacgagagccaucaugga

SEQ ID NO: 1236715 - RNA, 19 nt, Artificial Sequence
  Description of Artificial Sequence: Synthetic oligonucleotide
ccuuagcgauuuugcuaga

SEQ ID NO: 1236716 - RNA, 19 nt, Artificial Sequence
  Description of Artificial Sequence: Synthetic oligonucleotide
caaagacgucuuaguuauu

SEQ ID NO: 1236717 - RNA, 19 nt, Artificial Sequence
  Description of Artificial Sequence: Synthetic oligonucleotide
guggccccucuccucuagu

SEQ ID NO: 1236718 - RNA, 19 nt, Artificial Sequence
  Description of Artificial Sequence: Synthetic oligonucleotide
ccggucaaacacuccuucu

SEQ ID NO: 1236719 - RNA, 19 nt, Artificial Sequence
  Description of Artificial Sequence: Synthetic oligonucleotide
ccguccgugucgagcgauc

SEQ ID NO: 1236720 - RNA, 19 nt, Artificial Sequence
  Description of Artificial Sequence: Synthetic oligonucleotide
cccguuagaugugcaaacu

SEQ ID NO: 1236721 - RNA, 19 nt, Artificial Sequence
  Description of Artificial Sequence: Synthetic oligonucleotide
cgagcgaucucguucucuu

SEQ ID NO: 1236722 - RNA, 19 nt, Artificial Sequence
  Description of Artificial Sequence: Synthetic oligonucleotide
ggcggccugcacaacuccu

SEQ ID NO: 1236723 - RNA, 19 nt, Artificial Sequence
  Description of Artificial Sequence: Synthetic oligonucleotide
gcguugccaugucacuaau

SEQ ID NO: 1236724 - RNA, 19 nt, Artificial Sequence
  Description of Artificial Sequence: Synthetic oligonucleotide
ccgugucgagcgaucucgu

SEQ ID NO: 1236725 - RNA, 19 nt, Artificial Sequence
  Description of Artificial Sequence: Synthetic oligonucleotide
ccacucucauccggucaaa

SEQ ID NO: 1236726 - RNA, 19 nt, Artificial Sequence
  Description of Artificial Sequence: Synthetic oligonucleotide
cguccgugucgagcgaucu

SEQ ID NO: 1236727 - RNA, 19 nt, Artificial Sequence
  Description of Artificial Sequence: Synthetic oligonucleotide
ccgguuugucgggcuuuaa

SEQ ID NO: 1236728 - RNA, 19 nt, Artificial Sequence
  Description of Artificial Sequence: Synthetic oligonucleotide
cgugucgagcgaucucguu

SEQ ID NO: 1236729 - RNA, 19 nt, Artificial Sequence
  Description of Artificial Sequence: Synthetic oligonucleotide
aagacuuuguccccgaacg

SEQ ID NO: 1236730 - RNA, 19 nt, Artificial Sequence
  Description of Artificial Sequence: Synthetic oligonucleotide
aaaucauuaacagaaucgg

SEQ ID NO: 1236731 - RNA, 19 nt, Artificial Sequence
  Description of Artificial Sequence: Synthetic oligonucleotide
aaagauggagcucggagac

SEQ ID NO: 1236732 - RNA, 19 nt, Artificial Sequence
  Description of Artificial Sequence: Synthetic oligonucleotide
aaggucuaggguuugaggg

SEQ ID NO: 1236733 - RNA, 19 nt, Artificial Sequence
  Description of Artificial Sequence: Synthetic oligonucleotide
ucaacauacugaauaaggg

SEQ ID NO: 1236734 - RNA, 19 nt, Artificial Sequence
  Description of Artificial Sequence: Synthetic oligonucleotide
aaucucagcaaccgaaggc

SEQ ID NO: 1236735 - RNA, 19 nt, Artificial Sequence
  Description of Artificial Sequence: Synthetic oligonucleotide
acgucugugacucagcugc

SEQ ID NO: 1236736 - RNA, 19 nt, Artificial Sequence
  Description of Artificial Sequence: Synthetic oligonucleotide
aacauacugaauaaggguc

SEQ ID NO: 1236737 - RNA, 19 nt, Artificial Sequence
  Description of Artificial Sequence: Synthetic oligonucleotide
ugauugaugcauaagguga

SEQ ID NO: 1236738 - RNA, 19 nt, Artificial Sequence
  Description of Artificial Sequence: Synthetic oligonucleotide
uugagcugcaauaaagccg

SEQ ID NO: 1236739 - RNA, 19 nt, Artificial Sequence
  Description of Artificial Sequence: Synthetic oligonucleotide
aaucagcuuagcugaaacc

SEQ ID NO: 1236740 - RNA, 19 nt, Artificial Sequence
  Description of Artificial Sequence: Synthetic oligonucleotide
uccacaacaauguaaucgg

SEQ ID NO: 1236741 - RNA, 19 nt, Artificial Sequence
  Description of Artificial Sequence: Synthetic oligonucleotide
aaauccuguaacaucagac

SEQ ID NO: 1236742 - RNA, 19 nt, Artificial Sequence
  Description of Artificial Sequence: Synthetic oligonucleotide
uguccagucacucagcuug

SEQ ID NO: 1236743 - RNA, 19 nt, Artificial Sequence
  Description of Artificial Sequence: Synthetic oligonucleotide
aacaauguaaucggaaauc

SEQ ID NO: 1236744 - RNA, 19 nt, Artificial Sequence
  Description of Artificial Sequence: Synthetic oligonucleotide
aaggggacaucguauuucc

SEQ ID NO: 1236745 - RNA, 19 nt, Artificial Sequence
  Description of Artificial Sequence: Synthetic oligonucleotide
uccaauaucuccgagaacu

SEQ ID NO: 1236746 - RNA, 19 nt, Artificial Sequence
  Description of Artificial Sequence: Synthetic oligonucleotide
uuugguauguucugcacag

SEQ ID NO: 1236747 - RNA, 19 nt, Artificial Sequence
  Description of Artificial Sequence: Synthetic oligonucleotide
aaagacuuuguccccgaac

SEQ ID NO: 1236748 - RNA, 19 nt, Artificial Sequence
  Description of Artificial Sequence: Synthetic oligonucleotide
uguaacaucagaccguccu

SEQ ID NO: 1236749 - RNA, 19 nt, Artificial Sequence
  Description of Artificial Sequence: Synthetic oligonucleotide
ugagcugcaauaaagccga

SEQ ID NO: 1236750 - RNA, 19 nt, Artificial Sequence
  Description of Artificial Sequence: Synthetic oligonucleotide
aaagccgacagccaguaca

SEQ ID NO: 1236751 - RNA, 19 nt, Artificial Sequence
  Description of Artificial Sequence: Synthetic oligonucleotide
agaaaccuucauuugugcc

SEQ ID NO: 1236752 - RNA, 19 nt, Artificial Sequence
  Description of Artificial Sequence: Synthetic oligonucleotide
ucggaaaucagcuuagcug

SEQ ID NO: 1236753 - RNA, 19 nt, Artificial Sequence
  Description of Artificial Sequence: Synthetic oligonucleotide
ugcagaaagauggagcucg

SEQ ID NO: 1236754 - RNA, 19 nt, Artificial Sequence
  Description of Artificial Sequence: Synthetic oligonucleotide
aaaaccgaccacugaacuc

SEQ ID NO: 1236755 - RNA, 19 nt, Artificial Sequence
  Description of Artificial Sequence: Synthetic oligonucleotide
aaaggucuaggguuugagg

SEQ ID NO: 1236756 - RNA, 19 nt, Artificial Sequence
  Description of Artificial Sequence: Synthetic oligonucleotide
uguucaaauguccaccaug

SEQ ID NO: 1236757 - RNA, 19 nt, Artificial Sequence
  Description of Artificial Sequence: Synthetic oligonucleotide
cucagcuugugauugaugc

SEQ ID NO: 1236758 - RNA, 19 nt, Artificial Sequence
  Description of Artificial Sequence: Synthetic oligonucleotide
gaaaggcuuggccugaagg

SEQ ID NO: 1236759 - RNA, 19 nt, Artificial Sequence
  Description of Artificial Sequence: Synthetic oligonucleotide
agaaagauggagcucggag

SEQ ID NO: 1236760 - RNA, 19 nt, Artificial Sequence
  Description of Artificial Sequence: Synthetic oligonucleotide
agauaaccacugcugaagc

SEQ ID NO: 1236761 - RNA, 19 nt, Artificial Sequence
  Description of Artificial Sequence: Synthetic oligonucleotide
aagauaugagugucugagg

SEQ ID NO: 1236762 - RNA, 19 nt, Artificial Sequence
  Description of Artificial Sequence: Synthetic oligonucleotide
guauguucugcacagcagg

SEQ ID NO: 1236763 - RNA, 19 nt, Artificial Sequence
  Description of Artificial Sequence: Synthetic oligonucleotide
agauaugagugucugagga

SEQ ID NO: 1236764 - RNA, 19 nt, Artificial Sequence
  Description of Artificial Sequence: Synthetic oligonucleotide
auuggaccgcuccagaaac

SEQ ID NO: 1236765 - RNA, 19 nt, Artificial Sequence
  Description of Artificial Sequence: Synthetic oligonucleotide
aggaugaaaagacuuuguc

SEQ ID NO: 1236766 - RNA, 19 nt, Artificial Sequence
  Description of Artificial Sequence: Synthetic oligonucleotide
auuugugccuuguaaauca

SEQ ID NO: 1236767 - RNA, 19 nt, Artificial Sequence
  Description of Artificial Sequence: Synthetic oligonucleotide
acaucguauuuccuuaaac

SEQ ID NO: 1236768 - RNA, 19 nt, Artificial Sequence
  Description of Artificial Sequence: Synthetic oligonucleotide
cuccacaacaauguaaucg

SEQ ID NO: 1236769 - RNA, 19 nt, Artificial Sequence
  Description of Artificial Sequence: Synthetic oligonucleotide
uucaguuagagacgugucc

SEQ ID NO: 1236770 - RNA, 19 nt, Artificial Sequence
  Description of Artificial Sequence: Synthetic oligonucleotide
augaaaagacuuugucccc

SEQ ID NO: 1236771 - RNA, 19 nt, Artificial Sequence
  Description of Artificial Sequence: Synthetic oligonucleotide
gaccauggaacacacgggg

SEQ ID NO: 1236772 - RNA, 19 nt, Artificial Sequence
  Description of Artificial Sequence: Synthetic oligonucleotide
ugccuuguaaaucauuaac

SEQ ID NO: 1236773 - RNA, 19 nt, Artificial Sequence
  Description of Artificial Sequence: Synthetic oligonucleotide
gucugaggaagguagagag

SEQ ID NO: 1236774 - RNA, 19 nt, Artificial Sequence
  Description of Artificial Sequence: Synthetic oligonucleotide
ugaacuucggaucagccuu

SEQ ID NO: 1236775 - RNA, 19 nt, Artificial Sequence
  Description of Artificial Sequence: Synthetic oligonucleotide
aaaccgaccacugaacuca

SEQ ID NO: 1236776 - RNA, 19 nt, Artificial Sequence
  Description of Artificial Sequence: Synthetic oligonucleotide
ucaauaauggcgccaggcu

SEQ ID NO: 1236777 - RNA, 19 nt, Artificial Sequence
  Description of Artificial Sequence: Synthetic oligonucleotide
uaaucggaaaucagcuuag

SEQ ID NO: 1236778 - RNA, 19 nt, Artificial Sequence
  Description of Artificial Sequence: Synthetic oligonucleotide
gaagguagagaggaaggcg

SEQ ID NO: 1236779 - RNA, 19 nt, Artificial Sequence
  Description of Artificial Sequence: Synthetic oligonucleotide
gaaucucagcaaccgaagg

SEQ ID NO: 1236780 - RNA, 19 nt, Artificial Sequence
  Description of Artificial Sequence: Synthetic oligonucleotide
agcuccgcgcaucaggucc

SEQ ID NO: 1236781 - RNA, 19 nt, Artificial Sequence
  Description of Artificial Sequence: Synthetic oligonucleotide
auaugagugucugaggaag

SEQ ID NO: 1236782 - RNA, 19 nt, Artificial Sequence
  Description of Artificial Sequence: Synthetic oligonucleotide
aggucuaggguuugagggc

SEQ ID NO: 1236783 - RNA, 19 nt, Artificial Sequence
  Description of Artificial Sequence: Synthetic oligonucleotide
gugauugaugcauaaggug

SEQ ID NO: 1236784 - RNA, 19 nt, Artificial Sequence
  Description of Artificial Sequence: Synthetic oligonucleotide
gaugcauaaggugaugaug

SEQ ID NO: 1236785 - RNA, 19 nt, Artificial Sequence
  Description of Artificial Sequence: Synthetic oligonucleotide
gagauaaccacugcugaag

SEQ ID NO: 1236786 - RNA, 19 nt, Artificial Sequence
  Description of Artificial Sequence: Synthetic oligonucleotide
gaaagauggagcucggaga

SEQ ID NO: 1236787 - RNA, 19 nt, Artificial Sequence
  Description of Artificial Sequence: Synthetic oligonucleotide
ugcagcacgcuauuaaaca

SEQ ID NO: 1236788 - RNA, 19 nt, Artificial Sequence
  Description of Artificial Sequence: Synthetic oligonucleotide
gacguguccaauaucuccg

SEQ ID NO: 1236789 - RNA, 19 nt, Artificial Sequence
  Description of Artificial Sequence: Synthetic oligonucleotide
ggagaugucgcacagcugc

SEQ ID NO: 1236790 - RNA, 19 nt, Artificial Sequence
  Description of Artificial Sequence: Synthetic oligonucleotide
ugguauguucugcacagca

SEQ ID NO: 1236791 - RNA, 19 nt, Artificial Sequence
  Description of Artificial Sequence: Synthetic oligonucleotide
guauacugaaugaccaugg

SEQ ID NO: 1236792 - RNA, 19 nt, Artificial Sequence
  Description of Artificial Sequence: Synthetic oligonucleotide
gaugucaucccacggaauc

SEQ ID NO: 1236793 - RNA, 19 nt, Artificial Sequence
  Description of Artificial Sequence: Synthetic oligonucleotide
aaccgaaggcccugacucc

SEQ ID NO: 1236794 - RNA, 19 nt, Artificial Sequence
  Description of Artificial Sequence: Synthetic oligonucleotide
aauaauggcgccaggcucu

SEQ ID NO: 1236795 - RNA, 19 nt, Artificial Sequence
  Description of Artificial Sequence: Synthetic oligonucleotide
ucguagaaggaugaaaaga

SEQ ID NO: 1236796 - RNA, 19 nt, Artificial Sequence
  Description of Artificial Sequence: Synthetic oligonucleotide
aggcggaagauccaucugg

SEQ ID NO: 1236797 - RNA, 19 nt, Artificial Sequence
  Description of Artificial Sequence: Synthetic oligonucleotide
uuagagacguguccaauau

SEQ ID NO: 1236798 - RNA, 19 nt, Artificial Sequence
  Description of Artificial Sequence: Synthetic oligonucleotide
cugaacucacggcugaucc

SEQ ID NO: 1236799 - RNA, 19 nt, Artificial Sequence
  Description of Artificial Sequence: Synthetic oligonucleotide
ucguauuuccuuaaacaau

SEQ ID NO: 1236800 - RNA, 19 nt, Artificial Sequence
  Description of Artificial Sequence: Synthetic oligonucleotide
uguacggagacuccccucu

SEQ ID NO: 1236801 - RNA, 19 nt, Artificial Sequence
  Description of Artificial Sequence: Synthetic oligonucleotide
auacacauaucugaccauc

SEQ ID NO: 1236802 - RNA, 19 nt, Artificial Sequence
  Description of Artificial Sequence: Synthetic oligonucleotide
guaggaaaacugcucguag

SEQ ID NO: 1236803 - RNA, 19 nt, Artificial Sequence
  Description of Artificial Sequence: Synthetic oligonucleotide
agaaucgggaaucuccaca

SEQ ID NO: 1236804 - RNA, 19 nt, Artificial Sequence
  Description of Artificial Sequence: Synthetic oligonucleotide
agagacguguccaauaucu

SEQ ID NO: 1236805 - RNA, 19 nt, Artificial Sequence
  Description of Artificial Sequence: Synthetic oligonucleotide
ugucugggaaagauaugag

SEQ ID NO: 1236806 - RNA, 19 nt, Artificial Sequence
  Description of Artificial Sequence: Synthetic oligonucleotide
aguugacucugugaaggcc

SEQ ID NO: 1236807 - RNA, 19 nt, Artificial Sequence
  Description of Artificial Sequence: Synthetic oligonucleotide
cuugaacuucggaucagcc

SEQ ID NO: 1236808 - RNA, 19 nt, Artificial Sequence
  Description of Artificial Sequence: Synthetic oligonucleotide
uaagggucuggcagcaaag

SEQ ID NO: 1236809 - RNA, 19 nt, Artificial Sequence
  Description of Artificial Sequence: Synthetic oligonucleotide
caauguaaucggaaaucag

SEQ ID NO: 1236810 - RNA, 19 nt, Artificial Sequence
  Description of Artificial Sequence: Synthetic oligonucleotide
cuucacuuugggaggaagc

SEQ ID NO: 1236811 - RNA, 19 nt, Artificial Sequence
  Description of Artificial Sequence: Synthetic oligonucleotide
uacacauaucugaccaucu

SEQ ID NO: 1236812 - RNA, 19 nt, Artificial Sequence
  Description of Artificial Sequence: Synthetic oligonucleotide
guaaucggaaaucagcuua

SEQ ID NO: 1236813 - RNA, 19 nt, Artificial Sequence
  Description of Artificial Sequence: Synthetic oligonucleotide
caaccgaaggcccugacuc

SEQ ID NO: 1236814 - RNA, 19 nt, Artificial Sequence
  Description of Artificial Sequence: Synthetic oligonucleotide
cucaauaauggcgccaggc

SEQ ID NO: 1236815 - RNA, 19 nt, Artificial Sequence
  Description of Artificial Sequence: Synthetic oligonucleotide
cugggagguauacugaaug

SEQ ID NO: 1236816 - RNA, 19 nt, Artificial Sequence
  Description of Artificial Sequence: Synthetic oligonucleotide
uccgagaacugcaacugcu

SEQ ID NO: 1236817 - RNA, 19 nt, Artificial Sequence
  Description of Artificial Sequence: Synthetic oligonucleotide
uagcugaaaccaaauccug

SEQ ID NO: 1236818 - RNA, 19 nt, Artificial Sequence
  Description of Artificial Sequence: Synthetic oligonucleotide
ucugaggacgucucguugu

SEQ ID NO: 1236819 - RNA, 19 nt, Artificial Sequence
  Description of Artificial Sequence: Synthetic oligonucleotide
gacgucucguugucgaugc

SEQ ID NO: 1236820 - RNA, 19 nt, Artificial Sequence
  Description of Artificial Sequence: Synthetic oligonucleotide
acuguucaaauguccacca

SEQ ID NO: 1236821 - RNA, 19 nt, Artificial Sequence
  Description of Artificial Sequence: Synthetic oligonucleotide
uccuguaacaucagaccgu

SEQ ID NO: 1236822 - RNA, 19 nt, Artificial Sequence
  Description of Artificial Sequence: Synthetic oligonucleotide
uccucaacauacugaauaa

SEQ ID NO: 1236823 - RNA, 19 nt, Artificial Sequence
  Description of Artificial Sequence: Synthetic oligonucleotide
auguaaucggaaaucagcu

SEQ ID NO: 1236824 - RNA, 19 nt, Artificial Sequence
  Description of Artificial Sequence: Synthetic oligonucleotide
uuuggagcugggcacgaga

SEQ ID NO: 1236825 - RNA, 19 nt, Artificial Sequence
  Description of Artificial Sequence: Synthetic oligonucleotide
ucgggaaucuccacaacaa

SEQ ID NO: 1236826 - RNA, 19 nt, Artificial Sequence
  Description of Artificial Sequence: Synthetic oligonucleotide
uuucaguuagagacguguc

SEQ ID NO: 1236827 - RNA, 19 nt, Artificial Sequence
  Description of Artificial Sequence: Synthetic oligonucleotide
ugucgaugcucucaccaca

SEQ ID NO: 1236828 - RNA, 19 nt, Artificial Sequence
  Description of Artificial Sequence: Synthetic oligonucleotide
uugaugcauaaggugauga

SEQ ID NO: 1236829 - RNA, 19 nt, Artificial Sequence
  Description of Artificial Sequence: Synthetic oligonucleotide
auggaacacacggggagcc

SEQ ID NO: 1236830 - RNA, 19 nt, Artificial Sequence
  Description of Artificial Sequence: Synthetic oligonucleotide
aucggaaaucagcuuagcu

SEQ ID NO: 1236831 - RNA, 19 nt, Artificial Sequence
  Description of Artificial Sequence: Synthetic oligonucleotide
ugagauaaccacugcugaa

SEQ ID NO: 1236832 - RNA, 19 nt, Artificial Sequence
  Description of Artificial Sequence: Synthetic oligonucleotide
aucuccgagaacugcaacu

SEQ ID NO: 1236833 - RNA, 19 nt, Artificial Sequence
  Description of Artificial Sequence: Synthetic oligonucleotide
guugucgaugcucucacca

SEQ ID NO: 1236834 - RNA, 19 nt, Artificial Sequence
  Description of Artificial Sequence: Synthetic oligonucleotide
ucuccgagaacugcaacug

SEQ ID NO: 1236835 - RNA, 19 nt, Artificial Sequence
  Description of Artificial Sequence: Synthetic oligonucleotide
ugggagguauacugaauga

SEQ ID NO: 1236836 - RNA, 19 nt, Artificial Sequence
  Description of Artificial Sequence: Synthetic oligonucleotide
caauaauggcgccaggcuc

SEQ ID NO: 1236837 - RNA, 19 nt, Artificial Sequence
  Description of Artificial Sequence: Synthetic oligonucleotide
ugacaaggggacaucguau

SEQ ID NO: 1236838 - RNA, 19 nt, Artificial Sequence
  Description of Artificial Sequence: Synthetic oligonucleotide
uuaacagaaucgggaaucu

SEQ ID NO: 1236839 - RNA, 19 nt, Artificial Sequence
  Description of Artificial Sequence: Synthetic oligonucleotide
agucuuucaguuagagacg

SEQ ID NO: 1236840 - RNA, 19 nt, Artificial Sequence
  Description of Artificial Sequence: Synthetic oligonucleotide
cagcacgcuauuaaacagc

SEQ ID NO: 1236841 - RNA, 19 nt, Artificial Sequence
  Description of Artificial Sequence: Synthetic oligonucleotide
ucuugagaggccaggccac

SEQ ID NO: 1236842 - RNA, 19 nt, Artificial Sequence
  Description of Artificial Sequence: Synthetic oligonucleotide
auaaggugaugaugucauc

SEQ ID NO: 1236843 - RNA, 19 nt, Artificial Sequence
  Description of Artificial Sequence: Synthetic oligonucleotide
acaugaagcaguggaguag

SEQ ID NO: 1236844 - RNA, 19 nt, Artificial Sequence
  Description of Artificial Sequence: Synthetic oligonucleotide
cucacggcugaucccaucc

SEQ ID NO: 1236845 - RNA, 19 nt, Artificial Sequence
  Description of Artificial Sequence: Synthetic oligonucleotide
caagcuagaugcucuggug

SEQ ID NO: 1236846 - RNA, 19 nt, Artificial Sequence
  Description of Artificial Sequence: Synthetic oligonucleotide
aacaucagaccguccucca

SEQ ID NO: 1236847 - RNA, 19 nt, Artificial Sequence
  Description of Artificial Sequence: Synthetic oligonucleotide
cacggaaucucagcaaccg

SEQ ID NO: 1236848 - RNA, 19 nt, Artificial Sequence
  Description of Artificial Sequence: Synthetic oligonucleotide
ugaacucacggcugauccc

SEQ ID NO: 1236849 - RNA, 19 nt, Artificial Sequence
  Description of Artificial Sequence: Synthetic oligonucleotide
aaggcgaguugacucugug

SEQ ID NO: 1236850 - RNA, 19 nt, Artificial Sequence
  Description of Artificial Sequence: Synthetic oligonucleotide
aacugcucguagaaggaug

SEQ ID NO: 1236851 - RNA, 19 nt, Artificial Sequence
  Description of Artificial Sequence: Synthetic oligonucleotide
agcucaauaauggcgccag

SEQ ID NO: 1236852 - RNA, 19 nt, Artificial Sequence
  Description of Artificial Sequence: Synthetic oligonucleotide
uguaaucggaaaucagcuu

SEQ ID NO: 1236853 - RNA, 19 nt, Artificial Sequence
  Description of Artificial Sequence: Synthetic oligonucleotide
ugaugcauaaggugaugau

SEQ ID NO: 1236854 - RNA, 19 nt, Artificial Sequence
  Description of Artificial Sequence: Synthetic oligonucleotide
gauaugagugucugaggaa

SEQ ID NO: 1236855 - RNA, 19 nt, Artificial Sequence
  Description of Artificial Sequence: Synthetic oligonucleotide
ucuguacggagacuccccu

SEQ ID NO: 1236856 - RNA, 19 nt, Artificial Sequence
  Description of Artificial Sequence: Synthetic oligonucleotide
gguuugagggcaucgggag

SEQ ID NO: 1236857 - RNA, 19 nt, Artificial Sequence
  Description of Artificial Sequence: Synthetic oligonucleotide
uagagaggaaggcgaguug

SEQ ID NO: 1236858 - RNA, 19 nt, Artificial Sequence
  Description of Artificial Sequence: Synthetic oligonucleotide
acuucggaucagccuuucc

SEQ ID NO: 1236859 - RNA, 19 nt, Artificial Sequence
  Description of Artificial Sequence: Synthetic oligonucleotide
uauacacauaucugaccau

SEQ ID NO: 1236860 - RNA, 19 nt, Artificial Sequence
  Description of Artificial Sequence: Synthetic oligonucleotide
agggcaucgggagaccagc

SEQ ID NO: 1236861 - RNA, 19 nt, Artificial Sequence
  Description of Artificial Sequence: Synthetic oligonucleotide
agagaggaaggcgaguuga

SEQ ID NO: 1236862 - RNA, 19 nt, Artificial Sequence
  Description of Artificial Sequence: Synthetic oligonucleotide
gguauacugaaugaccaug

SEQ ID NO: 1236863 - RNA, 19 nt, Artificial Sequence
  Description of Artificial Sequence: Synthetic oligonucleotide
uaggguuugagggcaucgg

SEQ ID NO: 1236864 - RNA, 19 nt, Artificial Sequence
  Description of Artificial Sequence: Synthetic oligonucleotide
ggaaagauaugagugucug

SEQ ID NO: 1236865 - RNA, 19 nt, Artificial Sequence
  Description of Artificial Sequence: Synthetic oligonucleotide
uuccacuuuugguauguuc

SEQ ID NO: 1236866 - RNA, 19 nt, Artificial Sequence
  Description of Artificial Sequence: Synthetic oligonucleotide
acggagacuccccucucgg

SEQ ID NO: 1236867 - RNA, 19 nt, Artificial Sequence
  Description of Artificial Sequence: Synthetic oligonucleotide
caucccacggaaucucagc

SEQ ID NO: 1236868 - RNA, 19 nt, Artificial Sequence
  Description of Artificial Sequence: Synthetic oligonucleotide
uugacucugugaaggccug

SEQ ID NO: 1236869 - RNA, 19 nt, Artificial Sequence
  Description of Artificial Sequence: Synthetic oligonucleotide
ucagguccucuguacggag

SEQ ID NO: 1236870 - RNA, 19 nt, Artificial Sequence
  Description of Artificial Sequence: Synthetic oligonucleotide
ucuuccacuuuugguaugu

SEQ ID NO: 1236871 - RNA, 19 nt, Artificial Sequence
  Description of Artificial Sequence: Synthetic oligonucleotide
augcucucaccacagucug

SEQ ID NO: 1236872 - RNA, 19 nt, Artificial Sequence
  Description of Artificial Sequence: Synthetic oligonucleotide
agcagacugcuggacagac

SEQ ID NO: 1236873 - RNA, 19 nt, Artificial Sequence
  Description of Artificial Sequence: Synthetic oligonucleotide
caacauacugaauaagggu

SEQ ID NO: 1236874 - RNA, 19 nt, Artificial Sequence
  Description of Artificial Sequence: Synthetic oligonucleotide
cuaggguuugagggcaucg

SEQ ID NO: 1236875 - RNA, 19 nt, Artificial Sequence
  Description of Artificial Sequence: Synthetic oligonucleotide
cucuguacggagacucccc

SEQ ID NO: 1236876 - RNA, 19 nt, Artificial Sequence
  Description of Artificial Sequence: Synthetic oligonucleotide
aaaagacuuuguccccgaa

SEQ ID NO: 1236877 - RNA, 19 nt, Artificial Sequence
  Description of Artificial Sequence: Synthetic oligonucleotide
uaucuccgagaacugcaac

SEQ ID NO: 1236878 - RNA, 19 nt, Artificial Sequence
  Description of Artificial Sequence: Synthetic oligonucleotide
cugcagcacgcuauuaaac

SEQ ID NO: 1236879 - RNA, 19 nt, Artificial Sequence
  Description of Artificial Sequence: Synthetic oligonucleotide
gaaaagacuuuguccccga

SEQ ID NO: 1236880 - RNA, 19 nt, Artificial Sequence
  Description of Artificial Sequence: Synthetic oligonucleotide
agaccagccauuggaccgc

SEQ ID NO: 1236881 - RNA, 19 nt, Artificial Sequence
  Description of Artificial Sequence: Synthetic oligonucleotide
ucggagacaacuucuucuu

SEQ ID NO: 1236882 - RNA, 19 nt, Artificial Sequence
  Description of Artificial Sequence: Synthetic oligonucleotide
uugucgaugcucucaccac

SEQ ID NO: 1236883 - RNA, 19 nt, Artificial Sequence
  Description of Artificial Sequence: Synthetic oligonucleotide
gaagauccaucuggggaag

SEQ ID NO: 1236884 - RNA, 19 nt, Artificial Sequence
  Description of Artificial Sequence: Synthetic oligonucleotide
gaggacgucucguugucga

SEQ ID NO: 1236885 - RNA, 19 nt, Artificial Sequence
  Description of Artificial Sequence: Synthetic oligonucleotide
gaacucacggcugauccca

SEQ ID NO: 1236886 - RNA, 19 nt, Artificial Sequence
  Description of Artificial Sequence: Synthetic oligonucleotide
acugaacucacggcugauc

SEQ ID NO: 1236887 - RNA, 19 nt, Artificial Sequence
  Description of Artificial Sequence: Synthetic oligonucleotide
gcagcacgcuauuaaacag

SEQ ID NO: 1236888 - RNA, 19 nt, Artificial Sequence
  Description of Artificial Sequence: Synthetic oligonucleotide
ucuuucaguuagagacgug

SEQ ID NO: 1236889 - RNA, 19 nt, Artificial Sequence
  Description of Artificial Sequence: Synthetic oligonucleotide
ucugggagguauacugaau

SEQ ID NO: 1236890 - RNA, 19 nt, Artificial Sequence
  Description of Artificial Sequence: Synthetic oligonucleotide
gggaaucuccacaacaaug

SEQ ID NO: 1236891 - RNA, 19 nt, Artificial Sequence
  Description of Artificial Sequence: Synthetic oligonucleotide
guuagagacguguccaaua

SEQ ID NO: 1236892 - RNA, 19 nt, Artificial Sequence
  Description of Artificial Sequence: Synthetic oligonucleotide
gacuuuguccccgaacguc

SEQ ID NO: 1236893 - RNA, 19 nt, Artificial Sequence
  Description of Artificial Sequence: Synthetic oligonucleotide
uacagauccuccucugcua

SEQ ID NO: 1236894 - RNA, 19 nt, Artificial Sequence
  Description of Artificial Sequence: Synthetic oligonucleotide
gaccacugaacucacggcu

SEQ ID NO: 1236895 - RNA, 19 nt, Artificial Sequence
  Description of Artificial Sequence: Synthetic oligonucleotide
cacgagaaccaccagugga

SEQ ID NO: 1236896 - RNA, 19 nt, Artificial Sequence
  Description of Artificial Sequence: Synthetic oligonucleotide
gcaucagguccucuguacg

SEQ ID NO: 1236897 - RNA, 19 nt, Artificial Sequence
  Description of Artificial Sequence: Synthetic oligonucleotide
agaaggaugaaaagacuuu

SEQ ID NO: 1236898 - RNA, 19 nt, Artificial Sequence
  Description of Artificial Sequence: Synthetic oligonucleotide
gcucuggugaguuccagug

SEQ ID NO: 1236899 - RNA, 19 nt, Artificial Sequence
  Description of Artificial Sequence: Synthetic oligonucleotide
agauggagcucggagacaa

SEQ ID NO: 1236900 - RNA, 19 nt, Artificial Sequence
  Description of Artificial Sequence: Synthetic oligonucleotide
agcacgcuauuaaacagcu

SEQ ID NO: 1236901 - RNA, 19 nt, Artificial Sequence
  Description of Artificial Sequence: Synthetic oligonucleotide
ucgggagaccagccauugg

SEQ ID NO: 1236902 - RNA, 19 nt, Artificial Sequence
  Description of Artificial Sequence: Synthetic oligonucleotide
aagcuccgcgcaucagguc

SEQ ID NO: 1236903 - RNA, 19 nt, Artificial Sequence
  Description of Artificial Sequence: Synthetic oligonucleotide
aguaggaaaacugcucgua

SEQ ID NO: 1236904 - RNA, 19 nt, Artificial Sequence
  Description of Artificial Sequence: Synthetic oligonucleotide
ggaagcuggaacccaagca

SEQ ID NO: 1236905 - RNA, 19 nt, Artificial Sequence
  Description of Artificial Sequence: Synthetic oligonucleotide
ugaggacgucucguugucg

SEQ ID NO: 1236906 - RNA, 19 nt, Artificial Sequence
  Description of Artificial Sequence: Synthetic oligonucleotide
uucaaaccuuuuguucucu

SEQ ID NO: 1236907 - RNA, 19 nt, Artificial Sequence
  Description of Artificial Sequence: Synthetic oligonucleotide
cagcaaacuccaugacagg

SEQ ID NO: 1236908 - RNA, 19 nt, Artificial Sequence
  Description of Artificial Sequence: Synthetic oligonucleotide
ccgaccacugaacucacgg

SEQ ID NO: 1236909 - RNA, 19 nt, Artificial Sequence
  Description of Artificial Sequence: Synthetic oligonucleotide
caaggggacaucguauuuc

SEQ ID NO: 1236910 - RNA, 19 nt, Artificial Sequence
  Description of Artificial Sequence: Synthetic oligonucleotide
ggcgaguugacucugugaa

SEQ ID NO: 1236911 - RNA, 19 nt, Artificial Sequence
  Description of Artificial Sequence: Synthetic oligonucleotide
cuguucccaugacaagggg

SEQ ID NO: 1236912 - RNA, 19 nt, Artificial Sequence
  Description of Artificial Sequence: Synthetic oligonucleotide
cugggcacgagaaccacca

SEQ ID NO: 1236913 - RNA, 19 nt, Artificial Sequence
  Description of Artificial Sequence: Synthetic oligonucleotide
gccuguucccaugacaagg

SEQ ID NO: 1236914 - RNA, 19 nt, Artificial Sequence
  Description of Artificial Sequence: Synthetic oligonucleotide
ggcacgagaaccaccagug

SEQ ID NO: 1236915 - RNA, 19 nt, Artificial Sequence
  Description of Artificial Sequence: Synthetic oligonucleotide
auggagcucggagacaacu

SEQ ID NO: 1236916 - RNA, 19 nt, Artificial Sequence
  Description of Artificial Sequence: Synthetic oligonucleotide
gauaaccacugcugaagcu

SEQ ID NO: 1236917 - RNA, 19 nt, Artificial Sequence
  Description of Artificial Sequence: Synthetic oligonucleotide
cuuucaguuagagacgugu

SEQ ID NO: 1236918 - RNA, 19 nt, Artificial Sequence
  Description of Artificial Sequence: Synthetic oligonucleotide
uuccagugcagaugaggaa

SEQ ID NO: 1236919 - RNA, 19 nt, Artificial Sequence
  Description of Artificial Sequence: Synthetic oligonucleotide
ugaugucaucccacggaau

SEQ ID NO: 1236920 - RNA, 19 nt, Artificial Sequence
  Description of Artificial Sequence: Synthetic oligonucleotide
acugcucguagaaggauga

SEQ ID NO: 1236921 - RNA, 19 nt, Artificial Sequence
  Description of Artificial Sequence: Synthetic oligonucleotide
ggaagguagagaggaaggc

SEQ ID NO: 1236922 - RNA, 19 nt, Artificial Sequence
  Description of Artificial Sequence: Synthetic oligonucleotide
gaacccaagcacagcuugc

SEQ ID NO: 1236923 - RNA, 19 nt, Artificial Sequence
  Description of Artificial Sequence: Synthetic oligonucleotide
ggaaucucagcaaccgaag

SEQ ID NO: 1236924 - RNA, 19 nt, Artificial Sequence
  Description of Artificial Sequence: Synthetic oligonucleotide
accauguccagcagugcag

SEQ ID NO: 1236925 - RNA, 19 nt, Artificial Sequence
  Description of Artificial Sequence: Synthetic oligonucleotide
gguauguucugcacagcag

SEQ ID NO: 1236926 - RNA, 19 nt, Artificial Sequence
  Description of Artificial Sequence: Synthetic oligonucleotide
gccuuguaaaucauuaaca

SEQ ID NO: 1236927 - RNA, 19 nt, Artificial Sequence
  Description of Artificial Sequence: Synthetic oligonucleotide
agcaaccgaaggcccugac

SEQ ID NO: 1236928 - RNA, 19 nt, Artificial Sequence
  Description of Artificial Sequence: Synthetic oligonucleotide
gacaucguauuuccuuaaa

SEQ ID NO: 1236929 - RNA, 19 nt, Artificial Sequence
  Description of Artificial Sequence: Synthetic oligonucleotide
gaccgcuccagaaaccuuc

SEQ ID NO: 1236930 - RNA, 19 nt, Artificial Sequence
  Description of Artificial Sequence: Synthetic oligonucleotide
uccccgaacgucugugacu

SEQ ID NO: 1236931 - RNA, 19 nt, Artificial Sequence
  Description of Artificial Sequence: Synthetic oligonucleotide
cucggagacaacuucuucu

SEQ ID NO: 1236932 - RNA, 19 nt, Artificial Sequence
  Description of Artificial Sequence: Synthetic oligonucleotide
cuccgagaacugcaacugc

SEQ ID NO: 1236933 - RNA, 19 nt, Artificial Sequence
  Description of Artificial Sequence: Synthetic oligonucleotide
accaguggaagugcgggcu

SEQ ID NO: 1236934 - RNA, 19 nt, Artificial Sequence
  Description of Artificial Sequence: Synthetic oligonucleotide
gagacuccccucucggcca

SEQ ID NO: 1236935 - RNA, 19 nt, Artificial Sequence
  Description of Artificial Sequence: Synthetic oligonucleotide
acggaaucucagcaaccga

SEQ ID NO: 1236936 - RNA, 19 nt, Artificial Sequence
  Description of Artificial Sequence: Synthetic oligonucleotide
ugaucccauccucaacaua

SEQ ID NO: 1236937 - RNA, 19 nt, Artificial Sequence
  Description of Artificial Sequence: Synthetic oligonucleotide
aggcgaguugacucuguga

SEQ ID NO: 1236938 - RNA, 19 nt, Artificial Sequence
  Description of Artificial Sequence: Synthetic oligonucleotide
auaaagccgacagccagua

SEQ ID NO: 1236939 - RNA, 19 nt, Artificial Sequence
  Description of Artificial Sequence: Synthetic oligonucleotide
augucgcacagcugcucag

SEQ ID NO: 1236940 - RNA, 19 nt, Artificial Sequence
  Description of Artificial Sequence: Synthetic oligonucleotide
uggagcucggagacaacuu

SEQ ID NO: 1236941 - RNA, 19 nt, Artificial Sequence
  Description of Artificial Sequence: Synthetic oligonucleotide
ucaaaccuuuuguucucuu

SEQ ID NO: 1236942 - RNA, 19 nt, Artificial Sequence
  Description of Artificial Sequence: Synthetic oligonucleotide
aaccgaccacugaacucac

SEQ ID NO: 1236943 - RNA, 19 nt, Artificial Sequence
  Description of Artificial Sequence: Synthetic oligonucleotide
aggccaggagaugucgcac

SEQ ID NO: 1236944 - RNA, 19 nt, Artificial Sequence
  Description of Artificial Sequence: Synthetic oligonucleotide
gaacgucugugacucagcu

SEQ ID NO: 1236945 - RNA, 19 nt, Artificial Sequence
  Description of Artificial Sequence: Synthetic oligonucleotide
acaaggggacaucguauuu

SEQ ID NO: 1236946 - RNA, 19 nt, Artificial Sequence
  Description of Artificial Sequence: Synthetic oligonucleotide
acgagaaccaccaguggaa

SEQ ID NO: 1236947 - RNA, 19 nt, Artificial Sequence
  Description of Artificial Sequence: Synthetic oligonucleotide
cggaaaucagcuuagcuga

SEQ ID NO: 1236948 - RNA, 19 nt, Artificial Sequence
  Description of Artificial Sequence: Synthetic oligonucleotide
cugggaaagauaugagugu

SEQ ID NO: 1236949 - RNA, 19 nt, Artificial Sequence
  Description of Artificial Sequence: Synthetic oligonucleotide
ucccacggaaucucagcaa

SEQ ID NO: 1236950 - RNA, 19 nt, Artificial Sequence
  Description of Artificial Sequence: Synthetic oligonucleotide
ggcggaagauccaucuggg

SEQ ID NO: 1236951 - RNA, 19 nt, Artificial Sequence
  Description of Artificial Sequence: Synthetic oligonucleotide
aguuagagacguguccaau

SEQ ID NO: 1236952 - RNA, 19 nt, Artificial Sequence
  Description of Artificial Sequence: Synthetic oligonucleotide
acguguccaauaucuccga

SEQ ID NO: 1236953 - RNA, 19 nt, Artificial Sequence
  Description of Artificial Sequence: Synthetic oligonucleotide
gauugaugcauaaggugau

SEQ ID NO: 1236954 - RNA, 19 nt, Artificial Sequence
  Description of Artificial Sequence: Synthetic oligonucleotide
aucgggagaccagccauug

SEQ ID NO: 1236955 - RNA, 19 nt, Artificial Sequence
  Description of Artificial Sequence: Synthetic oligonucleotide
gcuugcuucagccaagcua

SEQ ID NO: 1236956 - RNA, 19 nt, Artificial Sequence
  Description of Artificial Sequence: Synthetic oligonucleotide
guuugagggcaucgggaga

SEQ ID NO: 1236957 - RNA, 19 nt, Artificial Sequence
  Description of Artificial Sequence: Synthetic oligonucleotide
gggagguauacugaaugac

SEQ ID NO: 1236958 - RNA, 19 nt, Artificial Sequence
  Description of Artificial Sequence: Synthetic oligonucleotide
uccuuuuguggugcacaug

SEQ ID NO: 1236959 - RNA, 19 nt, Artificial Sequence
  Description of Artificial Sequence: Synthetic oligonucleotide
cauuggaccgcuccagaaa

SEQ ID NO: 1236960 - RNA, 19 nt, Artificial Sequence
  Description of Artificial Sequence: Synthetic oligonucleotide
caacaauguaaucggaaau

SEQ ID NO: 1236961 - RNA, 19 nt, Artificial Sequence
  Description of Artificial Sequence: Synthetic oligonucleotide
agccccugcaggcggaaga

SEQ ID NO: 1236962 - RNA, 19 nt, Artificial Sequence
  Description of Artificial Sequence: Synthetic oligonucleotide
ugcaggcggaagauccauc

SEQ ID NO: 1236963 - RNA, 19 nt, Artificial Sequence
  Description of Artificial Sequence: Synthetic oligonucleotide
gcagcaaaggucuaggguu

SEQ ID NO: 1236964 - RNA, 19 nt, Artificial Sequence
  Description of Artificial Sequence: Synthetic oligonucleotide
cgacagccaguacagaucc

SEQ ID NO: 1236965 - RNA, 19 nt, Artificial Sequence
  Description of Artificial Sequence: Synthetic oligonucleotide
gacaaggggacaucguauu

SEQ ID NO: 1236966 - RNA, 19 nt, Artificial Sequence
  Description of Artificial Sequence: Synthetic oligonucleotide
gagacguguccaauaucuc

SEQ ID NO: 1236967 - RNA, 19 nt, Artificial Sequence
  Description of Artificial Sequence: Synthetic oligonucleotide
auaucuccgagaacugcaa

SEQ ID NO: 1236968 - RNA, 19 nt, Artificial Sequence
  Description of Artificial Sequence: Synthetic oligonucleotide
ccaauaucuccgagaacug

SEQ ID NO: 1236969 - RNA, 19 nt, Artificial Sequence
  Description of Artificial Sequence: Synthetic oligonucleotide
guccccgaacgucugugac

SEQ ID NO: 1236970 - RNA, 19 nt, Artificial Sequence
  Description of Artificial Sequence: Synthetic oligonucleotide
agcuuagcugaaaccaaau

SEQ ID NO: 1236971 - RNA, 19 nt, Artificial Sequence
  Description of Artificial Sequence: Synthetic oligonucleotide
gcggaagauccaucugggg

SEQ ID NO: 1236972 - RNA, 19 nt, Artificial Sequence
  Description of Artificial Sequence: Synthetic oligonucleotide
uucccaugacaaggggaca

SEQ ID NO: 1236973 - RNA, 19 nt, Artificial Sequence
  Description of Artificial Sequence: Synthetic oligonucleotide
ucuaggguuugagggcauc

SEQ ID NO: 1236974 - RNA, 19 nt, Artificial Sequence
  Description of Artificial Sequence: Synthetic oligonucleotide
cacggcugaucccauccuc

SEQ ID NO: 1236975 - RNA, 19 nt, Artificial Sequence
  Description of Artificial Sequence: Synthetic oligonucleotide
cuguacggagacuccccuc

SEQ ID NO: 1236976 - RNA, 19 nt, Artificial Sequence
  Description of Artificial Sequence: Synthetic oligonucleotide
cccacggaaucucagcaac

SEQ ID NO: 1236977 - RNA, 19 nt, Artificial Sequence
  Description of Artificial Sequence: Synthetic oligonucleotide
guccaauaucuccgagaac

SEQ ID NO: 1236978 - RNA, 19 nt, Artificial Sequence
  Description of Artificial Sequence: Synthetic oligonucleotide
gggacaucguauuuccuua

SEQ ID NO: 1236979 - RNA, 19 nt, Artificial Sequence
  Description of Artificial Sequence: Synthetic oligonucleotide
accgaaggcccugacuccu

SEQ ID NO: 1236980 - RNA, 19 nt, Artificial Sequence
  Description of Artificial Sequence: Synthetic oligonucleotide
gaagcuccgcgcaucaggu

SEQ ID NO: 1236981 - RNA, 19 nt, Artificial Sequence
  Description of Artificial Sequence: Synthetic oligonucleotide
caggcggaagauccaucug

SEQ ID NO: 1236982 - RNA, 19 nt, Artificial Sequence
  Description of Artificial Sequence: Synthetic oligonucleotide
caucagaccguccuccacu

SEQ ID NO: 1236983 - RNA, 19 nt, Artificial Sequence
  Description of Artificial Sequence: Synthetic oligonucleotide
gcgaguugacucugugaag

SEQ ID NO: 1236984 - RNA, 19 nt, Artificial Sequence
  Description of Artificial Sequence: Synthetic oligonucleotide
acggcugaucccauccuca

SEQ ID NO: 1236985 - RNA, 19 nt, Artificial Sequence
  Description of Artificial Sequence: Synthetic oligonucleotide
agugcgggcuggaaaggcu

SEQ ID NO: 1236986 - RNA, 19 nt, Artificial Sequence
  Description of Artificial Sequence: Synthetic oligonucleotide
ggaaaggcuuggccugaag

SEQ ID NO: 1236987 - RNA, 19 nt, Artificial Sequence
  Description of Artificial Sequence: Synthetic oligonucleotide
uccagucacucagcuugug

SEQ ID NO: 1236988 - RNA, 19 nt, Artificial Sequence
  Description of Artificial Sequence: Synthetic oligonucleotide
ggugguguccagucacuca

SEQ ID NO: 1236989 - RNA, 19 nt, Artificial Sequence
  Description of Artificial Sequence: Synthetic oligonucleotide
ccuguaacaucagaccguc

SEQ ID NO: 1236990 - RNA, 19 nt, Artificial Sequence
  Description of Artificial Sequence: Synthetic oligonucleotide
ucagaccguccuccacuuc

SEQ ID NO: 1236991 - RNA, 19 nt, Artificial Sequence
  Description of Artificial Sequence: Synthetic oligonucleotide
ggucuaggguuugagggca

SEQ ID NO: 1236992 - RNA, 19 nt, Artificial Sequence
  Description of Artificial Sequence: Synthetic oligonucleotide
gcucaauaauggcgccagg

SEQ ID NO: 1236993 - RNA, 19 nt, Artificial Sequence
  Description of Artificial Sequence: Synthetic oligonucleotide
gggaaucugggagguauac

SEQ ID NO: 1236994 - RNA, 19 nt, Artificial Sequence
  Description of Artificial Sequence: Synthetic oligonucleotide
ccgacagccaguacagauc

SEQ ID NO: 1236995 - RNA, 19 nt, Artificial Sequence
  Description of Artificial Sequence: Synthetic oligonucleotide
guagagaggaaggcgaguu

SEQ ID NO: 1236996 - RNA, 19 nt, Artificial Sequence
  Description of Artificial Sequence: Synthetic oligonucleotide
caguuagagacguguccaa

SEQ ID NO: 1236997 - RNA, 19 nt, Artificial Sequence
  Description of Artificial Sequence: Synthetic oligonucleotide
cuuuggagcugggcacgag

SEQ ID NO: 1236998 - RNA, 19 nt, Artificial Sequence
  Description of Artificial Sequence: Synthetic oligonucleotide
aggacgucucguugucgau

SEQ ID NO: 1236999 - RNA, 19 nt, Artificial Sequence
  Description of Artificial Sequence: Synthetic oligonucleotide
caugacaaggggacaucgu

SEQ ID NO: 1237000 - RNA, 19 nt, Artificial Sequence
  Description of Artificial Sequence: Synthetic oligonucleotide
ggacgucucguugucgaug

SEQ ID NO: 1237001 - RNA, 19 nt, Artificial Sequence
  Description of Artificial Sequence: Synthetic oligonucleotide
gcaauaaagccgacagcca

SEQ ID NO: 1237002 - RNA, 19 nt, Artificial Sequence
  Description of Artificial Sequence: Synthetic oligonucleotide
cggaagauccaucugggga

SEQ ID NO: 1237003 - RNA, 19 nt, Artificial Sequence
  Description of Artificial Sequence: Synthetic oligonucleotide
gccaagcuagaugcucugg

SEQ ID NO: 1237004 - RNA, 19 nt, Artificial Sequence
  Description of Artificial Sequence: Synthetic oligonucleotide
ggguuugagggcaucggga

SEQ ID NO: 1237005 - RNA, 19 nt, Artificial Sequence
  Description of Artificial Sequence: Synthetic oligonucleotide
ccgagaacugcaacugcuc

SEQ ID NO: 1237006 - RNA, 19 nt, Artificial Sequence
  Description of Artificial Sequence: Synthetic oligonucleotide
gauggagcucggagacaac

SEQ ID NO: 1237007 - RNA, 19 nt, Artificial Sequence
  Description of Artificial Sequence: Synthetic oligonucleotide
gugcagaaagauggagcuc

SEQ ID NO: 1237008 - RNA, 19 nt, Artificial Sequence
  Description of Artificial Sequence: Synthetic oligonucleotide
guacggagacuccccucuc

SEQ ID NO: 1237009 - RNA, 19 nt, Artificial Sequence
  Description of Artificial Sequence: Synthetic oligonucleotide
ccgaacgucugugacucag

SEQ ID NO: 1237010 - RNA, 19 nt, Artificial Sequence
  Description of Artificial Sequence: Synthetic oligonucleotide
accgaccacugaacucacg

SEQ ID NO: 1237011 - RNA, 19 nt, Artificial Sequence
  Description of Artificial Sequence: Synthetic oligonucleotide
gcaggcggaagauccaucu

SEQ ID NO: 1237012 - RNA, 19 nt, Artificial Sequence
  Description of Artificial Sequence: Synthetic oligonucleotide
gguguccagucacucagcu

SEQ ID NO: 1237013 - RNA, 19 nt, Artificial Sequence
  Description of Artificial Sequence: Synthetic oligonucleotide
cgaccacugaacucacggc

SEQ ID NO: 1237014 - RNA, 19 nt, Artificial Sequence
  Description of Artificial Sequence: Synthetic oligonucleotide
ggggacaucguauuuccuu

SEQ ID NO: 1237015 - RNA, 19 nt, Artificial Sequence
  Description of Artificial Sequence: Synthetic oligonucleotide
aacucacggcugaucccau

SEQ ID NO: 1237016 - RNA, 19 nt, Artificial Sequence
  Description of Artificial Sequence: Synthetic oligonucleotide
ccccgaacgucugugacuc

SEQ ID NO: 1237017 - RNA, 19 nt, Artificial Sequence
  Description of Artificial Sequence: Synthetic oligonucleotide
cggaaucucagcaaccgaa

SEQ ID NO: 1237018 - RNA, 19 nt, Artificial Sequence
  Description of Artificial Sequence: Synthetic oligonucleotide
auaauggcgccaggcucuu

SEQ ID NO: 1237019 - RNA, 19 nt, Artificial Sequence
  Description of Artificial Sequence: Synthetic oligonucleotide
cgaacgucugugacucagc

SEQ ID NO: 1237020 - RNA, 19 nt, Artificial Sequence
  Description of Artificial Sequence: Synthetic oligonucleotide
ggggaagcuggaacccaag

SEQ ID NO: 1237021 - RNA, 19 nt, Artificial Sequence
  Description of Artificial Sequence: Synthetic oligonucleotide
gaacugcagcacgcuauua

SEQ ID NO: 1237022 - RNA, 19 nt, Artificial Sequence
  Description of Artificial Sequence: Synthetic oligonucleotide
ccacaacaauguaaucgga

SEQ ID NO: 1237023 - RNA, 19 nt, Artificial Sequence
  Description of Artificial Sequence: Synthetic oligonucleotide
uaauggcgccaggcucuug

SEQ ID NO: 1237024 - RNA, 19 nt, Artificial Sequence
  Description of Artificial Sequence: Synthetic oligonucleotide
acgucucguugucgaugcu

SEQ ID NO: 1237025 - RNA, 19 nt, Artificial Sequence
  Description of Artificial Sequence: Synthetic oligonucleotide
ccagucacucagcuuguga

SEQ ID NO: 1237026 - RNA, 19 nt, Artificial Sequence
  Description of Artificial Sequence: Synthetic oligonucleotide
gggcacgagaaccaccagu

SEQ ID NO: 1237027 - RNA, 19 nt, Artificial Sequence
  Description of Artificial Sequence: Synthetic oligonucleotide
gggaaagauaugagugucu

SEQ ID NO: 1237028 - RNA, 19 nt, Artificial Sequence
  Description of Artificial Sequence: Synthetic oligonucleotide
ccaguggaagugcgggcug

SEQ ID NO: 1237029 - RNA, 19 nt, Artificial Sequence
  Description of Artificial Sequence: Synthetic oligonucleotide
gccgacagccaguacagau

SEQ ID NO: 1237030 - RNA, 19 nt, Artificial Sequence
  Description of Artificial Sequence: Synthetic oligonucleotide
cagcaugagcccacuggcu

SEQ ID NO: 1237031 - RNA, 19 nt, Artificial Sequence
  Description of Artificial Sequence: Synthetic oligonucleotide
gccgccucucucuucuguc

SEQ ID NO: 1237032 - RNA, 19 nt, Artificial Sequence
  Description of Artificial Sequence: Synthetic oligonucleotide
gcaaccgaaggcccugacu

SEQ ID NO: 1237033 - RNA, 19 nt, Artificial Sequence
  Description of Artificial Sequence: Synthetic oligonucleotide
ccgcgcaucagguccucug

SEQ ID NO: 1237034 - RNA, 19 nt, Artificial Sequence
  Description of Artificial Sequence: Synthetic oligonucleotide
ccauuggaccgcuccagaa

SEQ ID NO: 1237035 - RNA, 19 nt, Artificial Sequence
  Description of Artificial Sequence: Synthetic oligonucleotide
ccaagcuagaugcucuggu

SEQ ID NO: 1237036 - RNA, 19 nt, Artificial Sequence
  Description of Artificial Sequence: Synthetic oligonucleotide
ccaggugcuucagucuuuc

SEQ ID NO: 1237037 - RNA, 19 nt, Artificial Sequence
  Description of Artificial Sequence: Synthetic oligonucleotide
gcaaaggucuaggguuuga

SEQ ID NO: 1237038 - RNA, 19 nt, Artificial Sequence
  Description of Artificial Sequence: Synthetic oligonucleotide
gagcugcaauaaagccgac

SEQ ID NO: 1237039 - RNA, 19 nt, Artificial Sequence
  Description of Artificial Sequence: Synthetic oligonucleotide
ggaacugcagcacgcuauu

SEQ ID NO: 1237040 - RNA, 19 nt, Artificial Sequence
  Description of Artificial Sequence: Synthetic oligonucleotide
gaacuucggaucagccuuu

SEQ ID NO: 1237041 - RNA, 19 nt, Artificial Sequence
  Description of Artificial Sequence: Synthetic oligonucleotide
ccauggagucuccuuugga

SEQ ID NO: 1237042 - RNA, 19 nt, Artificial Sequence
  Description of Artificial Sequence: Synthetic oligonucleotide
cguugucgaugcucucacc

SEQ ID NO: 1237043 - RNA, 19 nt, Artificial Sequence
  Description of Artificial Sequence: Synthetic oligonucleotide
gggugguguccagucacuc

SEQ ID NO: 1237044 - RNA, 19 nt, Artificial Sequence
  Description of Artificial Sequence: Synthetic oligonucleotide
accagccauuggaccgcuc

SEQ ID NO: 1237045 - RNA, 19 nt, Artificial Sequence
  Description of Artificial Sequence: Synthetic oligonucleotide
cgccucucucuucugucag

SEQ ID NO: 1237046 - RNA, 19 nt, Artificial Sequence
  Description of Artificial Sequence: Synthetic oligonucleotide
caucgggagaccagccauu

SEQ ID NO: 1237047 - RNA, 19 nt, Artificial Sequence
  Description of Artificial Sequence: Synthetic oligonucleotide
ccgaaggcccugacuccug

SEQ ID NO: 1237048 - RNA, 19 nt, Artificial Sequence
  Description of Artificial Sequence: Synthetic oligonucleotide
cugcucguagaaggaugaa

SEQ ID NO: 1237049 - RNA, 19 nt, Artificial Sequence
  Description of Artificial Sequence: Synthetic oligonucleotide
ccgccucucucuucuguca

SEQ ID NO: 1237050 - RNA, 19 nt, Artificial Sequence
  Description of Artificial Sequence: Synthetic oligonucleotide
gcuagaugcucuggugagu

SEQ ID NO: 1237051 - RNA, 19 nt, Artificial Sequence
  Description of Artificial Sequence: Synthetic oligonucleotide
ggauggugucugggaaaga

SEQ ID NO: 1237052 - RNA, 19 nt, Artificial Sequence
  Description of Artificial Sequence: Synthetic oligonucleotide
gcacgcuauuaaacagcuc

SEQ ID NO: 1237053 - RNA, 19 nt, Artificial Sequence
  Description of Artificial Sequence: Synthetic oligonucleotide
ccagccgccucucucuucu

SEQ ID NO: 1237054 - RNA, 19 nt, Artificial Sequence
  Description of Artificial Sequence: Synthetic oligonucleotide
gaccagccauuggaccgcu

SEQ ID NO: 1237055 - RNA, 19 nt, Artificial Sequence
  Description of Artificial Sequence: Synthetic oligonucleotide
cuuccacuuuugguauguu

SEQ ID NO: 1237056 - RNA, 19 nt, Artificial Sequence
  Description of Artificial Sequence: Synthetic oligonucleotide
cggcugaucccauccucaa

SEQ ID NO: 1237057 - RNA, 19 nt, Artificial Sequence
  Description of Artificial Sequence: Synthetic oligonucleotide
gcuccgcgcaucagguccu

SEQ ID NO: 1237058 - RNA, 19 nt, Artificial Sequence
  Description of Artificial Sequence: Synthetic oligonucleotide
ggagccccugcaggcggaa

SEQ ID NO: 1237059 - RNA, 19 nt, Artificial Sequence
  Description of Artificial Sequence: Synthetic oligonucleotide
cccgaacgucugugacuca

SEQ ID NO: 1237060 - RNA, 19 nt, Artificial Sequence
  Description of Artificial Sequence: Synthetic oligonucleotide
ggaccgcuccagaaaccuu

SEQ ID NO: 1237061 - RNA, 19 nt, Artificial Sequence
  Description of Artificial Sequence: Synthetic oligonucleotide
cccugacuccuggccugga

SEQ ID NO: 1237062 - RNA, 19 nt, Artificial Sequence
  Description of Artificial Sequence: Synthetic oligonucleotide
aagugaaagaaacaugggc

SEQ ID NO: 1237063 - RNA, 19 nt, Artificial Sequence
  Description of Artificial Sequence: Synthetic oligonucleotide
cuuaguaucaacuugccac

SEQ ID NO: 1237064 - RNA, 19 nt, Artificial Sequence
  Description of Artificial Sequence: Synthetic oligonucleotide
ucacgcaaaacacagaugc

SEQ ID NO: 1237065 - RNA, 19 nt, Artificial Sequence
  Description of Artificial Sequence: Synthetic oligonucleotide
aagaacgggaaccucaaag

SEQ ID NO: 1237066 - RNA, 19 nt, Artificial Sequence
  Description of Artificial Sequence: Synthetic oligonucleotide
uucgguaccuuccacaucc

SEQ ID NO: 1237067 - RNA, 19 nt, Artificial Sequence
  Description of Artificial Sequence: Synthetic oligonucleotide
uucaaaagaccacucaugu

SEQ ID NO: 1237068 - RNA, 19 nt, Artificial Sequence
  Description of Artificial Sequence: Synthetic oligonucleotide
guugggaagggaaagaacg

SEQ ID NO: 1237069 - RNA, 19 nt, Artificial Sequence
  Description of Artificial Sequence: Synthetic oligonucleotide
acagucaccauucgguacc

SEQ ID NO: 1237070 - RNA, 19 nt, Artificial Sequence
  Description of Artificial Sequence: Synthetic oligonucleotide
uuucaaaagaccacucaug

SEQ ID NO: 1237071 - RNA, 19 nt, Artificial Sequence
  Description of Artificial Sequence: Synthetic oligonucleotide
uuccuuaguaucaacuugc

SEQ ID NO: 1237072 - RNA, 19 nt, Artificial Sequence
  Description of Artificial Sequence: Synthetic oligonucleotide
cucgcuaucauccggaccc

SEQ ID NO: 1237073 - RNA, 19 nt, Artificial Sequence
  Description of Artificial Sequence: Synthetic oligonucleotide
uuaacggucaggucucugg

SEQ ID NO: 1237074 - RNA, 19 nt, Artificial Sequence
  Description of Artificial Sequence: Synthetic oligonucleotide
ucuuacagucaccauucgg

SEQ ID NO: 1237075 - RNA, 19 nt, Artificial Sequence
  Description of Artificial Sequence: Synthetic oligonucleotide
ugcuugaggucccaaaucc

SEQ ID NO: 1237076 - RNA, 19 nt, Artificial Sequence
  Description of Artificial Sequence: Synthetic oligonucleotide
aaaagaccacucauguccc

SEQ ID NO: 1237077 - RNA, 19 nt, Artificial Sequence
  Description of Artificial Sequence: Synthetic oligonucleotide
aaaaggacaaggagcgggc

SEQ ID NO: 1237078 - RNA, 19 nt, Artificial Sequence
  Description of Artificial Sequence: Synthetic oligonucleotide
aacgggaaccucaaagacc

SEQ ID NO: 1237079 - RNA, 19 nt, Artificial Sequence
  Description of Artificial Sequence: Synthetic oligonucleotide
gaugguaccaucuucauau

SEQ ID NO: 1237080 - RNA, 19 nt, Artificial Sequence
  Description of Artificial Sequence: Synthetic oligonucleotide
acaugggccuccuaaaggg

SEQ ID NO: 1237081 - RNA, 19 nt, Artificial Sequence
  Description of Artificial Sequence: Synthetic oligonucleotide
ggaaguauauuuuauuuac

SEQ ID NO: 1237082 - RNA, 19 nt, Artificial Sequence
  Description of Artificial Sequence: Synthetic oligonucleotide
uuaguaucaacuugccaca

SEQ ID NO: 1237083 - RNA, 19 nt, Artificial Sequence
  Description of Artificial Sequence: Synthetic oligonucleotide
aaugcaaaggugaccucgc

SEQ ID NO: 1237084 - RNA, 19 nt, Artificial Sequence
  Description of Artificial Sequence: Synthetic oligonucleotide
aaguccacgucuuccaucu

SEQ ID NO: 1237085 - RNA, 19 nt, Artificial Sequence
  Description of Artificial Sequence: Synthetic oligonucleotide
ugauguugucaccaccagg

SEQ ID NO: 1237086 - RNA, 19 nt, Artificial Sequence
  Description of Artificial Sequence: Synthetic oligonucleotide
ugcaaugcaaaggugaccu

SEQ ID NO: 1237087 - RNA, 19 nt, Artificial Sequence
  Description of Artificial Sequence: Synthetic oligonucleotide
ucauagauagccaguguuc

SEQ ID NO: 1237088 - RNA, 19 nt, Artificial Sequence
  Description of Artificial Sequence: Synthetic oligonucleotide
cucaacaccagacacuaug

SEQ ID NO: 1237089 - RNA, 19 nt, Artificial Sequence
  Description of Artificial Sequence: Synthetic oligonucleotide
acuaggguggagucauggc

SEQ ID NO: 1237090 - RNA, 19 nt, Artificial Sequence
  Description of Artificial Sequence: Synthetic oligonucleotide
ucaccauucgguaccuucc

SEQ ID NO: 1237091 - RNA, 19 nt, Artificial Sequence
  Description of Artificial Sequence: Synthetic oligonucleotide
ucaguaagcaggcggccag

SEQ ID NO: 1237092 - RNA, 19 nt, Artificial Sequence
  Description of Artificial Sequence: Synthetic oligonucleotide
cauagauagccaguguucc

SEQ ID NO: 1237093 - RNA, 19 nt, Artificial Sequence
  Description of Artificial Sequence: Synthetic oligonucleotide
gacacuaugccagagccac

SEQ ID NO: 1237094 - RNA, 19 nt, Artificial Sequence
  Description of Artificial Sequence: Synthetic oligonucleotide
aacggucaggucucuggac

SEQ ID NO: 1237095 - RNA, 19 nt, Artificial Sequence
  Description of Artificial Sequence: Synthetic oligonucleotide
agaucauccgggucggcgg

SEQ ID NO: 1237096 - RNA, 19 nt, Artificial Sequence
  Description of Artificial Sequence: Synthetic oligonucleotide
ccuuucaguacauggaugg

SEQ ID NO: 1237097 - RNA, 19 nt, Artificial Sequence
  Description of Artificial Sequence: Synthetic oligonucleotide
acaaggagcgggcagguca

SEQ ID NO: 1237098 - RNA, 19 nt, Artificial Sequence
  Description of Artificial Sequence: Synthetic oligonucleotide
aauaggacaggugcccgag

SEQ ID NO: 1237099 - RNA, 19 nt, Artificial Sequence
  Description of Artificial Sequence: Synthetic oligonucleotide
gaaagaaacaugggccucc

SEQ ID NO: 1237100 - RNA, 19 nt, Artificial Sequence
  Description of Artificial Sequence: Synthetic oligonucleotide
auacuuucgcuuugugguc

SEQ ID NO: 1237101 - RNA, 19 nt, Artificial Sequence
  Description of Artificial Sequence: Synthetic oligonucleotide
cagcacaugucacagaguc

SEQ ID NO: 1237102 - RNA, 19 nt, Artificial Sequence
  Description of Artificial Sequence: Synthetic oligonucleotide
agugcaaugcaaaggugac

SEQ ID NO: 1237103 - RNA, 19 nt, Artificial Sequence
  Description of Artificial Sequence: Synthetic oligonucleotide
gaacgggaaccucaaagac

SEQ ID NO: 1237104 - RNA, 19 nt, Artificial Sequence
  Description of Artificial Sequence: Synthetic oligonucleotide
cauccagauagccaacagc

SEQ ID NO: 1237105 - RNA, 19 nt, Artificial Sequence
  Description of Artificial Sequence: Synthetic oligonucleotide
cagaguucgacucacucuc

SEQ ID NO: 1237106 - RNA, 19 nt, Artificial Sequence
  Description of Artificial Sequence: Synthetic oligonucleotide
guugcagggcaauuggggc

SEQ ID NO: 1237107 - RNA, 19 nt, Artificial Sequence
  Description of Artificial Sequence: Synthetic oligonucleotide
uccuuucaguacauggaug

SEQ ID NO: 1237108 - RNA, 19 nt, Artificial Sequence
  Description of Artificial Sequence: Synthetic oligonucleotide
agucauggcuaaaaccagc

SEQ ID NO: 1237109 - RNA, 19 nt, Artificial Sequence
  Description of Artificial Sequence: Synthetic oligonucleotide
uccugcuucaaaagaccag

SEQ ID NO: 1237110 - RNA, 19 nt, Artificial Sequence
  Description of Artificial Sequence: Synthetic oligonucleotide
agcugugcccgcuaauagg

SEQ ID NO: 1237111 - RNA, 19 nt, Artificial Sequence
  Description of Artificial Sequence: Synthetic oligonucleotide
guuggaaagcaguccaaug

SEQ ID NO: 1237112 - RNA, 19 nt, Artificial Sequence
  Description of Artificial Sequence: Synthetic oligonucleotide
uccuuaguaucaacuugcc

SEQ ID NO: 1237113 - RNA, 19 nt, Artificial Sequence
  Description of Artificial Sequence: Synthetic oligonucleotide
cugagucuccacacaaagg

SEQ ID NO: 1237114 - RNA, 19 nt, Artificial Sequence
  Description of Artificial Sequence: Synthetic oligonucleotide
ugcugagugcaaugcaaag

SEQ ID NO: 1237115 - RNA, 19 nt, Artificial Sequence
  Description of Artificial Sequence: Synthetic oligonucleotide
gaacacacccacaaccuug

SEQ ID NO: 1237116 - RNA, 19 nt, Artificial Sequence
  Description of Artificial Sequence: Synthetic oligonucleotide
aguacauggaugggguuuc

SEQ ID NO: 1237117 - RNA, 19 nt, Artificial Sequence
  Description of Artificial Sequence: Synthetic oligonucleotide
uugccacacuuucaaaaga

SEQ ID NO: 1237118 - RNA, 19 nt, Artificial Sequence
  Description of Artificial Sequence: Synthetic oligonucleotide
ugagugcaaugcaaaggug

SEQ ID NO: 1237119 - RNA, 19 nt, Artificial Sequence
  Description of Artificial Sequence: Synthetic oligonucleotide
ggagucauggcuaaaacca

SEQ ID NO: 1237120 - RNA, 19 nt, Artificial Sequence
  Description of Artificial Sequence: Synthetic oligonucleotide
gaaggucuuacagucacca

SEQ ID NO: 1237121 - RNA, 19 nt, Artificial Sequence
  Description of Artificial Sequence: Synthetic oligonucleotide
uguggucuccugauguugu

SEQ ID NO: 1237122 - RNA, 19 nt, Artificial Sequence
  Description of Artificial Sequence: Synthetic oligonucleotide
acgcaaaacacagaugcug

SEQ ID NO: 1237123 - RNA, 19 nt, Artificial Sequence
  Description of Artificial Sequence: Synthetic oligonucleotide
ucauccggacccuccaugc

SEQ ID NO: 1237124 - RNA, 19 nt, Artificial Sequence
  Description of Artificial Sequence: Synthetic oligonucleotide
ggacaggucauagauagcc

SEQ ID NO: 1237125 - RNA, 19 nt, Artificial Sequence
  Description of Artificial Sequence: Synthetic oligonucleotide
gcaauuggggcccuggaag

SEQ ID NO: 1237126 - RNA, 19 nt, Artificial Sequence
  Description of Artificial Sequence: Synthetic oligonucleotide
ggccagaucauccgggucg

SEQ ID NO: 1237127 - RNA, 19 nt, Artificial Sequence
  Description of Artificial Sequence: Synthetic oligonucleotide
acgggaaccucaaagaccu

SEQ ID NO: 1237128 - RNA, 19 nt, Artificial Sequence
  Description of Artificial Sequence: Synthetic oligonucleotide
cagguugcagggcaauugg

SEQ ID NO: 1237129 - RNA, 19 nt, Artificial Sequence
  Description of Artificial Sequence: Synthetic oligonucleotide
ugugcccgcuaauaggaca

SEQ ID NO: 1237130 - RNA, 19 nt, Artificial Sequence
  Description of Artificial Sequence: Synthetic oligonucleotide
uaacggucaggucucugga

SEQ ID NO: 1237131 - RNA, 19 nt, Artificial Sequence
  Description of Artificial Sequence: Synthetic oligonucleotide
uacagucaccauucgguac

SEQ ID NO: 1237132 - RNA, 19 nt, Artificial Sequence
  Description of Artificial Sequence: Synthetic oligonucleotide
agcaguccaaugcccuccc

SEQ ID NO: 1237133 - RNA, 19 nt, Artificial Sequence
  Description of Artificial Sequence: Synthetic oligonucleotide
cagguguacaccacagcag

SEQ ID NO: 1237134 - RNA, 19 nt, Artificial Sequence
  Description of Artificial Sequence: Synthetic oligonucleotide
caucacugagucuccacac

SEQ ID NO: 1237135 - RNA, 19 nt, Artificial Sequence
  Description of Artificial Sequence: Synthetic oligonucleotide
guaaggcgggucuccaggg

SEQ ID NO: 1237136 - RNA, 19 nt, Artificial Sequence
  Description of Artificial Sequence: Synthetic oligonucleotide
gguaaggcgggucuccagg

SEQ ID NO: 1237137 - RNA, 19 nt, Artificial Sequence
  Description of Artificial Sequence: Synthetic oligonucleotide
gaucauccgggucggcggg

SEQ ID NO: 1237138 - RNA, 19 nt, Artificial Sequence
  Description of Artificial Sequence: Synthetic oligonucleotide
uugccgucagcugugcccg

SEQ ID NO: 1237139 - RNA, 19 nt, Artificial Sequence
  Description of Artificial Sequence: Synthetic oligonucleotide
uaauaggacaggugcccga

SEQ ID NO: 1237140 - RNA, 19 nt, Artificial Sequence
  Description of Artificial Sequence: Synthetic oligonucleotide
uuacagucaccauucggua

SEQ ID NO: 1237141 - RNA, 19 nt, Artificial Sequence
  Description of Artificial Sequence: Synthetic oligonucleotide
auagauagccaguguucca

SEQ ID NO: 1237142 - RNA, 19 nt, Artificial Sequence
  Description of Artificial Sequence: Synthetic oligonucleotide
acuaugccagagccacagc

SEQ ID NO: 1237143 - RNA, 19 nt, Artificial Sequence
  Description of Artificial Sequence: Synthetic oligonucleotide
ggugaccucgcuaucaucc

SEQ ID NO: 1237144 - RNA, 19 nt, Artificial Sequence
  Description of Artificial Sequence: Synthetic oligonucleotide
aguaucaacuugccacacu

SEQ ID NO: 1237145 - RNA, 19 nt, Artificial Sequence
  Description of Artificial Sequence: Synthetic oligonucleotide
agucaguaagcaggcggcc

SEQ ID NO: 1237146 - RNA, 19 nt, Artificial Sequence
  Description of Artificial Sequence: Synthetic oligonucleotide
accauucgguaccuuccac

SEQ ID NO: 1237147 - RNA, 19 nt, Artificial Sequence
  Description of Artificial Sequence: Synthetic oligonucleotide
uuauggccugcacacucga

SEQ ID NO: 1237148 - RNA, 19 nt, Artificial Sequence
  Description of Artificial Sequence: Synthetic oligonucleotide
caccccauggcucacacca

SEQ ID NO: 1237149 - RNA, 19 nt, Artificial Sequence
  Description of Artificial Sequence: Synthetic oligonucleotide
agcugaacaaugcccgacu

SEQ ID NO: 1237150 - RNA, 19 nt, Artificial Sequence
  Description of Artificial Sequence: Synthetic oligonucleotide
aggacacggccacagguug

SEQ ID NO: 1237151 - RNA, 19 nt, Artificial Sequence
  Description of Artificial Sequence: Synthetic oligonucleotide
cacuaugccagagccacag

SEQ ID NO: 1237152 - RNA, 19 nt, Artificial Sequence
  Description of Artificial Sequence: Synthetic oligonucleotide
caggucugaacacacccac

SEQ ID NO: 1237153 - RNA, 19 nt, Artificial Sequence
  Description of Artificial Sequence: Synthetic oligonucleotide
uagauagccaguguuccau

SEQ ID NO: 1237154 - RNA, 19 nt, Artificial Sequence
  Description of Artificial Sequence: Synthetic oligonucleotide
ugcaaaggugaccucgcua

SEQ ID NO: 1237155 - RNA, 19 nt, Artificial Sequence
  Description of Artificial Sequence: Synthetic oligonucleotide
uccggacccuccaugcugc

SEQ ID NO: 1237156 - RNA, 19 nt, Artificial Sequence
  Description of Artificial Sequence: Synthetic oligonucleotide
ucgaagagcagcucuccau

SEQ ID NO: 1237157 - RNA, 19 nt, Artificial Sequence
  Description of Artificial Sequence: Synthetic oligonucleotide
aagaccacucauguccccu

SEQ ID NO: 1237158 - RNA, 19 nt, Artificial Sequence
  Description of Artificial Sequence: Synthetic oligonucleotide
ccgcuaauaggacaggugc

SEQ ID NO: 1237159 - RNA, 19 nt, Artificial Sequence
  Description of Artificial Sequence: Synthetic oligonucleotide
aucauccggacccuccaug

SEQ ID NO: 1237160 - RNA, 19 nt, Artificial Sequence
  Description of Artificial Sequence: Synthetic oligonucleotide
ugaaagaaacaugggccuc

SEQ ID NO: 1237161 - RNA, 19 nt, Artificial Sequence
  Description of Artificial Sequence: Synthetic oligonucleotide
acagguugcagggcaauug

SEQ ID NO: 1237162 - RNA, 19 nt, Artificial Sequence
  Description of Artificial Sequence: Synthetic oligonucleotide
auucgguaccuuccacauc

SEQ ID NO: 1237163 - RNA, 19 nt, Artificial Sequence
  Description of Artificial Sequence: Synthetic oligonucleotide
gguugcagggcaauugggg

SEQ ID NO: 1237164 - RNA, 19 nt, Artificial Sequence
  Description of Artificial Sequence: Synthetic oligonucleotide
cuaaagggccccagggcug

SEQ ID NO: 1237165 - RNA, 19 nt, Artificial Sequence
  Description of Artificial Sequence: Synthetic oligonucleotide
gugaccucgcuaucauccg

SEQ ID NO: 1237166 - RNA, 19 nt, Artificial Sequence
  Description of Artificial Sequence: Synthetic oligonucleotide
gucaccauucgguaccuuc

SEQ ID NO: 1237167 - RNA, 19 nt, Artificial Sequence
  Description of Artificial Sequence: Synthetic oligonucleotide
ugaacacacccacaaccuu

SEQ ID NO: 1237168 - RNA, 19 nt, Artificial Sequence
  Description of Artificial Sequence: Synthetic oligonucleotide
aaggcgggucuccagggaa

SEQ ID NO: 1237169 - RNA, 19 nt, Artificial Sequence
  Description of Artificial Sequence: Synthetic oligonucleotide
aggcucacgcaaaacacag

SEQ ID NO: 1237170 - RNA, 19 nt, Artificial Sequence
  Description of Artificial Sequence: Synthetic oligonucleotide
gacugucucaggucugaac

SEQ ID NO: 1237171 - RNA, 19 nt, Artificial Sequence
  Description of Artificial Sequence: Synthetic oligonucleotide
augguaccaucuucauauc

SEQ ID NO: 1237172 - RNA, 19 nt, Artificial Sequence
  Description of Artificial Sequence: Synthetic oligonucleotide
gcuaauaggacaggugccc

SEQ ID NO: 1237173 - RNA, 19 nt, Artificial Sequence
  Description of Artificial Sequence: Synthetic oligonucleotide
auccggacccuccaugcug

SEQ ID NO: 1237174 - RNA, 19 nt, Artificial Sequence
  Description of Artificial Sequence: Synthetic oligonucleotide
uacuuucgcuuuguggucu

SEQ ID NO: 1237175 - RNA, 19 nt, Artificial Sequence
  Description of Artificial Sequence: Synthetic oligonucleotide
ccagagacgaacaaugcca

SEQ ID NO: 1237176 - RNA, 19 nt, Artificial Sequence
  Description of Artificial Sequence: Synthetic oligonucleotide
cacggccacagguugcagg

SEQ ID NO: 1237177 - RNA, 19 nt, Artificial Sequence
  Description of Artificial Sequence: Synthetic oligonucleotide
ucgacucacucuccucccc

SEQ ID NO: 1237178 - RNA, 19 nt, Artificial Sequence
  Description of Artificial Sequence: Synthetic oligonucleotide
cugucucaggucugaacac

SEQ ID NO: 1237179 - RNA, 19 nt, Artificial Sequence
  Description of Artificial Sequence: Synthetic oligonucleotide
accagcaaaucaaagugaa

SEQ ID NO: 1237180 - RNA, 19 nt, Artificial Sequence
  Description of Artificial Sequence: Synthetic oligonucleotide
caaguguugccgucagcug

SEQ ID NO: 1237181 - RNA, 19 nt, Artificial Sequence
  Description of Artificial Sequence: Synthetic oligonucleotide
agaguucgacucacucucc

SEQ ID NO: 1237182 - RNA, 19 nt, Artificial Sequence
  Description of Artificial Sequence: Synthetic oligonucleotide
uuuguggucuccugauguu

SEQ ID NO: 1237183 - RNA, 19 nt, Artificial Sequence
  Description of Artificial Sequence: Synthetic oligonucleotide
ugccggagugucugcgugg

SEQ ID NO: 1237184 - RNA, 19 nt, Artificial Sequence
  Description of Artificial Sequence: Synthetic oligonucleotide
acaaugcccgacuggugcu

SEQ ID NO: 1237185 - RNA, 19 nt, Artificial Sequence
  Description of Artificial Sequence: Synthetic oligonucleotide
cagcucuaccaccucaaug

SEQ ID NO: 1237186 - RNA, 19 nt, Artificial Sequence
  Description of Artificial Sequence: Synthetic oligonucleotide
agccacagccguuaacggu

SEQ ID NO: 1237187 - RNA, 19 nt, Artificial Sequence
  Description of Artificial Sequence: Synthetic oligonucleotide
accucgcuaucauccggac

SEQ ID NO: 1237188 - RNA, 19 nt, Artificial Sequence
  Description of Artificial Sequence: Synthetic oligonucleotide
ugaggaucaggcugccauc

SEQ ID NO: 1237189 - RNA, 19 nt, Artificial Sequence
  Description of Artificial Sequence: Synthetic oligonucleotide
gaaagaacgggaaccucaa

SEQ ID NO: 1237190 - RNA, 19 nt, Artificial Sequence
  Description of Artificial Sequence: Synthetic oligonucleotide
uaaggcgggucuccaggga

SEQ ID NO: 1237191 - RNA, 19 nt, Artificial Sequence
  Description of Artificial Sequence: Synthetic oligonucleotide
ggaaagaacgggaaccuca

SEQ ID NO: 1237192 - RNA, 19 nt, Artificial Sequence
  Description of Artificial Sequence: Synthetic oligonucleotide
ugggguuucccugcuugag

SEQ ID NO: 1237193 - RNA, 19 nt, Artificial Sequence
  Description of Artificial Sequence: Synthetic oligonucleotide
augcugccgauuccugggg

SEQ ID NO: 1237194 - RNA, 19 nt, Artificial Sequence
  Description of Artificial Sequence: Synthetic oligonucleotide
gggaaguauauuuuauuua

SEQ ID NO: 1237195 - RNA, 19 nt, Artificial Sequence
  Description of Artificial Sequence: Synthetic oligonucleotide
ggucagagggcccugguga

SEQ ID NO: 1237196 - RNA, 19 nt, Artificial Sequence
  Description of Artificial Sequence: Synthetic oligonucleotide
cacucgaagagcagcucuc

SEQ ID NO: 1237197 - RNA, 19 nt, Artificial Sequence
  Description of Artificial Sequence: Synthetic oligonucleotide
gugcccgcuaauaggacag

SEQ ID NO: 1237198 - RNA, 19 nt, Artificial Sequence
  Description of Artificial Sequence: Synthetic oligonucleotide
uggucuccugauguuguca

SEQ ID NO: 1237199 - RNA, 19 nt, Artificial Sequence
  Description of Artificial Sequence: Synthetic oligonucleotide
gugacccucaguuccuuuc

SEQ ID NO: 1237200 - RNA, 19 nt, Artificial Sequence
  Description of Artificial Sequence: Synthetic oligonucleotide
gagcgggcaggucagcuga

SEQ ID NO: 1237201 - RNA, 19 nt, Artificial Sequence
  Description of Artificial Sequence: Synthetic oligonucleotide
ggucugaacacacccacaa

SEQ ID NO: 1237202 - RNA, 19 nt, Artificial Sequence
  Description of Artificial Sequence: Synthetic oligonucleotide
gccguuaacggucaggucu

SEQ ID NO: 1237203 - RNA, 19 nt, Artificial Sequence
  Description of Artificial Sequence: Synthetic oligonucleotide
gaaagcaguccaaugcccu

SEQ ID NO: 1237204 - RNA, 19 nt, Artificial Sequence
  Description of Artificial Sequence: Synthetic oligonucleotide
uucgggcaucccagagacg

SEQ ID NO: 1237205 - RNA, 19 nt, Artificial Sequence
  Description of Artificial Sequence: Synthetic oligonucleotide
cccagagacgaacaaugcc

SEQ ID NO: 1237206 - RNA, 19 nt, Artificial Sequence
  Description of Artificial Sequence: Synthetic oligonucleotide
ggaggcaucuuugcugagg

SEQ ID NO: 1237207 - RNA, 19 nt, Artificial Sequence
  Description of Artificial Sequence: Synthetic oligonucleotide
gaacaaugcccgacuggug

SEQ ID NO: 1237208 - RNA, 19 nt, Artificial Sequence
  Description of Artificial Sequence: Synthetic oligonucleotide
ggcuaaaaccagcacaugu

SEQ ID NO: 1237209 - RNA, 19 nt, Artificial Sequence
  Description of Artificial Sequence: Synthetic oligonucleotide
cugaacacacccacaaccu

SEQ ID NO: 1237210 - RNA, 19 nt, Artificial Sequence
  Description of Artificial Sequence: Synthetic oligonucleotide
cagagggcccuggugaccc

SEQ ID NO: 1237211 - RNA, 19 nt, Artificial Sequence
  Description of Artificial Sequence: Synthetic oligonucleotide
gucugaacacacccacaac

SEQ ID NO: 1237212 - RNA, 19 nt, Artificial Sequence
  Description of Artificial Sequence: Synthetic oligonucleotide
ccaggcucacgcaaaacac

SEQ ID NO: 1237213 - RNA, 19 nt, Artificial Sequence
  Description of Artificial Sequence: Synthetic oligonucleotide
cauggcucacaccagcaaa

SEQ ID NO: 1237214 - RNA, 19 nt, Artificial Sequence
  Description of Artificial Sequence: Synthetic oligonucleotide
cuaggguggagucauggcu

SEQ ID NO: 1237215 - RNA, 19 nt, Artificial Sequence
  Description of Artificial Sequence: Synthetic oligonucleotide
agguugcagggcaauuggg

SEQ ID NO: 1237216 - RNA, 19 nt, Artificial Sequence
  Description of Artificial Sequence: Synthetic oligonucleotide
agggcaauuggggcccugg

SEQ ID NO: 1237217 - RNA, 19 nt, Artificial Sequence
  Description of Artificial Sequence: Synthetic oligonucleotide
ucuccacacaaaggcuuug

SEQ ID NO: 1237218 - RNA, 19 nt, Artificial Sequence
  Description of Artificial Sequence: Synthetic oligonucleotide
gugaggaucaggcugccau

SEQ ID NO: 1237219 - RNA, 19 nt, Artificial Sequence
  Description of Artificial Sequence: Synthetic oligonucleotide
augggguuucccugcuuga

SEQ ID NO: 1237220 - RNA, 19 nt, Artificial Sequence
  Description of Artificial Sequence: Synthetic oligonucleotide
gcugaacaaugcccgacug

SEQ ID NO: 1237221 - RNA, 19 nt, Artificial Sequence
  Description of Artificial Sequence: Synthetic oligonucleotide
gucucaggucugaacacac

SEQ ID NO: 1237222 - RNA, 19 nt, Artificial Sequence
  Description of Artificial Sequence: Synthetic oligonucleotide
caggcggccaguucgggca

SEQ ID NO: 1237223 - RNA, 19 nt, Artificial Sequence
  Description of Artificial Sequence: Synthetic oligonucleotide
ggccccgguagucaguaag

SEQ ID NO: 1237224 - RNA, 19 nt, Artificial Sequence
  Description of Artificial Sequence: Synthetic oligonucleotide
uggcuaaaaccagcacaug

SEQ ID NO: 1237225 - RNA, 19 nt, Artificial Sequence
  Description of Artificial Sequence: Synthetic oligonucleotide
ugcccgagggugccacucc

SEQ ID NO: 1237226 - RNA, 19 nt, Artificial Sequence
  Description of Artificial Sequence: Synthetic oligonucleotide
ggugccacuccauccacuc

SEQ ID NO: 1237227 - RNA, 19 nt, Artificial Sequence
  Description of Artificial Sequence: Synthetic oligonucleotide
agauagccaacagcagcca

SEQ ID NO: 1237228 - RNA, 19 nt, Artificial Sequence
  Description of Artificial Sequence: Synthetic oligonucleotide
gggaaccucaaagaccuac

SEQ ID NO: 1237229 - RNA, 19 nt, Artificial Sequence
  Description of Artificial Sequence: Synthetic oligonucleotide
cccaucagggaggacacgg

SEQ ID NO: 1237230 - RNA, 19 nt, Artificial Sequence
  Description of Artificial Sequence: Synthetic oligonucleotide
auggcucacaccagcaaau

SEQ ID NO: 1237231 - RNA, 19 nt, Artificial Sequence
  Description of Artificial Sequence: Synthetic oligonucleotide
guaagcaggcggccaguuc

SEQ ID NO: 1237232 - RNA, 19 nt, Artificial Sequence
  Description of Artificial Sequence: Synthetic oligonucleotide
ccaugcugccgauuccugg

SEQ ID NO: 1237233 - RNA, 19 nt, Artificial Sequence
  Description of Artificial Sequence: Synthetic oligonucleotide
gugccggagugucugcgug

SEQ ID NO: 1237234 - RNA, 19 nt, Artificial Sequence
  Description of Artificial Sequence: Synthetic oligonucleotide
aucauccgggucggcgggc

SEQ ID NO: 1237235 - RNA, 19 nt, Artificial Sequence
  Description of Artificial Sequence: Synthetic oligonucleotide
cucuggacacaaaauacuu

SEQ ID NO: 1237236 - RNA, 19 nt, Artificial Sequence
  Description of Artificial Sequence: Synthetic oligonucleotide
ucgguaccuuccacaucca

SEQ ID NO: 1237237 - RNA, 19 nt, Artificial Sequence
  Description of Artificial Sequence: Synthetic oligonucleotide
ugcccgcuaauaggacagg

SEQ ID NO: 1237238 - RNA, 19 nt, Artificial Sequence
  Description of Artificial Sequence: Synthetic oligonucleotide
cccacaaccuugccugugg

SEQ ID NO: 1237239 - RNA, 19 nt, Artificial Sequence
  Description of Artificial Sequence: Synthetic oligonucleotide
cauucgguaccuuccacau

SEQ ID NO: 1237240 - RNA, 19 nt, Artificial Sequence
  Description of Artificial Sequence: Synthetic oligonucleotide
gucaguaagcaggcggcca

SEQ ID NO: 1237241 - RNA, 19 nt, Artificial Sequence
  Description of Artificial Sequence: Synthetic oligonucleotide
aggucucuggacacaaaau

SEQ ID NO: 1237242 - RNA, 19 nt, Artificial Sequence
  Description of Artificial Sequence: Synthetic oligonucleotide
accuugccugugguggcac

SEQ ID NO: 1237243 - RNA, 19 nt, Artificial Sequence
  Description of Artificial Sequence: Synthetic oligonucleotide
cugugcccgcuaauaggac

SEQ ID NO: 1237244 - RNA, 19 nt, Artificial Sequence
  Description of Artificial Sequence: Synthetic oligonucleotide
agacacuaugccagagcca

SEQ ID NO: 1237245 - RNA, 19 nt, Artificial Sequence
  Description of Artificial Sequence: Synthetic oligonucleotide
cgcuaauaggacaggugcc

SEQ ID NO: 1237246 - RNA, 19 nt, Artificial Sequence
  Description of Artificial Sequence: Synthetic oligonucleotide
ucauccgggucggcgggcc

SEQ ID NO: 1237247 - RNA, 19 nt, Artificial Sequence
  Description of Artificial Sequence: Synthetic oligonucleotide
gaccagcuuggccuggcaa

SEQ ID NO: 1237248 - RNA, 19 nt, Artificial Sequence
  Description of Artificial Sequence: Synthetic oligonucleotide
augcugagugcaaugcaaa

SEQ ID NO: 1237249 - RNA, 19 nt, Artificial Sequence
  Description of Artificial Sequence: Synthetic oligonucleotide
gccaguucgggcaucccag

SEQ ID NO: 1237250 - RNA, 19 nt, Artificial Sequence
  Description of Artificial Sequence: Synthetic oligonucleotide
uggcucacaccagcaaauc

SEQ ID NO: 1237251 - RNA, 19 nt, Artificial Sequence
  Description of Artificial Sequence: Synthetic oligonucleotide
ggcucacaccagcaaauca

SEQ ID NO: 1237252 - RNA, 19 nt, Artificial Sequence
  Description of Artificial Sequence: Synthetic oligonucleotide
gcucacaccagcaaaucaa

SEQ ID NO: 1237253 - RNA, 19 nt, Artificial Sequence
  Description of Artificial Sequence: Synthetic oligonucleotide
cauccugguugguggcaac

SEQ ID NO: 1237254 - RNA, 19 nt, Artificial Sequence
  Description of Artificial Sequence: Synthetic oligonucleotide
ggccugcacacucgaagag

SEQ ID NO: 1237255 - RNA, 19 nt, Artificial Sequence
  Description of Artificial Sequence: Synthetic oligonucleotide
gcugugcccgcuaauagga

SEQ ID NO: 1237256 - RNA, 19 nt, Artificial Sequence
  Description of Artificial Sequence: Synthetic oligonucleotide
ccugcuucaaaagaccaga

SEQ ID NO: 1237257 - RNA, 19 nt, Artificial Sequence
  Description of Artificial Sequence: Synthetic oligonucleotide
cucgaagagcagcucucca

SEQ ID NO: 1237258 - RNA, 19 nt, Artificial Sequence
  Description of Artificial Sequence: Synthetic oligonucleotide
gccacagccguuaacgguc

SEQ ID NO: 1237259 - RNA, 19 nt, Artificial Sequence
  Description of Artificial Sequence: Synthetic oligonucleotide
cccgcuaauaggacaggug

SEQ ID NO: 1237260 - RNA, 19 nt, Artificial Sequence
  Description of Artificial Sequence: Synthetic oligonucleotide
gugacugucucaggucuga

SEQ ID NO: 1237261 - RNA, 19 nt, Artificial Sequence
  Description of Artificial Sequence: Synthetic oligonucleotide
ggucggcgggccuggaucc

SEQ ID NO: 1237262 - RNA, 19 nt, Artificial Sequence
  Description of Artificial Sequence: Synthetic oligonucleotide
gguggagucauggcuaaaa

SEQ ID NO: 1237263 - RNA, 19 nt, Artificial Sequence
  Description of Artificial Sequence: Synthetic oligonucleotide
caccauucgguaccuucca

SEQ ID NO: 1237264 - RNA, 19 nt, Artificial Sequence
  Description of Artificial Sequence: Synthetic oligonucleotide
cagagccacagccguuaac

SEQ ID NO: 1237265 - RNA, 19 nt, Artificial Sequence
  Description of Artificial Sequence: Synthetic oligonucleotide
auacaaagacgcaccccau

SEQ ID NO: 1237266 - RNA, 19 nt, Artificial Sequence
  Description of Artificial Sequence: Synthetic oligonucleotide
gagucuccacacaaaggcu

SEQ ID NO: 1237267 - RNA, 19 nt, Artificial Sequence
  Description of Artificial Sequence: Synthetic oligonucleotide
gcuggcauuggugccggag

SEQ ID NO: 1237268 - RNA, 19 nt, Artificial Sequence
  Description of Artificial Sequence: Synthetic oligonucleotide
ccauucgguaccuuccaca

SEQ ID NO: 1237269 - RNA, 19 nt, Artificial Sequence
  Description of Artificial Sequence: Synthetic oligonucleotide
aggucugaacacacccaca

SEQ ID NO: 1237270 - RNA, 19 nt, Artificial Sequence
  Description of Artificial Sequence: Synthetic oligonucleotide
guacauggaugggguuucc

SEQ ID NO: 1237271 - RNA, 19 nt, Artificial Sequence
  Description of Artificial Sequence: Synthetic oligonucleotide
aguaagcaggcggccaguu

SEQ ID NO: 1237272 - RNA, 19 nt, Artificial Sequence
  Description of Artificial Sequence: Synthetic oligonucleotide
ccguuaacggucaggucuc

SEQ ID NO: 1237273 - RNA, 19 nt, Artificial Sequence
  Description of Artificial Sequence: Synthetic oligonucleotide
caaugcccgacuggugcug

SEQ ID NO: 1237274 - RNA, 19 nt, Artificial Sequence
  Description of Artificial Sequence: Synthetic oligonucleotide
cugccgauuccugggguuc

SEQ ID NO: 1237275 - RNA, 19 nt, Artificial Sequence
  Description of Artificial Sequence: Synthetic oligonucleotide
cacacucgaagagcagcuc

SEQ ID NO: 1237276 - RNA, 19 nt, Artificial Sequence
  Description of Artificial Sequence: Synthetic oligonucleotide
ugacugucucaggucugaa

SEQ ID NO: 1237277 - RNA, 19 nt, Artificial Sequence
  Description of Artificial Sequence: Synthetic oligonucleotide
gggaggacacggccacagg

SEQ ID NO: 1237278 - RNA, 19 nt, Artificial Sequence
  Description of Artificial Sequence: Synthetic oligonucleotide
ucggcgggccuggauccag

SEQ ID NO: 1237279 - RNA, 19 nt, Artificial Sequence
  Description of Artificial Sequence: Synthetic oligonucleotide
ccuuaguaucaacuugcca

SEQ ID NO: 1237280 - RNA, 19 nt, Artificial Sequence
  Description of Artificial Sequence: Synthetic oligonucleotide
cacgcaaaacacagaugcu

SEQ ID NO: 1237281 - RNA, 19 nt, Artificial Sequence
  Description of Artificial Sequence: Synthetic oligonucleotide
guacaccacagcagugcca

SEQ ID NO: 1237282 - RNA, 19 nt, Artificial Sequence
  Description of Artificial Sequence: Synthetic oligonucleotide
ucgcuaucauccggacccu

SEQ ID NO: 1237283 - RNA, 19 nt, Artificial Sequence
  Description of Artificial Sequence: Synthetic oligonucleotide
ccucgcuaucauccggacc

SEQ ID NO: 1237284 - RNA, 19 nt, Artificial Sequence
  Description of Artificial Sequence: Synthetic oligonucleotide
gggucggcgggccuggauc

SEQ ID NO: 1237285 - RNA, 19 nt, Artificial Sequence
  Description of Artificial Sequence: Synthetic oligonucleotide
gcacaugucacagagucuu

SEQ ID NO: 1237286 - RNA, 19 nt, Artificial Sequence
  Description of Artificial Sequence: Synthetic oligonucleotide
gguuucccugcuugagguc

SEQ ID NO: 1237287 - RNA, 19 nt, Artificial Sequence
  Description of Artificial Sequence: Synthetic oligonucleotide
gcaggcggccaguucgggc

SEQ ID NO: 1237288 - RNA, 19 nt, Artificial Sequence
  Description of Artificial Sequence: Synthetic oligonucleotide
gccccgguagucaguaagc

SEQ ID NO: 1237289 - RNA, 19 nt, Artificial Sequence
  Description of Artificial Sequence: Synthetic oligonucleotide
gaggacacggccacagguu

SEQ ID NO: 1237290 - RNA, 19 nt, Artificial Sequence
  Description of Artificial Sequence: Synthetic oligonucleotide
gggaaagaacgggaaccuc

SEQ ID NO: 1237291 - RNA, 19 nt, Artificial Sequence
  Description of Artificial Sequence: Synthetic oligonucleotide
accccauggcucacaccag

SEQ ID NO: 1237292 - RNA, 19 nt, Artificial Sequence
  Description of Artificial Sequence: Synthetic oligonucleotide
ccaaggacuccacagaguu

SEQ ID NO: 1237293 - RNA, 19 nt, Artificial Sequence
  Description of Artificial Sequence: Synthetic oligonucleotide
caguacauggaugggguuu

SEQ ID NO: 1237294 - RNA, 19 nt, Artificial Sequence
  Description of Artificial Sequence: Synthetic oligonucleotide
cacaggucagagggcccug

SEQ ID NO: 1237295 - RNA, 19 nt, Artificial Sequence
  Description of Artificial Sequence: Synthetic oligonucleotide
ccgacuggugcuggcauug

SEQ ID NO: 1237296 - RNA, 19 nt, Artificial Sequence
  Description of Artificial Sequence: Synthetic oligonucleotide
ggcuacagguguacaccac

SEQ ID NO: 1237297 - RNA, 19 nt, Artificial Sequence
  Description of Artificial Sequence: Synthetic oligonucleotide
gguuggaaagcaguccaau

SEQ ID NO: 1237298 - RNA, 19 nt, Artificial Sequence
  Description of Artificial Sequence: Synthetic oligonucleotide
cucccucugcacccugcca

SEQ ID NO: 1237299 - RNA, 19 nt, Artificial Sequence
  Description of Artificial Sequence: Synthetic oligonucleotide
gugcccgagggugccacuc

SEQ ID NO: 1237300 - RNA, 19 nt, Artificial Sequence
  Description of Artificial Sequence: Synthetic oligonucleotide
gacgcaccccauggcucac

SEQ ID NO: 1237301 - RNA, 19 nt, Artificial Sequence
  Description of Artificial Sequence: Synthetic oligonucleotide
gggcaauuggggcccugga

SEQ ID NO: 1237302 - RNA, 19 nt, Artificial Sequence
  Description of Artificial Sequence: Synthetic oligonucleotide
gcccuggugacccucaguu

SEQ ID NO: 1237303 - RNA, 19 nt, Artificial Sequence
  Description of Artificial Sequence: Synthetic oligonucleotide
gggccagaucauccggguc

SEQ ID NO: 1237304 - RNA, 19 nt, Artificial Sequence
  Description of Artificial Sequence: Synthetic oligonucleotide
caucucccugggccagauc

SEQ ID NO: 1237305 - RNA, 19 nt, Artificial Sequence
  Description of Artificial Sequence: Synthetic oligonucleotide
guguugguuuuggggucca

SEQ ID NO: 1237306 - RNA, 19 nt, Artificial Sequence
  Description of Artificial Sequence: Synthetic oligonucleotide
cauuggugccggagugucu

SEQ ID NO: 1237307 - RNA, 19 nt, Artificial Sequence
  Description of Artificial Sequence: Synthetic oligonucleotide
ccgagggugccacuccauc

SEQ ID NO: 1237308 - RNA, 19 nt, Artificial Sequence
  Description of Artificial Sequence: Synthetic oligonucleotide
gccuccuaaagggccccag

SEQ ID NO: 1237309 - RNA, 19 nt, Artificial Sequence
  Description of Artificial Sequence: Synthetic oligonucleotide
guggccccgguagucagua

SEQ ID NO: 1237310 - RNA, 19 nt, Artificial Sequence
  Description of Artificial Sequence: Synthetic oligonucleotide
cccuggugacccucaguuc

SEQ ID NO: 1237311 - RNA, 19 nt, Artificial Sequence
  Description of Artificial Sequence: Synthetic oligonucleotide
gcaccccauggcucacacc

SEQ ID NO: 1237312 - RNA, 19 nt, Artificial Sequence
  Description of Artificial Sequence: Synthetic oligonucleotide
ggccugguaaggcgggucu

SEQ ID NO: 1237313 - RNA, 19 nt, Artificial Sequence
  Description of Artificial Sequence: Synthetic oligonucleotide
cauccggacccuccaugcu

SEQ ID NO: 1237314 - RNA, 19 nt, Artificial Sequence
  Description of Artificial Sequence: Synthetic oligonucleotide
ggcucacgcaaaacacaga

SEQ ID NO: 1237315 - RNA, 19 nt, Artificial Sequence
  Description of Artificial Sequence: Synthetic oligonucleotide
ccugcuugaggucccaaau

SEQ ID NO: 1237316 - RNA, 19 nt, Artificial Sequence
  Description of Artificial Sequence: Synthetic oligonucleotide
gcuugaggucccaaauccu

SEQ ID NO: 1237317 - RNA, 19 nt, Artificial Sequence
  Description of Artificial Sequence: Synthetic oligonucleotide
gcgggcaggucagcugaag

SEQ ID NO: 1237318 - RNA, 19 nt, Artificial Sequence
  Description of Artificial Sequence: Synthetic oligonucleotide
agucaccauucgguaccuu

SEQ ID NO: 1237319 - RNA, 19 nt, Artificial Sequence
  Description of Artificial Sequence: Synthetic oligonucleotide
ggugccggagugucugcgu

SEQ ID NO: 1237320 - RNA, 19 nt, Artificial Sequence
  Description of Artificial Sequence: Synthetic oligonucleotide
gccggagugucugcgugga

SEQ ID NO: 1237321 - RNA, 19 nt, Artificial Sequence
  Description of Artificial Sequence: Synthetic oligonucleotide
ggcgggucuccagggaaga

SEQ ID NO: 1237322 - RNA, 19 nt, Artificial Sequence
  Description of Artificial Sequence: Synthetic oligonucleotide
ccacagccguuaacgguca

SEQ ID NO: 1237323 - RNA, 19 nt, Artificial Sequence
  Description of Artificial Sequence: Synthetic oligonucleotide
acgcaccccauggcucaca

SEQ ID NO: 1237324 - RNA, 19 nt, Artificial Sequence
  Description of Artificial Sequence: Synthetic oligonucleotide
cagggcaauuggggcccug

SEQ ID NO: 1237325 - RNA, 19 nt, Artificial Sequence
  Description of Artificial Sequence: Synthetic oligonucleotide
gcccgagggugccacucca

SEQ ID NO: 1237326 - RNA, 19 nt, Artificial Sequence
  Description of Artificial Sequence: Synthetic oligonucleotide
ggguccaggcucacgcaaa

SEQ ID NO: 1237327 - RNA, 19 nt, Artificial Sequence
  Description of Artificial Sequence: Synthetic oligonucleotide
ccgauuccugggguuccag

SEQ ID NO: 1237328 - RNA, 19 nt, Artificial Sequence
  Description of Artificial Sequence: Synthetic oligonucleotide
gggccugguaaggcggguc

SEQ ID NO: 1237329 - RNA, 19 nt, Artificial Sequence
  Description of Artificial Sequence: Synthetic oligonucleotide
cgcaccccauggcucacac

SEQ ID NO: 1237330 - RNA, 19 nt, Artificial Sequence
  Description of Artificial Sequence: Synthetic oligonucleotide
gacccuccaugcugccgau

SEQ ID NO: 1237331 - RNA, 19 nt, Artificial Sequence
  Description of Artificial Sequence: Synthetic oligonucleotide
cacccacaaccuugccugu

SEQ ID NO: 1237332 - RNA, 19 nt, Artificial Sequence
  Description of Artificial Sequence: Synthetic oligonucleotide
caaugccauccaggcuaca

SEQ ID NO: 1237333 - RNA, 19 nt, Artificial Sequence
  Description of Artificial Sequence: Synthetic oligonucleotide
cagucaccauucgguaccu

SEQ ID NO: 1237334 - RNA, 19 nt, Artificial Sequence
  Description of Artificial Sequence: Synthetic oligonucleotide
ccaggucuccugcuucaaa

SEQ ID NO: 1237335 - RNA, 19 nt, Artificial Sequence
  Description of Artificial Sequence: Synthetic oligonucleotide
agcgggcaggucagcugaa

SEQ ID NO: 1237336 - RNA, 19 nt, Artificial Sequence
  Description of Artificial Sequence: Synthetic oligonucleotide
gcugccgauuccugggguu

SEQ ID NO: 1237337 - RNA, 19 nt, Artificial Sequence
  Description of Artificial Sequence: Synthetic oligonucleotide
ccggacccuccaugcugcc

SEQ ID NO: 1237338 - RNA, 19 nt, Artificial Sequence
  Description of Artificial Sequence: Synthetic oligonucleotide
gucggcgggccuggaucca

SEQ ID NO: 1237339 - RNA, 19 nt, Artificial Sequence
  Description of Artificial Sequence: Synthetic oligonucleotide
cgacuggugcuggcauugg

SEQ ID NO: 1237340 - RNA, 19 nt, Artificial Sequence
  Description of Artificial Sequence: Synthetic oligonucleotide
ccagaucauccgggucggc

SEQ ID NO: 1237341 - RNA, 19 nt, Artificial Sequence
  Description of Artificial Sequence: Synthetic oligonucleotide
cggacccuccaugcugccg

SEQ ID NO: 1237342 - RNA, 19 nt, Artificial Sequence
  Description of Artificial Sequence: Synthetic oligonucleotide
ggugacccucaguuccuuu

SEQ ID NO: 1237343 - RNA, 19 nt, Artificial Sequence
  Description of Artificial Sequence: Synthetic oligonucleotide
gcccgcuaauaggacaggu

SEQ ID NO: 1237344 - RNA, 19 nt, Artificial Sequence
  Description of Artificial Sequence: Synthetic oligonucleotide
ccggagugucugcguggac

SEQ ID NO: 1237345 - RNA, 19 nt, Artificial Sequence
  Description of Artificial Sequence: Synthetic oligonucleotide
gcccgacuggugcuggcau

SEQ ID NO: 1237346 - RNA, 19 nt, Artificial Sequence
  Description of Artificial Sequence: Synthetic oligonucleotide
cgcuaucauccggacccuc

SEQ ID NO: 1237347 - RNA, 19 nt, Artificial Sequence
  Description of Artificial Sequence: Synthetic oligonucleotide
ggcggccaguucgggcauc

SEQ ID NO: 1237348 - RNA, 19 nt, Artificial Sequence
  Description of Artificial Sequence: Synthetic oligonucleotide
gcagggcaauuggggcccu

SEQ ID NO: 1237349 - RNA, 19 nt, Artificial Sequence
  Description of Artificial Sequence: Synthetic oligonucleotide
cguuaacggucaggucucu

SEQ ID NO: 1237350 - RNA, 19 nt, Artificial Sequence
  Description of Artificial Sequence: Synthetic oligonucleotide
cgggaaccucaaagaccua

SEQ ID NO: 1237351 - RNA, 19 nt, Artificial Sequence
  Description of Artificial Sequence: Synthetic oligonucleotide
aauaugaugggacacagcg

SEQ ID NO: 1237352 - RNA, 19 nt, Artificial Sequence
  Description of Artificial Sequence: Synthetic oligonucleotide
aauugaaugaacuugucug

SEQ ID NO: 1237353 - RNA, 19 nt, Artificial Sequence
  Description of Artificial Sequence: Synthetic oligonucleotide
gauaaaauccuguugagcc

SEQ ID NO: 1237354 - RNA, 19 nt, Artificial Sequence
  Description of Artificial Sequence: Synthetic oligonucleotide
auuugcaugaucuuaguuc

SEQ ID NO: 1237355 - RNA, 19 nt, Artificial Sequence
  Description of Artificial Sequence: Synthetic oligonucleotide
uguaauuucaaacaacguc

SEQ ID NO: 1237356 - RNA, 19 nt, Artificial Sequence
  Description of Artificial Sequence: Synthetic oligonucleotide
uguagacggacacacaugg

SEQ ID NO: 1237357 - RNA, 19 nt, Artificial Sequence
  Description of Artificial Sequence: Synthetic oligonucleotide
ugauuggcaaaacugauug

SEQ ID NO: 1237358 - RNA, 19 nt, Artificial Sequence
  Description of Artificial Sequence: Synthetic oligonucleotide
guaguuauuccacacauag

SEQ ID NO: 1237359 - RNA, 19 nt, Artificial Sequence
  Description of Artificial Sequence: Synthetic oligonucleotide
aguuuagacaugcaucggc

SEQ ID NO: 1237360 - RNA, 19 nt, Artificial Sequence
  Description of Artificial Sequence: Synthetic oligonucleotide
aacgucuaauaauugaaug

SEQ ID NO: 1237361 - RNA, 19 nt, Artificial Sequence
  Description of Artificial Sequence: Synthetic oligonucleotide
uucacuaaaugacaguccc

SEQ ID NO: 1237362 - RNA, 19 nt, Artificial Sequence
  Description of Artificial Sequence: Synthetic oligonucleotide
ucaaacaacgucuugcuga

SEQ ID NO: 1237363 - RNA, 19 nt, Artificial Sequence
  Description of Artificial Sequence: Synthetic oligonucleotide
aaaauuugcaugaucuuag

SEQ ID NO: 1237364 - RNA, 19 nt, Artificial Sequence
  Description of Artificial Sequence: Synthetic oligonucleotide
uuugcaugaucuuaguuca

SEQ ID NO: 1237365 - RNA, 19 nt, Artificial Sequence
  Description of Artificial Sequence: Synthetic oligonucleotide
uuuuccaauaugaugggac

SEQ ID NO: 1237366 - RNA, 19 nt, Artificial Sequence
  Description of Artificial Sequence: Synthetic oligonucleotide
uaaacguccaguuuagaca

SEQ ID NO: 1237367 - RNA, 19 nt, Artificial Sequence
  Description of Artificial Sequence: Synthetic oligonucleotide
agacuuucuguguauaaac

SEQ ID NO: 1237368 - RNA, 19 nt, Artificial Sequence
  Description of Artificial Sequence: Synthetic oligonucleotide
uuuuacaugagugccaggc

SEQ ID NO: 1237369 - RNA, 19 nt, Artificial Sequence
  Description of Artificial Sequence: Synthetic oligonucleotide
gacacugugauaauguugc

SEQ ID NO: 1237370 - RNA, 19 nt, Artificial Sequence
  Description of Artificial Sequence: Synthetic oligonucleotide
ugaguuucugucuaguucu

SEQ ID NO: 1237371 - RNA, 19 nt, Artificial Sequence
  Description of Artificial Sequence: Synthetic oligonucleotide
uacaggacggacaugagcu

SEQ ID NO: 1237372 - RNA, 19 nt, Artificial Sequence
  Description of Artificial Sequence: Synthetic oligonucleotide
cuacacuggacacugaccg

SEQ ID NO: 1237373 - RNA, 19 nt, Artificial Sequence
  Description of Artificial Sequence: Synthetic oligonucleotide
ucuguaaacguccaguuua

SEQ ID NO: 1237374 - RNA, 19 nt, Artificial Sequence
  Description of Artificial Sequence: Synthetic oligonucleotide
uagacggacacacauggag

SEQ ID NO: 1237375 - RNA, 19 nt, Artificial Sequence
  Description of Artificial Sequence: Synthetic oligonucleotide
cuauacacaccucacgugg

SEQ ID NO: 1237376 - RNA, 19 nt, Artificial Sequence
  Description of Artificial Sequence: Synthetic oligonucleotide
uuagaaagcacuucucugu

SEQ ID NO: 1237377 - RNA, 19 nt, Artificial Sequence
  Description of Artificial Sequence: Synthetic oligonucleotide
aacaacgucuugcugaggu

SEQ ID NO: 1237378 - RNA, 19 nt, Artificial Sequence
  Description of Artificial Sequence: Synthetic oligonucleotide
uuaccauggucccacagag

SEQ ID NO: 1237379 - RNA, 19 nt, Artificial Sequence
  Description of Artificial Sequence: Synthetic oligonucleotide
cucauuaucaauacuuuuc

SEQ ID NO: 1237380 - RNA, 19 nt, Artificial Sequence
  Description of Artificial Sequence: Synthetic oligonucleotide
cauggagguuuaaagaagg

SEQ ID NO: 1237381 - RNA, 19 nt, Artificial Sequence
  Description of Artificial Sequence: Synthetic oligonucleotide
uccacacauaguuugcugg

SEQ ID NO: 1237382 - RNA, 19 nt, Artificial Sequence
  Description of Artificial Sequence: Synthetic oligonucleotide
aaacguccaguuuagacau

SEQ ID NO: 1237383 - RNA, 19 nt, Artificial Sequence
  Description of Artificial Sequence: Synthetic oligonucleotide
uucccuuuuagaaagcacu

SEQ ID NO: 1237384 - RNA, 19 nt, Artificial Sequence
  Description of Artificial Sequence: Synthetic oligonucleotide
uuuuacauacacacuggca

SEQ ID NO: 1237385 - RNA, 19 nt, Artificial Sequence
  Description of Artificial Sequence: Synthetic oligonucleotide
agauaaaauccuguugagc

SEQ ID NO: 1237386 - RNA, 19 nt, Artificial Sequence
  Description of Artificial Sequence: Synthetic oligonucleotide
aguaugauuggcaaaacug

SEQ ID NO: 1237387 - RNA, 19 nt, Artificial Sequence
  Description of Artificial Sequence: Synthetic oligonucleotide
acauguaguuauuccacac

SEQ ID NO: 1237388 - RNA, 19 nt, Artificial Sequence
  Description of Artificial Sequence: Synthetic oligonucleotide
gauaauguugcuggcagag

SEQ ID NO: 1237389 - RNA, 19 nt, Artificial Sequence
  Description of Artificial Sequence: Synthetic oligonucleotide
gucgauuuguacauggucg

SEQ ID NO: 1237390 - RNA, 19 nt, Artificial Sequence
  Description of Artificial Sequence: Synthetic oligonucleotide
uguaaugugcagcagcaaa

SEQ ID NO: 1237391 - RNA, 19 nt, Artificial Sequence
  Description of Artificial Sequence: Synthetic oligonucleotide
gauugugacugguuugggg

SEQ ID NO: 1237392 - RNA, 19 nt, Artificial Sequence
  Description of Artificial Sequence: Synthetic oligonucleotide
uccaguuuagacaugcauc

SEQ ID NO: 1237393 - RNA, 19 nt, Artificial Sequence
  Description of Artificial Sequence: Synthetic oligonucleotide
uuccgagaagcccaguccg

SEQ ID NO: 1237394 - RNA, 19 nt, Artificial Sequence
  Description of Artificial Sequence: Synthetic oligonucleotide
agucgauuuguacaugguc

SEQ ID NO: 1237395 - RNA, 19 nt, Artificial Sequence
  Description of Artificial Sequence: Synthetic oligonucleotide
acgucuaauaauugaauga

SEQ ID NO: 1237396 - RNA, 19 nt, Artificial Sequence
  Description of Artificial Sequence: Synthetic oligonucleotide
cugucuaguucuuuguggg

SEQ ID NO: 1237397 - RNA, 19 nt, Artificial Sequence
  Description of Artificial Sequence: Synthetic oligonucleotide
agguguuuguggcugcucc

SEQ ID NO: 1237398 - RNA, 19 nt, Artificial Sequence
  Description of Artificial Sequence: Synthetic oligonucleotide
augaaaugaaaauuugcau

SEQ ID NO: 1237399 - RNA, 19 nt, Artificial Sequence
  Description of Artificial Sequence: Synthetic oligonucleotide
aagugcaugguggaaggac

SEQ ID NO: 1237400 - RNA, 19 nt, Artificial Sequence
  Description of Artificial Sequence: Synthetic oligonucleotide
gaugguggaauuucuuccc

SEQ ID NO: 1237401 - RNA, 19 nt, Artificial Sequence
  Description of Artificial Sequence: Synthetic oligonucleotide
uuuccaauaugaugggaca

SEQ ID NO: 1237402 - RNA, 19 nt, Artificial Sequence
  Description of Artificial Sequence: Synthetic oligonucleotide
uaaaauccuguugagccag

SEQ ID NO: 1237403 - RNA, 19 nt, Artificial Sequence
  Description of Artificial Sequence: Synthetic oligonucleotide
cacuaaaugacagucccgg

SEQ ID NO: 1237404 - RNA, 19 nt, Artificial Sequence
  Description of Artificial Sequence: Synthetic oligonucleotide
aacaguucuaauguggcaa

SEQ ID NO: 1237405 - RNA, 19 nt, Artificial Sequence
  Description of Artificial Sequence: Synthetic oligonucleotide
ucacuaaaugacagucccg

SEQ ID NO: 1237406 - RNA, 19 nt, Artificial Sequence
  Description of Artificial Sequence: Synthetic oligonucleotide
uguugagccaggcaucggc

SEQ ID NO: 1237407 - RNA, 19 nt, Artificial Sequence
  Description of Artificial Sequence: Synthetic oligonucleotide
uuuagacaugcaucggcag

SEQ ID NO: 1237408 - RNA, 19 nt, Artificial Sequence
  Description of Artificial Sequence: Synthetic oligonucleotide
acaguucuaauguggcaac

SEQ ID NO: 1237409 - RNA, 19 nt, Artificial Sequence
  Description of Artificial Sequence: Synthetic oligonucleotide
ucuauacacaccucacgug

SEQ ID NO: 1237410 - RNA, 19 nt, Artificial Sequence
  Description of Artificial Sequence: Synthetic oligonucleotide
caugcauugagucuuucuc

SEQ ID NO: 1237411 - RNA, 19 nt, Artificial Sequence
  Description of Artificial Sequence: Synthetic oligonucleotide
ccaguuuagacaugcaucg

SEQ ID NO: 1237412 - RNA, 19 nt, Artificial Sequence
  Description of Artificial Sequence: Synthetic oligonucleotide
cuucacuaaaugacagucc

SEQ ID NO: 1237413 - RNA, 19 nt, Artificial Sequence
  Description of Artificial Sequence: Synthetic oligonucleotide
acacauggagguuuaaaga

SEQ ID NO: 1237414 - RNA, 19 nt, Artificial Sequence
  Description of Artificial Sequence: Synthetic oligonucleotide
aauccauugguagagucau

SEQ ID NO: 1237415 - RNA, 19 nt, Artificial Sequence
  Description of Artificial Sequence: Synthetic oligonucleotide
caucuauacacaccucacg

SEQ ID NO: 1237416 - RNA, 19 nt, Artificial Sequence
  Description of Artificial Sequence: Synthetic oligonucleotide
aaugccucagucgauuugu

SEQ ID NO: 1237417 - RNA, 19 nt, Artificial Sequence
  Description of Artificial Sequence: Synthetic oligonucleotide
ugcaucggcaggaaguaug

SEQ ID NO: 1237418 - RNA, 19 nt, Artificial Sequence
  Description of Artificial Sequence: Synthetic oligonucleotide
aguaagaugaugaaaugaa

SEQ ID NO: 1237419 - RNA, 19 nt, Artificial Sequence
  Description of Artificial Sequence: Synthetic oligonucleotide
uuugccugcaaaagccuug

SEQ ID NO: 1237420 - RNA, 19 nt, Artificial Sequence
  Description of Artificial Sequence: Synthetic oligonucleotide
auaaaauccuguugagcca

SEQ ID NO: 1237421 - RNA, 19 nt, Artificial Sequence
  Description of Artificial Sequence: Synthetic oligonucleotide
ucacguggcaugcauugag

SEQ ID NO: 1237422 - RNA, 19 nt, Artificial Sequence
  Description of Artificial Sequence: Synthetic oligonucleotide
gacaaguuuuguuggcugc

SEQ ID NO: 1237423 - RNA, 19 nt, Artificial Sequence
  Description of Artificial Sequence: Synthetic oligonucleotide
auguaguuauuccacacau

SEQ ID NO: 1237424 - RNA, 19 nt, Artificial Sequence
  Description of Artificial Sequence: Synthetic oligonucleotide
acugauugugacugguuug

SEQ ID NO: 1237425 - RNA, 19 nt, Artificial Sequence
  Description of Artificial Sequence: Synthetic oligonucleotide
uauacacaccucacguggc

SEQ ID NO: 1237426 - RNA, 19 nt, Artificial Sequence
  Description of Artificial Sequence: Synthetic oligonucleotide
agucccggaucacaaugcc

SEQ ID NO: 1237427 - RNA, 19 nt, Artificial Sequence
  Description of Artificial Sequence: Synthetic oligonucleotide
ugucuaguucuuugugggg

SEQ ID NO: 1237428 - RNA, 19 nt, Artificial Sequence
  Description of Artificial Sequence: Synthetic oligonucleotide
uccgcuuccgagaagccca

SEQ ID NO: 1237429 - RNA, 19 nt, Artificial Sequence
  Description of Artificial Sequence: Synthetic oligonucleotide
aaaccuuggcugucugguc

SEQ ID NO: 1237430 - RNA, 19 nt, Artificial Sequence
  Description of Artificial Sequence: Synthetic oligonucleotide
gacaugagcucaucuacac

SEQ ID NO: 1237431 - RNA, 19 nt, Artificial Sequence
  Description of Artificial Sequence: Synthetic oligonucleotide
cuguauuguaaugugcagc

SEQ ID NO: 1237432 - RNA, 19 nt, Artificial Sequence
  Description of Artificial Sequence: Synthetic oligonucleotide
acguccaguuuagacaugc

SEQ ID NO: 1237433 - RNA, 19 nt, Artificial Sequence
  Description of Artificial Sequence: Synthetic oligonucleotide
uucaaacaacgucuugcug

SEQ ID NO: 1237434 - RNA, 19 nt, Artificial Sequence
  Description of Artificial Sequence: Synthetic oligonucleotide
augcauugcagccccucgc

SEQ ID NO: 1237435 - RNA, 19 nt, Artificial Sequence
  Description of Artificial Sequence: Synthetic oligonucleotide
ucuguuaccauggucccac

SEQ ID NO: 1237436 - RNA, 19 nt, Artificial Sequence
  Description of Artificial Sequence: Synthetic oligonucleotide
guguucaugcauugcagcc

SEQ ID NO: 1237437 - RNA, 19 nt, Artificial Sequence
  Description of Artificial Sequence: Synthetic oligonucleotide
ucgauuuguacauggucgu

SEQ ID NO: 1237438 - RNA, 19 nt, Artificial Sequence
  Description of Artificial Sequence: Synthetic oligonucleotide
ugugcugguguucaugcau

SEQ ID NO: 1237439 - RNA, 19 nt, Artificial Sequence
  Description of Artificial Sequence: Synthetic oligonucleotide
caugaucuuaguucauaug

SEQ ID NO: 1237440 - RNA, 19 nt, Artificial Sequence
  Description of Artificial Sequence: Synthetic oligonucleotide
gucacugguagaaaagcag

SEQ ID NO: 1237441 - RNA, 19 nt, Artificial Sequence
  Description of Artificial Sequence: Synthetic oligonucleotide
uugucuguaaacguccagu

SEQ ID NO: 1237442 - RNA, 19 nt, Artificial Sequence
  Description of Artificial Sequence: Synthetic oligonucleotide
aguucuaauguggcaacag

SEQ ID NO: 1237443 - RNA, 19 nt, Artificial Sequence
  Description of Artificial Sequence: Synthetic oligonucleotide
uguacauggucgucgguaa

SEQ ID NO: 1237444 - RNA, 19 nt, Artificial Sequence
  Description of Artificial Sequence: Synthetic oligonucleotide
guugagagugggcugcugc

SEQ ID NO: 1237445 - RNA, 19 nt, Artificial Sequence
  Description of Artificial Sequence: Synthetic oligonucleotide
uccaauaugaugggacaca

SEQ ID NO: 1237446 - RNA, 19 nt, Artificial Sequence
  Description of Artificial Sequence: Synthetic oligonucleotide
guaacaacugcauguuuga

SEQ ID NO: 1237447 - RNA, 19 nt, Artificial Sequence
  Description of Artificial Sequence: Synthetic oligonucleotide
acguggcaugcauugaguc

SEQ ID NO: 1237448 - RNA, 19 nt, Artificial Sequence
  Description of Artificial Sequence: Synthetic oligonucleotide
ugacaugaguuucugucua

SEQ ID NO: 1237449 - RNA, 19 nt, Artificial Sequence
  Description of Artificial Sequence: Synthetic oligonucleotide
ucgcuguugcaacagcccc

SEQ ID NO: 1237450 - RNA, 19 nt, Artificial Sequence
  Description of Artificial Sequence: Synthetic oligonucleotide
uucuguguauaaacaguuc

SEQ ID NO: 1237451 - RNA, 19 nt, Artificial Sequence
  Description of Artificial Sequence: Synthetic oligonucleotide
cuguaaacguccaguuuag

SEQ ID NO: 1237452 - RNA, 19 nt, Artificial Sequence
  Description of Artificial Sequence: Synthetic oligonucleotide
uuugaugguggaauuucuu

SEQ ID NO: 1237453 - RNA, 19 nt, Artificial Sequence
  Description of Artificial Sequence: Synthetic oligonucleotide
gacaugaguuucugucuag

SEQ ID NO: 1237454 - RNA, 19 nt, Artificial Sequence
  Description of Artificial Sequence: Synthetic oligonucleotide
uggucgucgguaacaacug

SEQ ID NO: 1237455 - RNA, 19 nt, Artificial Sequence
  Description of Artificial Sequence: Synthetic oligonucleotide
acacauaguuugcuggaca

SEQ ID NO: 1237456 - RNA, 19 nt, Artificial Sequence
  Description of Artificial Sequence: Synthetic oligonucleotide
gcuggacaaguuuuguugg

SEQ ID NO: 1237457 - RNA, 19 nt, Artificial Sequence
  Description of Artificial Sequence: Synthetic oligonucleotide
caucuguagacggacacac

SEQ ID NO: 1237458 - RNA, 19 nt, Artificial Sequence
  Description of Artificial Sequence: Synthetic oligonucleotide
guacaggacggacaugagc

SEQ ID NO: 1237459 - RNA, 19 nt, Artificial Sequence
  Description of Artificial Sequence: Synthetic oligonucleotide
cacaucuauacacaccuca

SEQ ID NO: 1237460 - RNA, 19 nt, Artificial Sequence
  Description of Artificial Sequence: Synthetic oligonucleotide
guagggaacacgccagagc

SEQ ID NO: 1237461 - RNA, 19 nt, Artificial Sequence
  Description of Artificial Sequence: Synthetic oligonucleotide
auggucgucgguaacaacu

SEQ ID NO: 1237462 - RNA, 19 nt, Artificial Sequence
  Description of Artificial Sequence: Synthetic oligonucleotide
uccgagaagcccaguccgg

SEQ ID NO: 1237463 - RNA, 19 nt, Artificial Sequence
  Description of Artificial Sequence: Synthetic oligonucleotide
uuccuuagcuggcacuugu

SEQ ID NO: 1237464 - RNA, 19 nt, Artificial Sequence
  Description of Artificial Sequence: Synthetic oligonucleotide
agacggacacacauggagg

SEQ ID NO: 1237465 - RNA, 19 nt, Artificial Sequence
  Description of Artificial Sequence: Synthetic oligonucleotide
guuaccauggucccacaga

SEQ ID NO: 1237466 - RNA, 19 nt, Artificial Sequence
  Description of Artificial Sequence: Synthetic oligonucleotide
caugcauugcagccccucg

SEQ ID NO: 1237467 - RNA, 19 nt, Artificial Sequence
  Description of Artificial Sequence: Synthetic oligonucleotide
uugguagagucauccucag

SEQ ID NO: 1237468 - RNA, 19 nt, Artificial Sequence
  Description of Artificial Sequence: Synthetic oligonucleotide
uacauggucgucgguaaca

SEQ ID NO: 1237469 - RNA, 19 nt, Artificial Sequence
  Description of Artificial Sequence: Synthetic oligonucleotide
caauaugaugggacacagc

SEQ ID NO: 1237470 - RNA, 19 nt, Artificial Sequence
  Description of Artificial Sequence: Synthetic oligonucleotide
uuguguugagagugggcug

SEQ ID NO: 1237471 - RNA, 19 nt, Artificial Sequence
  Description of Artificial Sequence: Synthetic oligonucleotide
gacuuucuguguauaaaca

SEQ ID NO: 1237472 - RNA, 19 nt, Artificial Sequence
  Description of Artificial Sequence: Synthetic oligonucleotide
aacgucuugcugagguaac

SEQ ID NO: 1237473 - RNA, 19 nt, Artificial Sequence
  Description of Artificial Sequence: Synthetic oligonucleotide
ucaagacaguaagaugaug

SEQ ID NO: 1237474 - RNA, 19 nt, Artificial Sequence
  Description of Artificial Sequence: Synthetic oligonucleotide
aggucuuugccugcaaaag

SEQ ID NO: 1237475 - RNA, 19 nt, Artificial Sequence
  Description of Artificial Sequence: Synthetic oligonucleotide
acaugcaucggcaggaagu

SEQ ID NO: 1237476 - RNA, 19 nt, Artificial Sequence
  Description of Artificial Sequence: Synthetic oligonucleotide
uuccaauaugaugggacac

SEQ ID NO: 1237477 - RNA, 19 nt, Artificial Sequence
  Description of Artificial Sequence: Synthetic oligonucleotide
agcgacacacuucuucacu

SEQ ID NO: 1237478 - RNA, 19 nt, Artificial Sequence
  Description of Artificial Sequence: Synthetic oligonucleotide
uugagucuuucuccacuca

SEQ ID NO: 1237479 - RNA, 19 nt, Artificial Sequence
  Description of Artificial Sequence: Synthetic oligonucleotide
ucccuuuuagaaagcacuu

SEQ ID NO: 1237480 - RNA, 19 nt, Artificial Sequence
  Description of Artificial Sequence: Synthetic oligonucleotide
uccuuguguugagaguggg

SEQ ID NO: 1237481 - RNA, 19 nt, Artificial Sequence
  Description of Artificial Sequence: Synthetic oligonucleotide
ugacagucccggaucacaa

SEQ ID NO: 1237482 - RNA, 19 nt, Artificial Sequence
  Description of Artificial Sequence: Synthetic oligonucleotide
guuuagacaugcaucggca

SEQ ID NO: 1237483 - RNA, 19 nt, Artificial Sequence
  Description of Artificial Sequence: Synthetic oligonucleotide
aucggcaggaaguaugauu

SEQ ID NO: 1237484 - RNA, 19 nt, Artificial Sequence
  Description of Artificial Sequence: Synthetic oligonucleotide
acuaaaugacagucccgga

SEQ ID NO: 1237485 - RNA, 19 nt, Artificial Sequence
  Description of Artificial Sequence: Synthetic oligonucleotide
ucgucgguaacaacugcau

SEQ ID NO: 1237486 - RNA, 19 nt, Artificial Sequence
  Description of Artificial Sequence: Synthetic oligonucleotide
cugcuugacacugugauaa

SEQ ID NO: 1237487 - RNA, 19 nt, Artificial Sequence
  Description of Artificial Sequence: Synthetic oligonucleotide
gacaugcaucggcaggaag

SEQ ID NO: 1237488 - RNA, 19 nt, Artificial Sequence
  Description of Artificial Sequence: Synthetic oligonucleotide
acgucuugcugagguaacc

SEQ ID NO: 1237489 - RNA, 19 nt, Artificial Sequence
  Description of Artificial Sequence: Synthetic oligonucleotide
ggaaguaugauuggcaaaa

SEQ ID NO: 1237490 - RNA, 19 nt, Artificial Sequence
  Description of Artificial Sequence: Synthetic oligonucleotide
aaagcacuucucuguguuu

SEQ ID NO: 1237491 - RNA, 19 nt, Artificial Sequence
  Description of Artificial Sequence: Synthetic oligonucleotide
auacacaccucacguggca

SEQ ID NO: 1237492 - RNA, 19 nt, Artificial Sequence
  Description of Artificial Sequence: Synthetic oligonucleotide
ugagguaaccugugcuggu

SEQ ID NO: 1237493 - RNA, 19 nt, Artificial Sequence
  Description of Artificial Sequence: Synthetic oligonucleotide
aggaaguaugauuggcaaa

SEQ ID NO: 1237494 - RNA, 19 nt, Artificial Sequence
  Description of Artificial Sequence: Synthetic oligonucleotide
acacugaccgcaacuguuc

SEQ ID NO: 1237495 - RNA, 19 nt, Artificial Sequence
  Description of Artificial Sequence: Synthetic oligonucleotide
uggcagagaacgucuaaua

SEQ ID NO: 1237496 - RNA, 19 nt, Artificial Sequence
  Description of Artificial Sequence: Synthetic oligonucleotide
aguccggacucgaaggcgg

SEQ ID NO: 1237497 - RNA, 19 nt, Artificial Sequence
  Description of Artificial Sequence: Synthetic oligonucleotide
agccccucgcuguugcaac

SEQ ID NO: 1237498 - RNA, 19 nt, Artificial Sequence
  Description of Artificial Sequence: Synthetic oligonucleotide
ggagguuuaaagaaggugu

SEQ ID NO: 1237499 - RNA, 19 nt, Artificial Sequence
  Description of Artificial Sequence: Synthetic oligonucleotide
aggggucgguuucuaggac

SEQ ID NO: 1237500 - RNA, 19 nt, Artificial Sequence
  Description of Artificial Sequence: Synthetic oligonucleotide
acagagacuuucuguguau

SEQ ID NO: 1237501 - RNA, 19 nt, Artificial Sequence
  Description of Artificial Sequence: Synthetic oligonucleotide
aggguuugaauaaaagaua

SEQ ID NO: 1237502 - RNA, 19 nt, Artificial Sequence
  Description of Artificial Sequence: Synthetic oligonucleotide
acauaguuugcuggacaag

SEQ ID NO: 1237503 - RNA, 19 nt, Artificial Sequence
  Description of Artificial Sequence: Synthetic oligonucleotide
guaagaugaugaaaugaaa

SEQ ID NO: 1237504 - RNA, 19 nt, Artificial Sequence
  Description of Artificial Sequence: Synthetic oligonucleotide
ugcaugguggaaggaccgg

SEQ ID NO: 1237505 - RNA, 19 nt, Artificial Sequence
  Description of Artificial Sequence: Synthetic oligonucleotide
uacacacuggcaaguguuu

SEQ ID NO: 1237506 - RNA, 19 nt, Artificial Sequence
  Description of Artificial Sequence: Synthetic oligonucleotide
uguugcuggcagagaacgu

SEQ ID NO: 1237507 - RNA, 19 nt, Artificial Sequence
  Description of Artificial Sequence: Synthetic oligonucleotide
cuaguucuuuguggggucc

SEQ ID NO: 1237508 - RNA, 19 nt, Artificial Sequence
  Description of Artificial Sequence: Synthetic oligonucleotide
acauuguccccuguccuug

SEQ ID NO: 1237509 - RNA, 19 nt, Artificial Sequence
  Description of Artificial Sequence: Synthetic oligonucleotide
aaacaacgucuugcugagg

SEQ ID NO: 1237510 - RNA, 19 nt, Artificial Sequence
  Description of Artificial Sequence: Synthetic oligonucleotide
ugcagcuauccccacgguu

SEQ ID NO: 1237511 - RNA, 19 nt, Artificial Sequence
  Description of Artificial Sequence: Synthetic oligonucleotide
gaaagcacuucucuguguu

SEQ ID NO: 1237512 - RNA, 19 nt, Artificial Sequence
  Description of Artificial Sequence: Synthetic oligonucleotide
gugcaugguggaaggaccg

SEQ ID NO: 1237513 - RNA, 19 nt, Artificial Sequence
  Description of Artificial Sequence: Synthetic oligonucleotide
uuccaggauucaggggucg

SEQ ID NO: 1237514 - RNA, 19 nt, Artificial Sequence
  Description of Artificial Sequence: Synthetic oligonucleotide
cacugaccgcaacuguucc

SEQ ID NO: 1237515 - RNA, 19 nt, Artificial Sequence
  Description of Artificial Sequence: Synthetic oligonucleotide
uguaaacguccaguuuaga

SEQ ID NO: 1237516 - RNA, 19 nt, Artificial Sequence
  Description of Artificial Sequence: Synthetic oligonucleotide
caguuuagacaugcaucgg

SEQ ID NO: 1237517 - RNA, 19 nt, Artificial Sequence
  Description of Artificial Sequence: Synthetic oligonucleotide
gccucagucgauuuguaca

SEQ ID NO: 1237518 - RNA, 19 nt, Artificial Sequence
  Description of Artificial Sequence: Synthetic oligonucleotide
gacggacacacauggaggu

SEQ ID NO: 1237519 - RNA, 19 nt, Artificial Sequence
  Description of Artificial Sequence: Synthetic oligonucleotide
acaugaguuucugucuagu

SEQ ID NO: 1237520 - RNA, 19 nt, Artificial Sequence
  Description of Artificial Sequence: Synthetic oligonucleotide
uccaggauucaggggucgg

SEQ ID NO: 1237521 - RNA, 19 nt, Artificial Sequence
  Description of Artificial Sequence: Synthetic oligonucleotide
aggcugagguccccucucg

SEQ ID NO: 1237522 - RNA, 19 nt, Artificial Sequence
  Description of Artificial Sequence: Synthetic oligonucleotide
uuguuggcugcuugacacu

SEQ ID NO: 1237523 - RNA, 19 nt, Artificial Sequence
  Description of Artificial Sequence: Synthetic oligonucleotide
uugccugcaaaagccuuga

SEQ ID NO: 1237524 - RNA, 19 nt, Artificial Sequence
  Description of Artificial Sequence: Synthetic oligonucleotide
ucgggcuccgcuuccgaga

SEQ ID NO: 1237525 - RNA, 19 nt, Artificial Sequence
  Description of Artificial Sequence: Synthetic oligonucleotide
ucgguuucuaggacagguu

SEQ ID NO: 1237526 - RNA, 19 nt, Artificial Sequence
  Description of Artificial Sequence: Synthetic oligonucleotide
ucgguaacaacugcauguu

SEQ ID NO: 1237527 - RNA, 19 nt, Artificial Sequence
  Description of Artificial Sequence: Synthetic oligonucleotide
uuuccuuagcuggcacuug

SEQ ID NO: 1237528 - RNA, 19 nt, Artificial Sequence
  Description of Artificial Sequence: Synthetic oligonucleotide
augugcagcagcaaauuuu

SEQ ID NO: 1237529 - RNA, 19 nt, Artificial Sequence
  Description of Artificial Sequence: Synthetic oligonucleotide
cugaccgcaacuguuccuc

SEQ ID NO: 1237530 - RNA, 19 nt, Artificial Sequence
  Description of Artificial Sequence: Synthetic oligonucleotide
auaugaugggacacagcga

SEQ ID NO: 1237531 - RNA, 19 nt, Artificial Sequence
  Description of Artificial Sequence: Synthetic oligonucleotide
ucggcacauguaguuauuc

SEQ ID NO: 1237532 - RNA, 19 nt, Artificial Sequence
  Description of Artificial Sequence: Synthetic oligonucleotide
uguccccuguccuuguguu

SEQ ID NO: 1237533 - RNA, 19 nt, Artificial Sequence
  Description of Artificial Sequence: Synthetic oligonucleotide
ccccuuugcagacacacug

SEQ ID NO: 1237534 - RNA, 19 nt, Artificial Sequence
  Description of Artificial Sequence: Synthetic oligonucleotide
ucacaaugccucagucgau

SEQ ID NO: 1237535 - RNA, 19 nt, Artificial Sequence
  Description of Artificial Sequence: Synthetic oligonucleotide
gaggcacuguaauuucaaa

SEQ ID NO: 1237536 - RNA, 19 nt, Artificial Sequence
  Description of Artificial Sequence: Synthetic oligonucleotide
ucccgcgguuuccuucggg

SEQ ID NO: 1237537 - RNA, 19 nt, Artificial Sequence
  Description of Artificial Sequence: Synthetic oligonucleotide
augauuggcaaaacugauu

SEQ ID NO: 1237538 - RNA, 19 nt, Artificial Sequence
  Description of Artificial Sequence: Synthetic oligonucleotide
ccaauaugaugggacacag

SEQ ID NO: 1237539 - RNA, 19 nt, Artificial Sequence
  Description of Artificial Sequence: Synthetic oligonucleotide
ugguggaauuucuucccuu

SEQ ID NO: 1237540 - RNA, 19 nt, Artificial Sequence
  Description of Artificial Sequence: Synthetic oligonucleotide
ggcaggaaguaugauuggc

SEQ ID NO: 1237541 - RNA, 19 nt, Artificial Sequence
  Description of Artificial Sequence: Synthetic oligonucleotide
cucucgucccagucccgcg

SEQ ID NO: 1237542 - RNA, 19 nt, Artificial Sequence
  Description of Artificial Sequence: Synthetic oligonucleotide
acaaugccucagucgauuu

SEQ ID NO: 1237543 - RNA, 19 nt, Artificial Sequence
  Description of Artificial Sequence: Synthetic oligonucleotide
gaggccgguccgcuggcag

SEQ ID NO: 1237544 - RNA, 19 nt, Artificial Sequence
  Description of Artificial Sequence: Synthetic oligonucleotide
gagugggcugcugccagcc

SEQ ID NO: 1237545 - RNA, 19 nt, Artificial Sequence
  Description of Artificial Sequence: Synthetic oligonucleotide
ucaugcauugcagccccuc

SEQ ID NO: 1237546 - RNA, 19 nt, Artificial Sequence
  Description of Artificial Sequence: Synthetic oligonucleotide
gcgaguagggaacacgcca

SEQ ID NO: 1237547 - RNA, 19 nt, Artificial Sequence
  Description of Artificial Sequence: Synthetic oligonucleotide
gaacgucuaauaauugaau

SEQ ID NO: 1237548 - RNA, 19 nt, Artificial Sequence
  Description of Artificial Sequence: Synthetic oligonucleotide
agaggcacuguaauuucaa

SEQ ID NO: 1237549 - RNA, 19 nt, Artificial Sequence
  Description of Artificial Sequence: Synthetic oligonucleotide
ggaucacaaugccucaguc

SEQ ID NO: 1237550 - RNA, 19 nt, Artificial Sequence
  Description of Artificial Sequence: Synthetic oligonucleotide
gcagcuauccccacgguuc

SEQ ID NO: 1237551 - RNA, 19 nt, Artificial Sequence
  Description of Artificial Sequence: Synthetic oligonucleotide
gaggcugagguccccucuc

SEQ ID NO: 1237552 - RNA, 19 nt, Artificial Sequence
  Description of Artificial Sequence: Synthetic oligonucleotide
gucgucgguaacaacugca

SEQ ID NO: 1237553 - RNA, 19 nt, Artificial Sequence
  Description of Artificial Sequence: Synthetic oligonucleotide
uccucaggguuugaauaaa

SEQ ID NO: 1237554 - RNA, 19 nt, Artificial Sequence
  Description of Artificial Sequence: Synthetic oligonucleotide
gacacacugacaugaguuu

SEQ ID NO: 1237555 - RNA, 19 nt, Artificial Sequence
  Description of Artificial Sequence: Synthetic oligonucleotide
uggaauccauugguagagu

SEQ ID NO: 1237556 - RNA, 19 nt, Artificial Sequence
  Description of Artificial Sequence: Synthetic oligonucleotide
caaaagccuugaccucgcc

SEQ ID NO: 1237557 - RNA, 19 nt, Artificial Sequence
  Description of Artificial Sequence: Synthetic oligonucleotide
ccucacguggcaugcauug

SEQ ID NO: 1237558 - RNA, 19 nt, Artificial Sequence
  Description of Artificial Sequence: Synthetic oligonucleotide
gaugggacacagcgacaca

SEQ ID NO: 1237559 - RNA, 19 nt, Artificial Sequence
  Description of Artificial Sequence: Synthetic oligonucleotide
aggccgguccgcuggcagg

SEQ ID NO: 1237560 - RNA, 19 nt, Artificial Sequence
  Description of Artificial Sequence: Synthetic oligonucleotide
ccucgcuguugcaacagcc

SEQ ID NO: 1237561 - RNA, 19 nt, Artificial Sequence
  Description of Artificial Sequence: Synthetic oligonucleotide
gaagcccaguccggacucg

SEQ ID NO: 1237562 - RNA, 19 nt, Artificial Sequence
  Description of Artificial Sequence: Synthetic oligonucleotide
cucguggggacccgggauc

SEQ ID NO: 1237563 - RNA, 19 nt, Artificial Sequence
  Description of Artificial Sequence: Synthetic oligonucleotide
cagcgacacacuucuucac

SEQ ID NO: 1237564 - RNA, 19 nt, Artificial Sequence
  Description of Artificial Sequence: Synthetic oligonucleotide
guagagucauccucagggu

SEQ ID NO: 1237565 - RNA, 19 nt, Artificial Sequence
  Description of Artificial Sequence: Synthetic oligonucleotide
uauccccacgguucaugaa

SEQ ID NO: 1237566 - RNA, 19 nt, Artificial Sequence
  Description of Artificial Sequence: Synthetic oligonucleotide
guacauggucgucgguaac

SEQ ID NO: 1237567 - RNA, 19 nt, Artificial Sequence
  Description of Artificial Sequence: Synthetic oligonucleotide
auguuugaugguggaauuu

SEQ ID NO: 1237568 - RNA, 19 nt, Artificial Sequence
  Description of Artificial Sequence: Synthetic oligonucleotide
auugcagccccucgcuguu

SEQ ID NO: 1237569 - RNA, 19 nt, Artificial Sequence
  Description of Artificial Sequence: Synthetic oligonucleotide
guaaugugcagcagcaaau

SEQ ID NO: 1237570 - RNA, 19 nt, Artificial Sequence
  Description of Artificial Sequence: Synthetic oligonucleotide
guccaguuuagacaugcau

SEQ ID NO: 1237571 - RNA, 19 nt, Artificial Sequence
  Description of Artificial Sequence: Synthetic oligonucleotide
acauggucgucgguaacaa

SEQ ID NO: 1237572 - RNA, 19 nt, Artificial Sequence
  Description of Artificial Sequence: Synthetic oligonucleotide
gguggcgggcgccucgugg

SEQ ID NO: 1237573 - RNA, 19 nt, Artificial Sequence
  Description of Artificial Sequence: Synthetic oligonucleotide
gacggacaugagcucaucu

SEQ ID NO: 1237574 - RNA, 19 nt, Artificial Sequence
  Description of Artificial Sequence: Synthetic oligonucleotide
caacgucuugcugagguaa

SEQ ID NO: 1237575 - RNA, 19 nt, Artificial Sequence
  Description of Artificial Sequence: Synthetic oligonucleotide
accugugcugguguucaug

SEQ ID NO: 1237576 - RNA, 19 nt, Artificial Sequence
  Description of Artificial Sequence: Synthetic oligonucleotide
uacacaccucacguggcau

SEQ ID NO: 1237577 - RNA, 19 nt, Artificial Sequence
  Description of Artificial Sequence: Synthetic oligonucleotide
cagucuugagccucuguua

SEQ ID NO: 1237578 - RNA, 19 nt, Artificial Sequence
  Description of Artificial Sequence: Synthetic oligonucleotide
ugcuugacacugugauaau

SEQ ID NO: 1237579 - RNA, 19 nt, Artificial Sequence
  Description of Artificial Sequence: Synthetic oligonucleotide
ccuuguguugagagugggc

SEQ ID NO: 1237580 - RNA, 19 nt, Artificial Sequence
  Description of Artificial Sequence: Synthetic oligonucleotide
uucaugcauugcagccccu

SEQ ID NO: 1237581 - RNA, 19 nt, Artificial Sequence
  Description of Artificial Sequence: Synthetic oligonucleotide
gggucgguuucuaggacag

SEQ ID NO: 1237582 - RNA, 19 nt, Artificial Sequence
  Description of Artificial Sequence: Synthetic oligonucleotide
ucguggggacccgggauca

SEQ ID NO: 1237583 - RNA, 19 nt, Artificial Sequence
  Description of Artificial Sequence: Synthetic oligonucleotide
cgaguagggaacacgccag

SEQ ID NO: 1237584 - RNA, 19 nt, Artificial Sequence
  Description of Artificial Sequence: Synthetic oligonucleotide
cucagucgauuuguacaug

SEQ ID NO: 1237585 - RNA, 19 nt, Artificial Sequence
  Description of Artificial Sequence: Synthetic oligonucleotide
ggucgucgguaacaacugc

SEQ ID NO: 1237586 - RNA, 19 nt, Artificial Sequence
  Description of Artificial Sequence: Synthetic oligonucleotide
aacguccaguuuagacaug

SEQ ID NO: 1237587 - RNA, 19 nt, Artificial Sequence
  Description of Artificial Sequence: Synthetic oligonucleotide
gguuugaauaaaagauaaa

SEQ ID NO: 1237588 - RNA, 19 nt, Artificial Sequence
  Description of Artificial Sequence: Synthetic oligonucleotide
cccgcgguuuccuucgggg

SEQ ID NO: 1237589 - RNA, 19 nt, Artificial Sequence
  Description of Artificial Sequence: Synthetic oligonucleotide
ggggucgguuucuaggaca

SEQ ID NO: 1237590 - RNA, 19 nt, Artificial Sequence
  Description of Artificial Sequence: Synthetic oligonucleotide
gguguuuguggcugcucca

SEQ ID NO: 1237591 - RNA, 19 nt, Artificial Sequence
  Description of Artificial Sequence: Synthetic oligonucleotide
cagucccgcgguuuccuuc

SEQ ID NO: 1237592 - RNA, 19 nt, Artificial Sequence
  Description of Artificial Sequence: Synthetic oligonucleotide
cauugcagccccucgcugu

SEQ ID NO: 1237593 - RNA, 19 nt, Artificial Sequence
  Description of Artificial Sequence: Synthetic oligonucleotide
auccauugguagagucauc

SEQ ID NO: 1237594 - RNA, 19 nt, Artificial Sequence
  Description of Artificial Sequence: Synthetic oligonucleotide
agcggcgaguagggaacac

SEQ ID NO: 1237595 - RNA, 19 nt, Artificial Sequence
  Description of Artificial Sequence: Synthetic oligonucleotide
ccgggaucagcgcagcggc

SEQ ID NO: 1237596 - RNA, 19 nt, Artificial Sequence
  Description of Artificial Sequence: Synthetic oligonucleotide
acccgggaucagcgcagcg

SEQ ID NO: 1237597 - RNA, 19 nt, Artificial Sequence
  Description of Artificial Sequence: Synthetic oligonucleotide
caugcaucggcaggaagua

SEQ ID NO: 1237598 - RNA, 19 nt, Artificial Sequence
  Description of Artificial Sequence: Synthetic oligonucleotide
cccacgguucaugaaacac

SEQ ID NO: 1237599 - RNA, 19 nt, Artificial Sequence
  Description of Artificial Sequence: Synthetic oligonucleotide
ggaucagcgcagcggcgag

SEQ ID NO: 1237600 - RNA, 19 nt, Artificial Sequence
  Description of Artificial Sequence: Synthetic oligonucleotide
aucagcgcagcggcgagua

SEQ ID NO: 1237601 - RNA, 19 nt, Artificial Sequence
  Description of Artificial Sequence: Synthetic oligonucleotide
cgucuaauaauugaaugaa

SEQ ID NO: 1237602 - RNA, 19 nt, Artificial Sequence
  Description of Artificial Sequence: Synthetic oligonucleotide
guggcaugcauugagucuu

SEQ ID NO: 1237603 - RNA, 19 nt, Artificial Sequence
  Description of Artificial Sequence: Synthetic oligonucleotide
caucggcacauguaguuau

SEQ ID NO: 1237604 - RNA, 19 nt, Artificial Sequence
  Description of Artificial Sequence: Synthetic oligonucleotide
cccacaucuguagacggac

SEQ ID NO: 1237605 - RNA, 19 nt, Artificial Sequence
  Description of Artificial Sequence: Synthetic oligonucleotide
uccggacucgaaggcggug

SEQ ID NO: 1237606 - RNA, 19 nt, Artificial Sequence
  Description of Artificial Sequence: Synthetic oligonucleotide
cggcgaguagggaacacgc

SEQ ID NO: 1237607 - RNA, 19 nt, Artificial Sequence
  Description of Artificial Sequence: Synthetic oligonucleotide
gcugguguucaugcauugc

SEQ ID NO: 1237608 - RNA, 19 nt, Artificial Sequence
  Description of Artificial Sequence: Synthetic oligonucleotide
guagacggacacacaugga

SEQ ID NO: 1237609 - RNA, 19 nt, Artificial Sequence
  Description of Artificial Sequence: Synthetic oligonucleotide
gcaaaagccuugaccucgc

SEQ ID NO: 1237610 - RNA, 19 nt, Artificial Sequence
  Description of Artificial Sequence: Synthetic oligonucleotide
ccacacauaguuugcugga

SEQ ID NO: 1237611 - RNA, 19 nt, Artificial Sequence
  Description of Artificial Sequence: Synthetic oligonucleotide
ccccucucgucccaguccc

SEQ ID NO: 1237612 - RNA, 19 nt, Artificial Sequence
  Description of Artificial Sequence: Synthetic oligonucleotide
gcuauccccacgguucaug

SEQ ID NO: 1237613 - RNA, 19 nt, Artificial Sequence
  Description of Artificial Sequence: Synthetic oligonucleotide
gucuguaaacguccaguuu

SEQ ID NO: 1237614 - RNA, 19 nt, Artificial Sequence
  Description of Artificial Sequence: Synthetic oligonucleotide
gucccagucccgcgguuuc

SEQ ID NO: 1237615 - RNA, 19 nt, Artificial Sequence
  Description of Artificial Sequence: Synthetic oligonucleotide
ucccagucccgcgguuucc

SEQ ID NO: 1237616 - RNA, 19 nt, Artificial Sequence
  Description of Artificial Sequence: Synthetic oligonucleotide
cccuuuuagaaagcacuuc

SEQ ID NO: 1237617 - RNA, 19 nt, Artificial Sequence
  Description of Artificial Sequence: Synthetic oligonucleotide
agacaugcaucggcaggaa

SEQ ID NO: 1237618 - RNA, 19 nt, Artificial Sequence
  Description of Artificial Sequence: Synthetic oligonucleotide
ggacucgaaggcgguggcg

SEQ ID NO: 1237619 - RNA, 19 nt, Artificial Sequence
  Description of Artificial Sequence: Synthetic oligonucleotide
gguuucuaggacagguucu

SEQ ID NO: 1237620 - RNA, 19 nt, Artificial Sequence
  Description of Artificial Sequence: Synthetic oligonucleotide
ggcgaguagggaacacgcc

SEQ ID NO: 1237621 - RNA, 19 nt, Artificial Sequence
  Description of Artificial Sequence: Synthetic oligonucleotide
ugacugguuuggggccuug

SEQ ID NO: 1237622 - RNA, 19 nt, Artificial Sequence
  Description of Artificial Sequence: Synthetic oligonucleotide
gcgacacacuucuucacua

SEQ ID NO: 1237623 - RNA, 19 nt, Artificial Sequence
  Description of Artificial Sequence: Synthetic oligonucleotide
cccgggaucagcgcagcgg

SEQ ID NO: 1237624 - RNA, 19 nt, Artificial Sequence
  Description of Artificial Sequence: Synthetic oligonucleotide
cagacacacugacaugagu

SEQ ID NO: 1237625 - RNA, 19 nt, Artificial Sequence
  Description of Artificial Sequence: Synthetic oligonucleotide
gagucuuucuccacucauu

SEQ ID NO: 1237626 - RNA, 19 nt, Artificial Sequence
  Description of Artificial Sequence: Synthetic oligonucleotide
gaagguguuuguggcugcu

SEQ ID NO: 1237627 - RNA, 19 nt, Artificial Sequence
  Description of Artificial Sequence: Synthetic oligonucleotide
gcaucggcaggaaguauga

SEQ ID NO: 1237628 - RNA, 19 nt, Artificial Sequence
  Description of Artificial Sequence: Synthetic oligonucleotide
gacccgggaucagcgcagc

SEQ ID NO: 1237629 - RNA, 19 nt, Artificial Sequence
  Description of Artificial Sequence: Synthetic oligonucleotide
gacagucccggaucacaau

SEQ ID NO: 1237630 - RNA, 19 nt, Artificial Sequence
  Description of Artificial Sequence: Synthetic oligonucleotide
ggacccgggaucagcgcag

SEQ ID NO: 1237631 - RNA, 19 nt, Artificial Sequence
  Description of Artificial Sequence: Synthetic oligonucleotide
acgguucaugaaacacagu

SEQ ID NO: 1237632 - RNA, 19 nt, Artificial Sequence
  Description of Artificial Sequence: Synthetic oligonucleotide
gacacacauggagguuuaa

SEQ ID NO: 1237633 - RNA, 19 nt, Artificial Sequence
  Description of Artificial Sequence: Synthetic oligonucleotide
cucacguggcaugcauuga

SEQ ID NO: 1237634 - RNA, 19 nt, Artificial Sequence
  Description of Artificial Sequence: Synthetic oligonucleotide
ggcaucggcacauguaguu

SEQ ID NO: 1237635 - RNA, 19 nt, Artificial Sequence
  Description of Artificial Sequence: Synthetic oligonucleotide
gucccgcgguuuccuucgg

SEQ ID NO: 1237636 - RNA, 19 nt, Artificial Sequence
  Description of Artificial Sequence: Synthetic oligonucleotide
augcaucggcaggaaguau

SEQ ID NO: 1237637 - RNA, 19 nt, Artificial Sequence
  Description of Artificial Sequence: Synthetic oligonucleotide
cgucgguaacaacugcaug

SEQ ID NO: 1237638 - RNA, 19 nt, Artificial Sequence
  Description of Artificial Sequence: Synthetic oligonucleotide
aucggcacauguaguuauu

SEQ ID NO: 1237639 - RNA, 19 nt, Artificial Sequence
  Description of Artificial Sequence: Synthetic oligonucleotide
cuguuaccauggucccaca

SEQ ID NO: 1237640 - RNA, 19 nt, Artificial Sequence
  Description of Artificial Sequence: Synthetic oligonucleotide
ccucagucgauuuguacau

SEQ ID NO: 1237641 - RNA, 19 nt, Artificial Sequence
  Description of Artificial Sequence: Synthetic oligonucleotide
ccggaucacaaugccucag

SEQ ID NO: 1237642 - RNA, 19 nt, Artificial Sequence
  Description of Artificial Sequence: Synthetic oligonucleotide
ucgucccagucccgcgguu

SEQ ID NO: 1237643 - RNA, 19 nt, Artificial Sequence
  Description of Artificial Sequence: Synthetic oligonucleotide
accucacguggcaugcauu

SEQ ID NO: 1237644 - RNA, 19 nt, Artificial Sequence
  Description of Artificial Sequence: Synthetic oligonucleotide
agucauccucaggguuuga

SEQ ID NO: 1237645 - RNA, 19 nt, Artificial Sequence
  Description of Artificial Sequence: Synthetic oligonucleotide
cauuguccccuguccuugu

SEQ ID NO: 1237646 - RNA, 19 nt, Artificial Sequence
  Description of Artificial Sequence: Synthetic oligonucleotide
ggccgguccgcuggcaggc

SEQ ID NO: 1237647 - RNA, 19 nt, Artificial Sequence
  Description of Artificial Sequence: Synthetic oligonucleotide
cagccaccuuuccuuagcu

SEQ ID NO: 1237648 - RNA, 19 nt, Artificial Sequence
  Description of Artificial Sequence: Synthetic oligonucleotide
gucccggaucacaaugccu

SEQ ID NO: 1237649 - RNA, 19 nt, Artificial Sequence
  Description of Artificial Sequence: Synthetic oligonucleotide
gcaucggcacauguaguua

SEQ ID NO: 1237650 - RNA, 19 nt, Artificial Sequence
  Description of Artificial Sequence: Synthetic oligonucleotide
agcuauccccacgguucau

SEQ ID NO: 1237651 - RNA, 19 nt, Artificial Sequence
  Description of Artificial Sequence: Synthetic oligonucleotide
guuggcugcuugacacugu

SEQ ID NO: 1237652 - RNA, 19 nt, Artificial Sequence
  Description of Artificial Sequence: Synthetic oligonucleotide
gguaaccugugcugguguu

SEQ ID NO: 1237653 - RNA, 19 nt, Artificial Sequence
  Description of Artificial Sequence: Synthetic oligonucleotide
augccucagucgauuugua

SEQ ID NO: 1237654 - RNA, 19 nt, Artificial Sequence
  Description of Artificial Sequence: Synthetic oligonucleotide
gaucagcgcagcggcgagu

SEQ ID NO: 1237655 - RNA, 19 nt, Artificial Sequence
  Description of Artificial Sequence: Synthetic oligonucleotide
caccucacguggcaugcau

SEQ ID NO: 1237656 - RNA, 19 nt, Artificial Sequence
  Description of Artificial Sequence: Synthetic oligonucleotide
gguccgcuggcaggcgcag

SEQ ID NO: 1237657 - RNA, 19 nt, Artificial Sequence
  Description of Artificial Sequence: Synthetic oligonucleotide
ccgcuuccgagaagcccag

SEQ ID NO: 1237658 - RNA, 19 nt, Artificial Sequence
  Description of Artificial Sequence: Synthetic oligonucleotide
ggcaugcauugagucuuuc

SEQ ID NO: 1237659 - RNA, 19 nt, Artificial Sequence
  Description of Artificial Sequence: Synthetic oligonucleotide
cccggaucacaaugccuca

SEQ ID NO: 1237660 - RNA, 19 nt, Artificial Sequence
  Description of Artificial Sequence: Synthetic oligonucleotide
cggacucgaaggcgguggc

SEQ ID NO: 1237661 - RNA, 19 nt, Artificial Sequence
  Description of Artificial Sequence: Synthetic oligonucleotide
cguggcaugcauugagucu

SEQ ID NO: 1237662 - RNA, 19 nt, Artificial Sequence
  Description of Artificial Sequence: Synthetic oligonucleotide
ggacggacaugagcucauc

SEQ ID NO: 1237663 - RNA, 19 nt, Artificial Sequence
  Description of Artificial Sequence: Synthetic oligonucleotide
gccccucgcuguugcaaca

SEQ ID NO: 1237664 - RNA, 19 nt, Artificial Sequence
  Description of Artificial Sequence: Synthetic oligonucleotide
ccgguccgcuggcaggcgc

SEQ ID NO: 1237665 - RNA, 19 nt, Artificial Sequence
  Description of Artificial Sequence: Synthetic oligonucleotide
ccgagaagcccaguccgga

SEQ ID NO: 1237666 - RNA, 19 nt, Artificial Sequence
  Description of Artificial Sequence: Synthetic oligonucleotide
cagcggcgaguagggaaca

SEQ ID NO: 1237667 - RNA, 19 nt, Artificial Sequence
  Description of Artificial Sequence: Synthetic oligonucleotide
cccgucgggcuccgcuucc

SEQ ID NO: 1237668 - RNA, 19 nt, Artificial Sequence
  Description of Artificial Sequence: Synthetic oligonucleotide
ggcgccucguggggacccg

SEQ ID NO: 1237669 - RNA, 19 nt, Artificial Sequence
  Description of Artificial Sequence: Synthetic oligonucleotide
ccgucgggcuccgcuuccg

SEQ ID NO: 1237670 - RNA, 19 nt, Artificial Sequence
  Description of Artificial Sequence: Synthetic oligonucleotide
caucggcaggaaguaugau

SEQ ID NO: 1237671 - RNA, 19 nt, Artificial Sequence
  Description of Artificial Sequence: Synthetic oligonucleotide
guccggacucgaaggcggu

SEQ ID NO: 1237672 - RNA, 19 nt, Artificial Sequence
  Description of Artificial Sequence: Synthetic oligonucleotide
gcgccucguggggacccgg

SEQ ID NO: 1237673 - RNA, 19 nt, Artificial Sequence
  Description of Artificial Sequence: Synthetic oligonucleotide
cggaucacaaugccucagu

SEQ ID NO: 1237674 - RNA, 19 nt, Artificial Sequence
  Description of Artificial Sequence: Synthetic oligonucleotide
cgucuugcugagguaaccu

SEQ ID NO: 1237675 - RNA, 19 nt, Artificial Sequence
  Description of Artificial Sequence: Synthetic oligonucleotide
ccaggauucaggggucggu

SEQ ID NO: 1237676 - RNA, 19 nt, Artificial Sequence
  Description of Artificial Sequence: Synthetic oligonucleotide
gggagcggggaggccgguc

SEQ ID NO: 1237677 - RNA, 19 nt, Artificial Sequence
  Description of Artificial Sequence: Synthetic oligonucleotide
gcgcaggcuggggcgcgag

SEQ ID NO: 1237678 - RNA, 19 nt, Artificial Sequence
  Description of Artificial Sequence: Synthetic oligonucleotide
ggaggccgguccgcuggca

SEQ ID NO: 1237679 - RNA, 19 nt, Artificial Sequence
  Description of Artificial Sequence: Synthetic oligonucleotide
ccucguggggacccgggau

SEQ ID NO: 1237680 - RNA, 19 nt, Artificial Sequence
  Description of Artificial Sequence: Synthetic oligonucleotide
cgguccgcuggcaggcgca

SEQ ID NO: 1237681 - RNA, 19 nt, Artificial Sequence
  Description of Artificial Sequence: Synthetic oligonucleotide
cgucgggcuccgcuuccga

SEQ ID NO: 1237682 - RNA, 19 nt, Artificial Sequence
  Description of Artificial Sequence: Synthetic oligonucleotide
cgggcgccucguggggacc

SEQ ID NO: 1237683 - RNA, 19 nt, Artificial Sequence
  Description of Artificial Sequence: Synthetic oligonucleotide
gcgguggcgggcgccucgu

SEQ ID NO: 1237684 - RNA, 19 nt, Artificial Sequence
  Description of Artificial Sequence: Synthetic oligonucleotide
ccgcuggcaggcgcaggcu

SEQ ID NO: 1237685 - RNA, 19 nt, Artificial Sequence
  Description of Artificial Sequence: Synthetic oligonucleotide
cgcgaggcugagguccccu

SEQ ID NO: 1237686 - RNA, 19 nt, Artificial Sequence
  Description of Artificial Sequence: Synthetic oligonucleotide
cgggagcggggaggccggu

SEQ ID NO: 1237687 - RNA, 19 nt, Artificial Sequence
  Description of Artificial Sequence: Synthetic oligonucleotide
ugucuuacuagauuuagag

SEQ ID NO: 1237688 - RNA, 19 nt, Artificial Sequence
  Description of Artificial Sequence: Synthetic oligonucleotide
aucuuaaaggccuuggcgg

SEQ ID NO: 1237689 - RNA, 19 nt, Artificial Sequence
  Description of Artificial Sequence: Synthetic oligonucleotide
gaugaaacugaccuggccc

SEQ ID NO: 1237690 - RNA, 19 nt, Artificial Sequence
  Description of Artificial Sequence: Synthetic oligonucleotide
ucagaaaugacccgaugag

SEQ ID NO: 1237691 - RNA, 19 nt, Artificial Sequence
  Description of Artificial Sequence: Synthetic oligonucleotide
uuaucagagaaauucuccc

SEQ ID NO: 1237692 - RNA, 19 nt, Artificial Sequence
  Description of Artificial Sequence: Synthetic oligonucleotide
ugggcaauauugaacaugc

SEQ ID NO: 1237693 - RNA, 19 nt, Artificial Sequence
  Description of Artificial Sequence: Synthetic oligonucleotide
aacauggagucuuuuccac

SEQ ID NO: 1237694 - RNA, 19 nt, Artificial Sequence
  Description of Artificial Sequence: Synthetic oligonucleotide
cuuaucagagaaauucucc

SEQ ID NO: 1237695 - RNA, 19 nt, Artificial Sequence
  Description of Artificial Sequence: Synthetic oligonucleotide
aagaggcagaccuugaggu

SEQ ID NO: 1237696 - RNA, 19 nt, Artificial Sequence
  Description of Artificial Sequence: Synthetic oligonucleotide
auuuagaggaaugugacgu

SEQ ID NO: 1237697 - RNA, 19 nt, Artificial Sequence
  Description of Artificial Sequence: Synthetic oligonucleotide
gauuuagaggaaugugacg

SEQ ID NO: 1237698 - RNA, 19 nt, Artificial Sequence
  Description of Artificial Sequence: Synthetic oligonucleotide
ugacuaguuagcuuggcug

SEQ ID NO: 1237699 - RNA, 19 nt, Artificial Sequence
  Description of Artificial Sequence: Synthetic oligonucleotide
ugugagagagauccgcagg

SEQ ID NO: 1237700 - RNA, 19 nt, Artificial Sequence
  Description of Artificial Sequence: Synthetic oligonucleotide
ucugucaaggccacgaagu

SEQ ID NO: 1237701 - RNA, 19 nt, Artificial Sequence
  Description of Artificial Sequence: Synthetic oligonucleotide
uuugcuaaggcacguugag

SEQ ID NO: 1237702 - RNA, 19 nt, Artificial Sequence
  Description of Artificial Sequence: Synthetic oligonucleotide
agauuuagaggaaugugac

SEQ ID NO: 1237703 - RNA, 19 nt, Artificial Sequence
  Description of Artificial Sequence: Synthetic oligonucleotide
aacggcauguacucaauga

SEQ ID NO: 1237704 - RNA, 19 nt, Artificial Sequence
  Description of Artificial Sequence: Synthetic oligonucleotide
aucagaaaugacccgauga

SEQ ID NO: 1237705 - RNA, 19 nt, Artificial Sequence
  Description of Artificial Sequence: Synthetic oligonucleotide
caauauugaacaugccugc

SEQ ID NO: 1237706 - RNA, 19 nt, Artificial Sequence
  Description of Artificial Sequence: Synthetic oligonucleotide
aaaugacccgaugaggauc

SEQ ID NO: 1237707 - RNA, 19 nt, Artificial Sequence
  Description of Artificial Sequence: Synthetic oligonucleotide
ugcuccaacuagcuggugg

SEQ ID NO: 1237708 - RNA, 19 nt, Artificial Sequence
  Description of Artificial Sequence: Synthetic oligonucleotide
ugugacgucuuuuccuugg

SEQ ID NO: 1237709 - RNA, 19 nt, Artificial Sequence
  Description of Artificial Sequence: Synthetic oligonucleotide
gauucucaaaagcuccucc

SEQ ID NO: 1237710 - RNA, 19 nt, Artificial Sequence
  Description of Artificial Sequence: Synthetic oligonucleotide
gacuaguuagcuuggcugc

SEQ ID NO: 1237711 - RNA, 19 nt, Artificial Sequence
  Description of Artificial Sequence: Synthetic oligonucleotide
agccacgggaucuuaaagg

SEQ ID NO: 1237712 - RNA, 19 nt, Artificial Sequence
  Description of Artificial Sequence: Synthetic oligonucleotide
gucuuacuagauuuagagg

SEQ ID NO: 1237713 - RNA, 19 nt, Artificial Sequence
  Description of Artificial Sequence: Synthetic oligonucleotide
uggacaagcuugaaggcca

SEQ ID NO: 1237714 - RNA, 19 nt, Artificial Sequence
  Description of Artificial Sequence: Synthetic oligonucleotide
gacgucuuuuccuuggccc

SEQ ID NO: 1237715 - RNA, 19 nt, Artificial Sequence
  Description of Artificial Sequence: Synthetic oligonucleotide
uacuagauuuagaggaaug

SEQ ID NO: 1237716 - RNA, 19 nt, Artificial Sequence
  Description of Artificial Sequence: Synthetic oligonucleotide
ugaguuagcugaguugagg

SEQ ID NO: 1237717 - RNA, 19 nt, Artificial Sequence
  Description of Artificial Sequence: Synthetic oligonucleotide
ugugucuuacuagauuuag

SEQ ID NO: 1237718 - RNA, 19 nt, Artificial Sequence
  Description of Artificial Sequence: Synthetic oligonucleotide
ugaugaaacugaccuggcc

SEQ ID NO: 1237719 - RNA, 19 nt, Artificial Sequence
  Description of Artificial Sequence: Synthetic oligonucleotide
ucugaauccacaugaguua

SEQ ID NO: 1237720 - RNA, 19 nt, Artificial Sequence
  Description of Artificial Sequence: Synthetic oligonucleotide
caaugaagcgcacauccag

SEQ ID NO: 1237721 - RNA, 19 nt, Artificial Sequence
  Description of Artificial Sequence: Synthetic oligonucleotide
auuccgaacacagagggga

SEQ ID NO: 1237722 - RNA, 19 nt, Artificial Sequence
  Description of Artificial Sequence: Synthetic oligonucleotide
ugagugaguaucagagucu

SEQ ID NO: 1237723 - RNA, 19 nt, Artificial Sequence
  Description of Artificial Sequence: Synthetic oligonucleotide
caugacugcagugagugag

SEQ ID NO: 1237724 - RNA, 19 nt, Artificial Sequence
  Description of Artificial Sequence: Synthetic oligonucleotide
agaaaugacccgaugagga

SEQ ID NO: 1237725 - RNA, 19 nt, Artificial Sequence
  Description of Artificial Sequence: Synthetic oligonucleotide
ucaaacggcauguacucaa

SEQ ID NO: 1237726 - RNA, 19 nt, Artificial Sequence
  Description of Artificial Sequence: Synthetic oligonucleotide
ggaucagcugacuaguuag

SEQ ID NO: 1237727 - RNA, 19 nt, Artificial Sequence
  Description of Artificial Sequence: Synthetic oligonucleotide
caaaguugccaucuuauca

SEQ ID NO: 1237728 - RNA, 19 nt, Artificial Sequence
  Description of Artificial Sequence: Synthetic oligonucleotide
cagcugacuaguuagcuug

SEQ ID NO: 1237729 - RNA, 19 nt, Artificial Sequence
  Description of Artificial Sequence: Synthetic oligonucleotide
caaaagcuccuccucagag

SEQ ID NO: 1237730 - RNA, 19 nt, Artificial Sequence
  Description of Artificial Sequence: Synthetic oligonucleotide
acgaugucccuacugacug

SEQ ID NO: 1237731 - RNA, 19 nt, Artificial Sequence
  Description of Artificial Sequence: Synthetic oligonucleotide
gcaauauugaacaugccug

SEQ ID NO: 1237732 - RNA, 19 nt, Artificial Sequence
  Description of Artificial Sequence: Synthetic oligonucleotide
ucugugagagagauccgca

SEQ ID NO: 1237733 - RNA, 19 nt, Artificial Sequence
  Description of Artificial Sequence: Synthetic oligonucleotide
ucuuaaaggccuuggcggu

SEQ ID NO: 1237734 - RNA, 19 nt, Artificial Sequence
  Description of Artificial Sequence: Synthetic oligonucleotide
acuagauuuagaggaaugu

SEQ ID NO: 1237735 - RNA, 19 nt, Artificial Sequence
  Description of Artificial Sequence: Synthetic oligonucleotide
ucgaaugguguccagcauc

SEQ ID NO: 1237736 - RNA, 19 nt, Artificial Sequence
  Description of Artificial Sequence: Synthetic oligonucleotide
caucaaacggcauguacuc

SEQ ID NO: 1237737 - RNA, 19 nt, Artificial Sequence
  Description of Artificial Sequence: Synthetic oligonucleotide
uucccgucggcugugaugc

SEQ ID NO: 1237738 - RNA, 19 nt, Artificial Sequence
  Description of Artificial Sequence: Synthetic oligonucleotide
cagguaacugugcuggcgg

SEQ ID NO: 1237739 - RNA, 19 nt, Artificial Sequence
  Description of Artificial Sequence: Synthetic oligonucleotide
gaacauggagucuuuucca

SEQ ID NO: 1237740 - RNA, 19 nt, Artificial Sequence
  Description of Artificial Sequence: Synthetic oligonucleotide
uugggagacaugacugcag

SEQ ID NO: 1237741 - RNA, 19 nt, Artificial Sequence
  Description of Artificial Sequence: Synthetic oligonucleotide
aaugacccgaugaggauca

SEQ ID NO: 1237742 - RNA, 19 nt, Artificial Sequence
  Description of Artificial Sequence: Synthetic oligonucleotide
accgcugucgaaugguguc

SEQ ID NO: 1237743 - RNA, 19 nt, Artificial Sequence
  Description of Artificial Sequence: Synthetic oligonucleotide
agccgcaugcuccuggagg

SEQ ID NO: 1237744 - RNA, 19 nt, Artificial Sequence
  Description of Artificial Sequence: Synthetic oligonucleotide
caugaguuagcugaguuga

SEQ ID NO: 1237745 - RNA, 19 nt, Artificial Sequence
  Description of Artificial Sequence: Synthetic oligonucleotide
auugcaucuccuugggaga

SEQ ID NO: 1237746 - RNA, 19 nt, Artificial Sequence
  Description of Artificial Sequence: Synthetic oligonucleotide
aaguugccaucuuaucaga

SEQ ID NO: 1237747 - RNA, 19 nt, Artificial Sequence
  Description of Artificial Sequence: Synthetic oligonucleotide
cagaaaugacccgaugagg

SEQ ID NO: 1237748 - RNA, 19 nt, Artificial Sequence
  Description of Artificial Sequence: Synthetic oligonucleotide
gcauccggaaggcagacgg

SEQ ID NO: 1237749 - RNA, 19 nt, Artificial Sequence
  Description of Artificial Sequence: Synthetic oligonucleotide
uggcuucccgcccacaucu

SEQ ID NO: 1237750 - RNA, 19 nt, Artificial Sequence
  Description of Artificial Sequence: Synthetic oligonucleotide
gacggcgccgccaugaagc

SEQ ID NO: 1237751 - RNA, 19 nt, Artificial Sequence
  Description of Artificial Sequence: Synthetic oligonucleotide
uuccuuggcccaaauugca

SEQ ID NO: 1237752 - RNA, 19 nt, Artificial Sequence
  Description of Artificial Sequence: Synthetic oligonucleotide
uuuagaggaaugugacguc

SEQ ID NO: 1237753 - RNA, 19 nt, Artificial Sequence
  Description of Artificial Sequence: Synthetic oligonucleotide
agagagauccgcagguaac

SEQ ID NO: 1237754 - RNA, 19 nt, Artificial Sequence
  Description of Artificial Sequence: Synthetic oligonucleotide
agaguucccgaagaggcag

SEQ ID NO: 1237755 - RNA, 19 nt, Artificial Sequence
  Description of Artificial Sequence: Synthetic oligonucleotide
ugucaaggccacgaagucc

SEQ ID NO: 1237756 - RNA, 19 nt, Artificial Sequence
  Description of Artificial Sequence: Synthetic oligonucleotide
gagugaguaucagagucug

SEQ ID NO: 1237757 - RNA, 19 nt, Artificial Sequence
  Description of Artificial Sequence: Synthetic oligonucleotide
agcaucagaaaugacccga

SEQ ID NO: 1237758 - RNA, 19 nt, Artificial Sequence
  Description of Artificial Sequence: Synthetic oligonucleotide
gaaugugacgucuuuuccu

SEQ ID NO: 1237759 - RNA, 19 nt, Artificial Sequence
  Description of Artificial Sequence: Synthetic oligonucleotide
ugcgcaagcgguugcaggu

SEQ ID NO: 1237760 - RNA, 19 nt, Artificial Sequence
  Description of Artificial Sequence: Synthetic oligonucleotide
ugcuagagcaucucccuuc

SEQ ID NO: 1237761 - RNA, 19 nt, Artificial Sequence
  Description of Artificial Sequence: Synthetic oligonucleotide
cuaccauagcugcucgucc

SEQ ID NO: 1237762 - RNA, 19 nt, Artificial Sequence
  Description of Artificial Sequence: Synthetic oligonucleotide
ucuaccauagcugcucguc

SEQ ID NO: 1237763 - RNA, 19 nt, Artificial Sequence
  Description of Artificial Sequence: Synthetic oligonucleotide
ugugaugcgcaagcgguug

SEQ ID NO: 1237764 - RNA, 19 nt, Artificial Sequence
  Description of Artificial Sequence: Synthetic oligonucleotide
cuggacaagcuugaaggcc

SEQ ID NO: 1237765 - RNA, 19 nt, Artificial Sequence
  Description of Artificial Sequence: Synthetic oligonucleotide
agcuguaccugcacguggc

SEQ ID NO: 1237766 - RNA, 19 nt, Artificial Sequence
  Description of Artificial Sequence: Synthetic oligonucleotide
cagaagaaagugcuccaac

SEQ ID NO: 1237767 - RNA, 19 nt, Artificial Sequence
  Description of Artificial Sequence: Synthetic oligonucleotide
uuaaaggccuuggcggugc

SEQ ID NO: 1237768 - RNA, 19 nt, Artificial Sequence
  Description of Artificial Sequence: Synthetic oligonucleotide
aacuagcugguggggaauc

SEQ ID NO: 1237769 - RNA, 19 nt, Artificial Sequence
  Description of Artificial Sequence: Synthetic oligonucleotide
cugugagagagauccgcag

SEQ ID NO: 1237770 - RNA, 19 nt, Artificial Sequence
  Description of Artificial Sequence: Synthetic oligonucleotide
cuaagcccgauggaagucc

SEQ ID NO: 1237771 - RNA, 19 nt, Artificial Sequence
  Description of Artificial Sequence: Synthetic oligonucleotide
cuuacuagauuuagaggaa

SEQ ID NO: 1237772 - RNA, 19 nt, Artificial Sequence
  Description of Artificial Sequence: Synthetic oligonucleotide
uaagcccgauggaaguccc

SEQ ID NO: 1237773 - RNA, 19 nt, Artificial Sequence
  Description of Artificial Sequence: Synthetic oligonucleotide
augcgcaagcgguugcagg

SEQ ID NO: 1237774 - RNA, 19 nt, Artificial Sequence
  Description of Artificial Sequence: Synthetic oligonucleotide
uuacuagauuuagaggaau

SEQ ID NO: 1237775 - RNA, 19 nt, Artificial Sequence
  Description of Artificial Sequence: Synthetic oligonucleotide
uccuuguagcugaccaucu

SEQ ID NO: 1237776 - RNA, 19 nt, Artificial Sequence
  Description of Artificial Sequence: Synthetic oligonucleotide
cugguggggaaucuucaag

SEQ ID NO: 1237777 - RNA, 19 nt, Artificial Sequence
  Description of Artificial Sequence: Synthetic oligonucleotide
gcacugccgagacagaggg

SEQ ID NO: 1237778 - RNA, 19 nt, Artificial Sequence
  Description of Artificial Sequence: Synthetic oligonucleotide
gguaagggcagccauggca

SEQ ID NO: 1237779 - RNA, 19 nt, Artificial Sequence
  Description of Artificial Sequence: Synthetic oligonucleotide
accucagaguucccgaaga

SEQ ID NO: 1237780 - RNA, 19 nt, Artificial Sequence
  Description of Artificial Sequence: Synthetic oligonucleotide
ccuugcacaugucauacag

SEQ ID NO: 1237781 - RNA, 19 nt, Artificial Sequence
  Description of Artificial Sequence: Synthetic oligonucleotide
cucugugucuggcuucccg

SEQ ID NO: 1237782 - RNA, 19 nt, Artificial Sequence
  Description of Artificial Sequence: Synthetic oligonucleotide
cugggcaauauugaacaug

SEQ ID NO: 1237783 - RNA, 19 nt, Artificial Sequence
  Description of Artificial Sequence: Synthetic oligonucleotide
cuuugcuaaggcacguuga

SEQ ID NO: 1237784 - RNA, 19 nt, Artificial Sequence
  Description of Artificial Sequence: Synthetic oligonucleotide
cuucccgcccacaucuacc

SEQ ID NO: 1237785 - RNA, 19 nt, Artificial Sequence
  Description of Artificial Sequence: Synthetic oligonucleotide
ggcaauauugaacaugccu

SEQ ID NO: 1237786 - RNA, 19 nt, Artificial Sequence
  Description of Artificial Sequence: Synthetic oligonucleotide
ucagcugacuaguuagcuu

SEQ ID NO: 1237787 - RNA, 19 nt, Artificial Sequence
  Description of Artificial Sequence: Synthetic oligonucleotide
acgucuuuuccuuggccca

SEQ ID NO: 1237788 - RNA, 19 nt, Artificial Sequence
  Description of Artificial Sequence: Synthetic oligonucleotide
cauggagucuuuuccacaa

SEQ ID NO: 1237789 - RNA, 19 nt, Artificial Sequence
  Description of Artificial Sequence: Synthetic oligonucleotide
acguugagugaguaucaga

SEQ ID NO: 1237790 - RNA, 19 nt, Artificial Sequence
  Description of Artificial Sequence: Synthetic oligonucleotide
uaaggcacguugagugagu

SEQ ID NO: 1237791 - RNA, 19 nt, Artificial Sequence
  Description of Artificial Sequence: Synthetic oligonucleotide
aaacugaccuggcccugga

SEQ ID NO: 1237792 - RNA, 19 nt, Artificial Sequence
  Description of Artificial Sequence: Synthetic oligonucleotide
ccacaucuaccauagcugc

SEQ ID NO: 1237793 - RNA, 19 nt, Artificial Sequence
  Description of Artificial Sequence: Synthetic oligonucleotide
uccaacuagcuggugggga

SEQ ID NO: 1237794 - RNA, 19 nt, Artificial Sequence
  Description of Artificial Sequence: Synthetic oligonucleotide
ugugugugugugugugucu

SEQ ID NO: 1237795 - RNA, 19 nt, Artificial Sequence
  Description of Artificial Sequence: Synthetic oligonucleotide
aucagcugacuaguuagcu

SEQ ID NO: 1237796 - RNA, 19 nt, Artificial Sequence
  Description of Artificial Sequence: Synthetic oligonucleotide
aaguuccacuuguugccau

SEQ ID NO: 1237797 - RNA, 19 nt, Artificial Sequence
  Description of Artificial Sequence: Synthetic oligonucleotide
uccggaaggcagacggcgc

SEQ ID NO: 1237798 - RNA, 19 nt, Artificial Sequence
  Description of Artificial Sequence: Synthetic oligonucleotide
ugugugugugugugugugu

SEQ ID NO: 1237799 - RNA, 19 nt, Artificial Sequence
  Description of Artificial Sequence: Synthetic oligonucleotide
caucagaaaugacccgaug

SEQ ID NO: 1237800 - RNA, 19 nt, Artificial Sequence
  Description of Artificial Sequence: Synthetic oligonucleotide
ugugugugugugucuuacu

SEQ ID NO: 1237801 - RNA, 19 nt, Artificial Sequence
  Description of Artificial Sequence: Synthetic oligonucleotide
ugaggcacccuaagcccga

SEQ ID NO: 1237802 - RNA, 19 nt, Artificial Sequence
  Description of Artificial Sequence: Synthetic oligonucleotide
auccgcagguaacugugcu

SEQ ID NO: 1237803 - RNA, 19 nt, Artificial Sequence
  Description of Artificial Sequence: Synthetic oligonucleotide
ugucccuacugacugccuu

SEQ ID NO: 1237804 - RNA, 19 nt, Artificial Sequence
  Description of Artificial Sequence: Synthetic oligonucleotide
ggcugugaugcgcaagcgg

SEQ ID NO: 1237805 - RNA, 19 nt, Artificial Sequence
  Description of Artificial Sequence: Synthetic oligonucleotide
gugugugugugugugugug

SEQ ID NO: 1237806 - RNA, 19 nt, Artificial Sequence
  Description of Artificial Sequence: Synthetic oligonucleotide
ggcacguugagugaguauc

SEQ ID NO: 1237807 - RNA, 19 nt, Artificial Sequence
  Description of Artificial Sequence: Synthetic oligonucleotide
uagaggaaugugacgucuu

SEQ ID NO: 1237808 - RNA, 19 nt, Artificial Sequence
  Description of Artificial Sequence: Synthetic oligonucleotide
gucccuacugacugccuug

SEQ ID NO: 1237809 - RNA, 19 nt, Artificial Sequence
  Description of Artificial Sequence: Synthetic oligonucleotide
aagcgguugcaggucccac

SEQ ID NO: 1237810 - RNA, 19 nt, Artificial Sequence
  Description of Artificial Sequence: Synthetic oligonucleotide
gugugugugugucuuacua

SEQ ID NO: 1237811 - RNA, 19 nt, Artificial Sequence
  Description of Artificial Sequence: Synthetic oligonucleotide
uggcacuccgauuccgaac

SEQ ID NO: 1237812 - RNA, 19 nt, Artificial Sequence
  Description of Artificial Sequence: Synthetic oligonucleotide
ggcacuccgauuccgaaca

SEQ ID NO: 1237813 - RNA, 19 nt, Artificial Sequence
  Description of Artificial Sequence: Synthetic oligonucleotide
cugucgaaugguguccagc

SEQ ID NO: 1237814 - RNA, 19 nt, Artificial Sequence
  Description of Artificial Sequence: Synthetic oligonucleotide
cugucaaggccacgaaguc

SEQ ID NO: 1237815 - RNA, 19 nt, Artificial Sequence
  Description of Artificial Sequence: Synthetic oligonucleotide
gagugagugaggcacccua

SEQ ID NO: 1237816 - RNA, 19 nt, Artificial Sequence
  Description of Artificial Sequence: Synthetic oligonucleotide
gaugcgcaagcgguugcag

SEQ ID NO: 1237817 - RNA, 19 nt, Artificial Sequence
  Description of Artificial Sequence: Synthetic oligonucleotide
cauacaggguaagggcagc

SEQ ID NO: 1237818 - RNA, 19 nt, Artificial Sequence
  Description of Artificial Sequence: Synthetic oligonucleotide
cacgggaucuuaaaggccu

SEQ ID NO: 1237819 - RNA, 19 nt, Artificial Sequence
  Description of Artificial Sequence: Synthetic oligonucleotide
uacugacugccuugcacau

SEQ ID NO: 1237820 - RNA, 19 nt, Artificial Sequence
  Description of Artificial Sequence: Synthetic oligonucleotide
ugaaacugaccuggcccug

SEQ ID NO: 1237821 - RNA, 19 nt, Artificial Sequence
  Description of Artificial Sequence: Synthetic oligonucleotide
ucugggcaauauugaacau

SEQ ID NO: 1237822 - RNA, 19 nt, Artificial Sequence
  Description of Artificial Sequence: Synthetic oligonucleotide
aagcccgauggaagucccc

SEQ ID NO: 1237823 - RNA, 19 nt, Artificial Sequence
  Description of Artificial Sequence: Synthetic oligonucleotide
gugacgucuuuuccuuggc

SEQ ID NO: 1237824 - RNA, 19 nt, Artificial Sequence
  Description of Artificial Sequence: Synthetic oligonucleotide
gcuggacaagcuugaaggc

SEQ ID NO: 1237825 - RNA, 19 nt, Artificial Sequence
  Description of Artificial Sequence: Synthetic oligonucleotide
acccuaagcccgauggaag

SEQ ID NO: 1237826 - RNA, 19 nt, Artificial Sequence
  Description of Artificial Sequence: Synthetic oligonucleotide
uggcgugugcuguccagcu

SEQ ID NO: 1237827 - RNA, 19 nt, Artificial Sequence
  Description of Artificial Sequence: Synthetic oligonucleotide
caccucagaguucccgaag

SEQ ID NO: 1237828 - RNA, 19 nt, Artificial Sequence
  Description of Artificial Sequence: Synthetic oligonucleotide
ucccuacugacugccuugc

SEQ ID NO: 1237829 - RNA, 19 nt, Artificial Sequence
  Description of Artificial Sequence: Synthetic oligonucleotide
gaacacagaggggauccca

SEQ ID NO: 1237830 - RNA, 19 nt, Artificial Sequence
  Description of Artificial Sequence: Synthetic oligonucleotide
gccaugggaacauggaguc

SEQ ID NO: 1237831 - RNA, 19 nt, Artificial Sequence
  Description of Artificial Sequence: Synthetic oligonucleotide
cauccggaaggcagacggc

SEQ ID NO: 1237832 - RNA, 19 nt, Artificial Sequence
  Description of Artificial Sequence: Synthetic oligonucleotide
agcugacuaguuagcuugg

SEQ ID NO: 1237833 - RNA, 19 nt, Artificial Sequence
  Description of Artificial Sequence: Synthetic oligonucleotide
gaaaugacccgaugaggau

SEQ ID NO: 1237834 - RNA, 19 nt, Artificial Sequence
  Description of Artificial Sequence: Synthetic oligonucleotide
ugggccacugcuagagcau

SEQ ID NO: 1237835 - RNA, 19 nt, Artificial Sequence
  Description of Artificial Sequence: Synthetic oligonucleotide
guuagcuuggcugccugga

SEQ ID NO: 1237836 - RNA, 19 nt, Artificial Sequence
  Description of Artificial Sequence: Synthetic oligonucleotide
caacacagcauggcgugug

SEQ ID NO: 1237837 - RNA, 19 nt, Artificial Sequence
  Description of Artificial Sequence: Synthetic oligonucleotide
gaggggaucccagaagaaa

SEQ ID NO: 1237838 - RNA, 19 nt, Artificial Sequence
  Description of Artificial Sequence: Synthetic oligonucleotide
ugaugcgcaagcgguugca

SEQ ID NO: 1237839 - RNA, 19 nt, Artificial Sequence
  Description of Artificial Sequence: Synthetic oligonucleotide
ucguggacugccccucccu

SEQ ID NO: 1237840 - RNA, 19 nt, Artificial Sequence
  Description of Artificial Sequence: Synthetic oligonucleotide
cacguugagugaguaucag

SEQ ID NO: 1237841 - RNA, 19 nt, Artificial Sequence
  Description of Artificial Sequence: Synthetic oligonucleotide
gugugugugugugucuuac

SEQ ID NO: 1237842 - RNA, 19 nt, Artificial Sequence
  Description of Artificial Sequence: Synthetic oligonucleotide
gggucuugagggcuccgcg

SEQ ID NO: 1237843 - RNA, 19 nt, Artificial Sequence
  Description of Artificial Sequence: Synthetic oligonucleotide
ugacccgaugaggaucaug

SEQ ID NO: 1237844 - RNA, 19 nt, Artificial Sequence
  Description of Artificial Sequence: Synthetic oligonucleotide
cugccgagacagagggagg

SEQ ID NO: 1237845 - RNA, 19 nt, Artificial Sequence
  Description of Artificial Sequence: Synthetic oligonucleotide
aucaaacggcauguacuca

SEQ ID NO: 1237846 - RNA, 19 nt, Artificial Sequence
  Description of Artificial Sequence: Synthetic oligonucleotide
gugaugaaacugaccuggc

SEQ ID NO: 1237847 - RNA, 19 nt, Artificial Sequence
  Description of Artificial Sequence: Synthetic oligonucleotide
guguguguguguguguguc

SEQ ID NO: 1237848 - RNA, 19 nt, Artificial Sequence
  Description of Artificial Sequence: Synthetic oligonucleotide
aucuaccauagcugcucgu

SEQ ID NO: 1237849 - RNA, 19 nt, Artificial Sequence
  Description of Artificial Sequence: Synthetic oligonucleotide
ccuuugcuaaggcacguug

SEQ ID NO: 1237850 - RNA, 19 nt, Artificial Sequence
  Description of Artificial Sequence: Synthetic oligonucleotide
gugucuuacuagauuuaga

SEQ ID NO: 1237851 - RNA, 19 nt, Artificial Sequence
  Description of Artificial Sequence: Synthetic oligonucleotide
ugugugugugugugucuua

SEQ ID NO: 1237852 - RNA, 19 nt, Artificial Sequence
  Description of Artificial Sequence: Synthetic oligonucleotide
cuccaacuagcuggugggg

SEQ ID NO: 1237853 - RNA, 19 nt, Artificial Sequence
  Description of Artificial Sequence: Synthetic oligonucleotide
aaggcacguugagugagua

SEQ ID NO: 1237854 - RNA, 19 nt, Artificial Sequence
  Description of Artificial Sequence: Synthetic oligonucleotide
uggccaccgcugucgaaug

SEQ ID NO: 1237855 - RNA, 19 nt, Artificial Sequence
  Description of Artificial Sequence: Synthetic oligonucleotide
agacggcgccgccaugaag

SEQ ID NO: 1237856 - RNA, 19 nt, Artificial Sequence
  Description of Artificial Sequence: Synthetic oligonucleotide
caugggccgguucuucauc

SEQ ID NO: 1237857 - RNA, 19 nt, Artificial Sequence
  Description of Artificial Sequence: Synthetic oligonucleotide
guacucaaugaagcgcaca

SEQ ID NO: 1237858 - RNA, 19 nt, Artificial Sequence
  Description of Artificial Sequence: Synthetic oligonucleotide
aagcgcacauccaggggaa

SEQ ID NO: 1237859 - RNA, 19 nt, Artificial Sequence
  Description of Artificial Sequence: Synthetic oligonucleotide
agcauccggaaggcagacg

SEQ ID NO: 1237860 - RNA, 19 nt, Artificial Sequence
  Description of Artificial Sequence: Synthetic oligonucleotide
ccccaaugauucucaaaag

SEQ ID NO: 1237861 - RNA, 19 nt, Artificial Sequence
  Description of Artificial Sequence: Synthetic oligonucleotide
cucguggacugccccuccc

SEQ ID NO: 1237862 - RNA, 19 nt, Artificial Sequence
  Description of Artificial Sequence: Synthetic oligonucleotide
ccaucaaacggcauguacu

SEQ ID NO: 1237863 - RNA, 19 nt, Artificial Sequence
  Description of Artificial Sequence: Synthetic oligonucleotide
cacgaugucccuacugacu

SEQ ID NO: 1237864 - RNA, 19 nt, Artificial Sequence
  Description of Artificial Sequence: Synthetic oligonucleotide
agugagugaggcacccuaa

SEQ ID NO: 1237865 - RNA, 19 nt, Artificial Sequence
  Description of Artificial Sequence: Synthetic oligonucleotide
cugacuaguuagcuuggcu

SEQ ID NO: 1237866 - RNA, 19 nt, Artificial Sequence
  Description of Artificial Sequence: Synthetic oligonucleotide
gcuaaggcacguugaguga

SEQ ID NO: 1237867 - RNA, 19 nt, Artificial Sequence
  Description of Artificial Sequence: Synthetic oligonucleotide
ggccgguucuucaucuggg

SEQ ID NO: 1237868 - RNA, 19 nt, Artificial Sequence
  Description of Artificial Sequence: Synthetic oligonucleotide
cugagcgcagguggucccg

SEQ ID NO: 1237869 - RNA, 19 nt, Artificial Sequence
  Description of Artificial Sequence: Synthetic oligonucleotide
ugagcgcagguggucccgc

SEQ ID NO: 1237870 - RNA, 19 nt, Artificial Sequence
  Description of Artificial Sequence: Synthetic oligonucleotide
cuguaccugcacguggcuc

SEQ ID NO: 1237871 - RNA, 19 nt, Artificial Sequence
  Description of Artificial Sequence: Synthetic oligonucleotide
aggcacguugagugaguau

SEQ ID NO: 1237872 - RNA, 19 nt, Artificial Sequence
  Description of Artificial Sequence: Synthetic oligonucleotide
gucggcugugaugcgcaag

SEQ ID NO: 1237873 - RNA, 19 nt, Artificial Sequence
  Description of Artificial Sequence: Synthetic oligonucleotide
cacccuaagcccgauggaa

SEQ ID NO: 1237874 - RNA, 19 nt, Artificial Sequence
  Description of Artificial Sequence: Synthetic oligonucleotide
agccuuugcuaaggcacgu

SEQ ID NO: 1237875 - RNA, 19 nt, Artificial Sequence
  Description of Artificial Sequence: Synthetic oligonucleotide
gcgacagccacccgcucug

SEQ ID NO: 1237876 - RNA, 19 nt, Artificial Sequence
  Description of Artificial Sequence: Synthetic oligonucleotide
gccgcaugcuccuggagga

SEQ ID NO: 1237877 - RNA, 19 nt, Artificial Sequence
  Description of Artificial Sequence: Synthetic oligonucleotide
ccacgaugucccuacugac

SEQ ID NO: 1237878 - RNA, 19 nt, Artificial Sequence
  Description of Artificial Sequence: Synthetic oligonucleotide
cuucugucaaggccacgaa

SEQ ID NO: 1237879 - RNA, 19 nt, Artificial Sequence
  Description of Artificial Sequence: Synthetic oligonucleotide
gugugugucuuacuagauu

SEQ ID NO: 1237880 - RNA, 19 nt, Artificial Sequence
  Description of Artificial Sequence: Synthetic oligonucleotide
aggcagacggcgccgccau

SEQ ID NO: 1237881 - RNA, 19 nt, Artificial Sequence
  Description of Artificial Sequence: Synthetic oligonucleotide
gcgcacauccaggggaagg

SEQ ID NO: 1237882 - RNA, 19 nt, Artificial Sequence
  Description of Artificial Sequence: Synthetic oligonucleotide
guggggaaucuucaagcau

SEQ ID NO: 1237883 - RNA, 19 nt, Artificial Sequence
  Description of Artificial Sequence: Synthetic oligonucleotide
gcugcgucaccggagcccc

SEQ ID NO: 1237884 - RNA, 19 nt, Artificial Sequence
  Description of Artificial Sequence: Synthetic oligonucleotide
gacaagcuugaaggccaca

SEQ ID NO: 1237885 - RNA, 19 nt, Artificial Sequence
  Description of Artificial Sequence: Synthetic oligonucleotide
acccgcucugugucuggcu

SEQ ID NO: 1237886 - RNA, 19 nt, Artificial Sequence
  Description of Artificial Sequence: Synthetic oligonucleotide
aggcacccuaagcccgaug

SEQ ID NO: 1237887 - RNA, 19 nt, Artificial Sequence
  Description of Artificial Sequence: Synthetic oligonucleotide
cacaucuaccauagcugcu

SEQ ID NO: 1237888 - RNA, 19 nt, Artificial Sequence
  Description of Artificial Sequence: Synthetic oligonucleotide
gcugacuaguuagcuuggc

SEQ ID NO: 1237889 - RNA, 19 nt, Artificial Sequence
  Description of Artificial Sequence: Synthetic oligonucleotide
ccggaaggcagacggcgcc

SEQ ID NO: 1237890 - RNA, 19 nt, Artificial Sequence
  Description of Artificial Sequence: Synthetic oligonucleotide
cuugagguucccgucggcu

SEQ ID NO: 1237891 - RNA, 19 nt, Artificial Sequence
  Description of Artificial Sequence: Synthetic oligonucleotide
gugugucuuacuagauuua

SEQ ID NO: 1237892 - RNA, 19 nt, Artificial Sequence
  Description of Artificial Sequence: Synthetic oligonucleotide
cagcauccggaaggcagac

SEQ ID NO: 1237893 - RNA, 19 nt, Artificial Sequence
  Description of Artificial Sequence: Synthetic oligonucleotide
agcgcacauccaggggaag

SEQ ID NO: 1237894 - RNA, 19 nt, Artificial Sequence
  Description of Artificial Sequence: Synthetic oligonucleotide
cacuccgauuccgaacaca

SEQ ID NO: 1237895 - RNA, 19 nt, Artificial Sequence
  Description of Artificial Sequence: Synthetic oligonucleotide
ggccaccgcugucgaaugg

SEQ ID NO: 1237896 - RNA, 19 nt, Artificial Sequence
  Description of Artificial Sequence: Synthetic oligonucleotide
acaugccugcaugcugccu

SEQ ID NO: 1237897 - RNA, 19 nt, Artificial Sequence
  Description of Artificial Sequence: Synthetic oligonucleotide
ugccaucaaacggcaugua

SEQ ID NO: 1237898 - RNA, 19 nt, Artificial Sequence
  Description of Artificial Sequence: Synthetic oligonucleotide
gcacguugagugaguauca

SEQ ID NO: 1237899 - RNA, 19 nt, Artificial Sequence
  Description of Artificial Sequence: Synthetic oligonucleotide
ccaacuagcugguggggaa

SEQ ID NO: 1237900 - RNA, 19 nt, Artificial Sequence
  Description of Artificial Sequence: Synthetic oligonucleotide
caaacggcauguacucaau

SEQ ID NO: 1237901 - RNA, 19 nt, Artificial Sequence
  Description of Artificial Sequence: Synthetic oligonucleotide
gagaagggagccgcaugcu

SEQ ID NO: 1237902 - RNA, 19 nt, Artificial Sequence
  Description of Artificial Sequence: Synthetic oligonucleotide
cuaguuagcuuggcugccu

SEQ ID NO: 1237903 - RNA, 19 nt, Artificial Sequence
  Description of Artificial Sequence: Synthetic oligonucleotide
caagcgguugcagguccca

SEQ ID NO: 1237904 - RNA, 19 nt, Artificial Sequence
  Description of Artificial Sequence: Synthetic oligonucleotide
ggguaagggcagccauggc

SEQ ID NO: 1237905 - RNA, 19 nt, Artificial Sequence
  Description of Artificial Sequence: Synthetic oligonucleotide
cgcaagcgguugcaggucc

SEQ ID NO: 1237906 - RNA, 19 nt, Artificial Sequence
  Description of Artificial Sequence: Synthetic oligonucleotide
gcagacggcgccgccauga

SEQ ID NO: 1237907 - RNA, 19 nt, Artificial Sequence
  Description of Artificial Sequence: Synthetic oligonucleotide
ccuaagcccgauggaaguc

SEQ ID NO: 1237908 - RNA, 19 nt, Artificial Sequence
  Description of Artificial Sequence: Synthetic oligonucleotide
agucuggguaguagcugua

SEQ ID NO: 1237909 - RNA, 19 nt, Artificial Sequence
  Description of Artificial Sequence: Synthetic oligonucleotide
ggcccggcacgaugccugg

SEQ ID NO: 1237910 - RNA, 19 nt, Artificial Sequence
  Description of Artificial Sequence: Synthetic oligonucleotide
ccgccaugaagccagcaaa

SEQ ID NO: 1237911 - RNA, 19 nt, Artificial Sequence
  Description of Artificial Sequence: Synthetic oligonucleotide
cacugcugccccaaugauu

SEQ ID NO: 1237912 - RNA, 19 nt, Artificial Sequence
  Description of Artificial Sequence: Synthetic oligonucleotide
gugugugugugugugucuu

SEQ ID NO: 1237913 - RNA, 19 nt, Artificial Sequence
  Description of Artificial Sequence: Synthetic oligonucleotide
ccgcugucgaauggugucc

SEQ ID NO: 1237914 - RNA, 19 nt, Artificial Sequence
  Description of Artificial Sequence: Synthetic oligonucleotide
gcacccuaagcccgaugga

SEQ ID NO: 1237915 - RNA, 19 nt, Artificial Sequence
  Description of Artificial Sequence: Synthetic oligonucleotide
cuggccaccgcugucgaau

SEQ ID NO: 1237916 - RNA, 19 nt, Artificial Sequence
  Description of Artificial Sequence: Synthetic oligonucleotide
gcaagcgguugcagguccc

SEQ ID NO: 1237917 - RNA, 19 nt, Artificial Sequence
  Description of Artificial Sequence: Synthetic oligonucleotide
gcugucggugaggaaggca

SEQ ID NO: 1237918 - RNA, 19 nt, Artificial Sequence
  Description of Artificial Sequence: Synthetic oligonucleotide
gccuugcacaugucauaca

SEQ ID NO: 1237919 - RNA, 19 nt, Artificial Sequence
  Description of Artificial Sequence: Synthetic oligonucleotide
cacugccgagacagaggga

SEQ ID NO: 1237920 - RNA, 19 nt, Artificial Sequence
  Description of Artificial Sequence: Synthetic oligonucleotide
ggcgugugcuguccagcuc

SEQ ID NO: 1237921 - RNA, 19 nt, Artificial Sequence
  Description of Artificial Sequence: Synthetic oligonucleotide
gcgggcggcuucaggagcc

SEQ ID NO: 1237922 - RNA, 19 nt, Artificial Sequence
  Description of Artificial Sequence: Synthetic oligonucleotide
acgggaucuuaaaggccuu

SEQ ID NO: 1237923 - RNA, 19 nt, Artificial Sequence
  Description of Artificial Sequence: Synthetic oligonucleotide
ggcgacagccacccgcucu

SEQ ID NO: 1237924 - RNA, 19 nt, Artificial Sequence
  Description of Artificial Sequence: Synthetic oligonucleotide
ccagaagaaagugcuccaa

SEQ ID NO: 1237925 - RNA, 19 nt, Artificial Sequence
  Description of Artificial Sequence: Synthetic oligonucleotide
cccgucggcugugaugcgc

SEQ ID NO: 1237926 - RNA, 19 nt, Artificial Sequence
  Description of Artificial Sequence: Synthetic oligonucleotide
ggcacgaugccuggaucaa

SEQ ID NO: 1237927 - RNA, 19 nt, Artificial Sequence
  Description of Artificial Sequence: Synthetic oligonucleotide
cugugaugcgcaagcgguu

SEQ ID NO: 1237928 - RNA, 19 nt, Artificial Sequence
  Description of Artificial Sequence: Synthetic oligonucleotide
gcacuccgauuccgaacac

SEQ ID NO: 1237929 - RNA, 19 nt, Artificial Sequence
  Description of Artificial Sequence: Synthetic oligonucleotide
ccucguggacugccccucc

SEQ ID NO: 1237930 - RNA, 19 nt, Artificial Sequence
  Description of Artificial Sequence: Synthetic oligonucleotide
agggagccgcaugcuccug

SEQ ID NO: 1237931 - RNA, 19 nt, Artificial Sequence
  Description of Artificial Sequence: Synthetic oligonucleotide
gggcugcgucaccggagcc

SEQ ID NO: 1237932 - RNA, 19 nt, Artificial Sequence
  Description of Artificial Sequence: Synthetic oligonucleotide
ccgaagaggcagaccuuga

SEQ ID NO: 1237933 - RNA, 19 nt, Artificial Sequence
  Description of Artificial Sequence: Synthetic oligonucleotide
ggagggccaugggaacaug

SEQ ID NO: 1237934 - RNA, 19 nt, Artificial Sequence
  Description of Artificial Sequence: Synthetic oligonucleotide
ggcgggucuugagggcucc

SEQ ID NO: 1237935 - RNA, 19 nt, Artificial Sequence
  Description of Artificial Sequence: Synthetic oligonucleotide
cccuaagcccgauggaagu

SEQ ID NO: 1237936 - RNA, 19 nt, Artificial Sequence
  Description of Artificial Sequence: Synthetic oligonucleotide
ccgucggcugugaugcgca

SEQ ID NO: 1237937 - RNA, 19 nt, Artificial Sequence
  Description of Artificial Sequence: Synthetic oligonucleotide
ggcccaaauugcaucuccu

SEQ ID NO: 1237938 - RNA, 19 nt, Artificial Sequence
  Description of Artificial Sequence: Synthetic oligonucleotide
gcccaaauugcaucuccuu

SEQ ID NO: 1237939 - RNA, 19 nt, Artificial Sequence
  Description of Artificial Sequence: Synthetic oligonucleotide
caaggccacgaaguccacu

SEQ ID NO: 1237940 - RNA, 19 nt, Artificial Sequence
  Description of Artificial Sequence: Synthetic oligonucleotide
ccggcacgaugccuggauc

SEQ ID NO: 1237941 - RNA, 19 nt, Artificial Sequence
  Description of Artificial Sequence: Synthetic oligonucleotide
cagacggcgccgccaugaa

SEQ ID NO: 1237942 - RNA, 19 nt, Artificial Sequence
  Description of Artificial Sequence: Synthetic oligonucleotide
caacuagcugguggggaau

SEQ ID NO: 1237943 - RNA, 19 nt, Artificial Sequence
  Description of Artificial Sequence: Synthetic oligonucleotide
augacccgaugaggaucau

SEQ ID NO: 1237944 - RNA, 19 nt, Artificial Sequence
  Description of Artificial Sequence: Synthetic oligonucleotide
gcgcaagcgguugcagguc

SEQ ID NO: 1237945 - RNA, 19 nt, Artificial Sequence
  Description of Artificial Sequence: Synthetic oligonucleotide
gcgggucuugagggcuccg

SEQ ID NO: 1237946 - RNA, 19 nt, Artificial Sequence
  Description of Artificial Sequence: Synthetic oligonucleotide
gccaccgcugucgaauggu

SEQ ID NO: 1237947 - RNA, 19 nt, Artificial Sequence
  Description of Artificial Sequence: Synthetic oligonucleotide
cgggucuugagggcuccgc

SEQ ID NO: 1237948 - RNA, 19 nt, Artificial Sequence
  Description of Artificial Sequence: Synthetic oligonucleotide
ccgggcgggcggcuucagg

SEQ ID NO: 1237949 - RNA, 19 nt, Artificial Sequence
  Description of Artificial Sequence: Synthetic oligonucleotide
cccuacugacugccuugca

SEQ ID NO: 1237950 - RNA, 19 nt, Artificial Sequence
  Description of Artificial Sequence: Synthetic oligonucleotide
gaggcacccuaagcccgau

SEQ ID NO: 1237951 - RNA, 19 nt, Artificial Sequence
  Description of Artificial Sequence: Synthetic oligonucleotide
ggaucaugggccgguucuu

SEQ ID NO: 1237952 - RNA, 19 nt, Artificial Sequence
  Description of Artificial Sequence: Synthetic oligonucleotide
ccgggcccggcacgaugcc

SEQ ID NO: 1237953 - RNA, 19 nt, Artificial Sequence
  Description of Artificial Sequence: Synthetic oligonucleotide
gguucccgucggcugugau

SEQ ID NO: 1237954 - RNA, 19 nt, Artificial Sequence
  Description of Artificial Sequence: Synthetic oligonucleotide
ggggaucagcugacuaguu

SEQ ID NO: 1237955 - RNA, 19 nt, Artificial Sequence
  Description of Artificial Sequence: Synthetic oligonucleotide
cccggcacgaugccuggau

SEQ ID NO: 1237956 - RNA, 19 nt, Artificial Sequence
  Description of Artificial Sequence: Synthetic oligonucleotide
gccuuugcuaaggcacguu

SEQ ID NO: 1237957 - RNA, 19 nt, Artificial Sequence
  Description of Artificial Sequence: Synthetic oligonucleotide
ccgcaugcuccuggaggaa

SEQ ID NO: 1237958 - RNA, 19 nt, Artificial Sequence
  Description of Artificial Sequence: Synthetic oligonucleotide
gcccggcacgaugccugga

SEQ ID NO: 1237959 - RNA, 19 nt, Artificial Sequence
  Description of Artificial Sequence: Synthetic oligonucleotide
cgucggcugugaugcgcaa

SEQ ID NO: 1237960 - RNA, 19 nt, Artificial Sequence
  Description of Artificial Sequence: Synthetic oligonucleotide
cccgggcgggcggcuucag

SEQ ID NO: 1237961 - RNA, 19 nt, Artificial Sequence
  Description of Artificial Sequence: Synthetic oligonucleotide
ccccgggcgggcggcuuca

SEQ ID NO: 1237962 - RNA, 19 nt, Artificial Sequence
  Description of Artificial Sequence: Synthetic oligonucleotide
gccccgggcccggcacgau

SEQ ID NO: 1237963 - RNA, 19 nt, Artificial Sequence
  Description of Artificial Sequence: Synthetic oligonucleotide
ccccucccuggcgggucuu

SEQ ID NO: 1237964 - RNA, 19 nt, Artificial Sequence
  Description of Artificial Sequence: Synthetic oligonucleotide
auuugggugaugcagacac

SEQ ID NO: 1237965 - RNA, 19 nt, Artificial Sequence
  Description of Artificial Sequence: Synthetic oligonucleotide
uaaaauagcacagaaggcc

SEQ ID NO: 1237966 - RNA, 19 nt, Artificial Sequence
  Description of Artificial Sequence: Synthetic oligonucleotide
uacgucaugacgaugagcu

SEQ ID NO: 1237967 - RNA, 19 nt, Artificial Sequence
  Description of Artificial Sequence: Synthetic oligonucleotide
aucgauguaaaauagcaca

SEQ ID NO: 1237968 - RNA, 19 nt, Artificial Sequence
  Description of Artificial Sequence: Synthetic oligonucleotide
augacgaugagcuugucag

SEQ ID NO: 1237969 - RNA, 19 nt, Artificial Sequence
  Description of Artificial Sequence: Synthetic oligonucleotide
ugaaauuugggugaugcag

SEQ ID NO: 1237970 - RNA, 19 nt, Artificial Sequence
  Description of Artificial Sequence: Synthetic oligonucleotide
cuucuuuagcaaaucagcg

SEQ ID NO: 1237971 - RNA, 19 nt, Artificial Sequence
  Description of Artificial Sequence: Synthetic oligonucleotide
gaugagagcauucuucuug

SEQ ID NO: 1237972 - RNA, 19 nt, Artificial Sequence
  Description of Artificial Sequence: Synthetic oligonucleotide
uagaaucgauguaaaauag

SEQ ID NO: 1237973 - RNA, 19 nt, Artificial Sequence
  Description of Artificial Sequence: Synthetic oligonucleotide
ucgauguaaaauagcacag

SEQ ID NO: 1237974 - RNA, 19 nt, Artificial Sequence
  Description of Artificial Sequence: Synthetic oligonucleotide
uccgugaccagagaaaggg

SEQ ID NO: 1237975 - RNA, 19 nt, Artificial Sequence
  Description of Artificial Sequence: Synthetic oligonucleotide
aaaggggcgagaaccaggc

SEQ ID NO: 1237976 - RNA, 19 nt, Artificial Sequence
  Description of Artificial Sequence: Synthetic oligonucleotide
gaugcagacaccacgguag

SEQ ID NO: 1237977 - RNA, 19 nt, Artificial Sequence
  Description of Artificial Sequence: Synthetic oligonucleotide
uagcaaaucagcgucacgc

SEQ ID NO: 1237978 - RNA, 19 nt, Artificial Sequence
  Description of Artificial Sequence: Synthetic oligonucleotide
gaaucgauguaaaauagca

SEQ ID NO: 1237979 - RNA, 19 nt, Artificial Sequence
  Description of Artificial Sequence: Synthetic oligonucleotide
acacguacugacuuguguc

SEQ ID NO: 1237980 - RNA, 19 nt, Artificial Sequence
  Description of Artificial Sequence: Synthetic oligonucleotide
ucagguacggacagaagca

SEQ ID NO: 1237981 - RNA, 19 nt, Artificial Sequence
  Description of Artificial Sequence: Synthetic oligonucleotide
gauucgcuccuuuuggucc

SEQ ID NO: 1237982 - RNA, 19 nt, Artificial Sequence
  Description of Artificial Sequence: Synthetic oligonucleotide
ugacuuguguccuggaacc

SEQ ID NO: 1237983 - RNA, 19 nt, Artificial Sequence
  Description of Artificial Sequence: Synthetic oligonucleotide
gucagguacggacagaagc

SEQ ID NO: 1237984 - RNA, 19 nt, Artificial Sequence
  Description of Artificial Sequence: Synthetic oligonucleotide
uuguugaccagggugaacc

SEQ ID NO: 1237985 - RNA, 19 nt, Artificial Sequence
  Description of Artificial Sequence: Synthetic oligonucleotide
gaaagagccaugugcgcgg

SEQ ID NO: 1237986 - RNA, 19 nt, Artificial Sequence
  Description of Artificial Sequence: Synthetic oligonucleotide
gaaagcucggaucuggcac

SEQ ID NO: 1237987 - RNA, 19 nt, Artificial Sequence
  Description of Artificial Sequence: Synthetic oligonucleotide
agaaucgauguaaaauagc

SEQ ID NO: 1237988 - RNA, 19 nt, Artificial Sequence
  Description of Artificial Sequence: Synthetic oligonucleotide
auguggugaaauuugggug

SEQ ID NO: 1237989 - RNA, 19 nt, Artificial Sequence
  Description of Artificial Sequence: Synthetic oligonucleotide
gauagucaaucuugucugg

SEQ ID NO: 1237990 - RNA, 19 nt, Artificial Sequence
  Description of Artificial Sequence: Synthetic oligonucleotide
uucuuuagcaaaucagcgu

SEQ ID NO: 1237991 - RNA, 19 nt, Artificial Sequence
  Description of Artificial Sequence: Synthetic oligonucleotide
ucguccacagaaaaggagu

SEQ ID NO: 1237992 - RNA, 19 nt, Artificial Sequence
  Description of Artificial Sequence: Synthetic oligonucleotide
guagaaucgauguaaaaua

SEQ ID NO: 1237993 - RNA, 19 nt, Artificial Sequence
  Description of Artificial Sequence: Synthetic oligonucleotide
aagauguggugaaauuugg

SEQ ID NO: 1237994 - RNA, 19 nt, Artificial Sequence
  Description of Artificial Sequence: Synthetic oligonucleotide
gucgccugcauccaggccg

SEQ ID NO: 1237995 - RNA, 19 nt, Artificial Sequence
  Description of Artificial Sequence: Synthetic oligonucleotide
ugauucaccagugacacua

SEQ ID NO: 1237996 - RNA, 19 nt, Artificial Sequence
  Description of Artificial Sequence: Synthetic oligonucleotide
agcgauucgcuccuuuugg

SEQ ID NO: 1237997 - RNA, 19 nt, Artificial Sequence
  Description of Artificial Sequence: Synthetic oligonucleotide
uuagcaaaucagcgucacg

SEQ ID NO: 1237998 - RNA, 19 nt, Artificial Sequence
  Description of Artificial Sequence: Synthetic oligonucleotide
auguugagugggucgaggg

SEQ ID NO: 1237999 - RNA, 19 nt, Artificial Sequence
  Description of Artificial Sequence: Synthetic oligonucleotide
gauccgugaccagagaaag

SEQ ID NO: 1238000 - RNA, 19 nt, Artificial Sequence
  Description of Artificial Sequence: Synthetic oligonucleotide
ugggucgagggagagauag

SEQ ID NO: 1238001 - RNA, 19 nt, Artificial Sequence
  Description of Artificial Sequence: Synthetic oligonucleotide
gauguggugaaauuugggu

SEQ ID NO: 1238002 - RNA, 19 nt, Artificial Sequence
  Description of Artificial Sequence: Synthetic oligonucleotide
aggggcgagaaccaggcag

SEQ ID NO: 1238003 - RNA, 19 nt, Artificial Sequence
  Description of Artificial Sequence: Synthetic oligonucleotide
agaagcaccauguccgcug

SEQ ID NO: 1238004 - RNA, 19 nt, Artificial Sequence
  Description of Artificial Sequence: Synthetic oligonucleotide
ucuagagcgauucgcuccu

SEQ ID NO: 1238005 - RNA, 19 nt, Artificial Sequence
  Description of Artificial Sequence: Synthetic oligonucleotide
ugcgcgacgguuuucugcc

SEQ ID NO: 1238006 - RNA, 19 nt, Artificial Sequence
  Description of Artificial Sequence: Synthetic oligonucleotide
auucaccagugacacuagc

SEQ ID NO: 1238007 - RNA, 19 nt, Artificial Sequence
  Description of Artificial Sequence: Synthetic oligonucleotide
caauagccaacauggcgcg

SEQ ID NO: 1238008 - RNA, 19 nt, Artificial Sequence
  Description of Artificial Sequence: Synthetic oligonucleotide
cuugcgacgucgcugcucc

SEQ ID NO: 1238009 - RNA, 19 nt, Artificial Sequence
  Description of Artificial Sequence: Synthetic oligonucleotide
agcccgcccaucuaucugc

SEQ ID NO: 1238010 - RNA, 19 nt, Artificial Sequence
  Description of Artificial Sequence: Synthetic oligonucleotide
uugcuauuccguagccugg

SEQ ID NO: 1238011 - RNA, 19 nt, Artificial Sequence
  Description of Artificial Sequence: Synthetic oligonucleotide
gaaauuugggugaugcaga

SEQ ID NO: 1238012 - RNA, 19 nt, Artificial Sequence
  Description of Artificial Sequence: Synthetic oligonucleotide
auagucaaucuugucuggg

SEQ ID NO: 1238013 - RNA, 19 nt, Artificial Sequence
  Description of Artificial Sequence: Synthetic oligonucleotide
auagcacagaaggccaggc

SEQ ID NO: 1238014 - RNA, 19 nt, Artificial Sequence
  Description of Artificial Sequence: Synthetic oligonucleotide
ugucuggguagaaucgaug

SEQ ID NO: 1238015 - RNA, 19 nt, Artificial Sequence
  Description of Artificial Sequence: Synthetic oligonucleotide
cacguacugacuugugucc

SEQ ID NO: 1238016 - RNA, 19 nt, Artificial Sequence
  Description of Artificial Sequence: Synthetic oligonucleotide
aggaguugcuauuccguag

SEQ ID NO: 1238017 - RNA, 19 nt, Artificial Sequence
  Description of Artificial Sequence: Synthetic oligonucleotide
cacagguacgucaugacga

SEQ ID NO: 1238018 - RNA, 19 nt, Artificial Sequence
  Description of Artificial Sequence: Synthetic oligonucleotide
ggagagauagucaaucuug

SEQ ID NO: 1238019 - RNA, 19 nt, Artificial Sequence
  Description of Artificial Sequence: Synthetic oligonucleotide
gaccgucucagucucacac

SEQ ID NO: 1238020 - RNA, 19 nt, Artificial Sequence
  Description of Artificial Sequence: Synthetic oligonucleotide
uguugagugggucgaggga

SEQ ID NO: 1238021 - RNA, 19 nt, Artificial Sequence
  Description of Artificial Sequence: Synthetic oligonucleotide
uucucgccugcucagcugc

SEQ ID NO: 1238022 - RNA, 19 nt, Artificial Sequence
  Description of Artificial Sequence: Synthetic oligonucleotide
accgaggaccgucucaguc

SEQ ID NO: 1238023 - RNA, 19 nt, Artificial Sequence
  Description of Artificial Sequence: Synthetic oligonucleotide
augagagcauucuucuugu

SEQ ID NO: 1238024 - RNA, 19 nt, Artificial Sequence
  Description of Artificial Sequence: Synthetic oligonucleotide
caaaccuccgcuccaaguc

SEQ ID NO: 1238025 - RNA, 19 nt, Artificial Sequence
  Description of Artificial Sequence: Synthetic oligonucleotide
gaagcaccauguccgcugg

SEQ ID NO: 1238026 - RNA, 19 nt, Artificial Sequence
  Description of Artificial Sequence: Synthetic oligonucleotide
uuuagcaaaucagcgucac

SEQ ID NO: 1238027 - RNA, 19 nt, Artificial Sequence
  Description of Artificial Sequence: Synthetic oligonucleotide
gagaaagagccaugugcgc

SEQ ID NO: 1238028 - RNA, 19 nt, Artificial Sequence
  Description of Artificial Sequence: Synthetic oligonucleotide
aauagccaacauggcgcgc

SEQ ID NO: 1238029 - RNA, 19 nt, Artificial Sequence
  Description of Artificial Sequence: Synthetic oligonucleotide
ucacgcacgugggagaaag

SEQ ID NO: 1238030 - RNA, 19 nt, Artificial Sequence
  Description of Artificial Sequence: Synthetic oligonucleotide
gguacagaaagcucggauc

SEQ ID NO: 1238031 - RNA, 19 nt, Artificial Sequence
  Description of Artificial Sequence: Synthetic oligonucleotide
gaugagcuugucagguacg

SEQ ID NO: 1238032 - RNA, 19 nt, Artificial Sequence
  Description of Artificial Sequence: Synthetic oligonucleotide
ugcuccucgaugagaagcu

SEQ ID NO: 1238033 - RNA, 19 nt, Artificial Sequence
  Description of Artificial Sequence: Synthetic oligonucleotide
agauguggugaaauuuggg

SEQ ID NO: 1238034 - RNA, 19 nt, Artificial Sequence
  Description of Artificial Sequence: Synthetic oligonucleotide
accgagacacgcccagggc

SEQ ID NO: 1238035 - RNA, 19 nt, Artificial Sequence
  Description of Artificial Sequence: Synthetic oligonucleotide
cugggugaccucuuggcac

SEQ ID NO: 1238036 - RNA, 19 nt, Artificial Sequence
  Description of Artificial Sequence: Synthetic oligonucleotide
uccccacugaccgaggacc

SEQ ID NO: 1238037 - RNA, 19 nt, Artificial Sequence
  Description of Artificial Sequence: Synthetic oligonucleotide
acaggggacguggacgacc

SEQ ID NO: 1238038 - RNA, 19 nt, Artificial Sequence
  Description of Artificial Sequence: Synthetic oligonucleotide
cucgcguagccucugugcc

SEQ ID NO: 1238039 - RNA, 19 nt, Artificial Sequence
  Description of Artificial Sequence: Synthetic oligonucleotide
gagcgauucgcuccuuuug

SEQ ID NO: 1238040 - RNA, 19 nt, Artificial Sequence
  Description of Artificial Sequence: Synthetic oligonucleotide
cacuccguuuaccagcccc

SEQ ID NO: 1238041 - RNA, 19 nt, Artificial Sequence
  Description of Artificial Sequence: Synthetic oligonucleotide
agcaaaucagcgucacgca

SEQ ID NO: 1238042 - RNA, 19 nt, Artificial Sequence
  Description of Artificial Sequence: Synthetic oligonucleotide
uugcccacgcgguaagugc

SEQ ID NO: 1238043 - RNA, 19 nt, Artificial Sequence
  Description of Artificial Sequence: Synthetic oligonucleotide
uggguagaaucgauguaaa

SEQ ID NO: 1238044 - RNA, 19 nt, Artificial Sequence
  Description of Artificial Sequence: Synthetic oligonucleotide
agugggucgagggagagau

SEQ ID NO: 1238045 - RNA, 19 nt, Artificial Sequence
  Description of Artificial Sequence: Synthetic oligonucleotide
augagcuugucagguacgg

SEQ ID NO: 1238046 - RNA, 19 nt, Artificial Sequence
  Description of Artificial Sequence: Synthetic oligonucleotide
accacucacaccaccuggc

SEQ ID NO: 1238047 - RNA, 19 nt, Artificial Sequence
  Description of Artificial Sequence: Synthetic oligonucleotide
agguacgucaugacgauga

SEQ ID NO: 1238048 - RNA, 19 nt, Artificial Sequence
  Description of Artificial Sequence: Synthetic oligonucleotide
ugucagguacggacagaag

SEQ ID NO: 1238049 - RNA, 19 nt, Artificial Sequence
  Description of Artificial Sequence: Synthetic oligonucleotide
aaagagccaugugcgcggg

SEQ ID NO: 1238050 - RNA, 19 nt, Artificial Sequence
  Description of Artificial Sequence: Synthetic oligonucleotide
cugggcguugcccacgcgg

SEQ ID NO: 1238051 - RNA, 19 nt, Artificial Sequence
  Description of Artificial Sequence: Synthetic oligonucleotide
cacgcgguaagugccaggg

SEQ ID NO: 1238052 - RNA, 19 nt, Artificial Sequence
  Description of Artificial Sequence: Synthetic oligonucleotide
gagucaaggcuggagucag

SEQ ID NO: 1238053 - RNA, 19 nt, Artificial Sequence
  Description of Artificial Sequence: Synthetic oligonucleotide
cugcuccucgaugagaagc

SEQ ID NO: 1238054 - RNA, 19 nt, Artificial Sequence
  Description of Artificial Sequence: Synthetic oligonucleotide
aacauggcgcgcagcuccc

SEQ ID NO: 1238055 - RNA, 19 nt, Artificial Sequence
  Description of Artificial Sequence: Synthetic oligonucleotide
ugcccacgcgguaagugcc

SEQ ID NO: 1238056 - RNA, 19 nt, Artificial Sequence
  Description of Artificial Sequence: Synthetic oligonucleotide
agguacggacagaagcacc

SEQ ID NO: 1238057 - RNA, 19 nt, Artificial Sequence
  Description of Artificial Sequence: Synthetic oligonucleotide
caggggacguggacgaccg

SEQ ID NO: 1238058 - RNA, 19 nt, Artificial Sequence
  Description of Artificial Sequence: Synthetic oligonucleotide
aauuugggugaugcagaca

SEQ ID NO: 1238059 - RNA, 19 nt, Artificial Sequence
  Description of Artificial Sequence: Synthetic oligonucleotide
aaccguugcaggccagccu

SEQ ID NO: 1238060 - RNA, 19 nt, Artificial Sequence
  Description of Artificial Sequence: Synthetic oligonucleotide
gacgaccgggcucuggggc

SEQ ID NO: 1238061 - RNA, 19 nt, Artificial Sequence
  Description of Artificial Sequence: Synthetic oligonucleotide
ucaccuugcgacgucgcug

SEQ ID NO: 1238062 - RNA, 19 nt, Artificial Sequence
  Description of Artificial Sequence: Synthetic oligonucleotide
ugcgccaagauguggugaa

SEQ ID NO: 1238063 - RNA, 19 nt, Artificial Sequence
  Description of Artificial Sequence: Synthetic oligonucleotide
caugcagcguucucgccug

SEQ ID NO: 1238064 - RNA, 19 nt, Artificial Sequence
  Description of Artificial Sequence: Synthetic oligonucleotide
gagggauccgugaccagag

SEQ ID NO: 1238065 - RNA, 19 nt, Artificial Sequence
  Description of Artificial Sequence: Synthetic oligonucleotide
accacgguagccucugggu

SEQ ID NO: 1238066 - RNA, 19 nt, Artificial Sequence
  Description of Artificial Sequence: Synthetic oligonucleotide
gcacagguacgucaugacg

SEQ ID NO: 1238067 - RNA, 19 nt, Artificial Sequence
  Description of Artificial Sequence: Synthetic oligonucleotide
cuuuagcaaaucagcguca

SEQ ID NO: 1238068 - RNA, 19 nt, Artificial Sequence
  Description of Artificial Sequence: Synthetic oligonucleotide
acgcacgugggagaaagag

SEQ ID NO: 1238069 - RNA, 19 nt, Artificial Sequence
  Description of Artificial Sequence: Synthetic oligonucleotide
gcagcgaagccaucaaaag

SEQ ID NO: 1238070 - RNA, 19 nt, Artificial Sequence
  Description of Artificial Sequence: Synthetic oligonucleotide
uguugaccagggugaacca

SEQ ID NO: 1238071 - RNA, 19 nt, Artificial Sequence
  Description of Artificial Sequence: Synthetic oligonucleotide
cucucggugcugcugcgcg

SEQ ID NO: 1238072 - RNA, 19 nt, Artificial Sequence
  Description of Artificial Sequence: Synthetic oligonucleotide
aggaccgucucagucucac

SEQ ID NO: 1238073 - RNA, 19 nt, Artificial Sequence
  Description of Artificial Sequence: Synthetic oligonucleotide
cagcaugcagcguucucgc

SEQ ID NO: 1238074 - RNA, 19 nt, Artificial Sequence
  Description of Artificial Sequence: Synthetic oligonucleotide
uugucuggguagaaucgau

SEQ ID NO: 1238075 - RNA, 19 nt, Artificial Sequence
  Description of Artificial Sequence: Synthetic oligonucleotide
ugccggcucaccuugcgac

SEQ ID NO: 1238076 - RNA, 19 nt, Artificial Sequence
  Description of Artificial Sequence: Synthetic oligonucleotide
ucgccugcucagcugccgg

SEQ ID NO: 1238077 - RNA, 19 nt, Artificial Sequence
  Description of Artificial Sequence: Synthetic oligonucleotide
auucgcuccuuuuggucca

SEQ ID NO: 1238078 - RNA, 19 nt, Artificial Sequence
  Description of Artificial Sequence: Synthetic oligonucleotide
acggacagaagcaccaugu

SEQ ID NO: 1238079 - RNA, 19 nt, Artificial Sequence
  Description of Artificial Sequence: Synthetic oligonucleotide
cagcaaccgagacacgccc

SEQ ID NO: 1238080 - RNA, 19 nt, Artificial Sequence
  Description of Artificial Sequence: Synthetic oligonucleotide
ggcaccuguuuccaugagg

SEQ ID NO: 1238081 - RNA, 19 nt, Artificial Sequence
  Description of Artificial Sequence: Synthetic oligonucleotide
cugcgcgacgguuuucugc

SEQ ID NO: 1238082 - RNA, 19 nt, Artificial Sequence
  Description of Artificial Sequence: Synthetic oligonucleotide
cuuuugguccaggucccgg

SEQ ID NO: 1238083 - RNA, 19 nt, Artificial Sequence
  Description of Artificial Sequence: Synthetic oligonucleotide
gaagccaucaaaagccugu

SEQ ID NO: 1238084 - RNA, 19 nt, Artificial Sequence
  Description of Artificial Sequence: Synthetic oligonucleotide
aagagccaugugcgcgggg

SEQ ID NO: 1238085 - RNA, 19 nt, Artificial Sequence
  Description of Artificial Sequence: Synthetic oligonucleotide
uccagaguccgggucgucc

SEQ ID NO: 1238086 - RNA, 19 nt, Artificial Sequence
  Description of Artificial Sequence: Synthetic oligonucleotide
agcguucucgccugcucag

SEQ ID NO: 1238087 - RNA, 19 nt, Artificial Sequence
  Description of Artificial Sequence: Synthetic oligonucleotide
aggcccgagucccuagagg

SEQ ID NO: 1238088 - RNA, 19 nt, Artificial Sequence
  Description of Artificial Sequence: Synthetic oligonucleotide
acagguacgucaugacgau

SEQ ID NO: 1238089 - RNA, 19 nt, Artificial Sequence
  Description of Artificial Sequence: Synthetic oligonucleotide
gugaaccacuccucaauca

SEQ ID NO: 1238090 - RNA, 19 nt, Artificial Sequence
  Description of Artificial Sequence: Synthetic oligonucleotide
ggcccgagucccuagaggc

SEQ ID NO: 1238091 - RNA, 19 nt, Artificial Sequence
  Description of Artificial Sequence: Synthetic oligonucleotide
gguagaaucgauguaaaau

SEQ ID NO: 1238092 - RNA, 19 nt, Artificial Sequence
  Description of Artificial Sequence: Synthetic oligonucleotide
caggccgcguuccaggcgc

SEQ ID NO: 1238093 - RNA, 19 nt, Artificial Sequence
  Description of Artificial Sequence: Synthetic oligonucleotide
guuuaccagccccucugug

SEQ ID NO: 1238094 - RNA, 19 nt, Artificial Sequence
  Description of Artificial Sequence: Synthetic oligonucleotide
caacaggaguugcucucgg

SEQ ID NO: 1238095 - RNA, 19 nt, Artificial Sequence
  Description of Artificial Sequence: Synthetic oligonucleotide
uccguuuaccagccccucu

SEQ ID NO: 1238096 - RNA, 19 nt, Artificial Sequence
  Description of Artificial Sequence: Synthetic oligonucleotide
gugaaauuugggugaugca

SEQ ID NO: 1238097 - RNA, 19 nt, Artificial Sequence
  Description of Artificial Sequence: Synthetic oligonucleotide
aggccguugcgccaagaug

SEQ ID NO: 1238098 - RNA, 19 nt, Artificial Sequence
  Description of Artificial Sequence: Synthetic oligonucleotide
guugcgccaagauguggug

SEQ ID NO: 1238099 - RNA, 19 nt, Artificial Sequence
  Description of Artificial Sequence: Synthetic oligonucleotide
ugcuauuccguagccugga

SEQ ID NO: 1238100 - RNA, 19 nt, Artificial Sequence
  Description of Artificial Sequence: Synthetic oligonucleotide
gcugcugcgggccuggggc

SEQ ID NO: 1238101 - RNA, 19 nt, Artificial Sequence
  Description of Artificial Sequence: Synthetic oligonucleotide
caccacgguagccucuggg

SEQ ID NO: 1238102 - RNA, 19 nt, Artificial Sequence
  Description of Artificial Sequence: Synthetic oligonucleotide
acgcgguaagugccagggc

SEQ ID NO: 1238103 - RNA, 19 nt, Artificial Sequence
  Description of Artificial Sequence: Synthetic oligonucleotide
uagccaacauggcgcgcag

SEQ ID NO: 1238104 - RNA, 19 nt, Artificial Sequence
  Description of Artificial Sequence: Synthetic oligonucleotide
gaaccguugcaggccagcc

SEQ ID NO: 1238105 - RNA, 19 nt, Artificial Sequence
  Description of Artificial Sequence: Synthetic oligonucleotide
ugggugaugcagacaccac

SEQ ID NO: 1238106 - RNA, 19 nt, Artificial Sequence
  Description of Artificial Sequence: Synthetic oligonucleotide
agagcgauucgcuccuuuu

SEQ ID NO: 1238107 - RNA, 19 nt, Artificial Sequence
  Description of Artificial Sequence: Synthetic oligonucleotide
gcuugucagguacggacag

SEQ ID NO: 1238108 - RNA, 19 nt, Artificial Sequence
  Description of Artificial Sequence: Synthetic oligonucleotide
ugcucgcguagccucugug

SEQ ID NO: 1238109 - RNA, 19 nt, Artificial Sequence
  Description of Artificial Sequence: Synthetic oligonucleotide
cacucacaccaccuggcac

SEQ ID NO: 1238110 - RNA, 19 nt, Artificial Sequence
  Description of Artificial Sequence: Synthetic oligonucleotide
aggccgucgggcaagcuag

SEQ ID NO: 1238111 - RNA, 19 nt, Artificial Sequence
  Description of Artificial Sequence: Synthetic oligonucleotide
agagccaugugcgcggggu

SEQ ID NO: 1238112 - RNA, 19 nt, Artificial Sequence
  Description of Artificial Sequence: Synthetic oligonucleotide
gagagauagucaaucuugu

SEQ ID NO: 1238113 - RNA, 19 nt, Artificial Sequence
  Description of Artificial Sequence: Synthetic oligonucleotide
uggagguaccgguccggcc

SEQ ID NO: 1238114 - RNA, 19 nt, Artificial Sequence
  Description of Artificial Sequence: Synthetic oligonucleotide
gcaaaucagcgucacgcac

SEQ ID NO: 1238115 - RNA, 19 nt, Artificial Sequence
  Description of Artificial Sequence: Synthetic oligonucleotide
ggugaaccacuccucaauc

SEQ ID NO: 1238116 - RNA, 19 nt, Artificial Sequence
  Description of Artificial Sequence: Synthetic oligonucleotide
augugcgcgggguggaggu

SEQ ID NO: 1238117 - RNA, 19 nt, Artificial Sequence
  Description of Artificial Sequence: Synthetic oligonucleotide
guccgggucguccacagaa

SEQ ID NO: 1238118 - RNA, 19 nt, Artificial Sequence
  Description of Artificial Sequence: Synthetic oligonucleotide
cucuuggcaccacuccaac

SEQ ID NO: 1238119 - RNA, 19 nt, Artificial Sequence
  Description of Artificial Sequence: Synthetic oligonucleotide
gacguggacgaccgggcuc

SEQ ID NO: 1238120 - RNA, 19 nt, Artificial Sequence
  Description of Artificial Sequence: Synthetic oligonucleotide
cucaucccucugauucacc

SEQ ID NO: 1238121 - RNA, 19 nt, Artificial Sequence
  Description of Artificial Sequence: Synthetic oligonucleotide
acgguagccucugggugac

SEQ ID NO: 1238122 - RNA, 19 nt, Artificial Sequence
  Description of Artificial Sequence: Synthetic oligonucleotide
ugcugcgcgacgguuuucu

SEQ ID NO: 1238123 - RNA, 19 nt, Artificial Sequence
  Description of Artificial Sequence: Synthetic oligonucleotide
uugcgccaagaugugguga

SEQ ID NO: 1238124 - RNA, 19 nt, Artificial Sequence
  Description of Artificial Sequence: Synthetic oligonucleotide
gccacaggggacguggacg

SEQ ID NO: 1238125 - RNA, 19 nt, Artificial Sequence
  Description of Artificial Sequence: Synthetic oligonucleotide
cuugucuggguagaaucga

SEQ ID NO: 1238126 - RNA, 19 nt, Artificial Sequence
  Description of Artificial Sequence: Synthetic oligonucleotide
uggcaccuguuuccaugag

SEQ ID NO: 1238127 - RNA, 19 nt, Artificial Sequence
  Description of Artificial Sequence: Synthetic oligonucleotide
cagguacggacagaagcac

SEQ ID NO: 1238128 - RNA, 19 nt, Artificial Sequence
  Description of Artificial Sequence: Synthetic oligonucleotide
auccgugaccagagaaagg

SEQ ID NO: 1238129 - RNA, 19 nt, Artificial Sequence
  Description of Artificial Sequence: Synthetic oligonucleotide
uguccgcuggcuccagcaa

SEQ ID NO: 1238130 - RNA, 19 nt, Artificial Sequence
  Description of Artificial Sequence: Synthetic oligonucleotide
gcaaccgagacacgcccag

SEQ ID NO: 1238131 - RNA, 19 nt, Artificial Sequence
  Description of Artificial Sequence: Synthetic oligonucleotide
uagagcgauucgcuccuuu

SEQ ID NO: 1238132 - RNA, 19 nt, Artificial Sequence
  Description of Artificial Sequence: Synthetic oligonucleotide
ggggcgagaaccaggcagg

SEQ ID NO: 1238133 - RNA, 19 nt, Artificial Sequence
  Description of Artificial Sequence: Synthetic oligonucleotide
auuccguagccuggaucuc

SEQ ID NO: 1238134 - RNA, 19 nt, Artificial Sequence
  Description of Artificial Sequence: Synthetic oligonucleotide
agggugaaccacuccucaa

SEQ ID NO: 1238135 - RNA, 19 nt, Artificial Sequence
  Description of Artificial Sequence: Synthetic oligonucleotide
ucgccugcauccaggccgu

SEQ ID NO: 1238136 - RNA, 19 nt, Artificial Sequence
  Description of Artificial Sequence: Synthetic oligonucleotide
caugugcgcgggguggagg

SEQ ID NO: 1238137 - RNA, 19 nt, Artificial Sequence
  Description of Artificial Sequence: Synthetic oligonucleotide
acguggacgaccgggcucu

SEQ ID NO: 1238138 - RNA, 19 nt, Artificial Sequence
  Description of Artificial Sequence: Synthetic oligonucleotide
ccagcaaccgagacacgcc

SEQ ID NO: 1238139 - RNA, 19 nt, Artificial Sequence
  Description of Artificial Sequence: Synthetic oligonucleotide
agcucagcaugcagcguuc

SEQ ID NO: 1238140 - RNA, 19 nt, Artificial Sequence
  Description of Artificial Sequence: Synthetic oligonucleotide
gcucgcguagccucugugc

SEQ ID NO: 1238141 - RNA, 19 nt, Artificial Sequence
  Description of Artificial Sequence: Synthetic oligonucleotide
gagccaugugcgcggggug

SEQ ID NO: 1238142 - RNA, 19 nt, Artificial Sequence
  Description of Artificial Sequence: Synthetic oligonucleotide
cgcgguaagugccagggcc

SEQ ID NO: 1238143 - RNA, 19 nt, Artificial Sequence
  Description of Artificial Sequence: Synthetic oligonucleotide
acuccguuuaccagccccu

SEQ ID NO: 1238144 - RNA, 19 nt, Artificial Sequence
  Description of Artificial Sequence: Synthetic oligonucleotide
ucgggcaagcuaggcuggg

SEQ ID NO: 1238145 - RNA, 19 nt, Artificial Sequence
  Description of Artificial Sequence: Synthetic oligonucleotide
agucccuagaggccacuuu

SEQ ID NO: 1238146 - RNA, 19 nt, Artificial Sequence
  Description of Artificial Sequence: Synthetic oligonucleotide
agacacgcccagggcagcg

SEQ ID NO: 1238147 - RNA, 19 nt, Artificial Sequence
  Description of Artificial Sequence: Synthetic oligonucleotide
gucgggcaagcuaggcugg

SEQ ID NO: 1238148 - RNA, 19 nt, Artificial Sequence
  Description of Artificial Sequence: Synthetic oligonucleotide
augcagcguucucgccugc

SEQ ID NO: 1238149 - RNA, 19 nt, Artificial Sequence
  Description of Artificial Sequence: Synthetic oligonucleotide
agccaacauggcgcgcagc

SEQ ID NO: 1238150 - RNA, 19 nt, Artificial Sequence
  Description of Artificial Sequence: Synthetic oligonucleotide
cccgguacagaaagcucgg

SEQ ID NO: 1238151 - RNA, 19 nt, Artificial Sequence
  Description of Artificial Sequence: Synthetic oligonucleotide
ucucggugcugcugcgcga

SEQ ID NO: 1238152 - RNA, 19 nt, Artificial Sequence
  Description of Artificial Sequence: Synthetic oligonucleotide
gucgagggagagauaguca

SEQ ID NO: 1238153 - RNA, 19 nt, Artificial Sequence
  Description of Artificial Sequence: Synthetic oligonucleotide
ugagagcauucuucuuguu

SEQ ID NO: 1238154 - RNA, 19 nt, Artificial Sequence
  Description of Artificial Sequence: Synthetic oligonucleotide
agucaaaccuccgcuccaa

SEQ ID NO: 1238155 - RNA, 19 nt, Artificial Sequence
  Description of Artificial Sequence: Synthetic oligonucleotide
ccaacaggaguugcucucg

SEQ ID NO: 1238156 - RNA, 19 nt, Artificial Sequence
  Description of Artificial Sequence: Synthetic oligonucleotide
cccacuccguuuaccagcc

SEQ ID NO: 1238157 - RNA, 19 nt, Artificial Sequence
  Description of Artificial Sequence: Synthetic oligonucleotide
ggcgcucaucuucuucuag

SEQ ID NO: 1238158 - RNA, 19 nt, Artificial Sequence
  Description of Artificial Sequence: Synthetic oligonucleotide
caagcuaggcugggcguug

SEQ ID NO: 1238159 - RNA, 19 nt, Artificial Sequence
  Description of Artificial Sequence: Synthetic oligonucleotide
ugcgugggccugagucaag

SEQ ID NO: 1238160 - RNA, 19 nt, Artificial Sequence
  Description of Artificial Sequence: Synthetic oligonucleotide
caaccgagacacgcccagg

SEQ ID NO: 1238161 - RNA, 19 nt, Artificial Sequence
  Description of Artificial Sequence: Synthetic oligonucleotide
gugggccugagucaaggcu

SEQ ID NO: 1238162 - RNA, 19 nt, Artificial Sequence
  Description of Artificial Sequence: Synthetic oligonucleotide
ugcgcgggguggagguacc

SEQ ID NO: 1238163 - RNA, 19 nt, Artificial Sequence
  Description of Artificial Sequence: Synthetic oligonucleotide
gggauccgugaccagagaa

SEQ ID NO: 1238164 - RNA, 19 nt, Artificial Sequence
  Description of Artificial Sequence: Synthetic oligonucleotide
cacacguacugacuugugu

SEQ ID NO: 1238165 - RNA, 19 nt, Artificial Sequence
  Description of Artificial Sequence: Synthetic oligonucleotide
ggcagcgaagccaucaaaa

SEQ ID NO: 1238166 - RNA, 19 nt, Artificial Sequence
  Description of Artificial Sequence: Synthetic oligonucleotide
cucggugcugcugcgcgac

SEQ ID NO: 1238167 - RNA, 19 nt, Artificial Sequence
  Description of Artificial Sequence: Synthetic oligonucleotide
ggagguaccgguccggccu

SEQ ID NO: 1238168 - RNA, 19 nt, Artificial Sequence
  Description of Artificial Sequence: Synthetic oligonucleotide
agggauccgugaccagaga

SEQ ID NO: 1238169 - RNA, 19 nt, Artificial Sequence
  Description of Artificial Sequence: Synthetic oligonucleotide
gagguaccgguccggccuc

SEQ ID NO: 1238170 - RNA, 19 nt, Artificial Sequence
  Description of Artificial Sequence: Synthetic oligonucleotide
cagcguucucgccugcuca

SEQ ID NO: 1238171 - RNA, 19 nt, Artificial Sequence
  Description of Artificial Sequence: Synthetic oligonucleotide
ccgugaccagagaaagggg

SEQ ID NO: 1238172 - RNA, 19 nt, Artificial Sequence
  Description of Artificial Sequence: Synthetic oligonucleotide
guggagguaccgguccggc

SEQ ID NO: 1238173 - RNA, 19 nt, Artificial Sequence
  Description of Artificial Sequence: Synthetic oligonucleotide
ggccguugcgccaagaugu

SEQ ID NO: 1238174 - RNA, 19 nt, Artificial Sequence
  Description of Artificial Sequence: Synthetic oligonucleotide
gguggagguaccgguccgg

SEQ ID NO: 1238175 - RNA, 19 nt, Artificial Sequence
  Description of Artificial Sequence: Synthetic oligonucleotide
ggagggauccgugaccaga

SEQ ID NO: 1238176 - RNA, 19 nt, Artificial Sequence
  Description of Artificial Sequence: Synthetic oligonucleotide
ggacgaccgggcucugggg

SEQ ID NO: 1238177 - RNA, 19 nt, Artificial Sequence
  Description of Artificial Sequence: Synthetic oligonucleotide
cagcccgcccaucuaucug

SEQ ID NO: 1238178 - RNA, 19 nt, Artificial Sequence
  Description of Artificial Sequence: Synthetic oligonucleotide
ggguagaaucgauguaaaa

SEQ ID NO: 1238179 - RNA, 19 nt, Artificial Sequence
  Description of Artificial Sequence: Synthetic oligonucleotide
gucaugacgaugagcuugu

SEQ ID NO: 1238180 - RNA, 19 nt, Artificial Sequence
  Description of Artificial Sequence: Synthetic oligonucleotide
gccggcucaccuugcgacg

SEQ ID NO: 1238181 - RNA, 19 nt, Artificial Sequence
  Description of Artificial Sequence: Synthetic oligonucleotide
ggcucaccuugcgacgucg

SEQ ID NO: 1238182 - RNA, 19 nt, Artificial Sequence
  Description of Artificial Sequence: Synthetic oligonucleotide
gcgaggagggauccgugac

SEQ ID NO: 1238183 - RNA, 19 nt, Artificial Sequence
  Description of Artificial Sequence: Synthetic oligonucleotide
aaucagcgucacgcacgug

SEQ ID NO: 1238184 - RNA, 19 nt, Artificial Sequence
  Description of Artificial Sequence: Synthetic oligonucleotide
acgucaugacgaugagcuu

SEQ ID NO: 1238185 - RNA, 19 nt, Artificial Sequence
  Description of Artificial Sequence: Synthetic oligonucleotide
cacgcccagggcagcgaag

SEQ ID NO: 1238186 - RNA, 19 nt, Artificial Sequence
  Description of Artificial Sequence: Synthetic oligonucleotide
ccagaaggcugcugcgggc

SEQ ID NO: 1238187 - RNA, 19 nt, Artificial Sequence
  Description of Artificial Sequence: Synthetic oligonucleotide
acacgcccagggcagcgaa

SEQ ID NO: 1238188 - RNA, 19 nt, Artificial Sequence
  Description of Artificial Sequence: Synthetic oligonucleotide
cacgugggagaaagagcca

SEQ ID NO: 1238189 - RNA, 19 nt, Artificial Sequence
  Description of Artificial Sequence: Synthetic oligonucleotide
cagguacgucaugacgaug

SEQ ID NO: 1238190 - RNA, 19 nt, Artificial Sequence
  Description of Artificial Sequence: Synthetic oligonucleotide
agguaccgguccggccucc

SEQ ID NO: 1238191 - RNA, 19 nt, Artificial Sequence
  Description of Artificial Sequence: Synthetic oligonucleotide
agcaaccgagacacgccca

SEQ ID NO: 1238192 - RNA, 19 nt, Artificial Sequence
  Description of Artificial Sequence: Synthetic oligonucleotide
gccugagucaaggcuggag

SEQ ID NO: 1238193 - RNA, 19 nt, Artificial Sequence
  Description of Artificial Sequence: Synthetic oligonucleotide
gcucugcgcacacguacug

SEQ ID NO: 1238194 - RNA, 19 nt, Artificial Sequence
  Description of Artificial Sequence: Synthetic oligonucleotide
aggggacguggacgaccgg

SEQ ID NO: 1238195 - RNA, 19 nt, Artificial Sequence
  Description of Artificial Sequence: Synthetic oligonucleotide
gcgugggccugagucaagg

SEQ ID NO: 1238196 - RNA, 19 nt, Artificial Sequence
  Description of Artificial Sequence: Synthetic oligonucleotide
cuugucagguacggacaga

SEQ ID NO: 1238197 - RNA, 19 nt, Artificial Sequence
  Description of Artificial Sequence: Synthetic oligonucleotide
gggacguggacgaccgggc

SEQ ID NO: 1238198 - RNA, 19 nt, Artificial Sequence
  Description of Artificial Sequence: Synthetic oligonucleotide
ggucguccacagaaaagga

SEQ ID NO: 1238199 - RNA, 19 nt, Artificial Sequence
  Description of Artificial Sequence: Synthetic oligonucleotide
agucaggguuuggcccuuc

SEQ ID NO: 1238200 - RNA, 19 nt, Artificial Sequence
  Description of Artificial Sequence: Synthetic oligonucleotide
ccccacugaccgaggaccg

SEQ ID NO: 1238201 - RNA, 19 nt, Artificial Sequence
  Description of Artificial Sequence: Synthetic oligonucleotide
aguccgggucguccacaga

SEQ ID NO: 1238202 - RNA, 19 nt, Artificial Sequence
  Description of Artificial Sequence: Synthetic oligonucleotide
ggcucggggacuggcgagg

SEQ ID NO: 1238203 - RNA, 19 nt, Artificial Sequence
  Description of Artificial Sequence: Synthetic oligonucleotide
gugaccucuuggcaccacu

SEQ ID NO: 1238204 - RNA, 19 nt, Artificial Sequence
  Description of Artificial Sequence: Synthetic oligonucleotide
ccgcccaucuaucugccuc

SEQ ID NO: 1238205 - RNA, 19 nt, Artificial Sequence
  Description of Artificial Sequence: Synthetic oligonucleotide
cucggggacuggcgaggag

SEQ ID NO: 1238206 - RNA, 19 nt, Artificial Sequence
  Description of Artificial Sequence: Synthetic oligonucleotide
cgaggagggauccgugacc

SEQ ID NO: 1238207 - RNA, 19 nt, Artificial Sequence
  Description of Artificial Sequence: Synthetic oligonucleotide
gccacuccucaauagccaa

SEQ ID NO: 1238208 - RNA, 19 nt, Artificial Sequence
  Description of Artificial Sequence: Synthetic oligonucleotide
cuccguuuaccagccccuc

SEQ ID NO: 1238209 - RNA, 19 nt, Artificial Sequence
  Description of Artificial Sequence: Synthetic oligonucleotide
gugcgcgggguggagguac

SEQ ID NO: 1238210 - RNA, 19 nt, Artificial Sequence
  Description of Artificial Sequence: Synthetic oligonucleotide
gcgcacacguacugacuug

SEQ ID NO: 1238211 - RNA, 19 nt, Artificial Sequence
  Description of Artificial Sequence: Synthetic oligonucleotide
ccgucucagucucacacca

SEQ ID NO: 1238212 - RNA, 19 nt, Artificial Sequence
  Description of Artificial Sequence: Synthetic oligonucleotide
uccaggccgucgggcaagc

SEQ ID NO: 1238213 - RNA, 19 nt, Artificial Sequence
  Description of Artificial Sequence: Synthetic oligonucleotide
ccgagacacgcccagggca

SEQ ID NO: 1238214 - RNA, 19 nt, Artificial Sequence
  Description of Artificial Sequence: Synthetic oligonucleotide
ggccuccccacugaccgag

SEQ ID NO: 1238215 - RNA, 19 nt, Artificial Sequence
  Description of Artificial Sequence: Synthetic oligonucleotide
cugcccgguacagaaagcu

SEQ ID NO: 1238216 - RNA, 19 nt, Artificial Sequence
  Description of Artificial Sequence: Synthetic oligonucleotide
ccugcccgguacagaaagc

SEQ ID NO: 1238217 - RNA, 19 nt, Artificial Sequence
  Description of Artificial Sequence: Synthetic oligonucleotide
caggccgucgggcaagcua

SEQ ID NO: 1238218 - RNA, 19 nt, Artificial Sequence
  Description of Artificial Sequence: Synthetic oligonucleotide
caacagggacuggcuggag

SEQ ID NO: 1238219 - RNA, 19 nt, Artificial Sequence
  Description of Artificial Sequence: Synthetic oligonucleotide
gggugaaccacuccucaau

SEQ ID NO: 1238220 - RNA, 19 nt, Artificial Sequence
  Description of Artificial Sequence: Synthetic oligonucleotide
cgggucguccacagaaaag

SEQ ID NO: 1238221 - RNA, 19 nt, Artificial Sequence
  Description of Artificial Sequence: Synthetic oligonucleotide
ucaugacgaugagcuuguc

SEQ ID NO: 1238222 - RNA, 19 nt, Artificial Sequence
  Description of Artificial Sequence: Synthetic oligonucleotide
ggucgccugcauccaggcc

SEQ ID NO: 1238223 - RNA, 19 nt, Artificial Sequence
  Description of Artificial Sequence: Synthetic oligonucleotide
ggcgagaaccaggcaggag

SEQ ID NO: 1238224 - RNA, 19 nt, Artificial Sequence
  Description of Artificial Sequence: Synthetic oligonucleotide
cucugcgcacacguacuga

SEQ ID NO: 1238225 - RNA, 19 nt, Artificial Sequence
  Description of Artificial Sequence: Synthetic oligonucleotide
cacuuugggcaccgcucca

SEQ ID NO: 1238226 - RNA, 19 nt, Artificial Sequence
  Description of Artificial Sequence: Synthetic oligonucleotide
gguccugccuccggaugag

SEQ ID NO: 1238227 - RNA, 19 nt, Artificial Sequence
  Description of Artificial Sequence: Synthetic oligonucleotide
gcagcguucucgccugcuc

SEQ ID NO: 1238228 - RNA, 19 nt, Artificial Sequence
  Description of Artificial Sequence: Synthetic oligonucleotide
gacacgcccagggcagcga

SEQ ID NO: 1238229 - RNA, 19 nt, Artificial Sequence
  Description of Artificial Sequence: Synthetic oligonucleotide
gugcgugggccugagucaa

SEQ ID NO: 1238230 - RNA, 19 nt, Artificial Sequence
  Description of Artificial Sequence: Synthetic oligonucleotide
gcguugcccacgcgguaag

SEQ ID NO: 1238231 - RNA, 19 nt, Artificial Sequence
  Description of Artificial Sequence: Synthetic oligonucleotide
cacgcacgugggagaaaga

SEQ ID NO: 1238232 - RNA, 19 nt, Artificial Sequence
  Description of Artificial Sequence: Synthetic oligonucleotide
cugccggcucaccuugcga

SEQ ID NO: 1238233 - RNA, 19 nt, Artificial Sequence
  Description of Artificial Sequence: Synthetic oligonucleotide
ggcgcuucagccccaugcu

SEQ ID NO: 1238234 - RNA, 19 nt, Artificial Sequence
  Description of Artificial Sequence: Synthetic oligonucleotide
ccuuuugguccaggucccg

SEQ ID NO: 1238235 - RNA, 19 nt, Artificial Sequence
  Description of Artificial Sequence: Synthetic oligonucleotide
ccagagaaaggggcgagaa

SEQ ID NO: 1238236 - RNA, 19 nt, Artificial Sequence
  Description of Artificial Sequence: Synthetic oligonucleotide
uggggccgucggagggagc

SEQ ID NO: 1238237 - RNA, 19 nt, Artificial Sequence
  Description of Artificial Sequence: Synthetic oligonucleotide
cucaccuugcgacgucgcu

SEQ ID NO: 1238238 - RNA, 19 nt, Artificial Sequence
  Description of Artificial Sequence: Synthetic oligonucleotide
cgaggaccgucucagucuc

SEQ ID NO: 1238239 - RNA, 19 nt, Artificial Sequence
  Description of Artificial Sequence: Synthetic oligonucleotide
accuugcgacgucgcugcu

SEQ ID NO: 1238240 - RNA, 19 nt, Artificial Sequence
  Description of Artificial Sequence: Synthetic oligonucleotide
ggcaagcuaggcugggcgu

SEQ ID NO: 1238241 - RNA, 19 nt, Artificial Sequence
  Description of Artificial Sequence: Synthetic oligonucleotide
ccacgcgguaagugccagg

SEQ ID NO: 1238242 - RNA, 19 nt, Artificial Sequence
  Description of Artificial Sequence: Synthetic oligonucleotide
ggacuggcgaggagggauc

SEQ ID NO: 1238243 - RNA, 19 nt, Artificial Sequence
  Description of Artificial Sequence: Synthetic oligonucleotide
cccgcgguucacagccucc

SEQ ID NO: 1238244 - RNA, 19 nt, Artificial Sequence
  Description of Artificial Sequence: Synthetic oligonucleotide
gccaagauguggugaaauu

SEQ ID NO: 1238245 - RNA, 19 nt, Artificial Sequence
  Description of Artificial Sequence: Synthetic oligonucleotide
ccaggucgccugcauccag

SEQ ID NO: 1238246 - RNA, 19 nt, Artificial Sequence
  Description of Artificial Sequence: Synthetic oligonucleotide
gcugcgcgacgguuuucug

SEQ ID NO: 1238247 - RNA, 19 nt, Artificial Sequence
  Description of Artificial Sequence: Synthetic oligonucleotide
gcacacguacugacuugug

SEQ ID NO: 1238248 - RNA, 19 nt, Artificial Sequence
  Description of Artificial Sequence: Synthetic oligonucleotide
cacugaccgaggaccgucu

SEQ ID NO: 1238249 - RNA, 19 nt, Artificial Sequence
  Description of Artificial Sequence: Synthetic oligonucleotide
cugauucaccagugacacu

SEQ ID NO: 1238250 - RNA, 19 nt, Artificial Sequence
  Description of Artificial Sequence: Synthetic oligonucleotide
ccaagauguggugaaauuu

SEQ ID NO: 1238251 - RNA, 19 nt, Artificial Sequence
  Description of Artificial Sequence: Synthetic oligonucleotide
cacaggggacguggacgac

SEQ ID NO: 1238252 - RNA, 19 nt, Artificial Sequence
  Description of Artificial Sequence: Synthetic oligonucleotide
gcgcuucagccccaugcuc

SEQ ID NO: 1238253 - RNA, 19 nt, Artificial Sequence
  Description of Artificial Sequence: Synthetic oligonucleotide
cggaugagagcauucuucu

SEQ ID NO: 1238254 - RNA, 19 nt, Artificial Sequence
  Description of Artificial Sequence: Synthetic oligonucleotide
ugugcgcgggguggaggua

SEQ ID NO: 1238255 - RNA, 19 nt, Artificial Sequence
  Description of Artificial Sequence: Synthetic oligonucleotide
gcgucacgcacgugggaga

SEQ ID NO: 1238256 - RNA, 19 nt, Artificial Sequence
  Description of Artificial Sequence: Synthetic oligonucleotide
cgugggccugagucaaggc

SEQ ID NO: 1238257 - RNA, 19 nt, Artificial Sequence
  Description of Artificial Sequence: Synthetic oligonucleotide
gcgauucgcuccuuuuggu

SEQ ID NO: 1238258 - RNA, 19 nt, Artificial Sequence
  Description of Artificial Sequence: Synthetic oligonucleotide
ccguugcgccaagaugugg

SEQ ID NO: 1238259 - RNA, 19 nt, Artificial Sequence
  Description of Artificial Sequence: Synthetic oligonucleotide
gggcagcgaagccaucaaa

SEQ ID NO: 1238260 - RNA, 19 nt, Artificial Sequence
  Description of Artificial Sequence: Synthetic oligonucleotide
gcccgagucccuagaggcc

SEQ ID NO: 1238261 - RNA, 19 nt, Artificial Sequence
  Description of Artificial Sequence: Synthetic oligonucleotide
gcucaccuugcgacgucgc

SEQ ID NO: 1238262 - RNA, 19 nt, Artificial Sequence
  Description of Artificial Sequence: Synthetic oligonucleotide
gaggaccgucucagucuca

SEQ ID NO: 1238263 - RNA, 19 nt, Artificial Sequence
  Description of Artificial Sequence: Synthetic oligonucleotide
ggaccgucucagucucaca

SEQ ID NO: 1238264 - RNA, 19 nt, Artificial Sequence
  Description of Artificial Sequence: Synthetic oligonucleotide
gccguugcgccaagaugug

SEQ ID NO: 1238265 - RNA, 19 nt, Artificial Sequence
  Description of Artificial Sequence: Synthetic oligonucleotide
ggcguugcccacgcgguaa

SEQ ID NO: 1238266 - RNA, 19 nt, Artificial Sequence
  Description of Artificial Sequence: Synthetic oligonucleotide
cgucggagggagccucugg

SEQ ID NO: 1238267 - RNA, 19 nt, Artificial Sequence
  Description of Artificial Sequence: Synthetic oligonucleotide
ccacucacaccaccuggca

SEQ ID NO: 1238268 - RNA, 19 nt, Artificial Sequence
  Description of Artificial Sequence: Synthetic oligonucleotide
ccgaggaccgucucagucu

SEQ ID NO: 1238269 - RNA, 19 nt, Artificial Sequence
  Description of Artificial Sequence: Synthetic oligonucleotide
caggccguugcgccaagau

SEQ ID NO: 1238270 - RNA, 19 nt, Artificial Sequence
  Description of Artificial Sequence: Synthetic oligonucleotide
cguugcgccaagauguggu

SEQ ID NO: 1238271 - RNA, 19 nt, Artificial Sequence
  Description of Artificial Sequence: Synthetic oligonucleotide
cgcgacgguuuucugccac

SEQ ID NO: 1238272 - RNA, 19 nt, Artificial Sequence
  Description of Artificial Sequence: Synthetic oligonucleotide
ccacagaaaaggaguugcu

SEQ ID NO: 1238273 - RNA, 19 nt, Artificial Sequence
  Description of Artificial Sequence: Synthetic oligonucleotide
gccgucgggcaagcuaggc

SEQ ID NO: 1238274 - RNA, 19 nt, Artificial Sequence
  Description of Artificial Sequence: Synthetic oligonucleotide
gcguucucgccugcucagc

SEQ ID NO: 1238275 - RNA, 19 nt, Artificial Sequence
  Description of Artificial Sequence: Synthetic oligonucleotide
gcagcccgcccaucuaucu

SEQ ID NO: 1238276 - RNA, 19 nt, Artificial Sequence
  Description of Artificial Sequence: Synthetic oligonucleotide
ccuugcgacgucgcugcuc

SEQ ID NO: 1238277 - RNA, 19 nt, Artificial Sequence
  Description of Artificial Sequence: Synthetic oligonucleotide
ccgggucguccacagaaaa

SEQ ID NO: 1238278 - RNA, 19 nt, Artificial Sequence
  Description of Artificial Sequence: Synthetic oligonucleotide
ggccgucgggcaagcuagg

SEQ ID NO: 1238279 - RNA, 19 nt, Artificial Sequence
  Description of Artificial Sequence: Synthetic oligonucleotide
gcccaucuaucugccucug

SEQ ID NO: 1238280 - RNA, 19 nt, Artificial Sequence
  Description of Artificial Sequence: Synthetic oligonucleotide
gcguagccucugugccagg

SEQ ID NO: 1238281 - RNA, 19 nt, Artificial Sequence
  Description of Artificial Sequence: Synthetic oligonucleotide
ccggaccagcucaucccuc

SEQ ID NO: 1238282 - RNA, 19 nt, Artificial Sequence
  Description of Artificial Sequence: Synthetic oligonucleotide
cagccuguuggcaccuguu

SEQ ID NO: 1238283 - RNA, 19 nt, Artificial Sequence
  Description of Artificial Sequence: Synthetic oligonucleotide
cccacgcgguaagugccag

SEQ ID NO: 1238284 - RNA, 19 nt, Artificial Sequence
  Description of Artificial Sequence: Synthetic oligonucleotide
gagucccuagaggccacuu

SEQ ID NO: 1238285 - RNA, 19 nt, Artificial Sequence
  Description of Artificial Sequence: Synthetic oligonucleotide
ccgcuggcuccagcaaccg

SEQ ID NO: 1238286 - RNA, 19 nt, Artificial Sequence
  Description of Artificial Sequence: Synthetic oligonucleotide
gucacgcacgugggagaaa

SEQ ID NO: 1238287 - RNA, 19 nt, Artificial Sequence
  Description of Artificial Sequence: Synthetic oligonucleotide
ccuccccacugaccgagga

SEQ ID NO: 1238288 - RNA, 19 nt, Artificial Sequence
  Description of Artificial Sequence: Synthetic oligonucleotide
gcuauuccguagccuggau

SEQ ID NO: 1238289 - RNA, 19 nt, Artificial Sequence
  Description of Artificial Sequence: Synthetic oligonucleotide
cgacgguuuucugccacuc

SEQ ID NO: 1238290 - RNA, 19 nt, Artificial Sequence
  Description of Artificial Sequence: Synthetic oligonucleotide
gcgacgguuuucugccacu

SEQ ID NO: 1238291 - RNA, 19 nt, Artificial Sequence
  Description of Artificial Sequence: Synthetic oligonucleotide
ggccgucggagggagccuc

SEQ ID NO: 1238292 - RNA, 19 nt, Artificial Sequence
  Description of Artificial Sequence: Synthetic oligonucleotide
cugcugcgcgacgguuuuc

SEQ ID NO: 1238293 - RNA, 19 nt, Artificial Sequence
  Description of Artificial Sequence: Synthetic oligonucleotide
ccacuccguuuaccagccc

SEQ ID NO: 1238294 - RNA, 19 nt, Artificial Sequence
  Description of Artificial Sequence: Synthetic oligonucleotide
cgcgggguggagguaccgg

SEQ ID NO: 1238295 - RNA, 19 nt, Artificial Sequence
  Description of Artificial Sequence: Synthetic oligonucleotide
gcgcgggguggagguaccg

SEQ ID NO: 1238296 - RNA, 19 nt, Artificial Sequence
  Description of Artificial Sequence: Synthetic oligonucleotide
ccccgcgguucacagccuc

SEQ ID NO: 1238297 - RNA, 19 nt, Artificial Sequence
  Description of Artificial Sequence: Synthetic oligonucleotide
gccaggucgccugcaucca

SEQ ID NO: 1238298 - RNA, 19 nt, Artificial Sequence
  Description of Artificial Sequence: Synthetic oligonucleotide
gcugcugcgcgacgguuuu

SEQ ID NO: 1238299 - RNA, 19 nt, Artificial Sequence
  Description of Artificial Sequence: Synthetic oligonucleotide
ccgggcucuggggccgucg

SEQ ID NO: 1238300 - RNA, 19 nt, Artificial Sequence
  Description of Artificial Sequence: Synthetic oligonucleotide
gcaagcuaggcugggcguu

SEQ ID NO: 1238301 - RNA, 19 nt, Artificial Sequence
  Description of Artificial Sequence: Synthetic oligonucleotide
gcucggggacuggcgagga

SEQ ID NO: 1238302 - RNA, 19 nt, Artificial Sequence
  Description of Artificial Sequence: Synthetic oligonucleotide
ccguagccuggaucuccuc

SEQ ID NO: 1238303 - RNA, 19 nt, Artificial Sequence
  Description of Artificial Sequence: Synthetic oligonucleotide
cgaccgggcucuggggccg

SEQ ID NO: 1238304 - RNA, 19 nt, Artificial Sequence
  Description of Artificial Sequence: Synthetic oligonucleotide
cgguacagaaagcucggau

SEQ ID NO: 1238305 - RNA, 19 nt, Artificial Sequence
  Description of Artificial Sequence: Synthetic oligonucleotide
gcccacgcgguaagugcca

SEQ ID NO: 1238306 - RNA, 19 nt, Artificial Sequence
  Description of Artificial Sequence: Synthetic oligonucleotide
gagucaggguuuggcccuu

SEQ ID NO: 1238307 - RNA, 19 nt, Artificial Sequence
  Description of Artificial Sequence: Synthetic oligonucleotide
gcgcgacgguuuucugcca

SEQ ID NO: 1238308 - RNA, 19 nt, Artificial Sequence
  Description of Artificial Sequence: Synthetic oligonucleotide
gugggucgagggagagaua

SEQ ID NO: 1238309 - RNA, 19 nt, Artificial Sequence
  Description of Artificial Sequence: Synthetic oligonucleotide
ccaugcucgcguagccucu

SEQ ID NO: 1238310 - RNA, 19 nt, Artificial Sequence
  Description of Artificial Sequence: Synthetic oligonucleotide
ccauguccgcuggcuccag

SEQ ID NO: 1238311 - RNA, 19 nt, Artificial Sequence
  Description of Artificial Sequence: Synthetic oligonucleotide
cguucucgccugcucagcu

SEQ ID NO: 1238312 - RNA, 19 nt, Artificial Sequence
  Description of Artificial Sequence: Synthetic oligonucleotide
gcucagcaugcagcguucu

SEQ ID NO: 1238313 - RNA, 19 nt, Artificial Sequence
  Description of Artificial Sequence: Synthetic oligonucleotide
gcgccaagauguggugaaa

SEQ ID NO: 1238314 - RNA, 19 nt, Artificial Sequence
  Description of Artificial Sequence: Synthetic oligonucleotide
ccgucggagggagccucug

SEQ ID NO: 1238315 - RNA, 19 nt, Artificial Sequence
  Description of Artificial Sequence: Synthetic oligonucleotide
cgcccaucuaucugccucu

SEQ ID NO: 1238316 - RNA, 19 nt, Artificial Sequence
  Description of Artificial Sequence: Synthetic oligonucleotide
cgcacacguacugacuugu

SEQ ID NO: 1238317 - RNA, 19 nt, Artificial Sequence
  Description of Artificial Sequence: Synthetic oligonucleotide
cgucacgcacgugggagaa

SEQ ID NO: 1238318 - RNA, 19 nt, Artificial Sequence
  Description of Artificial Sequence: Synthetic oligonucleotide
cuagagcgauucgcuccuu

SEQ ID NO: 1238319 - RNA, 19 nt, Artificial Sequence
  Description of Artificial Sequence: Synthetic oligonucleotide
cggcucaccuugcgacguc

SEQ ID NO: 1238320 - RNA, 19 nt, Artificial Sequence
  Description of Artificial Sequence: Synthetic oligonucleotide
ccggcucaccuugcgacgu

SEQ ID NO: 1238321 - RNA, 19 nt, Artificial Sequence
  Description of Artificial Sequence: Synthetic oligonucleotide
ccgcgguucacagccuccu

SEQ ID NO: 1238322 - RNA, 19 nt, Artificial Sequence
  Description of Artificial Sequence: Synthetic oligonucleotide
ccaggccguugcgccaaga

SEQ ID NO: 1238323 - RNA, 19 nt, Artificial Sequence
  Description of Artificial Sequence: Synthetic oligonucleotide
ccucugugccaggucgccu

SEQ ID NO: 1238324 - RNA, 19 nt, Artificial Sequence
  Description of Artificial Sequence: Synthetic oligonucleotide
ccccaugcucgcguagccu

SEQ ID NO: 1238325 - RNA, 19 nt, Artificial Sequence
  Description of Artificial Sequence: Synthetic oligonucleotide
cccacugaccgaggaccgu

SEQ ID NO: 1238326 - RNA, 19 nt, Artificial Sequence
  Description of Artificial Sequence: Synthetic oligonucleotide
cccgcccaucuaucugccu

SEQ ID NO: 1238327 - RNA, 19 nt, Artificial Sequence
  Description of Artificial Sequence: Synthetic oligonucleotide
cguugcccacgcgguaagu

SEQ ID NO: 1238328 - RNA, 19 nt, Artificial Sequence
  Description of Artificial Sequence: Synthetic oligonucleotide
cgagucccuagaggccacu

SEQ ID NO: 1238329 - RNA, 19 nt, Artificial Sequence
  Description of Artificial Sequence: Synthetic oligonucleotide
gccccgcgguucacagccu

SEQ ID NO: 1238330 - RNA, 19 nt, Artificial Sequence
  Description of Artificial Sequence: Synthetic oligonucleotide
ccaggccgucgggcaagcu

SEQ ID NO: 1238331 - RNA, 19 nt, Artificial Sequence
  Description of Artificial Sequence: Synthetic oligonucleotide
uuuaaaggcuuuauuaggg

SEQ ID NO: 1238332 - RNA, 19 nt, Artificial Sequence
  Description of Artificial Sequence: Synthetic oligonucleotide
uuauuagggaaacauacag

SEQ ID NO: 1238333 - RNA, 19 nt, Artificial Sequence
  Description of Artificial Sequence: Synthetic oligonucleotide
aaugacacgacggauaccg

SEQ ID NO: 1238334 - RNA, 19 nt, Artificial Sequence
  Description of Artificial Sequence: Synthetic oligonucleotide
auaccguugacaaaguugc

SEQ ID NO: 1238335 - RNA, 19 nt, Artificial Sequence
  Description of Artificial Sequence: Synthetic oligonucleotide
agugaaacugcaccaagcg

SEQ ID NO: 1238336 - RNA, 19 nt, Artificial Sequence
  Description of Artificial Sequence: Synthetic oligonucleotide
ugagaguuucggaacaggg

SEQ ID NO: 1238337 - RNA, 19 nt, Artificial Sequence
  Description of Artificial Sequence: Synthetic oligonucleotide
uuaaaugcugcucaccagu

SEQ ID NO: 1238338 - RNA, 19 nt, Artificial Sequence
  Description of Artificial Sequence: Synthetic oligonucleotide
uuccugggaaauuaaaugc

SEQ ID NO: 1238339 - RNA, 19 nt, Artificial Sequence
  Description of Artificial Sequence: Synthetic oligonucleotide
gguaaaguggaauugggcc

SEQ ID NO: 1238340 - RNA, 19 nt, Artificial Sequence
  Description of Artificial Sequence: Synthetic oligonucleotide
uugguaaaguggaauuggg

SEQ ID NO: 1238341 - RNA, 19 nt, Artificial Sequence
  Description of Artificial Sequence: Synthetic oligonucleotide
acauacaggggcaaggacc

SEQ ID NO: 1238342 - RNA, 19 nt, Artificial Sequence
  Description of Artificial Sequence: Synthetic oligonucleotide
guaguaguuucccuaaugc

SEQ ID NO: 1238343 - RNA, 19 nt, Artificial Sequence
  Description of Artificial Sequence: Synthetic oligonucleotide
gguuuaaaggcuuuauuag

SEQ ID NO: 1238344 - RNA, 19 nt, Artificial Sequence
  Description of Artificial Sequence: Synthetic oligonucleotide
uguaguaguuucccuaaug

SEQ ID NO: 1238345 - RNA, 19 nt, Artificial Sequence
  Description of Artificial Sequence: Synthetic oligonucleotide
uuagugaagugaaacugca

SEQ ID NO: 1238346 - RNA, 19 nt, Artificial Sequence
  Description of Artificial Sequence: Synthetic oligonucleotide
gauaccguugacaaaguug

SEQ ID NO: 1238347 - RNA, 19 nt, Artificial Sequence
  Description of Artificial Sequence: Synthetic oligonucleotide
ugccguauggcauugacaa

SEQ ID NO: 1238348 - RNA, 19 nt, Artificial Sequence
  Description of Artificial Sequence: Synthetic oligonucleotide
gaauuuguuguugacaauc

SEQ ID NO: 1238349 - RNA, 19 nt, Artificial Sequence
  Description of Artificial Sequence: Synthetic oligonucleotide
ugguaaaguggaauugggc

SEQ ID NO: 1238350 - RNA, 19 nt, Artificial Sequence
  Description of Artificial Sequence: Synthetic oligonucleotide
aacgugagcgcacggcgcg

SEQ ID NO: 1238351 - RNA, 19 nt, Artificial Sequence
  Description of Artificial Sequence: Synthetic oligonucleotide
auuaaaugcugcucaccag

SEQ ID NO: 1238352 - RNA, 19 nt, Artificial Sequence
  Description of Artificial Sequence: Synthetic oligonucleotide
gaauugggccagcugagag

SEQ ID NO: 1238353 - RNA, 19 nt, Artificial Sequence
  Description of Artificial Sequence: Synthetic oligonucleotide
gacucgagcaccuuccaug

SEQ ID NO: 1238354 - RNA, 19 nt, Artificial Sequence
  Description of Artificial Sequence: Synthetic oligonucleotide
guuggcaaugacacgacgg

SEQ ID NO: 1238355 - RNA, 19 nt, Artificial Sequence
  Description of Artificial Sequence: Synthetic oligonucleotide
gacgcuguccuccaaguug

SEQ ID NO: 1238356 - RNA, 19 nt, Artificial Sequence
  Description of Artificial Sequence: Synthetic oligonucleotide
cuacucgugagacugcacc

SEQ ID NO: 1238357 - RNA, 19 nt, Artificial Sequence
  Description of Artificial Sequence: Synthetic oligonucleotide
uucuccgaggaguagagaa

SEQ ID NO: 1238358 - RNA, 19 nt, Artificial Sequence
  Description of Artificial Sequence: Synthetic oligonucleotide
uucacguagacgugggaug

SEQ ID NO: 1238359 - RNA, 19 nt, Artificial Sequence
  Description of Artificial Sequence: Synthetic oligonucleotide
gagaguuucggaacagggg

SEQ ID NO: 1238360 - RNA, 19 nt, Artificial Sequence
  Description of Artificial Sequence: Synthetic oligonucleotide
gaagggucuacgcuucucc

SEQ ID NO: 1238361 - RNA, 19 nt, Artificial Sequence
  Description of Artificial Sequence: Synthetic oligonucleotide
acucgagcaccuuccaugg

SEQ ID NO: 1238362 - RNA, 19 nt, Artificial Sequence
  Description of Artificial Sequence: Synthetic oligonucleotide
agggauacaagucccagaa

SEQ ID NO: 1238363 - RNA, 19 nt, Artificial Sequence
  Description of Artificial Sequence: Synthetic oligonucleotide
cuuggagaccucaggacgc

SEQ ID NO: 1238364 - RNA, 19 nt, Artificial Sequence
  Description of Artificial Sequence: Synthetic oligonucleotide
agagucuccauguccuuag

SEQ ID NO: 1238365 - RNA, 19 nt, Artificial Sequence
  Description of Artificial Sequence: Synthetic oligonucleotide
ugggauggcagccaucgcu

SEQ ID NO: 1238366 - RNA, 19 nt, Artificial Sequence
  Description of Artificial Sequence: Synthetic oligonucleotide
gagcauacagccugcgaag

SEQ ID NO: 1238367 - RNA, 19 nt, Artificial Sequence
  Description of Artificial Sequence: Synthetic oligonucleotide
ucgagcaccuuccauggga

SEQ ID NO: 1238368 - RNA, 19 nt, Artificial Sequence
  Description of Artificial Sequence: Synthetic oligonucleotide
ucacguagacgugggaugg

SEQ ID NO: 1238369 - RNA, 19 nt, Artificial Sequence
  Description of Artificial Sequence: Synthetic oligonucleotide
gcaaggaccauccuuggag

SEQ ID NO: 1238370 - RNA, 19 nt, Artificial Sequence
  Description of Artificial Sequence: Synthetic oligonucleotide
cuuggaccggcuauugggc

SEQ ID NO: 1238371 - RNA, 19 nt, Artificial Sequence
  Description of Artificial Sequence: Synthetic oligonucleotide
aaacagcggcaccagggug

SEQ ID NO: 1238372 - RNA, 19 nt, Artificial Sequence
  Description of Artificial Sequence: Synthetic oligonucleotide
accguugacaaaguugcuc

SEQ ID NO: 1238373 - RNA, 19 nt, Artificial Sequence
  Description of Artificial Sequence: Synthetic oligonucleotide
uacucgugagacugcaccc

SEQ ID NO: 1238374 - RNA, 19 nt, Artificial Sequence
  Description of Artificial Sequence: Synthetic oligonucleotide
ugggaguccacuagccacc

SEQ ID NO: 1238375 - RNA, 19 nt, Artificial Sequence
  Description of Artificial Sequence: Synthetic oligonucleotide
uugcggguggugaugaccu

SEQ ID NO: 1238376 - RNA, 19 nt, Artificial Sequence
  Description of Artificial Sequence: Synthetic oligonucleotide
cccaauaggcccuagggcc

SEQ ID NO: 1238377 - RNA, 19 nt, Artificial Sequence
  Description of Artificial Sequence: Synthetic oligonucleotide
agcauacagccugcgaagc

SEQ ID NO: 1238378 - RNA, 19 nt, Artificial Sequence
  Description of Artificial Sequence: Synthetic oligonucleotide
agcaccuuccaugggaggg

SEQ ID NO: 1238379 - RNA, 19 nt, Artificial Sequence
  Description of Artificial Sequence: Synthetic oligonucleotide
aagagcauacagccugcga

SEQ ID NO: 1238380 - RNA, 19 nt, Artificial Sequence
  Description of Artificial Sequence: Synthetic oligonucleotide
gcuuggaccggcuauuggg

SEQ ID NO: 1238381 - RNA, 19 nt, Artificial Sequence
  Description of Artificial Sequence: Synthetic oligonucleotide
cugggaguccacuagccac

SEQ ID NO: 1238382 - RNA, 19 nt, Artificial Sequence
  Description of Artificial Sequence: Synthetic oligonucleotide
cauacaggggcaaggacca

SEQ ID NO: 1238383 - RNA, 19 nt, Artificial Sequence
  Description of Artificial Sequence: Synthetic oligonucleotide
caacagagagcccagguga

SEQ ID NO: 1238384 - RNA, 19 nt, Artificial Sequence
  Description of Artificial Sequence: Synthetic oligonucleotide
gacacgacggauaccguug

SEQ ID NO: 1238385 - RNA, 19 nt, Artificial Sequence
  Description of Artificial Sequence: Synthetic oligonucleotide
ggaacgugagcgcacggcg

SEQ ID NO: 1238386 - RNA, 19 nt, Artificial Sequence
  Description of Artificial Sequence: Synthetic oligonucleotide
ugagccggugcucauucac

SEQ ID NO: 1238387 - RNA, 19 nt, Artificial Sequence
  Description of Artificial Sequence: Synthetic oligonucleotide
gagggguggcuucuacucg

SEQ ID NO: 1238388 - RNA, 19 nt, Artificial Sequence
  Description of Artificial Sequence: Synthetic oligonucleotide
aagggucuacgcuucuccu

SEQ ID NO: 1238389 - RNA, 19 nt, Artificial Sequence
  Description of Artificial Sequence: Synthetic oligonucleotide
guagacgugggauggcagc

SEQ ID NO: 1238390 - RNA, 19 nt, Artificial Sequence
  Description of Artificial Sequence: Synthetic oligonucleotide
ucuacgcuucuccugccac

SEQ ID NO: 1238391 - RNA, 19 nt, Artificial Sequence
  Description of Artificial Sequence: Synthetic oligonucleotide
uuugcggguggugaugacc

SEQ ID NO: 1238392 - RNA, 19 nt, Artificial Sequence
  Description of Artificial Sequence: Synthetic oligonucleotide
uggcugucgaguccgagaa

SEQ ID NO: 1238393 - RNA, 19 nt, Artificial Sequence
  Description of Artificial Sequence: Synthetic oligonucleotide
ucguguaguaguuucccua

SEQ ID NO: 1238394 - RNA, 19 nt, Artificial Sequence
  Description of Artificial Sequence: Synthetic oligonucleotide
aguggaauugggccagcug

SEQ ID NO: 1238395 - RNA, 19 nt, Artificial Sequence
  Description of Artificial Sequence: Synthetic oligonucleotide
aguuucccuaaugccaggg

SEQ ID NO: 1238396 - RNA, 19 nt, Artificial Sequence
  Description of Artificial Sequence: Synthetic oligonucleotide
aaaguggaauugggccagc

SEQ ID NO: 1238397 - RNA, 19 nt, Artificial Sequence
  Description of Artificial Sequence: Synthetic oligonucleotide
ucgucugggacuguggccu

SEQ ID NO: 1238398 - RNA, 19 nt, Artificial Sequence
  Description of Artificial Sequence: Synthetic oligonucleotide
ucgaguccgagaagggucu

SEQ ID NO: 1238399 - RNA, 19 nt, Artificial Sequence
  Description of Artificial Sequence: Synthetic oligonucleotide
caagcgggaguuccgaaac

SEQ ID NO: 1238400 - RNA, 19 nt, Artificial Sequence
  Description of Artificial Sequence: Synthetic oligonucleotide
cuccuaagggcccuggcac

SEQ ID NO: 1238401 - RNA, 19 nt, Artificial Sequence
  Description of Artificial Sequence: Synthetic oligonucleotide
cugcucagaagcaucugac

SEQ ID NO: 1238402 - RNA, 19 nt, Artificial Sequence
  Description of Artificial Sequence: Synthetic oligonucleotide
ggguuuaaaggcuuuauua

SEQ ID NO: 1238403 - RNA, 19 nt, Artificial Sequence
  Description of Artificial Sequence: Synthetic oligonucleotide
gcugucgaguccgagaagg

SEQ ID NO: 1238404 - RNA, 19 nt, Artificial Sequence
  Description of Artificial Sequence: Synthetic oligonucleotide
acuagccacccaucccucg

SEQ ID NO: 1238405 - RNA, 19 nt, Artificial Sequence
  Description of Artificial Sequence: Synthetic oligonucleotide
aguccgagaagggucuacg

SEQ ID NO: 1238406 - RNA, 19 nt, Artificial Sequence
  Description of Artificial Sequence: Synthetic oligonucleotide
ccuuggagaccucaggacg

SEQ ID NO: 1238407 - RNA, 19 nt, Artificial Sequence
  Description of Artificial Sequence: Synthetic oligonucleotide
ugcggcacaggcucuugag

SEQ ID NO: 1238408 - RNA, 19 nt, Artificial Sequence
  Description of Artificial Sequence: Synthetic oligonucleotide
cucgcccugguucacguag

SEQ ID NO: 1238409 - RNA, 19 nt, Artificial Sequence
  Description of Artificial Sequence: Synthetic oligonucleotide
cuugguucacguagacgug

SEQ ID NO: 1238410 - RNA, 19 nt, Artificial Sequence
  Description of Artificial Sequence: Synthetic oligonucleotide
ugccucguguaguaguuuc

SEQ ID NO: 1238411 - RNA, 19 nt, Artificial Sequence
  Description of Artificial Sequence: Synthetic oligonucleotide
cuagccacccaucccucgc

SEQ ID NO: 1238412 - RNA, 19 nt, Artificial Sequence
  Description of Artificial Sequence: Synthetic oligonucleotide
gcaaugacacgacggauac

SEQ ID NO: 1238413 - RNA, 19 nt, Artificial Sequence
  Description of Artificial Sequence: Synthetic oligonucleotide
gagcgagucacagucucug

SEQ ID NO: 1238414 - RNA, 19 nt, Artificial Sequence
  Description of Artificial Sequence: Synthetic oligonucleotide
uccuaagggcccuggcacc

SEQ ID NO: 1238415 - RNA, 19 nt, Artificial Sequence
  Description of Artificial Sequence: Synthetic oligonucleotide
agcgggaguuccgaaacag

SEQ ID NO: 1238416 - RNA, 19 nt, Artificial Sequence
  Description of Artificial Sequence: Synthetic oligonucleotide
ugacacgacggauaccguu

SEQ ID NO: 1238417 - RNA, 19 nt, Artificial Sequence
  Description of Artificial Sequence: Synthetic oligonucleotide
ugagcgagucacagucucu

SEQ ID NO: 1238418 - RNA, 19 nt, Artificial Sequence
  Description of Artificial Sequence: Synthetic oligonucleotide
cugucgaguccgagaaggg

SEQ ID NO: 1238419 - RNA, 19 nt, Artificial Sequence
  Description of Artificial Sequence: Synthetic oligonucleotide
uccaugccaagaauuuguu

SEQ ID NO: 1238420 - RNA, 19 nt, Artificial Sequence
  Description of Artificial Sequence: Synthetic oligonucleotide
ucuacucgugagacugcac

SEQ ID NO: 1238421 - RNA, 19 nt, Artificial Sequence
  Description of Artificial Sequence: Synthetic oligonucleotide
gagacugcacccuaccccu

SEQ ID NO: 1238422 - RNA, 19 nt, Artificial Sequence
  Description of Artificial Sequence: Synthetic oligonucleotide
agagcuuccgaggccacug

SEQ ID NO: 1238423 - RNA, 19 nt, Artificial Sequence
  Description of Artificial Sequence: Synthetic oligonucleotide
uuggguuuaaaggcuuuau

SEQ ID NO: 1238424 - RNA, 19 nt, Artificial Sequence
  Description of Artificial Sequence: Synthetic oligonucleotide
cucgucugggacuguggcc

SEQ ID NO: 1238425 - RNA, 19 nt, Artificial Sequence
  Description of Artificial Sequence: Synthetic oligonucleotide
cuucuacucgugagacugc

SEQ ID NO: 1238426 - RNA, 19 nt, Artificial Sequence
  Description of Artificial Sequence: Synthetic oligonucleotide
caucugaccugggaggcag

SEQ ID NO: 1238427 - RNA, 19 nt, Artificial Sequence
  Description of Artificial Sequence: Synthetic oligonucleotide
ucgcccugguucacguagg

SEQ ID NO: 1238428 - RNA, 19 nt, Artificial Sequence
  Description of Artificial Sequence: Synthetic oligonucleotide
ggcacccauaccuugccag

SEQ ID NO: 1238429 - RNA, 19 nt, Artificial Sequence
  Description of Artificial Sequence: Synthetic oligonucleotide
aagcgggaguuccgaaaca

SEQ ID NO: 1238430 - RNA, 19 nt, Artificial Sequence
  Description of Artificial Sequence: Synthetic oligonucleotide
ugucgaguccgagaagggu

SEQ ID NO: 1238431 - RNA, 19 nt, Artificial Sequence
  Description of Artificial Sequence: Synthetic oligonucleotide
gggucuacgcuucuccugc

SEQ ID NO: 1238432 - RNA, 19 nt, Artificial Sequence
  Description of Artificial Sequence: Synthetic oligonucleotide
caaggacgccacuccaggc

SEQ ID NO: 1238433 - RNA, 19 nt, Artificial Sequence
  Description of Artificial Sequence: Synthetic oligonucleotide
uccaaguugcugggcaggc

SEQ ID NO: 1238434 - RNA, 19 nt, Artificial Sequence
  Description of Artificial Sequence: Synthetic oligonucleotide
gaaacugcaccaagcggga

SEQ ID NO: 1238435 - RNA, 19 nt, Artificial Sequence
  Description of Artificial Sequence: Synthetic oligonucleotide
auugggccagcugagaguu

SEQ ID NO: 1238436 - RNA, 19 nt, Artificial Sequence
  Description of Artificial Sequence: Synthetic oligonucleotide
uuggaccggcuauugggcu

SEQ ID NO: 1238437 - RNA, 19 nt, Artificial Sequence
  Description of Artificial Sequence: Synthetic oligonucleotide
gagcaccuuccaugggagg

SEQ ID NO: 1238438 - RNA, 19 nt, Artificial Sequence
  Description of Artificial Sequence: Synthetic oligonucleotide
caaggaccauccuuggaga

SEQ ID NO: 1238439 - RNA, 19 nt, Artificial Sequence
  Description of Artificial Sequence: Synthetic oligonucleotide
gaaacagcggcaccagggu

SEQ ID NO: 1238440 - RNA, 19 nt, Artificial Sequence
  Description of Artificial Sequence: Synthetic oligonucleotide
agcggcaccagggugguca

SEQ ID NO: 1238441 - RNA, 19 nt, Artificial Sequence
  Description of Artificial Sequence: Synthetic oligonucleotide
aggacgcuguccuccaagu

SEQ ID NO: 1238442 - RNA, 19 nt, Artificial Sequence
  Description of Artificial Sequence: Synthetic oligonucleotide
acgacggauaccguugaca

SEQ ID NO: 1238443 - RNA, 19 nt, Artificial Sequence
  Description of Artificial Sequence: Synthetic oligonucleotide
gucgaguccgagaaggguc

SEQ ID NO: 1238444 - RNA, 19 nt, Artificial Sequence
  Description of Artificial Sequence: Synthetic oligonucleotide
gaacgugagcgcacggcgc

SEQ ID NO: 1238445 - RNA, 19 nt, Artificial Sequence
  Description of Artificial Sequence: Synthetic oligonucleotide
ugccacuccaugacaccac

SEQ ID NO: 1238446 - RNA, 19 nt, Artificial Sequence
  Description of Artificial Sequence: Synthetic oligonucleotide
ucgugagacugcacccuac

SEQ ID NO: 1238447 - RNA, 19 nt, Artificial Sequence
  Description of Artificial Sequence: Synthetic oligonucleotide
aggacgccacuccaggcga

SEQ ID NO: 1238448 - RNA, 19 nt, Artificial Sequence
  Description of Artificial Sequence: Synthetic oligonucleotide
cuggcacccauaccuugcc

SEQ ID NO: 1238449 - RNA, 19 nt, Artificial Sequence
  Description of Artificial Sequence: Synthetic oligonucleotide
ccggcuauugggcucaggc

SEQ ID NO: 1238450 - RNA, 19 nt, Artificial Sequence
  Description of Artificial Sequence: Synthetic oligonucleotide
caggacgcuguccuccaag

SEQ ID NO: 1238451 - RNA, 19 nt, Artificial Sequence
  Description of Artificial Sequence: Synthetic oligonucleotide
ccuaccccuccuaagggcc

SEQ ID NO: 1238452 - RNA, 19 nt, Artificial Sequence
  Description of Artificial Sequence: Synthetic oligonucleotide
ggaaacauacaggggcaag

SEQ ID NO: 1238453 - RNA, 19 nt, Artificial Sequence
  Description of Artificial Sequence: Synthetic oligonucleotide
caccucgcaaggagaaaug

SEQ ID NO: 1238454 - RNA, 19 nt, Artificial Sequence
  Description of Artificial Sequence: Synthetic oligonucleotide
acacgacggauaccguuga

SEQ ID NO: 1238455 - RNA, 19 nt, Artificial Sequence
  Description of Artificial Sequence: Synthetic oligonucleotide
uaccguugacaaaguugcu

SEQ ID NO: 1238456 - RNA, 19 nt, Artificial Sequence
  Description of Artificial Sequence: Synthetic oligonucleotide
ggccccaaagacucgagca

SEQ ID NO: 1238457 - RNA, 19 nt, Artificial Sequence
  Description of Artificial Sequence: Synthetic oligonucleotide
ccaauaggcccuagggccc

SEQ ID NO: 1238458 - RNA, 19 nt, Artificial Sequence
  Description of Artificial Sequence: Synthetic oligonucleotide
gcacccauaccuugccagg

SEQ ID NO: 1238459 - RNA, 19 nt, Artificial Sequence
  Description of Artificial Sequence: Synthetic oligonucleotide
accucgcaaggagaaaugu

SEQ ID NO: 1238460 - RNA, 19 nt, Artificial Sequence
  Description of Artificial Sequence: Synthetic oligonucleotide
uggaccggcuauugggcuc

SEQ ID NO: 1238461 - RNA, 19 nt, Artificial Sequence
  Description of Artificial Sequence: Synthetic oligonucleotide
ggcuauugggcucaggccu

SEQ ID NO: 1238462 - RNA, 19 nt, Artificial Sequence
  Description of Artificial Sequence: Synthetic oligonucleotide
acgcaccucacaggaggcc

SEQ ID NO: 1238463 - RNA, 19 nt, Artificial Sequence
  Description of Artificial Sequence: Synthetic oligonucleotide
cagggaacgugagcgcacg

SEQ ID NO: 1238464 - RNA, 19 nt, Artificial Sequence
  Description of Artificial Sequence: Synthetic oligonucleotide
acucgugagacugcacccu

SEQ ID NO: 1238465 - RNA, 19 nt, Artificial Sequence
  Description of Artificial Sequence: Synthetic oligonucleotide
aagagcuuccgaggccacu

SEQ ID NO: 1238466 - RNA, 19 nt, Artificial Sequence
  Description of Artificial Sequence: Synthetic oligonucleotide
acgaccaggggccgcggug

SEQ ID NO: 1238467 - RNA, 19 nt, Artificial Sequence
  Description of Artificial Sequence: Synthetic oligonucleotide
uuccgaggccacuggucug

SEQ ID NO: 1238468 - RNA, 19 nt, Artificial Sequence
  Description of Artificial Sequence: Synthetic oligonucleotide
ugcucuggucaugugggau

SEQ ID NO: 1238469 - RNA, 19 nt, Artificial Sequence
  Description of Artificial Sequence: Synthetic oligonucleotide
acguagacgugggauggca

SEQ ID NO: 1238470 - RNA, 19 nt, Artificial Sequence
  Description of Artificial Sequence: Synthetic oligonucleotide
uggccggccgcgaccuccg

SEQ ID NO: 1238471 - RNA, 19 nt, Artificial Sequence
  Description of Artificial Sequence: Synthetic oligonucleotide
cucgagcaccuuccauggg

SEQ ID NO: 1238472 - RNA, 19 nt, Artificial Sequence
  Description of Artificial Sequence: Synthetic oligonucleotide
cagcuuggcugucgagucc

SEQ ID NO: 1238473 - RNA, 19 nt, Artificial Sequence
  Description of Artificial Sequence: Synthetic oligonucleotide
cugccguauggcauugaca

SEQ ID NO: 1238474 - RNA, 19 nt, Artificial Sequence
  Description of Artificial Sequence: Synthetic oligonucleotide
cgugggauggcagccaucg

SEQ ID NO: 1238475 - RNA, 19 nt, Artificial Sequence
  Description of Artificial Sequence: Synthetic oligonucleotide
gacggauaccguugacaaa

SEQ ID NO: 1238476 - RNA, 19 nt, Artificial Sequence
  Description of Artificial Sequence: Synthetic oligonucleotide
caaugacacgacggauacc

SEQ ID NO: 1238477 - RNA, 19 nt, Artificial Sequence
  Description of Artificial Sequence: Synthetic oligonucleotide
agccaucgcuuggaccggc

SEQ ID NO: 1238478 - RNA, 19 nt, Artificial Sequence
  Description of Artificial Sequence: Synthetic oligonucleotide
cuuccgaggccacuggucu

SEQ ID NO: 1238479 - RNA, 19 nt, Artificial Sequence
  Description of Artificial Sequence: Synthetic oligonucleotide
ggcgcgcacgaccaggggc

SEQ ID NO: 1238480 - RNA, 19 nt, Artificial Sequence
  Description of Artificial Sequence: Synthetic oligonucleotide
ucugaccugggaggcagua

SEQ ID NO: 1238481 - RNA, 19 nt, Artificial Sequence
  Description of Artificial Sequence: Synthetic oligonucleotide
cuguuugcggguggugaug

SEQ ID NO: 1238482 - RNA, 19 nt, Artificial Sequence
  Description of Artificial Sequence: Synthetic oligonucleotide
gaccggagggccagggaac

SEQ ID NO: 1238483 - RNA, 19 nt, Artificial Sequence
  Description of Artificial Sequence: Synthetic oligonucleotide
gaugcggcacaggcucuug

SEQ ID NO: 1238484 - RNA, 19 nt, Artificial Sequence
  Description of Artificial Sequence: Synthetic oligonucleotide
ccucguguaguaguuuccc

SEQ ID NO: 1238485 - RNA, 19 nt, Artificial Sequence
  Description of Artificial Sequence: Synthetic oligonucleotide
gccccaaagacucgagcac

SEQ ID NO: 1238486 - RNA, 19 nt, Artificial Sequence
  Description of Artificial Sequence: Synthetic oligonucleotide
guucacguagacgugggau

SEQ ID NO: 1238487 - RNA, 19 nt, Artificial Sequence
  Description of Artificial Sequence: Synthetic oligonucleotide
gaguccgagaagggucuac

SEQ ID NO: 1238488 - RNA, 19 nt, Artificial Sequence
  Description of Artificial Sequence: Synthetic oligonucleotide
auacagccugcgaagccgu

SEQ ID NO: 1238489 - RNA, 19 nt, Artificial Sequence
  Description of Artificial Sequence: Synthetic oligonucleotide
cacuagccacccaucccuc

SEQ ID NO: 1238490 - RNA, 19 nt, Artificial Sequence
  Description of Artificial Sequence: Synthetic oligonucleotide
agugccucguguaguaguu

SEQ ID NO: 1238491 - RNA, 19 nt, Artificial Sequence
  Description of Artificial Sequence: Synthetic oligonucleotide
caccacuccaugccaagaa

SEQ ID NO: 1238492 - RNA, 19 nt, Artificial Sequence
  Description of Artificial Sequence: Synthetic oligonucleotide
gcugagaguuucggaacag

SEQ ID NO: 1238493 - RNA, 19 nt, Artificial Sequence
  Description of Artificial Sequence: Synthetic oligonucleotide
cacggcgcgcacgaccagg

SEQ ID NO: 1238494 - RNA, 19 nt, Artificial Sequence
  Description of Artificial Sequence: Synthetic oligonucleotide
accuuccaugggaggggcc

SEQ ID NO: 1238495 - RNA, 19 nt, Artificial Sequence
  Description of Artificial Sequence: Synthetic oligonucleotide
caccuuccaugggaggggc

SEQ ID NO: 1238496 - RNA, 19 nt, Artificial Sequence
  Description of Artificial Sequence: Synthetic oligonucleotide
gggcccacagccuguuugc

SEQ ID NO: 1238497 - RNA, 19 nt, Artificial Sequence
  Description of Artificial Sequence: Synthetic oligonucleotide
gcccuagggccccaaagac

SEQ ID NO: 1238498 - RNA, 19 nt, Artificial Sequence
  Description of Artificial Sequence: Synthetic oligonucleotide
gaagagcuuccgaggccac

SEQ ID NO: 1238499 - RNA, 19 nt, Artificial Sequence
  Description of Artificial Sequence: Synthetic oligonucleotide
ucuccccuugguucacgua

SEQ ID NO: 1238500 - RNA, 19 nt, Artificial Sequence
  Description of Artificial Sequence: Synthetic oligonucleotide
cccuaccccuccuaagggc

SEQ ID NO: 1238501 - RNA, 19 nt, Artificial Sequence
  Description of Artificial Sequence: Synthetic oligonucleotide
cucaggacgcuguccucca

SEQ ID NO: 1238502 - RNA, 19 nt, Artificial Sequence
  Description of Artificial Sequence: Synthetic oligonucleotide
cacguagacgugggauggc

SEQ ID NO: 1238503 - RNA, 19 nt, Artificial Sequence
  Description of Artificial Sequence: Synthetic oligonucleotide
agacgugggauggcagcca

SEQ ID NO: 1238504 - RNA, 19 nt, Artificial Sequence
  Description of Artificial Sequence: Synthetic oligonucleotide
ccccaaagacucgagcacc

SEQ ID NO: 1238505 - RNA, 19 nt, Artificial Sequence
  Description of Artificial Sequence: Synthetic oligonucleotide
ggaccggagggccagggaa

SEQ ID NO: 1238506 - RNA, 19 nt, Artificial Sequence
  Description of Artificial Sequence: Synthetic oligonucleotide
gcuauugggcucaggccug

SEQ ID NO: 1238507 - RNA, 19 nt, Artificial Sequence
  Description of Artificial Sequence: Synthetic oligonucleotide
aucgcuuggaccggcuauu

SEQ ID NO: 1238508 - RNA, 19 nt, Artificial Sequence
  Description of Artificial Sequence: Synthetic oligonucleotide
cacgacggauaccguugac

SEQ ID NO: 1238509 - RNA, 19 nt, Artificial Sequence
  Description of Artificial Sequence: Synthetic oligonucleotide
ccugccguauggcauugac

SEQ ID NO: 1238510 - RNA, 19 nt, Artificial Sequence
  Description of Artificial Sequence: Synthetic oligonucleotide
cacuccaugccaagaauuu

SEQ ID NO: 1238511 - RNA, 19 nt, Artificial Sequence
  Description of Artificial Sequence: Synthetic oligonucleotide
guuugcggguggugaugac

SEQ ID NO: 1238512 - RNA, 19 nt, Artificial Sequence
  Description of Artificial Sequence: Synthetic oligonucleotide
cgugagacugcacccuacc

SEQ ID NO: 1238513 - RNA, 19 nt, Artificial Sequence
  Description of Artificial Sequence: Synthetic oligonucleotide
ccggccgcgaccuccgagg

SEQ ID NO: 1238514 - RNA, 19 nt, Artificial Sequence
  Description of Artificial Sequence: Synthetic oligonucleotide
gugggauggcagccaucgc

SEQ ID NO: 1238515 - RNA, 19 nt, Artificial Sequence
  Description of Artificial Sequence: Synthetic oligonucleotide
cgagcaccuuccaugggag

SEQ ID NO: 1238516 - RNA, 19 nt, Artificial Sequence
  Description of Artificial Sequence: Synthetic oligonucleotide
gaccugccguauggcauug

SEQ ID NO: 1238517 - RNA, 19 nt, Artificial Sequence
  Description of Artificial Sequence: Synthetic oligonucleotide
ccguugacaaaguugcucu

SEQ ID NO: 1238518 - RNA, 19 nt, Artificial Sequence
  Description of Artificial Sequence: Synthetic oligonucleotide
cucguguaguaguuucccu

SEQ ID NO: 1238519 - RNA, 19 nt, Artificial Sequence
  Description of Artificial Sequence: Synthetic oligonucleotide
uaggcccuagggccccaaa

SEQ ID NO: 1238520 - RNA, 19 nt, Artificial Sequence
  Description of Artificial Sequence: Synthetic oligonucleotide
ccuaagggcccuggcaccc

SEQ ID NO: 1238521 - RNA, 19 nt, Artificial Sequence
  Description of Artificial Sequence: Synthetic oligonucleotide
cccuugguucacguagacg

SEQ ID NO: 1238522 - RNA, 19 nt, Artificial Sequence
  Description of Artificial Sequence: Synthetic oligonucleotide
agacugcacccuaccccuc

SEQ ID NO: 1238523 - RNA, 19 nt, Artificial Sequence
  Description of Artificial Sequence: Synthetic oligonucleotide
cguagacgugggauggcag

SEQ ID NO: 1238524 - RNA, 19 nt, Artificial Sequence
  Description of Artificial Sequence: Synthetic oligonucleotide
cggcuauugggcucaggcc

SEQ ID NO: 1238525 - RNA, 19 nt, Artificial Sequence
  Description of Artificial Sequence: Synthetic oligonucleotide
uacagccugcgaagccguu

SEQ ID NO: 1238526 - RNA, 19 nt, Artificial Sequence
  Description of Artificial Sequence: Synthetic oligonucleotide
acgcaccucgcaaggagaa

SEQ ID NO: 1238527 - RNA, 19 nt, Artificial Sequence
  Description of Artificial Sequence: Synthetic oligonucleotide
gcaccaagcgggaguuccg

SEQ ID NO: 1238528 - RNA, 19 nt, Artificial Sequence
  Description of Artificial Sequence: Synthetic oligonucleotide
gccucguguaguaguuucc

SEQ ID NO: 1238529 - RNA, 19 nt, Artificial Sequence
  Description of Artificial Sequence: Synthetic oligonucleotide
gagaagggucuacgcuucu

SEQ ID NO: 1238530 - RNA, 19 nt, Artificial Sequence
  Description of Artificial Sequence: Synthetic oligonucleotide
gguucacguagacguggga

SEQ ID NO: 1238531 - RNA, 19 nt, Artificial Sequence
  Description of Artificial Sequence: Synthetic oligonucleotide
ggcugucgaguccgagaag

SEQ ID NO: 1238532 - RNA, 19 nt, Artificial Sequence
  Description of Artificial Sequence: Synthetic oligonucleotide
cgacggauaccguugacaa

SEQ ID NO: 1238533 - RNA, 19 nt, Artificial Sequence
  Description of Artificial Sequence: Synthetic oligonucleotide
cucgugagacugcacccua

SEQ ID NO: 1238534 - RNA, 19 nt, Artificial Sequence
  Description of Artificial Sequence: Synthetic oligonucleotide
agccuguuugcggguggug

SEQ ID NO: 1238535 - RNA, 19 nt, Artificial Sequence
  Description of Artificial Sequence: Synthetic oligonucleotide
cguguaguaguuucccuaa

SEQ ID NO: 1238536 - RNA, 19 nt, Artificial Sequence
  Description of Artificial Sequence: Synthetic oligonucleotide
gacgugggauggcagccau

SEQ ID NO: 1238537 - RNA, 19 nt, Artificial Sequence
  Description of Artificial Sequence: Synthetic oligonucleotide
augaugcggcacaggcucu

SEQ ID NO: 1238538 - RNA, 19 nt, Artificial Sequence
  Description of Artificial Sequence: Synthetic oligonucleotide
cacguaggccuggcagggc

SEQ ID NO: 1238539 - RNA, 19 nt, Artificial Sequence
  Description of Artificial Sequence: Synthetic oligonucleotide
ggcagugccucguguagua

SEQ ID NO: 1238540 - RNA, 19 nt, Artificial Sequence
  Description of Artificial Sequence: Synthetic oligonucleotide
uugcugagccggugcucau

SEQ ID NO: 1238541 - RNA, 19 nt, Artificial Sequence
  Description of Artificial Sequence: Synthetic oligonucleotide
acgugggauggcagccauc

SEQ ID NO: 1238542 - RNA, 19 nt, Artificial Sequence
  Description of Artificial Sequence: Synthetic oligonucleotide
gcgcgcacgaccaggggcc

SEQ ID NO: 1238543 - RNA, 19 nt, Artificial Sequence
  Description of Artificial Sequence: Synthetic oligonucleotide
augacacgacggauaccgu

SEQ ID NO: 1238544 - RNA, 19 nt, Artificial Sequence
  Description of Artificial Sequence: Synthetic oligonucleotide
ccuccuaagggcccuggca

SEQ ID NO: 1238545 - RNA, 19 nt, Artificial Sequence
  Description of Artificial Sequence: Synthetic oligonucleotide
ucucgcccugguucacgua

SEQ ID NO: 1238546 - RNA, 19 nt, Artificial Sequence
  Description of Artificial Sequence: Synthetic oligonucleotide
accggcuauugggcucagg

SEQ ID NO: 1238547 - RNA, 19 nt, Artificial Sequence
  Description of Artificial Sequence: Synthetic oligonucleotide
gggaguccacuagccaccc

SEQ ID NO: 1238548 - RNA, 19 nt, Artificial Sequence
  Description of Artificial Sequence: Synthetic oligonucleotide
guguaguaguuucccuaau

SEQ ID NO: 1238549 - RNA, 19 nt, Artificial Sequence
  Description of Artificial Sequence: Synthetic oligonucleotide
caucgcuuggaccggcuau

SEQ ID NO: 1238550 - RNA, 19 nt, Artificial Sequence
  Description of Artificial Sequence: Synthetic oligonucleotide
agggugcgcuucagcuugg

SEQ ID NO: 1238551 - RNA, 19 nt, Artificial Sequence
  Description of Artificial Sequence: Synthetic oligonucleotide
ggcccacagccuguuugcg

SEQ ID NO: 1238552 - RNA, 19 nt, Artificial Sequence
  Description of Artificial Sequence: Synthetic oligonucleotide
caccaagcgggaguuccga

SEQ ID NO: 1238553 - RNA, 19 nt, Artificial Sequence
  Description of Artificial Sequence: Synthetic oligonucleotide
gcuuccgaggccacugguc

SEQ ID NO: 1238554 - RNA, 19 nt, Artificial Sequence
  Description of Artificial Sequence: Synthetic oligonucleotide
ccaagcgggaguuccgaaa

SEQ ID NO: 1238555 - RNA, 19 nt, Artificial Sequence
  Description of Artificial Sequence: Synthetic oligonucleotide
ggaccggcuauugggcuca

SEQ ID NO: 1238556 - RNA, 19 nt, Artificial Sequence
  Description of Artificial Sequence: Synthetic oligonucleotide
gggcagggugcgcuucagc

SEQ ID NO: 1238557 - RNA, 19 nt, Artificial Sequence
  Description of Artificial Sequence: Synthetic oligonucleotide
ccacuccaugacaccacuc

SEQ ID NO: 1238558 - RNA, 19 nt, Artificial Sequence
  Description of Artificial Sequence: Synthetic oligonucleotide
ggccgcgaccuccgagggg

SEQ ID NO: 1238559 - RNA, 19 nt, Artificial Sequence
  Description of Artificial Sequence: Synthetic oligonucleotide
cgcuuggaccggcuauugg

SEQ ID NO: 1238560 - RNA, 19 nt, Artificial Sequence
  Description of Artificial Sequence: Synthetic oligonucleotide
cccggcaccggagcggugc

SEQ ID NO: 1238561 - RNA, 19 nt, Artificial Sequence
  Description of Artificial Sequence: Synthetic oligonucleotide
gggcccggaucccggcggg

SEQ ID NO: 1238562 - RNA, 19 nt, Artificial Sequence
  Description of Artificial Sequence: Synthetic oligonucleotide
gcccugguucacguaggcc

SEQ ID NO: 1238563 - RNA, 19 nt, Artificial Sequence
  Description of Artificial Sequence: Synthetic oligonucleotide
ggauaccguugacaaaguu

SEQ ID NO: 1238564 - RNA, 19 nt, Artificial Sequence
  Description of Artificial Sequence: Synthetic oligonucleotide
cccuccuaagggcccuggc

SEQ ID NO: 1238565 - RNA, 19 nt, Artificial Sequence
  Description of Artificial Sequence: Synthetic oligonucleotide
ggccucgucugggacugug

SEQ ID NO: 1238566 - RNA, 19 nt, Artificial Sequence
  Description of Artificial Sequence: Synthetic oligonucleotide
gcgggcccggaucccggcg

SEQ ID NO: 1238567 - RNA, 19 nt, Artificial Sequence
  Description of Artificial Sequence: Synthetic oligonucleotide
gcaccucgcaaggagaaau

SEQ ID NO: 1238568 - RNA, 19 nt, Artificial Sequence
  Description of Artificial Sequence: Synthetic oligonucleotide
cuaaugccagggccacccu

SEQ ID NO: 1238569 - RNA, 19 nt, Artificial Sequence
  Description of Artificial Sequence: Synthetic oligonucleotide
ggcuucuacucgugagacu

SEQ ID NO: 1238570 - RNA, 19 nt, Artificial Sequence
  Description of Artificial Sequence: Synthetic oligonucleotide
cacaggcucuugagagucu

SEQ ID NO: 1238571 - RNA, 19 nt, Artificial Sequence
  Description of Artificial Sequence: Synthetic oligonucleotide
gaccggcuauugggcucag

SEQ ID NO: 1238572 - RNA, 19 nt, Artificial Sequence
  Description of Artificial Sequence: Synthetic oligonucleotide
ccauaccuugccagggaua

SEQ ID NO: 1238573 - RNA, 19 nt, Artificial Sequence
  Description of Artificial Sequence: Synthetic oligonucleotide
accugccguauggcauuga

SEQ ID NO: 1238574 - RNA, 19 nt, Artificial Sequence
  Description of Artificial Sequence: Synthetic oligonucleotide
gguucucgcccugguucac

SEQ ID NO: 1238575 - RNA, 19 nt, Artificial Sequence
  Description of Artificial Sequence: Synthetic oligonucleotide
gggaccggagggccaggga

SEQ ID NO: 1238576 - RNA, 19 nt, Artificial Sequence
  Description of Artificial Sequence: Synthetic oligonucleotide
ggaguccacuagccaccca

SEQ ID NO: 1238577 - RNA, 19 nt, Artificial Sequence
  Description of Artificial Sequence: Synthetic oligonucleotide
ccacuccaugccaagaauu

SEQ ID NO: 1238578 - RNA, 19 nt, Artificial Sequence
  Description of Artificial Sequence: Synthetic oligonucleotide
cgcacgaccaggggccgcg

SEQ ID NO: 1238579 - RNA, 19 nt, Artificial Sequence
  Description of Artificial Sequence: Synthetic oligonucleotide
ggggaagagcauacagccu

SEQ ID NO: 1238580 - RNA, 19 nt, Artificial Sequence
  Description of Artificial Sequence: Synthetic oligonucleotide
ccggcaccggagcggugcg

SEQ ID NO: 1238581 - RNA, 19 nt, Artificial Sequence
  Description of Artificial Sequence: Synthetic oligonucleotide
ggccacugguccgucucca

SEQ ID NO: 1238582 - RNA, 19 nt, Artificial Sequence
  Description of Artificial Sequence: Synthetic oligonucleotide
cgggcccggaucccggcgg

SEQ ID NO: 1238583 - RNA, 19 nt, Artificial Sequence
  Description of Artificial Sequence: Synthetic oligonucleotide
cgagcgggcccggaucccg

SEQ ID NO: 1238584 - RNA, 19 nt, Artificial Sequence
  Description of Artificial Sequence: Synthetic oligonucleotide
ccuguuugcggguggugau

SEQ ID NO: 1238585 - RNA, 19 nt, Artificial Sequence
  Description of Artificial Sequence: Synthetic oligonucleotide
cggugcggggcacggcgcg

SEQ ID NO: 1238586 - RNA, 19 nt, Artificial Sequence
  Description of Artificial Sequence: Synthetic oligonucleotide
ggcccggaucccggcgggg

SEQ ID NO: 1238587 - RNA, 19 nt, Artificial Sequence
  Description of Artificial Sequence: Synthetic oligonucleotide
gcacgaccaggggccgcgg

SEQ ID NO: 1238588 - RNA, 19 nt, Artificial Sequence
  Description of Artificial Sequence: Synthetic oligonucleotide
guaggaccugcugcugguu

SEQ ID NO: 1238589 - RNA, 19 nt, Artificial Sequence
  Description of Artificial Sequence: Synthetic oligonucleotide
ccccuccuaagggcccugg

SEQ ID NO: 1238590 - RNA, 19 nt, Artificial Sequence
  Description of Artificial Sequence: Synthetic oligonucleotide
ggacgcuguccuccaaguu

SEQ ID NO: 1238591 - RNA, 19 nt, Artificial Sequence
  Description of Artificial Sequence: Synthetic oligonucleotide
ggccgcgguggccggccgc

SEQ ID NO: 1238592 - RNA, 19 nt, Artificial Sequence
  Description of Artificial Sequence: Synthetic oligonucleotide
ggggccgcgguggccggcc

SEQ ID NO: 1238593 - RNA, 19 nt, Artificial Sequence
  Description of Artificial Sequence: Synthetic oligonucleotide
cggccgcgaccuccgaggg

SEQ ID NO: 1238594 - RNA, 19 nt, Artificial Sequence
  Description of Artificial Sequence: Synthetic oligonucleotide
cgucugggacuguggccug

SEQ ID NO: 1238595 - RNA, 19 nt, Artificial Sequence
  Description of Artificial Sequence: Synthetic oligonucleotide
ccgaggaguagagaagcau

SEQ ID NO: 1238596 - RNA, 19 nt, Artificial Sequence
  Description of Artificial Sequence: Synthetic oligonucleotide
cacgaccaggggccgcggu

SEQ ID NO: 1238597 - RNA, 19 nt, Artificial Sequence
  Description of Artificial Sequence: Synthetic oligonucleotide
ccaucgcuuggaccggcua

SEQ ID NO: 1238598 - RNA, 19 nt, Artificial Sequence
  Description of Artificial Sequence: Synthetic oligonucleotide
gugccucguguaguaguuu

SEQ ID NO: 1238599 - RNA, 19 nt, Artificial Sequence
  Description of Artificial Sequence: Synthetic oligonucleotide
cccuugagcgagucacagu

SEQ ID NO: 1238600 - RNA, 19 nt, Artificial Sequence
  Description of Artificial Sequence: Synthetic oligonucleotide
caugugggaugaggccaau

SEQ ID NO: 1238601 - RNA, 19 nt, Artificial Sequence
  Description of Artificial Sequence: Synthetic oligonucleotide
cggugcucauucacugcaa

SEQ ID NO: 1238602 - RNA, 19 nt, Artificial Sequence
  Description of Artificial Sequence: Synthetic oligonucleotide
ccgagcgggcccggauccc

SEQ ID NO: 1238603 - RNA, 19 nt, Artificial Sequence
  Description of Artificial Sequence: Synthetic oligonucleotide
gcgcacgaccaggggccgc

SEQ ID NO: 1238604 - RNA, 19 nt, Artificial Sequence
  Description of Artificial Sequence: Synthetic oligonucleotide
cggauaccguugacaaagu

SEQ ID NO: 1238605 - RNA, 19 nt, Artificial Sequence
  Description of Artificial Sequence: Synthetic oligonucleotide
cagcggcaccagggugguc

SEQ ID NO: 1238606 - RNA, 19 nt, Artificial Sequence
  Description of Artificial Sequence: Synthetic oligonucleotide
ccaaagacucgagcaccuu

SEQ ID NO: 1238607 - RNA, 19 nt, Artificial Sequence
  Description of Artificial Sequence: Synthetic oligonucleotide
ccccggcaccggagcggug

SEQ ID NO: 1238608 - RNA, 19 nt, Artificial Sequence
  Description of Artificial Sequence: Synthetic oligonucleotide
cgaguccgagaagggucua

SEQ ID NO: 1238609 - RNA, 19 nt, Artificial Sequence
  Description of Artificial Sequence: Synthetic oligonucleotide
uauuuaggaacuuauagcg

SEQ ID NO: 1238610 - RNA, 19 nt, Artificial Sequence
  Description of Artificial Sequence: Synthetic oligonucleotide
aauacugucuuauuacuac

SEQ ID NO: 1238611 - RNA, 19 nt, Artificial Sequence
  Description of Artificial Sequence: Synthetic oligonucleotide
aauugagauauccuucucc

SEQ ID NO: 1238612 - RNA, 19 nt, Artificial Sequence
  Description of Artificial Sequence: Synthetic oligonucleotide
aaugaucaaauacuuugcc

SEQ ID NO: 1238613 - RNA, 19 nt, Artificial Sequence
  Description of Artificial Sequence: Synthetic oligonucleotide
uagucuauaaucaaaacca

SEQ ID NO: 1238614 - RNA, 19 nt, Artificial Sequence
  Description of Artificial Sequence: Synthetic oligonucleotide
aguaggagaacaaagagcc

SEQ ID NO: 1238615 - RNA, 19 nt, Artificial Sequence
  Description of Artificial Sequence: Synthetic oligonucleotide
acaauuaccauuucaaguc

SEQ ID NO: 1238616 - RNA, 19 nt, Artificial Sequence
  Description of Artificial Sequence: Synthetic oligonucleotide
cuuauagcgaagaaggucg

SEQ ID NO: 1238617 - RNA, 19 nt, Artificial Sequence
  Description of Artificial Sequence: Synthetic oligonucleotide
gaacuuauagcgaagaagg

SEQ ID NO: 1238618 - RNA, 19 nt, Artificial Sequence
  Description of Artificial Sequence: Synthetic oligonucleotide
ucauaauucagaccaauag

SEQ ID NO: 1238619 - RNA, 19 nt, Artificial Sequence
  Description of Artificial Sequence: Synthetic oligonucleotide
aaauuaaacugccuccugg

SEQ ID NO: 1238620 - RNA, 19 nt, Artificial Sequence
  Description of Artificial Sequence: Synthetic oligonucleotide
ugaugaauaauucaaauuu

SEQ ID NO: 1238621 - RNA, 19 nt, Artificial Sequence
  Description of Artificial Sequence: Synthetic oligonucleotide
aaaugcuagcgucuuaucg

SEQ ID NO: 1238622 - RNA, 19 nt, Artificial Sequence
  Description of Artificial Sequence: Synthetic oligonucleotide
ucggcauuuacuaaaacag

SEQ ID NO: 1238623 - RNA, 19 nt, Artificial Sequence
  Description of Artificial Sequence: Synthetic oligonucleotide
accaaaagagaauagggac

SEQ ID NO: 1238624 - RNA, 19 nt, Artificial Sequence
  Description of Artificial Sequence: Synthetic oligonucleotide
ucagcaagacugaauaucg

SEQ ID NO: 1238625 - RNA, 19 nt, Artificial Sequence
  Description of Artificial Sequence: Synthetic oligonucleotide
accauuucaagucaucagc

SEQ ID NO: 1238626 - RNA, 19 nt, Artificial Sequence
  Description of Artificial Sequence: Synthetic oligonucleotide
uacuauauugcccauauuc

SEQ ID NO: 1238627 - RNA, 19 nt, Artificial Sequence
  Description of Artificial Sequence: Synthetic oligonucleotide
uauuccucgaucaauaacu

SEQ ID NO: 1238628 - RNA, 19 nt, Artificial Sequence
  Description of Artificial Sequence: Synthetic oligonucleotide
aaagagaauagggacggcc

SEQ ID NO: 1238629 - RNA, 19 nt, Artificial Sequence
  Description of Artificial Sequence: Synthetic oligonucleotide
uguauugacagauuacaag

SEQ ID NO: 1238630 - RNA, 19 nt, Artificial Sequence
  Description of Artificial Sequence: Synthetic oligonucleotide
ugaguaaugagccgaauca

SEQ ID NO: 1238631 - RNA, 19 nt, Artificial Sequence
  Description of Artificial Sequence: Synthetic oligonucleotide
aauuggauccauuuaucug

SEQ ID NO: 1238632 - RNA, 19 nt, Artificial Sequence
  Description of Artificial Sequence: Synthetic oligonucleotide
aagcccaugaguaaugagc

SEQ ID NO: 1238633 - RNA, 19 nt, Artificial Sequence
  Description of Artificial Sequence: Synthetic oligonucleotide
agcaagacugaauaucggc

SEQ ID NO: 1238634 - RNA, 19 nt, Artificial Sequence
  Description of Artificial Sequence: Synthetic oligonucleotide
aauaucggcauuuacuaaa

SEQ ID NO: 1238635 - RNA, 19 nt, Artificial Sequence
  Description of Artificial Sequence: Synthetic oligonucleotide
caaagcuuccgcauuaucg

SEQ ID NO: 1238636 - RNA, 19 nt, Artificial Sequence
  Description of Artificial Sequence: Synthetic oligonucleotide
ugagauauccuucuccacc

SEQ ID NO: 1238637 - RNA, 19 nt, Artificial Sequence
  Description of Artificial Sequence: Synthetic oligonucleotide
aaucuauucauaucucugu

SEQ ID NO: 1238638 - RNA, 19 nt, Artificial Sequence
  Description of Artificial Sequence: Synthetic oligonucleotide
uuucuaaacacaguuuagg

SEQ ID NO: 1238639 - RNA, 19 nt, Artificial Sequence
  Description of Artificial Sequence: Synthetic oligonucleotide
uacaauuaccauuucaagu

SEQ ID NO: 1238640 - RNA, 19 nt, Artificial Sequence
  Description of Artificial Sequence: Synthetic oligonucleotide
aaauucguuacccaugaaa

SEQ ID NO: 1238641 - RNA, 19 nt, Artificial Sequence
  Description of Artificial Sequence: Synthetic oligonucleotide
ucaaaguuauuuaggaacu

SEQ ID NO: 1238642 - RNA, 19 nt, Artificial Sequence
  Description of Artificial Sequence: Synthetic oligonucleotide
acuauauugcccauauucc

SEQ ID NO: 1238643 - RNA, 19 nt, Artificial Sequence
  Description of Artificial Sequence: Synthetic oligonucleotide
aaugagccgaaucaucuug

SEQ ID NO: 1238644 - RNA, 19 nt, Artificial Sequence
  Description of Artificial Sequence: Synthetic oligonucleotide
cuuaaugcaaaaugagggc

SEQ ID NO: 1238645 - RNA, 19 nt, Artificial Sequence
  Description of Artificial Sequence: Synthetic oligonucleotide
auagacacuggaauaaggc

SEQ ID NO: 1238646 - RNA, 19 nt, Artificial Sequence
  Description of Artificial Sequence: Synthetic oligonucleotide
uccucgaucaauaacugga

SEQ ID NO: 1238647 - RNA, 19 nt, Artificial Sequence
  Description of Artificial Sequence: Synthetic oligonucleotide
ugaaauugagauauccuuc

SEQ ID NO: 1238648 - RNA, 19 nt, Artificial Sequence
  Description of Artificial Sequence: Synthetic oligonucleotide
uugcauauuccaaaguuga

SEQ ID NO: 1238649 - RNA, 19 nt, Artificial Sequence
  Description of Artificial Sequence: Synthetic oligonucleotide
uauacuauauugcccauau

SEQ ID NO: 1238650 - RNA, 19 nt, Artificial Sequence
  Description of Artificial Sequence: Synthetic oligonucleotide
aauacuuugccaguaaaau

SEQ ID NO: 1238651 - RNA, 19 nt, Artificial Sequence
  Description of Artificial Sequence: Synthetic oligonucleotide
ucgaucaauaacuggagug

SEQ ID NO: 1238652 - RNA, 19 nt, Artificial Sequence
  Description of Artificial Sequence: Synthetic oligonucleotide
uuuaggaacuuauagcgaa

SEQ ID NO: 1238653 - RNA, 19 nt, Artificial Sequence
  Description of Artificial Sequence: Synthetic oligonucleotide
aauagggacggccauuaug

SEQ ID NO: 1238654 - RNA, 19 nt, Artificial Sequence
  Description of Artificial Sequence: Synthetic oligonucleotide
uuagguuacugcuacauau

SEQ ID NO: 1238655 - RNA, 19 nt, Artificial Sequence
  Description of Artificial Sequence: Synthetic oligonucleotide
uaggagaacaaagagccgg

SEQ ID NO: 1238656 - RNA, 19 nt, Artificial Sequence
  Description of Artificial Sequence: Synthetic oligonucleotide
auaaagaggaguccugcuc

SEQ ID NO: 1238657 - RNA, 19 nt, Artificial Sequence
  Description of Artificial Sequence: Synthetic oligonucleotide
uuguaauagaaucuggaua

SEQ ID NO: 1238658 - RNA, 19 nt, Artificial Sequence
  Description of Artificial Sequence: Synthetic oligonucleotide
ugaauaucggcauuuacua

SEQ ID NO: 1238659 - RNA, 19 nt, Artificial Sequence
  Description of Artificial Sequence: Synthetic oligonucleotide
aaugguaacucucauuauu

SEQ ID NO: 1238660 - RNA, 19 nt, Artificial Sequence
  Description of Artificial Sequence: Synthetic oligonucleotide
ucaaccaaaaugcuagcgu

SEQ ID NO: 1238661 - RNA, 19 nt, Artificial Sequence
  Description of Artificial Sequence: Synthetic oligonucleotide
auauucaugauagucaccu

SEQ ID NO: 1238662 - RNA, 19 nt, Artificial Sequence
  Description of Artificial Sequence: Synthetic oligonucleotide
uuccgcauuaucgacaccg

SEQ ID NO: 1238663 - RNA, 19 nt, Artificial Sequence
  Description of Artificial Sequence: Synthetic oligonucleotide
uucguuacccaugaaauug

SEQ ID NO: 1238664 - RNA, 19 nt, Artificial Sequence
  Description of Artificial Sequence: Synthetic oligonucleotide
ucugcuauuguaauagaau

SEQ ID NO: 1238665 - RNA, 19 nt, Artificial Sequence
  Description of Artificial Sequence: Synthetic oligonucleotide
aaggaugagagccacucga

SEQ ID NO: 1238666 - RNA, 19 nt, Artificial Sequence
  Description of Artificial Sequence: Synthetic oligonucleotide
aaauugagauauccuucuc

SEQ ID NO: 1238667 - RNA, 19 nt, Artificial Sequence
  Description of Artificial Sequence: Synthetic oligonucleotide
gcuuaaugcaaaaugaggg

SEQ ID NO: 1238668 - RNA, 19 nt, Artificial Sequence
  Description of Artificial Sequence: Synthetic oligonucleotide
aauaaagaggaguccugcu

SEQ ID NO: 1238669 - RNA, 19 nt, Artificial Sequence
  Description of Artificial Sequence: Synthetic oligonucleotide
cuaaacacaguuuaggaaa

SEQ ID NO: 1238670 - RNA, 19 nt, Artificial Sequence
  Description of Artificial Sequence: Synthetic oligonucleotide
aauucguuacccaugaaau

SEQ ID NO: 1238671 - RNA, 19 nt, Artificial Sequence
  Description of Artificial Sequence: Synthetic oligonucleotide
auuaucgacaccguggcag

SEQ ID NO: 1238672 - RNA, 19 nt, Artificial Sequence
  Description of Artificial Sequence: Synthetic oligonucleotide
ugcuauuguaauagaaucu

SEQ ID NO: 1238673 - RNA, 19 nt, Artificial Sequence
  Description of Artificial Sequence: Synthetic oligonucleotide
uacaggauuucuaaacaca

SEQ ID NO: 1238674 - RNA, 19 nt, Artificial Sequence
  Description of Artificial Sequence: Synthetic oligonucleotide
uguggagcuguauuccucg

SEQ ID NO: 1238675 - RNA, 19 nt, Artificial Sequence
  Description of Artificial Sequence: Synthetic oligonucleotide
acuuauagcgaagaagguc

SEQ ID NO: 1238676 - RNA, 19 nt, Artificial Sequence
  Description of Artificial Sequence: Synthetic oligonucleotide
cuuugcuaguauuuuaaac

SEQ ID NO: 1238677 - RNA, 19 nt, Artificial Sequence
  Description of Artificial Sequence: Synthetic oligonucleotide
uugcuaguauuuuaaacac

SEQ ID NO: 1238678 - RNA, 19 nt, Artificial Sequence
  Description of Artificial Sequence: Synthetic oligonucleotide
agccaaaugauuugccaac

SEQ ID NO: 1238679 - RNA, 19 nt, Artificial Sequence
  Description of Artificial Sequence: Synthetic oligonucleotide
uaauuggauccauuuaucu

SEQ ID NO: 1238680 - RNA, 19 nt, Artificial Sequence
  Description of Artificial Sequence: Synthetic oligonucleotide
uaucuuuuauaagaauugc

SEQ ID NO: 1238681 - RNA, 19 nt, Artificial Sequence
  Description of Artificial Sequence: Synthetic oligonucleotide
ucacgacacacuuugcuag

SEQ ID NO: 1238682 - RNA, 19 nt, Artificial Sequence
  Description of Artificial Sequence: Synthetic oligonucleotide
agauaagaauuucauauua

SEQ ID NO: 1238683 - RNA, 19 nt, Artificial Sequence
  Description of Artificial Sequence: Synthetic oligonucleotide
acaccaaaagagaauaggg

SEQ ID NO: 1238684 - RNA, 19 nt, Artificial Sequence
  Description of Artificial Sequence: Synthetic oligonucleotide
gucgucaucaguuaaauua

SEQ ID NO: 1238685 - RNA, 19 nt, Artificial Sequence
  Description of Artificial Sequence: Synthetic oligonucleotide
aucggcauuuacuaaaaca

SEQ ID NO: 1238686 - RNA, 19 nt, Artificial Sequence
  Description of Artificial Sequence: Synthetic oligonucleotide
cuggaauugccauugcuag

SEQ ID NO: 1238687 - RNA, 19 nt, Artificial Sequence
  Description of Artificial Sequence: Synthetic oligonucleotide
aaauccuaauuucuuggaa

SEQ ID NO: 1238688 - RNA, 19 nt, Artificial Sequence
  Description of Artificial Sequence: Synthetic oligonucleotide
auauccuucuccaccaagc

SEQ ID NO: 1238689 - RNA, 19 nt, Artificial Sequence
  Description of Artificial Sequence: Synthetic oligonucleotide
cugcuauuguaauagaauc

SEQ ID NO: 1238690 - RNA, 19 nt, Artificial Sequence
  Description of Artificial Sequence: Synthetic oligonucleotide
ugcuagucuauaaucaaaa

SEQ ID NO: 1238691 - RNA, 19 nt, Artificial Sequence
  Description of Artificial Sequence: Synthetic oligonucleotide
cuacaauuaccauuucaag

SEQ ID NO: 1238692 - RNA, 19 nt, Artificial Sequence
  Description of Artificial Sequence: Synthetic oligonucleotide
caaucuauucauaucucug

SEQ ID NO: 1238693 - RNA, 19 nt, Artificial Sequence
  Description of Artificial Sequence: Synthetic oligonucleotide
aagcuuaaugcaaaaugag

SEQ ID NO: 1238694 - RNA, 19 nt, Artificial Sequence
  Description of Artificial Sequence: Synthetic oligonucleotide
agccgaaucaucuugugga

SEQ ID NO: 1238695 - RNA, 19 nt, Artificial Sequence
  Description of Artificial Sequence: Synthetic oligonucleotide
agcuuaaugcaaaaugagg

SEQ ID NO: 1238696 - RNA, 19 nt, Artificial Sequence
  Description of Artificial Sequence: Synthetic oligonucleotide
uuaggaacuuauagcgaag

SEQ ID NO: 1238697 - RNA, 19 nt, Artificial Sequence
  Description of Artificial Sequence: Synthetic oligonucleotide
guggaaguugaaaauaaag

SEQ ID NO: 1238698 - RNA, 19 nt, Artificial Sequence
  Description of Artificial Sequence: Synthetic oligonucleotide
agcccaugaguaaugagcc

SEQ ID NO: 1238699 - RNA, 19 nt, Artificial Sequence
  Description of Artificial Sequence: Synthetic oligonucleotide
auuuaucuggaauugccau

SEQ ID NO: 1238700 - RNA, 19 nt, Artificial Sequence
  Description of Artificial Sequence: Synthetic oligonucleotide
aauguacaccaaaagagaa

SEQ ID NO: 1238701 - RNA, 19 nt, Artificial Sequence
  Description of Artificial Sequence: Synthetic oligonucleotide
ugaucuuauugccuucaug

SEQ ID NO: 1238702 - RNA, 19 nt, Artificial Sequence
  Description of Artificial Sequence: Synthetic oligonucleotide
ucgucaucaguuaaauuaa

SEQ ID NO: 1238703 - RNA, 19 nt, Artificial Sequence
  Description of Artificial Sequence: Synthetic oligonucleotide
aauccagugcaauuuugaa

SEQ ID NO: 1238704 - RNA, 19 nt, Artificial Sequence
  Description of Artificial Sequence: Synthetic oligonucleotide
guuuuggcuagacagcgug

SEQ ID NO: 1238705 - RNA, 19 nt, Artificial Sequence
  Description of Artificial Sequence: Synthetic oligonucleotide
gguagcgucgauuugugag

SEQ ID NO: 1238706 - RNA, 19 nt, Artificial Sequence
  Description of Artificial Sequence: Synthetic oligonucleotide
gauguuuuggcuagacagc

SEQ ID NO: 1238707 - RNA, 19 nt, Artificial Sequence
  Description of Artificial Sequence: Synthetic oligonucleotide
aacuuguaguccaaaauau

SEQ ID NO: 1238708 - RNA, 19 nt, Artificial Sequence
  Description of Artificial Sequence: Synthetic oligonucleotide
aaaagagaauagggacggc

SEQ ID NO: 1238709 - RNA, 19 nt, Artificial Sequence
  Description of Artificial Sequence: Synthetic oligonucleotide
gaaauugagauauccuucu

SEQ ID NO: 1238710 - RNA, 19 nt, Artificial Sequence
  Description of Artificial Sequence: Synthetic oligonucleotide
ugcauaagcaauacauuuu

SEQ ID NO: 1238711 - RNA, 19 nt, Artificial Sequence
  Description of Artificial Sequence: Synthetic oligonucleotide
caaccaaaaugcuagcguc

SEQ ID NO: 1238712 - RNA, 19 nt, Artificial Sequence
  Description of Artificial Sequence: Synthetic oligonucleotide
cauugcuagucuauaauca

SEQ ID NO: 1238713 - RNA, 19 nt, Artificial Sequence
  Description of Artificial Sequence: Synthetic oligonucleotide
gauauccuucuccaccaag

SEQ ID NO: 1238714 - RNA, 19 nt, Artificial Sequence
  Description of Artificial Sequence: Synthetic oligonucleotide
uucaagguagcgucgauuu

SEQ ID NO: 1238715 - RNA, 19 nt, Artificial Sequence
  Description of Artificial Sequence: Synthetic oligonucleotide
auaacuggagugaaaggag

SEQ ID NO: 1238716 - RNA, 19 nt, Artificial Sequence
  Description of Artificial Sequence: Synthetic oligonucleotide
ugcuaguauuuuaaacaca

SEQ ID NO: 1238717 - RNA, 19 nt, Artificial Sequence
  Description of Artificial Sequence: Synthetic oligonucleotide
aagucuaaccacucaggau

SEQ ID NO: 1238718 - RNA, 19 nt, Artificial Sequence
  Description of Artificial Sequence: Synthetic oligonucleotide
augcccaaauucguuaccc

SEQ ID NO: 1238719 - RNA, 19 nt, Artificial Sequence
  Description of Artificial Sequence: Synthetic oligonucleotide
ucgacuuggaauguacacc

SEQ ID NO: 1238720 - RNA, 19 nt, Artificial Sequence
  Description of Artificial Sequence: Synthetic oligonucleotide
aucaaccaaaaugcuagcg

SEQ ID NO: 1238721 - RNA, 19 nt, Artificial Sequence
  Description of Artificial Sequence: Synthetic oligonucleotide
ugguaacucucauuauucc

SEQ ID NO: 1238722 - RNA, 19 nt, Artificial Sequence
  Description of Artificial Sequence: Synthetic oligonucleotide
auugcuagucuauaaucaa

SEQ ID NO: 1238723 - RNA, 19 nt, Artificial Sequence
  Description of Artificial Sequence: Synthetic oligonucleotide
ucaguaccucauaauucag

SEQ ID NO: 1238724 - RNA, 19 nt, Artificial Sequence
  Description of Artificial Sequence: Synthetic oligonucleotide
uuccaaaguugaauuucag

SEQ ID NO: 1238725 - RNA, 19 nt, Artificial Sequence
  Description of Artificial Sequence: Synthetic oligonucleotide
auagggacggccauuaugu

SEQ ID NO: 1238726 - RNA, 19 nt, Artificial Sequence
  Description of Artificial Sequence: Synthetic oligonucleotide
ggaacuuauagcgaagaag

SEQ ID NO: 1238727 - RNA, 19 nt, Artificial Sequence
  Description of Artificial Sequence: Synthetic oligonucleotide
acucaguaccucauaauuc

SEQ ID NO: 1238728 - RNA, 19 nt, Artificial Sequence
  Description of Artificial Sequence: Synthetic oligonucleotide
uacugucuuauuacuacaa

SEQ ID NO: 1238729 - RNA, 19 nt, Artificial Sequence
  Description of Artificial Sequence: Synthetic oligonucleotide
cauauuaauacaggauuuc

SEQ ID NO: 1238730 - RNA, 19 nt, Artificial Sequence
  Description of Artificial Sequence: Synthetic oligonucleotide
ugugagaguguauacuaua

SEQ ID NO: 1238731 - RNA, 19 nt, Artificial Sequence
  Description of Artificial Sequence: Synthetic oligonucleotide
agggacggccauuauguuc

SEQ ID NO: 1238732 - RNA, 19 nt, Artificial Sequence
  Description of Artificial Sequence: Synthetic oligonucleotide
agaacaaagagccggcauu

SEQ ID NO: 1238733 - RNA, 19 nt, Artificial Sequence
  Description of Artificial Sequence: Synthetic oligonucleotide
uuaaguaauuggauccauu

SEQ ID NO: 1238734 - RNA, 19 nt, Artificial Sequence
  Description of Artificial Sequence: Synthetic oligonucleotide
ucaggaugcccaaauucgu

SEQ ID NO: 1238735 - RNA, 19 nt, Artificial Sequence
  Description of Artificial Sequence: Synthetic oligonucleotide
auuugugagaguguauacu

SEQ ID NO: 1238736 - RNA, 19 nt, Artificial Sequence
  Description of Artificial Sequence: Synthetic oligonucleotide
ucguuacccaugaaauuga

SEQ ID NO: 1238737 - RNA, 19 nt, Artificial Sequence
  Description of Artificial Sequence: Synthetic oligonucleotide
uugcuagucuauaaucaaa

SEQ ID NO: 1238738 - RNA, 19 nt, Artificial Sequence
  Description of Artificial Sequence: Synthetic oligonucleotide
cucgacuuggaauguacac

SEQ ID NO: 1238739 - RNA, 19 nt, Artificial Sequence
  Description of Artificial Sequence: Synthetic oligonucleotide
ucaguuuggcagauccaug

SEQ ID NO: 1238740 - RNA, 19 nt, Artificial Sequence
  Description of Artificial Sequence: Synthetic oligonucleotide
agcaaaguaaucaguguug

SEQ ID NO: 1238741 - RNA, 19 nt, Artificial Sequence
  Description of Artificial Sequence: Synthetic oligonucleotide
gcaguaggagaacaaagag

SEQ ID NO: 1238742 - RNA, 19 nt, Artificial Sequence
  Description of Artificial Sequence: Synthetic oligonucleotide
gcuauuguaauagaaucug

SEQ ID NO: 1238743 - RNA, 19 nt, Artificial Sequence
  Description of Artificial Sequence: Synthetic oligonucleotide
caccugagaaaccuugacc

SEQ ID NO: 1238744 - RNA, 19 nt, Artificial Sequence
  Description of Artificial Sequence: Synthetic oligonucleotide
ggcauuuacuaaaacagug

SEQ ID NO: 1238745 - RNA, 19 nt, Artificial Sequence
  Description of Artificial Sequence: Synthetic oligonucleotide
ucaugauagucaccugaga

SEQ ID NO: 1238746 - RNA, 19 nt, Artificial Sequence
  Description of Artificial Sequence: Synthetic oligonucleotide
uuuaucuggaauugccauu

SEQ ID NO: 1238747 - RNA, 19 nt, Artificial Sequence
  Description of Artificial Sequence: Synthetic oligonucleotide
auacuuugccaguaaaaua

SEQ ID NO: 1238748 - RNA, 19 nt, Artificial Sequence
  Description of Artificial Sequence: Synthetic oligonucleotide
uuuagguuacugcuacaua

SEQ ID NO: 1238749 - RNA, 19 nt, Artificial Sequence
  Description of Artificial Sequence: Synthetic oligonucleotide
uuaucgacaccguggcagc

SEQ ID NO: 1238750 - RNA, 19 nt, Artificial Sequence
  Description of Artificial Sequence: Synthetic oligonucleotide
uccaaucuauucauaucuc

SEQ ID NO: 1238751 - RNA, 19 nt, Artificial Sequence
  Description of Artificial Sequence: Synthetic oligonucleotide
auuccgcggcaucugaauc

SEQ ID NO: 1238752 - RNA, 19 nt, Artificial Sequence
  Description of Artificial Sequence: Synthetic oligonucleotide
uucacgacacacuuugcua

SEQ ID NO: 1238753 - RNA, 19 nt, Artificial Sequence
  Description of Artificial Sequence: Synthetic oligonucleotide
uuacugcuacauauuaaua

SEQ ID NO: 1238754 - RNA, 19 nt, Artificial Sequence
  Description of Artificial Sequence: Synthetic oligonucleotide
uuguggucuagucucuggu

SEQ ID NO: 1238755 - RNA, 19 nt, Artificial Sequence
  Description of Artificial Sequence: Synthetic oligonucleotide
guuacugcuacauauuaau

SEQ ID NO: 1238756 - RNA, 19 nt, Artificial Sequence
  Description of Artificial Sequence: Synthetic oligonucleotide
guauuccucgaucaauaac

SEQ ID NO: 1238757 - RNA, 19 nt, Artificial Sequence
  Description of Artificial Sequence: Synthetic oligonucleotide
uuggauccauuuaucugga

SEQ ID NO: 1238758 - RNA, 19 nt, Artificial Sequence
  Description of Artificial Sequence: Synthetic oligonucleotide
uuccgcggcaucugaaucc

SEQ ID NO: 1238759 - RNA, 19 nt, Artificial Sequence
  Description of Artificial Sequence: Synthetic oligonucleotide
cugaauaucggcauuuacu

SEQ ID NO: 1238760 - RNA, 19 nt, Artificial Sequence
  Description of Artificial Sequence: Synthetic oligonucleotide
uauucaugauagucaccug

SEQ ID NO: 1238761 - RNA, 19 nt, Artificial Sequence
  Description of Artificial Sequence: Synthetic oligonucleotide
gaugcccaaauucguuacc

SEQ ID NO: 1238762 - RNA, 19 nt, Artificial Sequence
  Description of Artificial Sequence: Synthetic oligonucleotide
caacuuguaguccaaaaua

SEQ ID NO: 1238763 - RNA, 19 nt, Artificial Sequence
  Description of Artificial Sequence: Synthetic oligonucleotide
gggaagucuaaccacucag

SEQ ID NO: 1238764 - RNA, 19 nt, Artificial Sequence
  Description of Artificial Sequence: Synthetic oligonucleotide
ucaagguagcgucgauuug

SEQ ID NO: 1238765 - RNA, 19 nt, Artificial Sequence
  Description of Artificial Sequence: Synthetic oligonucleotide
uuuaaguaauuggauccau

SEQ ID NO: 1238766 - RNA, 19 nt, Artificial Sequence
  Description of Artificial Sequence: Synthetic oligonucleotide
uugcccauauuccagucuu

SEQ ID NO: 1238767 - RNA, 19 nt, Artificial Sequence
  Description of Artificial Sequence: Synthetic oligonucleotide
uccugcucucucaaaggug

SEQ ID NO: 1238768 - RNA, 19 nt, Artificial Sequence
  Description of Artificial Sequence: Synthetic oligonucleotide
gagccggcauuccugauac

SEQ ID NO: 1238769 - RNA, 19 nt, Artificial Sequence
  Description of Artificial Sequence: Synthetic oligonucleotide
aauugccauugcuagucua

SEQ ID NO: 1238770 - RNA, 19 nt, Artificial Sequence
  Description of Artificial Sequence: Synthetic oligonucleotide
acugucuuauuacuacaaa

SEQ ID NO: 1238771 - RNA, 19 nt, Artificial Sequence
  Description of Artificial Sequence: Synthetic oligonucleotide
uuauagcgaagaaggucgu

SEQ ID NO: 1238772 - RNA, 19 nt, Artificial Sequence
  Description of Artificial Sequence: Synthetic oligonucleotide
cagcauagcucuugcuugg

SEQ ID NO: 1238773 - RNA, 19 nt, Artificial Sequence
  Description of Artificial Sequence: Synthetic oligonucleotide
uuaucgccaaccagugccu

SEQ ID NO: 1238774 - RNA, 19 nt, Artificial Sequence
  Description of Artificial Sequence: Synthetic oligonucleotide
ucaguguuguggucuaguc

SEQ ID NO: 1238775 - RNA, 19 nt, Artificial Sequence
  Description of Artificial Sequence: Synthetic oligonucleotide
acauauuaauacaggauuu

SEQ ID NO: 1238776 - RNA, 19 nt, Artificial Sequence
  Description of Artificial Sequence: Synthetic oligonucleotide
aacuuauagcgaagaaggu

SEQ ID NO: 1238777 - RNA, 19 nt, Artificial Sequence
  Description of Artificial Sequence: Synthetic oligonucleotide
caaaguaaucaguguugug

SEQ ID NO: 1238778 - RNA, 19 nt, Artificial Sequence
  Description of Artificial Sequence: Synthetic oligonucleotide
ucagaccaauagacacugg

SEQ ID NO: 1238779 - RNA, 19 nt, Artificial Sequence
  Description of Artificial Sequence: Synthetic oligonucleotide
uugugagaguguauacuau

SEQ ID NO: 1238780 - RNA, 19 nt, Artificial Sequence
  Description of Artificial Sequence: Synthetic oligonucleotide
uugagauauccuucuccac

SEQ ID NO: 1238781 - RNA, 19 nt, Artificial Sequence
  Description of Artificial Sequence: Synthetic oligonucleotide
acuggaauaaggccaccaa

SEQ ID NO: 1238782 - RNA, 19 nt, Artificial Sequence
  Description of Artificial Sequence: Synthetic oligonucleotide
aauuaccauuucaagucau

SEQ ID NO: 1238783 - RNA, 19 nt, Artificial Sequence
  Description of Artificial Sequence: Synthetic oligonucleotide
guaguccaaaauauucaug

SEQ ID NO: 1238784 - RNA, 19 nt, Artificial Sequence
  Description of Artificial Sequence: Synthetic oligonucleotide
gcauuaucgacaccguggc

SEQ ID NO: 1238785 - RNA, 19 nt, Artificial Sequence
  Description of Artificial Sequence: Synthetic oligonucleotide
auuuaggaacuuauagcga

SEQ ID NO: 1238786 - RNA, 19 nt, Artificial Sequence
  Description of Artificial Sequence: Synthetic oligonucleotide
gaauaucggcauuuacuaa

SEQ ID NO: 1238787 - RNA, 19 nt, Artificial Sequence
  Description of Artificial Sequence: Synthetic oligonucleotide
uaucggcauuuacuaaaac

SEQ ID NO: 1238788 - RNA, 19 nt, Artificial Sequence
  Description of Artificial Sequence: Synthetic oligonucleotide
cagaccaauagacacugga

SEQ ID NO: 1238789 - RNA, 19 nt, Artificial Sequence
  Description of Artificial Sequence: Synthetic oligonucleotide
guagcgucgauuugugaga

SEQ ID NO: 1238790 - RNA, 19 nt, Artificial Sequence
  Description of Artificial Sequence: Synthetic oligonucleotide
guaauuggauccauuuauc

SEQ ID NO: 1238791 - RNA, 19 nt, Artificial Sequence
  Description of Artificial Sequence: Synthetic oligonucleotide
uggaauugccauugcuagu

SEQ ID NO: 1238792 - RNA, 19 nt, Artificial Sequence
  Description of Artificial Sequence: Synthetic oligonucleotide
agguuacugcuacauauua

SEQ ID NO: 1238793 - RNA, 19 nt, Artificial Sequence
  Description of Artificial Sequence: Synthetic oligonucleotide
cgcauuaucgacaccgugg

SEQ ID NO: 1238794 - RNA, 19 nt, Artificial Sequence
  Description of Artificial Sequence: Synthetic oligonucleotide
cacucgacuuggaauguac

SEQ ID NO: 1238795 - RNA, 19 nt, Artificial Sequence
  Description of Artificial Sequence: Synthetic oligonucleotide
agugccugaucauggcucu

SEQ ID NO: 1238796 - RNA, 19 nt, Artificial Sequence
  Description of Artificial Sequence: Synthetic oligonucleotide
uauuccgcggcaucugaau

SEQ ID NO: 1238797 - RNA, 19 nt, Artificial Sequence
  Description of Artificial Sequence: Synthetic oligonucleotide
cacuuugcuaguauuuuaa

SEQ ID NO: 1238798 - RNA, 19 nt, Artificial Sequence
  Description of Artificial Sequence: Synthetic oligonucleotide
ugcccaaauucguuaccca

SEQ ID NO: 1238799 - RNA, 19 nt, Artificial Sequence
  Description of Artificial Sequence: Synthetic oligonucleotide
aggccgacccguuugugug

SEQ ID NO: 1238800 - RNA, 19 nt, Artificial Sequence
  Description of Artificial Sequence: Synthetic oligonucleotide
guaacucucauuauucccu

SEQ ID NO: 1238801 - RNA, 19 nt, Artificial Sequence
  Description of Artificial Sequence: Synthetic oligonucleotide
uagcgucgauuugugagag

SEQ ID NO: 1238802 - RNA, 19 nt, Artificial Sequence
  Description of Artificial Sequence: Synthetic oligonucleotide
aagguagcgucgauuugug

SEQ ID NO: 1238803 - RNA, 19 nt, Artificial Sequence
  Description of Artificial Sequence: Synthetic oligonucleotide
guaggagaacaaagagccg

SEQ ID NO: 1238804 - RNA, 19 nt, Artificial Sequence
  Description of Artificial Sequence: Synthetic oligonucleotide
uguggagcugaaagccaac

SEQ ID NO: 1238805 - RNA, 19 nt, Artificial Sequence
  Description of Artificial Sequence: Synthetic oligonucleotide
agcgucuuaucgccaacca

SEQ ID NO: 1238806 - RNA, 19 nt, Artificial Sequence
  Description of Artificial Sequence: Synthetic oligonucleotide
guaaucaguguuguggucu

SEQ ID NO: 1238807 - RNA, 19 nt, Artificial Sequence
  Description of Artificial Sequence: Synthetic oligonucleotide
guacaccaaaagagaauag

SEQ ID NO: 1238808 - RNA, 19 nt, Artificial Sequence
  Description of Artificial Sequence: Synthetic oligonucleotide
gaucaauaacuggagugaa

SEQ ID NO: 1238809 - RNA, 19 nt, Artificial Sequence
  Description of Artificial Sequence: Synthetic oligonucleotide
uaaugagccgaaucaucuu

SEQ ID NO: 1238810 - RNA, 19 nt, Artificial Sequence
  Description of Artificial Sequence: Synthetic oligonucleotide
gaaggucgucaucaguuaa

SEQ ID NO: 1238811 - RNA, 19 nt, Artificial Sequence
  Description of Artificial Sequence: Synthetic oligonucleotide
cucugcuauuguaauagaa

SEQ ID NO: 1238812 - RNA, 19 nt, Artificial Sequence
  Description of Artificial Sequence: Synthetic oligonucleotide
ucgauuugugagaguguau

SEQ ID NO: 1238813 - RNA, 19 nt, Artificial Sequence
  Description of Artificial Sequence: Synthetic oligonucleotide
auuccucgaucaauaacug

SEQ ID NO: 1238814 - RNA, 19 nt, Artificial Sequence
  Description of Artificial Sequence: Synthetic oligonucleotide
agaaggucgucaucaguua

SEQ ID NO: 1238815 - RNA, 19 nt, Artificial Sequence
  Description of Artificial Sequence: Synthetic oligonucleotide
aaucaguguuguggucuag

SEQ ID NO: 1238816 - RNA, 19 nt, Artificial Sequence
  Description of Artificial Sequence: Synthetic oligonucleotide
uccgcauuaucgacaccgu

SEQ ID NO: 1238817 - RNA, 19 nt, Artificial Sequence
  Description of Artificial Sequence: Synthetic oligonucleotide
ucgacaccguggcagcaga

SEQ ID NO: 1238818 - RNA, 19 nt, Artificial Sequence
  Description of Artificial Sequence: Synthetic oligonucleotide
gucuaaccacucaggaugc

SEQ ID NO: 1238819 - RNA, 19 nt, Artificial Sequence
  Description of Artificial Sequence: Synthetic oligonucleotide
caguaccucauaauucaga

SEQ ID NO: 1238820 - RNA, 19 nt, Artificial Sequence
  Description of Artificial Sequence: Synthetic oligonucleotide
agaccaauagacacuggaa

SEQ ID NO: 1238821 - RNA, 19 nt, Artificial Sequence
  Description of Artificial Sequence: Synthetic oligonucleotide
uagcgaagaaggucgucau

SEQ ID NO: 1238822 - RNA, 19 nt, Artificial Sequence
  Description of Artificial Sequence: Synthetic oligonucleotide
agauuacaagauaaagcuu

SEQ ID NO: 1238823 - RNA, 19 nt, Artificial Sequence
  Description of Artificial Sequence: Synthetic oligonucleotide
cagaacacucauguucgug

SEQ ID NO: 1238824 - RNA, 19 nt, Artificial Sequence
  Description of Artificial Sequence: Synthetic oligonucleotide
aaccacucaggaugcccaa

SEQ ID NO: 1238825 - RNA, 19 nt, Artificial Sequence
  Description of Artificial Sequence: Synthetic oligonucleotide
gcgucgauuugugagagug

SEQ ID NO: 1238826 - RNA, 19 nt, Artificial Sequence
  Description of Artificial Sequence: Synthetic oligonucleotide
acucgguagucagcauagc

SEQ ID NO: 1238827 - RNA, 19 nt, Artificial Sequence
  Description of Artificial Sequence: Synthetic oligonucleotide
agucccaacucgguaguca

SEQ ID NO: 1238828 - RNA, 19 nt, Artificial Sequence
  Description of Artificial Sequence: Synthetic oligonucleotide
agcauagcucuugcuuggg

SEQ ID NO: 1238829 - RNA, 19 nt, Artificial Sequence
  Description of Artificial Sequence: Synthetic oligonucleotide
auaucggcauuuacuaaaa

SEQ ID NO: 1238830 - RNA, 19 nt, Artificial Sequence
  Description of Artificial Sequence: Synthetic oligonucleotide
ugcuagcgucuuaucgcca

SEQ ID NO: 1238831 - RNA, 19 nt, Artificial Sequence
  Description of Artificial Sequence: Synthetic oligonucleotide
gggacggccauuauguuca

SEQ ID NO: 1238832 - RNA, 19 nt, Artificial Sequence
  Description of Artificial Sequence: Synthetic oligonucleotide
augaucuuauugccuucau

SEQ ID NO: 1238833 - RNA, 19 nt, Artificial Sequence
  Description of Artificial Sequence: Synthetic oligonucleotide
guuacccaugaaauugaga

SEQ ID NO: 1238834 - RNA, 19 nt, Artificial Sequence
  Description of Artificial Sequence: Synthetic oligonucleotide
agagccggcauuccugaua

SEQ ID NO: 1238835 - RNA, 19 nt, Artificial Sequence
  Description of Artificial Sequence: Synthetic oligonucleotide
ucuaaccacucaggaugcc

SEQ ID NO: 1238836 - RNA, 19 nt, Artificial Sequence
  Description of Artificial Sequence: Synthetic oligonucleotide
gcaagacugaauaucggca

SEQ ID NO: 1238837 - RNA, 19 nt, Artificial Sequence
  Description of Artificial Sequence: Synthetic oligonucleotide
uauagcgaagaaggucguc

SEQ ID NO: 1238838 - RNA, 19 nt, Artificial Sequence
  Description of Artificial Sequence: Synthetic oligonucleotide
gucgauuugugagagugua

SEQ ID NO: 1238839 - RNA, 19 nt, Artificial Sequence
  Description of Artificial Sequence: Synthetic oligonucleotide
gagaacaaagagccggcau

SEQ ID NO: 1238840 - RNA, 19 nt, Artificial Sequence
  Description of Artificial Sequence: Synthetic oligonucleotide
acacacuuugcuaguauuu

SEQ ID NO: 1238841 - RNA, 19 nt, Artificial Sequence
  Description of Artificial Sequence: Synthetic oligonucleotide
cauauuccgcggcaucuga

SEQ ID NO: 1238842 - RNA, 19 nt, Artificial Sequence
  Description of Artificial Sequence: Synthetic oligonucleotide
aggcaggccgacccguuug

SEQ ID NO: 1238843 - RNA, 19 nt, Artificial Sequence
  Description of Artificial Sequence: Synthetic oligonucleotide
uccgcggcaucugaaucca

SEQ ID NO: 1238844 - RNA, 19 nt, Artificial Sequence
  Description of Artificial Sequence: Synthetic oligonucleotide
accaaaaugcuagcgucuu

SEQ ID NO: 1238845 - RNA, 19 nt, Artificial Sequence
  Description of Artificial Sequence: Synthetic oligonucleotide
aggucgucaucaguuaaau

SEQ ID NO: 1238846 - RNA, 19 nt, Artificial Sequence
  Description of Artificial Sequence: Synthetic oligonucleotide
aucgccaaccagugccuga

SEQ ID NO: 1238847 - RNA, 19 nt, Artificial Sequence
  Description of Artificial Sequence: Synthetic oligonucleotide
augagccgaaucaucuugu

SEQ ID NO: 1238848 - RNA, 19 nt, Artificial Sequence
  Description of Artificial Sequence: Synthetic oligonucleotide
cuagcgucuuaucgccaac

SEQ ID NO: 1238849 - RNA, 19 nt, Artificial Sequence
  Description of Artificial Sequence: Synthetic oligonucleotide
cuguggagcugaaagccaa

SEQ ID NO: 1238850 - RNA, 19 nt, Artificial Sequence
  Description of Artificial Sequence: Synthetic oligonucleotide
auacuauauugcccauauu

SEQ ID NO: 1238851 - RNA, 19 nt, Artificial Sequence
  Description of Artificial Sequence: Synthetic oligonucleotide
gcggcaucugaauccagug

SEQ ID NO: 1238852 - RNA, 19 nt, Artificial Sequence
  Description of Artificial Sequence: Synthetic oligonucleotide
auccucugcuauuguaaua

SEQ ID NO: 1238853 - RNA, 19 nt, Artificial Sequence
  Description of Artificial Sequence: Synthetic oligonucleotide
acucgacuuggaauguaca

SEQ ID NO: 1238854 - RNA, 19 nt, Artificial Sequence
  Description of Artificial Sequence: Synthetic oligonucleotide
ggauccauuuaucuggaau

SEQ ID NO: 1238855 - RNA, 19 nt, Artificial Sequence
  Description of Artificial Sequence: Synthetic oligonucleotide
uugccaacaugagguaaau

SEQ ID NO: 1238856 - RNA, 19 nt, Artificial Sequence
  Description of Artificial Sequence: Synthetic oligonucleotide
uaucgccaaccagugccug

SEQ ID NO: 1238857 - RNA, 19 nt, Artificial Sequence
  Description of Artificial Sequence: Synthetic oligonucleotide
ggauacaaugugugagcca

SEQ ID NO: 1238858 - RNA, 19 nt, Artificial Sequence
  Description of Artificial Sequence: Synthetic oligonucleotide
caagguagcgucgauuugu

SEQ ID NO: 1238859 - RNA, 19 nt, Artificial Sequence
  Description of Artificial Sequence: Synthetic oligonucleotide
agcuuccgcauuaucgaca

SEQ ID NO: 1238860 - RNA, 19 nt, Artificial Sequence
  Description of Artificial Sequence: Synthetic oligonucleotide
caacucgguagucagcaua

SEQ ID NO: 1238861 - RNA, 19 nt, Artificial Sequence
  Description of Artificial Sequence: Synthetic oligonucleotide
aucaugcaugaugaauaau

SEQ ID NO: 1238862 - RNA, 19 nt, Artificial Sequence
  Description of Artificial Sequence: Synthetic oligonucleotide
gaauugccauugcuagucu

SEQ ID NO: 1238863 - RNA, 19 nt, Artificial Sequence
  Description of Artificial Sequence: Synthetic oligonucleotide
agguagcgucgauuuguga

SEQ ID NO: 1238864 - RNA, 19 nt, Artificial Sequence
  Description of Artificial Sequence: Synthetic oligonucleotide
uaucgacaccguggcagca

SEQ ID NO: 1238865 - RNA, 19 nt, Artificial Sequence
  Description of Artificial Sequence: Synthetic oligonucleotide
gcccaugaguaaugagccg

SEQ ID NO: 1238866 - RNA, 19 nt, Artificial Sequence
  Description of Artificial Sequence: Synthetic oligonucleotide
guauacuauauugcccaua

SEQ ID NO: 1238867 - RNA, 19 nt, Artificial Sequence
  Description of Artificial Sequence: Synthetic oligonucleotide
ggucuagucucuggugucc

SEQ ID NO: 1238868 - RNA, 19 nt, Artificial Sequence
  Description of Artificial Sequence: Synthetic oligonucleotide
cuccuggcguaaugguaac

SEQ ID NO: 1238869 - RNA, 19 nt, Artificial Sequence
  Description of Artificial Sequence: Synthetic oligonucleotide
ucgccaaccagugccugau

SEQ ID NO: 1238870 - RNA, 19 nt, Artificial Sequence
  Description of Artificial Sequence: Synthetic oligonucleotide
gugagaguguauacuauau

SEQ ID NO: 1238871 - RNA, 19 nt, Artificial Sequence
  Description of Artificial Sequence: Synthetic oligonucleotide
cucgaucaauaacuggagu

SEQ ID NO: 1238872 - RNA, 19 nt, Artificial Sequence
  Description of Artificial Sequence: Synthetic oligonucleotide
gguuacugcuacauauuaa

SEQ ID NO: 1238873 - RNA, 19 nt, Artificial Sequence
  Description of Artificial Sequence: Synthetic oligonucleotide
cauuaucgacaccguggca

SEQ ID NO: 1238874 - RNA, 19 nt, Artificial Sequence
  Description of Artificial Sequence: Synthetic oligonucleotide
uccuggcguaaugguaacu

SEQ ID NO: 1238875 - RNA, 19 nt, Artificial Sequence
  Description of Artificial Sequence: Synthetic oligonucleotide
caguguuguggucuagucu

SEQ ID NO: 1238876 - RNA, 19 nt, Artificial Sequence
  Description of Artificial Sequence: Synthetic oligonucleotide
cuuccgcauuaucgacacc

SEQ ID NO: 1238877 - RNA, 19 nt, Artificial Sequence
  Description of Artificial Sequence: Synthetic oligonucleotide
agcgucgauuugugagagu

SEQ ID NO: 1238878 - RNA, 19 nt, Artificial Sequence
  Description of Artificial Sequence: Synthetic oligonucleotide
ccaaucuauucauaucucu

SEQ ID NO: 1238879 - RNA, 19 nt, Artificial Sequence
  Description of Artificial Sequence: Synthetic oligonucleotide
uagggacggccauuauguu

SEQ ID NO: 1238880 - RNA, 19 nt, Artificial Sequence
  Description of Artificial Sequence: Synthetic oligonucleotide
auauuccgcggcaucugaa

SEQ ID NO: 1238881 - RNA, 19 nt, Artificial Sequence
  Description of Artificial Sequence: Synthetic oligonucleotide
caucuuguggagcuguauu

SEQ ID NO: 1238882 - RNA, 19 nt, Artificial Sequence
  Description of Artificial Sequence: Synthetic oligonucleotide
gcuagcgucuuaucgccaa

SEQ ID NO: 1238883 - RNA, 19 nt, Artificial Sequence
  Description of Artificial Sequence: Synthetic oligonucleotide
cccaugaguaaugagccga

SEQ ID NO: 1238884 - RNA, 19 nt, Artificial Sequence
  Description of Artificial Sequence: Synthetic oligonucleotide
ccuccuggcguaaugguaa

SEQ ID NO: 1238885 - RNA, 19 nt, Artificial Sequence
  Description of Artificial Sequence: Synthetic oligonucleotide
cguuacccaugaaauugag

SEQ ID NO: 1238886 - RNA, 19 nt, Artificial Sequence
  Description of Artificial Sequence: Synthetic oligonucleotide
gcaaagcuuccgcauuauc

SEQ ID NO: 1238887 - RNA, 19 nt, Artificial Sequence
  Description of Artificial Sequence: Synthetic oligonucleotide
ggaugagagccacucgacu

SEQ ID NO: 1238888 - RNA, 19 nt, Artificial Sequence
  Description of Artificial Sequence: Synthetic oligonucleotide
gcccauauuccagucuuca

SEQ ID NO: 1238889 - RNA, 19 nt, Artificial Sequence
  Description of Artificial Sequence: Synthetic oligonucleotide
ggagaacaaagagccggca

SEQ ID NO: 1238890 - RNA, 19 nt, Artificial Sequence
  Description of Artificial Sequence: Synthetic oligonucleotide
ccggcauuccugauacauc

SEQ ID NO: 1238891 - RNA, 19 nt, Artificial Sequence
  Description of Artificial Sequence: Synthetic oligonucleotide
cggcaucugaauccagugc

SEQ ID NO: 1238892 - RNA, 19 nt, Artificial Sequence
  Description of Artificial Sequence: Synthetic oligonucleotide
gagaauagggacggccauu

SEQ ID NO: 1238893 - RNA, 19 nt, Artificial Sequence
  Description of Artificial Sequence: Synthetic oligonucleotide
ccgcauuaucgacaccgug

SEQ ID NO: 1238894 - RNA, 19 nt, Artificial Sequence
  Description of Artificial Sequence: Synthetic oligonucleotide
cccaugaaauugagauauc

SEQ ID NO: 1238895 - RNA, 19 nt, Artificial Sequence
  Description of Artificial Sequence: Synthetic oligonucleotide
caggccgacccguuugugu

SEQ ID NO: 1238896 - RNA, 19 nt, Artificial Sequence
  Description of Artificial Sequence: Synthetic oligonucleotide
cgauuugugagaguguaua

SEQ ID NO: 1238897 - RNA, 19 nt, Artificial Sequence
  Description of Artificial Sequence: Synthetic oligonucleotide
ccaugaguaaugagccgaa

SEQ ID NO: 1238898 - RNA, 19 nt, Artificial Sequence
  Description of Artificial Sequence: Synthetic oligonucleotide
gcucucugcauaagcaaua

SEQ ID NO: 1238899 - RNA, 19 nt, Artificial Sequence
  Description of Artificial Sequence: Synthetic oligonucleotide
gccgacccguuugugugag

SEQ ID NO: 1238900 - RNA, 19 nt, Artificial Sequence
  Description of Artificial Sequence: Synthetic oligonucleotide
gagccagaacacucauguu

SEQ ID NO: 1238901 - RNA, 19 nt, Artificial Sequence
  Description of Artificial Sequence: Synthetic oligonucleotide
ccguuugugugaggugggc

SEQ ID NO: 1238902 - RNA, 19 nt, Artificial Sequence
  Description of Artificial Sequence: Synthetic oligonucleotide
caccaagcccaugaguaau

SEQ ID NO: 1238903 - RNA, 19 nt, Artificial Sequence
  Description of Artificial Sequence: Synthetic oligonucleotide
gccggcauuccugauacau

SEQ ID NO: 1238904 - RNA, 19 nt, Artificial Sequence
  Description of Artificial Sequence: Synthetic oligonucleotide
ggccgacccguuuguguga

SEQ ID NO: 1238905 - RNA, 19 nt, Artificial Sequence
  Description of Artificial Sequence: Synthetic oligonucleotide
ggucgucaucaguuaaauu

SEQ ID NO: 1238906 - RNA, 19 nt, Artificial Sequence
  Description of Artificial Sequence: Synthetic oligonucleotide
gcguaaugguaacucucau

SEQ ID NO: 1238907 - RNA, 19 nt, Artificial Sequence
  Description of Artificial Sequence: Synthetic oligonucleotide
gugccugaucauggcucuc

SEQ ID NO: 1238908 - RNA, 19 nt, Artificial Sequence
  Description of Artificial Sequence: Synthetic oligonucleotide
cugcucucucaaaggugau

SEQ ID NO: 1238909 - RNA, 19 nt, Artificial Sequence
  Description of Artificial Sequence: Synthetic oligonucleotide
ccgacccguuugugugagg

SEQ ID NO: 1238910 - RNA, 19 nt, Artificial Sequence
  Description of Artificial Sequence: Synthetic oligonucleotide
gcaggccgacccguuugug

SEQ ID NO: 1238911 - RNA, 19 nt, Artificial Sequence
  Description of Artificial Sequence: Synthetic oligonucleotide
ggcaggccgacccguuugu

SEQ ID NO: 1238912 - RNA, 19 nt, Artificial Sequence
  Description of Artificial Sequence: Synthetic oligonucleotide
ggacggccauuauguucaa

SEQ ID NO: 1238913 - RNA, 19 nt, Artificial Sequence
  Description of Artificial Sequence: Synthetic oligonucleotide
ccagugcaauuuugaauuu

SEQ ID NO: 1238914 - RNA, 19 nt, Artificial Sequence
  Description of Artificial Sequence: Synthetic oligonucleotide
ccgcggcaucugaauccag

SEQ ID NO: 1238915 - RNA, 19 nt, Artificial Sequence
  Description of Artificial Sequence: Synthetic oligonucleotide
gccacucgacuuggaaugu

SEQ ID NO: 1238916 - RNA, 19 nt, Artificial Sequence
  Description of Artificial Sequence: Synthetic oligonucleotide
cgcggcaucugaauccagu

SEQ ID NO: 1238917 - RNA, 19 nt, Artificial Sequence
  Description of Artificial Sequence: Synthetic oligonucleotide
cgucgauuugugagagugu

SEQ ID NO: 1238918 - RNA, 19 nt, Artificial Sequence
  Description of Artificial Sequence: Synthetic oligonucleotide
cgacccguuugugugaggu

SEQ ID NO: 1238919 - RNA, 19 nt, Artificial Sequence
  Description of Artificial Sequence: Synthetic oligonucleotide
ccaacucgguagucagcau

SEQ ID NO: 1238920 - RNA, 19 nt, Artificial Sequence
  Description of Artificial Sequence: Synthetic oligonucleotide
cgccaaccagugccugauc

SEQ ID NO: 1238921 - RNA, 19 nt, Artificial Sequence
  Description of Artificial Sequence: Synthetic oligonucleotide
aagaauucuaauaaaaugc

SEQ ID NO: 1238922 - RNA, 19 nt, Artificial Sequence
  Description of Artificial Sequence: Synthetic oligonucleotide
aaaauaucuacuuucauga

SEQ ID NO: 1238923 - RNA, 19 nt, Artificial Sequence
  Description of Artificial Sequence: Synthetic oligonucleotide
acuauauagauugugaacc

SEQ ID NO: 1238924 - RNA, 19 nt, Artificial Sequence
  Description of Artificial Sequence: Synthetic oligonucleotide
aacuauuucacuacaaacc

SEQ ID NO: 1238925 - RNA, 19 nt, Artificial Sequence
  Description of Artificial Sequence: Synthetic oligonucleotide
uguaauacugaccacacug

SEQ ID NO: 1238926 - RNA, 19 nt, Artificial Sequence
  Description of Artificial Sequence: Synthetic oligonucleotide
aacuauauagauugugaac

SEQ ID NO: 1238927 - RNA, 19 nt, Artificial Sequence
  Description of Artificial Sequence: Synthetic oligonucleotide
gaauucuugagucaggcgg

SEQ ID NO: 1238928 - RNA, 19 nt, Artificial Sequence
  Description of Artificial Sequence: Synthetic oligonucleotide
uauauaauguucuucaccu

SEQ ID NO: 1238929 - RNA, 19 nt, Artificial Sequence
  Description of Artificial Sequence: Synthetic oligonucleotide
acuaaauacacacguuucc

SEQ ID NO: 1238930 - RNA, 19 nt, Artificial Sequence
  Description of Artificial Sequence: Synthetic oligonucleotide
aacuucuuauauuggaaac

SEQ ID NO: 1238931 - RNA, 19 nt, Artificial Sequence
  Description of Artificial Sequence: Synthetic oligonucleotide
aacauauaaacaaggcugc

SEQ ID NO: 1238932 - RNA, 19 nt, Artificial Sequence
  Description of Artificial Sequence: Synthetic oligonucleotide
aaaacugagagggaguggg

SEQ ID NO: 1238933 - RNA, 19 nt, Artificial Sequence
  Description of Artificial Sequence: Synthetic oligonucleotide
ucuacuuucaugaaauagu

SEQ ID NO: 1238934 - RNA, 19 nt, Artificial Sequence
  Description of Artificial Sequence: Synthetic oligonucleotide
auaguaacuauuucacuac

SEQ ID NO: 1238935 - RNA, 19 nt, Artificial Sequence
  Description of Artificial Sequence: Synthetic oligonucleotide
ugaacauauaaacaaggcu

SEQ ID NO: 1238936 - RNA, 19 nt, Artificial Sequence
  Description of Artificial Sequence: Synthetic oligonucleotide
uauauuggaaaccaaacuu

SEQ ID NO: 1238937 - RNA, 19 nt, Artificial Sequence
  Description of Artificial Sequence: Synthetic oligonucleotide
uuuaaauuacgcuuuggcu

SEQ ID NO: 1238938 - RNA, 19 nt, Artificial Sequence
  Description of Artificial Sequence: Synthetic oligonucleotide
accccaaucagcuaggcac

SEQ ID NO: 1238939 - RNA, 19 nt, Artificial Sequence
  Description of Artificial Sequence: Synthetic oligonucleotide
ucagcuaggcacaagagga

SEQ ID NO: 1238940 - RNA, 19 nt, Artificial Sequence
  Description of Artificial Sequence: Synthetic oligonucleotide
accaguuaugauuuccucc

SEQ ID NO: 1238941 - RNA, 19 nt, Artificial Sequence
  Description of Artificial Sequence: Synthetic oligonucleotide
uauaauguucuucaccugu

SEQ ID NO: 1238942 - RNA, 19 nt, Artificial Sequence
  Description of Artificial Sequence: Synthetic oligonucleotide
ugguauauaauguucuuca

SEQ ID NO: 1238943 - RNA, 19 nt, Artificial Sequence
  Description of Artificial Sequence: Synthetic oligonucleotide
ugcuuuaggaccuugccag

SEQ ID NO: 1238944 - RNA, 19 nt, Artificial Sequence
  Description of Artificial Sequence: Synthetic oligonucleotide
uucacagagaguaugggga

SEQ ID NO: 1238945 - RNA, 19 nt, Artificial Sequence
  Description of Artificial Sequence: Synthetic oligonucleotide
aaagguaaacuagugaaca

SEQ ID NO: 1238946 - RNA, 19 nt, Artificial Sequence
  Description of Artificial Sequence: Synthetic oligonucleotide
uauuggaaaccaaacuucc

SEQ ID NO: 1238947 - RNA, 19 nt, Artificial Sequence
  Description of Artificial Sequence: Synthetic oligonucleotide
aauaucuacuuucaugaaa

SEQ ID NO: 1238948 - RNA, 19 nt, Artificial Sequence
  Description of Artificial Sequence: Synthetic oligonucleotide
aaagagucucuuucggagg

SEQ ID NO: 1238949 - RNA, 19 nt, Artificial Sequence
  Description of Artificial Sequence: Synthetic oligonucleotide
ucaaccuucaguguugagg

SEQ ID NO: 1238950 - RNA, 19 nt, Artificial Sequence
  Description of Artificial Sequence: Synthetic oligonucleotide
gaaauaguaacuauuucac

SEQ ID NO: 1238951 - RNA, 19 nt, Artificial Sequence
  Description of Artificial Sequence: Synthetic oligonucleotide
ucuuauauuggaaaccaaa

SEQ ID NO: 1238952 - RNA, 19 nt, Artificial Sequence
  Description of Artificial Sequence: Synthetic oligonucleotide
ugcuauaagggacagcuga

SEQ ID NO: 1238953 - RNA, 19 nt, Artificial Sequence
  Description of Artificial Sequence: Synthetic oligonucleotide
aauucuaauaaaaugccaa

SEQ ID NO: 1238954 - RNA, 19 nt, Artificial Sequence
  Description of Artificial Sequence: Synthetic oligonucleotide
acuucuuauauuggaaacc

SEQ ID NO: 1238955 - RNA, 19 nt, Artificial Sequence
  Description of Artificial Sequence: Synthetic oligonucleotide
aguuaugauuuccuccgcc

SEQ ID NO: 1238956 - RNA, 19 nt, Artificial Sequence
  Description of Artificial Sequence: Synthetic oligonucleotide
uaacuauuucacuacaaac

SEQ ID NO: 1238957 - RNA, 19 nt, Artificial Sequence
  Description of Artificial Sequence: Synthetic oligonucleotide
auuuccuccgccuccaaac

SEQ ID NO: 1238958 - RNA, 19 nt, Artificial Sequence
  Description of Artificial Sequence: Synthetic oligonucleotide
aaagagauacauuucccaa

SEQ ID NO: 1238959 - RNA, 19 nt, Artificial Sequence
  Description of Artificial Sequence: Synthetic oligonucleotide
uucagaguuucauuggaag

SEQ ID NO: 1238960 - RNA, 19 nt, Artificial Sequence
  Description of Artificial Sequence: Synthetic oligonucleotide
uccgccuccaaacacaacc

SEQ ID NO: 1238961 - RNA, 19 nt, Artificial Sequence
  Description of Artificial Sequence: Synthetic oligonucleotide
uaaauuacgcuuuggcuga

SEQ ID NO: 1238962 - RNA, 19 nt, Artificial Sequence
  Description of Artificial Sequence: Synthetic oligonucleotide
aagacuagagcaacuugcc

SEQ ID NO: 1238963 - RNA, 19 nt, Artificial Sequence
  Description of Artificial Sequence: Synthetic oligonucleotide
uuuguaauacugaccacac

SEQ ID NO: 1238964 - RNA, 19 nt, Artificial Sequence
  Description of Artificial Sequence: Synthetic oligonucleotide
aaauacacacguuuccuaa

SEQ ID NO: 1238965 - RNA, 19 nt, Artificial Sequence
  Description of Artificial Sequence: Synthetic oligonucleotide
cuagugaacauauaaacaa

SEQ ID NO: 1238966 - RNA, 19 nt, Artificial Sequence
  Description of Artificial Sequence: Synthetic oligonucleotide
acaagaggaacagagaaug

SEQ ID NO: 1238967 - RNA, 19 nt, Artificial Sequence
  Description of Artificial Sequence: Synthetic oligonucleotide
gauuuugugcuauaaggga

SEQ ID NO: 1238968 - RNA, 19 nt, Artificial Sequence
  Description of Artificial Sequence: Synthetic oligonucleotide
uuuauccucaugauucgug

SEQ ID NO: 1238969 - RNA, 19 nt, Artificial Sequence
  Description of Artificial Sequence: Synthetic oligonucleotide
uccauggucucaaaccagg

SEQ ID NO: 1238970 - RNA, 19 nt, Artificial Sequence
  Description of Artificial Sequence: Synthetic oligonucleotide
agauugugaaccuggugcg

SEQ ID NO: 1238971 - RNA, 19 nt, Artificial Sequence
  Description of Artificial Sequence: Synthetic oligonucleotide
uuuugugcuauaagggaca

SEQ ID NO: 1238972 - RNA, 19 nt, Artificial Sequence
  Description of Artificial Sequence: Synthetic oligonucleotide
auauuggaaaccaaacuuc

SEQ ID NO: 1238973 - RNA, 19 nt, Artificial Sequence
  Description of Artificial Sequence: Synthetic oligonucleotide
auuuugugcuauaagggac

SEQ ID NO: 1238974 - RNA, 19 nt, Artificial Sequence
  Description of Artificial Sequence: Synthetic oligonucleotide
uuuggucaugaauugggcc

SEQ ID NO: 1238975 - RNA, 19 nt, Artificial Sequence
  Description of Artificial Sequence: Synthetic oligonucleotide
auauagauugugaaccugg

SEQ ID NO: 1238976 - RNA, 19 nt, Artificial Sequence
  Description of Artificial Sequence: Synthetic oligonucleotide
gaaacugugugugugaaca

SEQ ID NO: 1238977 - RNA, 19 nt, Artificial Sequence
  Description of Artificial Sequence: Synthetic oligonucleotide
aguuuauccucaugauucg

SEQ ID NO: 1238978 - RNA, 19 nt, Artificial Sequence
  Description of Artificial Sequence: Synthetic oligonucleotide
agugcgacuuucuuguguc

SEQ ID NO: 1238979 - RNA, 19 nt, Artificial Sequence
  Description of Artificial Sequence: Synthetic oligonucleotide
agccuuguacgccauauuc

SEQ ID NO: 1238980 - RNA, 19 nt, Artificial Sequence
  Description of Artificial Sequence: Synthetic oligonucleotide
agaguuuguaauacugacc

SEQ ID NO: 1238981 - RNA, 19 nt, Artificial Sequence
  Description of Artificial Sequence: Synthetic oligonucleotide
cauuuggagaggcaggcgg

SEQ ID NO: 1238982 - RNA, 19 nt, Artificial Sequence
  Description of Artificial Sequence: Synthetic oligonucleotide
ucccucaagauaaaacuga

SEQ ID NO: 1238983 - RNA, 19 nt, Artificial Sequence
  Description of Artificial Sequence: Synthetic oligonucleotide
uaguccaggaaaacaacug

SEQ ID NO: 1238984 - RNA, 19 nt, Artificial Sequence
  Description of Artificial Sequence: Synthetic oligonucleotide
auacacacguuuccuaauc

SEQ ID NO: 1238985 - RNA, 19 nt, Artificial Sequence
  Description of Artificial Sequence: Synthetic oligonucleotide
ugcaugguauauaauguuc

SEQ ID NO: 1238986 - RNA, 19 nt, Artificial Sequence
  Description of Artificial Sequence: Synthetic oligonucleotide
ucccaauguaccuaugggc

SEQ ID NO: 1238987 - RNA, 19 nt, Artificial Sequence
  Description of Artificial Sequence: Synthetic oligonucleotide
aggaaaacaacuguuauuu

SEQ ID NO: 1238988 - RNA, 19 nt, Artificial Sequence
  Description of Artificial Sequence: Synthetic oligonucleotide
uacgcuuuggcugauuuug

SEQ ID NO: 1238989 - RNA, 19 nt, Artificial Sequence
  Description of Artificial Sequence: Synthetic oligonucleotide
aacuucccaccccauuugg

SEQ ID NO: 1238990 - RNA, 19 nt, Artificial Sequence
  Description of Artificial Sequence: Synthetic oligonucleotide
cagaucaggucguacaaag

SEQ ID NO: 1238991 - RNA, 19 nt, Artificial Sequence
  Description of Artificial Sequence: Synthetic oligonucleotide
ugauucgugugaguguugg

SEQ ID NO: 1238992 - RNA, 19 nt, Artificial Sequence
  Description of Artificial Sequence: Synthetic oligonucleotide
uauagauugugaaccuggu

SEQ ID NO: 1238993 - RNA, 19 nt, Artificial Sequence
  Description of Artificial Sequence: Synthetic oligonucleotide
aguguugugagaggccugc

SEQ ID NO: 1238994 - RNA, 19 nt, Artificial Sequence
  Description of Artificial Sequence: Synthetic oligonucleotide
ugcugaaaauauuuucaga

SEQ ID NO: 1238995 - RNA, 19 nt, Artificial Sequence
  Description of Artificial Sequence: Synthetic oligonucleotide
ucaccuguaguuuauccuc

SEQ ID NO: 1238996 - RNA, 19 nt, Artificial Sequence
  Description of Artificial Sequence: Synthetic oligonucleotide
auaucuacuuucaugaaau

SEQ ID NO: 1238997 - RNA, 19 nt, Artificial Sequence
  Description of Artificial Sequence: Synthetic oligonucleotide
cacaaccccaaucagcuag

SEQ ID NO: 1238998 - RNA, 19 nt, Artificial Sequence
  Description of Artificial Sequence: Synthetic oligonucleotide
gucaugugcggaaacacgg

SEQ ID NO: 1238999 - RNA, 19 nt, Artificial Sequence
  Description of Artificial Sequence: Synthetic oligonucleotide
cugaguaggaaaguuuugc

SEQ ID NO: 1239000 - RNA, 19 nt, Artificial Sequence
  Description of Artificial Sequence: Synthetic oligonucleotide
uucaugaaauaguaacuau

SEQ ID NO: 1239001 - RNA, 19 nt, Artificial Sequence
  Description of Artificial Sequence: Synthetic oligonucleotide
gagacuaaaagaauucuaa

SEQ ID NO: 1239002 - RNA, 19 nt, Artificial Sequence
  Description of Artificial Sequence: Synthetic oligonucleotide
uggucaagcaaccuggauu

SEQ ID NO: 1239003 - RNA, 19 nt, Artificial Sequence
  Description of Artificial Sequence: Synthetic oligonucleotide
ccaguuaugauuuccuccg

SEQ ID NO: 1239004 - RNA, 19 nt, Artificial Sequence
  Description of Artificial Sequence: Synthetic oligonucleotide
uucaccuguaguuuauccu

SEQ ID NO: 1239005 - RNA, 19 nt, Artificial Sequence
  Description of Artificial Sequence: Synthetic oligonucleotide
agcaacuugccuuuccuca

SEQ ID NO: 1239006 - RNA, 19 nt, Artificial Sequence
  Description of Artificial Sequence: Synthetic oligonucleotide
aaacugugugugugaacag

SEQ ID NO: 1239007 - RNA, 19 nt, Artificial Sequence
  Description of Artificial Sequence: Synthetic oligonucleotide
uauauagauugugaaccug

SEQ ID NO: 1239008 - RNA, 19 nt, Artificial Sequence
  Description of Artificial Sequence: Synthetic oligonucleotide
uaguaacuauuucacuaca

SEQ ID NO: 1239009 - RNA, 19 nt, Artificial Sequence
  Description of Artificial Sequence: Synthetic oligonucleotide
aaaguagcuggguagccua

SEQ ID NO: 1239010 - RNA, 19 nt, Artificial Sequence
  Description of Artificial Sequence: Synthetic oligonucleotide
cuugcagagagcccugccg

SEQ ID NO: 1239011 - RNA, 19 nt, Artificial Sequence
  Description of Artificial Sequence: Synthetic oligonucleotide
cugguaaguguugugagag

SEQ ID NO: 1239012 - RNA, 19 nt, Artificial Sequence
  Description of Artificial Sequence: Synthetic oligonucleotide
aagguaaacuagugaacau

SEQ ID NO: 1239013 - RNA, 19 nt, Artificial Sequence
  Description of Artificial Sequence: Synthetic oligonucleotide
uuggagagaugucugaauu

SEQ ID NO: 1239014 - RNA, 19 nt, Artificial Sequence
  Description of Artificial Sequence: Synthetic oligonucleotide
ucugaaacuguguguguga

SEQ ID NO: 1239015 - RNA, 19 nt, Artificial Sequence
  Description of Artificial Sequence: Synthetic oligonucleotide
gugaacauauaaacaaggc

SEQ ID NO: 1239016 - RNA, 19 nt, Artificial Sequence
  Description of Artificial Sequence: Synthetic oligonucleotide
gauucguugggccuugaga

SEQ ID NO: 1239017 - RNA, 19 nt, Artificial Sequence
  Description of Artificial Sequence: Synthetic oligonucleotide
cucaugauucgugugagug

SEQ ID NO: 1239018 - RNA, 19 nt, Artificial Sequence
  Description of Artificial Sequence: Synthetic oligonucleotide
uaaguguugugagaggccu

SEQ ID NO: 1239019 - RNA, 19 nt, Artificial Sequence
  Description of Artificial Sequence: Synthetic oligonucleotide
ugcuucacaugcucuggcg

SEQ ID NO: 1239020 - RNA, 19 nt, Artificial Sequence
  Description of Artificial Sequence: Synthetic oligonucleotide
uccaggaaaacaacuguua

SEQ ID NO: 1239021 - RNA, 19 nt, Artificial Sequence
  Description of Artificial Sequence: Synthetic oligonucleotide
aauacugaccacacuggcu

SEQ ID NO: 1239022 - RNA, 19 nt, Artificial Sequence
  Description of Artificial Sequence: Synthetic oligonucleotide
uacaaaguagcuggguagc

SEQ ID NO: 1239023 - RNA, 19 nt, Artificial Sequence
  Description of Artificial Sequence: Synthetic oligonucleotide
gaucaggucguacaaagua

SEQ ID NO: 1239024 - RNA, 19 nt, Artificial Sequence
  Description of Artificial Sequence: Synthetic oligonucleotide
agguaugaagacagcaucg

SEQ ID NO: 1239025 - RNA, 19 nt, Artificial Sequence
  Description of Artificial Sequence: Synthetic oligonucleotide
guaacuauuucacuacaaa

SEQ ID NO: 1239026 - RNA, 19 nt, Artificial Sequence
  Description of Artificial Sequence: Synthetic oligonucleotide
caaguuuccaaugcuuuag

SEQ ID NO: 1239027 - RNA, 19 nt, Artificial Sequence
  Description of Artificial Sequence: Synthetic oligonucleotide
uggguagccuagaagccag

SEQ ID NO: 1239028 - RNA, 19 nt, Artificial Sequence
  Description of Artificial Sequence: Synthetic oligonucleotide
uaucuuuucagaguuucau

SEQ ID NO: 1239029 - RNA, 19 nt, Artificial Sequence
  Description of Artificial Sequence: Synthetic oligonucleotide
gaauucuaauaaaaugcca

SEQ ID NO: 1239030 - RNA, 19 nt, Artificial Sequence
  Description of Artificial Sequence: Synthetic oligonucleotide
acagagaaugaaggugugc

SEQ ID NO: 1239031 - RNA, 19 nt, Artificial Sequence
  Description of Artificial Sequence: Synthetic oligonucleotide
ugugugugaacagugcgac

SEQ ID NO: 1239032 - RNA, 19 nt, Artificial Sequence
  Description of Artificial Sequence: Synthetic oligonucleotide
uaaaacugagagggagugg

SEQ ID NO: 1239033 - RNA, 19 nt, Artificial Sequence
  Description of Artificial Sequence: Synthetic oligonucleotide
auauaauguucuucaccug

SEQ ID NO: 1239034 - RNA, 19 nt, Artificial Sequence
  Description of Artificial Sequence: Synthetic oligonucleotide
guuugcaaacggcuccugg

SEQ ID NO: 1239035 - RNA, 19 nt, Artificial Sequence
  Description of Artificial Sequence: Synthetic oligonucleotide
guaccuaugggccagugaa

SEQ ID NO: 1239036 - RNA, 19 nt, Artificial Sequence
  Description of Artificial Sequence: Synthetic oligonucleotide
augggaauguggcacccuc

SEQ ID NO: 1239037 - RNA, 19 nt, Artificial Sequence
  Description of Artificial Sequence: Synthetic oligonucleotide
ucaugaauugggcccagau

SEQ ID NO: 1239038 - RNA, 19 nt, Artificial Sequence
  Description of Artificial Sequence: Synthetic oligonucleotide
ccagauaccaacuuugguc

SEQ ID NO: 1239039 - RNA, 19 nt, Artificial Sequence
  Description of Artificial Sequence: Synthetic oligonucleotide
uucgugugaguguuggaga

SEQ ID NO: 1239040 - RNA, 19 nt, Artificial Sequence
  Description of Artificial Sequence: Synthetic oligonucleotide
ucaugauucgugugagugu

SEQ ID NO: 1239041 - RNA, 19 nt, Artificial Sequence
  Description of Artificial Sequence: Synthetic oligonucleotide
agcuucaagucugaaacug

SEQ ID NO: 1239042 - RNA, 19 nt, Artificial Sequence
  Description of Artificial Sequence: Synthetic oligonucleotide
ucaugugcggaaacacggc

SEQ ID NO: 1239043 - RNA, 19 nt, Artificial Sequence
  Description of Artificial Sequence: Synthetic oligonucleotide
uccagauaccaacuuuggu

SEQ ID NO: 1239044 - RNA, 19 nt, Artificial Sequence
  Description of Artificial Sequence: Synthetic oligonucleotide
aguuucggauucguugggc

SEQ ID NO: 1239045 - RNA, 19 nt, Artificial Sequence
  Description of Artificial Sequence: Synthetic oligonucleotide
cccaauguaccuaugggcc

SEQ ID NO: 1239046 - RNA, 19 nt, Artificial Sequence
  Description of Artificial Sequence: Synthetic oligonucleotide
ugguaaguguugugagagg

SEQ ID NO: 1239047 - RNA, 19 nt, Artificial Sequence
  Description of Artificial Sequence: Synthetic oligonucleotide
cagguaugaagacagcauc

SEQ ID NO: 1239048 - RNA, 19 nt, Artificial Sequence
  Description of Artificial Sequence: Synthetic oligonucleotide
caaugcuuuaggaccuugc

SEQ ID NO: 1239049 - RNA, 19 nt, Artificial Sequence
  Description of Artificial Sequence: Synthetic oligonucleotide
cuucuuauauuggaaacca

SEQ ID NO: 1239050 - RNA, 19 nt, Artificial Sequence
  Description of Artificial Sequence: Synthetic oligonucleotide
cacacguuuccuaauccug

SEQ ID NO: 1239051 - RNA, 19 nt, Artificial Sequence
  Description of Artificial Sequence: Synthetic oligonucleotide
caugugcggaaacacggcc

SEQ ID NO: 1239052 - RNA, 19 nt, Artificial Sequence
  Description of Artificial Sequence: Synthetic oligonucleotide
augcuuuaggaccuugcca

SEQ ID NO: 1239053 - RNA, 19 nt, Artificial Sequence
  Description of Artificial Sequence: Synthetic oligonucleotide
ggucaagcaaccuggauuc

SEQ ID NO: 1239054 - RNA, 19 nt, Artificial Sequence
  Description of Artificial Sequence: Synthetic oligonucleotide
uuugugcuauaagggacag

SEQ ID NO: 1239055 - RNA, 19 nt, Artificial Sequence
  Description of Artificial Sequence: Synthetic oligonucleotide
uguaccuaugggccaguga

SEQ ID NO: 1239056 - RNA, 19 nt, Artificial Sequence
  Description of Artificial Sequence: Synthetic oligonucleotide
acacguuuccuaauccugg

SEQ ID NO: 1239057 - RNA, 19 nt, Artificial Sequence
  Description of Artificial Sequence: Synthetic oligonucleotide
gaagggguagcuccacagc

SEQ ID NO: 1239058 - RNA, 19 nt, Artificial Sequence
  Description of Artificial Sequence: Synthetic oligonucleotide
aucaggucguacaaaguag

SEQ ID NO: 1239059 - RNA, 19 nt, Artificial Sequence
  Description of Artificial Sequence: Synthetic oligonucleotide
uagagcaacuugccuuucc

SEQ ID NO: 1239060 - RNA, 19 nt, Artificial Sequence
  Description of Artificial Sequence: Synthetic oligonucleotide
acacggugcuuucuuggac

SEQ ID NO: 1239061 - RNA, 19 nt, Artificial Sequence
  Description of Artificial Sequence: Synthetic oligonucleotide
aaggccacugaaugggaau

SEQ ID NO: 1239062 - RNA, 19 nt, Artificial Sequence
  Description of Artificial Sequence: Synthetic oligonucleotide
uauccucaugauucgugug

SEQ ID NO: 1239063 - RNA, 19 nt, Artificial Sequence
  Description of Artificial Sequence: Synthetic oligonucleotide
guuucauuggaaggaagac

SEQ ID NO: 1239064 - RNA, 19 nt, Artificial Sequence
  Description of Artificial Sequence: Synthetic oligonucleotide
caaucagcuaggcacaaga

SEQ ID NO: 1239065 - RNA, 19 nt, Artificial Sequence
  Description of Artificial Sequence: Synthetic oligonucleotide
uaggaccuugccaguuucg

SEQ ID NO: 1239066 - RNA, 19 nt, Artificial Sequence
  Description of Artificial Sequence: Synthetic oligonucleotide
caugaauugggcccagauc

SEQ ID NO: 1239067 - RNA, 19 nt, Artificial Sequence
  Description of Artificial Sequence: Synthetic oligonucleotide
gaauugggcccagaucagg

SEQ ID NO: 1239068 - RNA, 19 nt, Artificial Sequence
  Description of Artificial Sequence: Synthetic oligonucleotide
ugaacagugcgacuuucuu

SEQ ID NO: 1239069 - RNA, 19 nt, Artificial Sequence
  Description of Artificial Sequence: Synthetic oligonucleotide
ugcggaaacacggccaggc

SEQ ID NO: 1239070 - RNA, 19 nt, Artificial Sequence
  Description of Artificial Sequence: Synthetic oligonucleotide
uugugaaccuggugcgggg

SEQ ID NO: 1239071 - RNA, 19 nt, Artificial Sequence
  Description of Artificial Sequence: Synthetic oligonucleotide
guugugagaggccugcauc

SEQ ID NO: 1239072 - RNA, 19 nt, Artificial Sequence
  Description of Artificial Sequence: Synthetic oligonucleotide
gaacagagaaugaaggugu

SEQ ID NO: 1239073 - RNA, 19 nt, Artificial Sequence
  Description of Artificial Sequence: Synthetic oligonucleotide
uagcuggguagccuagaag

SEQ ID NO: 1239074 - RNA, 19 nt, Artificial Sequence
  Description of Artificial Sequence: Synthetic oligonucleotide
uuucggauucguugggccu

SEQ ID NO: 1239075 - RNA, 19 nt, Artificial Sequence
  Description of Artificial Sequence: Synthetic oligonucleotide
uuuccuccgccuccaaaca

SEQ ID NO: 1239076 - RNA, 19 nt, Artificial Sequence
  Description of Artificial Sequence: Synthetic oligonucleotide
gcauagaaagaguggcugg

SEQ ID NO: 1239077 - RNA, 19 nt, Artificial Sequence
  Description of Artificial Sequence: Synthetic oligonucleotide
aauugggcccagaucaggu

SEQ ID NO: 1239078 - RNA, 19 nt, Artificial Sequence
  Description of Artificial Sequence: Synthetic oligonucleotide
gcugauuuugugcuauaag

SEQ ID NO: 1239079 - RNA, 19 nt, Artificial Sequence
  Description of Artificial Sequence: Synthetic oligonucleotide
cucagacaugacacggugc

SEQ ID NO: 1239080 - RNA, 19 nt, Artificial Sequence
  Description of Artificial Sequence: Synthetic oligonucleotide
gccaguuucggauucguug

SEQ ID NO: 1239081 - RNA, 19 nt, Artificial Sequence
  Description of Artificial Sequence: Synthetic oligonucleotide
uccucaugauucgugugag

SEQ ID NO: 1239082 - RNA, 19 nt, Artificial Sequence
  Description of Artificial Sequence: Synthetic oligonucleotide
gauaccaacuuuggucaug

SEQ ID NO: 1239083 - RNA, 19 nt, Artificial Sequence
  Description of Artificial Sequence: Synthetic oligonucleotide
uaugggccagugaauucca

SEQ ID NO: 1239084 - RNA, 19 nt, Artificial Sequence
  Description of Artificial Sequence: Synthetic oligonucleotide
ucguugggccuugagagug

SEQ ID NO: 1239085 - RNA, 19 nt, Artificial Sequence
  Description of Artificial Sequence: Synthetic oligonucleotide
cuggugguuugcaaacggc

SEQ ID NO: 1239086 - RNA, 19 nt, Artificial Sequence
  Description of Artificial Sequence: Synthetic oligonucleotide
uuuaggaccuugccaguuu

SEQ ID NO: 1239087 - RNA, 19 nt, Artificial Sequence
  Description of Artificial Sequence: Synthetic oligonucleotide
ugcaaacggcuccuggagu

SEQ ID NO: 1239088 - RNA, 19 nt, Artificial Sequence
  Description of Artificial Sequence: Synthetic oligonucleotide
uguugugagaggccugcau

SEQ ID NO: 1239089 - RNA, 19 nt, Artificial Sequence
  Description of Artificial Sequence: Synthetic oligonucleotide
agacuagagcaacuugccu

SEQ ID NO: 1239090 - RNA, 19 nt, Artificial Sequence
  Description of Artificial Sequence: Synthetic oligonucleotide
aacagagaaugaaggugug

SEQ ID NO: 1239091 - RNA, 19 nt, Artificial Sequence
  Description of Artificial Sequence: Synthetic oligonucleotide
auaccaacuuuggucauga

SEQ ID NO: 1239092 - RNA, 19 nt, Artificial Sequence
  Description of Artificial Sequence: Synthetic oligonucleotide
uuuccuaauccuggagucu

SEQ ID NO: 1239093 - RNA, 19 nt, Artificial Sequence
  Description of Artificial Sequence: Synthetic oligonucleotide
gcuuuggcugauuuugugc

SEQ ID NO: 1239094 - RNA, 19 nt, Artificial Sequence
  Description of Artificial Sequence: Synthetic oligonucleotide
agcaucgcccaggaacugc

SEQ ID NO: 1239095 - RNA, 19 nt, Artificial Sequence
  Description of Artificial Sequence: Synthetic oligonucleotide
acguuuccuaauccuggag

SEQ ID NO: 1239096 - RNA, 19 nt, Artificial Sequence
  Description of Artificial Sequence: Synthetic oligonucleotide
gagaguauggggaauggcu

SEQ ID NO: 1239097 - RNA, 19 nt, Artificial Sequence
  Description of Artificial Sequence: Synthetic oligonucleotide
gaguuucauuggaaggaag

SEQ ID NO: 1239098 - RNA, 19 nt, Artificial Sequence
  Description of Artificial Sequence: Synthetic oligonucleotide
aggaccuugccaguuucgg

SEQ ID NO: 1239099 - RNA, 19 nt, Artificial Sequence
  Description of Artificial Sequence: Synthetic oligonucleotide
uaccaguuaugauuuccuc

SEQ ID NO: 1239100 - RNA, 19 nt, Artificial Sequence
  Description of Artificial Sequence: Synthetic oligonucleotide
uauggggaauggcugcauc

SEQ ID NO: 1239101 - RNA, 19 nt, Artificial Sequence
  Description of Artificial Sequence: Synthetic oligonucleotide
cccaaaaggccacugaaug

SEQ ID NO: 1239102 - RNA, 19 nt, Artificial Sequence
  Description of Artificial Sequence: Synthetic oligonucleotide
guaaguguugugagaggcc

SEQ ID NO: 1239103 - RNA, 19 nt, Artificial Sequence
  Description of Artificial Sequence: Synthetic oligonucleotide
uuccuaauccuggagucuc

SEQ ID NO: 1239104 - RNA, 19 nt, Artificial Sequence
  Description of Artificial Sequence: Synthetic oligonucleotide
caauguaccuaugggccag

SEQ ID NO: 1239105 - RNA, 19 nt, Artificial Sequence
  Description of Artificial Sequence: Synthetic oligonucleotide
gugggcuuuuccugggucc

SEQ ID NO: 1239106 - RNA, 19 nt, Artificial Sequence
  Description of Artificial Sequence: Synthetic oligonucleotide
guuaugauuuccuccgccu

SEQ ID NO: 1239107 - RNA, 19 nt, Artificial Sequence
  Description of Artificial Sequence: Synthetic oligonucleotide
cucuggcgauacaaagucc

SEQ ID NO: 1239108 - RNA, 19 nt, Artificial Sequence
  Description of Artificial Sequence: Synthetic oligonucleotide
gcuggugguuugcaaacgg

SEQ ID NO: 1239109 - RNA, 19 nt, Artificial Sequence
  Description of Artificial Sequence: Synthetic oligonucleotide
uggcgauacaaaguccucu

SEQ ID NO: 1239110 - RNA, 19 nt, Artificial Sequence
  Description of Artificial Sequence: Synthetic oligonucleotide
agagacuaaaagaauucua

SEQ ID NO: 1239111 - RNA, 19 nt, Artificial Sequence
  Description of Artificial Sequence: Synthetic oligonucleotide
aguaacuauuucacuacaa

SEQ ID NO: 1239112 - RNA, 19 nt, Artificial Sequence
  Description of Artificial Sequence: Synthetic oligonucleotide
uucuugugucaaccuucag

SEQ ID NO: 1239113 - RNA, 19 nt, Artificial Sequence
  Description of Artificial Sequence: Synthetic oligonucleotide
agguaaacuagugaacaua

SEQ ID NO: 1239114 - RNA, 19 nt, Artificial Sequence
  Description of Artificial Sequence: Synthetic oligonucleotide
ggcgauacaaaguccucug

SEQ ID NO: 1239115 - RNA, 19 nt, Artificial Sequence
  Description of Artificial Sequence: Synthetic oligonucleotide
gauucccaaaaggccacug

SEQ ID NO: 1239116 - RNA, 19 nt, Artificial Sequence
  Description of Artificial Sequence: Synthetic oligonucleotide
aaaaggccacugaauggga

SEQ ID NO: 1239117 - RNA, 19 nt, Artificial Sequence
  Description of Artificial Sequence: Synthetic oligonucleotide
caacuguuauuucaaaagu

SEQ ID NO: 1239118 - RNA, 19 nt, Artificial Sequence
  Description of Artificial Sequence: Synthetic oligonucleotide
ggagagacuaaaagaauuc

SEQ ID NO: 1239119 - RNA, 19 nt, Artificial Sequence
  Description of Artificial Sequence: Synthetic oligonucleotide
uggucaugaauugggccca

SEQ ID NO: 1239120 - RNA, 19 nt, Artificial Sequence
  Description of Artificial Sequence: Synthetic oligonucleotide
gaaugggaauguggcaccc

SEQ ID NO: 1239121 - RNA, 19 nt, Artificial Sequence
  Description of Artificial Sequence: Synthetic oligonucleotide
agucugaaacugugugugu

SEQ ID NO: 1239122 - RNA, 19 nt, Artificial Sequence
  Description of Artificial Sequence: Synthetic oligonucleotide
cuuuccucauaguccagga

SEQ ID NO: 1239123 - RNA, 19 nt, Artificial Sequence
  Description of Artificial Sequence: Synthetic oligonucleotide
acauauaaacaaggcugca

SEQ ID NO: 1239124 - RNA, 19 nt, Artificial Sequence
  Description of Artificial Sequence: Synthetic oligonucleotide
aaacggcuccuggagucag

SEQ ID NO: 1239125 - RNA, 19 nt, Artificial Sequence
  Description of Artificial Sequence: Synthetic oligonucleotide
uucguugggccuugagagu

SEQ ID NO: 1239126 - RNA, 19 nt, Artificial Sequence
  Description of Artificial Sequence: Synthetic oligonucleotide
aggcacaugaaaucaucuu

SEQ ID NO: 1239127 - RNA, 19 nt, Artificial Sequence
  Description of Artificial Sequence: Synthetic oligonucleotide
caagcaaccuggauuccca

SEQ ID NO: 1239128 - RNA, 19 nt, Artificial Sequence
  Description of Artificial Sequence: Synthetic oligonucleotide
cccaagggaacgcuggugg

SEQ ID NO: 1239129 - RNA, 19 nt, Artificial Sequence
  Description of Artificial Sequence: Synthetic oligonucleotide
uuggcugauuuugugcuau

SEQ ID NO: 1239130 - RNA, 19 nt, Artificial Sequence
  Description of Artificial Sequence: Synthetic oligonucleotide
cuauauagauugugaaccu

SEQ ID NO: 1239131 - RNA, 19 nt, Artificial Sequence
  Description of Artificial Sequence: Synthetic oligonucleotide
acgccauauuccucaaaga

SEQ ID NO: 1239132 - RNA, 19 nt, Artificial Sequence
  Description of Artificial Sequence: Synthetic oligonucleotide
cuuguacgccauauuccuc

SEQ ID NO: 1239133 - RNA, 19 nt, Artificial Sequence
  Description of Artificial Sequence: Synthetic oligonucleotide
acugaguaggaaaguuuug

SEQ ID NO: 1239134 - RNA, 19 nt, Artificial Sequence
  Description of Artificial Sequence: Synthetic oligonucleotide
cuugagagugccgacggca

SEQ ID NO: 1239135 - RNA, 19 nt, Artificial Sequence
  Description of Artificial Sequence: Synthetic oligonucleotide
caguuucggauucguuggg

SEQ ID NO: 1239136 - RNA, 19 nt, Artificial Sequence
  Description of Artificial Sequence: Synthetic oligonucleotide
caguuaugauuuccuccgc

SEQ ID NO: 1239137 - RNA, 19 nt, Artificial Sequence
  Description of Artificial Sequence: Synthetic oligonucleotide
acaaccccaaucagcuagg

SEQ ID NO: 1239138 - RNA, 19 nt, Artificial Sequence
  Description of Artificial Sequence: Synthetic oligonucleotide
ugugaaccuggugcggggc

SEQ ID NO: 1239139 - RNA, 19 nt, Artificial Sequence
  Description of Artificial Sequence: Synthetic oligonucleotide
uuuggcugauuuugugcua

SEQ ID NO: 1239140 - RNA, 19 nt, Artificial Sequence
  Description of Artificial Sequence: Synthetic oligonucleotide
ggugcggggcuccagcagg

SEQ ID NO: 1239141 - RNA, 19 nt, Artificial Sequence
  Description of Artificial Sequence: Synthetic oligonucleotide
guaggaaaguuuugcugaa

SEQ ID NO: 1239142 - RNA, 19 nt, Artificial Sequence
  Description of Artificial Sequence: Synthetic oligonucleotide
ugcgacuuucuugugucaa

SEQ ID NO: 1239143 - RNA, 19 nt, Artificial Sequence
  Description of Artificial Sequence: Synthetic oligonucleotide
uacugaccacacuggcuug

SEQ ID NO: 1239144 - RNA, 19 nt, Artificial Sequence
  Description of Artificial Sequence: Synthetic oligonucleotide
cacggugcuuucuuggaca

SEQ ID NO: 1239145 - RNA, 19 nt, Artificial Sequence
  Description of Artificial Sequence: Synthetic oligonucleotide
cucagcuucaagucugaaa

SEQ ID NO: 1239146 - RNA, 19 nt, Artificial Sequence
  Description of Artificial Sequence: Synthetic oligonucleotide
cuugccaguuucggauucg

SEQ ID NO: 1239147 - RNA, 19 nt, Artificial Sequence
  Description of Artificial Sequence: Synthetic oligonucleotide
cagcgauggucaagcaacc

SEQ ID NO: 1239148 - RNA, 19 nt, Artificial Sequence
  Description of Artificial Sequence: Synthetic oligonucleotide
gugucaaccuucaguguug

SEQ ID NO: 1239149 - RNA, 19 nt, Artificial Sequence
  Description of Artificial Sequence: Synthetic oligonucleotide
aagcaaccuggauucccaa

SEQ ID NO: 1239150 - RNA, 19 nt, Artificial Sequence
  Description of Artificial Sequence: Synthetic oligonucleotide
cagcagugugcacgaaggg

SEQ ID NO: 1239151 - RNA, 19 nt, Artificial Sequence
  Description of Artificial Sequence: Synthetic oligonucleotide
gccuugagagugccgacgg

SEQ ID NO: 1239152 - RNA, 19 nt, Artificial Sequence
  Description of Artificial Sequence: Synthetic oligonucleotide
gacuuuuaugcaacuauau

SEQ ID NO: 1239153 - RNA, 19 nt, Artificial Sequence
  Description of Artificial Sequence: Synthetic oligonucleotide
guguugaggcagcauagaa

SEQ ID NO: 1239154 - RNA, 19 nt, Artificial Sequence
  Description of Artificial Sequence: Synthetic oligonucleotide
aacggcuccuggagucagc

SEQ ID NO: 1239155 - RNA, 19 nt, Artificial Sequence
  Description of Artificial Sequence: Synthetic oligonucleotide
aguguugaggcagcauaga

SEQ ID NO: 1239156 - RNA, 19 nt, Artificial Sequence
  Description of Artificial Sequence: Synthetic oligonucleotide
guaguuuauccucaugauu

SEQ ID NO: 1239157 - RNA, 19 nt, Artificial Sequence
  Description of Artificial Sequence: Synthetic oligonucleotide
aaaacgccacugaguagga

SEQ ID NO: 1239158 - RNA, 19 nt, Artificial Sequence
  Description of Artificial Sequence: Synthetic oligonucleotide
ugccguucccugguaagug

SEQ ID NO: 1239159 - RNA, 19 nt, Artificial Sequence
  Description of Artificial Sequence: Synthetic oligonucleotide
caggagaaugugcaggaaa

SEQ ID NO: 1239160 - RNA, 19 nt, Artificial Sequence
  Description of Artificial Sequence: Synthetic oligonucleotide
aggccacugaaugggaaug

SEQ ID NO: 1239161 - RNA, 19 nt, Artificial Sequence
  Description of Artificial Sequence: Synthetic oligonucleotide
gauucgugugaguguugga

SEQ ID NO: 1239162 - RNA, 19 nt, Artificial Sequence
  Description of Artificial Sequence: Synthetic oligonucleotide
aguccucugcgacuuuuau

SEQ ID NO: 1239163 - RNA, 19 nt, Artificial Sequence
  Description of Artificial Sequence: Synthetic oligonucleotide
aagcccagcgauggucaag

SEQ ID NO: 1239164 - RNA, 19 nt, Artificial Sequence
  Description of Artificial Sequence: Synthetic oligonucleotide
auggucaagcaaccuggau

SEQ ID NO: 1239165 - RNA, 19 nt, Artificial Sequence
  Description of Artificial Sequence: Synthetic oligonucleotide
ucacugcaugguauauaau

SEQ ID NO: 1239166 - RNA, 19 nt, Artificial Sequence
  Description of Artificial Sequence: Synthetic oligonucleotide
aauguaccuaugggccagu

SEQ ID NO: 1239167 - RNA, 19 nt, Artificial Sequence
  Description of Artificial Sequence: Synthetic oligonucleotide
ggaaacacggccaggcuuc

SEQ ID NO: 1239168 - RNA, 19 nt, Artificial Sequence
  Description of Artificial Sequence: Synthetic oligonucleotide
agauaccaacuuuggucau

SEQ ID NO: 1239169 - RNA, 19 nt, Artificial Sequence
  Description of Artificial Sequence: Synthetic oligonucleotide
acauuucccaauguaccua

SEQ ID NO: 1239170 - RNA, 19 nt, Artificial Sequence
  Description of Artificial Sequence: Synthetic oligonucleotide
uggagucuccugggaaaag

SEQ ID NO: 1239171 - RNA, 19 nt, Artificial Sequence
  Description of Artificial Sequence: Synthetic oligonucleotide
cuggcgauacaaaguccuc

SEQ ID NO: 1239172 - RNA, 19 nt, Artificial Sequence
  Description of Artificial Sequence: Synthetic oligonucleotide
cucugcgacuuuuaugcaa

SEQ ID NO: 1239173 - RNA, 19 nt, Artificial Sequence
  Description of Artificial Sequence: Synthetic oligonucleotide
ggagaaugugcaggaaagc

SEQ ID NO: 1239174 - RNA, 19 nt, Artificial Sequence
  Description of Artificial Sequence: Synthetic oligonucleotide
ugcgacuuuuaugcaacua

SEQ ID NO: 1239175 - RNA, 19 nt, Artificial Sequence
  Description of Artificial Sequence: Synthetic oligonucleotide
cuugagucaggcggaagca

SEQ ID NO: 1239176 - RNA, 19 nt, Artificial Sequence
  Description of Artificial Sequence: Synthetic oligonucleotide
gugugugugaacagugcga

SEQ ID NO: 1239177 - RNA, 19 nt, Artificial Sequence
  Description of Artificial Sequence: Synthetic oligonucleotide
gcaaccuggauucccaaaa

SEQ ID NO: 1239178 - RNA, 19 nt, Artificial Sequence
  Description of Artificial Sequence: Synthetic oligonucleotide
gcaaacggcuccuggaguc

SEQ ID NO: 1239179 - RNA, 19 nt, Artificial Sequence
  Description of Artificial Sequence: Synthetic oligonucleotide
caugcucuggcgauacaaa

SEQ ID NO: 1239180 - RNA, 19 nt, Artificial Sequence
  Description of Artificial Sequence: Synthetic oligonucleotide
gguaaacuagugaacauau

SEQ ID NO: 1239181 - RNA, 19 nt, Artificial Sequence
  Description of Artificial Sequence: Synthetic oligonucleotide
gccuuguacgccauauucc

SEQ ID NO: 1239182 - RNA, 19 nt, Artificial Sequence
  Description of Artificial Sequence: Synthetic oligonucleotide
ccgacggcaucuuucacug

SEQ ID NO: 1239183 - RNA, 19 nt, Artificial Sequence
  Description of Artificial Sequence: Synthetic oligonucleotide
cacguuuccuaauccugga

SEQ ID NO: 1239184 - RNA, 19 nt, Artificial Sequence
  Description of Artificial Sequence: Synthetic oligonucleotide
gaacugcacaauggcccag

SEQ ID NO: 1239185 - RNA, 19 nt, Artificial Sequence
  Description of Artificial Sequence: Synthetic oligonucleotide
cacugaguaggaaaguuuu

SEQ ID NO: 1239186 - RNA, 19 nt, Artificial Sequence
  Description of Artificial Sequence: Synthetic oligonucleotide
acggugcuuucuuggacaa

SEQ ID NO: 1239187 - RNA, 19 nt, Artificial Sequence
  Description of Artificial Sequence: Synthetic oligonucleotide
gaaacacggccaggcuucc

SEQ ID NO: 1239188 - RNA, 19 nt, Artificial Sequence
  Description of Artificial Sequence: Synthetic oligonucleotide
acgaagggguagcuccaca

SEQ ID NO: 1239189 - RNA, 19 nt, Artificial Sequence
  Description of Artificial Sequence: Synthetic oligonucleotide
gcgauacaaaguccucugc

SEQ ID NO: 1239190 - RNA, 19 nt, Artificial Sequence
  Description of Artificial Sequence: Synthetic oligonucleotide
uugccaguuucggauucgu

SEQ ID NO: 1239191 - RNA, 19 nt, Artificial Sequence
  Description of Artificial Sequence: Synthetic oligonucleotide
gugagaggccugcaucaca

SEQ ID NO: 1239192 - RNA, 19 nt, Artificial Sequence
  Description of Artificial Sequence: Synthetic oligonucleotide
uucacaugcucuggcgaua

SEQ ID NO: 1239193 - RNA, 19 nt, Artificial Sequence
  Description of Artificial Sequence: Synthetic oligonucleotide
ggaauggcugcauccccac

SEQ ID NO: 1239194 - RNA, 19 nt, Artificial Sequence
  Description of Artificial Sequence: Synthetic oligonucleotide
guugggccuugagagugcc

SEQ ID NO: 1239195 - RNA, 19 nt, Artificial Sequence
  Description of Artificial Sequence: Synthetic oligonucleotide
gagagugccgacggcaucu

SEQ ID NO: 1239196 - RNA, 19 nt, Artificial Sequence
  Description of Artificial Sequence: Synthetic oligonucleotide
caggcacaugaaaucaucu

SEQ ID NO: 1239197 - RNA, 19 nt, Artificial Sequence
  Description of Artificial Sequence: Synthetic oligonucleotide
aaauuacgcuuuggcugau

SEQ ID NO: 1239198 - RNA, 19 nt, Artificial Sequence
  Description of Artificial Sequence: Synthetic oligonucleotide
ggccuugagagugccgacg

SEQ ID NO: 1239199 - RNA, 19 nt, Artificial Sequence
  Description of Artificial Sequence: Synthetic oligonucleotide
cccauuuggagaggcaggc

SEQ ID NO: 1239200 - RNA, 19 nt, Artificial Sequence
  Description of Artificial Sequence: Synthetic oligonucleotide
gaacgcuggugguuugcaa

SEQ ID NO: 1239201 - RNA, 19 nt, Artificial Sequence
  Description of Artificial Sequence: Synthetic oligonucleotide
ggauucguugggccuugag

SEQ ID NO: 1239202 - RNA, 19 nt, Artificial Sequence
  Description of Artificial Sequence: Synthetic oligonucleotide
cauuucccaauguaccuau

SEQ ID NO: 1239203 - RNA, 19 nt, Artificial Sequence
  Description of Artificial Sequence: Synthetic oligonucleotide
agcgauggucaagcaaccu

SEQ ID NO: 1239204 - RNA, 19 nt, Artificial Sequence
  Description of Artificial Sequence: Synthetic oligonucleotide
ugccaguuucggauucguu

SEQ ID NO: 1239205 - RNA, 19 nt, Artificial Sequence
  Description of Artificial Sequence: Synthetic oligonucleotide
guaaacuagugaacauaua

SEQ ID NO: 1239206 - RNA, 19 nt, Artificial Sequence
  Description of Artificial Sequence: Synthetic oligonucleotide
cgaagggguagcuccacag

SEQ ID NO: 1239207 - RNA, 19 nt, Artificial Sequence
  Description of Artificial Sequence: Synthetic oligonucleotide
gcgacuuuuaugcaacuau

SEQ ID NO: 1239208 - RNA, 19 nt, Artificial Sequence
  Description of Artificial Sequence: Synthetic oligonucleotide
caugguauauaauguucuu

SEQ ID NO: 1239209 - RNA, 19 nt, Artificial Sequence
  Description of Artificial Sequence: Synthetic oligonucleotide
caggcggagucccaaggga

SEQ ID NO: 1239210 - RNA, 19 nt, Artificial Sequence
  Description of Artificial Sequence: Synthetic oligonucleotide
caaccccaaucagcuaggc

SEQ ID NO: 1239211 - RNA, 19 nt, Artificial Sequence
  Description of Artificial Sequence: Synthetic oligonucleotide
cugaaacugugugugugaa

SEQ ID NO: 1239212 - RNA, 19 nt, Artificial Sequence
  Description of Artificial Sequence: Synthetic oligonucleotide
aaacgccacugaguaggaa

SEQ ID NO: 1239213 - RNA, 19 nt, Artificial Sequence
  Description of Artificial Sequence: Synthetic oligonucleotide
gcccagaucaggucguaca

SEQ ID NO: 1239214 - RNA, 19 nt, Artificial Sequence
  Description of Artificial Sequence: Synthetic oligonucleotide
auucuugagucaggcggaa

SEQ ID NO: 1239215 - RNA, 19 nt, Artificial Sequence
  Description of Artificial Sequence: Synthetic oligonucleotide
ccgccuccaaacacaaccc

SEQ ID NO: 1239216 - RNA, 19 nt, Artificial Sequence
  Description of Artificial Sequence: Synthetic oligonucleotide
caugauucgugugaguguu

SEQ ID NO: 1239217 - RNA, 19 nt, Artificial Sequence
  Description of Artificial Sequence: Synthetic oligonucleotide
cuucacaugcucuggcgau

SEQ ID NO: 1239218 - RNA, 19 nt, Artificial Sequence
  Description of Artificial Sequence: Synthetic oligonucleotide
ugccgacggcaucuuucac

SEQ ID NO: 1239219 - RNA, 19 nt, Artificial Sequence
  Description of Artificial Sequence: Synthetic oligonucleotide
gcggagucccaagggaacg

SEQ ID NO: 1239220 - RNA, 19 nt, Artificial Sequence
  Description of Artificial Sequence: Synthetic oligonucleotide
ccucaagauaaaacugaga

SEQ ID NO: 1239221 - RNA, 19 nt, Artificial Sequence
  Description of Artificial Sequence: Synthetic oligonucleotide
auguaccuaugggccagug

SEQ ID NO: 1239222 - RNA, 19 nt, Artificial Sequence
  Description of Artificial Sequence: Synthetic oligonucleotide
cugcaugguauauaauguu

SEQ ID NO: 1239223 - RNA, 19 nt, Artificial Sequence
  Description of Artificial Sequence: Synthetic oligonucleotide
augauucgugugaguguug

SEQ ID NO: 1239224 - RNA, 19 nt, Artificial Sequence
  Description of Artificial Sequence: Synthetic oligonucleotide
ccugccguucccugguaag

SEQ ID NO: 1239225 - RNA, 19 nt, Artificial Sequence
  Description of Artificial Sequence: Synthetic oligonucleotide
ccaauguaccuaugggcca

SEQ ID NO: 1239226 - RNA, 19 nt, Artificial Sequence
  Description of Artificial Sequence: Synthetic oligonucleotide
ggcacaagaggaacagaga

SEQ ID NO: 1239227 - RNA, 19 nt, Artificial Sequence
  Description of Artificial Sequence: Synthetic oligonucleotide
ggaccuugccaguuucgga

SEQ ID NO: 1239228 - RNA, 19 nt, Artificial Sequence
  Description of Artificial Sequence: Synthetic oligonucleotide
auuucacuacaaaccuauu

SEQ ID NO: 1239229 - RNA, 19 nt, Artificial Sequence
  Description of Artificial Sequence: Synthetic oligonucleotide
ccuuguacgccauauuccu

SEQ ID NO: 1239230 - RNA, 19 nt, Artificial Sequence
  Description of Artificial Sequence: Synthetic oligonucleotide
guuuauccucaugauucgu

SEQ ID NO: 1239231 - RNA, 19 nt, Artificial Sequence
  Description of Artificial Sequence: Synthetic oligonucleotide
accuggaaagagauacauu

SEQ ID NO: 1239232 - RNA, 19 nt, Artificial Sequence
  Description of Artificial Sequence: Synthetic oligonucleotide
uggcugauuuugugcuaua

SEQ ID NO: 1239233 - RNA, 19 nt, Artificial Sequence
  Description of Artificial Sequence: Synthetic oligonucleotide
acacaaccccaaucagcua

SEQ ID NO: 1239234 - RNA, 19 nt, Artificial Sequence
  Description of Artificial Sequence: Synthetic oligonucleotide
caggucguacaaaguagcu

SEQ ID NO: 1239235 - RNA, 19 nt, Artificial Sequence
  Description of Artificial Sequence: Synthetic oligonucleotide
ggcuggagaguuuguaaua

SEQ ID NO: 1239236 - RNA, 19 nt, Artificial Sequence
  Description of Artificial Sequence: Synthetic oligonucleotide
caacugcucccucaagaua

SEQ ID NO: 1239237 - RNA, 19 nt, Artificial Sequence
  Description of Artificial Sequence: Synthetic oligonucleotide
ggcugcagggcaguacacc

SEQ ID NO: 1239238 - RNA, 19 nt, Artificial Sequence
  Description of Artificial Sequence: Synthetic oligonucleotide
caucacaggagagcugcaa

SEQ ID NO: 1239239 - RNA, 19 nt, Artificial Sequence
  Description of Artificial Sequence: Synthetic oligonucleotide
gugcgacuuucuuguguca

SEQ ID NO: 1239240 - RNA, 19 nt, Artificial Sequence
  Description of Artificial Sequence: Synthetic oligonucleotide
cugcaaguuuccaaugcuu

SEQ ID NO: 1239241 - RNA, 19 nt, Artificial Sequence
  Description of Artificial Sequence: Synthetic oligonucleotide
caugacacggugcuuucuu

SEQ ID NO: 1239242 - RNA, 19 nt, Artificial Sequence
  Description of Artificial Sequence: Synthetic oligonucleotide
agagucucuuucggaggau

SEQ ID NO: 1239243 - RNA, 19 nt, Artificial Sequence
  Description of Artificial Sequence: Synthetic oligonucleotide
caaacggcuccuggaguca

SEQ ID NO: 1239244 - RNA, 19 nt, Artificial Sequence
  Description of Artificial Sequence: Synthetic oligonucleotide
gugcggaaacacggccagg

SEQ ID NO: 1239245 - RNA, 19 nt, Artificial Sequence
  Description of Artificial Sequence: Synthetic oligonucleotide
gggaauggcugcaucccca

SEQ ID NO: 1239246 - RNA, 19 nt, Artificial Sequence
  Description of Artificial Sequence: Synthetic oligonucleotide
cagugcgacuuucuugugu

SEQ ID NO: 1239247 - RNA, 19 nt, Artificial Sequence
  Description of Artificial Sequence: Synthetic oligonucleotide
ggcugauuuugugcuauaa

SEQ ID NO: 1239248 - RNA, 19 nt, Artificial Sequence
  Description of Artificial Sequence: Synthetic oligonucleotide
guacgccauauuccucaaa

SEQ ID NO: 1239249 - RNA, 19 nt, Artificial Sequence
  Description of Artificial Sequence: Synthetic oligonucleotide
cuccgccuccaaacacaac

SEQ ID NO: 1239250 - RNA, 19 nt, Artificial Sequence
  Description of Artificial Sequence: Synthetic oligonucleotide
ggaggaucugguccagaua

SEQ ID NO: 1239251 - RNA, 19 nt, Artificial Sequence
  Description of Artificial Sequence: Synthetic oligonucleotide
ggcggagucccaagggaac

SEQ ID NO: 1239252 - RNA, 19 nt, Artificial Sequence
  Description of Artificial Sequence: Synthetic oligonucleotide
gccgacggcaucuuucacu

SEQ ID NO: 1239253 - RNA, 19 nt, Artificial Sequence
  Description of Artificial Sequence: Synthetic oligonucleotide
ggaacgcuggugguuugca

SEQ ID NO: 1239254 - RNA, 19 nt, Artificial Sequence
  Description of Artificial Sequence: Synthetic oligonucleotide
gugugugaacagugcgacu

SEQ ID NO: 1239255 - RNA, 19 nt, Artificial Sequence
  Description of Artificial Sequence: Synthetic oligonucleotide
cgacuuuuaugcaacuaua

SEQ ID NO: 1239256 - RNA, 19 nt, Artificial Sequence
  Description of Artificial Sequence: Synthetic oligonucleotide
gugcacgaagggguagcuc

SEQ ID NO: 1239257 - RNA, 19 nt, Artificial Sequence
  Description of Artificial Sequence: Synthetic oligonucleotide
ccaaucagcuaggcacaag

SEQ ID NO: 1239258 - RNA, 19 nt, Artificial Sequence
  Description of Artificial Sequence: Synthetic oligonucleotide
ggagagcugcaaguuucca

SEQ ID NO: 1239259 - RNA, 19 nt, Artificial Sequence
  Description of Artificial Sequence: Synthetic oligonucleotide
cuuuaggaccuugccaguu

SEQ ID NO: 1239260 - RNA, 19 nt, Artificial Sequence
  Description of Artificial Sequence: Synthetic oligonucleotide
cccagaucaggucguacaa

SEQ ID NO: 1239261 - RNA, 19 nt, Artificial Sequence
  Description of Artificial Sequence: Synthetic oligonucleotide
guacaccuggaaagagaua

SEQ ID NO: 1239262 - RNA, 19 nt, Artificial Sequence
  Description of Artificial Sequence: Synthetic oligonucleotide
gggccuugagagugccgac

SEQ ID NO: 1239263 - RNA, 19 nt, Artificial Sequence
  Description of Artificial Sequence: Synthetic oligonucleotide
gugugaacagugcgacuuu

SEQ ID NO: 1239264 - RNA, 19 nt, Artificial Sequence
  Description of Artificial Sequence: Synthetic oligonucleotide
gcuauaagggacagcugau

SEQ ID NO: 1239265 - RNA, 19 nt, Artificial Sequence
  Description of Artificial Sequence: Synthetic oligonucleotide
gccagugaauuccaucauu

SEQ ID NO: 1239266 - RNA, 19 nt, Artificial Sequence
  Description of Artificial Sequence: Synthetic oligonucleotide
cguugggccuugagagugc

SEQ ID NO: 1239267 - RNA, 19 nt, Artificial Sequence
  Description of Artificial Sequence: Synthetic oligonucleotide
gcuuuaggaccuugccagu

SEQ ID NO: 1239268 - RNA, 19 nt, Artificial Sequence
  Description of Artificial Sequence: Synthetic oligonucleotide
augggccagugaauuccau

SEQ ID NO: 1239269 - RNA, 19 nt, Artificial Sequence
  Description of Artificial Sequence: Synthetic oligonucleotide
cacagagaguauggggaau

SEQ ID NO: 1239270 - RNA, 19 nt, Artificial Sequence
  Description of Artificial Sequence: Synthetic oligonucleotide
gccguucccugguaagugu

SEQ ID NO: 1239271 - RNA, 19 nt, Artificial Sequence
  Description of Artificial Sequence: Synthetic oligonucleotide
ggcccagaucaggucguac

SEQ ID NO: 1239272 - RNA, 19 nt, Artificial Sequence
  Description of Artificial Sequence: Synthetic oligonucleotide
guauggggaauggcugcau

SEQ ID NO: 1239273 - RNA, 19 nt, Artificial Sequence
  Description of Artificial Sequence: Synthetic oligonucleotide
cugccguucccugguaagu

SEQ ID NO: 1239274 - RNA, 19 nt, Artificial Sequence
  Description of Artificial Sequence: Synthetic oligonucleotide
ugcggggcuccagcaggua

SEQ ID NO: 1239275 - RNA, 19 nt, Artificial Sequence
  Description of Artificial Sequence: Synthetic oligonucleotide
ccucugcgacuuuuaugca

SEQ ID NO: 1239276 - RNA, 19 nt, Artificial Sequence
  Description of Artificial Sequence: Synthetic oligonucleotide
ccagaucaggucguacaaa

SEQ ID NO: 1239277 - RNA, 19 nt, Artificial Sequence
  Description of Artificial Sequence: Synthetic oligonucleotide
gcggaaacacggccaggcu

SEQ ID NO: 1239278 - RNA, 19 nt, Artificial Sequence
  Description of Artificial Sequence: Synthetic oligonucleotide
cccaccccauuuggagagg

SEQ ID NO: 1239279 - RNA, 19 nt, Artificial Sequence
  Description of Artificial Sequence: Synthetic oligonucleotide
gagugccgacggcaucuuu

SEQ ID NO: 1239280 - RNA, 19 nt, Artificial Sequence
  Description of Artificial Sequence: Synthetic oligonucleotide
cgacggcaucuuucacugc

SEQ ID NO: 1239281 - RNA, 19 nt, Artificial Sequence
  Description of Artificial Sequence: Synthetic oligonucleotide
ggauucccaaaaggccacu

SEQ ID NO: 1239282 - RNA, 19 nt, Artificial Sequence
  Description of Artificial Sequence: Synthetic oligonucleotide
ccuaauccuggagucuccu

SEQ ID NO: 1239283 - RNA, 19 nt, Artificial Sequence
  Description of Artificial Sequence: Synthetic oligonucleotide
ccaaacuucccaccccauu

SEQ ID NO: 1239284 - RNA, 19 nt, Artificial Sequence
  Description of Artificial Sequence: Synthetic oligonucleotide
cggaaacacggccaggcuu

SEQ ID NO: 1239285 - RNA, 19 nt, Artificial Sequence
  Description of Artificial Sequence: Synthetic oligonucleotide
ccguucccugguaaguguu

SEQ ID NO: 1239286 - RNA, 19 nt, Artificial Sequence
  Description of Artificial Sequence: Synthetic oligonucleotide
gggcccagaucaggucgua

SEQ ID NO: 1239287 - RNA, 19 nt, Artificial Sequence
  Description of Artificial Sequence: Synthetic oligonucleotide
gcccugccguucccuggua

SEQ ID NO: 1239288 - RNA, 19 nt, Artificial Sequence
  Description of Artificial Sequence: Synthetic oligonucleotide
cgccacugaguaggaaagu

SEQ ID NO: 1239289 - RNA, 19 nt, Artificial Sequence
  Description of Artificial Sequence: Synthetic oligonucleotide
cggauucguugggccuuga

SEQ ID NO: 1239290 - RNA, 19 nt, Artificial Sequence
  Description of Artificial Sequence: Synthetic oligonucleotide
aacucaaugacauuggaca

SEQ ID NO: 1239291 - RNA, 19 nt, Artificial Sequence
  Description of Artificial Sequence: Synthetic oligonucleotide
agugcaacgagccaacucc

SEQ ID NO: 1239292 - RNA, 19 nt, Artificial Sequence
  Description of Artificial Sequence: Synthetic oligonucleotide
gacuccacgaaccaaaccg

SEQ ID NO: 1239293 - RNA, 19 nt, Artificial Sequence
  Description of Artificial Sequence: Synthetic oligonucleotide
aaaagaccgaaacugggag

SEQ ID NO: 1239294 - RNA, 19 nt, Artificial Sequence
  Description of Artificial Sequence: Synthetic oligonucleotide
aagaagguagccuuggucu

SEQ ID NO: 1239295 - RNA, 19 nt, Artificial Sequence
  Description of Artificial Sequence: Synthetic oligonucleotide
aaaccgaggccccaggacc

SEQ ID NO: 1239296 - RNA, 19 nt, Artificial Sequence
  Description of Artificial Sequence: Synthetic oligonucleotide
ugaaaagaccgaaacuggg

SEQ ID NO: 1239297 - RNA, 19 nt, Artificial Sequence
  Description of Artificial Sequence: Synthetic oligonucleotide
ucuccaauaaacaucugca

SEQ ID NO: 1239298 - RNA, 19 nt, Artificial Sequence
  Description of Artificial Sequence: Synthetic oligonucleotide
ucugcaugauucuagcccg

SEQ ID NO: 1239299 - RNA, 19 nt, Artificial Sequence
  Description of Artificial Sequence: Synthetic oligonucleotide
ugcgauuaccuuuacuugg

SEQ ID NO: 1239300 - RNA, 19 nt, Artificial Sequence
  Description of Artificial Sequence: Synthetic oligonucleotide
uucauaggcaggacaaugg

SEQ ID NO: 1239301 - RNA, 19 nt, Artificial Sequence
  Description of Artificial Sequence: Synthetic oligonucleotide
auuaccuuuacuugggugu

SEQ ID NO: 1239302 - RNA, 19 nt, Artificial Sequence
  Description of Artificial Sequence: Synthetic oligonucleotide
cucuuugugguucauaggc

SEQ ID NO: 1239303 - RNA, 19 nt, Artificial Sequence
  Description of Artificial Sequence: Synthetic oligonucleotide
ugcaugaaaagaccgaaac

SEQ ID NO: 1239304 - RNA, 19 nt, Artificial Sequence
  Description of Artificial Sequence: Synthetic oligonucleotide
auugggaucaacguccagc

SEQ ID NO: 1239305 - RNA, 19 nt, Artificial Sequence
  Description of Artificial Sequence: Synthetic oligonucleotide
uuuguuucggggaacagaa

SEQ ID NO: 1239306 - RNA, 19 nt, Artificial Sequence
  Description of Artificial Sequence: Synthetic oligonucleotide
uuuacuuggguguugggcu

SEQ ID NO: 1239307 - RNA, 19 nt, Artificial Sequence
  Description of Artificial Sequence: Synthetic oligonucleotide
auuuccugcaugaaaagac

SEQ ID NO: 1239308 - RNA, 19 nt, Artificial Sequence
  Description of Artificial Sequence: Synthetic oligonucleotide
agagucauauucugugggc

SEQ ID NO: 1239309 - RNA, 19 nt, Artificial Sequence
  Description of Artificial Sequence: Synthetic oligonucleotide
aaguuuugaucacagcaca

SEQ ID NO: 1239310 - RNA, 19 nt, Artificial Sequence
  Description of Artificial Sequence: Synthetic oligonucleotide
aaguauguuugucgugugg

SEQ ID NO: 1239311 - RNA, 19 nt, Artificial Sequence
  Description of Artificial Sequence: Synthetic oligonucleotide
uguuucggggaacagaaaa

SEQ ID NO: 1239312 - RNA, 19 nt, Artificial Sequence
  Description of Artificial Sequence: Synthetic oligonucleotide
uuccugcaugaaaagaccg

SEQ ID NO: 1239313 - RNA, 19 nt, Artificial Sequence
  Description of Artificial Sequence: Synthetic oligonucleotide
uguaccucuaagaugcccu

SEQ ID NO: 1239314 - RNA, 19 nt, Artificial Sequence
  Description of Artificial Sequence: Synthetic oligonucleotide
aggacaauggccucuacca

SEQ ID NO: 1239315 - RNA, 19 nt, Artificial Sequence
  Description of Artificial Sequence: Synthetic oligonucleotide
ucaacguccagcaacucaa

SEQ ID NO: 1239316 - RNA, 19 nt, Artificial Sequence
  Description of Artificial Sequence: Synthetic oligonucleotide
ucacccgagagucauauuc

SEQ ID NO: 1239317 - RNA, 19 nt, Artificial Sequence
  Description of Artificial Sequence: Synthetic oligonucleotide
ucggggaacagaaaacacc

SEQ ID NO: 1239318 - RNA, 19 nt, Artificial Sequence
  Description of Artificial Sequence: Synthetic oligonucleotide
uuugugguucauaggcagg

SEQ ID NO: 1239319 - RNA, 19 nt, Artificial Sequence
  Description of Artificial Sequence: Synthetic oligonucleotide
uggaucugcaugauucuag

SEQ ID NO: 1239320 - RNA, 19 nt, Artificial Sequence
  Description of Artificial Sequence: Synthetic oligonucleotide
cuuugugguucauaggcag

SEQ ID NO: 1239321 - RNA, 19 nt, Artificial Sequence
  Description of Artificial Sequence: Synthetic oligonucleotide
aagaccgaaacugggagug

SEQ ID NO: 1239322 - RNA, 19 nt, Artificial Sequence
  Description of Artificial Sequence: Synthetic oligonucleotide
gaaguuuugaucacagcac

SEQ ID NO: 1239323 - RNA, 19 nt, Artificial Sequence
  Description of Artificial Sequence: Synthetic oligonucleotide
ggaaguuuugaucacagca

SEQ ID NO: 1239324 - RNA, 19 nt, Artificial Sequence
  Description of Artificial Sequence: Synthetic oligonucleotide
uggacacaagguauggcag

SEQ ID NO: 1239325 - RNA, 19 nt, Artificial Sequence
  Description of Artificial Sequence: Synthetic oligonucleotide
acgaaccaaaccgaggccc

SEQ ID NO: 1239326 - RNA, 19 nt, Artificial Sequence
  Description of Artificial Sequence: Synthetic oligonucleotide
uccaccaacccgaucacug

SEQ ID NO: 1239327 - RNA, 19 nt, Artificial Sequence
  Description of Artificial Sequence: Synthetic oligonucleotide
cugguaggaaguauguuug

SEQ ID NO: 1239328 - RNA, 19 nt, Artificial Sequence
  Description of Artificial Sequence: Synthetic oligonucleotide
uaggaaguauguuugucgu

SEQ ID NO: 1239329 - RNA, 19 nt, Artificial Sequence
  Description of Artificial Sequence: Synthetic oligonucleotide
uuaguggcugcgauuaccu

SEQ ID NO: 1239330 - RNA, 19 nt, Artificial Sequence
  Description of Artificial Sequence: Synthetic oligonucleotide
aaagaccgaaacugggagu

SEQ ID NO: 1239331 - RNA, 19 nt, Artificial Sequence
  Description of Artificial Sequence: Synthetic oligonucleotide
uugggaucaacguccagca

SEQ ID NO: 1239332 - RNA, 19 nt, Artificial Sequence
  Description of Artificial Sequence: Synthetic oligonucleotide
uccacgaaccaaaccgagg

SEQ ID NO: 1239333 - RNA, 19 nt, Artificial Sequence
  Description of Artificial Sequence: Synthetic oligonucleotide
ucuuugugguucauaggca

SEQ ID NO: 1239334 - RNA, 19 nt, Artificial Sequence
  Description of Artificial Sequence: Synthetic oligonucleotide
agugcgaucauacccgccu

SEQ ID NO: 1239335 - RNA, 19 nt, Artificial Sequence
  Description of Artificial Sequence: Synthetic oligonucleotide
cuuuacuuggguguugggc

SEQ ID NO: 1239336 - RNA, 19 nt, Artificial Sequence
  Description of Artificial Sequence: Synthetic oligonucleotide
uuucggggaacagaaaaca

SEQ ID NO: 1239337 - RNA, 19 nt, Artificial Sequence
  Description of Artificial Sequence: Synthetic oligonucleotide
aacuucaagaagguagccu

SEQ ID NO: 1239338 - RNA, 19 nt, Artificial Sequence
  Description of Artificial Sequence: Synthetic oligonucleotide
gacaauggccucuaccaac

SEQ ID NO: 1239339 - RNA, 19 nt, Artificial Sequence
  Description of Artificial Sequence: Synthetic oligonucleotide
auguuugucguguggaagu

SEQ ID NO: 1239340 - RNA, 19 nt, Artificial Sequence
  Description of Artificial Sequence: Synthetic oligonucleotide
uuccccaaugccaucuugc

SEQ ID NO: 1239341 - RNA, 19 nt, Artificial Sequence
  Description of Artificial Sequence: Synthetic oligonucleotide
ugucgaagcgcuugguacc

SEQ ID NO: 1239342 - RNA, 19 nt, Artificial Sequence
  Description of Artificial Sequence: Synthetic oligonucleotide
acacacacggccuugcacu

SEQ ID NO: 1239343 - RNA, 19 nt, Artificial Sequence
  Description of Artificial Sequence: Synthetic oligonucleotide
agguccuaggcauaguacu

SEQ ID NO: 1239344 - RNA, 19 nt, Artificial Sequence
  Description of Artificial Sequence: Synthetic oligonucleotide
uuugucguguggaaguuuu

SEQ ID NO: 1239345 - RNA, 19 nt, Artificial Sequence
  Description of Artificial Sequence: Synthetic oligonucleotide
auuggacacaagguauggc

SEQ ID NO: 1239346 - RNA, 19 nt, Artificial Sequence
  Description of Artificial Sequence: Synthetic oligonucleotide
aacccgaucacugguagga

SEQ ID NO: 1239347 - RNA, 19 nt, Artificial Sequence
  Description of Artificial Sequence: Synthetic oligonucleotide
ugacucgcaauacuucacu

SEQ ID NO: 1239348 - RNA, 19 nt, Artificial Sequence
  Description of Artificial Sequence: Synthetic oligonucleotide
ucuucguggguaagcuccg

SEQ ID NO: 1239349 - RNA, 19 nt, Artificial Sequence
  Description of Artificial Sequence: Synthetic oligonucleotide
uagccuguaccucuaagau

SEQ ID NO: 1239350 - RNA, 19 nt, Artificial Sequence
  Description of Artificial Sequence: Synthetic oligonucleotide
auaggcaggacaauggccu

SEQ ID NO: 1239351 - RNA, 19 nt, Artificial Sequence
  Description of Artificial Sequence: Synthetic oligonucleotide
aacguccagcaacucaaug

SEQ ID NO: 1239352 - RNA, 19 nt, Artificial Sequence
  Description of Artificial Sequence: Synthetic oligonucleotide
ucaugggugacucgcaaua

SEQ ID NO: 1239353 - RNA, 19 nt, Artificial Sequence
  Description of Artificial Sequence: Synthetic oligonucleotide
ucguggguaagcuccguag

SEQ ID NO: 1239354 - RNA, 19 nt, Artificial Sequence
  Description of Artificial Sequence: Synthetic oligonucleotide
guggguaagcuccguagcg

SEQ ID NO: 1239355 - RNA, 19 nt, Artificial Sequence
  Description of Artificial Sequence: Synthetic oligonucleotide
cugucgaagcgcuugguac

SEQ ID NO: 1239356 - RNA, 19 nt, Artificial Sequence
  Description of Artificial Sequence: Synthetic oligonucleotide
accagcggcgaacuucacc

SEQ ID NO: 1239357 - RNA, 19 nt, Artificial Sequence
  Description of Artificial Sequence: Synthetic oligonucleotide
cacgucaggacugacauuc

SEQ ID NO: 1239358 - RNA, 19 nt, Artificial Sequence
  Description of Artificial Sequence: Synthetic oligonucleotide
ucacugucgaagcgcuugg

SEQ ID NO: 1239359 - RNA, 19 nt, Artificial Sequence
  Description of Artificial Sequence: Synthetic oligonucleotide
ucuugcucggcuucauccc

SEQ ID NO: 1239360 - RNA, 19 nt, Artificial Sequence
  Description of Artificial Sequence: Synthetic oligonucleotide
uuagcucccucuccagugc

SEQ ID NO: 1239361 - RNA, 19 nt, Artificial Sequence
  Description of Artificial Sequence: Synthetic oligonucleotide
gucuucguggguaagcucc

SEQ ID NO: 1239362 - RNA, 19 nt, Artificial Sequence
  Description of Artificial Sequence: Synthetic oligonucleotide
aguacugaagguuggcuuu

SEQ ID NO: 1239363 - RNA, 19 nt, Artificial Sequence
  Description of Artificial Sequence: Synthetic oligonucleotide
gaaaagaccgaaacuggga

SEQ ID NO: 1239364 - RNA, 19 nt, Artificial Sequence
  Description of Artificial Sequence: Synthetic oligonucleotide
ucguguggaaguuuugauc

SEQ ID NO: 1239365 - RNA, 19 nt, Artificial Sequence
  Description of Artificial Sequence: Synthetic oligonucleotide
uccugcaugaaaagaccga

SEQ ID NO: 1239366 - RNA, 19 nt, Artificial Sequence
  Description of Artificial Sequence: Synthetic oligonucleotide
aucaacguccagcaacuca

SEQ ID NO: 1239367 - RNA, 19 nt, Artificial Sequence
  Description of Artificial Sequence: Synthetic oligonucleotide
gaauuagcucccucuccag

SEQ ID NO: 1239368 - RNA, 19 nt, Artificial Sequence
  Description of Artificial Sequence: Synthetic oligonucleotide
acggccuugcacugggccc

SEQ ID NO: 1239369 - RNA, 19 nt, Artificial Sequence
  Description of Artificial Sequence: Synthetic oligonucleotide
auuaucagcuuuaguccac

SEQ ID NO: 1239370 - RNA, 19 nt, Artificial Sequence
  Description of Artificial Sequence: Synthetic oligonucleotide
gaucauacccgccuccaca

SEQ ID NO: 1239371 - RNA, 19 nt, Artificial Sequence
  Description of Artificial Sequence: Synthetic oligonucleotide
uaggcauaguacugaaggu

SEQ ID NO: 1239372 - RNA, 19 nt, Artificial Sequence
  Description of Artificial Sequence: Synthetic oligonucleotide
uacccaaguucucaaacuu

SEQ ID NO: 1239373 - RNA, 19 nt, Artificial Sequence
  Description of Artificial Sequence: Synthetic oligonucleotide
gaaguauguuugucgugug

SEQ ID NO: 1239374 - RNA, 19 nt, Artificial Sequence
  Description of Artificial Sequence: Synthetic oligonucleotide
cagaauuagcucccucucc

SEQ ID NO: 1239375 - RNA, 19 nt, Artificial Sequence
  Description of Artificial Sequence: Synthetic oligonucleotide
ucggacuccacgaaccaaa

SEQ ID NO: 1239376 - RNA, 19 nt, Artificial Sequence
  Description of Artificial Sequence: Synthetic oligonucleotide
caagaagguagccuugguc

SEQ ID NO: 1239377 - RNA, 19 nt, Artificial Sequence
  Description of Artificial Sequence: Synthetic oligonucleotide
guucauaggcaggacaaug

SEQ ID NO: 1239378 - RNA, 19 nt, Artificial Sequence
  Description of Artificial Sequence: Synthetic oligonucleotide
agcggagcagggcaggguc

SEQ ID NO: 1239379 - RNA, 19 nt, Artificial Sequence
  Description of Artificial Sequence: Synthetic oligonucleotide
cugcgauuaccuuuacuug

SEQ ID NO: 1239380 - RNA, 19 nt, Artificial Sequence
  Description of Artificial Sequence: Synthetic oligonucleotide
uccagugccgagcgaaucu

SEQ ID NO: 1239381 - RNA, 19 nt, Artificial Sequence
  Description of Artificial Sequence: Synthetic oligonucleotide
gauguccacucuguuagug

SEQ ID NO: 1239382 - RNA, 19 nt, Artificial Sequence
  Description of Artificial Sequence: Synthetic oligonucleotide
gaccgaaacugggagugcg

SEQ ID NO: 1239383 - RNA, 19 nt, Artificial Sequence
  Description of Artificial Sequence: Synthetic oligonucleotide
acauucaucuuccgugagu

SEQ ID NO: 1239384 - RNA, 19 nt, Artificial Sequence
  Description of Artificial Sequence: Synthetic oligonucleotide
aucagauaggagucuuugu

SEQ ID NO: 1239385 - RNA, 19 nt, Artificial Sequence
  Description of Artificial Sequence: Synthetic oligonucleotide
gucacuguauugcucugug

SEQ ID NO: 1239386 - RNA, 19 nt, Artificial Sequence
  Description of Artificial Sequence: Synthetic oligonucleotide
acugggagugcgcccgagc

SEQ ID NO: 1239387 - RNA, 19 nt, Artificial Sequence
  Description of Artificial Sequence: Synthetic oligonucleotide
auaguucacgucaggacug

SEQ ID NO: 1239388 - RNA, 19 nt, Artificial Sequence
  Description of Artificial Sequence: Synthetic oligonucleotide
agcggcgaacuucacccac

SEQ ID NO: 1239389 - RNA, 19 nt, Artificial Sequence
  Description of Artificial Sequence: Synthetic oligonucleotide
uccguagcgccccugcgca

SEQ ID NO: 1239390 - RNA, 19 nt, Artificial Sequence
  Description of Artificial Sequence: Synthetic oligonucleotide
ugcgaucauacccgccucc

SEQ ID NO: 1239391 - RNA, 19 nt, Artificial Sequence
  Description of Artificial Sequence: Synthetic oligonucleotide
cuucaucccacacggucgc

SEQ ID NO: 1239392 - RNA, 19 nt, Artificial Sequence
  Description of Artificial Sequence: Synthetic oligonucleotide
aggaaguauguuugucgug

SEQ ID NO: 1239393 - RNA, 19 nt, Artificial Sequence
  Description of Artificial Sequence: Synthetic oligonucleotide
cuuuguucacacccaccag

SEQ ID NO: 1239394 - RNA, 19 nt, Artificial Sequence
  Description of Artificial Sequence: Synthetic oligonucleotide
agugccgagcgaaucugcc

SEQ ID NO: 1239395 - RNA, 19 nt, Artificial Sequence
  Description of Artificial Sequence: Synthetic oligonucleotide
ccagcggcgaacuucaccc

SEQ ID NO: 1239396 - RNA, 19 nt, Artificial Sequence
  Description of Artificial Sequence: Synthetic oligonucleotide
agucuucguggguaagcuc

SEQ ID NO: 1239397 - RNA, 19 nt, Artificial Sequence
  Description of Artificial Sequence: Synthetic oligonucleotide
cauaguucacgucaggacu

SEQ ID NO: 1239398 - RNA, 19 nt, Artificial Sequence
  Description of Artificial Sequence: Synthetic oligonucleotide
ccacgaaccaaaccgaggc

SEQ ID NO: 1239399 - RNA, 19 nt, Artificial Sequence
  Description of Artificial Sequence: Synthetic oligonucleotide
ugcaugauucuagcccggg

SEQ ID NO: 1239400 - RNA, 19 nt, Artificial Sequence
  Description of Artificial Sequence: Synthetic oligonucleotide
caucgggaacucaaucuug

SEQ ID NO: 1239401 - RNA, 19 nt, Artificial Sequence
  Description of Artificial Sequence: Synthetic oligonucleotide
acggucgccaucuucuccu

SEQ ID NO: 1239402 - RNA, 19 nt, Artificial Sequence
  Description of Artificial Sequence: Synthetic oligonucleotide
cugggagugcgcccgagcc

SEQ ID NO: 1239403 - RNA, 19 nt, Artificial Sequence
  Description of Artificial Sequence: Synthetic oligonucleotide
uggguaagcuccguagcgc

SEQ ID NO: 1239404 - RNA, 19 nt, Artificial Sequence
  Description of Artificial Sequence: Synthetic oligonucleotide
uagucuucguggguaagcu

SEQ ID NO: 1239405 - RNA, 19 nt, Artificial Sequence
  Description of Artificial Sequence: Synthetic oligonucleotide
gacucgcaauacuucacuc

SEQ ID NO: 1239406 - RNA, 19 nt, Artificial Sequence
  Description of Artificial Sequence: Synthetic oligonucleotide
ggaucugcaugauucuagc

SEQ ID NO: 1239407 - RNA, 19 nt, Artificial Sequence
  Description of Artificial Sequence: Synthetic oligonucleotide
gagcgaaucugccgcucgg

SEQ ID NO: 1239408 - RNA, 19 nt, Artificial Sequence
  Description of Artificial Sequence: Synthetic oligonucleotide
uuggcaccaucuccaauaa

SEQ ID NO: 1239409 - RNA, 19 nt, Artificial Sequence
  Description of Artificial Sequence: Synthetic oligonucleotide
guuucggggaacagaaaac

SEQ ID NO: 1239410 - RNA, 19 nt, Artificial Sequence
  Description of Artificial Sequence: Synthetic oligonucleotide
cuccacgaaccaaaccgag

SEQ ID NO: 1239411 - RNA, 19 nt, Artificial Sequence
  Description of Artificial Sequence: Synthetic oligonucleotide
ucuuccgugaguggaucug

SEQ ID NO: 1239412 - RNA, 19 nt, Artificial Sequence
  Description of Artificial Sequence: Synthetic oligonucleotide
acccacgauuccugacucc

SEQ ID NO: 1239413 - RNA, 19 nt, Artificial Sequence
  Description of Artificial Sequence: Synthetic oligonucleotide
ugcgcagugcgaucauacc

SEQ ID NO: 1239414 - RNA, 19 nt, Artificial Sequence
  Description of Artificial Sequence: Synthetic oligonucleotide
gacuagagguccuaggcau

SEQ ID NO: 1239415 - RNA, 19 nt, Artificial Sequence
  Description of Artificial Sequence: Synthetic oligonucleotide
cugcgcagugcgaucauac

SEQ ID NO: 1239416 - RNA, 19 nt, Artificial Sequence
  Description of Artificial Sequence: Synthetic oligonucleotide
agccgugugcgcuggauga

SEQ ID NO: 1239417 - RNA, 19 nt, Artificial Sequence
  Description of Artificial Sequence: Synthetic oligonucleotide
ugguaggaaguauguuugu

SEQ ID NO: 1239418 - RNA, 19 nt, Artificial Sequence
  Description of Artificial Sequence: Synthetic oligonucleotide
ggugacucgcaauacuuca

SEQ ID NO: 1239419 - RNA, 19 nt, Artificial Sequence
  Description of Artificial Sequence: Synthetic oligonucleotide
cacucuguuaguggcugcg

SEQ ID NO: 1239420 - RNA, 19 nt, Artificial Sequence
  Description of Artificial Sequence: Synthetic oligonucleotide
uguagucuucguggguaag

SEQ ID NO: 1239421 - RNA, 19 nt, Artificial Sequence
  Description of Artificial Sequence: Synthetic oligonucleotide
cacacggccuugcacuggg

SEQ ID NO: 1239422 - RNA, 19 nt, Artificial Sequence
  Description of Artificial Sequence: Synthetic oligonucleotide
gugccgagcgaaucugccg

SEQ ID NO: 1239423 - RNA, 19 nt, Artificial Sequence
  Description of Artificial Sequence: Synthetic oligonucleotide
gcuucaucccacacggucg

SEQ ID NO: 1239424 - RNA, 19 nt, Artificial Sequence
  Description of Artificial Sequence: Synthetic oligonucleotide
uugucguguggaaguuuug

SEQ ID NO: 1239425 - RNA, 19 nt, Artificial Sequence
  Description of Artificial Sequence: Synthetic oligonucleotide
guauggcaggguuuuguuc

SEQ ID NO: 1239426 - RNA, 19 nt, Artificial Sequence
  Description of Artificial Sequence: Synthetic oligonucleotide
accaaaccgaggccccagg

SEQ ID NO: 1239427 - RNA, 19 nt, Artificial Sequence
  Description of Artificial Sequence: Synthetic oligonucleotide
ccgagagucauauucugug

SEQ ID NO: 1239428 - RNA, 19 nt, Artificial Sequence
  Description of Artificial Sequence: Synthetic oligonucleotide
cauggccuucacccgagag

SEQ ID NO: 1239429 - RNA, 19 nt, Artificial Sequence
  Description of Artificial Sequence: Synthetic oligonucleotide
cacgaaccaaaccgaggcc

SEQ ID NO: 1239430 - RNA, 19 nt, Artificial Sequence
  Description of Artificial Sequence: Synthetic oligonucleotide
uccuaggcauaguacugaa

SEQ ID NO: 1239431 - RNA, 19 nt, Artificial Sequence
  Description of Artificial Sequence: Synthetic oligonucleotide
uuccgugaguggaucugca

SEQ ID NO: 1239432 - RNA, 19 nt, Artificial Sequence
  Description of Artificial Sequence: Synthetic oligonucleotide
uacuuggguguugggcugg

SEQ ID NO: 1239433 - RNA, 19 nt, Artificial Sequence
  Description of Artificial Sequence: Synthetic oligonucleotide
uucaugggugacucgcaau

SEQ ID NO: 1239434 - RNA, 19 nt, Artificial Sequence
  Description of Artificial Sequence: Synthetic oligonucleotide
ucgcaauacuucacucuuc

SEQ ID NO: 1239435 - RNA, 19 nt, Artificial Sequence
  Description of Artificial Sequence: Synthetic oligonucleotide
ucguugggcaucgggaacu

SEQ ID NO: 1239436 - RNA, 19 nt, Artificial Sequence
  Description of Artificial Sequence: Synthetic oligonucleotide
uguggacaucuugagcacu

SEQ ID NO: 1239437 - RNA, 19 nt, Artificial Sequence
  Description of Artificial Sequence: Synthetic oligonucleotide
guaagcuccguagcgcccc

SEQ ID NO: 1239438 - RNA, 19 nt, Artificial Sequence
  Description of Artificial Sequence: Synthetic oligonucleotide
cccgaugucacuguauugc

SEQ ID NO: 1239439 - RNA, 19 nt, Artificial Sequence
  Description of Artificial Sequence: Synthetic oligonucleotide
ugggagugcgcccgagccc

SEQ ID NO: 1239440 - RNA, 19 nt, Artificial Sequence
  Description of Artificial Sequence: Synthetic oligonucleotide
accgaaacugggagugcgc

SEQ ID NO: 1239441 - RNA, 19 nt, Artificial Sequence
  Description of Artificial Sequence: Synthetic oligonucleotide
caacccgaucacugguagg

SEQ ID NO: 1239442 - RNA, 19 nt, Artificial Sequence
  Description of Artificial Sequence: Synthetic oligonucleotide
agaccgaaacugggagugc

SEQ ID NO: 1239443 - RNA, 19 nt, Artificial Sequence
  Description of Artificial Sequence: Synthetic oligonucleotide
agugcgcccgagccccugc

SEQ ID NO: 1239444 - RNA, 19 nt, Artificial Sequence
  Description of Artificial Sequence: Synthetic oligonucleotide
caacuucaagaagguagcc

SEQ ID NO: 1239445 - RNA, 19 nt, Artificial Sequence
  Description of Artificial Sequence: Synthetic oligonucleotide
cugcaugauucuagcccgg

SEQ ID NO: 1239446 - RNA, 19 nt, Artificial Sequence
  Description of Artificial Sequence: Synthetic oligonucleotide
cuuccgugaguggaucugc

SEQ ID NO: 1239447 - RNA, 19 nt, Artificial Sequence
  Description of Artificial Sequence: Synthetic oligonucleotide
cguguggaaguuuugauca

SEQ ID NO: 1239448 - RNA, 19 nt, Artificial Sequence
  Description of Artificial Sequence: Synthetic oligonucleotide
acugucgaagcgcuuggua

SEQ ID NO: 1239449 - RNA, 19 nt, Artificial Sequence
  Description of Artificial Sequence: Synthetic oligonucleotide
acaggcucgggcaagcaga

SEQ ID NO: 1239450 - RNA, 19 nt, Artificial Sequence
  Description of Artificial Sequence: Synthetic oligonucleotide
cuguaccucuaagaugccc

SEQ ID NO: 1239451 - RNA, 19 nt, Artificial Sequence
  Description of Artificial Sequence: Synthetic oligonucleotide
ucccucucuccaccagcgg

SEQ ID NO: 1239452 - RNA, 19 nt, Artificial Sequence
  Description of Artificial Sequence: Synthetic oligonucleotide
gcgauuaccuuuacuuggg

SEQ ID NO: 1239453 - RNA, 19 nt, Artificial Sequence
  Description of Artificial Sequence: Synthetic oligonucleotide
gggcaaaagcaucacggac

SEQ ID NO: 1239454 - RNA, 19 nt, Artificial Sequence
  Description of Artificial Sequence: Synthetic oligonucleotide
guauguuugucguguggaa

SEQ ID NO: 1239455 - RNA, 19 nt, Artificial Sequence
  Description of Artificial Sequence: Synthetic oligonucleotide
acacggucgccaucuucuc

SEQ ID NO: 1239456 - RNA, 19 nt, Artificial Sequence
  Description of Artificial Sequence: Synthetic oligonucleotide
gcgcagugcgaucauaccc

SEQ ID NO: 1239457 - RNA, 19 nt, Artificial Sequence
  Description of Artificial Sequence: Synthetic oligonucleotide
guuuugaucacagcacacu

SEQ ID NO: 1239458 - RNA, 19 nt, Artificial Sequence
  Description of Artificial Sequence: Synthetic oligonucleotide
ggguaagcuccguagcgcc

SEQ ID NO: 1239459 - RNA, 19 nt, Artificial Sequence
  Description of Artificial Sequence: Synthetic oligonucleotide
gcugcgauuaccuuuacuu

SEQ ID NO: 1239460 - RNA, 19 nt, Artificial Sequence
  Description of Artificial Sequence: Synthetic oligonucleotide
uuaccuuuacuuggguguu

SEQ ID NO: 1239461 - RNA, 19 nt, Artificial Sequence
  Description of Artificial Sequence: Synthetic oligonucleotide
cuccguagcgccccugcgc

SEQ ID NO: 1239462 - RNA, 19 nt, Artificial Sequence
  Description of Artificial Sequence: Synthetic oligonucleotide
cacggaccaguuuggcacc

SEQ ID NO: 1239463 - RNA, 19 nt, Artificial Sequence
  Description of Artificial Sequence: Synthetic oligonucleotide
ucauacccgccuccacaca

SEQ ID NO: 1239464 - RNA, 19 nt, Artificial Sequence
  Description of Artificial Sequence: Synthetic oligonucleotide
cuccuggucauugggauca

SEQ ID NO: 1239465 - RNA, 19 nt, Artificial Sequence
  Description of Artificial Sequence: Synthetic oligonucleotide
uucguggguaagcuccgua

SEQ ID NO: 1239466 - RNA, 19 nt, Artificial Sequence
  Description of Artificial Sequence: Synthetic oligonucleotide
uccggcgucggcagcagau

SEQ ID NO: 1239467 - RNA, 19 nt, Artificial Sequence
  Description of Artificial Sequence: Synthetic oligonucleotide
cacaggcucgggcaagcag

SEQ ID NO: 1239468 - RNA, 19 nt, Artificial Sequence
  Description of Artificial Sequence: Synthetic oligonucleotide
ugugguucauaggcaggac

SEQ ID NO: 1239469 - RNA, 19 nt, Artificial Sequence
  Description of Artificial Sequence: Synthetic oligonucleotide
cagaccagcgggcagacua

SEQ ID NO: 1239470 - RNA, 19 nt, Artificial Sequence
  Description of Artificial Sequence: Synthetic oligonucleotide
auguagucuucguggguaa

SEQ ID NO: 1239471 - RNA, 19 nt, Artificial Sequence
  Description of Artificial Sequence: Synthetic oligonucleotide
uugcccuuccucugugagu

SEQ ID NO: 1239472 - RNA, 19 nt, Artificial Sequence
  Description of Artificial Sequence: Synthetic oligonucleotide
uuguuucggggaacagaaa

SEQ ID NO: 1239473 - RNA, 19 nt, Artificial Sequence
  Description of Artificial Sequence: Synthetic oligonucleotide
cagugcaacgagccaacuc

SEQ ID NO: 1239474 - RNA, 19 nt, Artificial Sequence
  Description of Artificial Sequence: Synthetic oligonucleotide
acuggacucuccggcgucg

SEQ ID NO: 1239475 - RNA, 19 nt, Artificial Sequence
  Description of Artificial Sequence: Synthetic oligonucleotide
uacccgccuccacacacac

SEQ ID NO: 1239476 - RNA, 19 nt, Artificial Sequence
  Description of Artificial Sequence: Synthetic oligonucleotide
guccccggcuuucucacug

SEQ ID NO: 1239477 - RNA, 19 nt, Artificial Sequence
  Description of Artificial Sequence: Synthetic oligonucleotide
caggcucgggcaagcagag

SEQ ID NO: 1239478 - RNA, 19 nt, Artificial Sequence
  Description of Artificial Sequence: Synthetic oligonucleotide
ggaaguauguuugucgugu

SEQ ID NO: 1239479 - RNA, 19 nt, Artificial Sequence
  Description of Artificial Sequence: Synthetic oligonucleotide
cucguugggcaucgggaac

SEQ ID NO: 1239480 - RNA, 19 nt, Artificial Sequence
  Description of Artificial Sequence: Synthetic oligonucleotide
cacgauuccugacuccaca

SEQ ID NO: 1239481 - RNA, 19 nt, Artificial Sequence
  Description of Artificial Sequence: Synthetic oligonucleotide
uaccaggcggcccguacau

SEQ ID NO: 1239482 - RNA, 19 nt, Artificial Sequence
  Description of Artificial Sequence: Synthetic oligonucleotide
aguucacgucaggacugac

SEQ ID NO: 1239483 - RNA, 19 nt, Artificial Sequence
  Description of Artificial Sequence: Synthetic oligonucleotide
ugccgagucacuggacucu

SEQ ID NO: 1239484 - RNA, 19 nt, Artificial Sequence
  Description of Artificial Sequence: Synthetic oligonucleotide
cacacacggccuugcacug

SEQ ID NO: 1239485 - RNA, 19 nt, Artificial Sequence
  Description of Artificial Sequence: Synthetic oligonucleotide
acuccacgaaccaaaccga

SEQ ID NO: 1239486 - RNA, 19 nt, Artificial Sequence
  Description of Artificial Sequence: Synthetic oligonucleotide
aaacugggagugcgcccga

SEQ ID NO: 1239487 - RNA, 19 nt, Artificial Sequence
  Description of Artificial Sequence: Synthetic oligonucleotide
cagugccgagcgaaucugc

SEQ ID NO: 1239488 - RNA, 19 nt, Artificial Sequence
  Description of Artificial Sequence: Synthetic oligonucleotide
uguuugucguguggaaguu

SEQ ID NO: 1239489 - RNA, 19 nt, Artificial Sequence
  Description of Artificial Sequence: Synthetic oligonucleotide
caggucaauauuggcacca

SEQ ID NO: 1239490 - RNA, 19 nt, Artificial Sequence
  Description of Artificial Sequence: Synthetic oligonucleotide
uaccuuuacuuggguguug

SEQ ID NO: 1239491 - RNA, 19 nt, Artificial Sequence
  Description of Artificial Sequence: Synthetic oligonucleotide
guucacgucaggacugaca

SEQ ID NO: 1239492 - RNA, 19 nt, Artificial Sequence
  Description of Artificial Sequence: Synthetic oligonucleotide
uccgugaguggaucugcau

SEQ ID NO: 1239493 - RNA, 19 nt, Artificial Sequence
  Description of Artificial Sequence: Synthetic oligonucleotide
caucacggaccaguuuggc

SEQ ID NO: 1239494 - RNA, 19 nt, Artificial Sequence
  Description of Artificial Sequence: Synthetic oligonucleotide
guucaugggugacucgcaa

SEQ ID NO: 1239495 - RNA, 19 nt, Artificial Sequence
  Description of Artificial Sequence: Synthetic oligonucleotide
uccacagaauuagcucccu

SEQ ID NO: 1239496 - RNA, 19 nt, Artificial Sequence
  Description of Artificial Sequence: Synthetic oligonucleotide
cuugcucggcuucauccca

SEQ ID NO: 1239497 - RNA, 19 nt, Artificial Sequence
  Description of Artificial Sequence: Synthetic oligonucleotide
gugacucgcaauacuucac

SEQ ID NO: 1239498 - RNA, 19 nt, Artificial Sequence
  Description of Artificial Sequence: Synthetic oligonucleotide
ugggaucaacguccagcaa

SEQ ID NO: 1239499 - RNA, 19 nt, Artificial Sequence
  Description of Artificial Sequence: Synthetic oligonucleotide
cacccacgauuccugacuc

SEQ ID NO: 1239500 - RNA, 19 nt, Artificial Sequence
  Description of Artificial Sequence: Synthetic oligonucleotide
gcaacgagccaacuccuca

SEQ ID NO: 1239501 - RNA, 19 nt, Artificial Sequence
  Description of Artificial Sequence: Synthetic oligonucleotide
gccccauugaagucaucag

SEQ ID NO: 1239502 - RNA, 19 nt, Artificial Sequence
  Description of Artificial Sequence: Synthetic oligonucleotide
cugcaugaaaagaccgaaa

SEQ ID NO: 1239503 - RNA, 19 nt, Artificial Sequence
  Description of Artificial Sequence: Synthetic oligonucleotide
gggcuggauacccaaguuc

SEQ ID NO: 1239504 - RNA, 19 nt, Artificial Sequence
  Description of Artificial Sequence: Synthetic oligonucleotide
cagugcgaucauacccgcc

SEQ ID NO: 1239505 - RNA, 19 nt, Artificial Sequence
  Description of Artificial Sequence: Synthetic oligonucleotide
aacugggagugcgcccgag

SEQ ID NO: 1239506 - RNA, 19 nt, Artificial Sequence
  Description of Artificial Sequence: Synthetic oligonucleotide
ggacuccacgaaccaaacc

SEQ ID NO: 1239507 - RNA, 19 nt, Artificial Sequence
  Description of Artificial Sequence: Synthetic oligonucleotide
uaagcuccguagcgccccu

SEQ ID NO: 1239508 - RNA, 19 nt, Artificial Sequence
  Description of Artificial Sequence: Synthetic oligonucleotide
ccgugaguggaucugcaug

SEQ ID NO: 1239509 - RNA, 19 nt, Artificial Sequence
  Description of Artificial Sequence: Synthetic oligonucleotide
uugguaccaauggcaucca

SEQ ID NO: 1239510 - RNA, 19 nt, Artificial Sequence
  Description of Artificial Sequence: Synthetic oligonucleotide
ccuaggcauaguacugaag

SEQ ID NO: 1239511 - RNA, 19 nt, Artificial Sequence
  Description of Artificial Sequence: Synthetic oligonucleotide
ccaacccgaucacugguag

SEQ ID NO: 1239512 - RNA, 19 nt, Artificial Sequence
  Description of Artificial Sequence: Synthetic oligonucleotide
cccgaucacugguaggaag

SEQ ID NO: 1239513 - RNA, 19 nt, Artificial Sequence
  Description of Artificial Sequence: Synthetic oligonucleotide
acacacggccuugcacugg

SEQ ID NO: 1239514 - RNA, 19 nt, Artificial Sequence
  Description of Artificial Sequence: Synthetic oligonucleotide
cuaccaacuccuggaucug

SEQ ID NO: 1239515 - RNA, 19 nt, Artificial Sequence
  Description of Artificial Sequence: Synthetic oligonucleotide
cucgcaauacuucacucuu

SEQ ID NO: 1239516 - RNA, 19 nt, Artificial Sequence
  Description of Artificial Sequence: Synthetic oligonucleotide
gcuuuaguccacagaccag

SEQ ID NO: 1239517 - RNA, 19 nt, Artificial Sequence
  Description of Artificial Sequence: Synthetic oligonucleotide
uccugccgagucacuggac

SEQ ID NO: 1239518 - RNA, 19 nt, Artificial Sequence
  Description of Artificial Sequence: Synthetic oligonucleotide
agcgggcagacuagagguc

SEQ ID NO: 1239519 - RNA, 19 nt, Artificial Sequence
  Description of Artificial Sequence: Synthetic oligonucleotide
gggagugcgcccgagcccc

SEQ ID NO: 1239520 - RNA, 19 nt, Artificial Sequence
  Description of Artificial Sequence: Synthetic oligonucleotide
ccaggucaauauuggcacc

SEQ ID NO: 1239521 - RNA, 19 nt, Artificial Sequence
  Description of Artificial Sequence: Synthetic oligonucleotide
gcgaacuucacccacgauu

SEQ ID NO: 1239522 - RNA, 19 nt, Artificial Sequence
  Description of Artificial Sequence: Synthetic oligonucleotide
ggguguugggcuggaagcc

SEQ ID NO: 1239523 - RNA, 19 nt, Artificial Sequence
  Description of Artificial Sequence: Synthetic oligonucleotide
cugggccccauugaaguca

SEQ ID NO: 1239524 - RNA, 19 nt, Artificial Sequence
  Description of Artificial Sequence: Synthetic oligonucleotide
gaaccaaaccgaggcccca

SEQ ID NO: 1239525 - RNA, 19 nt, Artificial Sequence
  Description of Artificial Sequence: Synthetic oligonucleotide
gucguguggaaguuuugau

SEQ ID NO: 1239526 - RNA, 19 nt, Artificial Sequence
  Description of Artificial Sequence: Synthetic oligonucleotide
gucgaagcgcuugguacca

SEQ ID NO: 1239527 - RNA, 19 nt, Artificial Sequence
  Description of Artificial Sequence: Synthetic oligonucleotide
gcagugcgaucauacccgc

SEQ ID NO: 1239528 - RNA, 19 nt, Artificial Sequence
  Description of Artificial Sequence: Synthetic oligonucleotide
cccggcuuucucacugucg

SEQ ID NO: 1239529 - RNA, 19 nt, Artificial Sequence
  Description of Artificial Sequence: Synthetic oligonucleotide
gaucaacguccagcaacuc

SEQ ID NO: 1239530 - RNA, 19 nt, Artificial Sequence
  Description of Artificial Sequence: Synthetic oligonucleotide
cgaaccaaaccgaggcccc

SEQ ID NO: 1239531 - RNA, 19 nt, Artificial Sequence
  Description of Artificial Sequence: Synthetic oligonucleotide
cguggguaagcuccguagc

SEQ ID NO: 1239532 - RNA, 19 nt, Artificial Sequence
  Description of Artificial Sequence: Synthetic oligonucleotide
ggcggcacaggcucgggca

SEQ ID NO: 1239533 - RNA, 19 nt, Artificial Sequence
  Description of Artificial Sequence: Synthetic oligonucleotide
gugcgaucauacccgccuc

SEQ ID NO: 1239534 - RNA, 19 nt, Artificial Sequence
  Description of Artificial Sequence: Synthetic oligonucleotide
cgcucggacuccacgaacc

SEQ ID NO: 1239535 - RNA, 19 nt, Artificial Sequence
  Description of Artificial Sequence: Synthetic oligonucleotide
gguaagcuccguagcgccc

SEQ ID NO: 1239536 - RNA, 19 nt, Artificial Sequence
  Description of Artificial Sequence: Synthetic oligonucleotide
ggauacccaaguucucaaa

SEQ ID NO: 1239537 - RNA, 19 nt, Artificial Sequence
  Description of Artificial Sequence: Synthetic oligonucleotide
guagcgccccugcgcagug

SEQ ID NO: 1239538 - RNA, 19 nt, Artificial Sequence
  Description of Artificial Sequence: Synthetic oligonucleotide
caaaagcaucacggaccag

SEQ ID NO: 1239539 - RNA, 19 nt, Artificial Sequence
  Description of Artificial Sequence: Synthetic oligonucleotide
gcuugguaccaauggcauc

SEQ ID NO: 1239540 - RNA, 19 nt, Artificial Sequence
  Description of Artificial Sequence: Synthetic oligonucleotide
cugggcggcacaggcucgg

SEQ ID NO: 1239541 - RNA, 19 nt, Artificial Sequence
  Description of Artificial Sequence: Synthetic oligonucleotide
gaucacugguaggaaguau

SEQ ID NO: 1239542 - RNA, 19 nt, Artificial Sequence
  Description of Artificial Sequence: Synthetic oligonucleotide
gcgaaucugccgcucggac

SEQ ID NO: 1239543 - RNA, 19 nt, Artificial Sequence
  Description of Artificial Sequence: Synthetic oligonucleotide
ggaccaguuuggcaccauc

SEQ ID NO: 1239544 - RNA, 19 nt, Artificial Sequence
  Description of Artificial Sequence: Synthetic oligonucleotide
uucacccgagagucauauu

SEQ ID NO: 1239545 - RNA, 19 nt, Artificial Sequence
  Description of Artificial Sequence: Synthetic oligonucleotide
auccaccaacccgaucacu

SEQ ID NO: 1239546 - RNA, 19 nt, Artificial Sequence
  Description of Artificial Sequence: Synthetic oligonucleotide
auacccgccuccacacaca

SEQ ID NO: 1239547 - RNA, 19 nt, Artificial Sequence
  Description of Artificial Sequence: Synthetic oligonucleotide
gugcgcccgagccccugcg

SEQ ID NO: 1239548 - RNA, 19 nt, Artificial Sequence
  Description of Artificial Sequence: Synthetic oligonucleotide
uucuagcccgggccuccuc

SEQ ID NO: 1239549 - RNA, 19 nt, Artificial Sequence
  Description of Artificial Sequence: Synthetic oligonucleotide
gcuccguagcgccccugcg

SEQ ID NO: 1239550 - RNA, 19 nt, Artificial Sequence
  Description of Artificial Sequence: Synthetic oligonucleotide
uggcugcgauuaccuuuac

SEQ ID NO: 1239551 - RNA, 19 nt, Artificial Sequence
  Description of Artificial Sequence: Synthetic oligonucleotide
ugggcggcacaggcucggg

SEQ ID NO: 1239552 - RNA, 19 nt, Artificial Sequence
  Description of Artificial Sequence: Synthetic oligonucleotide
gggugacucgcaauacuuc

SEQ ID NO: 1239553 - RNA, 19 nt, Artificial Sequence
  Description of Artificial Sequence: Synthetic oligonucleotide
ggucgccaucuucuccugc

SEQ ID NO: 1239554 - RNA, 19 nt, Artificial Sequence
  Description of Artificial Sequence: Synthetic oligonucleotide
gguaccaauggcauccaau

SEQ ID NO: 1239555 - RNA, 19 nt, Artificial Sequence
  Description of Artificial Sequence: Synthetic oligonucleotide
ggccugccaacuucaagaa

SEQ ID NO: 1239556 - RNA, 19 nt, Artificial Sequence
  Description of Artificial Sequence: Synthetic oligonucleotide
cgagcgaaucugccgcucg

SEQ ID NO: 1239557 - RNA, 19 nt, Artificial Sequence
  Description of Artificial Sequence: Synthetic oligonucleotide
caacgagccaacuccucau

SEQ ID NO: 1239558 - RNA, 19 nt, Artificial Sequence
  Description of Artificial Sequence: Synthetic oligonucleotide
cuucacccgagagucauau

SEQ ID NO: 1239559 - RNA, 19 nt, Artificial Sequence
  Description of Artificial Sequence: Synthetic oligonucleotide
ggcccguacaucagcacuc

SEQ ID NO: 1239560 - RNA, 19 nt, Artificial Sequence
  Description of Artificial Sequence: Synthetic oligonucleotide
gcgcccgagccccugcggg

SEQ ID NO: 1239561 - RNA, 19 nt, Artificial Sequence
  Description of Artificial Sequence: Synthetic oligonucleotide
gugugcgcuggaugaucuc

SEQ ID NO: 1239562 - RNA, 19 nt, Artificial Sequence
  Description of Artificial Sequence: Synthetic oligonucleotide
auucuagcccgggccuccu

SEQ ID NO: 1239563 - RNA, 19 nt, Artificial Sequence
  Description of Artificial Sequence: Synthetic oligonucleotide
gaccagcgggcagacuaga

SEQ ID NO: 1239564 - RNA, 19 nt, Artificial Sequence
  Description of Artificial Sequence: Synthetic oligonucleotide
ccaacuccucauaguucac

SEQ ID NO: 1239565 - RNA, 19 nt, Artificial Sequence
  Description of Artificial Sequence: Synthetic oligonucleotide
caccuuuuauuaucagcuu

SEQ ID NO: 1239566 - RNA, 19 nt, Artificial Sequence
  Description of Artificial Sequence: Synthetic oligonucleotide
gcaucgggaacucaaucuu

SEQ ID NO: 1239567 - RNA, 19 nt, Artificial Sequence
  Description of Artificial Sequence: Synthetic oligonucleotide
ggacucuccggcgucggca

SEQ ID NO: 1239568 - RNA, 19 nt, Artificial Sequence
  Description of Artificial Sequence: Synthetic oligonucleotide
gcucggacuccacgaacca

SEQ ID NO: 1239569 - RNA, 19 nt, Artificial Sequence
  Description of Artificial Sequence: Synthetic oligonucleotide
acgucaggacugacauuca

SEQ ID NO: 1239570 - RNA, 19 nt, Artificial Sequence
  Description of Artificial Sequence: Synthetic oligonucleotide
ccacgauuccugacuccac

SEQ ID NO: 1239571 - RNA, 19 nt, Artificial Sequence
  Description of Artificial Sequence: Synthetic oligonucleotide
ucgaagcgcuugguaccaa

SEQ ID NO: 1239572 - RNA, 19 nt, Artificial Sequence
  Description of Artificial Sequence: Synthetic oligonucleotide
ccgaucacugguaggaagu

SEQ ID NO: 1239573 - RNA, 19 nt, Artificial Sequence
  Description of Artificial Sequence: Synthetic oligonucleotide
acccgaucacugguaggaa

SEQ ID NO: 1239574 - RNA, 19 nt, Artificial Sequence
  Description of Artificial Sequence: Synthetic oligonucleotide
ccagugccgagcgaaucug

SEQ ID NO: 1239575 - RNA, 19 nt, Artificial Sequence
  Description of Artificial Sequence: Synthetic oligonucleotide
cccacgauuccugacucca

SEQ ID NO: 1239576 - RNA, 19 nt, Artificial Sequence
  Description of Artificial Sequence: Synthetic oligonucleotide
guugggcaucgggaacuca

SEQ ID NO: 1239577 - RNA, 19 nt, Artificial Sequence
  Description of Artificial Sequence: Synthetic oligonucleotide
caggaccgccccguggcuc

SEQ ID NO: 1239578 - RNA, 19 nt, Artificial Sequence
  Description of Artificial Sequence: Synthetic oligonucleotide
cucggacuccacgaaccaa

SEQ ID NO: 1239579 - RNA, 19 nt, Artificial Sequence
  Description of Artificial Sequence: Synthetic oligonucleotide
cagcggcgaacuucaccca

SEQ ID NO: 1239580 - RNA, 19 nt, Artificial Sequence
  Description of Artificial Sequence: Synthetic oligonucleotide
gagugcgcccgagccccug

SEQ ID NO: 1239581 - RNA, 19 nt, Artificial Sequence
  Description of Artificial Sequence: Synthetic oligonucleotide
gcgaucauacccgccucca

SEQ ID NO: 1239582 - RNA, 19 nt, Artificial Sequence
  Description of Artificial Sequence: Synthetic oligonucleotide
caggaucagauaggagucu

SEQ ID NO: 1239583 - RNA, 19 nt, Artificial Sequence
  Description of Artificial Sequence: Synthetic oligonucleotide
uccuggucauugggaucaa

SEQ ID NO: 1239584 - RNA, 19 nt, Artificial Sequence
  Description of Artificial Sequence: Synthetic oligonucleotide
gcucggcuucaucccacac

SEQ ID NO: 1239585 - RNA, 19 nt, Artificial Sequence
  Description of Artificial Sequence: Synthetic oligonucleotide
caggcgcccugagcggagc

SEQ ID NO: 1239586 - RNA, 19 nt, Artificial Sequence
  Description of Artificial Sequence: Synthetic oligonucleotide
cggacuccacgaaccaaac

SEQ ID NO: 1239587 - RNA, 19 nt, Artificial Sequence
  Description of Artificial Sequence: Synthetic oligonucleotide
ggcgucggcagcagauuca

SEQ ID NO: 1239588 - RNA, 19 nt, Artificial Sequence
  Description of Artificial Sequence: Synthetic oligonucleotide
cauauucugugggcagggu

SEQ ID NO: 1239589 - RNA, 19 nt, Artificial Sequence
  Description of Artificial Sequence: Synthetic oligonucleotide
guuugucguguggaaguuu

SEQ ID NO: 1239590 - RNA, 19 nt, Artificial Sequence
  Description of Artificial Sequence: Synthetic oligonucleotide
caucccacacggucgccau

SEQ ID NO: 1239591 - RNA, 19 nt, Artificial Sequence
  Description of Artificial Sequence: Synthetic oligonucleotide
ggcgcccugagcggagcag

SEQ ID NO: 1239592 - RNA, 19 nt, Artificial Sequence
  Description of Artificial Sequence: Synthetic oligonucleotide
cgaucauacccgccuccac

SEQ ID NO: 1239593 - RNA, 19 nt, Artificial Sequence
  Description of Artificial Sequence: Synthetic oligonucleotide
ggcugcgauuaccuuuacu

SEQ ID NO: 1239594 - RNA, 19 nt, Artificial Sequence
  Description of Artificial Sequence: Synthetic oligonucleotide
ccgcucggacuccacgaac

SEQ ID NO: 1239595 - RNA, 19 nt, Artificial Sequence
  Description of Artificial Sequence: Synthetic oligonucleotide
gcggcccguacaucagcac

SEQ ID NO: 1239596 - RNA, 19 nt, Artificial Sequence
  Description of Artificial Sequence: Synthetic oligonucleotide
gaccgccccguggcucgcc

SEQ ID NO: 1239597 - RNA, 19 nt, Artificial Sequence
  Description of Artificial Sequence: Synthetic oligonucleotide
gcgcagccuuucucaacuc

SEQ ID NO: 1239598 - RNA, 19 nt, Artificial Sequence
  Description of Artificial Sequence: Synthetic oligonucleotide
ccgugugcgcuggaugauc

SEQ ID NO: 1239599 - RNA, 19 nt, Artificial Sequence
  Description of Artificial Sequence: Synthetic oligonucleotide
ggaucagauaggagucuuu

SEQ ID NO: 1239600 - RNA, 19 nt, Artificial Sequence
  Description of Artificial Sequence: Synthetic oligonucleotide
cggcgucggcagcagauuc

SEQ ID NO: 1239601 - RNA, 19 nt, Artificial Sequence
  Description of Artificial Sequence: Synthetic oligonucleotide
ccauguagucuucgugggu

SEQ ID NO: 1239602 - RNA, 19 nt, Artificial Sequence
  Description of Artificial Sequence: Synthetic oligonucleotide
ccccugcgggagcccagcg

SEQ ID NO: 1239603 - RNA, 19 nt, Artificial Sequence
  Description of Artificial Sequence: Synthetic oligonucleotide
cuucguggguaagcuccgu

SEQ ID NO: 1239604 - RNA, 19 nt, Artificial Sequence
  Description of Artificial Sequence: Synthetic oligonucleotide
cgugugcgcuggaugaucu

SEQ ID NO: 1239605 - RNA, 19 nt, Artificial Sequence
  Description of Artificial Sequence: Synthetic oligonucleotide
cacugucgaagcgcuuggu

SEQ ID NO: 1239606 - RNA, 19 nt, Artificial Sequence
  Description of Artificial Sequence: Synthetic oligonucleotide
cuccggcgucggcagcaga

SEQ ID NO: 1239607 - RNA, 19 nt, Artificial Sequence
  Description of Artificial Sequence: Synthetic oligonucleotide
cgcuugguaccaauggcau

SEQ ID NO: 1239608 - RNA, 19 nt, Artificial Sequence
  Description of Artificial Sequence: Synthetic oligonucleotide
ggucugggcggcacaggcu

SEQ ID NO: 1239609 - RNA, 19 nt, Artificial Sequence
  Description of Artificial Sequence: Synthetic oligonucleotide
cggcgaacuucacccacga

SEQ ID NO: 1239610 - RNA, 19 nt, Artificial Sequence
  Description of Artificial Sequence: Synthetic oligonucleotide
gggcagacuagagguccua

SEQ ID NO: 1239611 - RNA, 19 nt, Artificial Sequence
  Description of Artificial Sequence: Synthetic oligonucleotide
gcugagggccugccaacuu

SEQ ID NO: 1239612 - RNA, 19 nt, Artificial Sequence
  Description of Artificial Sequence: Synthetic oligonucleotide
ggcgaacuucacccacgau

SEQ ID NO: 1239613 - RNA, 19 nt, Artificial Sequence
  Description of Artificial Sequence: Synthetic oligonucleotide
ccuucacccgagagucaua

SEQ ID NO: 1239614 - RNA, 19 nt, Artificial Sequence
  Description of Artificial Sequence: Synthetic oligonucleotide
cgauuaccuuuacuugggu

SEQ ID NO: 1239615 - RNA, 19 nt, Artificial Sequence
  Description of Artificial Sequence: Synthetic oligonucleotide
cgaucacugguaggaagua

SEQ ID NO: 1239616 - RNA, 19 nt, Artificial Sequence
  Description of Artificial Sequence: Synthetic oligonucleotide
ccucuaagaugcccuccau

SEQ ID NO: 1239617 - RNA, 19 nt, Artificial Sequence
  Description of Artificial Sequence: Synthetic oligonucleotide
cuguaccaggcggcccgua

SEQ ID NO: 1239618 - RNA, 19 nt, Artificial Sequence
  Description of Artificial Sequence: Synthetic oligonucleotide
cccguacaucagcacuccu

SEQ ID NO: 1239619 - RNA, 19 nt, Artificial Sequence
  Description of Artificial Sequence: Synthetic oligonucleotide
gccgugugcgcuggaugau

SEQ ID NO: 1239620 - RNA, 19 nt, Artificial Sequence
  Description of Artificial Sequence: Synthetic oligonucleotide
gggccccauugaagucauc

SEQ ID NO: 1239621 - RNA, 19 nt, Artificial Sequence
  Description of Artificial Sequence: Synthetic oligonucleotide
cguagcgccccugcgcagu

SEQ ID NO: 1239622 - RNA, 19 nt, Artificial Sequence
  Description of Artificial Sequence: Synthetic oligonucleotide
ccggcgucggcagcagauu

SEQ ID NO: 1239623 - RNA, 19 nt, Artificial Sequence
  Description of Artificial Sequence: Synthetic oligonucleotide
cgccccugcgcagugcgau

SEQ ID NO: 1239624 - RNA, 19 nt, Artificial Sequence
  Description of Artificial Sequence: Synthetic oligonucleotide
uuaagguucucuaagaacu

SEQ ID NO: 1239625 - RNA, 19 nt, Artificial Sequence
  Description of Artificial Sequence: Synthetic oligonucleotide
cuugauauccuucaguggg

SEQ ID NO: 1239626 - RNA, 19 nt, Artificial Sequence
  Description of Artificial Sequence: Synthetic oligonucleotide
ugggauucaauaaauagga

SEQ ID NO: 1239627 - RNA, 19 nt, Artificial Sequence
  Description of Artificial Sequence: Synthetic oligonucleotide
uaaacuaaaggaagugagg

SEQ ID NO: 1239628 - RNA, 19 nt, Artificial Sequence
  Description of Artificial Sequence: Synthetic oligonucleotide
auugauuugugcuggcagc

SEQ ID NO: 1239629 - RNA, 19 nt, Artificial Sequence
  Description of Artificial Sequence: Synthetic oligonucleotide
aaaggaauacaguauggga

SEQ ID NO: 1239630 - RNA, 19 nt, Artificial Sequence
  Description of Artificial Sequence: Synthetic oligonucleotide
cauagcacgucauuaaccg

SEQ ID NO: 1239631 - RNA, 19 nt, Artificial Sequence
  Description of Artificial Sequence: Synthetic oligonucleotide
uuccuuaauauacaggaga

SEQ ID NO: 1239632 - RNA, 19 nt, Artificial Sequence
  Description of Artificial Sequence: Synthetic oligonucleotide
aaugaagucaccguaguga

SEQ ID NO: 1239633 - RNA, 19 nt, Artificial Sequence
  Description of Artificial Sequence: Synthetic oligonucleotide
uccuuaauauacaggagag

SEQ ID NO: 1239634 - RNA, 19 nt, Artificial Sequence
  Description of Artificial Sequence: Synthetic oligonucleotide
aaacuaaaggaagugagga

SEQ ID NO: 1239635 - RNA, 19 nt, Artificial Sequence
  Description of Artificial Sequence: Synthetic oligonucleotide
cuauacugaauuuaagaac

SEQ ID NO: 1239636 - RNA, 19 nt, Artificial Sequence
  Description of Artificial Sequence: Synthetic oligonucleotide
ugcuauacugaauuuaaga

SEQ ID NO: 1239637 - RNA, 19 nt, Artificial Sequence
  Description of Artificial Sequence: Synthetic oligonucleotide
acauuccgugacuugaucc

SEQ ID NO: 1239638 - RNA, 19 nt, Artificial Sequence
  Description of Artificial Sequence: Synthetic oligonucleotide
uguguauccaguuacuagu

SEQ ID NO: 1239639 - RNA, 19 nt, Artificial Sequence
  Description of Artificial Sequence: Synthetic oligonucleotide
aaccaagagcaucagcuuc

SEQ ID NO: 1239640 - RNA, 19 nt, Artificial Sequence
  Description of Artificial Sequence: Synthetic oligonucleotide
aaagggacgccucugucag

SEQ ID NO: 1239641 - RNA, 19 nt, Artificial Sequence
  Description of Artificial Sequence: Synthetic oligonucleotide
aacugugcgaacuggaggu

SEQ ID NO: 1239642 - RNA, 19 nt, Artificial Sequence
  Description of Artificial Sequence: Synthetic oligonucleotide
uuuaagguucucuaagaac

SEQ ID NO: 1239643 - RNA, 19 nt, Artificial Sequence
  Description of Artificial Sequence: Synthetic oligonucleotide
uacaguaugggauucaaua

SEQ ID NO: 1239644 - RNA, 19 nt, Artificial Sequence
  Description of Artificial Sequence: Synthetic oligonucleotide
guaaacuaaaggaagugag

SEQ ID NO: 1239645 - RNA, 19 nt, Artificial Sequence
  Description of Artificial Sequence: Synthetic oligonucleotide
uuaacuacccugaugugaa

SEQ ID NO: 1239646 - RNA, 19 nt, Artificial Sequence
  Description of Artificial Sequence: Synthetic oligonucleotide
uguaggcccgcaaagguag

SEQ ID NO: 1239647 - RNA, 19 nt, Artificial Sequence
  Description of Artificial Sequence: Synthetic oligonucleotide
auaggugcgcaguggaugc

SEQ ID NO: 1239648 - RNA, 19 nt, Artificial Sequence
  Description of Artificial Sequence: Synthetic oligonucleotide
augaagucaccguagugac

SEQ ID NO: 1239649 - RNA, 19 nt, Artificial Sequence
  Description of Artificial Sequence: Synthetic oligonucleotide
ugcgcuaaggcuagugugg

SEQ ID NO: 1239650 - RNA, 19 nt, Artificial Sequence
  Description of Artificial Sequence: Synthetic oligonucleotide
ugagcaggcccauagcacg

SEQ ID NO: 1239651 - RNA, 19 nt, Artificial Sequence
  Description of Artificial Sequence: Synthetic oligonucleotide
ugggauuuaacuacccuga

SEQ ID NO: 1239652 - RNA, 19 nt, Artificial Sequence
  Description of Artificial Sequence: Synthetic oligonucleotide
uagcccuuguccuagaagc

SEQ ID NO: 1239653 - RNA, 19 nt, Artificial Sequence
  Description of Artificial Sequence: Synthetic oligonucleotide
uuuaacuacccugauguga

SEQ ID NO: 1239654 - RNA, 19 nt, Artificial Sequence
  Description of Artificial Sequence: Synthetic oligonucleotide
agcacaaucugguaggcug

SEQ ID NO: 1239655 - RNA, 19 nt, Artificial Sequence
  Description of Artificial Sequence: Synthetic oligonucleotide
uguccuagaagcucuagcu

SEQ ID NO: 1239656 - RNA, 19 nt, Artificial Sequence
  Description of Artificial Sequence: Synthetic oligonucleotide
uuguguauccaguuacuag

SEQ ID NO: 1239657 - RNA, 19 nt, Artificial Sequence
  Description of Artificial Sequence: Synthetic oligonucleotide
aauggguaaacuaaaggaa

SEQ ID NO: 1239658 - RNA, 19 nt, Artificial Sequence
  Description of Artificial Sequence: Synthetic oligonucleotide
agaacuugucucuugcuug

SEQ ID NO: 1239659 - RNA, 19 nt, Artificial Sequence
  Description of Artificial Sequence: Synthetic oligonucleotide
ucuaguuagcaguauggcu

SEQ ID NO: 1239660 - RNA, 19 nt, Artificial Sequence
  Description of Artificial Sequence: Synthetic oligonucleotide
uagaagcucuagcuaaccg

SEQ ID NO: 1239661 - RNA, 19 nt, Artificial Sequence
  Description of Artificial Sequence: Synthetic oligonucleotide
guucucuaagaacugugcg

SEQ ID NO: 1239662 - RNA, 19 nt, Artificial Sequence
  Description of Artificial Sequence: Synthetic oligonucleotide
agaaggaaggucucucgcg

SEQ ID NO: 1239663 - RNA, 19 nt, Artificial Sequence
  Description of Artificial Sequence: Synthetic oligonucleotide
uuuucacacagggucaggg

SEQ ID NO: 1239664 - RNA, 19 nt, Artificial Sequence
  Description of Artificial Sequence: Synthetic oligonucleotide
agaaauggcuguguagagc

SEQ ID NO: 1239665 - RNA, 19 nt, Artificial Sequence
  Description of Artificial Sequence: Synthetic oligonucleotide
uauccaguuacuaguggug

SEQ ID NO: 1239666 - RNA, 19 nt, Artificial Sequence
  Description of Artificial Sequence: Synthetic oligonucleotide
uagcacgucauuaaccgca

SEQ ID NO: 1239667 - RNA, 19 nt, Artificial Sequence
  Description of Artificial Sequence: Synthetic oligonucleotide
ugaugagagggacaauggc

SEQ ID NO: 1239668 - RNA, 19 nt, Artificial Sequence
  Description of Artificial Sequence: Synthetic oligonucleotide
uuguaggucuguuuaaggu

SEQ ID NO: 1239669 - RNA, 19 nt, Artificial Sequence
  Description of Artificial Sequence: Synthetic oligonucleotide
gaagugaggaaacagaaau

SEQ ID NO: 1239670 - RNA, 19 nt, Artificial Sequence
  Description of Artificial Sequence: Synthetic oligonucleotide
cuuguaggucuguuuaagg

SEQ ID NO: 1239671 - RNA, 19 nt, Artificial Sequence
  Description of Artificial Sequence: Synthetic oligonucleotide
cuugucucuugcuuguggg

SEQ ID NO: 1239672 - RNA, 19 nt, Artificial Sequence
  Description of Artificial Sequence: Synthetic oligonucleotide
uguggguaagucgugagug

SEQ ID NO: 1239673 - RNA, 19 nt, Artificial Sequence
  Description of Artificial Sequence: Synthetic oligonucleotide
cauacuccuaggcacacgc

SEQ ID NO: 1239674 - RNA, 19 nt, Artificial Sequence
  Description of Artificial Sequence: Synthetic oligonucleotide
ucuaagaacugugcgaacu

SEQ ID NO: 1239675 - RNA, 19 nt, Artificial Sequence
  Description of Artificial Sequence: Synthetic oligonucleotide
uggguaaacuaaaggaagu

SEQ ID NO: 1239676 - RNA, 19 nt, Artificial Sequence
  Description of Artificial Sequence: Synthetic oligonucleotide
guaaccacggaccuccugc

SEQ ID NO: 1239677 - RNA, 19 nt, Artificial Sequence
  Description of Artificial Sequence: Synthetic oligonucleotide
gaaggaaggucucucgcgc

SEQ ID NO: 1239678 - RNA, 19 nt, Artificial Sequence
  Description of Artificial Sequence: Synthetic oligonucleotide
uguaucgugccacugugaa

SEQ ID NO: 1239679 - RNA, 19 nt, Artificial Sequence
  Description of Artificial Sequence: Synthetic oligonucleotide
auagcacgucauuaaccgc

SEQ ID NO: 1239680 - RNA, 19 nt, Artificial Sequence
  Description of Artificial Sequence: Synthetic oligonucleotide
agaagcucuagcuaaccgu

SEQ ID NO: 1239681 - RNA, 19 nt, Artificial Sequence
  Description of Artificial Sequence: Synthetic oligonucleotide
acuacccugaugugaaguc

SEQ ID NO: 1239682 - RNA, 19 nt, Artificial Sequence
  Description of Artificial Sequence: Synthetic oligonucleotide
ucagaucucccauuugucu

SEQ ID NO: 1239683 - RNA, 19 nt, Artificial Sequence
  Description of Artificial Sequence: Synthetic oligonucleotide
cugucccucagccaaaccg

SEQ ID NO: 1239684 - RNA, 19 nt, Artificial Sequence
  Description of Artificial Sequence: Synthetic oligonucleotide
gugggauuuaacuacccug

SEQ ID NO: 1239685 - RNA, 19 nt, Artificial Sequence
  Description of Artificial Sequence: Synthetic oligonucleotide
uccuagaagcucuagcuaa

SEQ ID NO: 1239686 - RNA, 19 nt, Artificial Sequence
  Description of Artificial Sequence: Synthetic oligonucleotide
uaaagggacgccucuguca

SEQ ID NO: 1239687 - RNA, 19 nt, Artificial Sequence
  Description of Artificial Sequence: Synthetic oligonucleotide
cuagcuaaccgugugaguc

SEQ ID NO: 1239688 - RNA, 19 nt, Artificial Sequence
  Description of Artificial Sequence: Synthetic oligonucleotide
auauacaggagagaagaca

SEQ ID NO: 1239689 - RNA, 19 nt, Artificial Sequence
  Description of Artificial Sequence: Synthetic oligonucleotide
aaguuacaaaaugaugcca

SEQ ID NO: 1239690 - RNA, 19 nt, Artificial Sequence
  Description of Artificial Sequence: Synthetic oligonucleotide
uuguccuagaagcucuagc

SEQ ID NO: 1239691 - RNA, 19 nt, Artificial Sequence
  Description of Artificial Sequence: Synthetic oligonucleotide
caaugaguggcugagugag

SEQ ID NO: 1239692 - RNA, 19 nt, Artificial Sequence
  Description of Artificial Sequence: Synthetic oligonucleotide
caggggauacccaugcucc

SEQ ID NO: 1239693 - RNA, 19 nt, Artificial Sequence
  Description of Artificial Sequence: Synthetic oligonucleotide
uuacaaaaugaugccaacu

SEQ ID NO: 1239694 - RNA, 19 nt, Artificial Sequence
  Description of Artificial Sequence: Synthetic oligonucleotide
ucucuaagaacugugcgaa

SEQ ID NO: 1239695 - RNA, 19 nt, Artificial Sequence
  Description of Artificial Sequence: Synthetic oligonucleotide
cucgaugcuccauguaucg

SEQ ID NO: 1239696 - RNA, 19 nt, Artificial Sequence
  Description of Artificial Sequence: Synthetic oligonucleotide
gaagcucuagcuaaccgug

SEQ ID NO: 1239697 - RNA, 19 nt, Artificial Sequence
  Description of Artificial Sequence: Synthetic oligonucleotide
acaguaugggauucaauaa

SEQ ID NO: 1239698 - RNA, 19 nt, Artificial Sequence
  Description of Artificial Sequence: Synthetic oligonucleotide
gucauuaaccgcagggugg

SEQ ID NO: 1239699 - RNA, 19 nt, Artificial Sequence
  Description of Artificial Sequence: Synthetic oligonucleotide
auaaagggacgccucuguc

SEQ ID NO: 1239700 - RNA, 19 nt, Artificial Sequence
  Description of Artificial Sequence: Synthetic oligonucleotide
uaagucgugagugacuggu

SEQ ID NO: 1239701 - RNA, 19 nt, Artificial Sequence
  Description of Artificial Sequence: Synthetic oligonucleotide
ugacuugauccucaaguaa

SEQ ID NO: 1239702 - RNA, 19 nt, Artificial Sequence
  Description of Artificial Sequence: Synthetic oligonucleotide
ugaagucaccguagugacg

SEQ ID NO: 1239703 - RNA, 19 nt, Artificial Sequence
  Description of Artificial Sequence: Synthetic oligonucleotide
caagacagguccuggcugg

SEQ ID NO: 1239704 - RNA, 19 nt, Artificial Sequence
  Description of Artificial Sequence: Synthetic oligonucleotide
uuagcaguauggcuucaga

SEQ ID NO: 1239705 - RNA, 19 nt, Artificial Sequence
  Description of Artificial Sequence: Synthetic oligonucleotide
uugauccucaaguaaccac

SEQ ID NO: 1239706 - RNA, 19 nt, Artificial Sequence
  Description of Artificial Sequence: Synthetic oligonucleotide
gauguggguaagucgugag

SEQ ID NO: 1239707 - RNA, 19 nt, Artificial Sequence
  Description of Artificial Sequence: Synthetic oligonucleotide
agagccagaacuugucucu

SEQ ID NO: 1239708 - RNA, 19 nt, Artificial Sequence
  Description of Artificial Sequence: Synthetic oligonucleotide
cuuagaauggcgucaccuc

SEQ ID NO: 1239709 - RNA, 19 nt, Artificial Sequence
  Description of Artificial Sequence: Synthetic oligonucleotide
agccaaaccgcucccgaac

SEQ ID NO: 1239710 - RNA, 19 nt, Artificial Sequence
  Description of Artificial Sequence: Synthetic oligonucleotide
aggucucucgcgcuuugcc

SEQ ID NO: 1239711 - RNA, 19 nt, Artificial Sequence
  Description of Artificial Sequence: Synthetic oligonucleotide
ucccgaaccaagagcauca

SEQ ID NO: 1239712 - RNA, 19 nt, Artificial Sequence
  Description of Artificial Sequence: Synthetic oligonucleotide
acugugaacagaugggcau

SEQ ID NO: 1239713 - RNA, 19 nt, Artificial Sequence
  Description of Artificial Sequence: Synthetic oligonucleotide
cuggacagcguguuugggg

SEQ ID NO: 1239714 - RNA, 19 nt, Artificial Sequence
  Description of Artificial Sequence: Synthetic oligonucleotide
uugcgcuaaggcuagugug

SEQ ID NO: 1239715 - RNA, 19 nt, Artificial Sequence
  Description of Artificial Sequence: Synthetic oligonucleotide
aguuacuaguggugggguc

SEQ ID NO: 1239716 - RNA, 19 nt, Artificial Sequence
  Description of Artificial Sequence: Synthetic oligonucleotide
aagugaggaaacagaaaug

SEQ ID NO: 1239717 - RNA, 19 nt, Artificial Sequence
  Description of Artificial Sequence: Synthetic oligonucleotide
guuacuagugguggggucc

SEQ ID NO: 1239718 - RNA, 19 nt, Artificial Sequence
  Description of Artificial Sequence: Synthetic oligonucleotide
ucauuaaccgcaggguggc

SEQ ID NO: 1239719 - RNA, 19 nt, Artificial Sequence
  Description of Artificial Sequence: Synthetic oligonucleotide
gcuauacugaauuuaagaa

SEQ ID NO: 1239720 - RNA, 19 nt, Artificial Sequence
  Description of Artificial Sequence: Synthetic oligonucleotide
aggaauacaguaugggauu

SEQ ID NO: 1239721 - RNA, 19 nt, Artificial Sequence
  Description of Artificial Sequence: Synthetic oligonucleotide
gauccucaaguaaccacgg

SEQ ID NO: 1239722 - RNA, 19 nt, Artificial Sequence
  Description of Artificial Sequence: Synthetic oligonucleotide
auucuggaaaguucugccu

SEQ ID NO: 1239723 - RNA, 19 nt, Artificial Sequence
  Description of Artificial Sequence: Synthetic oligonucleotide
cauguaucgugccacugug

SEQ ID NO: 1239724 - RNA, 19 nt, Artificial Sequence
  Description of Artificial Sequence: Synthetic oligonucleotide
augaugagagggacaaugg

SEQ ID NO: 1239725 - RNA, 19 nt, Artificial Sequence
  Description of Artificial Sequence: Synthetic oligonucleotide
agugggauuuaacuacccu

SEQ ID NO: 1239726 - RNA, 19 nt, Artificial Sequence
  Description of Artificial Sequence: Synthetic oligonucleotide
acacgcuuagaauggcguc

SEQ ID NO: 1239727 - RNA, 19 nt, Artificial Sequence
  Description of Artificial Sequence: Synthetic oligonucleotide
aagguaggccucgaugcuc

SEQ ID NO: 1239728 - RNA, 19 nt, Artificial Sequence
  Description of Artificial Sequence: Synthetic oligonucleotide
aacuacccugaugugaagu

SEQ ID NO: 1239729 - RNA, 19 nt, Artificial Sequence
  Description of Artificial Sequence: Synthetic oligonucleotide
ucccaaguggcuugguagc

SEQ ID NO: 1239730 - RNA, 19 nt, Artificial Sequence
  Description of Artificial Sequence: Synthetic oligonucleotide
ucaaggccucuugauaucc

SEQ ID NO: 1239731 - RNA, 19 nt, Artificial Sequence
  Description of Artificial Sequence: Synthetic oligonucleotide
gaugcuccauguaucgugc

SEQ ID NO: 1239732 - RNA, 19 nt, Artificial Sequence
  Description of Artificial Sequence: Synthetic oligonucleotide
cugagaguguccagcggcg

SEQ ID NO: 1239733 - RNA, 19 nt, Artificial Sequence
  Description of Artificial Sequence: Synthetic oligonucleotide
ucugagagcauaggugcgc

SEQ ID NO: 1239734 - RNA, 19 nt, Artificial Sequence
  Description of Artificial Sequence: Synthetic oligonucleotide
agggacaauggcugacaac

SEQ ID NO: 1239735 - RNA, 19 nt, Artificial Sequence
  Description of Artificial Sequence: Synthetic oligonucleotide
aggggauacccaugcuccc

SEQ ID NO: 1239736 - RNA, 19 nt, Artificial Sequence
  Description of Artificial Sequence: Synthetic oligonucleotide
aacucgugccgccccaaug

SEQ ID NO: 1239737 - RNA, 19 nt, Artificial Sequence
  Description of Artificial Sequence: Synthetic oligonucleotide
guucaggacagugggacag

SEQ ID NO: 1239738 - RNA, 19 nt, Artificial Sequence
  Description of Artificial Sequence: Synthetic oligonucleotide
ccucuaguuagcaguaugg

SEQ ID NO: 1239739 - RNA, 19 nt, Artificial Sequence
  Description of Artificial Sequence: Synthetic oligonucleotide
ucagccaaaccgcucccga

SEQ ID NO: 1239740 - RNA, 19 nt, Artificial Sequence
  Description of Artificial Sequence: Synthetic oligonucleotide
ugaccuuggugcccaaaac

SEQ ID NO: 1239741 - RNA, 19 nt, Artificial Sequence
  Description of Artificial Sequence: Synthetic oligonucleotide
cuaaccgugugagucuggg

SEQ ID NO: 1239742 - RNA, 19 nt, Artificial Sequence
  Description of Artificial Sequence: Synthetic oligonucleotide
cagagagcuguucccagcc

SEQ ID NO: 1239743 - RNA, 19 nt, Artificial Sequence
  Description of Artificial Sequence: Synthetic oligonucleotide
cugcuauacugaauuuaag

SEQ ID NO: 1239744 - RNA, 19 nt, Artificial Sequence
  Description of Artificial Sequence: Synthetic oligonucleotide
guaggucuguuuaagguuc

SEQ ID NO: 1239745 - RNA, 19 nt, Artificial Sequence
  Description of Artificial Sequence: Synthetic oligonucleotide
agcauaggugcgcagugga

SEQ ID NO: 1239746 - RNA, 19 nt, Artificial Sequence
  Description of Artificial Sequence: Synthetic oligonucleotide
uaguuagcaguauggcuuc

SEQ ID NO: 1239747 - RNA, 19 nt, Artificial Sequence
  Description of Artificial Sequence: Synthetic oligonucleotide
cucuagcuaaccgugugag

SEQ ID NO: 1239748 - RNA, 19 nt, Artificial Sequence
  Description of Artificial Sequence: Synthetic oligonucleotide
acucgugccgccccaauga

SEQ ID NO: 1239749 - RNA, 19 nt, Artificial Sequence
  Description of Artificial Sequence: Synthetic oligonucleotide
agcucuagcuaaccgugug

SEQ ID NO: 1239750 - RNA, 19 nt, Artificial Sequence
  Description of Artificial Sequence: Synthetic oligonucleotide
cauaggugcgcaguggaug

SEQ ID NO: 1239751 - RNA, 19 nt, Artificial Sequence
  Description of Artificial Sequence: Synthetic oligonucleotide
uacuccuaggcacacgcuu

SEQ ID NO: 1239752 - RNA, 19 nt, Artificial Sequence
  Description of Artificial Sequence: Synthetic oligonucleotide
uagugacgcgggcugaugu

SEQ ID NO: 1239753 - RNA, 19 nt, Artificial Sequence
  Description of Artificial Sequence: Synthetic oligonucleotide
cugaguugcgcuaaggcua

SEQ ID NO: 1239754 - RNA, 19 nt, Artificial Sequence
  Description of Artificial Sequence: Synthetic oligonucleotide
gugacugguggugauguag

SEQ ID NO: 1239755 - RNA, 19 nt, Artificial Sequence
  Description of Artificial Sequence: Synthetic oligonucleotide
agguaggccucgaugcucc

SEQ ID NO: 1239756 - RNA, 19 nt, Artificial Sequence
  Description of Artificial Sequence: Synthetic oligonucleotide
cuaguugcugucccucagc

SEQ ID NO: 1239757 - RNA, 19 nt, Artificial Sequence
  Description of Artificial Sequence: Synthetic oligonucleotide
cuguguagagccaaaggaa

SEQ ID NO: 1239758 - RNA, 19 nt, Artificial Sequence
  Description of Artificial Sequence: Synthetic oligonucleotide
aagggacgccucugucagc

SEQ ID NO: 1239759 - RNA, 19 nt, Artificial Sequence
  Description of Artificial Sequence: Synthetic oligonucleotide
gguaagucgugagugacug

SEQ ID NO: 1239760 - RNA, 19 nt, Artificial Sequence
  Description of Artificial Sequence: Synthetic oligonucleotide
aaggucucucgcgcuuugc

SEQ ID NO: 1239761 - RNA, 19 nt, Artificial Sequence
  Description of Artificial Sequence: Synthetic oligonucleotide
ggcguaggaugucugagag

SEQ ID NO: 1239762 - RNA, 19 nt, Artificial Sequence
  Description of Artificial Sequence: Synthetic oligonucleotide
cuagaagcucuagcuaacc

SEQ ID NO: 1239763 - RNA, 19 nt, Artificial Sequence
  Description of Artificial Sequence: Synthetic oligonucleotide
accguagugacgcgggcug

SEQ ID NO: 1239764 - RNA, 19 nt, Artificial Sequence
  Description of Artificial Sequence: Synthetic oligonucleotide
cuagcccuuguccuagaag

SEQ ID NO: 1239765 - RNA, 19 nt, Artificial Sequence
  Description of Artificial Sequence: Synthetic oligonucleotide
ugcgcaguggaugcugcgg

SEQ ID NO: 1239766 - RNA, 19 nt, Artificial Sequence
  Description of Artificial Sequence: Synthetic oligonucleotide
aagucaccguagugacgcg

SEQ ID NO: 1239767 - RNA, 19 nt, Artificial Sequence
  Description of Artificial Sequence: Synthetic oligonucleotide
ugagagggacaauggcuga

SEQ ID NO: 1239768 - RNA, 19 nt, Artificial Sequence
  Description of Artificial Sequence: Synthetic oligonucleotide
ggcugauguggguaagucg

SEQ ID NO: 1239769 - RNA, 19 nt, Artificial Sequence
  Description of Artificial Sequence: Synthetic oligonucleotide
uagcuaaccgugugagucu

SEQ ID NO: 1239770 - RNA, 19 nt, Artificial Sequence
  Description of Artificial Sequence: Synthetic oligonucleotide
auuugugcuggcagcuugg

SEQ ID NO: 1239771 - RNA, 19 nt, Artificial Sequence
  Description of Artificial Sequence: Synthetic oligonucleotide
aaggcuaguguggccagcu

SEQ ID NO: 1239772 - RNA, 19 nt, Artificial Sequence
  Description of Artificial Sequence: Synthetic oligonucleotide
ucuagcuaaccgugugagu

SEQ ID NO: 1239773 - RNA, 19 nt, Artificial Sequence
  Description of Artificial Sequence: Synthetic oligonucleotide
gauaaagggacgccucugu

SEQ ID NO: 1239774 - RNA, 19 nt, Artificial Sequence
  Description of Artificial Sequence: Synthetic oligonucleotide
gguaaacuaaaggaaguga

SEQ ID NO: 1239775 - RNA, 19 nt, Artificial Sequence
  Description of Artificial Sequence: Synthetic oligonucleotide
cuacccugaugugaagucc

SEQ ID NO: 1239776 - RNA, 19 nt, Artificial Sequence
  Description of Artificial Sequence: Synthetic oligonucleotide
ccauagcacgucauuaacc

SEQ ID NO: 1239777 - RNA, 19 nt, Artificial Sequence
  Description of Artificial Sequence: Synthetic oligonucleotide
uggguaagucgugagugac

SEQ ID NO: 1239778 - RNA, 19 nt, Artificial Sequence
  Description of Artificial Sequence: Synthetic oligonucleotide
guauccaguuacuaguggu

SEQ ID NO: 1239779 - RNA, 19 nt, Artificial Sequence
  Description of Artificial Sequence: Synthetic oligonucleotide
cuaaggcuaguguggccag

SEQ ID NO: 1239780 - RNA, 19 nt, Artificial Sequence
  Description of Artificial Sequence: Synthetic oligonucleotide
caguaugggauucaauaaa

SEQ ID NO: 1239781 - RNA, 19 nt, Artificial Sequence
  Description of Artificial Sequence: Synthetic oligonucleotide
auuccgugacuugauccuc

SEQ ID NO: 1239782 - RNA, 19 nt, Artificial Sequence
  Description of Artificial Sequence: Synthetic oligonucleotide
accgcucccgaaccaagag

SEQ ID NO: 1239783 - RNA, 19 nt, Artificial Sequence
  Description of Artificial Sequence: Synthetic oligonucleotide
gucagucccaaguggcuug

SEQ ID NO: 1239784 - RNA, 19 nt, Artificial Sequence
  Description of Artificial Sequence: Synthetic oligonucleotide
acgcuuagaauggcgucac

SEQ ID NO: 1239785 - RNA, 19 nt, Artificial Sequence
  Description of Artificial Sequence: Synthetic oligonucleotide
uuacuaguggugggguccc

SEQ ID NO: 1239786 - RNA, 19 nt, Artificial Sequence
  Description of Artificial Sequence: Synthetic oligonucleotide
gugagucugggagagccag

SEQ ID NO: 1239787 - RNA, 19 nt, Artificial Sequence
  Description of Artificial Sequence: Synthetic oligonucleotide
agugacgcgggcugaugug

SEQ ID NO: 1239788 - RNA, 19 nt, Artificial Sequence
  Description of Artificial Sequence: Synthetic oligonucleotide
ugagagcauaggugcgcag

SEQ ID NO: 1239789 - RNA, 19 nt, Artificial Sequence
  Description of Artificial Sequence: Synthetic oligonucleotide
cagugggauuuaacuaccc

SEQ ID NO: 1239790 - RNA, 19 nt, Artificial Sequence
  Description of Artificial Sequence: Synthetic oligonucleotide
gucaccguagugacgcggg

SEQ ID NO: 1239791 - RNA, 19 nt, Artificial Sequence
  Description of Artificial Sequence: Synthetic oligonucleotide
ccugcaggccucuaguuag

SEQ ID NO: 1239792 - RNA, 19 nt, Artificial Sequence
  Description of Artificial Sequence: Synthetic oligonucleotide
guguauccaguuacuagug

SEQ ID NO: 1239793 - RNA, 19 nt, Artificial Sequence
  Description of Artificial Sequence: Synthetic oligonucleotide
guuagcaguauggcuucag

SEQ ID NO: 1239794 - RNA, 19 nt, Artificial Sequence
  Description of Artificial Sequence: Synthetic oligonucleotide
aguaaccacggaccuccug

SEQ ID NO: 1239795 - RNA, 19 nt, Artificial Sequence
  Description of Artificial Sequence: Synthetic oligonucleotide
cuacccugugaccuuggug

SEQ ID NO: 1239796 - RNA, 19 nt, Artificial Sequence
  Description of Artificial Sequence: Synthetic oligonucleotide
ggguaaacuaaaggaagug

SEQ ID NO: 1239797 - RNA, 19 nt, Artificial Sequence
  Description of Artificial Sequence: Synthetic oligonucleotide
uccauguaucgugccacug

SEQ ID NO: 1239798 - RNA, 19 nt, Artificial Sequence
  Description of Artificial Sequence: Synthetic oligonucleotide
gugacgcgggcugaugugg

SEQ ID NO: 1239799 - RNA, 19 nt, Artificial Sequence
  Description of Artificial Sequence: Synthetic oligonucleotide
uauguggcagaggcucaag

SEQ ID NO: 1239800 - RNA, 19 nt, Artificial Sequence
  Description of Artificial Sequence: Synthetic oligonucleotide
aguugcgcuaaggcuagug

SEQ ID NO: 1239801 - RNA, 19 nt, Artificial Sequence
  Description of Artificial Sequence: Synthetic oligonucleotide
aguuguguauccaguuacu

SEQ ID NO: 1239802 - RNA, 19 nt, Artificial Sequence
  Description of Artificial Sequence: Synthetic oligonucleotide
gauacccaugcucccagcu

SEQ ID NO: 1239803 - RNA, 19 nt, Artificial Sequence
  Description of Artificial Sequence: Synthetic oligonucleotide
agccagaacuugucucuug

SEQ ID NO: 1239804 - RNA, 19 nt, Artificial Sequence
  Description of Artificial Sequence: Synthetic oligonucleotide
ucaccguagugacgcgggc

SEQ ID NO: 1239805 - RNA, 19 nt, Artificial Sequence
  Description of Artificial Sequence: Synthetic oligonucleotide
uaaccgugugagucuggga

SEQ ID NO: 1239806 - RNA, 19 nt, Artificial Sequence
  Description of Artificial Sequence: Synthetic oligonucleotide
auccucagaucucccauuu

SEQ ID NO: 1239807 - RNA, 19 nt, Artificial Sequence
  Description of Artificial Sequence: Synthetic oligonucleotide
ggaagaaacacagugggau

SEQ ID NO: 1239808 - RNA, 19 nt, Artificial Sequence
  Description of Artificial Sequence: Synthetic oligonucleotide
ucucucgcgcuuugcccag

SEQ ID NO: 1239809 - RNA, 19 nt, Artificial Sequence
  Description of Artificial Sequence: Synthetic oligonucleotide
guaucgugccacugugaac

SEQ ID NO: 1239810 - RNA, 19 nt, Artificial Sequence
  Description of Artificial Sequence: Synthetic oligonucleotide
ucccacauuccgugacuug

SEQ ID NO: 1239811 - RNA, 19 nt, Artificial Sequence
  Description of Artificial Sequence: Synthetic oligonucleotide
ucccauuugucugcauacu

SEQ ID NO: 1239812 - RNA, 19 nt, Artificial Sequence
  Description of Artificial Sequence: Synthetic oligonucleotide
aagucgugagugacuggug

SEQ ID NO: 1239813 - RNA, 19 nt, Artificial Sequence
  Description of Artificial Sequence: Synthetic oligonucleotide
ugcgaacuggaggugccca

SEQ ID NO: 1239814 - RNA, 19 nt, Artificial Sequence
  Description of Artificial Sequence: Synthetic oligonucleotide
auguaggcggcuacugcag

SEQ ID NO: 1239815 - RNA, 19 nt, Artificial Sequence
  Description of Artificial Sequence: Synthetic oligonucleotide
cacauuccgugacuugauc

SEQ ID NO: 1239816 - RNA, 19 nt, Artificial Sequence
  Description of Artificial Sequence: Synthetic oligonucleotide
ugccgccccaaugaguggc

SEQ ID NO: 1239817 - RNA, 19 nt, Artificial Sequence
  Description of Artificial Sequence: Synthetic oligonucleotide
cugacaacucgugccgccc

SEQ ID NO: 1239818 - RNA, 19 nt, Artificial Sequence
  Description of Artificial Sequence: Synthetic oligonucleotide
ggucucucgcgcuuugccc

SEQ ID NO: 1239819 - RNA, 19 nt, Artificial Sequence
  Description of Artificial Sequence: Synthetic oligonucleotide
auacccaugcucccagcua

SEQ ID NO: 1239820 - RNA, 19 nt, Artificial Sequence
  Description of Artificial Sequence: Synthetic oligonucleotide
augcugaguugcgcuaagg

SEQ ID NO: 1239821 - RNA, 19 nt, Artificial Sequence
  Description of Artificial Sequence: Synthetic oligonucleotide
cauuccgugacuugauccu

SEQ ID NO: 1239822 - RNA, 19 nt, Artificial Sequence
  Description of Artificial Sequence: Synthetic oligonucleotide
auccucaaguaaccacgga

SEQ ID NO: 1239823 - RNA, 19 nt, Artificial Sequence
  Description of Artificial Sequence: Synthetic oligonucleotide
agcuaaccgugugagucug

SEQ ID NO: 1239824 - RNA, 19 nt, Artificial Sequence
  Description of Artificial Sequence: Synthetic oligonucleotide
ugcauacuccuaggcacac

SEQ ID NO: 1239825 - RNA, 19 nt, Artificial Sequence
  Description of Artificial Sequence: Synthetic oligonucleotide
gcuaaggcuaguguggcca

SEQ ID NO: 1239826 - RNA, 19 nt, Artificial Sequence
  Description of Artificial Sequence: Synthetic oligonucleotide
auggcgucaccuccugccu

SEQ ID NO: 1239827 - RNA, 19 nt, Artificial Sequence
  Description of Artificial Sequence: Synthetic oligonucleotide
cguaggaugucugagagca

SEQ ID NO: 1239828 - RNA, 19 nt, Artificial Sequence
  Description of Artificial Sequence: Synthetic oligonucleotide
ugucagucccaaguggcuu

SEQ ID NO: 1239829 - RNA, 19 nt, Artificial Sequence
  Description of Artificial Sequence: Synthetic oligonucleotide
cugcauacuccuaggcaca

SEQ ID NO: 1239830 - RNA, 19 nt, Artificial Sequence
  Description of Artificial Sequence: Synthetic oligonucleotide
cuuguaggcccgcaaaggu

SEQ ID NO: 1239831 - RNA, 19 nt, Artificial Sequence
  Description of Artificial Sequence: Synthetic oligonucleotide
agcacgucauuaaccgcag

SEQ ID NO: 1239832 - RNA, 19 nt, Artificial Sequence
  Description of Artificial Sequence: Synthetic oligonucleotide
agcggcguaggaugucuga

SEQ ID NO: 1239833 - RNA, 19 nt, Artificial Sequence
  Description of Artificial Sequence: Synthetic oligonucleotide
gguaggcugccucgaaggc

SEQ ID NO: 1239834 - RNA, 19 nt, Artificial Sequence
  Description of Artificial Sequence: Synthetic oligonucleotide
gggauacccaugcucccag

SEQ ID NO: 1239835 - RNA, 19 nt, Artificial Sequence
  Description of Artificial Sequence: Synthetic oligonucleotide
agucccaaguggcuuggua

SEQ ID NO: 1239836 - RNA, 19 nt, Artificial Sequence
  Description of Artificial Sequence: Synthetic oligonucleotide
cacgcuuagaauggcguca

SEQ ID NO: 1239837 - RNA, 19 nt, Artificial Sequence
  Description of Artificial Sequence: Synthetic oligonucleotide
aagcucuagcuaaccgugu

SEQ ID NO: 1239838 - RNA, 19 nt, Artificial Sequence
  Description of Artificial Sequence: Synthetic oligonucleotide
guuguguauccaguuacua

SEQ ID NO: 1239839 - RNA, 19 nt, Artificial Sequence
  Description of Artificial Sequence: Synthetic oligonucleotide
guaugggauucaauaaaua

SEQ ID NO: 1239840 - RNA, 19 nt, Artificial Sequence
  Description of Artificial Sequence: Synthetic oligonucleotide
gagucugggagagccagaa

SEQ ID NO: 1239841 - RNA, 19 nt, Artificial Sequence
  Description of Artificial Sequence: Synthetic oligonucleotide
guugcgcuaaggcuagugu

SEQ ID NO: 1239842 - RNA, 19 nt, Artificial Sequence
  Description of Artificial Sequence: Synthetic oligonucleotide
cucaaguaaccacggaccu

SEQ ID NO: 1239843 - RNA, 19 nt, Artificial Sequence
  Description of Artificial Sequence: Synthetic oligonucleotide
uaggcccgcaaagguaggc

SEQ ID NO: 1239844 - RNA, 19 nt, Artificial Sequence
  Description of Artificial Sequence: Synthetic oligonucleotide
aggcggcuacugcagcauc

SEQ ID NO: 1239845 - RNA, 19 nt, Artificial Sequence
  Description of Artificial Sequence: Synthetic oligonucleotide
ugagaguguccagcggcgu

SEQ ID NO: 1239846 - RNA, 19 nt, Artificial Sequence
  Description of Artificial Sequence: Synthetic oligonucleotide
gaacuggaggugcccaucu

SEQ ID NO: 1239847 - RNA, 19 nt, Artificial Sequence
  Description of Artificial Sequence: Synthetic oligonucleotide
guccuagaagcucuagcua

SEQ ID NO: 1239848 - RNA, 19 nt, Artificial Sequence
  Description of Artificial Sequence: Synthetic oligonucleotide
cucccgaaccaagagcauc

SEQ ID NO: 1239849 - RNA, 19 nt, Artificial Sequence
  Description of Artificial Sequence: Synthetic oligonucleotide
ggccaggggauacccaugc

SEQ ID NO: 1239850 - RNA, 19 nt, Artificial Sequence
  Description of Artificial Sequence: Synthetic oligonucleotide
cucgugccgccccaaugag

SEQ ID NO: 1239851 - RNA, 19 nt, Artificial Sequence
  Description of Artificial Sequence: Synthetic oligonucleotide
gacaacucgugccgcccca

SEQ ID NO: 1239852 - RNA, 19 nt, Artificial Sequence
  Description of Artificial Sequence: Synthetic oligonucleotide
ccuuguaggucuguuuaag

SEQ ID NO: 1239853 - RNA, 19 nt, Artificial Sequence
  Description of Artificial Sequence: Synthetic oligonucleotide
ucgaugcuccauguaucgu

SEQ ID NO: 1239854 - RNA, 19 nt, Artificial Sequence
  Description of Artificial Sequence: Synthetic oligonucleotide
aaccgcucccgaaccaaga

SEQ ID NO: 1239855 - RNA, 19 nt, Artificial Sequence
  Description of Artificial Sequence: Synthetic oligonucleotide
gugcgcaguggaugcugcg

SEQ ID NO: 1239856 - RNA, 19 nt, Artificial Sequence
  Description of Artificial Sequence: Synthetic oligonucleotide
cgaaccaagagcaucagcu

SEQ ID NO: 1239857 - RNA, 19 nt, Artificial Sequence
  Description of Artificial Sequence: Synthetic oligonucleotide
cacacgcuuagaauggcgu

SEQ ID NO: 1239858 - RNA, 19 nt, Artificial Sequence
  Description of Artificial Sequence: Synthetic oligonucleotide
gcugacaacucgugccgcc

SEQ ID NO: 1239859 - RNA, 19 nt, Artificial Sequence
  Description of Artificial Sequence: Synthetic oligonucleotide
cgucauuaaccgcagggug

SEQ ID NO: 1239860 - RNA, 19 nt, Artificial Sequence
  Description of Artificial Sequence: Synthetic oligonucleotide
cgugccgccccaaugagug

SEQ ID NO: 1239861 - RNA, 19 nt, Artificial Sequence
  Description of Artificial Sequence: Synthetic oligonucleotide
gagagcauaggugcgcagu

SEQ ID NO: 1239862 - RNA, 19 nt, Artificial Sequence
  Description of Artificial Sequence: Synthetic oligonucleotide
aaccacggaccuccugcuu

SEQ ID NO: 1239863 - RNA, 19 nt, Artificial Sequence
  Description of Artificial Sequence: Synthetic oligonucleotide
cccauagcacgucauuaac

SEQ ID NO: 1239864 - RNA, 19 nt, Artificial Sequence
  Description of Artificial Sequence: Synthetic oligonucleotide
cccauuugucugcauacuc

SEQ ID NO: 1239865 - RNA, 19 nt, Artificial Sequence
  Description of Artificial Sequence: Synthetic oligonucleotide
aggccucgaugcuccaugu

SEQ ID NO: 1239866 - RNA, 19 nt, Artificial Sequence
  Description of Artificial Sequence: Synthetic oligonucleotide
ugcccaucuggugccagaa

SEQ ID NO: 1239867 - RNA, 19 nt, Artificial Sequence
  Description of Artificial Sequence: Synthetic oligonucleotide
ccaggggauacccaugcuc

SEQ ID NO: 1239868 - RNA, 19 nt, Artificial Sequence
  Description of Artificial Sequence: Synthetic oligonucleotide
uggcgucaccuccugccuc

SEQ ID NO: 1239869 - RNA, 19 nt, Artificial Sequence
  Description of Artificial Sequence: Synthetic oligonucleotide
ggcaaugcugaguugcgcu

SEQ ID NO: 1239870 - RNA, 19 nt, Artificial Sequence
  Description of Artificial Sequence: Synthetic oligonucleotide
ggugaggcauugauuugug

SEQ ID NO: 1239871 - RNA, 19 nt, Artificial Sequence
  Description of Artificial Sequence: Synthetic oligonucleotide
gagaguguccagcggcgua

SEQ ID NO: 1239872 - RNA, 19 nt, Artificial Sequence
  Description of Artificial Sequence: Synthetic oligonucleotide
gcacacgcuuagaauggcg

SEQ ID NO: 1239873 - RNA, 19 nt, Artificial Sequence
  Description of Artificial Sequence: Synthetic oligonucleotide
ccucgaugcuccauguauc

SEQ ID NO: 1239874 - RNA, 19 nt, Artificial Sequence
  Description of Artificial Sequence: Synthetic oligonucleotide
gcacaaucugguaggcugc

SEQ ID NO: 1239875 - RNA, 19 nt, Artificial Sequence
  Description of Artificial Sequence: Synthetic oligonucleotide
guaggcccgcaaagguagg

SEQ ID NO: 1239876 - RNA, 19 nt, Artificial Sequence
  Description of Artificial Sequence: Synthetic oligonucleotide
ugccucccacauuccguga

SEQ ID NO: 1239877 - RNA, 19 nt, Artificial Sequence
  Description of Artificial Sequence: Synthetic oligonucleotide
gaucucccauuugucugca

SEQ ID NO: 1239878 - RNA, 19 nt, Artificial Sequence
  Description of Artificial Sequence: Synthetic oligonucleotide
uaggcggcuacugcagcau

SEQ ID NO: 1239879 - RNA, 19 nt, Artificial Sequence
  Description of Artificial Sequence: Synthetic oligonucleotide
acuccuaggcacacgcuua

SEQ ID NO: 1239880 - RNA, 19 nt, Artificial Sequence
  Description of Artificial Sequence: Synthetic oligonucleotide
guagugacgcgggcugaug

SEQ ID NO: 1239881 - RNA, 19 nt, Artificial Sequence
  Description of Artificial Sequence: Synthetic oligonucleotide
aggcccauagcacgucauu

SEQ ID NO: 1239882 - RNA, 19 nt, Artificial Sequence
  Description of Artificial Sequence: Synthetic oligonucleotide
gcucuagcuaaccguguga

SEQ ID NO: 1239883 - RNA, 19 nt, Artificial Sequence
  Description of Artificial Sequence: Synthetic oligonucleotide
agugacugguggugaugua

SEQ ID NO: 1239884 - RNA, 19 nt, Artificial Sequence
  Description of Artificial Sequence: Synthetic oligonucleotide
ucgugccacugugaacaga

SEQ ID NO: 1239885 - RNA, 19 nt, Artificial Sequence
  Description of Artificial Sequence: Synthetic oligonucleotide
gugccgccccaaugagugg

SEQ ID NO: 1239886 - RNA, 19 nt, Artificial Sequence
  Description of Artificial Sequence: Synthetic oligonucleotide
agccuacccugugaccuug

SEQ ID NO: 1239887 - RNA, 19 nt, Artificial Sequence
  Description of Artificial Sequence: Synthetic oligonucleotide
acagugggacaggaccccu

SEQ ID NO: 1239888 - RNA, 19 nt, Artificial Sequence
  Description of Artificial Sequence: Synthetic oligonucleotide
gucgugagugacugguggu

SEQ ID NO: 1239889 - RNA, 19 nt, Artificial Sequence
  Description of Artificial Sequence: Synthetic oligonucleotide
auacuccuaggcacacgcu

SEQ ID NO: 1239890 - RNA, 19 nt, Artificial Sequence
  Description of Artificial Sequence: Synthetic oligonucleotide
gcguaggaugucugagagc

SEQ ID NO: 1239891 - RNA, 19 nt, Artificial Sequence
  Description of Artificial Sequence: Synthetic oligonucleotide
aaguaaccacggaccuccu

SEQ ID NO: 1239892 - RNA, 19 nt, Artificial Sequence
  Description of Artificial Sequence: Synthetic oligonucleotide
ggauacccaugcucccagc

SEQ ID NO: 1239893 - RNA, 19 nt, Artificial Sequence
  Description of Artificial Sequence: Synthetic oligonucleotide
gccccaaugaguggcugag

SEQ ID NO: 1239894 - RNA, 19 nt, Artificial Sequence
  Description of Artificial Sequence: Synthetic oligonucleotide
ggcggcuacugcagcaucc

SEQ ID NO: 1239895 - RNA, 19 nt, Artificial Sequence
  Description of Artificial Sequence: Synthetic oligonucleotide
ccgaaccaagagcaucagc

SEQ ID NO: 1239896 - RNA, 19 nt, Artificial Sequence
  Description of Artificial Sequence: Synthetic oligonucleotide
ccaugcucccagcuaguug

SEQ ID NO: 1239897 - RNA, 19 nt, Artificial Sequence
  Description of Artificial Sequence: Synthetic oligonucleotide
gcauacuccuaggcacacg

SEQ ID NO: 1239898 - RNA, 19 nt, Artificial Sequence
  Description of Artificial Sequence: Synthetic oligonucleotide
ggacuugagagaggcagaa

SEQ ID NO: 1239899 - RNA, 19 nt, Artificial Sequence
  Description of Artificial Sequence: Synthetic oligonucleotide
guauguggcagaggcucaa

SEQ ID NO: 1239900 - RNA, 19 nt, Artificial Sequence
  Description of Artificial Sequence: Synthetic oligonucleotide
ggagagccagaacuugucu

SEQ ID NO: 1239901 - RNA, 19 nt, Artificial Sequence
  Description of Artificial Sequence: Synthetic oligonucleotide
cgcucccgaaccaagagca

SEQ ID NO: 1239902 - RNA, 19 nt, Artificial Sequence
  Description of Artificial Sequence: Synthetic oligonucleotide
ccuuaauauacaggagaga

SEQ ID NO: 1239903 - RNA, 19 nt, Artificial Sequence
  Description of Artificial Sequence: Synthetic oligonucleotide
cugucagucccaaguggcu

SEQ ID NO: 1239904 - RNA, 19 nt, Artificial Sequence
  Description of Artificial Sequence: Synthetic oligonucleotide
gcggcguaggaugucugag

SEQ ID NO: 1239905 - RNA, 19 nt, Artificial Sequence
  Description of Artificial Sequence: Synthetic oligonucleotide
cagcggcguaggaugucug

SEQ ID NO: 1239906 - RNA, 19 nt, Artificial Sequence
  Description of Artificial Sequence: Synthetic oligonucleotide
ggcacacgcuuagaauggc

SEQ ID NO: 1239907 - RNA, 19 nt, Artificial Sequence
  Description of Artificial Sequence: Synthetic oligonucleotide
uaggugcgcaguggaugcu

SEQ ID NO: 1239908 - RNA, 19 nt, Artificial Sequence
  Description of Artificial Sequence: Synthetic oligonucleotide
cccgcaaagguaggccucg

SEQ ID NO: 1239909 - RNA, 19 nt, Artificial Sequence
  Description of Artificial Sequence: Synthetic oligonucleotide
gcaaugcugaguugcgcua

SEQ ID NO: 1239910 - RNA, 19 nt, Artificial Sequence
  Description of Artificial Sequence: Synthetic oligonucleotide
gccucccacauuccgugac

SEQ ID NO: 1239911 - RNA, 19 nt, Artificial Sequence
  Description of Artificial Sequence: Synthetic oligonucleotide
gguauguggcagaggcuca

SEQ ID NO: 1239912 - RNA, 19 nt, Artificial Sequence
  Description of Artificial Sequence: Synthetic oligonucleotide
gcgcuaaggcuaguguggc

SEQ ID NO: 1239913 - RNA, 19 nt, Artificial Sequence
  Description of Artificial Sequence: Synthetic oligonucleotide
ccgcucccgaaccaagagc

SEQ ID NO: 1239914 - RNA, 19 nt, Artificial Sequence
  Description of Artificial Sequence: Synthetic oligonucleotide
gccucgaugcuccauguau

SEQ ID NO: 1239915 - RNA, 19 nt, Artificial Sequence
  Description of Artificial Sequence: Synthetic oligonucleotide
cagccaaaccgcucccgaa

SEQ ID NO: 1239916 - RNA, 19 nt, Artificial Sequence
  Description of Artificial Sequence: Synthetic oligonucleotide
gggugaggcauugauuugu

SEQ ID NO: 1239917 - RNA, 19 nt, Artificial Sequence
  Description of Artificial Sequence: Synthetic oligonucleotide
uccagcggcguaggauguc

SEQ ID NO: 1239918 - RNA, 19 nt, Artificial Sequence
  Description of Artificial Sequence: Synthetic oligonucleotide
gcuaaccgugugagucugg

SEQ ID NO: 1239919 - RNA, 19 nt, Artificial Sequence
  Description of Artificial Sequence: Synthetic oligonucleotide
gcgcaguggaugcugcgga

SEQ ID NO: 1239920 - RNA, 19 nt, Artificial Sequence
  Description of Artificial Sequence: Synthetic oligonucleotide
aggcuaguguggccagcuu

SEQ ID NO: 1239921 - RNA, 19 nt, Artificial Sequence
  Description of Artificial Sequence: Synthetic oligonucleotide
gcuaguguggccagcuugu

SEQ ID NO: 1239922 - RNA, 19 nt, Artificial Sequence
  Description of Artificial Sequence: Synthetic oligonucleotide
acaacucgugccgccccaa

SEQ ID NO: 1239923 - RNA, 19 nt, Artificial Sequence
  Description of Artificial Sequence: Synthetic oligonucleotide
ggggauacccaugcuccca

SEQ ID NO: 1239924 - RNA, 19 nt, Artificial Sequence
  Description of Artificial Sequence: Synthetic oligonucleotide
cuccauguaucgugccacu

SEQ ID NO: 1239925 - RNA, 19 nt, Artificial Sequence
  Description of Artificial Sequence: Synthetic oligonucleotide
caguuacuagugguggggu

SEQ ID NO: 1239926 - RNA, 19 nt, Artificial Sequence
  Description of Artificial Sequence: Synthetic oligonucleotide
ggcccauagcacgucauua

SEQ ID NO: 1239927 - RNA, 19 nt, Artificial Sequence
  Description of Artificial Sequence: Synthetic oligonucleotide
ggugauguaggcggcuacu

SEQ ID NO: 1239928 - RNA, 19 nt, Artificial Sequence
  Description of Artificial Sequence: Synthetic oligonucleotide
gagcaggcccauagcacgu

SEQ ID NO: 1239929 - RNA, 19 nt, Artificial Sequence
  Description of Artificial Sequence: Synthetic oligonucleotide
gggauuuaacuacccugau

SEQ ID NO: 1239930 - RNA, 19 nt, Artificial Sequence
  Description of Artificial Sequence: Synthetic oligonucleotide
agcccugcgggcacccagu

SEQ ID NO: 1239931 - RNA, 19 nt, Artificial Sequence
  Description of Artificial Sequence: Synthetic oligonucleotide
ccaaaacaagacagguccu

SEQ ID NO: 1239932 - RNA, 19 nt, Artificial Sequence
  Description of Artificial Sequence: Synthetic oligonucleotide
ggagagaagacagguucau

SEQ ID NO: 1239933 - RNA, 19 nt, Artificial Sequence
  Description of Artificial Sequence: Synthetic oligonucleotide
gcuggcaaaguggugcccu

SEQ ID NO: 1239934 - RNA, 19 nt, Artificial Sequence
  Description of Artificial Sequence: Synthetic oligonucleotide
ccagccuacccugugaccu

SEQ ID NO: 1239935 - RNA, 19 nt, Artificial Sequence
  Description of Artificial Sequence: Synthetic oligonucleotide
gccucuagcccuuguccua

SEQ ID NO: 1239936 - RNA, 19 nt, Artificial Sequence
  Description of Artificial Sequence: Synthetic oligonucleotide
cuaguguggccagcuugua

SEQ ID NO: 1239937 - RNA, 19 nt, Artificial Sequence
  Description of Artificial Sequence: Synthetic oligonucleotide
cccuuguaggucuguuuaa

SEQ ID NO: 1239938 - RNA, 19 nt, Artificial Sequence
  Description of Artificial Sequence: Synthetic oligonucleotide
ccaaaccgcucccgaacca

SEQ ID NO: 1239939 - RNA, 19 nt, Artificial Sequence
  Description of Artificial Sequence: Synthetic oligonucleotide
ccacggaccuccugcuuca

SEQ ID NO: 1239940 - RNA, 19 nt, Artificial Sequence
  Description of Artificial Sequence: Synthetic oligonucleotide
gcggcuacugcagcaucca

SEQ ID NO: 1239941 - RNA, 19 nt, Artificial Sequence
  Description of Artificial Sequence: Synthetic oligonucleotide
cccgaaccaagagcaucag

SEQ ID NO: 1239942 - RNA, 19 nt, Artificial Sequence
  Description of Artificial Sequence: Synthetic oligonucleotide
ggguaagucgugagugacu

SEQ ID NO: 1239943 - RNA, 19 nt, Artificial Sequence
  Description of Artificial Sequence: Synthetic oligonucleotide
caccguagugacgcgggcu

SEQ ID NO: 1239944 - RNA, 19 nt, Artificial Sequence
  Description of Artificial Sequence: Synthetic oligonucleotide
ccugccucccacauuccgu

SEQ ID NO: 1239945 - RNA, 19 nt, Artificial Sequence
  Description of Artificial Sequence: Synthetic oligonucleotide
cucgcgcuuugcccaggaa

SEQ ID NO: 1239946 - RNA, 19 nt, Artificial Sequence
  Description of Artificial Sequence: Synthetic oligonucleotide
gcgggcugauguggguaag

SEQ ID NO: 1239947 - RNA, 19 nt, Artificial Sequence
  Description of Artificial Sequence: Synthetic oligonucleotide
cgaacuggaggugcccauc

SEQ ID NO: 1239948 - RNA, 19 nt, Artificial Sequence
  Description of Artificial Sequence: Synthetic oligonucleotide
gcccgcaaagguaggccuc

SEQ ID NO: 1239949 - RNA, 19 nt, Artificial Sequence
  Description of Artificial Sequence: Synthetic oligonucleotide
cggcguaggaugucugaga

SEQ ID NO: 1239950 - RNA, 19 nt, Artificial Sequence
  Description of Artificial Sequence: Synthetic oligonucleotide
guaggaugucugagagcau

SEQ ID NO: 1239951 - RNA, 19 nt, Artificial Sequence
  Description of Artificial Sequence: Synthetic oligonucleotide
guagcccugcgggcaccca

SEQ ID NO: 1239952 - RNA, 19 nt, Artificial Sequence
  Description of Artificial Sequence: Synthetic oligonucleotide
ggccucgaugcuccaugua

SEQ ID NO: 1239953 - RNA, 19 nt, Artificial Sequence
  Description of Artificial Sequence: Synthetic oligonucleotide
ccgcaggguggcugucuug

SEQ ID NO: 1239954 - RNA, 19 nt, Artificial Sequence
  Description of Artificial Sequence: Synthetic oligonucleotide
gcgaacuggaggugcccau

SEQ ID NO: 1239955 - RNA, 19 nt, Artificial Sequence
  Description of Artificial Sequence: Synthetic oligonucleotide
caacucgugccgccccaau

SEQ ID NO: 1239956 - RNA, 19 nt, Artificial Sequence
  Description of Artificial Sequence: Synthetic oligonucleotide
cagccuacccugugaccuu

SEQ ID NO: 1239957 - RNA, 19 nt, Artificial Sequence
  Description of Artificial Sequence: Synthetic oligonucleotide
ccucccacauuccgugacu

SEQ ID NO: 1239958 - RNA, 19 nt, Artificial Sequence
  Description of Artificial Sequence: Synthetic oligonucleotide
ggcacccaggugggcucug

SEQ ID NO: 1239959 - RNA, 19 nt, Artificial Sequence
  Description of Artificial Sequence: Synthetic oligonucleotide
gccaggggauacccaugcu

SEQ ID NO: 1239960 - RNA, 19 nt, Artificial Sequence
  Description of Artificial Sequence: Synthetic oligonucleotide
gcgucaccuccugccuccc

SEQ ID NO: 1239961 - RNA, 19 nt, Artificial Sequence
  Description of Artificial Sequence: Synthetic oligonucleotide
gaguugcgcuaaggcuagu

SEQ ID NO: 1239962 - RNA, 19 nt, Artificial Sequence
  Description of Artificial Sequence: Synthetic oligonucleotide
ccgccccaaugaguggcug

SEQ ID NO: 1239963 - RNA, 19 nt, Artificial Sequence
  Description of Artificial Sequence: Synthetic oligonucleotide
cgcgggcugauguggguaa

SEQ ID NO: 1239964 - RNA, 19 nt, Artificial Sequence
  Description of Artificial Sequence: Synthetic oligonucleotide
ccuacccugugaccuuggu

SEQ ID NO: 1239965 - RNA, 19 nt, Artificial Sequence
  Description of Artificial Sequence: Synthetic oligonucleotide
ccguagugacgcgggcuga

SEQ ID NO: 1239966 - RNA, 19 nt, Artificial Sequence
  Description of Artificial Sequence: Synthetic oligonucleotide
cccagaccuggugcugaga

SEQ ID NO: 1239967 - RNA, 19 nt, Artificial Sequence
  Description of Artificial Sequence: Synthetic oligonucleotide
gcucccgaaccaagagcau

SEQ ID NO: 1239968 - RNA, 19 nt, Artificial Sequence
  Description of Artificial Sequence: Synthetic oligonucleotide
ccgcaaagguaggccucga

SEQ ID NO: 1239969 - RNA, 19 nt, Artificial Sequence
  Description of Artificial Sequence: Synthetic oligonucleotide
gccgccccaaugaguggcu

SEQ ID NO: 1239970 - RNA, 19 nt, Artificial Sequence
  Description of Artificial Sequence: Synthetic oligonucleotide
cgcaaagguaggccucgau

SEQ ID NO: 1239971 - RNA, 19 nt, Artificial Sequence
  Description of Artificial Sequence: Synthetic oligonucleotide
ccccaaugaguggcugagu

SEQ ID NO: 1239972 - RNA, 19 nt, Artificial Sequence
  Description of Artificial Sequence: Synthetic oligonucleotide
cguagugacgcgggcugau

SEQ ID NO: 1239973 - RNA, 19 nt, Artificial Sequence
  Description of Artificial Sequence: Synthetic oligonucleotide
ugucauaaagaucagaacc

SEQ ID NO: 1239974 - RNA, 19 nt, Artificial Sequence
  Description of Artificial Sequence: Synthetic oligonucleotide
aaacauagucgguaguggc

SEQ ID NO: 1239975 - RNA, 19 nt, Artificial Sequence
  Description of Artificial Sequence: Synthetic oligonucleotide
uggaauguuaccuacuccg

SEQ ID NO: 1239976 - RNA, 19 nt, Artificial Sequence
  Description of Artificial Sequence: Synthetic oligonucleotide
gaagagaucauucuugggc

SEQ ID NO: 1239977 - RNA, 19 nt, Artificial Sequence
  Description of Artificial Sequence: Synthetic oligonucleotide
ugagaaauggcauuguuga

SEQ ID NO: 1239978 - RNA, 19 nt, Artificial Sequence
  Description of Artificial Sequence: Synthetic oligonucleotide
auaaacaggaugugguggc

SEQ ID NO: 1239979 - RNA, 19 nt, Artificial Sequence
  Description of Artificial Sequence: Synthetic oligonucleotide
gagaauaguaaacauaguc

SEQ ID NO: 1239980 - RNA, 19 nt, Artificial Sequence
  Description of Artificial Sequence: Synthetic oligonucleotide
aagucaagcagcaggaccc

SEQ ID NO: 1239981 - RNA, 19 nt, Artificial Sequence
  Description of Artificial Sequence: Synthetic oligonucleotide
guagcuuugcaucauaugc

SEQ ID NO: 1239982 - RNA, 19 nt, Artificial Sequence
  Description of Artificial Sequence: Synthetic oligonucleotide
uauccaucuugaaaggugg

SEQ ID NO: 1239983 - RNA, 19 nt, Artificial Sequence
  Description of Artificial Sequence: Synthetic oligonucleotide
ucucuauucacccaucucu

SEQ ID NO: 1239984 - RNA, 19 nt, Artificial Sequence
  Description of Artificial Sequence: Synthetic oligonucleotide
ugaagucaagcucacggcg

SEQ ID NO: 1239985 - RNA, 19 nt, Artificial Sequence
  Description of Artificial Sequence: Synthetic oligonucleotide
ugugucaagcauuuggaag

SEQ ID NO: 1239986 - RNA, 19 nt, Artificial Sequence
  Description of Artificial Sequence: Synthetic oligonucleotide
aauguuaccuacuccgugu

SEQ ID NO: 1239987 - RNA, 19 nt, Artificial Sequence
  Description of Artificial Sequence: Synthetic oligonucleotide
cuucccaacaacaugcugc

SEQ ID NO: 1239988 - RNA, 19 nt, Artificial Sequence
  Description of Artificial Sequence: Synthetic oligonucleotide
uaaagaucagaacccauga

SEQ ID NO: 1239989 - RNA, 19 nt, Artificial Sequence
  Description of Artificial Sequence: Synthetic oligonucleotide
aagagaucauucuugggcu

SEQ ID NO: 1239990 - RNA, 19 nt, Artificial Sequence
  Description of Artificial Sequence: Synthetic oligonucleotide
aggguuaaggggcaguacc

SEQ ID NO: 1239991 - RNA, 19 nt, Artificial Sequence
  Description of Artificial Sequence: Synthetic oligonucleotide
ucugauauccaucuugaaa

SEQ ID NO: 1239992 - RNA, 19 nt, Artificial Sequence
  Description of Artificial Sequence: Synthetic oligonucleotide
uggcuaauggccuggaagg

SEQ ID NO: 1239993 - RNA, 19 nt, Artificial Sequence
  Description of Artificial Sequence: Synthetic oligonucleotide
agugcuaagcugcagaaca

SEQ ID NO: 1239994 - RNA, 19 nt, Artificial Sequence
  Description of Artificial Sequence: Synthetic oligonucleotide
agagcuaaagggaggaucc

SEQ ID NO: 1239995 - RNA, 19 nt, Artificial Sequence
  Description of Artificial Sequence: Synthetic oligonucleotide
ugcuacagugcuaagcugc

SEQ ID NO: 1239996 - RNA, 19 nt, Artificial Sequence
  Description of Artificial Sequence: Synthetic oligonucleotide
auaaugucagggaaguugg

SEQ ID NO: 1239997 - RNA, 19 nt, Artificial Sequence
  Description of Artificial Sequence: Synthetic oligonucleotide
ucgguaguggcacaacuag

SEQ ID NO: 1239998 - RNA, 19 nt, Artificial Sequence
  Description of Artificial Sequence: Synthetic oligonucleotide
uguucagcgaacaucucac

SEQ ID NO: 1239999 - RNA, 19 nt, Artificial Sequence
  Description of Artificial Sequence: Synthetic oligonucleotide
uaguaaacauagucgguag

SEQ ID NO: 1240000 - RNA, 19 nt, Artificial Sequence
  Description of Artificial Sequence: Synthetic oligonucleotide
auaugcuugaagucaagcu

SEQ ID NO: 1240001 - RNA, 19 nt, Artificial Sequence
  Description of Artificial Sequence: Synthetic oligonucleotide
aagagaaucugcuggcgca

SEQ ID NO: 1240002 - RNA, 19 nt, Artificial Sequence
  Description of Artificial Sequence: Synthetic oligonucleotide
uuugguugggaaagguaag

SEQ ID NO: 1240003 - RNA, 19 nt, Artificial Sequence
  Description of Artificial Sequence: Synthetic oligonucleotide
ugagcgugcacuauaggcu

SEQ ID NO: 1240004 - RNA, 19 nt, Artificial Sequence
  Description of Artificial Sequence: Synthetic oligonucleotide
cacaguuggucagagaugg

SEQ ID NO: 1240005 - RNA, 19 nt, Artificial Sequence
  Description of Artificial Sequence: Synthetic oligonucleotide
acaucucaccaacaguuuc

SEQ ID NO: 1240006 - RNA, 19 nt, Artificial Sequence
  Description of Artificial Sequence: Synthetic oligonucleotide
cagagauggucguacaugc

SEQ ID NO: 1240007 - RNA, 19 nt, Artificial Sequence
  Description of Artificial Sequence: Synthetic oligonucleotide
aucagaacccaugaagagg

SEQ ID NO: 1240008 - RNA, 19 nt, Artificial Sequence
  Description of Artificial Sequence: Synthetic oligonucleotide
uucagcgaacaucucacca

SEQ ID NO: 1240009 - RNA, 19 nt, Artificial Sequence
  Description of Artificial Sequence: Synthetic oligonucleotide
uacagugcuaagcugcaga

SEQ ID NO: 1240010 - RNA, 19 nt, Artificial Sequence
  Description of Artificial Sequence: Synthetic oligonucleotide
uugaagucaagcucacggc

SEQ ID NO: 1240011 - RNA, 19 nt, Artificial Sequence
  Description of Artificial Sequence: Synthetic oligonucleotide
cauguuccaaacuugguca

SEQ ID NO: 1240012 - RNA, 19 nt, Artificial Sequence
  Description of Artificial Sequence: Synthetic oligonucleotide
uggucguacaugcgaaggg

SEQ ID NO: 1240013 - RNA, 19 nt, Artificial Sequence
  Description of Artificial Sequence: Synthetic oligonucleotide
ucuucuuacugaaagccuu

SEQ ID NO: 1240014 - RNA, 19 nt, Artificial Sequence
  Description of Artificial Sequence: Synthetic oligonucleotide
accuacuccguguaguguc

SEQ ID NO: 1240015 - RNA, 19 nt, Artificial Sequence
  Description of Artificial Sequence: Synthetic oligonucleotide
gugagcgugcacuauaggc

SEQ ID NO: 1240016 - RNA, 19 nt, Artificial Sequence
  Description of Artificial Sequence: Synthetic oligonucleotide
auaaagaucagaacccaug

SEQ ID NO: 1240017 - RNA, 19 nt, Artificial Sequence
  Description of Artificial Sequence: Synthetic oligonucleotide
gaauguuaccuacuccgug

SEQ ID NO: 1240018 - RNA, 19 nt, Artificial Sequence
  Description of Artificial Sequence: Synthetic oligonucleotide
ucuaaagcgagggaagacu

SEQ ID NO: 1240019 - RNA, 19 nt, Artificial Sequence
  Description of Artificial Sequence: Synthetic oligonucleotide
acuaucucuauucacccau

SEQ ID NO: 1240020 - RNA, 19 nt, Artificial Sequence
  Description of Artificial Sequence: Synthetic oligonucleotide
uguagguccuuguaauucu

SEQ ID NO: 1240021 - RNA, 19 nt, Artificial Sequence
  Description of Artificial Sequence: Synthetic oligonucleotide
uguuugucaucuaggcagc

SEQ ID NO: 1240022 - RNA, 19 nt, Artificial Sequence
  Description of Artificial Sequence: Synthetic oligonucleotide
guuucauagguccggccgg

SEQ ID NO: 1240023 - RNA, 19 nt, Artificial Sequence
  Description of Artificial Sequence: Synthetic oligonucleotide
ucugaugcuacagugcuaa

SEQ ID NO: 1240024 - RNA, 19 nt, Artificial Sequence
  Description of Artificial Sequence: Synthetic oligonucleotide
aguuggucagagauggucg

SEQ ID NO: 1240025 - RNA, 19 nt, Artificial Sequence
  Description of Artificial Sequence: Synthetic oligonucleotide
uugguugggaaagguaagg

SEQ ID NO: 1240026 - RNA, 19 nt, Artificial Sequence
  Description of Artificial Sequence: Synthetic oligonucleotide
ucagagauggucguacaug

SEQ ID NO: 1240027 - RNA, 19 nt, Artificial Sequence
  Description of Artificial Sequence: Synthetic oligonucleotide
cuugaaagguggcucuucc

SEQ ID NO: 1240028 - RNA, 19 nt, Artificial Sequence
  Description of Artificial Sequence: Synthetic oligonucleotide
cuauaggcuccagagaagc

SEQ ID NO: 1240029 - RNA, 19 nt, Artificial Sequence
  Description of Artificial Sequence: Synthetic oligonucleotide
agagaacuaucucuauuca

SEQ ID NO: 1240030 - RNA, 19 nt, Artificial Sequence
  Description of Artificial Sequence: Synthetic oligonucleotide
uggauaaugucagggaagu

SEQ ID NO: 1240031 - RNA, 19 nt, Artificial Sequence
  Description of Artificial Sequence: Synthetic oligonucleotide
uaucucuauucacccaucu

SEQ ID NO: 1240032 - RNA, 19 nt, Artificial Sequence
  Description of Artificial Sequence: Synthetic oligonucleotide
aucucuauucacccaucuc

SEQ ID NO: 1240033 - RNA, 19 nt, Artificial Sequence
  Description of Artificial Sequence: Synthetic oligonucleotide
aacuaucucuauucaccca

SEQ ID NO: 1240034 - RNA, 19 nt, Artificial Sequence
  Description of Artificial Sequence: Synthetic oligonucleotide
uuuggcucagagaacuauc

SEQ ID NO: 1240035 - RNA, 19 nt, Artificial Sequence
  Description of Artificial Sequence: Synthetic oligonucleotide
gagauggucguacaugcga

SEQ ID NO: 1240036 - RNA, 19 nt, Artificial Sequence
  Description of Artificial Sequence: Synthetic oligonucleotide
auaguaaacauagucggua

SEQ ID NO: 1240037 - RNA, 19 nt, Artificial Sequence
  Description of Artificial Sequence: Synthetic oligonucleotide
auauccaucuugaaaggug

SEQ ID NO: 1240038 - RNA, 19 nt, Artificial Sequence
  Description of Artificial Sequence: Synthetic oligonucleotide
ucaaggaguuuccaugaau

SEQ ID NO: 1240039 - RNA, 19 nt, Artificial Sequence
  Description of Artificial Sequence: Synthetic oligonucleotide
guuaaggggcaguaccucc

SEQ ID NO: 1240040 - RNA, 19 nt, Artificial Sequence
  Description of Artificial Sequence: Synthetic oligonucleotide
ucagcgaacaucucaccaa

SEQ ID NO: 1240041 - RNA, 19 nt, Artificial Sequence
  Description of Artificial Sequence: Synthetic oligonucleotide
aguaaacauagucgguagu

SEQ ID NO: 1240042 - RNA, 19 nt, Artificial Sequence
  Description of Artificial Sequence: Synthetic oligonucleotide
gacuucagaugggagaggc

SEQ ID NO: 1240043 - RNA, 19 nt, Artificial Sequence
  Description of Artificial Sequence: Synthetic oligonucleotide
uauaggcuccagagaagcc

SEQ ID NO: 1240044 - RNA, 19 nt, Artificial Sequence
  Description of Artificial Sequence: Synthetic oligonucleotide
aagucaagcucacggcgcu

SEQ ID NO: 1240045 - RNA, 19 nt, Artificial Sequence
  Description of Artificial Sequence: Synthetic oligonucleotide
agauccuggugcucugugg

SEQ ID NO: 1240046 - RNA, 19 nt, Artificial Sequence
  Description of Artificial Sequence: Synthetic oligonucleotide
ucguacaugcgaagggucu

SEQ ID NO: 1240047 - RNA, 19 nt, Artificial Sequence
  Description of Artificial Sequence: Synthetic oligonucleotide
agagacagugugucaagca

SEQ ID NO: 1240048 - RNA, 19 nt, Artificial Sequence
  Description of Artificial Sequence: Synthetic oligonucleotide
uguuaccuacuccguguag

SEQ ID NO: 1240049 - RNA, 19 nt, Artificial Sequence
  Description of Artificial Sequence: Synthetic oligonucleotide
gaagucaagcucacggcgc

SEQ ID NO: 1240050 - RNA, 19 nt, Artificial Sequence
  Description of Artificial Sequence: Synthetic oligonucleotide
caucauaugcuugaaguca

SEQ ID NO: 1240051 - RNA, 19 nt, Artificial Sequence
  Description of Artificial Sequence: Synthetic oligonucleotide
gauggucguacaugcgaag

SEQ ID NO: 1240052 - RNA, 19 nt, Artificial Sequence
  Description of Artificial Sequence: Synthetic oligonucleotide
aguagaggggaguccaaga

SEQ ID NO: 1240053 - RNA, 19 nt, Artificial Sequence
  Description of Artificial Sequence: Synthetic oligonucleotide
uuguagguccuuguaauuc

SEQ ID NO: 1240054 - RNA, 19 nt, Artificial Sequence
  Description of Artificial Sequence: Synthetic oligonucleotide
ucuagggacugaccagcag

SEQ ID NO: 1240055 - RNA, 19 nt, Artificial Sequence
  Description of Artificial Sequence: Synthetic oligonucleotide
ugugagaaauggcauuguu

SEQ ID NO: 1240056 - RNA, 19 nt, Artificial Sequence
  Description of Artificial Sequence: Synthetic oligonucleotide
cauuaucugauauccaucu

SEQ ID NO: 1240057 - RNA, 19 nt, Artificial Sequence
  Description of Artificial Sequence: Synthetic oligonucleotide
uucacuccauuuacugucu

SEQ ID NO: 1240058 - RNA, 19 nt, Artificial Sequence
  Description of Artificial Sequence: Synthetic oligonucleotide
auggucguacaugcgaagg

SEQ ID NO: 1240059 - RNA, 19 nt, Artificial Sequence
  Description of Artificial Sequence: Synthetic oligonucleotide
gggaggauccaucuggaag

SEQ ID NO: 1240060 - RNA, 19 nt, Artificial Sequence
  Description of Artificial Sequence: Synthetic oligonucleotide
guggauaaugucagggaag

SEQ ID NO: 1240061 - RNA, 19 nt, Artificial Sequence
  Description of Artificial Sequence: Synthetic oligonucleotide
gggccucagagcuaaaggg

SEQ ID NO: 1240062 - RNA, 19 nt, Artificial Sequence
  Description of Artificial Sequence: Synthetic oligonucleotide
ucuuacugaaagccuugaa

SEQ ID NO: 1240063 - RNA, 19 nt, Artificial Sequence
  Description of Artificial Sequence: Synthetic oligonucleotide
cuucaaggaguuuccauga

SEQ ID NO: 1240064 - RNA, 19 nt, Artificial Sequence
  Description of Artificial Sequence: Synthetic oligonucleotide
ccaaauuugguugggaaag

SEQ ID NO: 1240065 - RNA, 19 nt, Artificial Sequence
  Description of Artificial Sequence: Synthetic oligonucleotide
ugucuuuuguagguccuug

SEQ ID NO: 1240066 - RNA, 19 nt, Artificial Sequence
  Description of Artificial Sequence: Synthetic oligonucleotide
agagaucauucuugggcug

SEQ ID NO: 1240067 - RNA, 19 nt, Artificial Sequence
  Description of Artificial Sequence: Synthetic oligonucleotide
augaauccuuaagugucac

SEQ ID NO: 1240068 - RNA, 19 nt, Artificial Sequence
  Description of Artificial Sequence: Synthetic oligonucleotide
auggguagggcagggaaag

SEQ ID NO: 1240069 - RNA, 19 nt, Artificial Sequence
  Description of Artificial Sequence: Synthetic oligonucleotide
aggaugaucccuccccucu

SEQ ID NO: 1240070 - RNA, 19 nt, Artificial Sequence
  Description of Artificial Sequence: Synthetic oligonucleotide
caugcggcccucaucacuc

SEQ ID NO: 1240071 - RNA, 19 nt, Artificial Sequence
  Description of Artificial Sequence: Synthetic oligonucleotide
gcccucaucacucaugcgc

SEQ ID NO: 1240072 - RNA, 19 nt, Artificial Sequence
  Description of Artificial Sequence: Synthetic oligonucleotide
ccuucaaggaguuuccaug

SEQ ID NO: 1240073 - RNA, 19 nt, Artificial Sequence
  Description of Artificial Sequence: Synthetic oligonucleotide
agucgguaguggcacaacu

SEQ ID NO: 1240074 - RNA, 19 nt, Artificial Sequence
  Description of Artificial Sequence: Synthetic oligonucleotide
uccaucuugaaagguggcu

SEQ ID NO: 1240075 - RNA, 19 nt, Artificial Sequence
  Description of Artificial Sequence: Synthetic oligonucleotide
caggcauguuccaaacuug

SEQ ID NO: 1240076 - RNA, 19 nt, Artificial Sequence
  Description of Artificial Sequence: Synthetic oligonucleotide
auuccuugcggaagcuccc

SEQ ID NO: 1240077 - RNA, 19 nt, Artificial Sequence
  Description of Artificial Sequence: Synthetic oligonucleotide
acagugcuaagcugcagaa

SEQ ID NO: 1240078 - RNA, 19 nt, Artificial Sequence
  Description of Artificial Sequence: Synthetic oligonucleotide
gaacaucucaccaacaguu

SEQ ID NO: 1240079 - RNA, 19 nt, Artificial Sequence
  Description of Artificial Sequence: Synthetic oligonucleotide
gcaaggaugaucccucccc

SEQ ID NO: 1240080 - RNA, 19 nt, Artificial Sequence
  Description of Artificial Sequence: Synthetic oligonucleotide
gguaguggcacaacuagac

SEQ ID NO: 1240081 - RNA, 19 nt, Artificial Sequence
  Description of Artificial Sequence: Synthetic oligonucleotide
caugagucuggccgugggg

SEQ ID NO: 1240082 - RNA, 19 nt, Artificial Sequence
  Description of Artificial Sequence: Synthetic oligonucleotide
augcgaagggucuucucca

SEQ ID NO: 1240083 - RNA, 19 nt, Artificial Sequence
  Description of Artificial Sequence: Synthetic oligonucleotide
cuggaauuccuugcggaag

SEQ ID NO: 1240084 - RNA, 19 nt, Artificial Sequence
  Description of Artificial Sequence: Synthetic oligonucleotide
uccuucaaggaguuuccau

SEQ ID NO: 1240085 - RNA, 19 nt, Artificial Sequence
  Description of Artificial Sequence: Synthetic oligonucleotide
aguaccuccuggagaauag

SEQ ID NO: 1240086 - RNA, 19 nt, Artificial Sequence
  Description of Artificial Sequence: Synthetic oligonucleotide
gcauguuccaaacuugguc

SEQ ID NO: 1240087 - RNA, 19 nt, Artificial Sequence
  Description of Artificial Sequence: Synthetic oligonucleotide
ugcgaagggucuucuccag

SEQ ID NO: 1240088 - RNA, 19 nt, Artificial Sequence
  Description of Artificial Sequence: Synthetic oligonucleotide
gagagacagugugucaagc

SEQ ID NO: 1240089 - RNA, 19 nt, Artificial Sequence
  Description of Artificial Sequence: Synthetic oligonucleotide
ggugugagaaauggcauug

SEQ ID NO: 1240090 - RNA, 19 nt, Artificial Sequence
  Description of Artificial Sequence: Synthetic oligonucleotide
ggcacaacuagaccaugag

SEQ ID NO: 1240091 - RNA, 19 nt, Artificial Sequence
  Description of Artificial Sequence: Synthetic oligonucleotide
caaacuuggucaucaaugu

SEQ ID NO: 1240092 - RNA, 19 nt, Artificial Sequence
  Description of Artificial Sequence: Synthetic oligonucleotide
gggacaacggcccucuccc

SEQ ID NO: 1240093 - RNA, 19 nt, Artificial Sequence
  Description of Artificial Sequence: Synthetic oligonucleotide
acuucagaugggagaggcc

SEQ ID NO: 1240094 - RNA, 19 nt, Artificial Sequence
  Description of Artificial Sequence: Synthetic oligonucleotide
caacuagaccaugagucug

SEQ ID NO: 1240095 - RNA, 19 nt, Artificial Sequence
  Description of Artificial Sequence: Synthetic oligonucleotide
augggagaggccuugcaua

SEQ ID NO: 1240096 - RNA, 19 nt, Artificial Sequence
  Description of Artificial Sequence: Synthetic oligonucleotide
uucuuacugaaagccuuga

SEQ ID NO: 1240097 - RNA, 19 nt, Artificial Sequence
  Description of Artificial Sequence: Synthetic oligonucleotide
ugcuaagcugcagaacacu

SEQ ID NO: 1240098 - RNA, 19 nt, Artificial Sequence
  Description of Artificial Sequence: Synthetic oligonucleotide
cuguucagcgaacaucuca

SEQ ID NO: 1240099 - RNA, 19 nt, Artificial Sequence
  Description of Artificial Sequence: Synthetic oligonucleotide
cagagcuaaagggaggauc

SEQ ID NO: 1240100 - RNA, 19 nt, Artificial Sequence
  Description of Artificial Sequence: Synthetic oligonucleotide
auccaucuugaaagguggc

SEQ ID NO: 1240101 - RNA, 19 nt, Artificial Sequence
  Description of Artificial Sequence: Synthetic oligonucleotide
caguugcuggcccaccugc

SEQ ID NO: 1240102 - RNA, 19 nt, Artificial Sequence
  Description of Artificial Sequence: Synthetic oligonucleotide
gggaguccaagaccuauag

SEQ ID NO: 1240103 - RNA, 19 nt, Artificial Sequence
  Description of Artificial Sequence: Synthetic oligonucleotide
cagcgaacaucucaccaac

SEQ ID NO: 1240104 - RNA, 19 nt, Artificial Sequence
  Description of Artificial Sequence: Synthetic oligonucleotide
agagaaucugcuggcgcag

SEQ ID NO: 1240105 - RNA, 19 nt, Artificial Sequence
  Description of Artificial Sequence: Synthetic oligonucleotide
aaguuggagagcaggcccu

SEQ ID NO: 1240106 - RNA, 19 nt, Artificial Sequence
  Description of Artificial Sequence: Synthetic oligonucleotide
acaugcgaagggucuucuc

SEQ ID NO: 1240107 - RNA, 19 nt, Artificial Sequence
  Description of Artificial Sequence: Synthetic oligonucleotide
cucugcccggcguuuaccc

SEQ ID NO: 1240108 - RNA, 19 nt, Artificial Sequence
  Description of Artificial Sequence: Synthetic oligonucleotide
agaccaugagucuggccgu

SEQ ID NO: 1240109 - RNA, 19 nt, Artificial Sequence
  Description of Artificial Sequence: Synthetic oligonucleotide
augcuacagugcuaagcug

SEQ ID NO: 1240110 - RNA, 19 nt, Artificial Sequence
  Description of Artificial Sequence: Synthetic oligonucleotide
agaaucugcuggcgcaggu

SEQ ID NO: 1240111 - RNA, 19 nt, Artificial Sequence
  Description of Artificial Sequence: Synthetic oligonucleotide
guucagcgaacaucucacc

SEQ ID NO: 1240112 - RNA, 19 nt, Artificial Sequence
  Description of Artificial Sequence: Synthetic oligonucleotide
gauccaucuggaaggcaug

SEQ ID NO: 1240113 - RNA, 19 nt, Artificial Sequence
  Description of Artificial Sequence: Synthetic oligonucleotide
caucucuaaagcgagggaa

SEQ ID NO: 1240114 - RNA, 19 nt, Artificial Sequence
  Description of Artificial Sequence: Synthetic oligonucleotide
caguuucauagguccggcc

SEQ ID NO: 1240115 - RNA, 19 nt, Artificial Sequence
  Description of Artificial Sequence: Synthetic oligonucleotide
gagaaucugcuggcgcagg

SEQ ID NO: 1240116 - RNA, 19 nt, Artificial Sequence
  Description of Artificial Sequence: Synthetic oligonucleotide
aucauaugcuugaagucaa

SEQ ID NO: 1240117 - RNA, 19 nt, Artificial Sequence
  Description of Artificial Sequence: Synthetic oligonucleotide
cucuaaagcgagggaagac

SEQ ID NO: 1240118 - RNA, 19 nt, Artificial Sequence
  Description of Artificial Sequence: Synthetic oligonucleotide
gacaacggcccucucccca

SEQ ID NO: 1240119 - RNA, 19 nt, Artificial Sequence
  Description of Artificial Sequence: Synthetic oligonucleotide
acgguccucuacauccugc

SEQ ID NO: 1240120 - RNA, 19 nt, Artificial Sequence
  Description of Artificial Sequence: Synthetic oligonucleotide
uccguguaguguccccuga

SEQ ID NO: 1240121 - RNA, 19 nt, Artificial Sequence
  Description of Artificial Sequence: Synthetic oligonucleotide
uuacugucuuuuguagguc

SEQ ID NO: 1240122 - RNA, 19 nt, Artificial Sequence
  Description of Artificial Sequence: Synthetic oligonucleotide
guagagagacaguguguca

SEQ ID NO: 1240123 - RNA, 19 nt, Artificial Sequence
  Description of Artificial Sequence: Synthetic oligonucleotide
ucuaggcagcugaggaaau

SEQ ID NO: 1240124 - RNA, 19 nt, Artificial Sequence
  Description of Artificial Sequence: Synthetic oligonucleotide
aacaucucaccaacaguuu

SEQ ID NO: 1240125 - RNA, 19 nt, Artificial Sequence
  Description of Artificial Sequence: Synthetic oligonucleotide
ggcaguaccuccuggagaa

SEQ ID NO: 1240126 - RNA, 19 nt, Artificial Sequence
  Description of Artificial Sequence: Synthetic oligonucleotide
gcggaagcuccccacaugc

SEQ ID NO: 1240127 - RNA, 19 nt, Artificial Sequence
  Description of Artificial Sequence: Synthetic oligonucleotide
uucuugggcuguucagcga

SEQ ID NO: 1240128 - RNA, 19 nt, Artificial Sequence
  Description of Artificial Sequence: Synthetic oligonucleotide
caccaaauuugguugggaa

SEQ ID NO: 1240129 - RNA, 19 nt, Artificial Sequence
  Description of Artificial Sequence: Synthetic oligonucleotide
gauauccaucuugaaaggu

SEQ ID NO: 1240130 - RNA, 19 nt, Artificial Sequence
  Description of Artificial Sequence: Synthetic oligonucleotide
cauacugcauuaucugaua

SEQ ID NO: 1240131 - RNA, 19 nt, Artificial Sequence
  Description of Artificial Sequence: Synthetic oligonucleotide
gcucucuagggacugacca

SEQ ID NO: 1240132 - RNA, 19 nt, Artificial Sequence
  Description of Artificial Sequence: Synthetic oligonucleotide
uacuccguguagugucccc

SEQ ID NO: 1240133 - RNA, 19 nt, Artificial Sequence
  Description of Artificial Sequence: Synthetic oligonucleotide
agcgccugcgaaugccguc

SEQ ID NO: 1240134 - RNA, 19 nt, Artificial Sequence
  Description of Artificial Sequence: Synthetic oligonucleotide
ggaguuggccggcaguccc

SEQ ID NO: 1240135 - RNA, 19 nt, Artificial Sequence
  Description of Artificial Sequence: Synthetic oligonucleotide
ccaacaacaugcugcuggc

SEQ ID NO: 1240136 - RNA, 19 nt, Artificial Sequence
  Description of Artificial Sequence: Synthetic oligonucleotide
aggugagcgugcacuauag

SEQ ID NO: 1240137 - RNA, 19 nt, Artificial Sequence
  Description of Artificial Sequence: Synthetic oligonucleotide
aguggcacaacuagaccau

SEQ ID NO: 1240138 - RNA, 19 nt, Artificial Sequence
  Description of Artificial Sequence: Synthetic oligonucleotide
auguuaccuacuccgugua

SEQ ID NO: 1240139 - RNA, 19 nt, Artificial Sequence
  Description of Artificial Sequence: Synthetic oligonucleotide
cugccauacugcauuaucu

SEQ ID NO: 1240140 - RNA, 19 nt, Artificial Sequence
  Description of Artificial Sequence: Synthetic oligonucleotide
caguagaggggaguccaag

SEQ ID NO: 1240141 - RNA, 19 nt, Artificial Sequence
  Description of Artificial Sequence: Synthetic oligonucleotide
uccuugcggaagcucccca

SEQ ID NO: 1240142 - RNA, 19 nt, Artificial Sequence
  Description of Artificial Sequence: Synthetic oligonucleotide
ggugagcgugcacuauagg

SEQ ID NO: 1240143 - RNA, 19 nt, Artificial Sequence
  Description of Artificial Sequence: Synthetic oligonucleotide
gugugucaagcauuuggaa

SEQ ID NO: 1240144 - RNA, 19 nt, Artificial Sequence
  Description of Artificial Sequence: Synthetic oligonucleotide
agauggucguacaugcgaa

SEQ ID NO: 1240145 - RNA, 19 nt, Artificial Sequence
  Description of Artificial Sequence: Synthetic oligonucleotide
guuaccuacuccguguagu

SEQ ID NO: 1240146 - RNA, 19 nt, Artificial Sequence
  Description of Artificial Sequence: Synthetic oligonucleotide
uacaugcgaagggucuucu

SEQ ID NO: 1240147 - RNA, 19 nt, Artificial Sequence
  Description of Artificial Sequence: Synthetic oligonucleotide
acaccaaauuugguuggga

SEQ ID NO: 1240148 - RNA, 19 nt, Artificial Sequence
  Description of Artificial Sequence: Synthetic oligonucleotide
agcuaaagggaggauccau

SEQ ID NO: 1240149 - RNA, 19 nt, Artificial Sequence
  Description of Artificial Sequence: Synthetic oligonucleotide
accuccuggagaauaguaa

SEQ ID NO: 1240150 - RNA, 19 nt, Artificial Sequence
  Description of Artificial Sequence: Synthetic oligonucleotide
gcguuuacccaucuuccac

SEQ ID NO: 1240151 - RNA, 19 nt, Artificial Sequence
  Description of Artificial Sequence: Synthetic oligonucleotide
uuccuugcggaagcucccc

SEQ ID NO: 1240152 - RNA, 19 nt, Artificial Sequence
  Description of Artificial Sequence: Synthetic oligonucleotide
uggcgcagguagcuuugca

SEQ ID NO: 1240153 - RNA, 19 nt, Artificial Sequence
  Description of Artificial Sequence: Synthetic oligonucleotide
auagucgguaguggcacaa

SEQ ID NO: 1240154 - RNA, 19 nt, Artificial Sequence
  Description of Artificial Sequence: Synthetic oligonucleotide
uaccuacuccguguagugu

SEQ ID NO: 1240155 - RNA, 19 nt, Artificial Sequence
  Description of Artificial Sequence: Synthetic oligonucleotide
acggcagcgccugcgaaug

SEQ ID NO: 1240156 - RNA, 19 nt, Artificial Sequence
  Description of Artificial Sequence: Synthetic oligonucleotide
ggacaggcauguuccaaac

SEQ ID NO: 1240157 - RNA, 19 nt, Artificial Sequence
  Description of Artificial Sequence: Synthetic oligonucleotide
cucacggcgcugguggaag

SEQ ID NO: 1240158 - RNA, 19 nt, Artificial Sequence
  Description of Artificial Sequence: Synthetic oligonucleotide
gaccuauaggagggaguug

SEQ ID NO: 1240159 - RNA, 19 nt, Artificial Sequence
  Description of Artificial Sequence: Synthetic oligonucleotide
cugcauuaucugauaucca

SEQ ID NO: 1240160 - RNA, 19 nt, Artificial Sequence
  Description of Artificial Sequence: Synthetic oligonucleotide
ggggacaacggcccucucc

SEQ ID NO: 1240161 - RNA, 19 nt, Artificial Sequence
  Description of Artificial Sequence: Synthetic oligonucleotide
agacagugugucaagcauu

SEQ ID NO: 1240162 - RNA, 19 nt, Artificial Sequence
  Description of Artificial Sequence: Synthetic oligonucleotide
cauaaagaucagaacccau

SEQ ID NO: 1240163 - RNA, 19 nt, Artificial Sequence
  Description of Artificial Sequence: Synthetic oligonucleotide
acaacggcccucuccccaa

SEQ ID NO: 1240164 - RNA, 19 nt, Artificial Sequence
  Description of Artificial Sequence: Synthetic oligonucleotide
gaucccuccccucugucau

SEQ ID NO: 1240165 - RNA, 19 nt, Artificial Sequence
  Description of Artificial Sequence: Synthetic oligonucleotide
gccggugugagaaauggca

SEQ ID NO: 1240166 - RNA, 19 nt, Artificial Sequence
  Description of Artificial Sequence: Synthetic oligonucleotide
ucucugcccggcguuuacc

SEQ ID NO: 1240167 - RNA, 19 nt, Artificial Sequence
  Description of Artificial Sequence: Synthetic oligonucleotide
accaugagucuggccgugg

SEQ ID NO: 1240168 - RNA, 19 nt, Artificial Sequence
  Description of Artificial Sequence: Synthetic oligonucleotide
cuaaagcgagggaagacuu

SEQ ID NO: 1240169 - RNA, 19 nt, Artificial Sequence
  Description of Artificial Sequence: Synthetic oligonucleotide
gucguacaugcgaaggguc

SEQ ID NO: 1240170 - RNA, 19 nt, Artificial Sequence
  Description of Artificial Sequence: Synthetic oligonucleotide
gaugaucccuccccucugu

SEQ ID NO: 1240171 - RNA, 19 nt, Artificial Sequence
  Description of Artificial Sequence: Synthetic oligonucleotide
guuggucagagauggucgu

SEQ ID NO: 1240172 - RNA, 19 nt, Artificial Sequence
  Description of Artificial Sequence: Synthetic oligonucleotide
ccggcguuuacccaucuuc

SEQ ID NO: 1240173 - RNA, 19 nt, Artificial Sequence
  Description of Artificial Sequence: Synthetic oligonucleotide
ccuacuccguguagugucc

SEQ ID NO: 1240174 - RNA, 19 nt, Artificial Sequence
  Description of Artificial Sequence: Synthetic oligonucleotide
aacggcccucuccccaaaa

SEQ ID NO: 1240175 - RNA, 19 nt, Artificial Sequence
  Description of Artificial Sequence: Synthetic oligonucleotide
gcuaaagggaggauccauc

SEQ ID NO: 1240176 - RNA, 19 nt, Artificial Sequence
  Description of Artificial Sequence: Synthetic oligonucleotide
ggcauggcuaauggccugg

SEQ ID NO: 1240177 - RNA, 19 nt, Artificial Sequence
  Description of Artificial Sequence: Synthetic oligonucleotide
aacaugcugcuggccacau

SEQ ID NO: 1240178 - RNA, 19 nt, Artificial Sequence
  Description of Artificial Sequence: Synthetic oligonucleotide
cagugcuaagcugcagaac

SEQ ID NO: 1240179 - RNA, 19 nt, Artificial Sequence
  Description of Artificial Sequence: Synthetic oligonucleotide
gagaucauucuugggcugu

SEQ ID NO: 1240180 - RNA, 19 nt, Artificial Sequence
  Description of Artificial Sequence: Synthetic oligonucleotide
ucuggaaggcauggcuaau

SEQ ID NO: 1240181 - RNA, 19 nt, Artificial Sequence
  Description of Artificial Sequence: Synthetic oligonucleotide
agcagaccauggcuuccca

SEQ ID NO: 1240182 - RNA, 19 nt, Artificial Sequence
  Description of Artificial Sequence: Synthetic oligonucleotide
agucaagcagcaggaccca

SEQ ID NO: 1240183 - RNA, 19 nt, Artificial Sequence
  Description of Artificial Sequence: Synthetic oligonucleotide
ggcuguucagcgaacaucu

SEQ ID NO: 1240184 - RNA, 19 nt, Artificial Sequence
  Description of Artificial Sequence: Synthetic oligonucleotide
guacaugcgaagggucuuc

SEQ ID NO: 1240185 - RNA, 19 nt, Artificial Sequence
  Description of Artificial Sequence: Synthetic oligonucleotide
uccccacaugcuuccgcac

SEQ ID NO: 1240186 - RNA, 19 nt, Artificial Sequence
  Description of Artificial Sequence: Synthetic oligonucleotide
gaccaugagucuggccgug

SEQ ID NO: 1240187 - RNA, 19 nt, Artificial Sequence
  Description of Artificial Sequence: Synthetic oligonucleotide
agggaggauccaucuggaa

SEQ ID NO: 1240188 - RNA, 19 nt, Artificial Sequence
  Description of Artificial Sequence: Synthetic oligonucleotide
uggccggcagucccuccug

SEQ ID NO: 1240189 - RNA, 19 nt, Artificial Sequence
  Description of Artificial Sequence: Synthetic oligonucleotide
ccuauaggagggaguuggc

SEQ ID NO: 1240190 - RNA, 19 nt, Artificial Sequence
  Description of Artificial Sequence: Synthetic oligonucleotide
ccugcgaaugccgucugcc

SEQ ID NO: 1240191 - RNA, 19 nt, Artificial Sequence
  Description of Artificial Sequence: Synthetic oligonucleotide
cucuagggacugaccagca

SEQ ID NO: 1240192 - RNA, 19 nt, Artificial Sequence
  Description of Artificial Sequence: Synthetic oligonucleotide
uuccuucacuuuggcaaaa

SEQ ID NO: 1240193 - RNA, 19 nt, Artificial Sequence
  Description of Artificial Sequence: Synthetic oligonucleotide
ccccugaccagcagaauuc

SEQ ID NO: 1240194 - RNA, 19 nt, Artificial Sequence
  Description of Artificial Sequence: Synthetic oligonucleotide
ggggacaaggucacuuccc

SEQ ID NO: 1240195 - RNA, 19 nt, Artificial Sequence
  Description of Artificial Sequence: Synthetic oligonucleotide
auagguccggccgguguga

SEQ ID NO: 1240196 - RNA, 19 nt, Artificial Sequence
  Description of Artificial Sequence: Synthetic oligonucleotide
ggcguuuacccaucuucca

SEQ ID NO: 1240197 - RNA, 19 nt, Artificial Sequence
  Description of Artificial Sequence: Synthetic oligonucleotide
cauagucgguaguggcaca

SEQ ID NO: 1240198 - RNA, 19 nt, Artificial Sequence
  Description of Artificial Sequence: Synthetic oligonucleotide
uagucgguaguggcacaac

SEQ ID NO: 1240199 - RNA, 19 nt, Artificial Sequence
  Description of Artificial Sequence: Synthetic oligonucleotide
caaggucacuucccaacaa

SEQ ID NO: 1240200 - RNA, 19 nt, Artificial Sequence
  Description of Artificial Sequence: Synthetic oligonucleotide
gagcuaaagggaggaucca

SEQ ID NO: 1240201 - RNA, 19 nt, Artificial Sequence
  Description of Artificial Sequence: Synthetic oligonucleotide
ggcuaauggccuggaaggc

SEQ ID NO: 1240202 - RNA, 19 nt, Artificial Sequence
  Description of Artificial Sequence: Synthetic oligonucleotide
ccaugagucuggccguggg

SEQ ID NO: 1240203 - RNA, 19 nt, Artificial Sequence
  Description of Artificial Sequence: Synthetic oligonucleotide
cggcguuuacccaucuucc

SEQ ID NO: 1240204 - RNA, 19 nt, Artificial Sequence
  Description of Artificial Sequence: Synthetic oligonucleotide
uccggccggugugagaaau

SEQ ID NO: 1240205 - RNA, 19 nt, Artificial Sequence
  Description of Artificial Sequence: Synthetic oligonucleotide
guggcacaacuagaccaug

SEQ ID NO: 1240206 - RNA, 19 nt, Artificial Sequence
  Description of Artificial Sequence: Synthetic oligonucleotide
gcauuguugagggccucag

SEQ ID NO: 1240207 - RNA, 19 nt, Artificial Sequence
  Description of Artificial Sequence: Synthetic oligonucleotide
gcgagggaagacuucucca

SEQ ID NO: 1240208 - RNA, 19 nt, Artificial Sequence
  Description of Artificial Sequence: Synthetic oligonucleotide
cacucaugcgcuggcuuuc

SEQ ID NO: 1240209 - RNA, 19 nt, Artificial Sequence
  Description of Artificial Sequence: Synthetic oligonucleotide
ccauggagcaaggaugauc

SEQ ID NO: 1240210 - RNA, 19 nt, Artificial Sequence
  Description of Artificial Sequence: Synthetic oligonucleotide
gucgguaguggcacaacua

SEQ ID NO: 1240211 - RNA, 19 nt, Artificial Sequence
  Description of Artificial Sequence: Synthetic oligonucleotide
caaggaugaucccuccccu

SEQ ID NO: 1240212 - RNA, 19 nt, Artificial Sequence
  Description of Artificial Sequence: Synthetic oligonucleotide
gucagagauggucguacau

SEQ ID NO: 1240213 - RNA, 19 nt, Artificial Sequence
  Description of Artificial Sequence: Synthetic oligonucleotide
agucaagcucacggcgcug

SEQ ID NO: 1240214 - RNA, 19 nt, Artificial Sequence
  Description of Artificial Sequence: Synthetic oligonucleotide
gggaccauggagcaaggau

SEQ ID NO: 1240215 - RNA, 19 nt, Artificial Sequence
  Description of Artificial Sequence: Synthetic oligonucleotide
gcucagagaacuaucucua

SEQ ID NO: 1240216 - RNA, 19 nt, Artificial Sequence
  Description of Artificial Sequence: Synthetic oligonucleotide
aguugcuggcccaccugcu

SEQ ID NO: 1240217 - RNA, 19 nt, Artificial Sequence
  Description of Artificial Sequence: Synthetic oligonucleotide
ucccaacaacaugcugcug

SEQ ID NO: 1240218 - RNA, 19 nt, Artificial Sequence
  Description of Artificial Sequence: Synthetic oligonucleotide
uggugcucuguggggauuu

SEQ ID NO: 1240219 - RNA, 19 nt, Artificial Sequence
  Description of Artificial Sequence: Synthetic oligonucleotide
gagggaguuggccggcagu

SEQ ID NO: 1240220 - RNA, 19 nt, Artificial Sequence
  Description of Artificial Sequence: Synthetic oligonucleotide
caggugagcgugcacuaua

SEQ ID NO: 1240221 - RNA, 19 nt, Artificial Sequence
  Description of Artificial Sequence: Synthetic oligonucleotide
gguccggccggugugagaa

SEQ ID NO: 1240222 - RNA, 19 nt, Artificial Sequence
  Description of Artificial Sequence: Synthetic oligonucleotide
uuccacuguuugucaucua

SEQ ID NO: 1240223 - RNA, 19 nt, Artificial Sequence
  Description of Artificial Sequence: Synthetic oligonucleotide
ggcagcgccugcgaaugcc

SEQ ID NO: 1240224 - RNA, 19 nt, Artificial Sequence
  Description of Artificial Sequence: Synthetic oligonucleotide
cucagagaacuaucucuau

SEQ ID NO: 1240225 - RNA, 19 nt, Artificial Sequence
  Description of Artificial Sequence: Synthetic oligonucleotide
gcuacagugcuaagcugca

SEQ ID NO: 1240226 - RNA, 19 nt, Artificial Sequence
  Description of Artificial Sequence: Synthetic oligonucleotide
aggggacaacggcccucuc

SEQ ID NO: 1240227 - RNA, 19 nt, Artificial Sequence
  Description of Artificial Sequence: Synthetic oligonucleotide
aggauggguagggcaggga

SEQ ID NO: 1240228 - RNA, 19 nt, Artificial Sequence
  Description of Artificial Sequence: Synthetic oligonucleotide
cuggcgcagguagcuuugc

SEQ ID NO: 1240229 - RNA, 19 nt, Artificial Sequence
  Description of Artificial Sequence: Synthetic oligonucleotide
augcggcccucaucacuca

SEQ ID NO: 1240230 - RNA, 19 nt, Artificial Sequence
  Description of Artificial Sequence: Synthetic oligonucleotide
cauggcuaauggccuggaa

SEQ ID NO: 1240231 - RNA, 19 nt, Artificial Sequence
  Description of Artificial Sequence: Synthetic oligonucleotide
ggaauguuaccuacuccgu

SEQ ID NO: 1240232 - RNA, 19 nt, Artificial Sequence
  Description of Artificial Sequence: Synthetic oligonucleotide
acaguagaggggaguccaa

SEQ ID NO: 1240233 - RNA, 19 nt, Artificial Sequence
  Description of Artificial Sequence: Synthetic oligonucleotide
ggucguacaugcgaagggu

SEQ ID NO: 1240234 - RNA, 19 nt, Artificial Sequence
  Description of Artificial Sequence: Synthetic oligonucleotide
cagguagcuuugcaucaua

SEQ ID NO: 1240235 - RNA, 19 nt, Artificial Sequence
  Description of Artificial Sequence: Synthetic oligonucleotide
ccacaguagaggggagucc

SEQ ID NO: 1240236 - RNA, 19 nt, Artificial Sequence
  Description of Artificial Sequence: Synthetic oligonucleotide
gaaugccgucugccucuuc

SEQ ID NO: 1240237 - RNA, 19 nt, Artificial Sequence
  Description of Artificial Sequence: Synthetic oligonucleotide
uggcacccaccaucucauc

SEQ ID NO: 1240238 - RNA, 19 nt, Artificial Sequence
  Description of Artificial Sequence: Synthetic oligonucleotide
caggacaggcauguuccaa

SEQ ID NO: 1240239 - RNA, 19 nt, Artificial Sequence
  Description of Artificial Sequence: Synthetic oligonucleotide
ccccucugucauaaagauc

SEQ ID NO: 1240240 - RNA, 19 nt, Artificial Sequence
  Description of Artificial Sequence: Synthetic oligonucleotide
gugugagaaauggcauugu

SEQ ID NO: 1240241 - RNA, 19 nt, Artificial Sequence
  Description of Artificial Sequence: Synthetic oligonucleotide
ggcgcagguagcuuugcau

SEQ ID NO: 1240242 - RNA, 19 nt, Artificial Sequence
  Description of Artificial Sequence: Synthetic oligonucleotide
ccaucucuaaagcgaggga

SEQ ID NO: 1240243 - RNA, 19 nt, Artificial Sequence
  Description of Artificial Sequence: Synthetic oligonucleotide
gcauuuggaagagaucauu

SEQ ID NO: 1240244 - RNA, 19 nt, Artificial Sequence
  Description of Artificial Sequence: Synthetic oligonucleotide
ggaaggcauuccaguucug

SEQ ID NO: 1240245 - RNA, 19 nt, Artificial Sequence
  Description of Artificial Sequence: Synthetic oligonucleotide
gccugcgaaugccgucugc

SEQ ID NO: 1240246 - RNA, 19 nt, Artificial Sequence
  Description of Artificial Sequence: Synthetic oligonucleotide
cguuuacccaucuuccacu

SEQ ID NO: 1240247 - RNA, 19 nt, Artificial Sequence
  Description of Artificial Sequence: Synthetic oligonucleotide
cgaagccuaccacacggca

SEQ ID NO: 1240248 - RNA, 19 nt, Artificial Sequence
  Description of Artificial Sequence: Synthetic oligonucleotide
cacggcagcgccugcgaau

SEQ ID NO: 1240249 - RNA, 19 nt, Artificial Sequence
  Description of Artificial Sequence: Synthetic oligonucleotide
cgguaguggcacaacuaga

SEQ ID NO: 1240250 - RNA, 19 nt, Artificial Sequence
  Description of Artificial Sequence: Synthetic oligonucleotide
ccggccggugugagaaaug

SEQ ID NO: 1240251 - RNA, 19 nt, Artificial Sequence
  Description of Artificial Sequence: Synthetic oligonucleotide
gcuguucagcgaacaucuc

SEQ ID NO: 1240252 - RNA, 19 nt, Artificial Sequence
  Description of Artificial Sequence: Synthetic oligonucleotide
gccggcagucccuccugca

SEQ ID NO: 1240253 - RNA, 19 nt, Artificial Sequence
  Description of Artificial Sequence: Synthetic oligonucleotide
ccggugugagaaauggcau

SEQ ID NO: 1240254 - RNA, 19 nt, Artificial Sequence
  Description of Artificial Sequence: Synthetic oligonucleotide
gcauggcuaauggccugga

SEQ ID NO: 1240255 - RNA, 19 nt, Artificial Sequence
  Description of Artificial Sequence: Synthetic oligonucleotide
cagcgccugcgaaugccgu

SEQ ID NO: 1240256 - RNA, 19 nt, Artificial Sequence
  Description of Artificial Sequence: Synthetic oligonucleotide
caacggcccucuccccaaa

SEQ ID NO: 1240257 - RNA, 19 nt, Artificial Sequence
  Description of Artificial Sequence: Synthetic oligonucleotide
ccaugcggcccucaucacu

SEQ ID NO: 1240258 - RNA, 19 nt, Artificial Sequence
  Description of Artificial Sequence: Synthetic oligonucleotide
cgaagggucuucuccaguu

SEQ ID NO: 1240259 - RNA, 19 nt, Artificial Sequence
  Description of Artificial Sequence: Synthetic oligonucleotide
guccggccggugugagaaa

SEQ ID NO: 1240260 - RNA, 19 nt, Artificial Sequence
  Description of Artificial Sequence: Synthetic oligonucleotide
gcgccugcgaaugccgucu

SEQ ID NO: 1240261 - RNA, 19 nt, Artificial Sequence
  Description of Artificial Sequence: Synthetic oligonucleotide
cacugccauacugcauuau

SEQ ID NO: 1240262 - RNA, 19 nt, Artificial Sequence
  Description of Artificial Sequence: Synthetic oligonucleotide
cggugugagaaauggcauu

SEQ ID NO: 1240263 - RNA, 19 nt, Artificial Sequence
  Description of Artificial Sequence: Synthetic oligonucleotide
cccugaccagcagaauucu

SEQ ID NO: 1240264 - RNA, 19 nt, Artificial Sequence
  Description of Artificial Sequence: Synthetic oligonucleotide
cgccugcgaaugccgucug

SEQ ID NO: 1240265 - RNA, 19 nt, Artificial Sequence
  Description of Artificial Sequence: Synthetic oligonucleotide
cguacaugcgaagggucuu

SEQ ID NO: 1240266 - RNA, 19 nt, Artificial Sequence
  Description of Artificial Sequence: Synthetic oligonucleotide
gcccggcguuuacccaucu

SEQ ID NO: 1240267 - RNA, 19 nt, Artificial Sequence
  Description of Artificial Sequence: Synthetic oligonucleotide
cccggcguuuacccaucuu

SEQ ID NO: 1240268 - RNA, 19 nt, Artificial Sequence
  Description of Artificial Sequence: Synthetic oligonucleotide
aauagcguggcacaaaggc

SEQ ID NO: 1240269 - RNA, 19 nt, Artificial Sequence
  Description of Artificial Sequence: Synthetic oligonucleotide
auaauauagcuccuccucc

SEQ ID NO: 1240270 - RNA, 19 nt, Artificial Sequence
  Description of Artificial Sequence: Synthetic oligonucleotide
gauuaagcacaucuggagg

SEQ ID NO: 1240271 - RNA, 19 nt, Artificial Sequence
  Description of Artificial Sequence: Synthetic oligonucleotide
ugguuuaucucucugcucc

SEQ ID NO: 1240272 - RNA, 19 nt, Artificial Sequence
  Description of Artificial Sequence: Synthetic oligonucleotide
aauauagcuccuccucccc

SEQ ID NO: 1240273 - RNA, 19 nt, Artificial Sequence
  Description of Artificial Sequence: Synthetic oligonucleotide
acagacaccaccuuuaggu

SEQ ID NO: 1240274 - RNA, 19 nt, Artificial Sequence
  Description of Artificial Sequence: Synthetic oligonucleotide
ugauuaagcacaucuggag

SEQ ID NO: 1240275 - RNA, 19 nt, Artificial Sequence
  Description of Artificial Sequence: Synthetic oligonucleotide
ucagguaccucugaggugg

SEQ ID NO: 1240276 - RNA, 19 nt, Artificial Sequence
  Description of Artificial Sequence: Synthetic oligonucleotide
uucauaauauagcuccucc

SEQ ID NO: 1240277 - RNA, 19 nt, Artificial Sequence
  Description of Artificial Sequence: Synthetic oligonucleotide
gaggauucggacaacaagg

SEQ ID NO: 1240278 - RNA, 19 nt, Artificial Sequence
  Description of Artificial Sequence: Synthetic oligonucleotide
caaacugcagcucagcccg

SEQ ID NO: 1240279 - RNA, 19 nt, Artificial Sequence
  Description of Artificial Sequence: Synthetic oligonucleotide
ugcgugauuaagcacaucu

SEQ ID NO: 1240280 - RNA, 19 nt, Artificial Sequence
  Description of Artificial Sequence: Synthetic oligonucleotide
gauucggacaacaaggcag

SEQ ID NO: 1240281 - RNA, 19 nt, Artificial Sequence
  Description of Artificial Sequence: Synthetic oligonucleotide
ucagcuuucagguaccucu

SEQ ID NO: 1240282 - RNA, 19 nt, Artificial Sequence
  Description of Artificial Sequence: Synthetic oligonucleotide
ugaggauucggacaacaag

SEQ ID NO: 1240283 - RNA, 19 nt, Artificial Sequence
  Description of Artificial Sequence: Synthetic oligonucleotide
ugucccuucauaauauagc

SEQ ID NO: 1240284 - RNA, 19 nt, Artificial Sequence
  Description of Artificial Sequence: Synthetic oligonucleotide
uaaaguccccuucagauau

SEQ ID NO: 1240285 - RNA, 19 nt, Artificial Sequence
  Description of Artificial Sequence: Synthetic oligonucleotide
aagagcucacaauagcgug

SEQ ID NO: 1240286 - RNA, 19 nt, Artificial Sequence
  Description of Artificial Sequence: Synthetic oligonucleotide
uuagcguggagacagcaca

SEQ ID NO: 1240287 - RNA, 19 nt, Artificial Sequence
  Description of Artificial Sequence: Synthetic oligonucleotide
ugggaugagccacacauug

SEQ ID NO: 1240288 - RNA, 19 nt, Artificial Sequence
  Description of Artificial Sequence: Synthetic oligonucleotide
aucccugcacucuagguac

SEQ ID NO: 1240289 - RNA, 19 nt, Artificial Sequence
  Description of Artificial Sequence: Synthetic oligonucleotide
ugugcaagcccucaucccc

SEQ ID NO: 1240290 - RNA, 19 nt, Artificial Sequence
  Description of Artificial Sequence: Synthetic oligonucleotide
aggugagaggcccaauugc

SEQ ID NO: 1240291 - RNA, 19 nt, Artificial Sequence
  Description of Artificial Sequence: Synthetic oligonucleotide
uggaguagugguuuaaagu

SEQ ID NO: 1240292 - RNA, 19 nt, Artificial Sequence
  Description of Artificial Sequence: Synthetic oligonucleotide
uaauauagcuccuccuccc

SEQ ID NO: 1240293 - RNA, 19 nt, Artificial Sequence
  Description of Artificial Sequence: Synthetic oligonucleotide
aguagugguuuaaaguccc

SEQ ID NO: 1240294 - RNA, 19 nt, Artificial Sequence
  Description of Artificial Sequence: Synthetic oligonucleotide
acaauagcguggcacaaag

SEQ ID NO: 1240295 - RNA, 19 nt, Artificial Sequence
  Description of Artificial Sequence: Synthetic oligonucleotide
cauaauauagcuccuccuc

SEQ ID NO: 1240296 - RNA, 19 nt, Artificial Sequence
  Description of Artificial Sequence: Synthetic oligonucleotide
uacugauccagcacccugg

SEQ ID NO: 1240297 - RNA, 19 nt, Artificial Sequence
  Description of Artificial Sequence: Synthetic oligonucleotide
aaguugccgauuuggaucu

SEQ ID NO: 1240298 - RNA, 19 nt, Artificial Sequence
  Description of Artificial Sequence: Synthetic oligonucleotide
agaagagcucacaauagcg

SEQ ID NO: 1240299 - RNA, 19 nt, Artificial Sequence
  Description of Artificial Sequence: Synthetic oligonucleotide
agaguguggaaagucaggg

SEQ ID NO: 1240300 - RNA, 19 nt, Artificial Sequence
  Description of Artificial Sequence: Synthetic oligonucleotide
caucaucagacauccauag

SEQ ID NO: 1240301 - RNA, 19 nt, Artificial Sequence
  Description of Artificial Sequence: Synthetic oligonucleotide
gucaucucgaaucuugagc

SEQ ID NO: 1240302 - RNA, 19 nt, Artificial Sequence
  Description of Artificial Sequence: Synthetic oligonucleotide
caacaaggcaguuuagaag

SEQ ID NO: 1240303 - RNA, 19 nt, Artificial Sequence
  Description of Artificial Sequence: Synthetic oligonucleotide
agcuggucaaugugcaagc

SEQ ID NO: 1240304 - RNA, 19 nt, Artificial Sequence
  Description of Artificial Sequence: Synthetic oligonucleotide
acaugcagggucugguccc

SEQ ID NO: 1240305 - RNA, 19 nt, Artificial Sequence
  Description of Artificial Sequence: Synthetic oligonucleotide
ucauaauauagcuccuccu

SEQ ID NO: 1240306 - RNA, 19 nt, Artificial Sequence
  Description of Artificial Sequence: Synthetic oligonucleotide
cuuggcuugagagauggcc

SEQ ID NO: 1240307 - RNA, 19 nt, Artificial Sequence
  Description of Artificial Sequence: Synthetic oligonucleotide
ggaguagugguuuaaaguc

SEQ ID NO: 1240308 - RNA, 19 nt, Artificial Sequence
  Description of Artificial Sequence: Synthetic oligonucleotide
ucaccuauccugaacccca

SEQ ID NO: 1240309 - RNA, 19 nt, Artificial Sequence
  Description of Artificial Sequence: Synthetic oligonucleotide
agguuucucaugaugcugc

SEQ ID NO: 1240310 - RNA, 19 nt, Artificial Sequence
  Description of Artificial Sequence: Synthetic oligonucleotide
ugguuuaaaguccccuuca

SEQ ID NO: 1240311 - RNA, 19 nt, Artificial Sequence
  Description of Artificial Sequence: Synthetic oligonucleotide
ucuagguacugauccagca

SEQ ID NO: 1240312 - RNA, 19 nt, Artificial Sequence
  Description of Artificial Sequence: Synthetic oligonucleotide
uguggaaagucaggggugg

SEQ ID NO: 1240313 - RNA, 19 nt, Artificial Sequence
  Description of Artificial Sequence: Synthetic oligonucleotide
augggucugacucuuguug

SEQ ID NO: 1240314 - RNA, 19 nt, Artificial Sequence
  Description of Artificial Sequence: Synthetic oligonucleotide
guagaacugagcauguggc

SEQ ID NO: 1240315 - RNA, 19 nt, Artificial Sequence
  Description of Artificial Sequence: Synthetic oligonucleotide
aagguccgaugacuuggcc

SEQ ID NO: 1240316 - RNA, 19 nt, Artificial Sequence
  Description of Artificial Sequence: Synthetic oligonucleotide
aguguggggcuccaugacg

SEQ ID NO: 1240317 - RNA, 19 nt, Artificial Sequence
  Description of Artificial Sequence: Synthetic oligonucleotide
gaguguggaaagucagggg

SEQ ID NO: 1240318 - RNA, 19 nt, Artificial Sequence
  Description of Artificial Sequence: Synthetic oligonucleotide
ugagaggcccaauugcgug

SEQ ID NO: 1240319 - RNA, 19 nt, Artificial Sequence
  Description of Artificial Sequence: Synthetic oligonucleotide
gauugggaccugucgaccc

SEQ ID NO: 1240320 - RNA, 19 nt, Artificial Sequence
  Description of Artificial Sequence: Synthetic oligonucleotide
aggauucggacaacaaggc

SEQ ID NO: 1240321 - RNA, 19 nt, Artificial Sequence
  Description of Artificial Sequence: Synthetic oligonucleotide
cuccugaagguccaagggg

SEQ ID NO: 1240322 - RNA, 19 nt, Artificial Sequence
  Description of Artificial Sequence: Synthetic oligonucleotide
aggagaaggcugcugcacg

SEQ ID NO: 1240323 - RNA, 19 nt, Artificial Sequence
  Description of Artificial Sequence: Synthetic oligonucleotide
ugacccuugaggauucgga

SEQ ID NO: 1240324 - RNA, 19 nt, Artificial Sequence
  Description of Artificial Sequence: Synthetic oligonucleotide
gaguagugguuuaaagucc

SEQ ID NO: 1240325 - RNA, 19 nt, Artificial Sequence
  Description of Artificial Sequence: Synthetic oligonucleotide
aucacggcgucucagugug

SEQ ID NO: 1240326 - RNA, 19 nt, Artificial Sequence
  Description of Artificial Sequence: Synthetic oligonucleotide
caguuuagaagguuccuuc

SEQ ID NO: 1240327 - RNA, 19 nt, Artificial Sequence
  Description of Artificial Sequence: Synthetic oligonucleotide
uaagggacaccccgggagc

SEQ ID NO: 1240328 - RNA, 19 nt, Artificial Sequence
  Description of Artificial Sequence: Synthetic oligonucleotide
ugaaguugccgauuuggau

SEQ ID NO: 1240329 - RNA, 19 nt, Artificial Sequence
  Description of Artificial Sequence: Synthetic oligonucleotide
acacauugccccuccuugg

SEQ ID NO: 1240330 - RNA, 19 nt, Artificial Sequence
  Description of Artificial Sequence: Synthetic oligonucleotide
ucagagcucgacuucugca

SEQ ID NO: 1240331 - RNA, 19 nt, Artificial Sequence
  Description of Artificial Sequence: Synthetic oligonucleotide
uuaaaguccccuucagaua

SEQ ID NO: 1240332 - RNA, 19 nt, Artificial Sequence
  Description of Artificial Sequence: Synthetic oligonucleotide
gaggugagaggcccaauug

SEQ ID NO: 1240333 - RNA, 19 nt, Artificial Sequence
  Description of Artificial Sequence: Synthetic oligonucleotide
uaccggaacguggagaagc

SEQ ID NO: 1240334 - RNA, 19 nt, Artificial Sequence
  Description of Artificial Sequence: Synthetic oligonucleotide
auagcguggcacaaaggcg

SEQ ID NO: 1240335 - RNA, 19 nt, Artificial Sequence
  Description of Artificial Sequence: Synthetic oligonucleotide
cugaccagaccccugggag

SEQ ID NO: 1240336 - RNA, 19 nt, Artificial Sequence
  Description of Artificial Sequence: Synthetic oligonucleotide
ggagcgaauuugcagagug

SEQ ID NO: 1240337 - RNA, 19 nt, Artificial Sequence
  Description of Artificial Sequence: Synthetic oligonucleotide
gauaugagggcaggcgugc

SEQ ID NO: 1240338 - RNA, 19 nt, Artificial Sequence
  Description of Artificial Sequence: Synthetic oligonucleotide
aggcaguuuagaagguucc

SEQ ID NO: 1240339 - RNA, 19 nt, Artificial Sequence
  Description of Artificial Sequence: Synthetic oligonucleotide
agagauggccaccacugga

SEQ ID NO: 1240340 - RNA, 19 nt, Artificial Sequence
  Description of Artificial Sequence: Synthetic oligonucleotide
cuggucaaugugcaagccc

SEQ ID NO: 1240341 - RNA, 19 nt, Artificial Sequence
  Description of Artificial Sequence: Synthetic oligonucleotide
gguggauugggaccugucg

SEQ ID NO: 1240342 - RNA, 19 nt, Artificial Sequence
  Description of Artificial Sequence: Synthetic oligonucleotide
ucaccuguuccucuaccac

SEQ ID NO: 1240343 - RNA, 19 nt, Artificial Sequence
  Description of Artificial Sequence: Synthetic oligonucleotide
uugccgauuuggaucuucc

SEQ ID NO: 1240344 - RNA, 19 nt, Artificial Sequence
  Description of Artificial Sequence: Synthetic oligonucleotide
uggcagaccgaggugacag

SEQ ID NO: 1240345 - RNA, 19 nt, Artificial Sequence
  Description of Artificial Sequence: Synthetic oligonucleotide
agagcucacaauagcgugg

SEQ ID NO: 1240346 - RNA, 19 nt, Artificial Sequence
  Description of Artificial Sequence: Synthetic oligonucleotide
cgugauuaagcacaucugg

SEQ ID NO: 1240347 - RNA, 19 nt, Artificial Sequence
  Description of Artificial Sequence: Synthetic oligonucleotide
uggauugggaccugucgac

SEQ ID NO: 1240348 - RNA, 19 nt, Artificial Sequence
  Description of Artificial Sequence: Synthetic oligonucleotide
aucugauacucagggugcc

SEQ ID NO: 1240349 - RNA, 19 nt, Artificial Sequence
  Description of Artificial Sequence: Synthetic oligonucleotide
gagcauguggcagaccgag

SEQ ID NO: 1240350 - RNA, 19 nt, Artificial Sequence
  Description of Artificial Sequence: Synthetic oligonucleotide
guuaccggaacguggagaa

SEQ ID NO: 1240351 - RNA, 19 nt, Artificial Sequence
  Description of Artificial Sequence: Synthetic oligonucleotide
gacccuugaggauucggac

SEQ ID NO: 1240352 - RNA, 19 nt, Artificial Sequence
  Description of Artificial Sequence: Synthetic oligonucleotide
ggaagguccgaugacuugg

SEQ ID NO: 1240353 - RNA, 19 nt, Artificial Sequence
  Description of Artificial Sequence: Synthetic oligonucleotide
agugguuuaaaguccccuu

SEQ ID NO: 1240354 - RNA, 19 nt, Artificial Sequence
  Description of Artificial Sequence: Synthetic oligonucleotide
ggugacaggccaguuagcg

SEQ ID NO: 1240355 - RNA, 19 nt, Artificial Sequence
  Description of Artificial Sequence: Synthetic oligonucleotide
cccaauugcgugauuaagc

SEQ ID NO: 1240356 - RNA, 19 nt, Artificial Sequence
  Description of Artificial Sequence: Synthetic oligonucleotide
uccugaaccccaucuccag

SEQ ID NO: 1240357 - RNA, 19 nt, Artificial Sequence
  Description of Artificial Sequence: Synthetic oligonucleotide
caggauaugcucagccuug

SEQ ID NO: 1240358 - RNA, 19 nt, Artificial Sequence
  Description of Artificial Sequence: Synthetic oligonucleotide
aucuccacgccugaggaug

SEQ ID NO: 1240359 - RNA, 19 nt, Artificial Sequence
  Description of Artificial Sequence: Synthetic oligonucleotide
uugaggauucggacaacaa

SEQ ID NO: 1240360 - RNA, 19 nt, Artificial Sequence
  Description of Artificial Sequence: Synthetic oligonucleotide
agaccgaggugacaggcca

SEQ ID NO: 1240361 - RNA, 19 nt, Artificial Sequence
  Description of Artificial Sequence: Synthetic oligonucleotide
agguccgaugacuuggcca

SEQ ID NO: 1240362 - RNA, 19 nt, Artificial Sequence
  Description of Artificial Sequence: Synthetic oligonucleotide
aggauaugcucagccuugc

SEQ ID NO: 1240363 - RNA, 19 nt, Artificial Sequence
  Description of Artificial Sequence: Synthetic oligonucleotide
cauagaucucaucaucaga

SEQ ID NO: 1240364 - RNA, 19 nt, Artificial Sequence
  Description of Artificial Sequence: Synthetic oligonucleotide
caauugcgugauuaagcac

SEQ ID NO: 1240365 - RNA, 19 nt, Artificial Sequence
  Description of Artificial Sequence: Synthetic oligonucleotide
cuugcaguccacuugggua

SEQ ID NO: 1240366 - RNA, 19 nt, Artificial Sequence
  Description of Artificial Sequence: Synthetic oligonucleotide
gucgacccaggguucaggg

SEQ ID NO: 1240367 - RNA, 19 nt, Artificial Sequence
  Description of Artificial Sequence: Synthetic oligonucleotide
ggugagaggcccaauugcg

SEQ ID NO: 1240368 - RNA, 19 nt, Artificial Sequence
  Description of Artificial Sequence: Synthetic oligonucleotide
gguuuaaaguccccuucag

SEQ ID NO: 1240369 - RNA, 19 nt, Artificial Sequence
  Description of Artificial Sequence: Synthetic oligonucleotide
cagcuuauagaagagcuca

SEQ ID NO: 1240370 - RNA, 19 nt, Artificial Sequence
  Description of Artificial Sequence: Synthetic oligonucleotide
ugcuuggaaggccucgggu

SEQ ID NO: 1240371 - RNA, 19 nt, Artificial Sequence
  Description of Artificial Sequence: Synthetic oligonucleotide
gugguuuaaaguccccuuc

SEQ ID NO: 1240372 - RNA, 19 nt, Artificial Sequence
  Description of Artificial Sequence: Synthetic oligonucleotide
cuuccagcaccagacagac

SEQ ID NO: 1240373 - RNA, 19 nt, Artificial Sequence
  Description of Artificial Sequence: Synthetic oligonucleotide
ugcacucuagguacugauc

SEQ ID NO: 1240374 - RNA, 19 nt, Artificial Sequence
  Description of Artificial Sequence: Synthetic oligonucleotide
ucuggcauugucccuucau

SEQ ID NO: 1240375 - RNA, 19 nt, Artificial Sequence
  Description of Artificial Sequence: Synthetic oligonucleotide
gaacugagcauguggcaga

SEQ ID NO: 1240376 - RNA, 19 nt, Artificial Sequence
  Description of Artificial Sequence: Synthetic oligonucleotide
agccacacauugccccucc

SEQ ID NO: 1240377 - RNA, 19 nt, Artificial Sequence
  Description of Artificial Sequence: Synthetic oligonucleotide
augaugcugcuuggaaggc

SEQ ID NO: 1240378 - RNA, 19 nt, Artificial Sequence
  Description of Artificial Sequence: Synthetic oligonucleotide
agguccacugaaguugccg

SEQ ID NO: 1240379 - RNA, 19 nt, Artificial Sequence
  Description of Artificial Sequence: Synthetic oligonucleotide
gaagcauaagggacacccc

SEQ ID NO: 1240380 - RNA, 19 nt, Artificial Sequence
  Description of Artificial Sequence: Synthetic oligonucleotide
uagugguuuaaaguccccu

SEQ ID NO: 1240381 - RNA, 19 nt, Artificial Sequence
  Description of Artificial Sequence: Synthetic oligonucleotide
cacguggaccagcaagugg

SEQ ID NO: 1240382 - RNA, 19 nt, Artificial Sequence
  Description of Artificial Sequence: Synthetic oligonucleotide
gugauuaagcacaucugga

SEQ ID NO: 1240383 - RNA, 19 nt, Artificial Sequence
  Description of Artificial Sequence: Synthetic oligonucleotide
guggauugggaccugucga

SEQ ID NO: 1240384 - RNA, 19 nt, Artificial Sequence
  Description of Artificial Sequence: Synthetic oligonucleotide
uggaagguccgaugacuug

SEQ ID NO: 1240385 - RNA, 19 nt, Artificial Sequence
  Description of Artificial Sequence: Synthetic oligonucleotide
gucccuucauaauauagcu

SEQ ID NO: 1240386 - RNA, 19 nt, Artificial Sequence
  Description of Artificial Sequence: Synthetic oligonucleotide
gagcucacaauagcguggc

SEQ ID NO: 1240387 - RNA, 19 nt, Artificial Sequence
  Description of Artificial Sequence: Synthetic oligonucleotide
ccaguuagcguggagacag

SEQ ID NO: 1240388 - RNA, 19 nt, Artificial Sequence
  Description of Artificial Sequence: Synthetic oligonucleotide
aaguccccuucagauauga

SEQ ID NO: 1240389 - RNA, 19 nt, Artificial Sequence
  Description of Artificial Sequence: Synthetic oligonucleotide
cucagagcucgacuucugc

SEQ ID NO: 1240390 - RNA, 19 nt, Artificial Sequence
  Description of Artificial Sequence: Synthetic oligonucleotide
cuauccugaaccccaucuc

SEQ ID NO: 1240391 - RNA, 19 nt, Artificial Sequence
  Description of Artificial Sequence: Synthetic oligonucleotide
acgggccuuucucccaagc

SEQ ID NO: 1240392 - RNA, 19 nt, Artificial Sequence
  Description of Artificial Sequence: Synthetic oligonucleotide
acagcucgccagcaacggg

SEQ ID NO: 1240393 - RNA, 19 nt, Artificial Sequence
  Description of Artificial Sequence: Synthetic oligonucleotide
caaugugcaagcccucauc

SEQ ID NO: 1240394 - RNA, 19 nt, Artificial Sequence
  Description of Artificial Sequence: Synthetic oligonucleotide
gaacguggagaagcucugg

SEQ ID NO: 1240395 - RNA, 19 nt, Artificial Sequence
  Description of Artificial Sequence: Synthetic oligonucleotide
guaccucugaggugggaug

SEQ ID NO: 1240396 - RNA, 19 nt, Artificial Sequence
  Description of Artificial Sequence: Synthetic oligonucleotide
cagggacucaguguggggc

SEQ ID NO: 1240397 - RNA, 19 nt, Artificial Sequence
  Description of Artificial Sequence: Synthetic oligonucleotide
ugagcauguggcagaccga

SEQ ID NO: 1240398 - RNA, 19 nt, Artificial Sequence
  Description of Artificial Sequence: Synthetic oligonucleotide
agauaugagggcaggcgug

SEQ ID NO: 1240399 - RNA, 19 nt, Artificial Sequence
  Description of Artificial Sequence: Synthetic oligonucleotide
gaccccugggaggacacgg

SEQ ID NO: 1240400 - RNA, 19 nt, Artificial Sequence
  Description of Artificial Sequence: Synthetic oligonucleotide
auaugagggcaggcgugcc

SEQ ID NO: 1240401 - RNA, 19 nt, Artificial Sequence
  Description of Artificial Sequence: Synthetic oligonucleotide
ugggcggcaucccugcacu

SEQ ID NO: 1240402 - RNA, 19 nt, Artificial Sequence
  Description of Artificial Sequence: Synthetic oligonucleotide
uccaggguuaccggaacgu

SEQ ID NO: 1240403 - RNA, 19 nt, Artificial Sequence
  Description of Artificial Sequence: Synthetic oligonucleotide
ugacgguuaugggaacugc

SEQ ID NO: 1240404 - RNA, 19 nt, Artificial Sequence
  Description of Artificial Sequence: Synthetic oligonucleotide
ugaggcggcgaacccguga

SEQ ID NO: 1240405 - RNA, 19 nt, Artificial Sequence
  Description of Artificial Sequence: Synthetic oligonucleotide
guggccggucaucacggcg

SEQ ID NO: 1240406 - RNA, 19 nt, Artificial Sequence
  Description of Artificial Sequence: Synthetic oligonucleotide
ugagccagcggaucugaua

SEQ ID NO: 1240407 - RNA, 19 nt, Artificial Sequence
  Description of Artificial Sequence: Synthetic oligonucleotide
cugaaguugccgauuugga

SEQ ID NO: 1240408 - RNA, 19 nt, Artificial Sequence
  Description of Artificial Sequence: Synthetic oligonucleotide
caagcccucauccccauga

SEQ ID NO: 1240409 - RNA, 19 nt, Artificial Sequence
  Description of Artificial Sequence: Synthetic oligonucleotide
gaagagcucacaauagcgu

SEQ ID NO: 1240410 - RNA, 19 nt, Artificial Sequence
  Description of Artificial Sequence: Synthetic oligonucleotide
aacccgugaggagaaggcu

SEQ ID NO: 1240411 - RNA, 19 nt, Artificial Sequence
  Description of Artificial Sequence: Synthetic oligonucleotide
ccaauugcgugauuaagca

SEQ ID NO: 1240412 - RNA, 19 nt, Artificial Sequence
  Description of Artificial Sequence: Synthetic oligonucleotide
uggggcuccaugacgguua

SEQ ID NO: 1240413 - RNA, 19 nt, Artificial Sequence
  Description of Artificial Sequence: Synthetic oligonucleotide
augacgguuaugggaacug

SEQ ID NO: 1240414 - RNA, 19 nt, Artificial Sequence
  Description of Artificial Sequence: Synthetic oligonucleotide
auugggaccugucgaccca

SEQ ID NO: 1240415 - RNA, 19 nt, Artificial Sequence
  Description of Artificial Sequence: Synthetic oligonucleotide
aggaugaggucagaaaguu

SEQ ID NO: 1240416 - RNA, 19 nt, Artificial Sequence
  Description of Artificial Sequence: Synthetic oligonucleotide
caucucgaaucuugagcac

SEQ ID NO: 1240417 - RNA, 19 nt, Artificial Sequence
  Description of Artificial Sequence: Synthetic oligonucleotide
ugucgacccaggguucagg

SEQ ID NO: 1240418 - RNA, 19 nt, Artificial Sequence
  Description of Artificial Sequence: Synthetic oligonucleotide
aaguuggaguagugguuua

SEQ ID NO: 1240419 - RNA, 19 nt, Artificial Sequence
  Description of Artificial Sequence: Synthetic oligonucleotide
uaccucugaggugggauga

SEQ ID NO: 1240420 - RNA, 19 nt, Artificial Sequence
  Description of Artificial Sequence: Synthetic oligonucleotide
gaagguccgaugacuuggc

SEQ ID NO: 1240421 - RNA, 19 nt, Artificial Sequence
  Description of Artificial Sequence: Synthetic oligonucleotide
cagaccgaggugacaggcc

SEQ ID NO: 1240422 - RNA, 19 nt, Artificial Sequence
  Description of Artificial Sequence: Synthetic oligonucleotide
ucuccacgccugaggauga

SEQ ID NO: 1240423 - RNA, 19 nt, Artificial Sequence
  Description of Artificial Sequence: Synthetic oligonucleotide
gacaggccaguuagcgugg

SEQ ID NO: 1240424 - RNA, 19 nt, Artificial Sequence
  Description of Artificial Sequence: Synthetic oligonucleotide
cuccaggguuaccggaacg

SEQ ID NO: 1240425 - RNA, 19 nt, Artificial Sequence
  Description of Artificial Sequence: Synthetic oligonucleotide
gacgguuaugggaacugca

SEQ ID NO: 1240426 - RNA, 19 nt, Artificial Sequence
  Description of Artificial Sequence: Synthetic oligonucleotide
aguuagcguggagacagca

SEQ ID NO: 1240427 - RNA, 19 nt, Artificial Sequence
  Description of Artificial Sequence: Synthetic oligonucleotide
auugucccuucauaauaua

SEQ ID NO: 1240428 - RNA, 19 nt, Artificial Sequence
  Description of Artificial Sequence: Synthetic oligonucleotide
ugccgauuuggaucuuccu

SEQ ID NO: 1240429 - RNA, 19 nt, Artificial Sequence
  Description of Artificial Sequence: Synthetic oligonucleotide
ugggugaggcggcgaaccc

SEQ ID NO: 1240430 - RNA, 19 nt, Artificial Sequence
  Description of Artificial Sequence: Synthetic oligonucleotide
agaaguuggaguagugguu

SEQ ID NO: 1240431 - RNA, 19 nt, Artificial Sequence
  Description of Artificial Sequence: Synthetic oligonucleotide
acggcgucucagugugccc

SEQ ID NO: 1240432 - RNA, 19 nt, Artificial Sequence
  Description of Artificial Sequence: Synthetic oligonucleotide
gcgucaucuuuccaggaug

SEQ ID NO: 1240433 - RNA, 19 nt, Artificial Sequence
  Description of Artificial Sequence: Synthetic oligonucleotide
cucaugaugcugcuuggaa

SEQ ID NO: 1240434 - RNA, 19 nt, Artificial Sequence
  Description of Artificial Sequence: Synthetic oligonucleotide
accccgggagcgaauuugc

SEQ ID NO: 1240435 - RNA, 19 nt, Artificial Sequence
  Description of Artificial Sequence: Synthetic oligonucleotide
guuagcguggagacagcac

SEQ ID NO: 1240436 - RNA, 19 nt, Artificial Sequence
  Description of Artificial Sequence: Synthetic oligonucleotide
agguccaaggggccucuug

SEQ ID NO: 1240437 - RNA, 19 nt, Artificial Sequence
  Description of Artificial Sequence: Synthetic oligonucleotide
gugggugaggcggcgaacc

SEQ ID NO: 1240438 - RNA, 19 nt, Artificial Sequence
  Description of Artificial Sequence: Synthetic oligonucleotide
agcuuucagguaccucuga

SEQ ID NO: 1240439 - RNA, 19 nt, Artificial Sequence
  Description of Artificial Sequence: Synthetic oligonucleotide
cuugagagauggccaccac

SEQ ID NO: 1240440 - RNA, 19 nt, Artificial Sequence
  Description of Artificial Sequence: Synthetic oligonucleotide
ccacgccugaggaugagcc

SEQ ID NO: 1240441 - RNA, 19 nt, Artificial Sequence
  Description of Artificial Sequence: Synthetic oligonucleotide
cugcuuggaaggccucggg

SEQ ID NO: 1240442 - RNA, 19 nt, Artificial Sequence
  Description of Artificial Sequence: Synthetic oligonucleotide
gaaguuggaguagugguuu

SEQ ID NO: 1240443 - RNA, 19 nt, Artificial Sequence
  Description of Artificial Sequence: Synthetic oligonucleotide
gagaaggcugcugcacggc

SEQ ID NO: 1240444 - RNA, 19 nt, Artificial Sequence
  Description of Artificial Sequence: Synthetic oligonucleotide
gcucacaauagcguggcac

SEQ ID NO: 1240445 - RNA, 19 nt, Artificial Sequence
  Description of Artificial Sequence: Synthetic oligonucleotide
ucacggggcuccacgugga

SEQ ID NO: 1240446 - RNA, 19 nt, Artificial Sequence
  Description of Artificial Sequence: Synthetic oligonucleotide
gcgaauuugcagagugugg

SEQ ID NO: 1240447 - RNA, 19 nt, Artificial Sequence
  Description of Artificial Sequence: Synthetic oligonucleotide
ggucugacucuuguuguag

SEQ ID NO: 1240448 - RNA, 19 nt, Artificial Sequence
  Description of Artificial Sequence: Synthetic oligonucleotide
uugggaccugucgacccag

SEQ ID NO: 1240449 - RNA, 19 nt, Artificial Sequence
  Description of Artificial Sequence: Synthetic oligonucleotide
gguccacugaaguugccga

SEQ ID NO: 1240450 - RNA, 19 nt, Artificial Sequence
  Description of Artificial Sequence: Synthetic oligonucleotide
gauacucagggugcccauc

SEQ ID NO: 1240451 - RNA, 19 nt, Artificial Sequence
  Description of Artificial Sequence: Synthetic oligonucleotide
aaaguccccuucagauaug

SEQ ID NO: 1240452 - RNA, 19 nt, Artificial Sequence
  Description of Artificial Sequence: Synthetic oligonucleotide
cauugucccuucauaauau

SEQ ID NO: 1240453 - RNA, 19 nt, Artificial Sequence
  Description of Artificial Sequence: Synthetic oligonucleotide
uuaccggaacguggagaag

SEQ ID NO: 1240454 - RNA, 19 nt, Artificial Sequence
  Description of Artificial Sequence: Synthetic oligonucleotide
ucagugcaggaagcauaag

SEQ ID NO: 1240455 - RNA, 19 nt, Artificial Sequence
  Description of Artificial Sequence: Synthetic oligonucleotide
acgguuaugggaacugcau

SEQ ID NO: 1240456 - RNA, 19 nt, Artificial Sequence
  Description of Artificial Sequence: Synthetic oligonucleotide
ggauucggacaacaaggca

SEQ ID NO: 1240457 - RNA, 19 nt, Artificial Sequence
  Description of Artificial Sequence: Synthetic oligonucleotide
gguccaaggggccucuuga

SEQ ID NO: 1240458 - RNA, 19 nt, Artificial Sequence
  Description of Artificial Sequence: Synthetic oligonucleotide
cugauacucagggugccca

SEQ ID NO: 1240459 - RNA, 19 nt, Artificial Sequence
  Description of Artificial Sequence: Synthetic oligonucleotide
caggcgugccguagaacug

SEQ ID NO: 1240460 - RNA, 19 nt, Artificial Sequence
  Description of Artificial Sequence: Synthetic oligonucleotide
aguuggaguagugguuuaa

SEQ ID NO: 1240461 - RNA, 19 nt, Artificial Sequence
  Description of Artificial Sequence: Synthetic oligonucleotide
guuggaguagugguuuaaa

SEQ ID NO: 1240462 - RNA, 19 nt, Artificial Sequence
  Description of Artificial Sequence: Synthetic oligonucleotide
ucgccagcaacgggucagg

SEQ ID NO: 1240463 - RNA, 19 nt, Artificial Sequence
  Description of Artificial Sequence: Synthetic oligonucleotide
uccacgccugaggaugagc

SEQ ID NO: 1240464 - RNA, 19 nt, Artificial Sequence
  Description of Artificial Sequence: Synthetic oligonucleotide
ggaggcgcugccucacggg

SEQ ID NO: 1240465 - RNA, 19 nt, Artificial Sequence
  Description of Artificial Sequence: Synthetic oligonucleotide
cacugaaguugccgauuug

SEQ ID NO: 1240466 - RNA, 19 nt, Artificial Sequence
  Description of Artificial Sequence: Synthetic oligonucleotide
uguggccggucaucacggc

SEQ ID NO: 1240467 - RNA, 19 nt, Artificial Sequence
  Description of Artificial Sequence: Synthetic oligonucleotide
uaccacagcucgccagcaa

SEQ ID NO: 1240468 - RNA, 19 nt, Artificial Sequence
  Description of Artificial Sequence: Synthetic oligonucleotide
aggcccaauugcgugauua

SEQ ID NO: 1240469 - RNA, 19 nt, Artificial Sequence
  Description of Artificial Sequence: Synthetic oligonucleotide
caguuagcguggagacagc

SEQ ID NO: 1240470 - RNA, 19 nt, Artificial Sequence
  Description of Artificial Sequence: Synthetic oligonucleotide
ggguagaguccccuucccc

SEQ ID NO: 1240471 - RNA, 19 nt, Artificial Sequence
  Description of Artificial Sequence: Synthetic oligonucleotide
cgugccguagaacugagca

SEQ ID NO: 1240472 - RNA, 19 nt, Artificial Sequence
  Description of Artificial Sequence: Synthetic oligonucleotide
aggcgugccguagaacuga

SEQ ID NO: 1240473 - RNA, 19 nt, Artificial Sequence
  Description of Artificial Sequence: Synthetic oligonucleotide
uccaaguuccggcccucuu

SEQ ID NO: 1240474 - RNA, 19 nt, Artificial Sequence
  Description of Artificial Sequence: Synthetic oligonucleotide
uggacacaugcagggucug

SEQ ID NO: 1240475 - RNA, 19 nt, Artificial Sequence
  Description of Artificial Sequence: Synthetic oligonucleotide
caugcagggucuggucccc

SEQ ID NO: 1240476 - RNA, 19 nt, Artificial Sequence
  Description of Artificial Sequence: Synthetic oligonucleotide
cccgggagcgaauuugcag

SEQ ID NO: 1240477 - RNA, 19 nt, Artificial Sequence
  Description of Artificial Sequence: Synthetic oligonucleotide
ccggccaaggcuacugacc

SEQ ID NO: 1240478 - RNA, 19 nt, Artificial Sequence
  Description of Artificial Sequence: Synthetic oligonucleotide
cauugccccuccuuggucu

SEQ ID NO: 1240479 - RNA, 19 nt, Artificial Sequence
  Description of Artificial Sequence: Synthetic oligonucleotide
gagggcaggcgugccguag

SEQ ID NO: 1240480 - RNA, 19 nt, Artificial Sequence
  Description of Artificial Sequence: Synthetic oligonucleotide
guugccgauuuggaucuuc

SEQ ID NO: 1240481 - RNA, 19 nt, Artificial Sequence
  Description of Artificial Sequence: Synthetic oligonucleotide
cauggccuacucgcugccg

SEQ ID NO: 1240482 - RNA, 19 nt, Artificial Sequence
  Description of Artificial Sequence: Synthetic oligonucleotide
gcccaucauggccuacucg

SEQ ID NO: 1240483 - RNA, 19 nt, Artificial Sequence
  Description of Artificial Sequence: Synthetic oligonucleotide
ucccugcacucuagguacu

SEQ ID NO: 1240484 - RNA, 19 nt, Artificial Sequence
  Description of Artificial Sequence: Synthetic oligonucleotide
ggaacguggagaagcucug

SEQ ID NO: 1240485 - RNA, 19 nt, Artificial Sequence
  Description of Artificial Sequence: Synthetic oligonucleotide
caccccgggagcgaauuug

SEQ ID NO: 1240486 - RNA, 19 nt, Artificial Sequence
  Description of Artificial Sequence: Synthetic oligonucleotide
ggauugggaccugucgacc

SEQ ID NO: 1240487 - RNA, 19 nt, Artificial Sequence
  Description of Artificial Sequence: Synthetic oligonucleotide
gcaggcgugccguagaacu

SEQ ID NO: 1240488 - RNA, 19 nt, Artificial Sequence
  Description of Artificial Sequence: Synthetic oligonucleotide
gcccaauugcgugauuaag

SEQ ID NO: 1240489 - RNA, 19 nt, Artificial Sequence
  Description of Artificial Sequence: Synthetic oligonucleotide
gcgugauuaagcacaucug

SEQ ID NO: 1240490 - RNA, 19 nt, Artificial Sequence
  Description of Artificial Sequence: Synthetic oligonucleotide
agcucgccagcaacggguc

SEQ ID NO: 1240491 - RNA, 19 nt, Artificial Sequence
  Description of Artificial Sequence: Synthetic oligonucleotide
gugggcggcaucccugcac

SEQ ID NO: 1240492 - RNA, 19 nt, Artificial Sequence
  Description of Artificial Sequence: Synthetic oligonucleotide
cagguaccucugagguggg

SEQ ID NO: 1240493 - RNA, 19 nt, Artificial Sequence
  Description of Artificial Sequence: Synthetic oligonucleotide
gcagaccgaggugacaggc

SEQ ID NO: 1240494 - RNA, 19 nt, Artificial Sequence
  Description of Artificial Sequence: Synthetic oligonucleotide
gguuaccggaacguggaga

SEQ ID NO: 1240495 - RNA, 19 nt, Artificial Sequence
  Description of Artificial Sequence: Synthetic oligonucleotide
gggaacugcauagcacagc

SEQ ID NO: 1240496 - RNA, 19 nt, Artificial Sequence
  Description of Artificial Sequence: Synthetic oligonucleotide
ggcagaccgaggugacagg

SEQ ID NO: 1240497 - RNA, 19 nt, Artificial Sequence
  Description of Artificial Sequence: Synthetic oligonucleotide
gcauguggcagaccgaggu

SEQ ID NO: 1240498 - RNA, 19 nt, Artificial Sequence
  Description of Artificial Sequence: Synthetic oligonucleotide
gucaucacggcgucucagu

SEQ ID NO: 1240499 - RNA, 19 nt, Artificial Sequence
  Description of Artificial Sequence: Synthetic oligonucleotide
cgacccaggguucagggac

SEQ ID NO: 1240500 - RNA, 19 nt, Artificial Sequence
  Description of Artificial Sequence: Synthetic oligonucleotide
gguccgaugacuuggccau

SEQ ID NO: 1240501 - RNA, 19 nt, Artificial Sequence
  Description of Artificial Sequence: Synthetic oligonucleotide
accggaacguggagaagcu

SEQ ID NO: 1240502 - RNA, 19 nt, Artificial Sequence
  Description of Artificial Sequence: Synthetic oligonucleotide
ccgggagcgaauuugcaga

SEQ ID NO: 1240503 - RNA, 19 nt, Artificial Sequence
  Description of Artificial Sequence: Synthetic oligonucleotide
ugcaagcccucauccccau

SEQ ID NO: 1240504 - RNA, 19 nt, Artificial Sequence
  Description of Artificial Sequence: Synthetic oligonucleotide
gagagcgccagcaggcucu

SEQ ID NO: 1240505 - RNA, 19 nt, Artificial Sequence
  Description of Artificial Sequence: Synthetic oligonucleotide
ggucaucacggcgucucag

SEQ ID NO: 1240506 - RNA, 19 nt, Artificial Sequence
  Description of Artificial Sequence: Synthetic oligonucleotide
agccagcggaucugauacu

SEQ ID NO: 1240507 - RNA, 19 nt, Artificial Sequence
  Description of Artificial Sequence: Synthetic oligonucleotide
ucacggcgucucagugugc

SEQ ID NO: 1240508 - RNA, 19 nt, Artificial Sequence
  Description of Artificial Sequence: Synthetic oligonucleotide
cagcaacgggucagguuuc

SEQ ID NO: 1240509 - RNA, 19 nt, Artificial Sequence
  Description of Artificial Sequence: Synthetic oligonucleotide
gccucggguggccaaggag

SEQ ID NO: 1240510 - RNA, 19 nt, Artificial Sequence
  Description of Artificial Sequence: Synthetic oligonucleotide
caggccaguuagcguggag

SEQ ID NO: 1240511 - RNA, 19 nt, Artificial Sequence
  Description of Artificial Sequence: Synthetic oligonucleotide
cagcucgccagcaacgggu

SEQ ID NO: 1240512 - RNA, 19 nt, Artificial Sequence
  Description of Artificial Sequence: Synthetic oligonucleotide
gcuugagagauggccacca

SEQ ID NO: 1240513 - RNA, 19 nt, Artificial Sequence
  Description of Artificial Sequence: Synthetic oligonucleotide
guagaguccccuuccccau

SEQ ID NO: 1240514 - RNA, 19 nt, Artificial Sequence
  Description of Artificial Sequence: Synthetic oligonucleotide
gugcaagcccucaucccca

SEQ ID NO: 1240515 - RNA, 19 nt, Artificial Sequence
  Description of Artificial Sequence: Synthetic oligonucleotide
cacaauagcguggcacaaa

SEQ ID NO: 1240516 - RNA, 19 nt, Artificial Sequence
  Description of Artificial Sequence: Synthetic oligonucleotide
ggauaugcucagccuugca

SEQ ID NO: 1240517 - RNA, 19 nt, Artificial Sequence
  Description of Artificial Sequence: Synthetic oligonucleotide
caucacggcgucucagugu

SEQ ID NO: 1240518 - RNA, 19 nt, Artificial Sequence
  Description of Artificial Sequence: Synthetic oligonucleotide
ggguuaccggaacguggag

SEQ ID NO: 1240519 - RNA, 19 nt, Artificial Sequence
  Description of Artificial Sequence: Synthetic oligonucleotide
augaggucagaaaguuguu

SEQ ID NO: 1240520 - RNA, 19 nt, Artificial Sequence
  Description of Artificial Sequence: Synthetic oligonucleotide
cccuugaggauucggacaa

SEQ ID NO: 1240521 - RNA, 19 nt, Artificial Sequence
  Description of Artificial Sequence: Synthetic oligonucleotide
ccuauccugaaccccaucu

SEQ ID NO: 1240522 - RNA, 19 nt, Artificial Sequence
  Description of Artificial Sequence: Synthetic oligonucleotide
gggugucagugcaggaagc

SEQ ID NO: 1240523 - RNA, 19 nt, Artificial Sequence
  Description of Artificial Sequence: Synthetic oligonucleotide
gagcgaauuugcagagugu

SEQ ID NO: 1240524 - RNA, 19 nt, Artificial Sequence
  Description of Artificial Sequence: Synthetic oligonucleotide
cuggaagguccgaugacuu

SEQ ID NO: 1240525 - RNA, 19 nt, Artificial Sequence
  Description of Artificial Sequence: Synthetic oligonucleotide
ggacaucagugcuggugca

SEQ ID NO: 1240526 - RNA, 19 nt, Artificial Sequence
  Description of Artificial Sequence: Synthetic oligonucleotide
ggcauugucccuucauaau

SEQ ID NO: 1240527 - RNA, 19 nt, Artificial Sequence
  Description of Artificial Sequence: Synthetic oligonucleotide
ggccaaggcuacugaccag

SEQ ID NO: 1240528 - RNA, 19 nt, Artificial Sequence
  Description of Artificial Sequence: Synthetic oligonucleotide
agcuccccggccaaggcua

SEQ ID NO: 1240529 - RNA, 19 nt, Artificial Sequence
  Description of Artificial Sequence: Synthetic oligonucleotide
gccagcggaucugauacuc

SEQ ID NO: 1240530 - RNA, 19 nt, Artificial Sequence
  Description of Artificial Sequence: Synthetic oligonucleotide
ccaagcuuccagcaccaga

SEQ ID NO: 1240531 - RNA, 19 nt, Artificial Sequence
  Description of Artificial Sequence: Synthetic oligonucleotide
augcugcuuggaaggccuc

SEQ ID NO: 1240532 - RNA, 19 nt, Artificial Sequence
  Description of Artificial Sequence: Synthetic oligonucleotide
ccagcaacgggucagguuu

SEQ ID NO: 1240533 - RNA, 19 nt, Artificial Sequence
  Description of Artificial Sequence: Synthetic oligonucleotide
cugucgacccaggguucag

SEQ ID NO: 1240534 - RNA, 19 nt, Artificial Sequence
  Description of Artificial Sequence: Synthetic oligonucleotide
ggcggcgaacccgugagga

SEQ ID NO: 1240535 - RNA, 19 nt, Artificial Sequence
  Description of Artificial Sequence: Synthetic oligonucleotide
gcggcgaacccgugaggag

SEQ ID NO: 1240536 - RNA, 19 nt, Artificial Sequence
  Description of Artificial Sequence: Synthetic oligonucleotide
ggcccaauugcgugauuaa

SEQ ID NO: 1240537 - RNA, 19 nt, Artificial Sequence
  Description of Artificial Sequence: Synthetic oligonucleotide
cacgggccuuucucccaag

SEQ ID NO: 1240538 - RNA, 19 nt, Artificial Sequence
  Description of Artificial Sequence: Synthetic oligonucleotide
caugacgguuaugggaacu

SEQ ID NO: 1240539 - RNA, 19 nt, Artificial Sequence
  Description of Artificial Sequence: Synthetic oligonucleotide
ggaccugucgacccagggu

SEQ ID NO: 1240540 - RNA, 19 nt, Artificial Sequence
  Description of Artificial Sequence: Synthetic oligonucleotide
gugccguagaacugagcau

SEQ ID NO: 1240541 - RNA, 19 nt, Artificial Sequence
  Description of Artificial Sequence: Synthetic oligonucleotide
ugagggcaggcgugccgua

SEQ ID NO: 1240542 - RNA, 19 nt, Artificial Sequence
  Description of Artificial Sequence: Synthetic oligonucleotide
ggacucaguguggggcucc

SEQ ID NO: 1240543 - RNA, 19 nt, Artificial Sequence
  Description of Artificial Sequence: Synthetic oligonucleotide
guggaaagucaggggugga

SEQ ID NO: 1240544 - RNA, 19 nt, Artificial Sequence
  Description of Artificial Sequence: Synthetic oligonucleotide
cucgacuucugcagcuuau

SEQ ID NO: 1240545 - RNA, 19 nt, Artificial Sequence
  Description of Artificial Sequence: Synthetic oligonucleotide
ccucugaggugggaugagc

SEQ ID NO: 1240546 - RNA, 19 nt, Artificial Sequence
  Description of Artificial Sequence: Synthetic oligonucleotide
acaggccaguuagcgugga

SEQ ID NO: 1240547 - RNA, 19 nt, Artificial Sequence
  Description of Artificial Sequence: Synthetic oligonucleotide
ccaugacgguuaugggaac

SEQ ID NO: 1240548 - RNA, 19 nt, Artificial Sequence
  Description of Artificial Sequence: Synthetic oligonucleotide
ccaggguuaccggaacgug

SEQ ID NO: 1240549 - RNA, 19 nt, Artificial Sequence
  Description of Artificial Sequence: Synthetic oligonucleotide
caucuggagggagcucuga

SEQ ID NO: 1240550 - RNA, 19 nt, Artificial Sequence
  Description of Artificial Sequence: Synthetic oligonucleotide
ccucagagcucgacuucug

SEQ ID NO: 1240551 - RNA, 19 nt, Artificial Sequence
  Description of Artificial Sequence: Synthetic oligonucleotide
acaccccgggagcgaauuu

SEQ ID NO: 1240552 - RNA, 19 nt, Artificial Sequence
  Description of Artificial Sequence: Synthetic oligonucleotide
gggucugacucuuguugua

SEQ ID NO: 1240553 - RNA, 19 nt, Artificial Sequence
  Description of Artificial Sequence: Synthetic oligonucleotide
cuccacgccugaggaugag

SEQ ID NO: 1240554 - RNA, 19 nt, Artificial Sequence
  Description of Artificial Sequence: Synthetic oligonucleotide
caugggucugacucuuguu

SEQ ID NO: 1240555 - RNA, 19 nt, Artificial Sequence
  Description of Artificial Sequence: Synthetic oligonucleotide
gguaccucugaggugggau

SEQ ID NO: 1240556 - RNA, 19 nt, Artificial Sequence
  Description of Artificial Sequence: Synthetic oligonucleotide
agguaccucugagguggga

SEQ ID NO: 1240557 - RNA, 19 nt, Artificial Sequence
  Description of Artificial Sequence: Synthetic oligonucleotide
guccaaggggccucuugau

SEQ ID NO: 1240558 - RNA, 19 nt, Artificial Sequence
  Description of Artificial Sequence: Synthetic oligonucleotide
guggcagaccgaggugaca

SEQ ID NO: 1240559 - RNA, 19 nt, Artificial Sequence
  Description of Artificial Sequence: Synthetic oligonucleotide
ggcgugccguagaacugag

SEQ ID NO: 1240560 - RNA, 19 nt, Artificial Sequence
  Description of Artificial Sequence: Synthetic oligonucleotide
ccccaaacugcagcucagc

SEQ ID NO: 1240561 - RNA, 19 nt, Artificial Sequence
  Description of Artificial Sequence: Synthetic oligonucleotide
ccagcggaucugauacuca

SEQ ID NO: 1240562 - RNA, 19 nt, Artificial Sequence
  Description of Artificial Sequence: Synthetic oligonucleotide
gcaguuuagaagguuccuu

SEQ ID NO: 1240563 - RNA, 19 nt, Artificial Sequence
  Description of Artificial Sequence: Synthetic oligonucleotide
gcgccagcaggcucucaac

SEQ ID NO: 1240564 - RNA, 19 nt, Artificial Sequence
  Description of Artificial Sequence: Synthetic oligonucleotide
caaggcaguuuagaagguu

SEQ ID NO: 1240565 - RNA, 19 nt, Artificial Sequence
  Description of Artificial Sequence: Synthetic oligonucleotide
ggugaggcggcgaacccgu

SEQ ID NO: 1240566 - RNA, 19 nt, Artificial Sequence
  Description of Artificial Sequence: Synthetic oligonucleotide
gcaagcccucauccccaug

SEQ ID NO: 1240567 - RNA, 19 nt, Artificial Sequence
  Description of Artificial Sequence: Synthetic oligonucleotide
aagguccaaggggccucuu

SEQ ID NO: 1240568 - RNA, 19 nt, Artificial Sequence
  Description of Artificial Sequence: Synthetic oligonucleotide
gacaccccgggagcgaauu

SEQ ID NO: 1240569 - RNA, 19 nt, Artificial Sequence
  Description of Artificial Sequence: Synthetic oligonucleotide
gccaguuagcguggagaca

SEQ ID NO: 1240570 - RNA, 19 nt, Artificial Sequence
  Description of Artificial Sequence: Synthetic oligonucleotide
gguacugauccagcacccu

SEQ ID NO: 1240571 - RNA, 19 nt, Artificial Sequence
  Description of Artificial Sequence: Synthetic oligonucleotide
ccguagaacugagcaugug

SEQ ID NO: 1240572 - RNA, 19 nt, Artificial Sequence
  Description of Artificial Sequence: Synthetic oligonucleotide
cacuuggguagaguccccu

SEQ ID NO: 1240573 - RNA, 19 nt, Artificial Sequence
  Description of Artificial Sequence: Synthetic oligonucleotide
ggguggauugggaccuguc

SEQ ID NO: 1240574 - RNA, 19 nt, Artificial Sequence
  Description of Artificial Sequence: Synthetic oligonucleotide
guccgaugacuuggccauc

SEQ ID NO: 1240575 - RNA, 19 nt, Artificial Sequence
  Description of Artificial Sequence: Synthetic oligonucleotide
gcggcaucccugcacucua

SEQ ID NO: 1240576 - RNA, 19 nt, Artificial Sequence
  Description of Artificial Sequence: Synthetic oligonucleotide
gugaggcggcgaacccgug

SEQ ID NO: 1240577 - RNA, 19 nt, Artificial Sequence
  Description of Artificial Sequence: Synthetic oligonucleotide
cugagagcgccagcaggcu

SEQ ID NO: 1240578 - RNA, 19 nt, Artificial Sequence
  Description of Artificial Sequence: Synthetic oligonucleotide
caccuauccugaaccccau

SEQ ID NO: 1240579 - RNA, 19 nt, Artificial Sequence
  Description of Artificial Sequence: Synthetic oligonucleotide
ggcuacugaccagaccccu

SEQ ID NO: 1240580 - RNA, 19 nt, Artificial Sequence
  Description of Artificial Sequence: Synthetic oligonucleotide
caguccacuuggguagagu

SEQ ID NO: 1240581 - RNA, 19 nt, Artificial Sequence
  Description of Artificial Sequence: Synthetic oligonucleotide
aguugccgauuuggaucuu

SEQ ID NO: 1240582 - RNA, 19 nt, Artificial Sequence
  Description of Artificial Sequence: Synthetic oligonucleotide
cgguuaugggaacugcaua

SEQ ID NO: 1240583 - RNA, 19 nt, Artificial Sequence
  Description of Artificial Sequence: Synthetic oligonucleotide
cugccucacggggcuccac

SEQ ID NO: 1240584 - RNA, 19 nt, Artificial Sequence
  Description of Artificial Sequence: Synthetic oligonucleotide
gugggaugagccacacauu

SEQ ID NO: 1240585 - RNA, 19 nt, Artificial Sequence
  Description of Artificial Sequence: Synthetic oligonucleotide
gggcaggcgugccguagaa

SEQ ID NO: 1240586 - RNA, 19 nt, Artificial Sequence
  Description of Artificial Sequence: Synthetic oligonucleotide
gcucgccagcaacggguca

SEQ ID NO: 1240587 - RNA, 19 nt, Artificial Sequence
  Description of Artificial Sequence: Synthetic oligonucleotide
gcgugccguagaacugagc

SEQ ID NO: 1240588 - RNA, 19 nt, Artificial Sequence
  Description of Artificial Sequence: Synthetic oligonucleotide
ggcggcaucccugcacucu

SEQ ID NO: 1240589 - RNA, 19 nt, Artificial Sequence
  Description of Artificial Sequence: Synthetic oligonucleotide
ggugcccaucauggccuac

SEQ ID NO: 1240590 - RNA, 19 nt, Artificial Sequence
  Description of Artificial Sequence: Synthetic oligonucleotide
ggccucggguggccaagga

SEQ ID NO: 1240591 - RNA, 19 nt, Artificial Sequence
  Description of Artificial Sequence: Synthetic oligonucleotide
cccaugacccuugaggauu

SEQ ID NO: 1240592 - RNA, 19 nt, Artificial Sequence
  Description of Artificial Sequence: Synthetic oligonucleotide
gccguagaacugagcaugu

SEQ ID NO: 1240593 - RNA, 19 nt, Artificial Sequence
  Description of Artificial Sequence: Synthetic oligonucleotide
gggacaccccgggagcgaa

SEQ ID NO: 1240594 - RNA, 19 nt, Artificial Sequence
  Description of Artificial Sequence: Synthetic oligonucleotide
ccggaacguggagaagcuc

SEQ ID NO: 1240595 - RNA, 19 nt, Artificial Sequence
  Description of Artificial Sequence: Synthetic oligonucleotide
ccucccucagagcucgacu

SEQ ID NO: 1240596 - RNA, 19 nt, Artificial Sequence
  Description of Artificial Sequence: Synthetic oligonucleotide
cccaagcuuccagcaccag

SEQ ID NO: 1240597 - RNA, 19 nt, Artificial Sequence
  Description of Artificial Sequence: Synthetic oligonucleotide
gccucacggggcuccacgu

SEQ ID NO: 1240598 - RNA, 19 nt, Artificial Sequence
  Description of Artificial Sequence: Synthetic oligonucleotide
cggcgaacccgugaggaga

SEQ ID NO: 1240599 - RNA, 19 nt, Artificial Sequence
  Description of Artificial Sequence: Synthetic oligonucleotide
gcguggcacaaaggcguca

SEQ ID NO: 1240600 - RNA, 19 nt, Artificial Sequence
  Description of Artificial Sequence: Synthetic oligonucleotide
gggcggcaucccugcacuc

SEQ ID NO: 1240601 - RNA, 19 nt, Artificial Sequence
  Description of Artificial Sequence: Synthetic oligonucleotide
ccccgggagcgaauuugca

SEQ ID NO: 1240602 - RNA, 19 nt, Artificial Sequence
  Description of Artificial Sequence: Synthetic oligonucleotide
gaggcccaauugcgugauu

SEQ ID NO: 1240603 - RNA, 19 nt, Artificial Sequence
  Description of Artificial Sequence: Synthetic oligonucleotide
gggguggauugggaccugu

SEQ ID NO: 1240604 - RNA, 19 nt, Artificial Sequence
  Description of Artificial Sequence: Synthetic oligonucleotide
gcacccuggaagguccgau

SEQ ID NO: 1240605 - RNA, 19 nt, Artificial Sequence
  Description of Artificial Sequence: Synthetic oligonucleotide
cgggccuuucucccaagcu

SEQ ID NO: 1240606 - RNA, 19 nt, Artificial Sequence
  Description of Artificial Sequence: Synthetic oligonucleotide
cguggaccagcaagugggu

SEQ ID NO: 1240607 - RNA, 19 nt, Artificial Sequence
  Description of Artificial Sequence: Synthetic oligonucleotide
ggccuacucgcugccggau

SEQ ID NO: 1240608 - RNA, 19 nt, Artificial Sequence
  Description of Artificial Sequence: Synthetic oligonucleotide
gccggucaucacggcgucu

SEQ ID NO: 1240609 - RNA, 19 nt, Artificial Sequence
  Description of Artificial Sequence: Synthetic oligonucleotide
ggacaccccgggagcgaau

SEQ ID NO: 1240610 - RNA, 19 nt, Artificial Sequence
  Description of Artificial Sequence: Synthetic oligonucleotide
gcgcugccucacggggcuc

SEQ ID NO: 1240611 - RNA, 19 nt, Artificial Sequence
  Description of Artificial Sequence: Synthetic oligonucleotide
agagcgaugaaccugccgc

SEQ ID NO: 1240612 - RNA, 19 nt, Artificial Sequence
  Description of Artificial Sequence: Synthetic oligonucleotide
aauugacucagcaucagac

SEQ ID NO: 1240613 - RNA, 19 nt, Artificial Sequence
  Description of Artificial Sequence: Synthetic oligonucleotide
ugaaagaugcuccaguaga

SEQ ID NO: 1240614 - RNA, 19 nt, Artificial Sequence
  Description of Artificial Sequence: Synthetic oligonucleotide
caagaaguaagugaguucg

SEQ ID NO: 1240615 - RNA, 19 nt, Artificial Sequence
  Description of Artificial Sequence: Synthetic oligonucleotide
ugcucaugaacucaggcag

SEQ ID NO: 1240616 - RNA, 19 nt, Artificial Sequence
  Description of Artificial Sequence: Synthetic oligonucleotide
acgacuguagugcagacgg

SEQ ID NO: 1240617 - RNA, 19 nt, Artificial Sequence
  Description of Artificial Sequence: Synthetic oligonucleotide
ucuggguucacggugagcg

SEQ ID NO: 1240618 - RNA, 19 nt, Artificial Sequence
  Description of Artificial Sequence: Synthetic oligonucleotide
ucuaaguugcccuucaccu

SEQ ID NO: 1240619 - RNA, 19 nt, Artificial Sequence
  Description of Artificial Sequence: Synthetic oligonucleotide
cacauaugcacucuggagg

SEQ ID NO: 1240620 - RNA, 19 nt, Artificial Sequence
  Description of Artificial Sequence: Synthetic oligonucleotide
aaguaagugaguucguagu

SEQ ID NO: 1240621 - RNA, 19 nt, Artificial Sequence
  Description of Artificial Sequence: Synthetic oligonucleotide
cauauugaugacauccagg

SEQ ID NO: 1240622 - RNA, 19 nt, Artificial Sequence
  Description of Artificial Sequence: Synthetic oligonucleotide
aacaugcggucccaguggc

SEQ ID NO: 1240623 - RNA, 19 nt, Artificial Sequence
  Description of Artificial Sequence: Synthetic oligonucleotide
agcgcuagcaaguggaggg

SEQ ID NO: 1240624 - RNA, 19 nt, Artificial Sequence
  Description of Artificial Sequence: Synthetic oligonucleotide
aaggaacucuccuccuugc

SEQ ID NO: 1240625 - RNA, 19 nt, Artificial Sequence
  Description of Artificial Sequence: Synthetic oligonucleotide
uucguagucagcugagggg

SEQ ID NO: 1240626 - RNA, 19 nt, Artificial Sequence
  Description of Artificial Sequence: Synthetic oligonucleotide
ugcgucaugagcaucuggc

SEQ ID NO: 1240627 - RNA, 19 nt, Artificial Sequence
  Description of Artificial Sequence: Synthetic oligonucleotide
cugguuaugcuucugggcc

SEQ ID NO: 1240628 - RNA, 19 nt, Artificial Sequence
  Description of Artificial Sequence: Synthetic oligonucleotide
uaaguugcccuucaccuca

SEQ ID NO: 1240629 - RNA, 19 nt, Artificial Sequence
  Description of Artificial Sequence: Synthetic oligonucleotide
uucuaaguugcccuucacc

SEQ ID NO: 1240630 - RNA, 19 nt, Artificial Sequence
  Description of Artificial Sequence: Synthetic oligonucleotide
gcaauccucacucagagag

SEQ ID NO: 1240631 - RNA, 19 nt, Artificial Sequence
  Description of Artificial Sequence: Synthetic oligonucleotide
uagcaauccucacucagag

SEQ ID NO: 1240632 - RNA, 19 nt, Artificial Sequence
  Description of Artificial Sequence: Synthetic oligonucleotide
aauaccugaagaccaccca

SEQ ID NO: 1240633 - RNA, 19 nt, Artificial Sequence
  Description of Artificial Sequence: Synthetic oligonucleotide
ugaguucguagucagcuga

SEQ ID NO: 1240634 - RNA, 19 nt, Artificial Sequence
  Description of Artificial Sequence: Synthetic oligonucleotide
aagccugcuuccuugaggu

SEQ ID NO: 1240635 - RNA, 19 nt, Artificial Sequence
  Description of Artificial Sequence: Synthetic oligonucleotide
agugagaaagcagucgacg

SEQ ID NO: 1240636 - RNA, 19 nt, Artificial Sequence
  Description of Artificial Sequence: Synthetic oligonucleotide
gaaaagcagcgcuagcaag

SEQ ID NO: 1240637 - RNA, 19 nt, Artificial Sequence
  Description of Artificial Sequence: Synthetic oligonucleotide
uccagagcgaugaaccugc

SEQ ID NO: 1240638 - RNA, 19 nt, Artificial Sequence
  Description of Artificial Sequence: Synthetic oligonucleotide
ucccuuuuccccuaggcca

SEQ ID NO: 1240639 - RNA, 19 nt, Artificial Sequence
  Description of Artificial Sequence: Synthetic oligonucleotide
ugucaugagagguguggcg

SEQ ID NO: 1240640 - RNA, 19 nt, Artificial Sequence
  Description of Artificial Sequence: Synthetic oligonucleotide
uucugcguugcuuuggucu

SEQ ID NO: 1240641 - RNA, 19 nt, Artificial Sequence
  Description of Artificial Sequence: Synthetic oligonucleotide
ugggccgagaaaagcagcg

SEQ ID NO: 1240642 - RNA, 19 nt, Artificial Sequence
  Description of Artificial Sequence: Synthetic oligonucleotide
uaccugaagaccacccagg

SEQ ID NO: 1240643 - RNA, 19 nt, Artificial Sequence
  Description of Artificial Sequence: Synthetic oligonucleotide
auaccugaagaccacccag

SEQ ID NO: 1240644 - RNA, 19 nt, Artificial Sequence
  Description of Artificial Sequence: Synthetic oligonucleotide
gaacaugcggucccagugg

SEQ ID NO: 1240645 - RNA, 19 nt, Artificial Sequence
  Description of Artificial Sequence: Synthetic oligonucleotide
agcucgaacaugcgguccc

SEQ ID NO: 1240646 - RNA, 19 nt, Artificial Sequence
  Description of Artificial Sequence: Synthetic oligonucleotide
ucggcgauggccauauuga

SEQ ID NO: 1240647 - RNA, 19 nt, Artificial Sequence
  Description of Artificial Sequence: Synthetic oligonucleotide
aaaagcagcgcuagcaagu

SEQ ID NO: 1240648 - RNA, 19 nt, Artificial Sequence
  Description of Artificial Sequence: Synthetic oligonucleotide
cuacucaaaacaggcaacg

SEQ ID NO: 1240649 - RNA, 19 nt, Artificial Sequence
  Description of Artificial Sequence: Synthetic oligonucleotide
cuuguggcccaauugacuc

SEQ ID NO: 1240650 - RNA, 19 nt, Artificial Sequence
  Description of Artificial Sequence: Synthetic oligonucleotide
ucugggccgagaaaagcag

SEQ ID NO: 1240651 - RNA, 19 nt, Artificial Sequence
  Description of Artificial Sequence: Synthetic oligonucleotide
aaugucccggaguucccuc

SEQ ID NO: 1240652 - RNA, 19 nt, Artificial Sequence
  Description of Artificial Sequence: Synthetic oligonucleotide
ugaagaccacccaggaggc

SEQ ID NO: 1240653 - RNA, 19 nt, Artificial Sequence
  Description of Artificial Sequence: Synthetic oligonucleotide
uuaggugccucgaugcacu

SEQ ID NO: 1240654 - RNA, 19 nt, Artificial Sequence
  Description of Artificial Sequence: Synthetic oligonucleotide
uuugaggccuucuccagcu

SEQ ID NO: 1240655 - RNA, 19 nt, Artificial Sequence
  Description of Artificial Sequence: Synthetic oligonucleotide
ccagauuuguuccagugcg

SEQ ID NO: 1240656 - RNA, 19 nt, Artificial Sequence
  Description of Artificial Sequence: Synthetic oligonucleotide
uagagggucugccacaguc

SEQ ID NO: 1240657 - RNA, 19 nt, Artificial Sequence
  Description of Artificial Sequence: Synthetic oligonucleotide
ggcaacgguguccagagcg

SEQ ID NO: 1240658 - RNA, 19 nt, Artificial Sequence
  Description of Artificial Sequence: Synthetic oligonucleotide
ucgcauguagagcaccgag

SEQ ID NO: 1240659 - RNA, 19 nt, Artificial Sequence
  Description of Artificial Sequence: Synthetic oligonucleotide
ugguuaugcuucugggccg

SEQ ID NO: 1240660 - RNA, 19 nt, Artificial Sequence
  Description of Artificial Sequence: Synthetic oligonucleotide
ucuuguggcccaauugacu

SEQ ID NO: 1240661 - RNA, 19 nt, Artificial Sequence
  Description of Artificial Sequence: Synthetic oligonucleotide
agauuuguuccagugcguc

SEQ ID NO: 1240662 - RNA, 19 nt, Artificial Sequence
  Description of Artificial Sequence: Synthetic oligonucleotide
ucguagucagcugaggggc

SEQ ID NO: 1240663 - RNA, 19 nt, Artificial Sequence
  Description of Artificial Sequence: Synthetic oligonucleotide
gaugcacacgccaucuggg

SEQ ID NO: 1240664 - RNA, 19 nt, Artificial Sequence
  Description of Artificial Sequence: Synthetic oligonucleotide
uuuuaggugccucgaugca

SEQ ID NO: 1240665 - RNA, 19 nt, Artificial Sequence
  Description of Artificial Sequence: Synthetic oligonucleotide
gucaugagagguguggcgg

SEQ ID NO: 1240666 - RNA, 19 nt, Artificial Sequence
  Description of Artificial Sequence: Synthetic oligonucleotide
cuugcaggaauaccugaag

SEQ ID NO: 1240667 - RNA, 19 nt, Artificial Sequence
  Description of Artificial Sequence: Synthetic oligonucleotide
guagccucuucuaaguugc

SEQ ID NO: 1240668 - RNA, 19 nt, Artificial Sequence
  Description of Artificial Sequence: Synthetic oligonucleotide
agagcaccgagugagaggu

SEQ ID NO: 1240669 - RNA, 19 nt, Artificial Sequence
  Description of Artificial Sequence: Synthetic oligonucleotide
agaaaagcagcgcuagcaa

SEQ ID NO: 1240670 - RNA, 19 nt, Artificial Sequence
  Description of Artificial Sequence: Synthetic oligonucleotide
uuuccccuaggccacccag

SEQ ID NO: 1240671 - RNA, 19 nt, Artificial Sequence
  Description of Artificial Sequence: Synthetic oligonucleotide
aaacaggcaacggugucca

SEQ ID NO: 1240672 - RNA, 19 nt, Artificial Sequence
  Description of Artificial Sequence: Synthetic oligonucleotide
caggaauaccugaagacca

SEQ ID NO: 1240673 - RNA, 19 nt, Artificial Sequence
  Description of Artificial Sequence: Synthetic oligonucleotide
augaaccugccgcucgggc

SEQ ID NO: 1240674 - RNA, 19 nt, Artificial Sequence
  Description of Artificial Sequence: Synthetic oligonucleotide
ucaggguacucggcgaugg

SEQ ID NO: 1240675 - RNA, 19 nt, Artificial Sequence
  Description of Artificial Sequence: Synthetic oligonucleotide
aaagcagcgcuagcaagug

SEQ ID NO: 1240676 - RNA, 19 nt, Artificial Sequence
  Description of Artificial Sequence: Synthetic oligonucleotide
cucgaugcacuguuguuug

SEQ ID NO: 1240677 - RNA, 19 nt, Artificial Sequence
  Description of Artificial Sequence: Synthetic oligonucleotide
cagaugccggaccagcucg

SEQ ID NO: 1240678 - RNA, 19 nt, Artificial Sequence
  Description of Artificial Sequence: Synthetic oligonucleotide
agcaccgagugagaggugg

SEQ ID NO: 1240679 - RNA, 19 nt, Artificial Sequence
  Description of Artificial Sequence: Synthetic oligonucleotide
ugcguagccucuucuaagu

SEQ ID NO: 1240680 - RNA, 19 nt, Artificial Sequence
  Description of Artificial Sequence: Synthetic oligonucleotide
caggcaacgguguccagag

SEQ ID NO: 1240681 - RNA, 19 nt, Artificial Sequence
  Description of Artificial Sequence: Synthetic oligonucleotide
ucccggaguucccucaugc

SEQ ID NO: 1240682 - RNA, 19 nt, Artificial Sequence
  Description of Artificial Sequence: Synthetic oligonucleotide
aggguacucggcgauggcc

SEQ ID NO: 1240683 - RNA, 19 nt, Artificial Sequence
  Description of Artificial Sequence: Synthetic oligonucleotide
aucagacccaagcugugca

SEQ ID NO: 1240684 - RNA, 19 nt, Artificial Sequence
  Description of Artificial Sequence: Synthetic oligonucleotide
uggcccaauugacucagca

SEQ ID NO: 1240685 - RNA, 19 nt, Artificial Sequence
  Description of Artificial Sequence: Synthetic oligonucleotide
gagaaagcagucgacggca

SEQ ID NO: 1240686 - RNA, 19 nt, Artificial Sequence
  Description of Artificial Sequence: Synthetic oligonucleotide
gaaccugccgcucgggcug

SEQ ID NO: 1240687 - RNA, 19 nt, Artificial Sequence
  Description of Artificial Sequence: Synthetic oligonucleotide
caucccugcacauggucag

SEQ ID NO: 1240688 - RNA, 19 nt, Artificial Sequence
  Description of Artificial Sequence: Synthetic oligonucleotide
caucccuuuuccccuaggc

SEQ ID NO: 1240689 - RNA, 19 nt, Artificial Sequence
  Description of Artificial Sequence: Synthetic oligonucleotide
uguggcccaauugacucag

SEQ ID NO: 1240690 - RNA, 19 nt, Artificial Sequence
  Description of Artificial Sequence: Synthetic oligonucleotide
gaggcccuacucaaaacag

SEQ ID NO: 1240691 - RNA, 19 nt, Artificial Sequence
  Description of Artificial Sequence: Synthetic oligonucleotide
uuugaaguucugcguugcu

SEQ ID NO: 1240692 - RNA, 19 nt, Artificial Sequence
  Description of Artificial Sequence: Synthetic oligonucleotide
cucggcgauggccauauug

SEQ ID NO: 1240693 - RNA, 19 nt, Artificial Sequence
  Description of Artificial Sequence: Synthetic oligonucleotide
gucgacggcagccucauuc

SEQ ID NO: 1240694 - RNA, 19 nt, Artificial Sequence
  Description of Artificial Sequence: Synthetic oligonucleotide
cacaguccuuagaaugucc

SEQ ID NO: 1240695 - RNA, 19 nt, Artificial Sequence
  Description of Artificial Sequence: Synthetic oligonucleotide
gacggcagccucauucugg

SEQ ID NO: 1240696 - RNA, 19 nt, Artificial Sequence
  Description of Artificial Sequence: Synthetic oligonucleotide
gucuccacaguccuuagaa

SEQ ID NO: 1240697 - RNA, 19 nt, Artificial Sequence
  Description of Artificial Sequence: Synthetic oligonucleotide
uguagagcaccgagugaga

SEQ ID NO: 1240698 - RNA, 19 nt, Artificial Sequence
  Description of Artificial Sequence: Synthetic oligonucleotide
gacgacuguagugcagacg

SEQ ID NO: 1240699 - RNA, 19 nt, Artificial Sequence
  Description of Artificial Sequence: Synthetic oligonucleotide
aggaggcccuacucaaaac

SEQ ID NO: 1240700 - RNA, 19 nt, Artificial Sequence
  Description of Artificial Sequence: Synthetic oligonucleotide
ucuccuucguagaggugug

SEQ ID NO: 1240701 - RNA, 19 nt, Artificial Sequence
  Description of Artificial Sequence: Synthetic oligonucleotide
ucucuccacagcaucccga

SEQ ID NO: 1240702 - RNA, 19 nt, Artificial Sequence
  Description of Artificial Sequence: Synthetic oligonucleotide
aggaauaccugaagaccac

SEQ ID NO: 1240703 - RNA, 19 nt, Artificial Sequence
  Description of Artificial Sequence: Synthetic oligonucleotide
ucugcguugcuuuggucuc

SEQ ID NO: 1240704 - RNA, 19 nt, Artificial Sequence
  Description of Artificial Sequence: Synthetic oligonucleotide
aguucugcguugcuuuggu

SEQ ID NO: 1240705 - RNA, 19 nt, Artificial Sequence
  Description of Artificial Sequence: Synthetic oligonucleotide
gugcagacggcauccgggg

SEQ ID NO: 1240706 - RNA, 19 nt, Artificial Sequence
  Description of Artificial Sequence: Synthetic oligonucleotide
caugcggucccaguggccc

SEQ ID NO: 1240707 - RNA, 19 nt, Artificial Sequence
  Description of Artificial Sequence: Synthetic oligonucleotide
agguugaaauucucagggu

SEQ ID NO: 1240708 - RNA, 19 nt, Artificial Sequence
  Description of Artificial Sequence: Synthetic oligonucleotide
cugcguagccucuucuaag

SEQ ID NO: 1240709 - RNA, 19 nt, Artificial Sequence
  Description of Artificial Sequence: Synthetic oligonucleotide
uguccagagcgaugaaccu

SEQ ID NO: 1240710 - RNA, 19 nt, Artificial Sequence
  Description of Artificial Sequence: Synthetic oligonucleotide
auggccauauugaugacau

SEQ ID NO: 1240711 - RNA, 19 nt, Artificial Sequence
  Description of Artificial Sequence: Synthetic oligonucleotide
guagagcaccgagugagag

SEQ ID NO: 1240712 - RNA, 19 nt, Artificial Sequence
  Description of Artificial Sequence: Synthetic oligonucleotide
gcccaauugacucagcauc

SEQ ID NO: 1240713 - RNA, 19 nt, Artificial Sequence
  Description of Artificial Sequence: Synthetic oligonucleotide
cuucgcagccaucuucgag

SEQ ID NO: 1240714 - RNA, 19 nt, Artificial Sequence
  Description of Artificial Sequence: Synthetic oligonucleotide
ucgacggcagccucauucu

SEQ ID NO: 1240715 - RNA, 19 nt, Artificial Sequence
  Description of Artificial Sequence: Synthetic oligonucleotide
uccccuaggccacccagcu

SEQ ID NO: 1240716 - RNA, 19 nt, Artificial Sequence
  Description of Artificial Sequence: Synthetic oligonucleotide
ccaguagcaauccucacuc

SEQ ID NO: 1240717 - RNA, 19 nt, Artificial Sequence
  Description of Artificial Sequence: Synthetic oligonucleotide
accugaagaccacccagga

SEQ ID NO: 1240718 - RNA, 19 nt, Artificial Sequence
  Description of Artificial Sequence: Synthetic oligonucleotide
cagucucagcauuugccug

SEQ ID NO: 1240719 - RNA, 19 nt, Artificial Sequence
  Description of Artificial Sequence: Synthetic oligonucleotide
agcgggagcugucaugaga

SEQ ID NO: 1240720 - RNA, 19 nt, Artificial Sequence
  Description of Artificial Sequence: Synthetic oligonucleotide
gaugaaccugccgcucggg

SEQ ID NO: 1240721 - RNA, 19 nt, Artificial Sequence
  Description of Artificial Sequence: Synthetic oligonucleotide
aagaaguaagugaguucgu

SEQ ID NO: 1240722 - RNA, 19 nt, Artificial Sequence
  Description of Artificial Sequence: Synthetic oligonucleotide
cugucaugagagguguggc

SEQ ID NO: 1240723 - RNA, 19 nt, Artificial Sequence
  Description of Artificial Sequence: Synthetic oligonucleotide
uuguggcccaauugacuca

SEQ ID NO: 1240724 - RNA, 19 nt, Artificial Sequence
  Description of Artificial Sequence: Synthetic oligonucleotide
acccaagcugugcaugaug

SEQ ID NO: 1240725 - RNA, 19 nt, Artificial Sequence
  Description of Artificial Sequence: Synthetic oligonucleotide
gaaaugcccagcgucugca

SEQ ID NO: 1240726 - RNA, 19 nt, Artificial Sequence
  Description of Artificial Sequence: Synthetic oligonucleotide
ucgaacaugcggucccagu

SEQ ID NO: 1240727 - RNA, 19 nt, Artificial Sequence
  Description of Artificial Sequence: Synthetic oligonucleotide
uguggcggaggaguggaga

SEQ ID NO: 1240728 - RNA, 19 nt, Artificial Sequence
  Description of Artificial Sequence: Synthetic oligonucleotide
cugggccgagaaaagcagc

SEQ ID NO: 1240729 - RNA, 19 nt, Artificial Sequence
  Description of Artificial Sequence: Synthetic oligonucleotide
gagguccuuucaaagcuac

SEQ ID NO: 1240730 - RNA, 19 nt, Artificial Sequence
  Description of Artificial Sequence: Synthetic oligonucleotide
gugaguucguagucagcug

SEQ ID NO: 1240731 - RNA, 19 nt, Artificial Sequence
  Description of Artificial Sequence: Synthetic oligonucleotide
agcagucgacggcagccuc

SEQ ID NO: 1240732 - RNA, 19 nt, Artificial Sequence
  Description of Artificial Sequence: Synthetic oligonucleotide
cagagcgaugaaccugccg

SEQ ID NO: 1240733 - RNA, 19 nt, Artificial Sequence
  Description of Artificial Sequence: Synthetic oligonucleotide
uccuucguagagguguggu

SEQ ID NO: 1240734 - RNA, 19 nt, Artificial Sequence
  Description of Artificial Sequence: Synthetic oligonucleotide
guagcaauccucacucaga

SEQ ID NO: 1240735 - RNA, 19 nt, Artificial Sequence
  Description of Artificial Sequence: Synthetic oligonucleotide
aggcccuacucaaaacagg

SEQ ID NO: 1240736 - RNA, 19 nt, Artificial Sequence
  Description of Artificial Sequence: Synthetic oligonucleotide
ggcccuacucaaaacaggc

SEQ ID NO: 1240737 - RNA, 19 nt, Artificial Sequence
  Description of Artificial Sequence: Synthetic oligonucleotide
ugcagacggcauccggggc

SEQ ID NO: 1240738 - RNA, 19 nt, Artificial Sequence
  Description of Artificial Sequence: Synthetic oligonucleotide
caucagacccaagcugugc

SEQ ID NO: 1240739 - RNA, 19 nt, Artificial Sequence
  Description of Artificial Sequence: Synthetic oligonucleotide
ugcacauggucagggacuc

SEQ ID NO: 1240740 - RNA, 19 nt, Artificial Sequence
  Description of Artificial Sequence: Synthetic oligonucleotide
ucgagcgggagcugucaug

SEQ ID NO: 1240741 - RNA, 19 nt, Artificial Sequence
  Description of Artificial Sequence: Synthetic oligonucleotide
agugagagguggggaagag

SEQ ID NO: 1240742 - RNA, 19 nt, Artificial Sequence
  Description of Artificial Sequence: Synthetic oligonucleotide
augaugcacacgccaucug

SEQ ID NO: 1240743 - RNA, 19 nt, Artificial Sequence
  Description of Artificial Sequence: Synthetic oligonucleotide
agguccuuucaaagcuacc

SEQ ID NO: 1240744 - RNA, 19 nt, Artificial Sequence
  Description of Artificial Sequence: Synthetic oligonucleotide
aggaacucuccuccuugcu

SEQ ID NO: 1240745 - RNA, 19 nt, Artificial Sequence
  Description of Artificial Sequence: Synthetic oligonucleotide
gugcgucaugagcaucugg

SEQ ID NO: 1240746 - RNA, 19 nt, Artificial Sequence
  Description of Artificial Sequence: Synthetic oligonucleotide
augcacacgccaucugggu

SEQ ID NO: 1240747 - RNA, 19 nt, Artificial Sequence
  Description of Artificial Sequence: Synthetic oligonucleotide
cacgccaucuggguucacg

SEQ ID NO: 1240748 - RNA, 19 nt, Artificial Sequence
  Description of Artificial Sequence: Synthetic oligonucleotide
caauugacucagcaucaga

SEQ ID NO: 1240749 - RNA, 19 nt, Artificial Sequence
  Description of Artificial Sequence: Synthetic oligonucleotide
cuucaggugggagccgugc

SEQ ID NO: 1240750 - RNA, 19 nt, Artificial Sequence
  Description of Artificial Sequence: Synthetic oligonucleotide
agcgaugaaccugccgcuc

SEQ ID NO: 1240751 - RNA, 19 nt, Artificial Sequence
  Description of Artificial Sequence: Synthetic oligonucleotide
ucguagaggugugguuccg

SEQ ID NO: 1240752 - RNA, 19 nt, Artificial Sequence
  Description of Artificial Sequence: Synthetic oligonucleotide
ucuucgagcgggagcuguc

SEQ ID NO: 1240753 - RNA, 19 nt, Artificial Sequence
  Description of Artificial Sequence: Synthetic oligonucleotide
gagagugcagcaggacccc

SEQ ID NO: 1240754 - RNA, 19 nt, Artificial Sequence
  Description of Artificial Sequence: Synthetic oligonucleotide
ggcucuuguggcccaauug

SEQ ID NO: 1240755 - RNA, 19 nt, Artificial Sequence
  Description of Artificial Sequence: Synthetic oligonucleotide
ccuuuuaggugccucgaug

SEQ ID NO: 1240756 - RNA, 19 nt, Artificial Sequence
  Description of Artificial Sequence: Synthetic oligonucleotide
guccagagcgaugaaccug

SEQ ID NO: 1240757 - RNA, 19 nt, Artificial Sequence
  Description of Artificial Sequence: Synthetic oligonucleotide
ugccuuuuaggugccucga

SEQ ID NO: 1240758 - RNA, 19 nt, Artificial Sequence
  Description of Artificial Sequence: Synthetic oligonucleotide
cccuucgcagccaucuucg

SEQ ID NO: 1240759 - RNA, 19 nt, Artificial Sequence
  Description of Artificial Sequence: Synthetic oligonucleotide
uuaugcuucugggccgaga

SEQ ID NO: 1240760 - RNA, 19 nt, Artificial Sequence
  Description of Artificial Sequence: Synthetic oligonucleotide
aagcagucgacggcagccu

SEQ ID NO: 1240761 - RNA, 19 nt, Artificial Sequence
  Description of Artificial Sequence: Synthetic oligonucleotide
aggcaacgguguccagagc

SEQ ID NO: 1240762 - RNA, 19 nt, Artificial Sequence
  Description of Artificial Sequence: Synthetic oligonucleotide
ugcuucgccgguugcuacu

SEQ ID NO: 1240763 - RNA, 19 nt, Artificial Sequence
  Description of Artificial Sequence: Synthetic oligonucleotide
ggucaggugaaugccauuc

SEQ ID NO: 1240764 - RNA, 19 nt, Artificial Sequence
  Description of Artificial Sequence: Synthetic oligonucleotide
cagggcgugcugguuaugc

SEQ ID NO: 1240765 - RNA, 19 nt, Artificial Sequence
  Description of Artificial Sequence: Synthetic oligonucleotide
gagccgugcgcgcccuucg

SEQ ID NO: 1240766 - RNA, 19 nt, Artificial Sequence
  Description of Artificial Sequence: Synthetic oligonucleotide
gcgggagcugucaugagag

SEQ ID NO: 1240767 - RNA, 19 nt, Artificial Sequence
  Description of Artificial Sequence: Synthetic oligonucleotide
uacucggcgauggccauau

SEQ ID NO: 1240768 - RNA, 19 nt, Artificial Sequence
  Description of Artificial Sequence: Synthetic oligonucleotide
cagcgcuagcaaguggagg

SEQ ID NO: 1240769 - RNA, 19 nt, Artificial Sequence
  Description of Artificial Sequence: Synthetic oligonucleotide
gccggaaaugcccagcguc

SEQ ID NO: 1240770 - RNA, 19 nt, Artificial Sequence
  Description of Artificial Sequence: Synthetic oligonucleotide
cauaugcacucuggagggc

SEQ ID NO: 1240771 - RNA, 19 nt, Artificial Sequence
  Description of Artificial Sequence: Synthetic oligonucleotide
guagugcagacggcauccg

SEQ ID NO: 1240772 - RNA, 19 nt, Artificial Sequence
  Description of Artificial Sequence: Synthetic oligonucleotide
aggggacgacuguagugca

SEQ ID NO: 1240773 - RNA, 19 nt, Artificial Sequence
  Description of Artificial Sequence: Synthetic oligonucleotide
acaugcggucccaguggcc

SEQ ID NO: 1240774 - RNA, 19 nt, Artificial Sequence
  Description of Artificial Sequence: Synthetic oligonucleotide
agagggucugccacagucu

SEQ ID NO: 1240775 - RNA, 19 nt, Artificial Sequence
  Description of Artificial Sequence: Synthetic oligonucleotide
ccucgcauguagagcaccg

SEQ ID NO: 1240776 - RNA, 19 nt, Artificial Sequence
  Description of Artificial Sequence: Synthetic oligonucleotide
guagucagcugaggggcug

SEQ ID NO: 1240777 - RNA, 19 nt, Artificial Sequence
  Description of Artificial Sequence: Synthetic oligonucleotide
accaucccuuuuccccuag

SEQ ID NO: 1240778 - RNA, 19 nt, Artificial Sequence
  Description of Artificial Sequence: Synthetic oligonucleotide
cagccuggagccagauuug

SEQ ID NO: 1240779 - RNA, 19 nt, Artificial Sequence
  Description of Artificial Sequence: Synthetic oligonucleotide
ucuccggcaggggacgacu

SEQ ID NO: 1240780 - RNA, 19 nt, Artificial Sequence
  Description of Artificial Sequence: Synthetic oligonucleotide
gccaucuucgagcgggagc

SEQ ID NO: 1240781 - RNA, 19 nt, Artificial Sequence
  Description of Artificial Sequence: Synthetic oligonucleotide
cguagccucuucuaaguug

SEQ ID NO: 1240782 - RNA, 19 nt, Artificial Sequence
  Description of Artificial Sequence: Synthetic oligonucleotide
ggucacaagggcuuccucu

SEQ ID NO: 1240783 - RNA, 19 nt, Artificial Sequence
  Description of Artificial Sequence: Synthetic oligonucleotide
cacucuccggcaggggacg

SEQ ID NO: 1240784 - RNA, 19 nt, Artificial Sequence
  Description of Artificial Sequence: Synthetic oligonucleotide
ugcguugcuuuggucucca

SEQ ID NO: 1240785 - RNA, 19 nt, Artificial Sequence
  Description of Artificial Sequence: Synthetic oligonucleotide
acuguagugcagacggcau

SEQ ID NO: 1240786 - RNA, 19 nt, Artificial Sequence
  Description of Artificial Sequence: Synthetic oligonucleotide
gcagggucaggugaaugcc

SEQ ID NO: 1240787 - RNA, 19 nt, Artificial Sequence
  Description of Artificial Sequence: Synthetic oligonucleotide
ccaccuucaggugggagcc

SEQ ID NO: 1240788 - RNA, 19 nt, Artificial Sequence
  Description of Artificial Sequence: Synthetic oligonucleotide
cccuacucaaaacaggcaa

SEQ ID NO: 1240789 - RNA, 19 nt, Artificial Sequence
  Description of Artificial Sequence: Synthetic oligonucleotide
cugcuucgccgguugcuac

SEQ ID NO: 1240790 - RNA, 19 nt, Artificial Sequence
  Description of Artificial Sequence: Synthetic oligonucleotide
cgaacaugcggucccagug

SEQ ID NO: 1240791 - RNA, 19 nt, Artificial Sequence
  Description of Artificial Sequence: Synthetic oligonucleotide
cugcacauggucagggacu

SEQ ID NO: 1240792 - RNA, 19 nt, Artificial Sequence
  Description of Artificial Sequence: Synthetic oligonucleotide
ccucauucuggccuugguc

SEQ ID NO: 1240793 - RNA, 19 nt, Artificial Sequence
  Description of Artificial Sequence: Synthetic oligonucleotide
cccaauugacucagcauca

SEQ ID NO: 1240794 - RNA, 19 nt, Artificial Sequence
  Description of Artificial Sequence: Synthetic oligonucleotide
cagugcgucaugagcaucu

SEQ ID NO: 1240795 - RNA, 19 nt, Artificial Sequence
  Description of Artificial Sequence: Synthetic oligonucleotide
cagcauuugccugcagguc

SEQ ID NO: 1240796 - RNA, 19 nt, Artificial Sequence
  Description of Artificial Sequence: Synthetic oligonucleotide
cacuuugaaguucugcguu

SEQ ID NO: 1240797 - RNA, 19 nt, Artificial Sequence
  Description of Artificial Sequence: Synthetic oligonucleotide
gagcgggagcugucaugag

SEQ ID NO: 1240798 - RNA, 19 nt, Artificial Sequence
  Description of Artificial Sequence: Synthetic oligonucleotide
uggccauauugaugacauc

SEQ ID NO: 1240799 - RNA, 19 nt, Artificial Sequence
  Description of Artificial Sequence: Synthetic oligonucleotide
gacggcauccggggccccg

SEQ ID NO: 1240800 - RNA, 19 nt, Artificial Sequence
  Description of Artificial Sequence: Synthetic oligonucleotide
ccgaagcaccuucugggcc

SEQ ID NO: 1240801 - RNA, 19 nt, Artificial Sequence
  Description of Artificial Sequence: Synthetic oligonucleotide
cuccuucguagaggugugg

SEQ ID NO: 1240802 - RNA, 19 nt, Artificial Sequence
  Description of Artificial Sequence: Synthetic oligonucleotide
ggaagaggccagaagccuc

SEQ ID NO: 1240803 - RNA, 19 nt, Artificial Sequence
  Description of Artificial Sequence: Synthetic oligonucleotide
cucggcgcggcagcgcucc

SEQ ID NO: 1240804 - RNA, 19 nt, Artificial Sequence
  Description of Artificial Sequence: Synthetic oligonucleotide
ggugagcgccuccuuguac

SEQ ID NO: 1240805 - RNA, 19 nt, Artificial Sequence
  Description of Artificial Sequence: Synthetic oligonucleotide
caggguacucggcgauggc

SEQ ID NO: 1240806 - RNA, 19 nt, Artificial Sequence
  Description of Artificial Sequence: Synthetic oligonucleotide
cccgaagcaccuucugggc

SEQ ID NO: 1240807 - RNA, 19 nt, Artificial Sequence
  Description of Artificial Sequence: Synthetic oligonucleotide
guucugcguugcuuugguc

SEQ ID NO: 1240808 - RNA, 19 nt, Artificial Sequence
  Description of Artificial Sequence: Synthetic oligonucleotide
cucgaacaugcggucccag

SEQ ID NO: 1240809 - RNA, 19 nt, Artificial Sequence
  Description of Artificial Sequence: Synthetic oligonucleotide
cuucgccgguugcuacugc

SEQ ID NO: 1240810 - RNA, 19 nt, Artificial Sequence
  Description of Artificial Sequence: Synthetic oligonucleotide
cauccggggccccgguggc

SEQ ID NO: 1240811 - RNA, 19 nt, Artificial Sequence
  Description of Artificial Sequence: Synthetic oligonucleotide
gucaggugaaugccauucu

SEQ ID NO: 1240812 - RNA, 19 nt, Artificial Sequence
  Description of Artificial Sequence: Synthetic oligonucleotide
cugcguugcuuuggucucc

SEQ ID NO: 1240813 - RNA, 19 nt, Artificial Sequence
  Description of Artificial Sequence: Synthetic oligonucleotide
ggacuccugaaagaugcuc

SEQ ID NO: 1240814 - RNA, 19 nt, Artificial Sequence
  Description of Artificial Sequence: Synthetic oligonucleotide
gcugcguagccucuucuaa

SEQ ID NO: 1240815 - RNA, 19 nt, Artificial Sequence
  Description of Artificial Sequence: Synthetic oligonucleotide
ggauccggcagcagcagca

SEQ ID NO: 1240816 - RNA, 19 nt, Artificial Sequence
  Description of Artificial Sequence: Synthetic oligonucleotide
gugggagccgugcgcgccc

SEQ ID NO: 1240817 - RNA, 19 nt, Artificial Sequence
  Description of Artificial Sequence: Synthetic oligonucleotide
cucaggguacucggcgaug

SEQ ID NO: 1240818 - RNA, 19 nt, Artificial Sequence
  Description of Artificial Sequence: Synthetic oligonucleotide
gggcacacucuccggcagg

SEQ ID NO: 1240819 - RNA, 19 nt, Artificial Sequence
  Description of Artificial Sequence: Synthetic oligonucleotide
caguagcaauccucacuca

SEQ ID NO: 1240820 - RNA, 19 nt, Artificial Sequence
  Description of Artificial Sequence: Synthetic oligonucleotide
aggcucuuguggcccaauu

SEQ ID NO: 1240821 - RNA, 19 nt, Artificial Sequence
  Description of Artificial Sequence: Synthetic oligonucleotide
cuccggcaggggacgacug

SEQ ID NO: 1240822 - RNA, 19 nt, Artificial Sequence
  Description of Artificial Sequence: Synthetic oligonucleotide
guuaugcuucugggccgag

SEQ ID NO: 1240823 - RNA, 19 nt, Artificial Sequence
  Description of Artificial Sequence: Synthetic oligonucleotide
caauccucacucagagagu

SEQ ID NO: 1240824 - RNA, 19 nt, Artificial Sequence
  Description of Artificial Sequence: Synthetic oligonucleotide
cagauuuguuccagugcgu

SEQ ID NO: 1240825 - RNA, 19 nt, Artificial Sequence
  Description of Artificial Sequence: Synthetic oligonucleotide
ccgccggaaaugcccagcg

SEQ ID NO: 1240826 - RNA, 19 nt, Artificial Sequence
  Description of Artificial Sequence: Synthetic oligonucleotide
ccgguugcuacugccgccg

SEQ ID NO: 1240827 - RNA, 19 nt, Artificial Sequence
  Description of Artificial Sequence: Synthetic oligonucleotide
ggaccagcucgaacaugcg

SEQ ID NO: 1240828 - RNA, 19 nt, Artificial Sequence
  Description of Artificial Sequence: Synthetic oligonucleotide
ggccgagaaaagcagcgcu

SEQ ID NO: 1240829 - RNA, 19 nt, Artificial Sequence
  Description of Artificial Sequence: Synthetic oligonucleotide
uacagcugcguagccucuu

SEQ ID NO: 1240830 - RNA, 19 nt, Artificial Sequence
  Description of Artificial Sequence: Synthetic oligonucleotide
gguuaugcuucugggccga

SEQ ID NO: 1240831 - RNA, 19 nt, Artificial Sequence
  Description of Artificial Sequence: Synthetic oligonucleotide
gggauccggcagcagcagc

SEQ ID NO: 1240832 - RNA, 19 nt, Artificial Sequence
  Description of Artificial Sequence: Synthetic oligonucleotide
gccgccgccggaaaugccc

SEQ ID NO: 1240833 - RNA, 19 nt, Artificial Sequence
  Description of Artificial Sequence: Synthetic oligonucleotide
gcccuucgcagccaucuuc

SEQ ID NO: 1240834 - RNA, 19 nt, Artificial Sequence
  Description of Artificial Sequence: Synthetic oligonucleotide
gccgguugcuacugccgcc

SEQ ID NO: 1240835 - RNA, 19 nt, Artificial Sequence
  Description of Artificial Sequence: Synthetic oligonucleotide
gcagcgcuagcaaguggag

SEQ ID NO: 1240836 - RNA, 19 nt, Artificial Sequence
  Description of Artificial Sequence: Synthetic oligonucleotide
gcaucagacccaagcugug

SEQ ID NO: 1240837 - RNA, 19 nt, Artificial Sequence
  Description of Artificial Sequence: Synthetic oligonucleotide
cucgcauguagagcaccga

SEQ ID NO: 1240838 - RNA, 19 nt, Artificial Sequence
  Description of Artificial Sequence: Synthetic oligonucleotide
agaugccggaccagcucga

SEQ ID NO: 1240839 - RNA, 19 nt, Artificial Sequence
  Description of Artificial Sequence: Synthetic oligonucleotide
cgaagcaccuucugggcca

SEQ ID NO: 1240840 - RNA, 19 nt, Artificial Sequence
  Description of Artificial Sequence: Synthetic oligonucleotide
ggggacgacuguagugcag

SEQ ID NO: 1240841 - RNA, 19 nt, Artificial Sequence
  Description of Artificial Sequence: Synthetic oligonucleotide
gggugacaaaggaacucuc

SEQ ID NO: 1240842 - RNA, 19 nt, Artificial Sequence
  Description of Artificial Sequence: Synthetic oligonucleotide
gcuucgccgguugcuacug

SEQ ID NO: 1240843 - RNA, 19 nt, Artificial Sequence
  Description of Artificial Sequence: Synthetic oligonucleotide
aggaccccugccaggugcu

SEQ ID NO: 1240844 - RNA, 19 nt, Artificial Sequence
  Description of Artificial Sequence: Synthetic oligonucleotide
ccuuagaaugucccggagu

SEQ ID NO: 1240845 - RNA, 19 nt, Artificial Sequence
  Description of Artificial Sequence: Synthetic oligonucleotide
agacggcauccggggcccc

SEQ ID NO: 1240846 - RNA, 19 nt, Artificial Sequence
  Description of Artificial Sequence: Synthetic oligonucleotide
gcaacgguguccagagcga

SEQ ID NO: 1240847 - RNA, 19 nt, Artificial Sequence
  Description of Artificial Sequence: Synthetic oligonucleotide
ccaucuucgagcgggagcu

SEQ ID NO: 1240848 - RNA, 19 nt, Artificial Sequence
  Description of Artificial Sequence: Synthetic oligonucleotide
cggccucgcauguagagca

SEQ ID NO: 1240849 - RNA, 19 nt, Artificial Sequence
  Description of Artificial Sequence: Synthetic oligonucleotide
gcuacugccgccgccggaa

SEQ ID NO: 1240850 - RNA, 19 nt, Artificial Sequence
  Description of Artificial Sequence: Synthetic oligonucleotide
cuguucccaggcccugcca

SEQ ID NO: 1240851 - RNA, 19 nt, Artificial Sequence
  Description of Artificial Sequence: Synthetic oligonucleotide
ggcccaauugacucagcau

SEQ ID NO: 1240852 - RNA, 19 nt, Artificial Sequence
  Description of Artificial Sequence: Synthetic oligonucleotide
ggggauccggcagcagcag

SEQ ID NO: 1240853 - RNA, 19 nt, Artificial Sequence
  Description of Artificial Sequence: Synthetic oligonucleotide
caaggggcuccaguagcaa

SEQ ID NO: 1240854 - RNA, 19 nt, Artificial Sequence
  Description of Artificial Sequence: Synthetic oligonucleotide
ccagagcgaugaaccugcc

SEQ ID NO: 1240855 - RNA, 19 nt, Artificial Sequence
  Description of Artificial Sequence: Synthetic oligonucleotide
cacacgccaucuggguuca

SEQ ID NO: 1240856 - RNA, 19 nt, Artificial Sequence
  Description of Artificial Sequence: Synthetic oligonucleotide
ugcgcgcccuucgcagcca

SEQ ID NO: 1240857 - RNA, 19 nt, Artificial Sequence
  Description of Artificial Sequence: Synthetic oligonucleotide
gcgucugcagaugccggac

SEQ ID NO: 1240858 - RNA, 19 nt, Artificial Sequence
  Description of Artificial Sequence: Synthetic oligonucleotide
gcccuacucaaaacaggca

SEQ ID NO: 1240859 - RNA, 19 nt, Artificial Sequence
  Description of Artificial Sequence: Synthetic oligonucleotide
ggcauccggggccccggug

SEQ ID NO: 1240860 - RNA, 19 nt, Artificial Sequence
  Description of Artificial Sequence: Synthetic oligonucleotide
gcagucgacggcagccuca

SEQ ID NO: 1240861 - RNA, 19 nt, Artificial Sequence
  Description of Artificial Sequence: Synthetic oligonucleotide
ccggaguucccucaugccu

SEQ ID NO: 1240862 - RNA, 19 nt, Artificial Sequence
  Description of Artificial Sequence: Synthetic oligonucleotide
acucuccggcaggggacga

SEQ ID NO: 1240863 - RNA, 19 nt, Artificial Sequence
  Description of Artificial Sequence: Synthetic oligonucleotide
ucgggcugcuucgccgguu

SEQ ID NO: 1240864 - RNA, 19 nt, Artificial Sequence
  Description of Artificial Sequence: Synthetic oligonucleotide
guagagggucugccacagu

SEQ ID NO: 1240865 - RNA, 19 nt, Artificial Sequence
  Description of Artificial Sequence: Synthetic oligonucleotide
caggucacaagggcuuccu

SEQ ID NO: 1240866 - RNA, 19 nt, Artificial Sequence
  Description of Artificial Sequence: Synthetic oligonucleotide
ggggcggcguccagggcug

SEQ ID NO: 1240867 - RNA, 19 nt, Artificial Sequence
  Description of Artificial Sequence: Synthetic oligonucleotide
acacgccaucuggguucac

SEQ ID NO: 1240868 - RNA, 19 nt, Artificial Sequence
  Description of Artificial Sequence: Synthetic oligonucleotide
ucggcgcggcagcgcucca

SEQ ID NO: 1240869 - RNA, 19 nt, Artificial Sequence
  Description of Artificial Sequence: Synthetic oligonucleotide
gggcccgaacggcggccgg

SEQ ID NO: 1240870 - RNA, 19 nt, Artificial Sequence
  Description of Artificial Sequence: Synthetic oligonucleotide
cuacugccgccgccggaaa

SEQ ID NO: 1240871 - RNA, 19 nt, Artificial Sequence
  Description of Artificial Sequence: Synthetic oligonucleotide
agucgacggcagccucauu

SEQ ID NO: 1240872 - RNA, 19 nt, Artificial Sequence
  Description of Artificial Sequence: Synthetic oligonucleotide
ggagccgugcgcgcccuuc

SEQ ID NO: 1240873 - RNA, 19 nt, Artificial Sequence
  Description of Artificial Sequence: Synthetic oligonucleotide
guacucggcgauggccaua

SEQ ID NO: 1240874 - RNA, 19 nt, Artificial Sequence
  Description of Artificial Sequence: Synthetic oligonucleotide
gccgugcgcgcccuucgca

SEQ ID NO: 1240875 - RNA, 19 nt, Artificial Sequence
  Description of Artificial Sequence: Synthetic oligonucleotide
gcucgaacaugcgguccca

SEQ ID NO: 1240876 - RNA, 19 nt, Artificial Sequence
  Description of Artificial Sequence: Synthetic oligonucleotide
caacgguguccagagcgau

SEQ ID NO: 1240877 - RNA, 19 nt, Artificial Sequence
  Description of Artificial Sequence: Synthetic oligonucleotide
ggcccucggcgcggcagcg

SEQ ID NO: 1240878 - RNA, 19 nt, Artificial Sequence
  Description of Artificial Sequence: Synthetic oligonucleotide
cgaacggcggccggggauc

SEQ ID NO: 1240879 - RNA, 19 nt, Artificial Sequence
  Description of Artificial Sequence: Synthetic oligonucleotide
ccuucgcagccaucuucga

SEQ ID NO: 1240880 - RNA, 19 nt, Artificial Sequence
  Description of Artificial Sequence: Synthetic oligonucleotide
cgacggcagccucauucug

SEQ ID NO: 1240881 - RNA, 19 nt, Artificial Sequence
  Description of Artificial Sequence: Synthetic oligonucleotide
gggcugccuuuuaggugcc

SEQ ID NO: 1240882 - RNA, 19 nt, Artificial Sequence
  Description of Artificial Sequence: Synthetic oligonucleotide
acucggcgauggccauauu

SEQ ID NO: 1240883 - RNA, 19 nt, Artificial Sequence
  Description of Artificial Sequence: Synthetic oligonucleotide
gcguugcuuuggucuccac

SEQ ID NO: 1240884 - RNA, 19 nt, Artificial Sequence
  Description of Artificial Sequence: Synthetic oligonucleotide
gccucgaugcacuguuguu

SEQ ID NO: 1240885 - RNA, 19 nt, Artificial Sequence
  Description of Artificial Sequence: Synthetic oligonucleotide
cgcggcagcgcuccaucuc

SEQ ID NO: 1240886 - RNA, 19 nt, Artificial Sequence
  Description of Artificial Sequence: Synthetic oligonucleotide
cagucgacggcagccucau

SEQ ID NO: 1240887 - RNA, 19 nt, Artificial Sequence
  Description of Artificial Sequence: Synthetic oligonucleotide
ggguucacggugagcgccu

SEQ ID NO: 1240888 - RNA, 19 nt, Artificial Sequence
  Description of Artificial Sequence: Synthetic oligonucleotide
gcguagccucuucuaaguu

SEQ ID NO: 1240889 - RNA, 19 nt, Artificial Sequence
  Description of Artificial Sequence: Synthetic oligonucleotide
cggcagcgcuccaucucgc

SEQ ID NO: 1240890 - RNA, 19 nt, Artificial Sequence
  Description of Artificial Sequence: Synthetic oligonucleotide
ccgccgccggaaaugccca

SEQ ID NO: 1240891 - RNA, 19 nt, Artificial Sequence
  Description of Artificial Sequence: Synthetic oligonucleotide
cguagaggugugguuccga

SEQ ID NO: 1240892 - RNA, 19 nt, Artificial Sequence
  Description of Artificial Sequence: Synthetic oligonucleotide
gccggaccagcucgaacau

SEQ ID NO: 1240893 - RNA, 19 nt, Artificial Sequence
  Description of Artificial Sequence: Synthetic oligonucleotide
cggaguucccucaugccuu

SEQ ID NO: 1240894 - RNA, 19 nt, Artificial Sequence
  Description of Artificial Sequence: Synthetic oligonucleotide
cucgggcugcuucgccggu

SEQ ID NO: 1240895 - RNA, 19 nt, Artificial Sequence
  Description of Artificial Sequence: Synthetic oligonucleotide
cccucaugccuuucacaau

SEQ ID NO: 1240896 - RNA, 19 nt, Artificial Sequence
  Description of Artificial Sequence: Synthetic oligonucleotide
cgccgccggaaaugcccag

SEQ ID NO: 1240897 - RNA, 19 nt, Artificial Sequence
  Description of Artificial Sequence: Synthetic oligonucleotide
gcgcggcagcgcuccaucu

SEQ ID NO: 1240898 - RNA, 19 nt, Artificial Sequence
  Description of Artificial Sequence: Synthetic oligonucleotide
caggcucuuguggcccaau

SEQ ID NO: 1240899 - RNA, 19 nt, Artificial Sequence
  Description of Artificial Sequence: Synthetic oligonucleotide
cccucggcgcggcagcgcu

SEQ ID NO: 1240900 - RNA, 19 nt, Artificial Sequence
  Description of Artificial Sequence: Synthetic oligonucleotide
ccgaacggcggccggggau

SEQ ID NO: 1240901 - RNA, 19 nt, Artificial Sequence
  Description of Artificial Sequence: Synthetic oligonucleotide
cgccaucuggguucacggu

SEQ ID NO: 1240902 - RNA, 19 nt, Artificial Sequence
  Description of Artificial Sequence: Synthetic oligonucleotide
cccgaacggcggccgggga

SEQ ID NO: 1240903 - RNA, 19 nt, Artificial Sequence
  Description of Artificial Sequence: Synthetic oligonucleotide
cgcgcccuucgcagccauc

SEQ ID NO: 1240904 - RNA, 19 nt, Artificial Sequence
  Description of Artificial Sequence: Synthetic oligonucleotide
cgccggaaaugcccagcgu

SEQ ID NO: 1240905 - RNA, 19 nt, Artificial Sequence
  Description of Artificial Sequence: Synthetic oligonucleotide
gcgcgcccuucgcagccau

SEQ ID NO: 1240906 - RNA, 19 nt, Artificial Sequence
  Description of Artificial Sequence: Synthetic oligonucleotide
gggagccgugcgcgcccuu

SEQ ID NO: 1240907 - RNA, 19 nt, Artificial Sequence
  Description of Artificial Sequence: Synthetic oligonucleotide
cgcccuucgcagccaucuu

SEQ ID NO: 1240908 - RNA, 19 nt, Artificial Sequence
  Description of Artificial Sequence: Synthetic oligonucleotide
cggcauccggggccccggu

SEQ ID NO: 1240909 - RNA, 19 nt, Artificial Sequence
  Description of Artificial Sequence: Synthetic oligonucleotide
cggcgcggcagcgcuccau

SEQ ID NO: 1240910 - RNA, 19 nt, Artificial Sequence
  Description of Artificial Sequence: Synthetic oligonucleotide
aaaucgaugucacuaauac

SEQ ID NO: 1240911 - RNA, 19 nt, Artificial Sequence
  Description of Artificial Sequence: Synthetic oligonucleotide
aagacuaggcaugucaucc

SEQ ID NO: 1240912 - RNA, 19 nt, Artificial Sequence
  Description of Artificial Sequence: Synthetic oligonucleotide
guuuugaccagucucaacg

SEQ ID NO: 1240913 - RNA, 19 nt, Artificial Sequence
  Description of Artificial Sequence: Synthetic oligonucleotide
uaaugaaguccuuaaauag

SEQ ID NO: 1240914 - RNA, 19 nt, Artificial Sequence
  Description of Artificial Sequence: Synthetic oligonucleotide
uguagauuaacagagcucc

SEQ ID NO: 1240915 - RNA, 19 nt, Artificial Sequence
  Description of Artificial Sequence: Synthetic oligonucleotide
cuugcuguagcguaaaucc

SEQ ID NO: 1240916 - RNA, 19 nt, Artificial Sequence
  Description of Artificial Sequence: Synthetic oligonucleotide
ugucgaaauacucucauug

SEQ ID NO: 1240917 - RNA, 19 nt, Artificial Sequence
  Description of Artificial Sequence: Synthetic oligonucleotide
aauacugagaugucacuag

SEQ ID NO: 1240918 - RNA, 19 nt, Artificial Sequence
  Description of Artificial Sequence: Synthetic oligonucleotide
uccuuaaauagaaauacca

SEQ ID NO: 1240919 - RNA, 19 nt, Artificial Sequence
  Description of Artificial Sequence: Synthetic oligonucleotide
ucuuaauaguuccugaaga

SEQ ID NO: 1240920 - RNA, 19 nt, Artificial Sequence
  Description of Artificial Sequence: Synthetic oligonucleotide
ugagaaugaagucucuggg

SEQ ID NO: 1240921 - RNA, 19 nt, Artificial Sequence
  Description of Artificial Sequence: Synthetic oligonucleotide
auuguaagagccgaggagc

SEQ ID NO: 1240922 - RNA, 19 nt, Artificial Sequence
  Description of Artificial Sequence: Synthetic oligonucleotide
gauacugucgugcagagca

SEQ ID NO: 1240923 - RNA, 19 nt, Artificial Sequence
  Description of Artificial Sequence: Synthetic oligonucleotide
aagacuaagaaacuggauu

SEQ ID NO: 1240924 - RNA, 19 nt, Artificial Sequence
  Description of Artificial Sequence: Synthetic oligonucleotide
gaaucaggcaggcaaaggg

SEQ ID NO: 1240925 - RNA, 19 nt, Artificial Sequence
  Description of Artificial Sequence: Synthetic oligonucleotide
aaguaagggugucaggaac

SEQ ID NO: 1240926 - RNA, 19 nt, Artificial Sequence
  Description of Artificial Sequence: Synthetic oligonucleotide
uguguauaggaguugaacu

SEQ ID NO: 1240927 - RNA, 19 nt, Artificial Sequence
  Description of Artificial Sequence: Synthetic oligonucleotide
aguccaaccaucguguucc

SEQ ID NO: 1240928 - RNA, 19 nt, Artificial Sequence
  Description of Artificial Sequence: Synthetic oligonucleotide
ucucaggaaaguaagggug

SEQ ID NO: 1240929 - RNA, 19 nt, Artificial Sequence
  Description of Artificial Sequence: Synthetic oligonucleotide
aaaccaaacaguguccggg

SEQ ID NO: 1240930 - RNA, 19 nt, Artificial Sequence
  Description of Artificial Sequence: Synthetic oligonucleotide
uaauaguuccugaagacaa

SEQ ID NO: 1240931 - RNA, 19 nt, Artificial Sequence
  Description of Artificial Sequence: Synthetic oligonucleotide
acagaaguaaccugagagg

SEQ ID NO: 1240932 - RNA, 19 nt, Artificial Sequence
  Description of Artificial Sequence: Synthetic oligonucleotide
cacagaaguaaccugagag

SEQ ID NO: 1240933 - RNA, 19 nt, Artificial Sequence
  Description of Artificial Sequence: Synthetic oligonucleotide
gucucaacggaucugagag

SEQ ID NO: 1240934 - RNA, 19 nt, Artificial Sequence
  Description of Artificial Sequence: Synthetic oligonucleotide
aaccaaacaguguccgggc

SEQ ID NO: 1240935 - RNA, 19 nt, Artificial Sequence
  Description of Artificial Sequence: Synthetic oligonucleotide
aucagcuaggcuuucagag

SEQ ID NO: 1240936 - RNA, 19 nt, Artificial Sequence
  Description of Artificial Sequence: Synthetic oligonucleotide
ugugauaucuguuccuugc

SEQ ID NO: 1240937 - RNA, 19 nt, Artificial Sequence
  Description of Artificial Sequence: Synthetic oligonucleotide
uuaaggaacugugauaucu

SEQ ID NO: 1240938 - RNA, 19 nt, Artificial Sequence
  Description of Artificial Sequence: Synthetic oligonucleotide
agagcucccagcuaaggac

SEQ ID NO: 1240939 - RNA, 19 nt, Artificial Sequence
  Description of Artificial Sequence: Synthetic oligonucleotide
gauuguaagagccgaggag

SEQ ID NO: 1240940 - RNA, 19 nt, Artificial Sequence
  Description of Artificial Sequence: Synthetic oligonucleotide
gacagcuguagauuaacag

SEQ ID NO: 1240941 - RNA, 19 nt, Artificial Sequence
  Description of Artificial Sequence: Synthetic oligonucleotide
ugaucucacaguuuugacc

SEQ ID NO: 1240942 - RNA, 19 nt, Artificial Sequence
  Description of Artificial Sequence: Synthetic oligonucleotide
aggcaugucauccauagca

SEQ ID NO: 1240943 - RNA, 19 nt, Artificial Sequence
  Description of Artificial Sequence: Synthetic oligonucleotide
uguagcguaaaucccaguc

SEQ ID NO: 1240944 - RNA, 19 nt, Artificial Sequence
  Description of Artificial Sequence: Synthetic oligonucleotide
auacugagaugucacuagc

SEQ ID NO: 1240945 - RNA, 19 nt, Artificial Sequence
  Description of Artificial Sequence: Synthetic oligonucleotide
uugccuguugucuagggag

SEQ ID NO: 1240946 - RNA, 19 nt, Artificial Sequence
  Description of Artificial Sequence: Synthetic oligonucleotide
aacaucagagugccccgcc

SEQ ID NO: 1240947 - RNA, 19 nt, Artificial Sequence
  Description of Artificial Sequence: Synthetic oligonucleotide
uuuugaccagucucaacgg

SEQ ID NO: 1240948 - RNA, 19 nt, Artificial Sequence
  Description of Artificial Sequence: Synthetic oligonucleotide
ucgaaauacucucauugac

SEQ ID NO: 1240949 - RNA, 19 nt, Artificial Sequence
  Description of Artificial Sequence: Synthetic oligonucleotide
cagcuguagauuaacagag

SEQ ID NO: 1240950 - RNA, 19 nt, Artificial Sequence
  Description of Artificial Sequence: Synthetic oligonucleotide
uucgcuuagggacacagaa

SEQ ID NO: 1240951 - RNA, 19 nt, Artificial Sequence
  Description of Artificial Sequence: Synthetic oligonucleotide
gacaucgucuuuguuaggg

SEQ ID NO: 1240952 - RNA, 19 nt, Artificial Sequence
  Description of Artificial Sequence: Synthetic oligonucleotide
gaaaguaagggugucagga

SEQ ID NO: 1240953 - RNA, 19 nt, Artificial Sequence
  Description of Artificial Sequence: Synthetic oligonucleotide
uagcguaaaucccaguccc

SEQ ID NO: 1240954 - RNA, 19 nt, Artificial Sequence
  Description of Artificial Sequence: Synthetic oligonucleotide
uuaauaguuccugaagaca

SEQ ID NO: 1240955 - RNA, 19 nt, Artificial Sequence
  Description of Artificial Sequence: Synthetic oligonucleotide
cagaggaucuagcaggucg

SEQ ID NO: 1240956 - RNA, 19 nt, Artificial Sequence
  Description of Artificial Sequence: Synthetic oligonucleotide
ggaucuagcaggucgaggg

SEQ ID NO: 1240957 - RNA, 19 nt, Artificial Sequence
  Description of Artificial Sequence: Synthetic oligonucleotide
gacaagaccugacauaguc

SEQ ID NO: 1240958 - RNA, 19 nt, Artificial Sequence
  Description of Artificial Sequence: Synthetic oligonucleotide
uguauaggaguugaacugc

SEQ ID NO: 1240959 - RNA, 19 nt, Artificial Sequence
  Description of Artificial Sequence: Synthetic oligonucleotide
aggccauugaaaucgaugu

SEQ ID NO: 1240960 - RNA, 19 nt, Artificial Sequence
  Description of Artificial Sequence: Synthetic oligonucleotide
aauucgcuuagggacacag

SEQ ID NO: 1240961 - RNA, 19 nt, Artificial Sequence
  Description of Artificial Sequence: Synthetic oligonucleotide
gacgagugaagagaggagg

SEQ ID NO: 1240962 - RNA, 19 nt, Artificial Sequence
  Description of Artificial Sequence: Synthetic oligonucleotide
ugaagugucucugaucuca

SEQ ID NO: 1240963 - RNA, 19 nt, Artificial Sequence
  Description of Artificial Sequence: Synthetic oligonucleotide
ucccuuauuucccucauuc

SEQ ID NO: 1240964 - RNA, 19 nt, Artificial Sequence
  Description of Artificial Sequence: Synthetic oligonucleotide
uuucuuaauaguuccugaa

SEQ ID NO: 1240965 - RNA, 19 nt, Artificial Sequence
  Description of Artificial Sequence: Synthetic oligonucleotide
guaaacuuguguauaggag

SEQ ID NO: 1240966 - RNA, 19 nt, Artificial Sequence
  Description of Artificial Sequence: Synthetic oligonucleotide
agacuaagaaacuggauuu

SEQ ID NO: 1240967 - RNA, 19 nt, Artificial Sequence
  Description of Artificial Sequence: Synthetic oligonucleotide
cuuucagaggaucuagcag

SEQ ID NO: 1240968 - RNA, 19 nt, Artificial Sequence
  Description of Artificial Sequence: Synthetic oligonucleotide
augucacuaauacugagau

SEQ ID NO: 1240969 - RNA, 19 nt, Artificial Sequence
  Description of Artificial Sequence: Synthetic oligonucleotide
agcaagacuaggcauguca

SEQ ID NO: 1240970 - RNA, 19 nt, Artificial Sequence
  Description of Artificial Sequence: Synthetic oligonucleotide
gagauuguaagagccgagg

SEQ ID NO: 1240971 - RNA, 19 nt, Artificial Sequence
  Description of Artificial Sequence: Synthetic oligonucleotide
aagagaguucauccuggag

SEQ ID NO: 1240972 - RNA, 19 nt, Artificial Sequence
  Description of Artificial Sequence: Synthetic oligonucleotide
ucgaagacaagaccugaca

SEQ ID NO: 1240973 - RNA, 19 nt, Artificial Sequence
  Description of Artificial Sequence: Synthetic oligonucleotide
ucggagaaggucacugccg

SEQ ID NO: 1240974 - RNA, 19 nt, Artificial Sequence
  Description of Artificial Sequence: Synthetic oligonucleotide
uuccccucagguagcaucg

SEQ ID NO: 1240975 - RNA, 19 nt, Artificial Sequence
  Description of Artificial Sequence: Synthetic oligonucleotide
ugucgugcagagcaagaag

SEQ ID NO: 1240976 - RNA, 19 nt, Artificial Sequence
  Description of Artificial Sequence: Synthetic oligonucleotide
uccagaauucgcuuaggga

SEQ ID NO: 1240977 - RNA, 19 nt, Artificial Sequence
  Description of Artificial Sequence: Synthetic oligonucleotide
gagagaggaugguauuugg

SEQ ID NO: 1240978 - RNA, 19 nt, Artificial Sequence
  Description of Artificial Sequence: Synthetic oligonucleotide
uaugucgaaauacucucau

SEQ ID NO: 1240979 - RNA, 19 nt, Artificial Sequence
  Description of Artificial Sequence: Synthetic oligonucleotide
uacugagaugucacuagcc

SEQ ID NO: 1240980 - RNA, 19 nt, Artificial Sequence
  Description of Artificial Sequence: Synthetic oligonucleotide
ucuucccacguucccaggg

SEQ ID NO: 1240981 - RNA, 19 nt, Artificial Sequence
  Description of Artificial Sequence: Synthetic oligonucleotide
cuugccaaggacagagccg

SEQ ID NO: 1240982 - RNA, 19 nt, Artificial Sequence
  Description of Artificial Sequence: Synthetic oligonucleotide
aaaguaagggugucaggaa

SEQ ID NO: 1240983 - RNA, 19 nt, Artificial Sequence
  Description of Artificial Sequence: Synthetic oligonucleotide
guaaaucccagucccagac

SEQ ID NO: 1240984 - RNA, 19 nt, Artificial Sequence
  Description of Artificial Sequence: Synthetic oligonucleotide
uaaagggcaagcuccccag

SEQ ID NO: 1240985 - RNA, 19 nt, Artificial Sequence
  Description of Artificial Sequence: Synthetic oligonucleotide
aaggacagagccgauucag

SEQ ID NO: 1240986 - RNA, 19 nt, Artificial Sequence
  Description of Artificial Sequence: Synthetic oligonucleotide
guagcguaaaucccagucc

SEQ ID NO: 1240987 - RNA, 19 nt, Artificial Sequence
  Description of Artificial Sequence: Synthetic oligonucleotide
aaauacucucauugacugu

SEQ ID NO: 1240988 - RNA, 19 nt, Artificial Sequence
  Description of Artificial Sequence: Synthetic oligonucleotide
uuguaagagccgaggagcc

SEQ ID NO: 1240989 - RNA, 19 nt, Artificial Sequence
  Description of Artificial Sequence: Synthetic oligonucleotide
caucguguuccuuccaagg

SEQ ID NO: 1240990 - RNA, 19 nt, Artificial Sequence
  Description of Artificial Sequence: Synthetic oligonucleotide
aacugugauaucuguuccu

SEQ ID NO: 1240991 - RNA, 19 nt, Artificial Sequence
  Description of Artificial Sequence: Synthetic oligonucleotide
cugugcuuuaaugaagucc

SEQ ID NO: 1240992 - RNA, 19 nt, Artificial Sequence
  Description of Artificial Sequence: Synthetic oligonucleotide
gauuaaggaacugugauau

SEQ ID NO: 1240993 - RNA, 19 nt, Artificial Sequence
  Description of Artificial Sequence: Synthetic oligonucleotide
gucgugcagagcaagaagg

SEQ ID NO: 1240994 - RNA, 19 nt, Artificial Sequence
  Description of Artificial Sequence: Synthetic oligonucleotide
acaacaucagagugccccg

SEQ ID NO: 1240995 - RNA, 19 nt, Artificial Sequence
  Description of Artificial Sequence: Synthetic oligonucleotide
aaacacuggggccuccuca

SEQ ID NO: 1240996 - RNA, 19 nt, Artificial Sequence
  Description of Artificial Sequence: Synthetic oligonucleotide
uugaaaucgaugucacuaa

SEQ ID NO: 1240997 - RNA, 19 nt, Artificial Sequence
  Description of Artificial Sequence: Synthetic oligonucleotide
cauagcaucuaccaagaca

SEQ ID NO: 1240998 - RNA, 19 nt, Artificial Sequence
  Description of Artificial Sequence: Synthetic oligonucleotide
acaagaccugacauagucc

SEQ ID NO: 1240999 - RNA, 19 nt, Artificial Sequence
  Description of Artificial Sequence: Synthetic oligonucleotide
ugcacuaguugacuggaaa

SEQ ID NO: 1241000 - RNA, 19 nt, Artificial Sequence
  Description of Artificial Sequence: Synthetic oligonucleotide
agauuguaagagccgagga

SEQ ID NO: 1241001 - RNA, 19 nt, Artificial Sequence
  Description of Artificial Sequence: Synthetic oligonucleotide
gagauauucuuggugucag

SEQ ID NO: 1241002 - RNA, 19 nt, Artificial Sequence
  Description of Artificial Sequence: Synthetic oligonucleotide
uuguguauaggaguugaac

SEQ ID NO: 1241003 - RNA, 19 nt, Artificial Sequence
  Description of Artificial Sequence: Synthetic oligonucleotide
uuugaccagucucaacgga

SEQ ID NO: 1241004 - RNA, 19 nt, Artificial Sequence
  Description of Artificial Sequence: Synthetic oligonucleotide
ugauccucaggagauauuc

SEQ ID NO: 1241005 - RNA, 19 nt, Artificial Sequence
  Description of Artificial Sequence: Synthetic oligonucleotide
aaccaugaagcuugccugu

SEQ ID NO: 1241006 - RNA, 19 nt, Artificial Sequence
  Description of Artificial Sequence: Synthetic oligonucleotide
uagcaucgucuccagaacc

SEQ ID NO: 1241007 - RNA, 19 nt, Artificial Sequence
  Description of Artificial Sequence: Synthetic oligonucleotide
caagaccugacauagucca

SEQ ID NO: 1241008 - RNA, 19 nt, Artificial Sequence
  Description of Artificial Sequence: Synthetic oligonucleotide
agaccugacauaguccaac

SEQ ID NO: 1241009 - RNA, 19 nt, Artificial Sequence
  Description of Artificial Sequence: Synthetic oligonucleotide
aaggacggacugucuugcc

SEQ ID NO: 1241010 - RNA, 19 nt, Artificial Sequence
  Description of Artificial Sequence: Synthetic oligonucleotide
gauuguagccaggauuaag

SEQ ID NO: 1241011 - RNA, 19 nt, Artificial Sequence
  Description of Artificial Sequence: Synthetic oligonucleotide
cacuaguugacuggaaacc

SEQ ID NO: 1241012 - RNA, 19 nt, Artificial Sequence
  Description of Artificial Sequence: Synthetic oligonucleotide
ucguguuccuuccaaggcu

SEQ ID NO: 1241013 - RNA, 19 nt, Artificial Sequence
  Description of Artificial Sequence: Synthetic oligonucleotide
guugacuggaaaccaaaca

SEQ ID NO: 1241014 - RNA, 19 nt, Artificial Sequence
  Description of Artificial Sequence: Synthetic oligonucleotide
auacagugggaggacaggg

SEQ ID NO: 1241015 - RNA, 19 nt, Artificial Sequence
  Description of Artificial Sequence: Synthetic oligonucleotide
acuggcuacauagaagucu

SEQ ID NO: 1241016 - RNA, 19 nt, Artificial Sequence
  Description of Artificial Sequence: Synthetic oligonucleotide
uggaagugggcaaacgcuc

SEQ ID NO: 1241017 - RNA, 19 nt, Artificial Sequence
  Description of Artificial Sequence: Synthetic oligonucleotide
cugacauaguccaaccauc

SEQ ID NO: 1241018 - RNA, 19 nt, Artificial Sequence
  Description of Artificial Sequence: Synthetic oligonucleotide
uaauacugagaugucacua

SEQ ID NO: 1241019 - RNA, 19 nt, Artificial Sequence
  Description of Artificial Sequence: Synthetic oligonucleotide
uucgaagacaagaccugac

SEQ ID NO: 1241020 - RNA, 19 nt, Artificial Sequence
  Description of Artificial Sequence: Synthetic oligonucleotide
uugcuguagcguaaauccc

SEQ ID NO: 1241021 - RNA, 19 nt, Artificial Sequence
  Description of Artificial Sequence: Synthetic oligonucleotide
gaggaugguauuuggaucu

SEQ ID NO: 1241022 - RNA, 19 nt, Artificial Sequence
  Description of Artificial Sequence: Synthetic oligonucleotide
uaguugacuggaaaccaaa

SEQ ID NO: 1241023 - RNA, 19 nt, Artificial Sequence
  Description of Artificial Sequence: Synthetic oligonucleotide
ucgcuuagggacacagaag

SEQ ID NO: 1241024 - RNA, 19 nt, Artificial Sequence
  Description of Artificial Sequence: Synthetic oligonucleotide
aguugacuggaaaccaaac

SEQ ID NO: 1241025 - RNA, 19 nt, Artificial Sequence
  Description of Artificial Sequence: Synthetic oligonucleotide
gugucaggaacccggauac

SEQ ID NO: 1241026 - RNA, 19 nt, Artificial Sequence
  Description of Artificial Sequence: Synthetic oligonucleotide
ugaaaucgaugucacuaau

SEQ ID NO: 1241027 - RNA, 19 nt, Artificial Sequence
  Description of Artificial Sequence: Synthetic oligonucleotide
gaggccauugaaaucgaug

SEQ ID NO: 1241028 - RNA, 19 nt, Artificial Sequence
  Description of Artificial Sequence: Synthetic oligonucleotide
caguguccgggcuucaggg

SEQ ID NO: 1241029 - RNA, 19 nt, Artificial Sequence
  Description of Artificial Sequence: Synthetic oligonucleotide
agaagacuaagaaacugga

SEQ ID NO: 1241030 - RNA, 19 nt, Artificial Sequence
  Description of Artificial Sequence: Synthetic oligonucleotide
ugauggaagugggcaaacg

SEQ ID NO: 1241031 - RNA, 19 nt, Artificial Sequence
  Description of Artificial Sequence: Synthetic oligonucleotide
acugugcuuuaaugaaguc

SEQ ID NO: 1241032 - RNA, 19 nt, Artificial Sequence
  Description of Artificial Sequence: Synthetic oligonucleotide
acuaguugacuggaaacca

SEQ ID NO: 1241033 - RNA, 19 nt, Artificial Sequence
  Description of Artificial Sequence: Synthetic oligonucleotide
acucccguugcacuaguug

SEQ ID NO: 1241034 - RNA, 19 nt, Artificial Sequence
  Description of Artificial Sequence: Synthetic oligonucleotide
uuucgaagacaagaccuga

SEQ ID NO: 1241035 - RNA, 19 nt, Artificial Sequence
  Description of Artificial Sequence: Synthetic oligonucleotide
ugaugaagugucucugauc

SEQ ID NO: 1241036 - RNA, 19 nt, Artificial Sequence
  Description of Artificial Sequence: Synthetic oligonucleotide
agaauucgcuuagggacac

SEQ ID NO: 1241037 - RNA, 19 nt, Artificial Sequence
  Description of Artificial Sequence: Synthetic oligonucleotide
ggaaaccaaacaguguccg

SEQ ID NO: 1241038 - RNA, 19 nt, Artificial Sequence
  Description of Artificial Sequence: Synthetic oligonucleotide
ucacuagccuuucgaagac

SEQ ID NO: 1241039 - RNA, 19 nt, Artificial Sequence
  Description of Artificial Sequence: Synthetic oligonucleotide
uagcuaugucgaaauacuc

SEQ ID NO: 1241040 - RNA, 19 nt, Artificial Sequence
  Description of Artificial Sequence: Synthetic oligonucleotide
acuuguguauaggaguuga

SEQ ID NO: 1241041 - RNA, 19 nt, Artificial Sequence
  Description of Artificial Sequence: Synthetic oligonucleotide
guguaaacuuguguauagg

SEQ ID NO: 1241042 - RNA, 19 nt, Artificial Sequence
  Description of Artificial Sequence: Synthetic oligonucleotide
agccgaggagcccaucugg

SEQ ID NO: 1241043 - RNA, 19 nt, Artificial Sequence
  Description of Artificial Sequence: Synthetic oligonucleotide
ugaccagucucaacggauc

SEQ ID NO: 1241044 - RNA, 19 nt, Artificial Sequence
  Description of Artificial Sequence: Synthetic oligonucleotide
aagugggcaaacgcucuuc

SEQ ID NO: 1241045 - RNA, 19 nt, Artificial Sequence
  Description of Artificial Sequence: Synthetic oligonucleotide
gucgaaauacucucauuga

SEQ ID NO: 1241046 - RNA, 19 nt, Artificial Sequence
  Description of Artificial Sequence: Synthetic oligonucleotide
uacucagggguguaaacuu

SEQ ID NO: 1241047 - RNA, 19 nt, Artificial Sequence
  Description of Artificial Sequence: Synthetic oligonucleotide
uuggaucucucuucuugca

SEQ ID NO: 1241048 - RNA, 19 nt, Artificial Sequence
  Description of Artificial Sequence: Synthetic oligonucleotide
ugugagggguugagaauga

SEQ ID NO: 1241049 - RNA, 19 nt, Artificial Sequence
  Description of Artificial Sequence: Synthetic oligonucleotide
aucuaccaagacaacauca

SEQ ID NO: 1241050 - RNA, 19 nt, Artificial Sequence
  Description of Artificial Sequence: Synthetic oligonucleotide
gguagcuaugucgaaauac

SEQ ID NO: 1241051 - RNA, 19 nt, Artificial Sequence
  Description of Artificial Sequence: Synthetic oligonucleotide
caaccaucguguuccuucc

SEQ ID NO: 1241052 - RNA, 19 nt, Artificial Sequence
  Description of Artificial Sequence: Synthetic oligonucleotide
guccuuaaauagaaauacc

SEQ ID NO: 1241053 - RNA, 19 nt, Artificial Sequence
  Description of Artificial Sequence: Synthetic oligonucleotide
ugcuccggauuguagccag

SEQ ID NO: 1241054 - RNA, 19 nt, Artificial Sequence
  Description of Artificial Sequence: Synthetic oligonucleotide
gagggguugagaaugaagu

SEQ ID NO: 1241055 - RNA, 19 nt, Artificial Sequence
  Description of Artificial Sequence: Synthetic oligonucleotide
uuguuagggucacuggcua

SEQ ID NO: 1241056 - RNA, 19 nt, Artificial Sequence
  Description of Artificial Sequence: Synthetic oligonucleotide
aaacgcucuucugaccuca

SEQ ID NO: 1241057 - RNA, 19 nt, Artificial Sequence
  Description of Artificial Sequence: Synthetic oligonucleotide
cacucuucuucccacguuc

SEQ ID NO: 1241058 - RNA, 19 nt, Artificial Sequence
  Description of Artificial Sequence: Synthetic oligonucleotide
uucccucauucccacagaa

SEQ ID NO: 1241059 - RNA, 19 nt, Artificial Sequence
  Description of Artificial Sequence: Synthetic oligonucleotide
gguagcaucgucuccagaa

SEQ ID NO: 1241060 - RNA, 19 nt, Artificial Sequence
  Description of Artificial Sequence: Synthetic oligonucleotide
cuuccccucagguagcauc

SEQ ID NO: 1241061 - RNA, 19 nt, Artificial Sequence
  Description of Artificial Sequence: Synthetic oligonucleotide
caucggagaaggucacugc

SEQ ID NO: 1241062 - RNA, 19 nt, Artificial Sequence
  Description of Artificial Sequence: Synthetic oligonucleotide
auacucucauugacugugc

SEQ ID NO: 1241063 - RNA, 19 nt, Artificial Sequence
  Description of Artificial Sequence: Synthetic oligonucleotide
guauaggaguugaacugcc

SEQ ID NO: 1241064 - RNA, 19 nt, Artificial Sequence
  Description of Artificial Sequence: Synthetic oligonucleotide
cuaagaaacuggauuucaa

SEQ ID NO: 1241065 - RNA, 19 nt, Artificial Sequence
  Description of Artificial Sequence: Synthetic oligonucleotide
gucaggaacccggauacug

SEQ ID NO: 1241066 - RNA, 19 nt, Artificial Sequence
  Description of Artificial Sequence: Synthetic oligonucleotide
ugagaggcugguagcuaug

SEQ ID NO: 1241067 - RNA, 19 nt, Artificial Sequence
  Description of Artificial Sequence: Synthetic oligonucleotide
agcuggacgagugaagaga

SEQ ID NO: 1241068 - RNA, 19 nt, Artificial Sequence
  Description of Artificial Sequence: Synthetic oligonucleotide
uaguccaaccaucguguuc

SEQ ID NO: 1241069 - RNA, 19 nt, Artificial Sequence
  Description of Artificial Sequence: Synthetic oligonucleotide
ccaggauuaaggaacugug

SEQ ID NO: 1241070 - RNA, 19 nt, Artificial Sequence
  Description of Artificial Sequence: Synthetic oligonucleotide
acaucgucuuuguuagggu

SEQ ID NO: 1241071 - RNA, 19 nt, Artificial Sequence
  Description of Artificial Sequence: Synthetic oligonucleotide
augaaucaggcaggcaaag

SEQ ID NO: 1241072 - RNA, 19 nt, Artificial Sequence
  Description of Artificial Sequence: Synthetic oligonucleotide
ucucaacggaucugagaga

SEQ ID NO: 1241073 - RNA, 19 nt, Artificial Sequence
  Description of Artificial Sequence: Synthetic oligonucleotide
cagaauucgcuuagggaca

SEQ ID NO: 1241074 - RNA, 19 nt, Artificial Sequence
  Description of Artificial Sequence: Synthetic oligonucleotide
ucccguugcacuaguugac

SEQ ID NO: 1241075 - RNA, 19 nt, Artificial Sequence
  Description of Artificial Sequence: Synthetic oligonucleotide
caggagauauucuuggugu

SEQ ID NO: 1241076 - RNA, 19 nt, Artificial Sequence
  Description of Artificial Sequence: Synthetic oligonucleotide
caagacuaggcaugucauc

SEQ ID NO: 1241077 - RNA, 19 nt, Artificial Sequence
  Description of Artificial Sequence: Synthetic oligonucleotide
caacggaucugagagagga

SEQ ID NO: 1241078 - RNA, 19 nt, Artificial Sequence
  Description of Artificial Sequence: Synthetic oligonucleotide
uguccagaauucgcuuagg

SEQ ID NO: 1241079 - RNA, 19 nt, Artificial Sequence
  Description of Artificial Sequence: Synthetic oligonucleotide
gccacuuaucuucagcuac

SEQ ID NO: 1241080 - RNA, 19 nt, Artificial Sequence
  Description of Artificial Sequence: Synthetic oligonucleotide
uguaagagccgaggagccc

SEQ ID NO: 1241081 - RNA, 19 nt, Artificial Sequence
  Description of Artificial Sequence: Synthetic oligonucleotide
gccagagauuguaagagcc

SEQ ID NO: 1241082 - RNA, 19 nt, Artificial Sequence
  Description of Artificial Sequence: Synthetic oligonucleotide
ucaagugggcaaguugggu

SEQ ID NO: 1241083 - RNA, 19 nt, Artificial Sequence
  Description of Artificial Sequence: Synthetic oligonucleotide
uccugaucagcuaggcuuu

SEQ ID NO: 1241084 - RNA, 19 nt, Artificial Sequence
  Description of Artificial Sequence: Synthetic oligonucleotide
uaagggugucaggaacccg

SEQ ID NO: 1241085 - RNA, 19 nt, Artificial Sequence
  Description of Artificial Sequence: Synthetic oligonucleotide
cuucugaccucacugucca

SEQ ID NO: 1241086 - RNA, 19 nt, Artificial Sequence
  Description of Artificial Sequence: Synthetic oligonucleotide
ggugucagcaagacuaggc

SEQ ID NO: 1241087 - RNA, 19 nt, Artificial Sequence
  Description of Artificial Sequence: Synthetic oligonucleotide
uaggcaugucauccauagc

SEQ ID NO: 1241088 - RNA, 19 nt, Artificial Sequence
  Description of Artificial Sequence: Synthetic oligonucleotide
agugugagggguugagaau

SEQ ID NO: 1241089 - RNA, 19 nt, Artificial Sequence
  Description of Artificial Sequence: Synthetic oligonucleotide
guaagggugucaggaaccc

SEQ ID NO: 1241090 - RNA, 19 nt, Artificial Sequence
  Description of Artificial Sequence: Synthetic oligonucleotide
acuguccagaauucgcuua

SEQ ID NO: 1241091 - RNA, 19 nt, Artificial Sequence
  Description of Artificial Sequence: Synthetic oligonucleotide
ccagagauuguaagagccg

SEQ ID NO: 1241092 - RNA, 19 nt, Artificial Sequence
  Description of Artificial Sequence: Synthetic oligonucleotide
acacagaaguaaccugaga

SEQ ID NO: 1241093 - RNA, 19 nt, Artificial Sequence
  Description of Artificial Sequence: Synthetic oligonucleotide
ucuagggagccaggaaucu

SEQ ID NO: 1241094 - RNA, 19 nt, Artificial Sequence
  Description of Artificial Sequence: Synthetic oligonucleotide
uacugucgugcagagcaag

SEQ ID NO: 1241095 - RNA, 19 nt, Artificial Sequence
  Description of Artificial Sequence: Synthetic oligonucleotide
cucccguugcacuaguuga

SEQ ID NO: 1241096 - RNA, 19 nt, Artificial Sequence
  Description of Artificial Sequence: Synthetic oligonucleotide
cuaugucgaaauacucuca

SEQ ID NO: 1241097 - RNA, 19 nt, Artificial Sequence
  Description of Artificial Sequence: Synthetic oligonucleotide
gaaaucgaugucacuaaua

SEQ ID NO: 1241098 - RNA, 19 nt, Artificial Sequence
  Description of Artificial Sequence: Synthetic oligonucleotide
gcuucaagugggcaaguug

SEQ ID NO: 1241099 - RNA, 19 nt, Artificial Sequence
  Description of Artificial Sequence: Synthetic oligonucleotide
caaggacggacugucuugc

SEQ ID NO: 1241100 - RNA, 19 nt, Artificial Sequence
  Description of Artificial Sequence: Synthetic oligonucleotide
agagauuguaagagccgag

SEQ ID NO: 1241101 - RNA, 19 nt, Artificial Sequence
  Description of Artificial Sequence: Synthetic oligonucleotide
ggaaucugggcgaugcucc

SEQ ID NO: 1241102 - RNA, 19 nt, Artificial Sequence
  Description of Artificial Sequence: Synthetic oligonucleotide
agacuaggcaugucaucca

SEQ ID NO: 1241103 - RNA, 19 nt, Artificial Sequence
  Description of Artificial Sequence: Synthetic oligonucleotide
aacaguguccgggcuucag

SEQ ID NO: 1241104 - RNA, 19 nt, Artificial Sequence
  Description of Artificial Sequence: Synthetic oligonucleotide
agauauucuuggugucagu

SEQ ID NO: 1241105 - RNA, 19 nt, Artificial Sequence
  Description of Artificial Sequence: Synthetic oligonucleotide
acagagcucccagcuaagg

SEQ ID NO: 1241106 - RNA, 19 nt, Artificial Sequence
  Description of Artificial Sequence: Synthetic oligonucleotide
guagcuaugucgaaauacu

SEQ ID NO: 1241107 - RNA, 19 nt, Artificial Sequence
  Description of Artificial Sequence: Synthetic oligonucleotide
cagugugagggguugagaa

SEQ ID NO: 1241108 - RNA, 19 nt, Artificial Sequence
  Description of Artificial Sequence: Synthetic oligonucleotide
aggaucuagcaggucgagg

SEQ ID NO: 1241109 - RNA, 19 nt, Artificial Sequence
  Description of Artificial Sequence: Synthetic oligonucleotide
gccauugaaaucgauguca

SEQ ID NO: 1241110 - RNA, 19 nt, Artificial Sequence
  Description of Artificial Sequence: Synthetic oligonucleotide
aagccugguccaggaaggg

SEQ ID NO: 1241111 - RNA, 19 nt, Artificial Sequence
  Description of Artificial Sequence: Synthetic oligonucleotide
cagcuaggcuuucagagga

SEQ ID NO: 1241112 - RNA, 19 nt, Artificial Sequence
  Description of Artificial Sequence: Synthetic oligonucleotide
gcacuaguugacuggaaac

SEQ ID NO: 1241113 - RNA, 19 nt, Artificial Sequence
  Description of Artificial Sequence: Synthetic oligonucleotide
guagauuaacagagcuccc

SEQ ID NO: 1241114 - RNA, 19 nt, Artificial Sequence
  Description of Artificial Sequence: Synthetic oligonucleotide
ucucccuuauuucccucau

SEQ ID NO: 1241115 - RNA, 19 nt, Artificial Sequence
  Description of Artificial Sequence: Synthetic oligonucleotide
gaccucacuguccagaauu

SEQ ID NO: 1241116 - RNA, 19 nt, Artificial Sequence
  Description of Artificial Sequence: Synthetic oligonucleotide
uggcuacauagaagucucc

SEQ ID NO: 1241117 - RNA, 19 nt, Artificial Sequence
  Description of Artificial Sequence: Synthetic oligonucleotide
cacuaauacugagauguca

SEQ ID NO: 1241118 - RNA, 19 nt, Artificial Sequence
  Description of Artificial Sequence: Synthetic oligonucleotide
cagacagcuguagauuaac

SEQ ID NO: 1241119 - RNA, 19 nt, Artificial Sequence
  Description of Artificial Sequence: Synthetic oligonucleotide
caaacaguguccgggcuuc

SEQ ID NO: 1241120 - RNA, 19 nt, Artificial Sequence
  Description of Artificial Sequence: Synthetic oligonucleotide
guugcacuaguugacugga

SEQ ID NO: 1241121 - RNA, 19 nt, Artificial Sequence
  Description of Artificial Sequence: Synthetic oligonucleotide
accaaacaguguccgggcu

SEQ ID NO: 1241122 - RNA, 19 nt, Artificial Sequence
  Description of Artificial Sequence: Synthetic oligonucleotide
accaucguguuccuuccaa

SEQ ID NO: 1241123 - RNA, 19 nt, Artificial Sequence
  Description of Artificial Sequence: Synthetic oligonucleotide
gacggacugucuugccaag

SEQ ID NO: 1241124 - RNA, 19 nt, Artificial Sequence
  Description of Artificial Sequence: Synthetic oligonucleotide
cuaguugacuggaaaccaa

SEQ ID NO: 1241125 - RNA, 19 nt, Artificial Sequence
  Description of Artificial Sequence: Synthetic oligonucleotide
ccauugaaaucgaugucac

SEQ ID NO: 1241126 - RNA, 19 nt, Artificial Sequence
  Description of Artificial Sequence: Synthetic oligonucleotide
acuagccuuucgaagacaa

SEQ ID NO: 1241127 - RNA, 19 nt, Artificial Sequence
  Description of Artificial Sequence: Synthetic oligonucleotide
gauauucuuggugucaguu

SEQ ID NO: 1241128 - RNA, 19 nt, Artificial Sequence
  Description of Artificial Sequence: Synthetic oligonucleotide
cagagauuguaagagccga

SEQ ID NO: 1241129 - RNA, 19 nt, Artificial Sequence
  Description of Artificial Sequence: Synthetic oligonucleotide
caagcuccccagugugacg

SEQ ID NO: 1241130 - RNA, 19 nt, Artificial Sequence
  Description of Artificial Sequence: Synthetic oligonucleotide
auggacuccacugcucuga

SEQ ID NO: 1241131 - RNA, 19 nt, Artificial Sequence
  Description of Artificial Sequence: Synthetic oligonucleotide
aaccaucguguuccuucca

SEQ ID NO: 1241132 - RNA, 19 nt, Artificial Sequence
  Description of Artificial Sequence: Synthetic oligonucleotide
gcuguagauuaacagagcu

SEQ ID NO: 1241133 - RNA, 19 nt, Artificial Sequence
  Description of Artificial Sequence: Synthetic oligonucleotide
ugggcaaguugggugucag

SEQ ID NO: 1241134 - RNA, 19 nt, Artificial Sequence
  Description of Artificial Sequence: Synthetic oligonucleotide
gacuggccguacucagggg

SEQ ID NO: 1241135 - RNA, 19 nt, Artificial Sequence
  Description of Artificial Sequence: Synthetic oligonucleotide
agaggaucuagcaggucga

SEQ ID NO: 1241136 - RNA, 19 nt, Artificial Sequence
  Description of Artificial Sequence: Synthetic oligonucleotide
aggacaggcgcgguccacg

SEQ ID NO: 1241137 - RNA, 19 nt, Artificial Sequence
  Description of Artificial Sequence: Synthetic oligonucleotide
gccuuucgaagacaagacc

SEQ ID NO: 1241138 - RNA, 19 nt, Artificial Sequence
  Description of Artificial Sequence: Synthetic oligonucleotide
cucugaucucacaguuuug

SEQ ID NO: 1241139 - RNA, 19 nt, Artificial Sequence
  Description of Artificial Sequence: Synthetic oligonucleotide
gccgauucagggcugucag

SEQ ID NO: 1241140 - RNA, 19 nt, Artificial Sequence
  Description of Artificial Sequence: Synthetic oligonucleotide
gagccgaggagcccaucug

SEQ ID NO: 1241141 - RNA, 19 nt, Artificial Sequence
  Description of Artificial Sequence: Synthetic oligonucleotide
gcaaggacggacugucuug

SEQ ID NO: 1241142 - RNA, 19 nt, Artificial Sequence
  Description of Artificial Sequence: Synthetic oligonucleotide
cuggccguacucaggggug

SEQ ID NO: 1241143 - RNA, 19 nt, Artificial Sequence
  Description of Artificial Sequence: Synthetic oligonucleotide
gaggaucuagcaggucgag

SEQ ID NO: 1241144 - RNA, 19 nt, Artificial Sequence
  Description of Artificial Sequence: Synthetic oligonucleotide
augucgaaauacucucauu

SEQ ID NO: 1241145 - RNA, 19 nt, Artificial Sequence
  Description of Artificial Sequence: Synthetic oligonucleotide
gcgcccaggaaccaugaag

SEQ ID NO: 1241146 - RNA, 19 nt, Artificial Sequence
  Description of Artificial Sequence: Synthetic oligonucleotide
gcuggacgagugaagagag

SEQ ID NO: 1241147 - RNA, 19 nt, Artificial Sequence
  Description of Artificial Sequence: Synthetic oligonucleotide
cuaauacugagaugucacu

SEQ ID NO: 1241148 - RNA, 19 nt, Artificial Sequence
  Description of Artificial Sequence: Synthetic oligonucleotide
guugucuagggagccagga

SEQ ID NO: 1241149 - RNA, 19 nt, Artificial Sequence
  Description of Artificial Sequence: Synthetic oligonucleotide
aggaugguauuuggaucuc

SEQ ID NO: 1241150 - RNA, 19 nt, Artificial Sequence
  Description of Artificial Sequence: Synthetic oligonucleotide
cucaggaaaguaagggugu

SEQ ID NO: 1241151 - RNA, 19 nt, Artificial Sequence
  Description of Artificial Sequence: Synthetic oligonucleotide
acucagggguguaaacuug

SEQ ID NO: 1241152 - RNA, 19 nt, Artificial Sequence
  Description of Artificial Sequence: Synthetic oligonucleotide
gcuacagaugaaucaggca

SEQ ID NO: 1241153 - RNA, 19 nt, Artificial Sequence
  Description of Artificial Sequence: Synthetic oligonucleotide
gaacccggauacugucgug

SEQ ID NO: 1241154 - RNA, 19 nt, Artificial Sequence
  Description of Artificial Sequence: Synthetic oligonucleotide
uccggauuguagccaggau

SEQ ID NO: 1241155 - RNA, 19 nt, Artificial Sequence
  Description of Artificial Sequence: Synthetic oligonucleotide
ggccagagauuguaagagc

SEQ ID NO: 1241156 - RNA, 19 nt, Artificial Sequence
  Description of Artificial Sequence: Synthetic oligonucleotide
aggcugguagcuaugucga

SEQ ID NO: 1241157 - RNA, 19 nt, Artificial Sequence
  Description of Artificial Sequence: Synthetic oligonucleotide
ugguagcuaugucgaaaua

SEQ ID NO: 1241158 - RNA, 19 nt, Artificial Sequence
  Description of Artificial Sequence: Synthetic oligonucleotide
cguugcacuaguugacugg

SEQ ID NO: 1241159 - RNA, 19 nt, Artificial Sequence
  Description of Artificial Sequence: Synthetic oligonucleotide
cuugccuguugucuaggga

SEQ ID NO: 1241160 - RNA, 19 nt, Artificial Sequence
  Description of Artificial Sequence: Synthetic oligonucleotide
ccuuucgaagacaagaccu

SEQ ID NO: 1241161 - RNA, 19 nt, Artificial Sequence
  Description of Artificial Sequence: Synthetic oligonucleotide
uugcacuaguugacuggaa

SEQ ID NO: 1241162 - RNA, 19 nt, Artificial Sequence
  Description of Artificial Sequence: Synthetic oligonucleotide
agacagcuguagauuaaca

SEQ ID NO: 1241163 - RNA, 19 nt, Artificial Sequence
  Description of Artificial Sequence: Synthetic oligonucleotide
cagucucaacggaucugag

SEQ ID NO: 1241164 - RNA, 19 nt, Artificial Sequence
  Description of Artificial Sequence: Synthetic oligonucleotide
ucgucuccagaaccugauc

SEQ ID NO: 1241165 - RNA, 19 nt, Artificial Sequence
  Description of Artificial Sequence: Synthetic oligonucleotide
cauggacuccacugcucug

SEQ ID NO: 1241166 - RNA, 19 nt, Artificial Sequence
  Description of Artificial Sequence: Synthetic oligonucleotide
ccucauucccacagaagac

SEQ ID NO: 1241167 - RNA, 19 nt, Artificial Sequence
  Description of Artificial Sequence: Synthetic oligonucleotide
cccuuauuucccucauucc

SEQ ID NO: 1241168 - RNA, 19 nt, Artificial Sequence
  Description of Artificial Sequence: Synthetic oligonucleotide
agccacuuaucuucagcua

SEQ ID NO: 1241169 - RNA, 19 nt, Artificial Sequence
  Description of Artificial Sequence: Synthetic oligonucleotide
caaacgcucuucugaccuc

SEQ ID NO: 1241170 - RNA, 19 nt, Artificial Sequence
  Description of Artificial Sequence: Synthetic oligonucleotide
cagagcucccagcuaagga

SEQ ID NO: 1241171 - RNA, 19 nt, Artificial Sequence
  Description of Artificial Sequence: Synthetic oligonucleotide
aggucgagggagccaguga

SEQ ID NO: 1241172 - RNA, 19 nt, Artificial Sequence
  Description of Artificial Sequence: Synthetic oligonucleotide
acccggauacugucgugca

SEQ ID NO: 1241173 - RNA, 19 nt, Artificial Sequence
  Description of Artificial Sequence: Synthetic oligonucleotide
uucugaccucacuguccag

SEQ ID NO: 1241174 - RNA, 19 nt, Artificial Sequence
  Description of Artificial Sequence: Synthetic oligonucleotide
agcuaaggacuggccguac

SEQ ID NO: 1241175 - RNA, 19 nt, Artificial Sequence
  Description of Artificial Sequence: Synthetic oligonucleotide
gggcaaacgcucuucugac

SEQ ID NO: 1241176 - RNA, 19 nt, Artificial Sequence
  Description of Artificial Sequence: Synthetic oligonucleotide
cgaugcuccggauuguagc

SEQ ID NO: 1241177 - RNA, 19 nt, Artificial Sequence
  Description of Artificial Sequence: Synthetic oligonucleotide
gcguaaaucccagucccag

SEQ ID NO: 1241178 - RNA, 19 nt, Artificial Sequence
  Description of Artificial Sequence: Synthetic oligonucleotide
gaagacuaagaaacuggau

SEQ ID NO: 1241179 - RNA, 19 nt, Artificial Sequence
  Description of Artificial Sequence: Synthetic oligonucleotide
gagugccccgccuguagca

SEQ ID NO: 1241180 - RNA, 19 nt, Artificial Sequence
  Description of Artificial Sequence: Synthetic oligonucleotide
agugggcaaguuggguguc

SEQ ID NO: 1241181 - RNA, 19 nt, Artificial Sequence
  Description of Artificial Sequence: Synthetic oligonucleotide
gcaaacgcucuucugaccu

SEQ ID NO: 1241182 - RNA, 19 nt, Artificial Sequence
  Description of Artificial Sequence: Synthetic oligonucleotide
guacucagggguguaaacu

SEQ ID NO: 1241183 - RNA, 19 nt, Artificial Sequence
  Description of Artificial Sequence: Synthetic oligonucleotide
gagaagagacugccagcaa

SEQ ID NO: 1241184 - RNA, 19 nt, Artificial Sequence
  Description of Artificial Sequence: Synthetic oligonucleotide
gcuguagcguaaaucccag

SEQ ID NO: 1241185 - RNA, 19 nt, Artificial Sequence
  Description of Artificial Sequence: Synthetic oligonucleotide
ggcaaacgcucuucugacc

SEQ ID NO: 1241186 - RNA, 19 nt, Artificial Sequence
  Description of Artificial Sequence: Synthetic oligonucleotide
uaagagccgaggagcccau

SEQ ID NO: 1241187 - RNA, 19 nt, Artificial Sequence
  Description of Artificial Sequence: Synthetic oligonucleotide
gugauaucuguuccuugcu

SEQ ID NO: 1241188 - RNA, 19 nt, Artificial Sequence
  Description of Artificial Sequence: Synthetic oligonucleotide
agacaacaucagagugccc

SEQ ID NO: 1241189 - RNA, 19 nt, Artificial Sequence
  Description of Artificial Sequence: Synthetic oligonucleotide
acugucgugcagagcaaga

SEQ ID NO: 1241190 - RNA, 19 nt, Artificial Sequence
  Description of Artificial Sequence: Synthetic oligonucleotide
aagaccugacauaguccaa

SEQ ID NO: 1241191 - RNA, 19 nt, Artificial Sequence
  Description of Artificial Sequence: Synthetic oligonucleotide
agccgauucagggcuguca

SEQ ID NO: 1241192 - RNA, 19 nt, Artificial Sequence
  Description of Artificial Sequence: Synthetic oligonucleotide
cugguagcuaugucgaaau

SEQ ID NO: 1241193 - RNA, 19 nt, Artificial Sequence
  Description of Artificial Sequence: Synthetic oligonucleotide
gggcaagcuccccagugug

SEQ ID NO: 1241194 - RNA, 19 nt, Artificial Sequence
  Description of Artificial Sequence: Synthetic oligonucleotide
aggaacugugauaucuguu

SEQ ID NO: 1241195 - RNA, 19 nt, Artificial Sequence
  Description of Artificial Sequence: Synthetic oligonucleotide
ggacaggcgcgguccacgg

SEQ ID NO: 1241196 - RNA, 19 nt, Artificial Sequence
  Description of Artificial Sequence: Synthetic oligonucleotide
cuucccacguucccaggga

SEQ ID NO: 1241197 - RNA, 19 nt, Artificial Sequence
  Description of Artificial Sequence: Synthetic oligonucleotide
ggacggacugucuugccaa

SEQ ID NO: 1241198 - RNA, 19 nt, Artificial Sequence
  Description of Artificial Sequence: Synthetic oligonucleotide
ggagaaggucacugccgcc

SEQ ID NO: 1241199 - RNA, 19 nt, Artificial Sequence
  Description of Artificial Sequence: Synthetic oligonucleotide
cgaugucacuaauacugag

SEQ ID NO: 1241200 - RNA, 19 nt, Artificial Sequence
  Description of Artificial Sequence: Synthetic oligonucleotide
agggccccucuagagaaca

SEQ ID NO: 1241201 - RNA, 19 nt, Artificial Sequence
  Description of Artificial Sequence: Synthetic oligonucleotide
aaacaguguccgggcuuca

SEQ ID NO: 1241202 - RNA, 19 nt, Artificial Sequence
  Description of Artificial Sequence: Synthetic oligonucleotide
acgcucuucugaccucacu

SEQ ID NO: 1241203 - RNA, 19 nt, Artificial Sequence
  Description of Artificial Sequence: Synthetic oligonucleotide
agcguaaaucccaguccca

SEQ ID NO: 1241204 - RNA, 19 nt, Artificial Sequence
  Description of Artificial Sequence: Synthetic oligonucleotide
gauccucaggagauauucu

SEQ ID NO: 1241205 - RNA, 19 nt, Artificial Sequence
  Description of Artificial Sequence: Synthetic oligonucleotide
ugucaggaacccggauacu

SEQ ID NO: 1241206 - RNA, 19 nt, Artificial Sequence
  Description of Artificial Sequence: Synthetic oligonucleotide
auucgcuuagggacacaga

SEQ ID NO: 1241207 - RNA, 19 nt, Artificial Sequence
  Description of Artificial Sequence: Synthetic oligonucleotide
ccgccuguagcauggacuc

SEQ ID NO: 1241208 - RNA, 19 nt, Artificial Sequence
  Description of Artificial Sequence: Synthetic oligonucleotide
cucagggguguaaacuugu

SEQ ID NO: 1241209 - RNA, 19 nt, Artificial Sequence
  Description of Artificial Sequence: Synthetic oligonucleotide
ccucagguagcaucgucuc

SEQ ID NO: 1241210 - RNA, 19 nt, Artificial Sequence
  Description of Artificial Sequence: Synthetic oligonucleotide
ccuugcuguagcguaaauc

SEQ ID NO: 1241211 - RNA, 19 nt, Artificial Sequence
  Description of Artificial Sequence: Synthetic oligonucleotide
cucaggccuuccccucagg

SEQ ID NO: 1241212 - RNA, 19 nt, Artificial Sequence
  Description of Artificial Sequence: Synthetic oligonucleotide
aucugagguccaagauauc

SEQ ID NO: 1241213 - RNA, 19 nt, Artificial Sequence
  Description of Artificial Sequence: Synthetic oligonucleotide
ccagcaaggacggacuguc

SEQ ID NO: 1241214 - RNA, 19 nt, Artificial Sequence
  Description of Artificial Sequence: Synthetic oligonucleotide
agagccgauucagggcugu

SEQ ID NO: 1241215 - RNA, 19 nt, Artificial Sequence
  Description of Artificial Sequence: Synthetic oligonucleotide
gagcucccagcuaaggacu

SEQ ID NO: 1241216 - RNA, 19 nt, Artificial Sequence
  Description of Artificial Sequence: Synthetic oligonucleotide
uggccguacucaggggugu

SEQ ID NO: 1241217 - RNA, 19 nt, Artificial Sequence
  Description of Artificial Sequence: Synthetic oligonucleotide
cagggguguaaacuugugu

SEQ ID NO: 1241218 - RNA, 19 nt, Artificial Sequence
  Description of Artificial Sequence: Synthetic oligonucleotide
agacaagaccugacauagu

SEQ ID NO: 1241219 - RNA, 19 nt, Artificial Sequence
  Description of Artificial Sequence: Synthetic oligonucleotide
cggauuguagccaggauua

SEQ ID NO: 1241220 - RNA, 19 nt, Artificial Sequence
  Description of Artificial Sequence: Synthetic oligonucleotide
cuccggauuguagccagga

SEQ ID NO: 1241221 - RNA, 19 nt, Artificial Sequence
  Description of Artificial Sequence: Synthetic oligonucleotide
ccguugcacuaguugacug

SEQ ID NO: 1241222 - RNA, 19 nt, Artificial Sequence
  Description of Artificial Sequence: Synthetic oligonucleotide
cugucgugcagagcaagaa

SEQ ID NO: 1241223 - RNA, 19 nt, Artificial Sequence
  Description of Artificial Sequence: Synthetic oligonucleotide
ccgauucagggcugucagg

SEQ ID NO: 1241224 - RNA, 19 nt, Artificial Sequence
  Description of Artificial Sequence: Synthetic oligonucleotide
ggaacccggauacugucgu

SEQ ID NO: 1241225 - RNA, 19 nt, Artificial Sequence
  Description of Artificial Sequence: Synthetic oligonucleotide
gagaggcugguagcuaugu

SEQ ID NO: 1241226 - RNA, 19 nt, Artificial Sequence
  Description of Artificial Sequence: Synthetic oligonucleotide
ggccccucuagagaacagc

SEQ ID NO: 1241227 - RNA, 19 nt, Artificial Sequence
  Description of Artificial Sequence: Synthetic oligonucleotide
cguacucagggguguaaac

SEQ ID NO: 1241228 - RNA, 19 nt, Artificial Sequence
  Description of Artificial Sequence: Synthetic oligonucleotide
gcuaggcuuucagaggauc

SEQ ID NO: 1241229 - RNA, 19 nt, Artificial Sequence
  Description of Artificial Sequence: Synthetic oligonucleotide
ucugggcgaugcuccggau

SEQ ID NO: 1241230 - RNA, 19 nt, Artificial Sequence
  Description of Artificial Sequence: Synthetic oligonucleotide
gcugguagcuaugucgaaa

SEQ ID NO: 1241231 - RNA, 19 nt, Artificial Sequence
  Description of Artificial Sequence: Synthetic oligonucleotide
gggguguaaacuuguguau

SEQ ID NO: 1241232 - RNA, 19 nt, Artificial Sequence
  Description of Artificial Sequence: Synthetic oligonucleotide
agggugucaggaacccgga

SEQ ID NO: 1241233 - RNA, 19 nt, Artificial Sequence
  Description of Artificial Sequence: Synthetic oligonucleotide
cugaucagcuaggcuuuca

SEQ ID NO: 1241234 - RNA, 19 nt, Artificial Sequence
  Description of Artificial Sequence: Synthetic oligonucleotide
ggauacugucgugcagagc

SEQ ID NO: 1241235 - RNA, 19 nt, Artificial Sequence
  Description of Artificial Sequence: Synthetic oligonucleotide
gaauucgcuuagggacaca

SEQ ID NO: 1241236 - RNA, 19 nt, Artificial Sequence
  Description of Artificial Sequence: Synthetic oligonucleotide
gaacuggggcgcccaggaa

SEQ ID NO: 1241237 - RNA, 19 nt, Artificial Sequence
  Description of Artificial Sequence: Synthetic oligonucleotide
ggccccagucuccccaagc

SEQ ID NO: 1241238 - RNA, 19 nt, Artificial Sequence
  Description of Artificial Sequence: Synthetic oligonucleotide
auacugucgugcagagcaa

SEQ ID NO: 1241239 - RNA, 19 nt, Artificial Sequence
  Description of Artificial Sequence: Synthetic oligonucleotide
cccagugugacgggagccc

SEQ ID NO: 1241240 - RNA, 19 nt, Artificial Sequence
  Description of Artificial Sequence: Synthetic oligonucleotide
cugccagcaaggacggacu

SEQ ID NO: 1241241 - RNA, 19 nt, Artificial Sequence
  Description of Artificial Sequence: Synthetic oligonucleotide
gccuguugucuagggagcc

SEQ ID NO: 1241242 - RNA, 19 nt, Artificial Sequence
  Description of Artificial Sequence: Synthetic oligonucleotide
agugccccgccuguagcau

SEQ ID NO: 1241243 - RNA, 19 nt, Artificial Sequence
  Description of Artificial Sequence: Synthetic oligonucleotide
cgcuuagggacacagaagu

SEQ ID NO: 1241244 - RNA, 19 nt, Artificial Sequence
  Description of Artificial Sequence: Synthetic oligonucleotide
guaaccugagaggcuggua

SEQ ID NO: 1241245 - RNA, 19 nt, Artificial Sequence
  Description of Artificial Sequence: Synthetic oligonucleotide
ccauagcaucuaccaagac

SEQ ID NO: 1241246 - RNA, 19 nt, Artificial Sequence
  Description of Artificial Sequence: Synthetic oligonucleotide
gcgaugcuccggauuguag

SEQ ID NO: 1241247 - RNA, 19 nt, Artificial Sequence
  Description of Artificial Sequence: Synthetic oligonucleotide
cagugggaggacagggugu

SEQ ID NO: 1241248 - RNA, 19 nt, Artificial Sequence
  Description of Artificial Sequence: Synthetic oligonucleotide
cacuagccuuucgaagaca

SEQ ID NO: 1241249 - RNA, 19 nt, Artificial Sequence
  Description of Artificial Sequence: Synthetic oligonucleotide
ccggauacugucgugcaga

SEQ ID NO: 1241250 - RNA, 19 nt, Artificial Sequence
  Description of Artificial Sequence: Synthetic oligonucleotide
ccagcuaaggacuggccgu

SEQ ID NO: 1241251 - RNA, 19 nt, Artificial Sequence
  Description of Artificial Sequence: Synthetic oligonucleotide
caguagcccaggagguaaa

SEQ ID NO: 1241252 - RNA, 19 nt, Artificial Sequence
  Description of Artificial Sequence: Synthetic oligonucleotide
uccccucagguagcaucgu

SEQ ID NO: 1241253 - RNA, 19 nt, Artificial Sequence
  Description of Artificial Sequence: Synthetic oligonucleotide
cacuguccagaauucgcuu

SEQ ID NO: 1241254 - RNA, 19 nt, Artificial Sequence
  Description of Artificial Sequence: Synthetic oligonucleotide
cguaaaucccagucccaga

SEQ ID NO: 1241255 - RNA, 19 nt, Artificial Sequence
  Description of Artificial Sequence: Synthetic oligonucleotide
uggggcgcccaggaaccau

SEQ ID NO: 1241256 - RNA, 19 nt, Artificial Sequence
  Description of Artificial Sequence: Synthetic oligonucleotide
caggacaggcgcgguccac

SEQ ID NO: 1241257 - RNA, 19 nt, Artificial Sequence
  Description of Artificial Sequence: Synthetic oligonucleotide
cagcaagacuaggcauguc

SEQ ID NO: 1241258 - RNA, 19 nt, Artificial Sequence
  Description of Artificial Sequence: Synthetic oligonucleotide
gcuaaggacuggccguacu

SEQ ID NO: 1241259 - RNA, 19 nt, Artificial Sequence
  Description of Artificial Sequence: Synthetic oligonucleotide
ggggcgcccaggaaccaug

SEQ ID NO: 1241260 - RNA, 19 nt, Artificial Sequence
  Description of Artificial Sequence: Synthetic oligonucleotide
gcuccggauuguagccagg

SEQ ID NO: 1241261 - RNA, 19 nt, Artificial Sequence
  Description of Artificial Sequence: Synthetic oligonucleotide
cuguagcguaaaucccagu

SEQ ID NO: 1241262 - RNA, 19 nt, Artificial Sequence
  Description of Artificial Sequence: Synthetic oligonucleotide
ccccagugugacgggagcc

SEQ ID NO: 1241263 - RNA, 19 nt, Artificial Sequence
  Description of Artificial Sequence: Synthetic oligonucleotide
cagcuaaggacuggccgua

SEQ ID NO: 1241264 - RNA, 19 nt, Artificial Sequence
  Description of Artificial Sequence: Synthetic oligonucleotide
cccucagguagcaucgucu

SEQ ID NO: 1241265 - RNA, 19 nt, Artificial Sequence
  Description of Artificial Sequence: Synthetic oligonucleotide
ccccucuagagaacagcca

SEQ ID NO: 1241266 - RNA, 19 nt, Artificial Sequence
  Description of Artificial Sequence: Synthetic oligonucleotide
ggauuguagccaggauuaa

SEQ ID NO: 1241267 - RNA, 19 nt, Artificial Sequence
  Description of Artificial Sequence: Synthetic oligonucleotide
ggaugguauuuggaucucu

SEQ ID NO: 1241268 - RNA, 19 nt, Artificial Sequence
  Description of Artificial Sequence: Synthetic oligonucleotide
ccggauuguagccaggauu

SEQ ID NO: 1241269 - RNA, 19 nt, Artificial Sequence
  Description of Artificial Sequence: Synthetic oligonucleotide
cgaagacaagaccugacau

SEQ ID NO: 1241270 - RNA, 19 nt, Artificial Sequence
  Description of Artificial Sequence: Synthetic oligonucleotide
cccgccuguagcauggacu

SEQ ID NO: 1241271 - RNA, 19 nt, Artificial Sequence
  Description of Artificial Sequence: Synthetic oligonucleotide
cuguuccuugcuguagcgu

SEQ ID NO: 1241272 - RNA, 19 nt, Artificial Sequence
  Description of Artificial Sequence: Synthetic oligonucleotide
ccucaccggccccagucuc

SEQ ID NO: 1241273 - RNA, 19 nt, Artificial Sequence
  Description of Artificial Sequence: Synthetic oligonucleotide
ccccucagguagcaucguc

SEQ ID NO: 1241274 - RNA, 19 nt, Artificial Sequence
  Description of Artificial Sequence: Synthetic oligonucleotide
ugccgccaggguggugcca

SEQ ID NO: 1241275 - RNA, 19 nt, Artificial Sequence
  Description of Artificial Sequence: Synthetic oligonucleotide
cagugauccucaggagaua

SEQ ID NO: 1241276 - RNA, 19 nt, Artificial Sequence
  Description of Artificial Sequence: Synthetic oligonucleotide
gcgguccacggcccugaug

SEQ ID NO: 1241277 - RNA, 19 nt, Artificial Sequence
  Description of Artificial Sequence: Synthetic oligonucleotide
cagcaaggacggacugucu

SEQ ID NO: 1241278 - RNA, 19 nt, Artificial Sequence
  Description of Artificial Sequence: Synthetic oligonucleotide
cugggcgaugcuccggauu

SEQ ID NO: 1241279 - RNA, 19 nt, Artificial Sequence
  Description of Artificial Sequence: Synthetic oligonucleotide
ggcgaugcuccggauugua

SEQ ID NO: 1241280 - RNA, 19 nt, Artificial Sequence
  Description of Artificial Sequence: Synthetic oligonucleotide
ccugaucagcuaggcuuuc

SEQ ID NO: 1241281 - RNA, 19 nt, Artificial Sequence
  Description of Artificial Sequence: Synthetic oligonucleotide
cucccuuauuucccucauu

SEQ ID NO: 1241282 - RNA, 19 nt, Artificial Sequence
  Description of Artificial Sequence: Synthetic oligonucleotide
ccaaacaguguccgggcuu

SEQ ID NO: 1241283 - RNA, 19 nt, Artificial Sequence
  Description of Artificial Sequence: Synthetic oligonucleotide
ccccgccuguagcauggac

SEQ ID NO: 1241284 - RNA, 19 nt, Artificial Sequence
  Description of Artificial Sequence: Synthetic oligonucleotide
ggcgcccaggaaccaugaa

SEQ ID NO: 1241285 - RNA, 19 nt, Artificial Sequence
  Description of Artificial Sequence: Synthetic oligonucleotide
ccguacucagggguguaaa

SEQ ID NO: 1241286 - RNA, 19 nt, Artificial Sequence
  Description of Artificial Sequence: Synthetic oligonucleotide
gccguacucagggguguaa

SEQ ID NO: 1241287 - RNA, 19 nt, Artificial Sequence
  Description of Artificial Sequence: Synthetic oligonucleotide
cuggggcgcccaggaacca

SEQ ID NO: 1241288 - RNA, 19 nt, Artificial Sequence
  Description of Artificial Sequence: Synthetic oligonucleotide
gggugucaggaacccggau

SEQ ID NO: 1241289 - RNA, 19 nt, Artificial Sequence
  Description of Artificial Sequence: Synthetic oligonucleotide
cacucccguugcacuaguu

SEQ ID NO: 1241290 - RNA, 19 nt, Artificial Sequence
  Description of Artificial Sequence: Synthetic oligonucleotide
cacugccgccaggguggug

SEQ ID NO: 1241291 - RNA, 19 nt, Artificial Sequence
  Description of Artificial Sequence: Synthetic oligonucleotide
gugccaggacaggcgcggu

SEQ ID NO: 1241292 - RNA, 19 nt, Artificial Sequence
  Description of Artificial Sequence: Synthetic oligonucleotide
ggccguacucaggggugua

SEQ ID NO: 1241293 - RNA, 19 nt, Artificial Sequence
  Description of Artificial Sequence: Synthetic oligonucleotide
ccgggcuucaggggccaaa

SEQ ID NO: 1241294 - RNA, 19 nt, Artificial Sequence
  Description of Artificial Sequence: Synthetic oligonucleotide
ccacucccguugcacuagu

SEQ ID NO: 1241295 - RNA, 19 nt, Artificial Sequence
  Description of Artificial Sequence: Synthetic oligonucleotide
gccccgccuguagcaugga

SEQ ID NO: 1241296 - RNA, 19 nt, Artificial Sequence
  Description of Artificial Sequence: Synthetic oligonucleotide
aaagacuuuggcuaaaagc

SEQ ID NO: 1241297 - RNA, 19 nt, Artificial Sequence
  Description of Artificial Sequence: Synthetic oligonucleotide
aaaguugaaaucuauuugg

SEQ ID NO: 1241298 - RNA, 19 nt, Artificial Sequence
  Description of Artificial Sequence: Synthetic oligonucleotide
aagacuuuggcuaaaagcc

SEQ ID NO: 1241299 - RNA, 19 nt, Artificial Sequence
  Description of Artificial Sequence: Synthetic oligonucleotide
aaucuauuuggauuuauac

SEQ ID NO: 1241300 - RNA, 19 nt, Artificial Sequence
  Description of Artificial Sequence: Synthetic oligonucleotide
auaacuuuauacuuaaauc

SEQ ID NO: 1241301 - RNA, 19 nt, Artificial Sequence
  Description of Artificial Sequence: Synthetic oligonucleotide
aaugaauacuggcugaagg

SEQ ID NO: 1241302 - RNA, 19 nt, Artificial Sequence
  Description of Artificial Sequence: Synthetic oligonucleotide
aaguagcuauuauagaagc

SEQ ID NO: 1241303 - RNA, 19 nt, Artificial Sequence
  Description of Artificial Sequence: Synthetic oligonucleotide
  modified_base (2)..(2): a, c, u, g, unknown or other
anaagggaagaucuauggc

SEQ ID NO: 1241304 - RNA, 19 nt, Artificial Sequence
  Description of Artificial Sequence: Synthetic oligonucleotide
aaacauauugacuauuuga

SEQ ID NO: 1241305 - RNA, 19 nt, Artificial Sequence
  Description of Artificial Sequence: Synthetic oligonucleotide
cuaguuauuacucuucugg

SEQ ID NO: 1241306 - RNA, 19 nt, Artificial Sequence
  Description of Artificial Sequence: Synthetic oligonucleotide
caaauaguguucuugagcc

SEQ ID NO: 1241307 - RNA, 19 nt, Artificial Sequence
  Description of Artificial Sequence: Synthetic oligonucleotide
ucaucuauaacuuuauacu

SEQ ID NO: 1241308 - RNA, 19 nt, Artificial Sequence
  Description of Artificial Sequence: Synthetic oligonucleotide
uuauaaacaaugauuuccc

SEQ ID NO: 1241309 - RNA, 19 nt, Artificial Sequence
  Description of Artificial Sequence: Synthetic oligonucleotide
aagauaaagacuuuggcua

SEQ ID NO: 1241310 - RNA, 19 nt, Artificial Sequence
  Description of Artificial Sequence: Synthetic oligonucleotide
uguucaaacauauugacua

SEQ ID NO: 1241311 - RNA, 19 nt, Artificial Sequence
  Description of Artificial Sequence: Synthetic oligonucleotide
uugaccuauaacuauaggc

SEQ ID NO: 1241312 - RNA, 19 nt, Artificial Sequence
  Description of Artificial Sequence: Synthetic oligonucleotide
uaaaugauuacaucacuag

SEQ ID NO: 1241313 - RNA, 19 nt, Artificial Sequence
  Description of Artificial Sequence: Synthetic oligonucleotide
uaaaggaucacacuuugca

SEQ ID NO: 1241314 - RNA, 19 nt, Artificial Sequence
  Description of Artificial Sequence: Synthetic oligonucleotide
ugcuguauaaucuaacuug

SEQ ID NO: 1241315 - RNA, 19 nt, Artificial Sequence
  Description of Artificial Sequence: Synthetic oligonucleotide
uauagaagcagguauaauc

SEQ ID NO: 1241316 - RNA, 19 nt, Artificial Sequence
  Description of Artificial Sequence: Synthetic oligonucleotide
augaauacuggcugaaggc

SEQ ID NO: 1241317 - RNA, 19 nt, Artificial Sequence
  Description of Artificial Sequence: Synthetic oligonucleotide
auuuaaguagcuauuauag

SEQ ID NO: 1241318 - RNA, 19 nt, Artificial Sequence
  Description of Artificial Sequence: Synthetic oligonucleotide
uaaguagcuauuauagaag

SEQ ID NO: 1241319 - RNA, 19 nt, Artificial Sequence
  Description of Artificial Sequence: Synthetic oligonucleotide
uuaucuaauaccuauucuc

SEQ ID NO: 1241320 - RNA, 19 nt, Artificial Sequence
  Description of Artificial Sequence: Synthetic oligonucleotide
uuucgcaugcacaugacag

SEQ ID NO: 1241321 - RNA, 19 nt, Artificial Sequence
  Description of Artificial Sequence: Synthetic oligonucleotide
aaaacuuucgcaugcacau

SEQ ID NO: 1241322 - RNA, 19 nt, Artificial Sequence
  Description of Artificial Sequence: Synthetic oligonucleotide
cuaagcauguacaaggccc

SEQ ID NO: 1241323 - RNA, 19 nt, Artificial Sequence
  Description of Artificial Sequence: Synthetic oligonucleotide
agcacuaacauuugaacag

SEQ ID NO: 1241324 - RNA, 19 nt, Artificial Sequence
  Description of Artificial Sequence: Synthetic oligonucleotide
ucugauauggaguaaggga

SEQ ID NO: 1241325 - RNA, 19 nt, Artificial Sequence
  Description of Artificial Sequence: Synthetic oligonucleotide
ugucauacauacuagguac

SEQ ID NO: 1241326 - RNA, 19 nt, Artificial Sequence
  Description of Artificial Sequence: Synthetic oligonucleotide
uacaacuaagaccaaagcu

SEQ ID NO: 1241327 - RNA, 19 nt, Artificial Sequence
  Description of Artificial Sequence: Synthetic oligonucleotide
aagcauaccaaagcaauac

SEQ ID NO: 1241328 - RNA, 19 nt, Artificial Sequence
  Description of Artificial Sequence: Synthetic oligonucleotide
gaugucucaaacucuauug

SEQ ID NO: 1241329 - RNA, 19 nt, Artificial Sequence
  Description of Artificial Sequence: Synthetic oligonucleotide
auauugacuauuugaaaag

SEQ ID NO: 1241330 - RNA, 19 nt, Artificial Sequence
  Description of Artificial Sequence: Synthetic oligonucleotide
aauauuaaggugaugaaua

SEQ ID NO: 1241331 - RNA, 19 nt, Artificial Sequence
  Description of Artificial Sequence: Synthetic oligonucleotide
aagaaacuaggacuagggg

SEQ ID NO: 1241332 - RNA, 19 nt, Artificial Sequence
  Description of Artificial Sequence: Synthetic oligonucleotide
uauacucuaguuauuacuc

SEQ ID NO: 1241333 - RNA, 19 nt, Artificial Sequence
  Description of Artificial Sequence: Synthetic oligonucleotide
uugacuauuugaaaaguac

SEQ ID NO: 1241334 - RNA, 19 nt, Artificial Sequence
  Description of Artificial Sequence: Synthetic oligonucleotide
uaucuaauaccuauucuca

SEQ ID NO: 1241335 - RNA, 19 nt, Artificial Sequence
  Description of Artificial Sequence: Synthetic oligonucleotide
  modified_base (3)..(3): a, c, u, g, unknown or other
canaagggaagaucuaugg

SEQ ID NO: 1241336 - RNA, 19 nt, Artificial Sequence
  Description of Artificial Sequence: Synthetic oligonucleotide
uuuguuguacacauaacaa

SEQ ID NO: 1241337 - RNA, 19 nt, Artificial Sequence
  Description of Artificial Sequence: Synthetic oligonucleotide
gaaaaguacagcucaauga

SEQ ID NO: 1241338 - RNA, 19 nt, Artificial Sequence
  Description of Artificial Sequence: Synthetic oligonucleotide
aaaauccugugguaaaucu

SEQ ID NO: 1241339 - RNA, 19 nt, Artificial Sequence
  Description of Artificial Sequence: Synthetic oligonucleotide
acuaccauagauuaucaga

SEQ ID NO: 1241340 - RNA, 19 nt, Artificial Sequence
  Description of Artificial Sequence: Synthetic oligonucleotide
agaaacuaggacuagggga

SEQ ID NO: 1241341 - RNA, 19 nt, Artificial Sequence
  Description of Artificial Sequence: Synthetic oligonucleotide
uguauaaucuaacuuguua

SEQ ID NO: 1241342 - RNA, 19 nt, Artificial Sequence
  Description of Artificial Sequence: Synthetic oligonucleotide
auaacuauaggccuuccca

SEQ ID NO: 1241343 - RNA, 19 nt, Artificial Sequence
  Description of Artificial Sequence: Synthetic oligonucleotide
cuuacauugaagcauacca

SEQ ID NO: 1241344 - RNA, 19 nt, Artificial Sequence
  Description of Artificial Sequence: Synthetic oligonucleotide
augucucaaacucuauugc

SEQ ID NO: 1241345 - RNA, 19 nt, Artificial Sequence
  Description of Artificial Sequence: Synthetic oligonucleotide
ucauguucaguuaggaaug

SEQ ID NO: 1241346 - RNA, 19 nt, Artificial Sequence
  Description of Artificial Sequence: Synthetic oligonucleotide
uacuuaaauccuaagggcu

SEQ ID NO: 1241347 - RNA, 19 nt, Artificial Sequence
  Description of Artificial Sequence: Synthetic oligonucleotide
aguagagcaccuccuaagc

SEQ ID NO: 1241348 - RNA, 19 nt, Artificial Sequence
  Description of Artificial Sequence: Synthetic oligonucleotide
gacauuaugacuugucaac

SEQ ID NO: 1241349 - RNA, 19 nt, Artificial Sequence
  Description of Artificial Sequence: Synthetic oligonucleotide
uuugugucuacaaagguuu

SEQ ID NO: 1241350 - RNA, 19 nt, Artificial Sequence
  Description of Artificial Sequence: Synthetic oligonucleotide
ucucaauaaaggaucacac

SEQ ID NO: 1241351 - RNA, 19 nt, Artificial Sequence
  Description of Artificial Sequence: Synthetic oligonucleotide
uacaaaacaaauaguguuc

SEQ ID NO: 1241352 - RNA, 19 nt, Artificial Sequence
  Description of Artificial Sequence: Synthetic oligonucleotide
gaaccuguaacuaccauag

SEQ ID NO: 1241353 - RNA, 19 nt, Artificial Sequence
  Description of Artificial Sequence: Synthetic oligonucleotide
auugaagcauaccaaagca

SEQ ID NO: 1241354 - RNA, 19 nt, Artificial Sequence
  Description of Artificial Sequence: Synthetic oligonucleotide
gaagaaacuaggacuaggg

SEQ ID NO: 1241355 - RNA, 19 nt, Artificial Sequence
  Description of Artificial Sequence: Synthetic oligonucleotide
aauccuaagggcuggagau

SEQ ID NO: 1241356 - RNA, 19 nt, Artificial Sequence
  Description of Artificial Sequence: Synthetic oligonucleotide
aacaaauaguguucuugag

SEQ ID NO: 1241357 - RNA, 19 nt, Artificial Sequence
  Description of Artificial Sequence: Synthetic oligonucleotide
uuuccgaugucucaaacuc

SEQ ID NO: 1241358 - RNA, 19 nt, Artificial Sequence
  Description of Artificial Sequence: Synthetic oligonucleotide
aguaauuagaaguugugua

SEQ ID NO: 1241359 - RNA, 19 nt, Artificial Sequence
  Description of Artificial Sequence: Synthetic oligonucleotide
uauagagccuuucuuuaag

SEQ ID NO: 1241360 - RNA, 19 nt, Artificial Sequence
  Description of Artificial Sequence: Synthetic oligonucleotide
uuuauacuuaaauccuaag

SEQ ID NO: 1241361 - RNA, 19 nt, Artificial Sequence
  Description of Artificial Sequence: Synthetic oligonucleotide
ucauuaaaucaaaauccug

SEQ ID NO: 1241362 - RNA, 19 nt, Artificial Sequence
  Description of Artificial Sequence: Synthetic oligonucleotide
uuguacacauaacaaaagu

SEQ ID NO: 1241363 - RNA, 19 nt, Artificial Sequence
  Description of Artificial Sequence: Synthetic oligonucleotide
uauaaucuaacuuguuacu

SEQ ID NO: 1241364 - RNA, 19 nt, Artificial Sequence
  Description of Artificial Sequence: Synthetic oligonucleotide
uuaguagugacuauuuguu

SEQ ID NO: 1241365 - RNA, 19 nt, Artificial Sequence
  Description of Artificial Sequence: Synthetic oligonucleotide
uuaaaauaugcuguagaca

SEQ ID NO: 1241366 - RNA, 19 nt, Artificial Sequence
  Description of Artificial Sequence: Synthetic oligonucleotide
aucuauuuggauuuauacu

SEQ ID NO: 1241367 - RNA, 19 nt, Artificial Sequence
  Description of Artificial Sequence: Synthetic oligonucleotide
uguacacauaacaaaaguu

SEQ ID NO: 1241368 - RNA, 19 nt, Artificial Sequence
  Description of Artificial Sequence: Synthetic oligonucleotide
aacauauugacuauuugaa

SEQ ID NO: 1241369 - RNA, 19 nt, Artificial Sequence
  Description of Artificial Sequence: Synthetic oligonucleotide
aacuuucgcaugcacauga

SEQ ID NO: 1241370 - RNA, 19 nt, Artificial Sequence
  Description of Artificial Sequence: Synthetic oligonucleotide
gaaacuguccaugacuuag

SEQ ID NO: 1241371 - RNA, 19 nt, Artificial Sequence
  Description of Artificial Sequence: Synthetic oligonucleotide
aacucaguaucuuacuuau

SEQ ID NO: 1241372 - RNA, 19 nt, Artificial Sequence
  Description of Artificial Sequence: Synthetic oligonucleotide
cauugaagcauaccaaagc

SEQ ID NO: 1241373 - RNA, 19 nt, Artificial Sequence
  Description of Artificial Sequence: Synthetic oligonucleotide
uuuaaguagcuauuauaga

SEQ ID NO: 1241374 - RNA, 19 nt, Artificial Sequence
  Description of Artificial Sequence: Synthetic oligonucleotide
cucaguaucuuacuuauuc

SEQ ID NO: 1241375 - RNA, 19 nt, Artificial Sequence
  Description of Artificial Sequence: Synthetic oligonucleotide
gaaaugaaccuguaacuac

SEQ ID NO: 1241376 - RNA, 19 nt, Artificial Sequence
  Description of Artificial Sequence: Synthetic oligonucleotide
agcauaccaaagcaauacc

SEQ ID NO: 1241377 - RNA, 19 nt, Artificial Sequence
  Description of Artificial Sequence: Synthetic oligonucleotide
cauagauaaaagguguucc

SEQ ID NO: 1241378 - RNA, 19 nt, Artificial Sequence
  Description of Artificial Sequence: Synthetic oligonucleotide
uggauuuauacucuaguua

SEQ ID NO: 1241379 - RNA, 19 nt, Artificial Sequence
  Description of Artificial Sequence: Synthetic oligonucleotide
ucaacucuacaacuaagac

SEQ ID NO: 1241380 - RNA, 19 nt, Artificial Sequence
  Description of Artificial Sequence: Synthetic oligonucleotide
gaagaucuauggcugaagc

SEQ ID NO: 1241381 - RNA, 19 nt, Artificial Sequence
  Description of Artificial Sequence: Synthetic oligonucleotide
cacggaugaauuaaaauuc

SEQ ID NO: 1241382 - RNA, 19 nt, Artificial Sequence
  Description of Artificial Sequence: Synthetic oligonucleotide
uuugaccuauaacuauagg

SEQ ID NO: 1241383 - RNA, 19 nt, Artificial Sequence
  Description of Artificial Sequence: Synthetic oligonucleotide
accauagauuaucagaacu

SEQ ID NO: 1241384 - RNA, 19 nt, Artificial Sequence
  Description of Artificial Sequence: Synthetic oligonucleotide
cauauugacuauuugaaaa

SEQ ID NO: 1241385 - RNA, 19 nt, Artificial Sequence
  Description of Artificial Sequence: Synthetic oligonucleotide
aaggagguaugucucaacu

SEQ ID NO: 1241386 - RNA, 19 nt, Artificial Sequence
  Description of Artificial Sequence: Synthetic oligonucleotide
aaaggagguaugucucaac

SEQ ID NO: 1241387 - RNA, 19 nt, Artificial Sequence
  Description of Artificial Sequence: Synthetic oligonucleotide
acacggaugaauuaaaauu

SEQ ID NO: 1241388 - RNA, 19 nt, Artificial Sequence
  Description of Artificial Sequence: Synthetic oligonucleotide
uuugcauguggcuaucuca

SEQ ID NO: 1241389 - RNA, 19 nt, Artificial Sequence
  Description of Artificial Sequence: Synthetic oligonucleotide
aauaccuauucucaucuuu

SEQ ID NO: 1241390 - RNA, 19 nt, Artificial Sequence
  Description of Artificial Sequence: Synthetic oligonucleotide
auuuauagagccuuucuuu

SEQ ID NO: 1241391 - RNA, 19 nt, Artificial Sequence
  Description of Artificial Sequence: Synthetic oligonucleotide
ugagaguuuccuuggauga

SEQ ID NO: 1241392 - RNA, 19 nt, Artificial Sequence
  Description of Artificial Sequence: Synthetic oligonucleotide
ucugucgucagcacuacga

SEQ ID NO: 1241393 - RNA, 19 nt, Artificial Sequence
  Description of Artificial Sequence: Synthetic oligonucleotide
gaagauaaagacuuuggcu

SEQ ID NO: 1241394 - RNA, 19 nt, Artificial Sequence
  Description of Artificial Sequence: Synthetic oligonucleotide
aaaguaauuagaaguugug

SEQ ID NO: 1241395 - RNA, 19 nt, Artificial Sequence
  Description of Artificial Sequence: Synthetic oligonucleotide
aaguaauuagaaguugugu

SEQ ID NO: 1241396 - RNA, 19 nt, Artificial Sequence
  Description of Artificial Sequence: Synthetic oligonucleotide
caacuaagaccaaagcuag

SEQ ID NO: 1241397 - RNA, 19 nt, Artificial Sequence
  Description of Artificial Sequence: Synthetic oligonucleotide
ggaugaauuaaaauucucg

SEQ ID NO: 1241398 - RNA, 19 nt, Artificial Sequence
  Description of Artificial Sequence: Synthetic oligonucleotide
aucacuagcacuaacauuu

SEQ ID NO: 1241399 - RNA, 19 nt, Artificial Sequence
  Description of Artificial Sequence: Synthetic oligonucleotide
uucgcucauguucaguuag

SEQ ID NO: 1241400 - RNA, 19 nt, Artificial Sequence
  Description of Artificial Sequence: Synthetic oligonucleotide
uaaagacuuuggcuaaaag

SEQ ID NO: 1241401 - RNA, 19 nt, Artificial Sequence
  Description of Artificial Sequence: Synthetic oligonucleotide
uagcacuaacauuugaaca

SEQ ID NO: 1241402 - RNA, 19 nt, Artificial Sequence
  Description of Artificial Sequence: Synthetic oligonucleotide
acuuguuacucucaauucu

SEQ ID NO: 1241403 - RNA, 19 nt, Artificial Sequence
  Description of Artificial Sequence: Synthetic oligonucleotide
cuagcacuaacauuugaac

SEQ ID NO: 1241404 - RNA, 19 nt, Artificial Sequence
  Description of Artificial Sequence: Synthetic oligonucleotide
uauaacuauaggccuuccc

SEQ ID NO: 1241405 - RNA, 19 nt, Artificial Sequence
  Description of Artificial Sequence: Synthetic oligonucleotide
uuacauugaagcauaccaa

SEQ ID NO: 1241406 - RNA, 19 nt, Artificial Sequence
  Description of Artificial Sequence: Synthetic oligonucleotide
uacauugaagcauaccaaa

SEQ ID NO: 1241407 - RNA, 19 nt, Artificial Sequence
  Description of Artificial Sequence: Synthetic oligonucleotide
ucuaauaccuauucucauc

SEQ ID NO: 1241408 - RNA, 19 nt, Artificial Sequence
  Description of Artificial Sequence: Synthetic oligonucleotide
aagaucuauggcugaagca

SEQ ID NO: 1241409 - RNA, 19 nt, Artificial Sequence
  Description of Artificial Sequence: Synthetic oligonucleotide
aacuaccauagauuaucag

SEQ ID NO: 1241410 - RNA, 19 nt, Artificial Sequence
  Description of Artificial Sequence: Synthetic oligonucleotide
ugagccaugaggauagaaa

SEQ ID NO: 1241411 - RNA, 19 nt, Artificial Sequence
  Description of Artificial Sequence: Synthetic oligonucleotide
uucugauauggaguaaggg

SEQ ID NO: 1241412 - RNA, 19 nt, Artificial Sequence
  Description of Artificial Sequence: Synthetic oligonucleotide
ugauuuccccagcucaggg

SEQ ID NO: 1241413 - RNA, 19 nt, Artificial Sequence
  Description of Artificial Sequence: Synthetic oligonucleotide
aaacucaguaucuuacuua

SEQ ID NO: 1241414 - RNA, 19 nt, Artificial Sequence
  Description of Artificial Sequence: Synthetic oligonucleotide
aacucuaaagauaaaugau

SEQ ID NO: 1241415 - RNA, 19 nt, Artificial Sequence
  Description of Artificial Sequence: Synthetic oligonucleotide
uuuauacucuaguuauuac

SEQ ID NO: 1241416 - RNA, 19 nt, Artificial Sequence
  Description of Artificial Sequence: Synthetic oligonucleotide
ugaauacuggcugaaggcc

SEQ ID NO: 1241417 - RNA, 19 nt, Artificial Sequence
  Description of Artificial Sequence: Synthetic oligonucleotide
aguaagggaugauccauag

SEQ ID NO: 1241418 - RNA, 19 nt, Artificial Sequence
  Description of Artificial Sequence: Synthetic oligonucleotide
ugauauggaguaagggaug

SEQ ID NO: 1241419 - RNA, 19 nt, Artificial Sequence
  Description of Artificial Sequence: Synthetic oligonucleotide
gacuugucaacauaaaacu

SEQ ID NO: 1241420 - RNA, 19 nt, Artificial Sequence
  Description of Artificial Sequence: Synthetic oligonucleotide
ucucaaacucuauugcugu

SEQ ID NO: 1241421 - RNA, 19 nt, Artificial Sequence
  Description of Artificial Sequence: Synthetic oligonucleotide
auagaagcagguauaauca

SEQ ID NO: 1241422 - RNA, 19 nt, Artificial Sequence
  Description of Artificial Sequence: Synthetic oligonucleotide
guaacuaccauagauuauc

SEQ ID NO: 1241423 - RNA, 19 nt, Artificial Sequence
  Description of Artificial Sequence: Synthetic oligonucleotide
ugaugaauagauuguuuaa

SEQ ID NO: 1241424 - RNA, 19 nt, Artificial Sequence
  Description of Artificial Sequence: Synthetic oligonucleotide
aauaguguucuugagccau

SEQ ID NO: 1241425 - RNA, 19 nt, Artificial Sequence
  Description of Artificial Sequence: Synthetic oligonucleotide
ugcauuacacggaugaauu

SEQ ID NO: 1241426 - RNA, 19 nt, Artificial Sequence
  Description of Artificial Sequence: Synthetic oligonucleotide
agguguuccguauucuuuc

SEQ ID NO: 1241427 - RNA, 19 nt, Artificial Sequence
  Description of Artificial Sequence: Synthetic oligonucleotide
uuaucagaacugaaacugu

SEQ ID NO: 1241428 - RNA, 19 nt, Artificial Sequence
  Description of Artificial Sequence: Synthetic oligonucleotide
uauuuccguaaauaucccc

SEQ ID NO: 1241429 - RNA, 19 nt, Artificial Sequence
  Description of Artificial Sequence: Synthetic oligonucleotide
uacagcucaaugaucauuu

SEQ ID NO: 1241430 - RNA, 19 nt, Artificial Sequence
  Description of Artificial Sequence: Synthetic oligonucleotide
guaauuagaaguuguguaa

SEQ ID NO: 1241431 - RNA, 19 nt, Artificial Sequence
  Description of Artificial Sequence: Synthetic oligonucleotide
uuccugacuauauuucuca

SEQ ID NO: 1241432 - RNA, 19 nt, Artificial Sequence
  Description of Artificial Sequence: Synthetic oligonucleotide
cagggaaauagaaacucag

SEQ ID NO: 1241433 - RNA, 19 nt, Artificial Sequence
  Description of Artificial Sequence: Synthetic oligonucleotide
agaacugaaacuguccaug

SEQ ID NO: 1241434 - RNA, 19 nt, Artificial Sequence
  Description of Artificial Sequence: Synthetic oligonucleotide
ugcuguagacauuaugacu

SEQ ID NO: 1241435 - RNA, 19 nt, Artificial Sequence
  Description of Artificial Sequence: Synthetic oligonucleotide
cuauuuguuguacacauaa

SEQ ID NO: 1241436 - RNA, 19 nt, Artificial Sequence
  Description of Artificial Sequence: Synthetic oligonucleotide
cuagguacccuuucuuggg

SEQ ID NO: 1241437 - RNA, 19 nt, Artificial Sequence
  Description of Artificial Sequence: Synthetic oligonucleotide
acaacuaagaccaaagcua

SEQ ID NO: 1241438 - RNA, 19 nt, Artificial Sequence
  Description of Artificial Sequence: Synthetic oligonucleotide
cuaagaccaaagcuagagg

SEQ ID NO: 1241439 - RNA, 19 nt, Artificial Sequence
  Description of Artificial Sequence: Synthetic oligonucleotide
uuauuacucuucugguugc

SEQ ID NO: 1241440 - RNA, 19 nt, Artificial Sequence
  Description of Artificial Sequence: Synthetic oligonucleotide
ugucucaaacucuauugcu

SEQ ID NO: 1241441 - RNA, 19 nt, Artificial Sequence
  Description of Artificial Sequence: Synthetic oligonucleotide
uguggguucgucuggugag

SEQ ID NO: 1241442 - RNA, 19 nt, Artificial Sequence
  Description of Artificial Sequence: Synthetic oligonucleotide
aacagguuacaaaacaaau

SEQ ID NO: 1241443 - RNA, 19 nt, Artificial Sequence
  Description of Artificial Sequence: Synthetic oligonucleotide
uuuggcuaaaagccuuccc

SEQ ID NO: 1241444 - RNA, 19 nt, Artificial Sequence
  Description of Artificial Sequence: Synthetic oligonucleotide
auaugcuguagacauuaug

SEQ ID NO: 1241445 - RNA, 19 nt, Artificial Sequence
  Description of Artificial Sequence: Synthetic oligonucleotide
gguauaaucagagacagaa

SEQ ID NO: 1241446 - RNA, 19 nt, Artificial Sequence
  Description of Artificial Sequence: Synthetic oligonucleotide
cuaccauagauuaucagaa

SEQ ID NO: 1241447 - RNA, 19 nt, Artificial Sequence
  Description of Artificial Sequence: Synthetic oligonucleotide
uaagcauguacaaggcccu

SEQ ID NO: 1241448 - RNA, 19 nt, Artificial Sequence
  Description of Artificial Sequence: Synthetic oligonucleotide
accuguaacuaccauagau

SEQ ID NO: 1241449 - RNA, 19 nt, Artificial Sequence
  Description of Artificial Sequence: Synthetic oligonucleotide
gauuacaucacuagcacua

SEQ ID NO: 1241450 - RNA, 19 nt, Artificial Sequence
  Description of Artificial Sequence: Synthetic oligonucleotide
ucuaguuauuacucuucug

SEQ ID NO: 1241451 - RNA, 19 nt, Artificial Sequence
  Description of Artificial Sequence: Synthetic oligonucleotide
auuaaaauucucgggcuug

SEQ ID NO: 1241452 - RNA, 19 nt, Artificial Sequence
  Description of Artificial Sequence: Synthetic oligonucleotide
uccuaagcauguacaaggc

SEQ ID NO: 1241453 - RNA, 19 nt, Artificial Sequence
  Description of Artificial Sequence: Synthetic oligonucleotide
ugaaccuguaacuaccaua

SEQ ID NO: 1241454 - RNA, 19 nt, Artificial Sequence
  Description of Artificial Sequence: Synthetic oligonucleotide
uggcuuugagaauuuaagu

SEQ ID NO: 1241455 - RNA, 19 nt, Artificial Sequence
  Description of Artificial Sequence: Synthetic oligonucleotide
acuaggggagauuuaaaau

SEQ ID NO: 1241456 - RNA, 19 nt, Artificial Sequence
  Description of Artificial Sequence: Synthetic oligonucleotide
uauugacuauuugaaaagu

SEQ ID NO: 1241457 - RNA, 19 nt, Artificial Sequence
  Description of Artificial Sequence: Synthetic oligonucleotide
uuacucucaauucuuugua

SEQ ID NO: 1241458 - RNA, 19 nt, Artificial Sequence
  Description of Artificial Sequence: Synthetic oligonucleotide
cagguauaaucagagacag

SEQ ID NO: 1241459 - RNA, 19 nt, Artificial Sequence
  Description of Artificial Sequence: Synthetic oligonucleotide
aaauaguguucuugagcca

SEQ ID NO: 1241460 - RNA, 19 nt, Artificial Sequence
  Description of Artificial Sequence: Synthetic oligonucleotide
cuuaaauccuaagggcugg

SEQ ID NO: 1241461 - RNA, 19 nt, Artificial Sequence
  Description of Artificial Sequence: Synthetic oligonucleotide
aacucuauugcuguauaau

SEQ ID NO: 1241462 - RNA, 19 nt, Artificial Sequence
  Description of Artificial Sequence: Synthetic oligonucleotide
uaacuaccauagauuauca

SEQ ID NO: 1241463 - RNA, 19 nt, Artificial Sequence
  Description of Artificial Sequence: Synthetic oligonucleotide
uuggauuuauacucuaguu

SEQ ID NO: 1241464 - RNA, 19 nt, Artificial Sequence
  Description of Artificial Sequence: Synthetic oligonucleotide
gugacuauuuguuguacac

SEQ ID NO: 1241465 - RNA, 19 nt, Artificial Sequence
  Description of Artificial Sequence: Synthetic oligonucleotide
agaucuauggcugaagcau

SEQ ID NO: 1241466 - RNA, 19 nt, Artificial Sequence
  Description of Artificial Sequence: Synthetic oligonucleotide
cucucaauucuuuguaaac

SEQ ID NO: 1241467 - RNA, 19 nt, Artificial Sequence
  Description of Artificial Sequence: Synthetic oligonucleotide
cagugucauacauacuagg

SEQ ID NO: 1241468 - RNA, 19 nt, Artificial Sequence
  Description of Artificial Sequence: Synthetic oligonucleotide
aauagaaacucaguaucuu

SEQ ID NO: 1241469 - RNA, 19 nt, Artificial Sequence
  Description of Artificial Sequence: Synthetic oligonucleotide
uacacggaugaauuaaaau

SEQ ID NO: 1241470 - RNA, 19 nt, Artificial Sequence
  Description of Artificial Sequence: Synthetic oligonucleotide
uaguagugacuauuuguug

SEQ ID NO: 1241471 - RNA, 19 nt, Artificial Sequence
  Description of Artificial Sequence: Synthetic oligonucleotide
aggagguaugucucaacuc

SEQ ID NO: 1241472 - RNA, 19 nt, Artificial Sequence
  Description of Artificial Sequence: Synthetic oligonucleotide
acuuaguagugacuauuug

SEQ ID NO: 1241473 - RNA, 19 nt, Artificial Sequence
  Description of Artificial Sequence: Synthetic oligonucleotide
uuuccugacuauauuucuc

SEQ ID NO: 1241474 - RNA, 19 nt, Artificial Sequence
  Description of Artificial Sequence: Synthetic oligonucleotide
gaauuaaaauucucgggcu

SEQ ID NO: 1241475 - RNA, 19 nt, Artificial Sequence
  Description of Artificial Sequence: Synthetic oligonucleotide
uauuaaggugaugaauaga

SEQ ID NO: 1241476 - RNA, 19 nt, Artificial Sequence
  Description of Artificial Sequence: Synthetic oligonucleotide
caaacauauugacuauuug

SEQ ID NO: 1241477 - RNA, 19 nt, Artificial Sequence
  Description of Artificial Sequence: Synthetic oligonucleotide
cucuaaagauaaaugauua

SEQ ID NO: 1241478 - RNA, 19 nt, Artificial Sequence
  Description of Artificial Sequence: Synthetic oligonucleotide
uucuuuccugacuauauuu

SEQ ID NO: 1241479 - RNA, 19 nt, Artificial Sequence
  Description of Artificial Sequence: Synthetic oligonucleotide
gucuacaaagguuugaccu

SEQ ID NO: 1241480 - RNA, 19 nt, Artificial Sequence
  Description of Artificial Sequence: Synthetic oligonucleotide
auaaaggaucacacuuugc

SEQ ID NO: 1241481 - RNA, 19 nt, Artificial Sequence
  Description of Artificial Sequence: Synthetic oligonucleotide
auacauacuagguacccuu

SEQ ID NO: 1241482 - RNA, 19 nt, Artificial Sequence
  Description of Artificial Sequence: Synthetic oligonucleotide
aaacucuauugcuguauaa

SEQ ID NO: 1241483 - RNA, 19 nt, Artificial Sequence
  Description of Artificial Sequence: Synthetic oligonucleotide
uaugacuugucaacauaaa

SEQ ID NO: 1241484 - RNA, 19 nt, Artificial Sequence
  Description of Artificial Sequence: Synthetic oligonucleotide
agugacuauuuguuguaca

SEQ ID NO: 1241485 - RNA, 19 nt, Artificial Sequence
  Description of Artificial Sequence: Synthetic oligonucleotide
aaagcuagaggaaacucua

SEQ ID NO: 1241486 - RNA, 19 nt, Artificial Sequence
  Description of Artificial Sequence: Synthetic oligonucleotide
uuauagagccuuucuuuaa

SEQ ID NO: 1241487 - RNA, 19 nt, Artificial Sequence
  Description of Artificial Sequence: Synthetic oligonucleotide
agauaaaagguguuccgua

SEQ ID NO: 1241488 - RNA, 19 nt, Artificial Sequence
  Description of Artificial Sequence: Synthetic oligonucleotide
gacuaggggagauuuaaaa

SEQ ID NO: 1241489 - RNA, 19 nt, Artificial Sequence
  Description of Artificial Sequence: Synthetic oligonucleotide
auacucuaguuauuacucu

SEQ ID NO: 1241490 - RNA, 19 nt, Artificial Sequence
  Description of Artificial Sequence: Synthetic oligonucleotide
agauaaagacuuuggcuaa

SEQ ID NO: 1241491 - RNA, 19 nt, Artificial Sequence
  Description of Artificial Sequence: Synthetic oligonucleotide
cugacuauauuucucaaua

SEQ ID NO: 1241492 - RNA, 19 nt, Artificial Sequence
  Description of Artificial Sequence: Synthetic oligonucleotide
uguaacuaccauagauuau

SEQ ID NO: 1241493 - RNA, 19 nt, Artificial Sequence
  Description of Artificial Sequence: Synthetic oligonucleotide
cuuuauacuuaaauccuaa

SEQ ID NO: 1241494 - RNA, 19 nt, Artificial Sequence
  Description of Artificial Sequence: Synthetic oligonucleotide
cagcucaaugaucauuucc

SEQ ID NO: 1241495 - RNA, 19 nt, Artificial Sequence
  Description of Artificial Sequence: Synthetic oligonucleotide
aucacacuuugcauguggc

SEQ ID NO: 1241496 - RNA, 19 nt, Artificial Sequence
  Description of Artificial Sequence: Synthetic oligonucleotide
aguuauuacucuucugguu

SEQ ID NO: 1241497 - RNA, 19 nt, Artificial Sequence
  Description of Artificial Sequence: Synthetic oligonucleotide
uagagccuuucuuuaaggu

SEQ ID NO: 1241498 - RNA, 19 nt, Artificial Sequence
  Description of Artificial Sequence: Synthetic oligonucleotide
cucaacucuacaacuaaga

SEQ ID NO: 1241499 - RNA, 19 nt, Artificial Sequence
  Description of Artificial Sequence: Synthetic oligonucleotide
ugucgucagcacuacgaag

SEQ ID NO: 1241500 - RNA, 19 nt, Artificial Sequence
  Description of Artificial Sequence: Synthetic oligonucleotide
caaugauuuccccagcuca

SEQ ID NO: 1241501 - RNA, 19 nt, Artificial Sequence
  Description of Artificial Sequence: Synthetic oligonucleotide
uccgaugucucaaacucua

SEQ ID NO: 1241502 - RNA, 19 nt, Artificial Sequence
  Description of Artificial Sequence: Synthetic oligonucleotide
agauauagcucagcaguag

SEQ ID NO: 1241503 - RNA, 19 nt, Artificial Sequence
  Description of Artificial Sequence: Synthetic oligonucleotide
ggagauauagcucagcagu

SEQ ID NO: 1241504 - RNA, 19 nt, Artificial Sequence
  Description of Artificial Sequence: Synthetic oligonucleotide
aucaaaauccugugguaaa

SEQ ID NO: 1241505 - RNA, 19 nt, Artificial Sequence
  Description of Artificial Sequence: Synthetic oligonucleotide
guuugaccuauaacuauag

SEQ ID NO: 1241506 - RNA, 19 nt, Artificial Sequence
  Description of Artificial Sequence: Synthetic oligonucleotide
auaccuauucucaucuuug

SEQ ID NO: 1241507 - RNA, 19 nt, Artificial Sequence
  Description of Artificial Sequence: Synthetic oligonucleotide
agaaaugaaccuguaacua

SEQ ID NO: 1241508 - RNA, 19 nt, Artificial Sequence
  Description of Artificial Sequence: Synthetic oligonucleotide
acauugaagcauaccaaag

SEQ ID NO: 1241509 - RNA, 19 nt, Artificial Sequence
  Description of Artificial Sequence: Synthetic oligonucleotide
agugucauacauacuaggu

SEQ ID NO: 1241510 - RNA, 19 nt, Artificial Sequence
  Description of Artificial Sequence: Synthetic oligonucleotide
acucuaguuauuacucuuc

SEQ ID NO: 1241511 - RNA, 19 nt, Artificial Sequence
  Description of Artificial Sequence: Synthetic oligonucleotide
gggaucacugucuugugag

SEQ ID NO: 1241512 - RNA, 19 nt, Artificial Sequence
  Description of Artificial Sequence: Synthetic oligonucleotide
aaugaaccuguaacuacca

SEQ ID NO: 1241513 - RNA, 19 nt, Artificial Sequence
  Description of Artificial Sequence: Synthetic oligonucleotide
guaugucucaacucuacaa

SEQ ID NO: 1241514 - RNA, 19 nt, Artificial Sequence
  Description of Artificial Sequence: Synthetic oligonucleotide
acauuaugacuugucaaca

SEQ ID NO: 1241515 - RNA, 19 nt, Artificial Sequence
  Description of Artificial Sequence: Synthetic oligonucleotide
acugucuugugagacaagu

SEQ ID NO: 1241516 - RNA, 19 nt, Artificial Sequence
  Description of Artificial Sequence: Synthetic oligonucleotide
gaaugaauacuggcugaag

SEQ ID NO: 1241517 - RNA, 19 nt, Artificial Sequence
  Description of Artificial Sequence: Synthetic oligonucleotide
uauuuggauuuauacucua

SEQ ID NO: 1241518 - RNA, 19 nt, Artificial Sequence
  Description of Artificial Sequence: Synthetic oligonucleotide
caacauaaaacuuucgcau

SEQ ID NO: 1241519 - RNA, 19 nt, Artificial Sequence
  Description of Artificial Sequence: Synthetic oligonucleotide
aucuaauaccuauucucau

SEQ ID NO: 1241520 - RNA, 19 nt, Artificial Sequence
  Description of Artificial Sequence: Synthetic oligonucleotide
uuaaaauucucgggcuugu

SEQ ID NO: 1241521 - RNA, 19 nt, Artificial Sequence
  Description of Artificial Sequence: Synthetic oligonucleotide
ucgcucauguucaguuagg

SEQ ID NO: 1241522 - RNA, 19 nt, Artificial Sequence
  Description of Artificial Sequence: Synthetic oligonucleotide
gauauggaguaagggauga

SEQ ID NO: 1241523 - RNA, 19 nt, Artificial Sequence
  Description of Artificial Sequence: Synthetic oligonucleotide
cuguaacuaccauagauua

SEQ ID NO: 1241524 - RNA, 19 nt, Artificial Sequence
  Description of Artificial Sequence: Synthetic oligonucleotide
cuauuauagaagcagguau

SEQ ID NO: 1241525 - RNA, 19 nt, Artificial Sequence
  Description of Artificial Sequence: Synthetic oligonucleotide
aagcagguauaaucagaga

SEQ ID NO: 1241526 - RNA, 19 nt, Artificial Sequence
  Description of Artificial Sequence: Synthetic oligonucleotide
uuacaucacuagcacuaac

SEQ ID NO: 1241527 - RNA, 19 nt, Artificial Sequence
  Description of Artificial Sequence: Synthetic oligonucleotide
uccauagauaaaagguguu

SEQ ID NO: 1241528 - RNA, 19 nt, Artificial Sequence
  Description of Artificial Sequence: Synthetic oligonucleotide
  modified_base (16)..(16): a, c, u, g, unknown or other
ucgucuggugagccanaag

SEQ ID NO: 1241529 - RNA, 19 nt, Artificial Sequence
  Description of Artificial Sequence: Synthetic oligonucleotide
aguaucuuacuuauucuaa

SEQ ID NO: 1241530 - RNA, 19 nt, Artificial Sequence
  Description of Artificial Sequence: Synthetic oligonucleotide
uaccauagauuaucagaac

SEQ ID NO: 1241531 - RNA, 19 nt, Artificial Sequence
  Description of Artificial Sequence: Synthetic oligonucleotide
aaaaggagguaugucucaa

SEQ ID NO: 1241532 - RNA, 19 nt, Artificial Sequence
  Description of Artificial Sequence: Synthetic oligonucleotide
aggauagaaaugaaccugu

SEQ ID NO: 1241533 - RNA, 19 nt, Artificial Sequence
  Description of Artificial Sequence: Synthetic oligonucleotide
agguuugaccuauaacuau

SEQ ID NO: 1241534 - RNA, 19 nt, Artificial Sequence
  Description of Artificial Sequence: Synthetic oligonucleotide
uaccuauucucaucuuugu

SEQ ID NO: 1241535 - RNA, 19 nt, Artificial Sequence
  Description of Artificial Sequence: Synthetic oligonucleotide
caagcauaccacauuaucu

SEQ ID NO: 1241536 - RNA, 19 nt, Artificial Sequence
  Description of Artificial Sequence: Synthetic oligonucleotide
gauaaaagguguuccguau

SEQ ID NO: 1241537 - RNA, 19 nt, Artificial Sequence
  Description of Artificial Sequence: Synthetic oligonucleotide
uugcauuacacggaugaau

SEQ ID NO: 1241538 - RNA, 19 nt, Artificial Sequence
  Description of Artificial Sequence: Synthetic oligonucleotide
ucaaaauccugugguaaau

SEQ ID NO: 1241539 - RNA, 19 nt, Artificial Sequence
  Description of Artificial Sequence: Synthetic oligonucleotide
auaaucagagacagaagaa

SEQ ID NO: 1241540 - RNA, 19 nt, Artificial Sequence
  Description of Artificial Sequence: Synthetic oligonucleotide
agguaugucucaacucuac

SEQ ID NO: 1241541 - RNA, 19 nt, Artificial Sequence
  Description of Artificial Sequence: Synthetic oligonucleotide
acuagcacuaacauuugaa

SEQ ID NO: 1241542 - RNA, 19 nt, Artificial Sequence
  Description of Artificial Sequence: Synthetic oligonucleotide
aacuguccaugacuuagua

SEQ ID NO: 1241543 - RNA, 19 nt, Artificial Sequence
  Description of Artificial Sequence: Synthetic oligonucleotide
gucgucagcacuacgaaga

SEQ ID NO: 1241544 - RNA, 19 nt, Artificial Sequence
  Description of Artificial Sequence: Synthetic oligonucleotide
gucuaugggauuuccaucu

SEQ ID NO: 1241545 - RNA, 19 nt, Artificial Sequence
  Description of Artificial Sequence: Synthetic oligonucleotide
uccugugguaaaucuuucu

SEQ ID NO: 1241546 - RNA, 19 nt, Artificial Sequence
  Description of Artificial Sequence: Synthetic oligonucleotide
cugauauggaguaagggau

SEQ ID NO: 1241547 - RNA, 19 nt, Artificial Sequence
  Description of Artificial Sequence: Synthetic oligonucleotide
gaauuuaaguagcuauuau

SEQ ID NO: 1241548 - RNA, 19 nt, Artificial Sequence
  Description of Artificial Sequence: Synthetic oligonucleotide
gaccuauaacuauaggccu

SEQ ID NO: 1241549 - RNA, 19 nt, Artificial Sequence
  Description of Artificial Sequence: Synthetic oligonucleotide
agcuauuauagaagcaggu

SEQ ID NO: 1241550 - RNA, 19 nt, Artificial Sequence
  Description of Artificial Sequence: Synthetic oligonucleotide
aaacuuucgcaugcacaug

SEQ ID NO: 1241551 - RNA, 19 nt, Artificial Sequence
  Description of Artificial Sequence: Synthetic oligonucleotide
uucugucgucagcacuacg

SEQ ID NO: 1241552 - RNA, 19 nt, Artificial Sequence
  Description of Artificial Sequence: Synthetic oligonucleotide
caugacuuaguagugacua

SEQ ID NO: 1241553 - RNA, 19 nt, Artificial Sequence
  Description of Artificial Sequence: Synthetic oligonucleotide
agaggaaacucuaaagaua

SEQ ID NO: 1241554 - RNA, 19 nt, Artificial Sequence
  Description of Artificial Sequence: Synthetic oligonucleotide
aucuauaacuuuauacuua

SEQ ID NO: 1241555 - RNA, 19 nt, Artificial Sequence
  Description of Artificial Sequence: Synthetic oligonucleotide
  modified_base (15)..(15): a, c, u, g, unknown or other
cgucuggugagccanaagg

SEQ ID NO: 1241556 - RNA, 19 nt, Artificial Sequence
  Description of Artificial Sequence: Synthetic oligonucleotide
uugaaaaguacagcucaau

SEQ ID NO: 1241557 - RNA, 19 nt, Artificial Sequence
  Description of Artificial Sequence: Synthetic oligonucleotide
cugucuugugagacaagug

SEQ ID NO: 1241558 - RNA, 19 nt, Artificial Sequence
  Description of Artificial Sequence: Synthetic oligonucleotide
augcacaugacagggaaau

SEQ ID NO: 1241559 - RNA, 19 nt, Artificial Sequence
  Description of Artificial Sequence: Synthetic oligonucleotide
acacuuugcauguggcuau

SEQ ID NO: 1241560 - RNA, 19 nt, Artificial Sequence
  Description of Artificial Sequence: Synthetic oligonucleotide
gugucauacauacuaggua

SEQ ID NO: 1241561 - RNA, 19 nt, Artificial Sequence
  Description of Artificial Sequence: Synthetic oligonucleotide
cuguagacauuaugacuug

SEQ ID NO: 1241562 - RNA, 19 nt, Artificial Sequence
  Description of Artificial Sequence: Synthetic oligonucleotide
uccauuuauagagccuuuc

SEQ ID NO: 1241563 - RNA, 19 nt, Artificial Sequence
  Description of Artificial Sequence: Synthetic oligonucleotide
gucauacauacuagguacc

SEQ ID NO: 1241564 - RNA, 19 nt, Artificial Sequence
  Description of Artificial Sequence: Synthetic oligonucleotide
cacaugacagggaaauaga

SEQ ID NO: 1241565 - RNA, 19 nt, Artificial Sequence
  Description of Artificial Sequence: Synthetic oligonucleotide
gagccaugaggauagaaau

SEQ ID NO: 1241566 - RNA, 19 nt, Artificial Sequence
  Description of Artificial Sequence: Synthetic oligonucleotide
auugacuauuugaaaagua

SEQ ID NO: 1241567 - RNA, 19 nt, Artificial Sequence
  Description of Artificial Sequence: Synthetic oligonucleotide
cauuacacggaugaauuaa

SEQ ID NO: 1241568 - RNA, 19 nt, Artificial Sequence
  Description of Artificial Sequence: Synthetic oligonucleotide
aguagcuauuauagaagca

SEQ ID NO: 1241569 - RNA, 19 nt, Artificial Sequence
  Description of Artificial Sequence: Synthetic oligonucleotide
cuaugggauuuccaucuuc

SEQ ID NO: 1241570 - RNA, 19 nt, Artificial Sequence
  Description of Artificial Sequence: Synthetic oligonucleotide
acggaugaauuaaaauucu

SEQ ID NO: 1241571 - RNA, 19 nt, Artificial Sequence
  Description of Artificial Sequence: Synthetic oligonucleotide
caaagcuagaggaaacucu

SEQ ID NO: 1241572 - RNA, 19 nt, Artificial Sequence
  Description of Artificial Sequence: Synthetic oligonucleotide
aaacuguccaugacuuagu

SEQ ID NO: 1241573 - RNA, 19 nt, Artificial Sequence
  Description of Artificial Sequence: Synthetic oligonucleotide
uuauagaagcagguauaau

SEQ ID NO: 1241574 - RNA, 19 nt, Artificial Sequence
  Description of Artificial Sequence: Synthetic oligonucleotide
guauuuccguaaauauccc

SEQ ID NO: 1241575 - RNA, 19 nt, Artificial Sequence
  Description of Artificial Sequence: Synthetic oligonucleotide
uacauacuagguacccuuu

SEQ ID NO: 1241576 - RNA, 19 nt, Artificial Sequence
  Description of Artificial Sequence: Synthetic oligonucleotide
caaaauccugugguaaauc

SEQ ID NO: 1241577 - RNA, 19 nt, Artificial Sequence
  Description of Artificial Sequence: Synthetic oligonucleotide
cagaaauuucugauaugga

SEQ ID NO: 1241578 - RNA, 19 nt, Artificial Sequence
  Description of Artificial Sequence: Synthetic oligonucleotide
guagagcaccuccuaagca

SEQ ID NO: 1241579 - RNA, 19 nt, Artificial Sequence
  Description of Artificial Sequence: Synthetic oligonucleotide
  modified_base (4)..(4): a, c, u, g, unknown or other
ccanaagggaagaucuaug

SEQ ID NO: 1241580 - RNA, 19 nt, Artificial Sequence
  Description of Artificial Sequence: Synthetic oligonucleotide
caguaucuuacuuauucua

SEQ ID NO: 1241581 - RNA, 19 nt, Artificial Sequence
  Description of Artificial Sequence: Synthetic oligonucleotide
gcacuaacauuugaacagg

SEQ ID NO: 1241582 - RNA, 19 nt, Artificial Sequence
  Description of Artificial Sequence: Synthetic oligonucleotide
ggagguaugucucaacucu

SEQ ID NO: 1241583 - RNA, 19 nt, Artificial Sequence
  Description of Artificial Sequence: Synthetic oligonucleotide
auucugucgucagcacuac

SEQ ID NO: 1241584 - RNA, 19 nt, Artificial Sequence
  Description of Artificial Sequence: Synthetic oligonucleotide
cuauuuggauuuauacucu

SEQ ID NO: 1241585 - RNA, 19 nt, Artificial Sequence
  Description of Artificial Sequence: Synthetic oligonucleotide
cucaauaaaggaucacacu

SEQ ID NO: 1241586 - RNA, 19 nt, Artificial Sequence
  Description of Artificial Sequence: Synthetic oligonucleotide
guagugacuauuuguugua

SEQ ID NO: 1241587 - RNA, 19 nt, Artificial Sequence
  Description of Artificial Sequence: Synthetic oligonucleotide
uaguguucuugagccauga

SEQ ID NO: 1241588 - RNA, 19 nt, Artificial Sequence
  Description of Artificial Sequence: Synthetic oligonucleotide
caaugaucauuuccgaugu

SEQ ID NO: 1241589 - RNA, 19 nt, Artificial Sequence
  Description of Artificial Sequence: Synthetic oligonucleotide
caucuauaacuuuauacuu

SEQ ID NO: 1241590 - RNA, 19 nt, Artificial Sequence
  Description of Artificial Sequence: Synthetic oligonucleotide
ucucgggcuugucuucucu

SEQ ID NO: 1241591 - RNA, 19 nt, Artificial Sequence
  Description of Artificial Sequence: Synthetic oligonucleotide
uauuacucuucugguugcu

SEQ ID NO: 1241592 - RNA, 19 nt, Artificial Sequence
  Description of Artificial Sequence: Synthetic oligonucleotide
auuacaucacuagcacuaa

SEQ ID NO: 1241593 - RNA, 19 nt, Artificial Sequence
  Description of Artificial Sequence: Synthetic oligonucleotide
aacuaagaccaaagcuaga

SEQ ID NO: 1241594 - RNA, 19 nt, Artificial Sequence
  Description of Artificial Sequence: Synthetic oligonucleotide
aaacuaggacuaggggaga

SEQ ID NO: 1241595 - RNA, 19 nt, Artificial Sequence
  Description of Artificial Sequence: Synthetic oligonucleotide
acuuucgcaugcacaugac

SEQ ID NO: 1241596 - RNA, 19 nt, Artificial Sequence
  Description of Artificial Sequence: Synthetic oligonucleotide
uggugcuccagaagauaaa

SEQ ID NO: 1241597 - RNA, 19 nt, Artificial Sequence
  Description of Artificial Sequence: Synthetic oligonucleotide
ucuaugggauuuccaucuu

SEQ ID NO: 1241598 - RNA, 19 nt, Artificial Sequence
  Description of Artificial Sequence: Synthetic oligonucleotide
gaagcauaccaaagcaaua

SEQ ID NO: 1241599 - RNA, 19 nt, Artificial Sequence
  Description of Artificial Sequence: Synthetic oligonucleotide
aagggaugauccauagaua

SEQ ID NO: 1241600 - RNA, 19 nt, Artificial Sequence
  Description of Artificial Sequence: Synthetic oligonucleotide
ccugugguaaaucuuucuc

SEQ ID NO: 1241601 - RNA, 19 nt, Artificial Sequence
  Description of Artificial Sequence: Synthetic oligonucleotide
aacuaggacuaggggagau

SEQ ID NO: 1241602 - RNA, 19 nt, Artificial Sequence
  Description of Artificial Sequence: Synthetic oligonucleotide
gauaaagacuuuggcuaaa

SEQ ID NO: 1241603 - RNA, 19 nt, Artificial Sequence
  Description of Artificial Sequence: Synthetic oligonucleotide
cauaaaacuuucgcaugca

SEQ ID NO: 1241604 - RNA, 19 nt, Artificial Sequence
  Description of Artificial Sequence: Synthetic oligonucleotide
cuauaacuauaggccuucc

SEQ ID NO: 1241605 - RNA, 19 nt, Artificial Sequence
  Description of Artificial Sequence: Synthetic oligonucleotide
cuuucgcaugcacaugaca

SEQ ID NO: 1241606 - RNA, 19 nt, Artificial Sequence
  Description of Artificial Sequence: Synthetic oligonucleotide
ccuaagcauguacaaggcc

SEQ ID NO: 1241607 - RNA, 19 nt, Artificial Sequence
  Description of Artificial Sequence: Synthetic oligonucleotide
aauaugcuguagacauuau

SEQ ID NO: 1241608 - RNA, 19 nt, Artificial Sequence
  Description of Artificial Sequence: Synthetic oligonucleotide
augaaccuguaacuaccau

SEQ ID NO: 1241609 - RNA, 19 nt, Artificial Sequence
  Description of Artificial Sequence: Synthetic oligonucleotide
uaauaccuauucucaucuu

SEQ ID NO: 1241610 - RNA, 19 nt, Artificial Sequence
  Description of Artificial Sequence: Synthetic oligonucleotide
gguguuccguauucuuucc

SEQ ID NO: 1241611 - RNA, 19 nt, Artificial Sequence
  Description of Artificial Sequence: Synthetic oligonucleotide
ggucuaugggauuuccauc

SEQ ID NO: 1241612 - RNA, 19 nt, Artificial Sequence
  Description of Artificial Sequence: Synthetic oligonucleotide
guaagggaugauccauaga

SEQ ID NO: 1241613 - RNA, 19 nt, Artificial Sequence
  Description of Artificial Sequence: Synthetic oligonucleotide
ucuggugcuccagaagaua

SEQ ID NO: 1241614 - RNA, 19 nt, Artificial Sequence
  Description of Artificial Sequence: Synthetic oligonucleotide
uaaaauucucgggcuuguc

SEQ ID NO: 1241615 - RNA, 19 nt, Artificial Sequence
  Description of Artificial Sequence: Synthetic oligonucleotide
agcaguagagcaccuccua

SEQ ID NO: 1241616 - RNA, 19 nt, Artificial Sequence
  Description of Artificial Sequence: Synthetic oligonucleotide
acuaacauuugaacagguu

SEQ ID NO: 1241617 - RNA, 19 nt, Artificial Sequence
  Description of Artificial Sequence: Synthetic oligonucleotide
caccuccuaagcauguaca

SEQ ID NO: 1241618 - RNA, 19 nt, Artificial Sequence
  Description of Artificial Sequence: Synthetic oligonucleotide
guguggguucgucugguga

SEQ ID NO: 1241619 - RNA, 19 nt, Artificial Sequence
  Description of Artificial Sequence: Synthetic oligonucleotide
auucgcucauguucaguua

SEQ ID NO: 1241620 - RNA, 19 nt, Artificial Sequence
  Description of Artificial Sequence: Synthetic oligonucleotide
cuccacucuccaguguggg

SEQ ID NO: 1241621 - RNA, 19 nt, Artificial Sequence
  Description of Artificial Sequence: Synthetic oligonucleotide
guaaaucuggaagcuucuc

SEQ ID NO: 1241622 - RNA, 19 nt, Artificial Sequence
  Description of Artificial Sequence: Synthetic oligonucleotide
gguaugucucaacucuaca

SEQ ID NO: 1241623 - RNA, 19 nt, Artificial Sequence
  Description of Artificial Sequence: Synthetic oligonucleotide
uggguucgucuggugagcc

SEQ ID NO: 1241624 - RNA, 19 nt, Artificial Sequence
  Description of Artificial Sequence: Synthetic oligonucleotide
caaacucuauugcuguaua

SEQ ID NO: 1241625 - RNA, 19 nt, Artificial Sequence
  Description of Artificial Sequence: Synthetic oligonucleotide
aagcuagaggaaacucuaa

SEQ ID NO: 1241626 - RNA, 19 nt, Artificial Sequence
  Description of Artificial Sequence: Synthetic oligonucleotide
uacaaagguuugaccuaua

SEQ ID NO: 1241627 - RNA, 19 nt, Artificial Sequence
  Description of Artificial Sequence: Synthetic oligonucleotide
uaggacuaggggagauuua

SEQ ID NO: 1241628 - RNA, 19 nt, Artificial Sequence
  Description of Artificial Sequence: Synthetic oligonucleotide
cucuaguuauuacucuucu

SEQ ID NO: 1241629 - RNA, 19 nt, Artificial Sequence
  Description of Artificial Sequence: Synthetic oligonucleotide
auaguguucuugagccaug

SEQ ID NO: 1241630 - RNA, 19 nt, Artificial Sequence
  Description of Artificial Sequence: Synthetic oligonucleotide
cauuaugacuugucaacau

SEQ ID NO: 1241631 - RNA, 19 nt, Artificial Sequence
  Description of Artificial Sequence: Synthetic oligonucleotide
gaguaagggaugauccaua

SEQ ID NO: 1241632 - RNA, 19 nt, Artificial Sequence
  Description of Artificial Sequence: Synthetic oligonucleotide
guccaugacuuaguaguga

SEQ ID NO: 1241633 - RNA, 19 nt, Artificial Sequence
  Description of Artificial Sequence: Synthetic oligonucleotide
agccuuacauugaagcaua

SEQ ID NO: 1241634 - RNA, 19 nt, Artificial Sequence
  Description of Artificial Sequence: Synthetic oligonucleotide
cucaaugaucauuuccgau

SEQ ID NO: 1241635 - RNA, 19 nt, Artificial Sequence
  Description of Artificial Sequence: Synthetic oligonucleotide
  modified_base (17)..(17): a, c, u, g, unknown or other
uucgucuggugagccanaa

SEQ ID NO: 1241636 - RNA, 19 nt, Artificial Sequence
  Description of Artificial Sequence: Synthetic oligonucleotide
guguuccguauucuuucca

SEQ ID NO: 1241637 - RNA, 19 nt, Artificial Sequence
  Description of Artificial Sequence: Synthetic oligonucleotide
ccuauucucaucuuuguau

SEQ ID NO: 1241638 - RNA, 19 nt, Artificial Sequence
  Description of Artificial Sequence: Synthetic oligonucleotide
cucgggcuugucuucucuc

SEQ ID NO: 1241639 - RNA, 19 nt, Artificial Sequence
  Description of Artificial Sequence: Synthetic oligonucleotide
cacuagcacuaacauuuga

SEQ ID NO: 1241640 - RNA, 19 nt, Artificial Sequence
  Description of Artificial Sequence: Synthetic oligonucleotide
gacuuaguagugacuauuu

SEQ ID NO: 1241641 - RNA, 19 nt, Artificial Sequence
  Description of Artificial Sequence: Synthetic oligonucleotide
acuauuuguuguacacaua

SEQ ID NO: 1241642 - RNA, 19 nt, Artificial Sequence
  Description of Artificial Sequence: Synthetic oligonucleotide
gcuguauaaucuaacuugu

SEQ ID NO: 1241643 - RNA, 19 nt, Artificial Sequence
  Description of Artificial Sequence: Synthetic oligonucleotide
cugucgucagcacuacgaa

SEQ ID NO: 1241644 - RNA, 19 nt, Artificial Sequence
  Description of Artificial Sequence: Synthetic oligonucleotide
cauguucaguuaggaauga

SEQ ID NO: 1241645 - RNA, 19 nt, Artificial Sequence
  Description of Artificial Sequence: Synthetic oligonucleotide
  modified_base (10)..(10): a, c, u, g, unknown or other
ggugagccanaagggaaga

SEQ ID NO: 1241646 - RNA, 19 nt, Artificial Sequence
  Description of Artificial Sequence: Synthetic oligonucleotide
ccuccuaagcauguacaag

SEQ ID NO: 1241647 - RNA, 19 nt, Artificial Sequence
  Description of Artificial Sequence: Synthetic oligonucleotide
gagguaugucucaacucua

SEQ ID NO: 1241648 - RNA, 19 nt, Artificial Sequence
  Description of Artificial Sequence: Synthetic oligonucleotide
ugcacaugacagggaaaua

SEQ ID NO: 1241649 - RNA, 19 nt, Artificial Sequence
  Description of Artificial Sequence: Synthetic oligonucleotide
ccaaagcuagaggaaacuc

SEQ ID NO: 1241650 - RNA, 19 nt, Artificial Sequence
  Description of Artificial Sequence: Synthetic oligonucleotide
ggaaugaauacuggcugaa

SEQ ID NO: 1241651 - RNA, 19 nt, Artificial Sequence
  Description of Artificial Sequence: Synthetic oligonucleotide
guggguucgucuggugagc

SEQ ID NO: 1241652 - RNA, 19 nt, Artificial Sequence
  Description of Artificial Sequence: Synthetic oligonucleotide
cacuaacauuugaacaggu

SEQ ID NO: 1241653 - RNA, 19 nt, Artificial Sequence
  Description of Artificial Sequence: Synthetic oligonucleotide
agguauaaucagagacaga

SEQ ID NO: 1241654 - RNA, 19 nt, Artificial Sequence
  Description of Artificial Sequence: Synthetic oligonucleotide
cucaaacucuauugcugua

SEQ ID NO: 1241655 - RNA, 19 nt, Artificial Sequence
  Description of Artificial Sequence: Synthetic oligonucleotide
cuccacagugucauacaua

SEQ ID NO: 1241656 - RNA, 19 nt, Artificial Sequence
  Description of Artificial Sequence: Synthetic oligonucleotide
acuaggacuaggggagauu

SEQ ID NO: 1241657 - RNA, 19 nt, Artificial Sequence
  Description of Artificial Sequence: Synthetic oligonucleotide
ggggaucacugucuuguga

SEQ ID NO: 1241658 - RNA, 19 nt, Artificial Sequence
  Description of Artificial Sequence: Synthetic oligonucleotide
agggucuaugggauuucca

SEQ ID NO: 1241659 - RNA, 19 nt, Artificial Sequence
  Description of Artificial Sequence: Synthetic oligonucleotide
cuugcauuacacggaugaa

SEQ ID NO: 1241660 - RNA, 19 nt, Artificial Sequence
  Description of Artificial Sequence: Synthetic oligonucleotide
  modified_base (19)..(19): a, c, u, g, unknown or other
gguucgucuggugagccan

SEQ ID NO: 1241661 - RNA, 19 nt, Artificial Sequence
  Description of Artificial Sequence: Synthetic oligonucleotide
caucacuagcacuaacauu

SEQ ID NO: 1241662 - RNA, 19 nt, Artificial Sequence
  Description of Artificial Sequence: Synthetic oligonucleotide
guacccuuucuuggggauc

SEQ ID NO: 1241663 - RNA, 19 nt, Artificial Sequence
  Description of Artificial Sequence: Synthetic oligonucleotide
cuacaaagguuugaccuau

SEQ ID NO: 1241664 - RNA, 19 nt, Artificial Sequence
  Description of Artificial Sequence: Synthetic oligonucleotide
ggauucugucgucagcacu

SEQ ID NO: 1241665 - RNA, 19 nt, Artificial Sequence
  Description of Artificial Sequence: Synthetic oligonucleotide
cuaggacuaggggagauuu

SEQ ID NO: 1241666 - RNA, 19 nt, Artificial Sequence
  Description of Artificial Sequence: Synthetic oligonucleotide
gcauuacacggaugaauua

SEQ ID NO: 1241667 - RNA, 19 nt, Artificial Sequence
  Description of Artificial Sequence: Synthetic oligonucleotide
guuccguauucuuuccauu

SEQ ID NO: 1241668 - RNA, 19 nt, Artificial Sequence
  Description of Artificial Sequence: Synthetic oligonucleotide
aggaaacucuaaagauaaa

SEQ ID NO: 1241669 - RNA, 19 nt, Artificial Sequence
  Description of Artificial Sequence: Synthetic oligonucleotide
guggcuaucucaggcgucu

SEQ ID NO: 1241670 - RNA, 19 nt, Artificial Sequence
  Description of Artificial Sequence: Synthetic oligonucleotide
auccuaagggcuggagaua

SEQ ID NO: 1241671 - RNA, 19 nt, Artificial Sequence
  Description of Artificial Sequence: Synthetic oligonucleotide
cuguauaaucuaacuuguu

SEQ ID NO: 1241672 - RNA, 19 nt, Artificial Sequence
  Description of Artificial Sequence: Synthetic oligonucleotide
  modified_base (6)..(6): a, c, u, g, unknown or other
agccanaagggaagaucua

SEQ ID NO: 1241673 - RNA, 19 nt, Artificial Sequence
  Description of Artificial Sequence: Synthetic oligonucleotide
ggaguaagggaugauccau

SEQ ID NO: 1241674 - RNA, 19 nt, Artificial Sequence
  Description of Artificial Sequence: Synthetic oligonucleotide
guacagcucaaugaucauu

SEQ ID NO: 1241675 - RNA, 19 nt, Artificial Sequence
  Description of Artificial Sequence: Synthetic oligonucleotide
agccuuucuuuaaggugaa

SEQ ID NO: 1241676 - RNA, 19 nt, Artificial Sequence
  Description of Artificial Sequence: Synthetic oligonucleotide
cacaagcauaccacauuau

SEQ ID NO: 1241677 - RNA, 19 nt, Artificial Sequence
  Description of Artificial Sequence: Synthetic oligonucleotide
  modified_base (5)..(5): a, c, u, g, unknown or other
gccanaagggaagaucuau

SEQ ID NO: 1241678 - RNA, 19 nt, Artificial Sequence
  Description of Artificial Sequence: Synthetic oligonucleotide
acucaguaucuuacuuauu

SEQ ID NO: 1241679 - RNA, 19 nt, Artificial Sequence
  Description of Artificial Sequence: Synthetic oligonucleotide
cagcaguagagcaccuccu

SEQ ID NO: 1241680 - RNA, 19 nt, Artificial Sequence
  Description of Artificial Sequence: Synthetic oligonucleotide
ggaucacacuuugcaugug

SEQ ID NO: 1241681 - RNA, 19 nt, Artificial Sequence
  Description of Artificial Sequence: Synthetic oligonucleotide
gggaagaucuauggcugaa

SEQ ID NO: 1241682 - RNA, 19 nt, Artificial Sequence
  Description of Artificial Sequence: Synthetic oligonucleotide
gguacccuuucuuggggau

SEQ ID NO: 1241683 - RNA, 19 nt, Artificial Sequence
  Description of Artificial Sequence: Synthetic oligonucleotide
gagcaccuccuaagcaugu

SEQ ID NO: 1241684 - RNA, 19 nt, Artificial Sequence
  Description of Artificial Sequence: Synthetic oligonucleotide
ggacuaggggagauuuaaa

SEQ ID NO: 1241685 - RNA, 19 nt, Artificial Sequence
  Description of Artificial Sequence: Synthetic oligonucleotide
ggguucgucuggugagcca

SEQ ID NO: 1241686 - RNA, 19 nt, Artificial Sequence
  Description of Artificial Sequence: Synthetic oligonucleotide
  modified_base (18)..(18): a, c, u, g, unknown or other
guucgucuggugagccana

SEQ ID NO: 1241687 - RNA, 19 nt, Artificial Sequence
  Description of Artificial Sequence: Synthetic oligonucleotide
caguuucuuuccugacuau

SEQ ID NO: 1241688 - RNA, 19 nt, Artificial Sequence
  Description of Artificial Sequence: Synthetic oligonucleotide
uggcuaucucaggcgucuu

SEQ ID NO: 1241689 - RNA, 19 nt, Artificial Sequence
  Description of Artificial Sequence: Synthetic oligonucleotide
ccaugacuuaguagugacu

SEQ ID NO: 1241690 - RNA, 19 nt, Artificial Sequence
  Description of Artificial Sequence: Synthetic oligonucleotide
gcccuggauucugucguca

SEQ ID NO: 1241691 - RNA, 19 nt, Artificial Sequence
  Description of Artificial Sequence: Synthetic oligonucleotide
ggcuaucucaggcgucuuu

SEQ ID NO: 1241692 - RNA, 19 nt, Artificial Sequence
  Description of Artificial Sequence: Synthetic oligonucleotide
ccgaugucucaaacucuau

SEQ ID NO: 1241693 - RNA, 19 nt, Artificial Sequence
  Description of Artificial Sequence: Synthetic oligonucleotide
aaagaagacaaacuggcga

SEQ ID NO: 1241694 - RNA, 19 nt, Artificial Sequence
  Description of Artificial Sequence: Synthetic oligonucleotide
auaugaguggcauaccagc

SEQ ID NO: 1241695 - RNA, 19 nt, Artificial Sequence
  Description of Artificial Sequence: Synthetic oligonucleotide
gaagguguacuuuagggcc

SEQ ID NO: 1241696 - RNA, 19 nt, Artificial Sequence
  Description of Artificial Sequence: Synthetic oligonucleotide
aaaacaaucagggaaccug

SEQ ID NO: 1241697 - RNA, 19 nt, Artificial Sequence
  Description of Artificial Sequence: Synthetic oligonucleotide
agggauaacagucucaugu

SEQ ID NO: 1241698 - RNA, 19 nt, Artificial Sequence
  Description of Artificial Sequence: Synthetic oligonucleotide
aaugccagaagcaagagaa

SEQ ID NO: 1241699 - RNA, 19 nt, Artificial Sequence
  Description of Artificial Sequence: Synthetic oligonucleotide
aacgguacuggucaccccg

SEQ ID NO: 1241700 - RNA, 19 nt, Artificial Sequence
  Description of Artificial Sequence: Synthetic oligonucleotide
uucuguucgaagcaguuug

SEQ ID NO: 1241701 - RNA, 19 nt, Artificial Sequence
  Description of Artificial Sequence: Synthetic oligonucleotide
aaacuggcgaaugcuaacc

SEQ ID NO: 1241702 - RNA, 19 nt, Artificial Sequence
  Description of Artificial Sequence: Synthetic oligonucleotide
gagagacuagcucagaaug

SEQ ID NO: 1241703 - RNA, 19 nt, Artificial Sequence
  Description of Artificial Sequence: Synthetic oligonucleotide
uuucuuugggucaaacgcc

SEQ ID NO: 1241704 - RNA, 19 nt, Artificial Sequence
  Description of Artificial Sequence: Synthetic oligonucleotide
aacgccaagguuuuguggu

SEQ ID NO: 1241705 - RNA, 19 nt, Artificial Sequence
  Description of Artificial Sequence: Synthetic oligonucleotide
caaccuagcaccaugugag

SEQ ID NO: 1241706 - RNA, 19 nt, Artificial Sequence
  Description of Artificial Sequence: Synthetic oligonucleotide
cuggagacaauucuguggg

SEQ ID NO: 1241707 - RNA, 19 nt, Artificial Sequence
  Description of Artificial Sequence: Synthetic oligonucleotide
uaauccuuuaggaaggcuc

SEQ ID NO: 1241708 - RNA, 19 nt, Artificial Sequence
  Description of Artificial Sequence: Synthetic oligonucleotide
aauccuuuaggaaggcucg

SEQ ID NO: 1241709 - RNA, 19 nt, Artificial Sequence
  Description of Artificial Sequence: Synthetic oligonucleotide
uggcauaccagccagggac

SEQ ID NO: 1241710 - RNA, 19 nt, Artificial Sequence
  Description of Artificial Sequence: Synthetic oligonucleotide
ucauguacccgcaaacuca

SEQ ID NO: 1241711 - RNA, 19 nt, Artificial Sequence
  Description of Artificial Sequence: Synthetic oligonucleotide
aauucugugggucccugug

SEQ ID NO: 1241712 - RNA, 19 nt, Artificial Sequence
  Description of Artificial Sequence: Synthetic oligonucleotide
aaacgccaagguuuugugg

SEQ ID NO: 1241713 - RNA, 19 nt, Artificial Sequence
  Description of Artificial Sequence: Synthetic oligonucleotide
agcuguuaucaccucaugg

SEQ ID NO: 1241714 - RNA, 19 nt, Artificial Sequence
  Description of Artificial Sequence: Synthetic oligonucleotide
cagaaaacaaucagggaac

SEQ ID NO: 1241715 - RNA, 19 nt, Artificial Sequence
  Description of Artificial Sequence: Synthetic oligonucleotide
uuuugugguagucaacggu

SEQ ID NO: 1241716 - RNA, 19 nt, Artificial Sequence
  Description of Artificial Sequence: Synthetic oligonucleotide
uguaaacccagacuuccug

SEQ ID NO: 1241717 - RNA, 19 nt, Artificial Sequence
  Description of Artificial Sequence: Synthetic oligonucleotide
aauaugaguggcauaccag

SEQ ID NO: 1241718 - RNA, 19 nt, Artificial Sequence
  Description of Artificial Sequence: Synthetic oligonucleotide
gauaacagucucauguacc

SEQ ID NO: 1241719 - RNA, 19 nt, Artificial Sequence
  Description of Artificial Sequence: Synthetic oligonucleotide
ugagccagcguucaauaug

SEQ ID NO: 1241720 - RNA, 19 nt, Artificial Sequence
  Description of Artificial Sequence: Synthetic oligonucleotide
cauuucuggaccuacucug

SEQ ID NO: 1241721 - RNA, 19 nt, Artificial Sequence
  Description of Artificial Sequence: Synthetic oligonucleotide
gagaccuuuggguacagac

SEQ ID NO: 1241722 - RNA, 19 nt, Artificial Sequence
  Description of Artificial Sequence: Synthetic oligonucleotide
caggcaacgguucuggagg

SEQ ID NO: 1241723 - RNA, 19 nt, Artificial Sequence
  Description of Artificial Sequence: Synthetic oligonucleotide
cauguuguggucccgguag

SEQ ID NO: 1241724 - RNA, 19 nt, Artificial Sequence
  Description of Artificial Sequence: Synthetic oligonucleotide
gagacaauucugugggucc

SEQ ID NO: 1241725 - RNA, 19 nt, Artificial Sequence
  Description of Artificial Sequence: Synthetic oligonucleotide
uuguuaaaaggggacagga

SEQ ID NO: 1241726 - RNA, 19 nt, Artificial Sequence
  Description of Artificial Sequence: Synthetic oligonucleotide
acagaacccaagcagaaaa

SEQ ID NO: 1241727 - RNA, 19 nt, Artificial Sequence
  Description of Artificial Sequence: Synthetic oligonucleotide
agaguuggucuuccuuucc

SEQ ID NO: 1241728 - RNA, 19 nt, Artificial Sequence
  Description of Artificial Sequence: Synthetic oligonucleotide
agcuccaagaccccaauga

SEQ ID NO: 1241729 - RNA, 19 nt, Artificial Sequence
  Description of Artificial Sequence: Synthetic oligonucleotide
aaacaugaugugacauggc

SEQ ID NO: 1241730 - RNA, 19 nt, Artificial Sequence
  Description of Artificial Sequence: Synthetic oligonucleotide
uguccaucacuuuggcagg

SEQ ID NO: 1241731 - RNA, 19 nt, Artificial Sequence
  Description of Artificial Sequence: Synthetic oligonucleotide
auuguuaaaaggggacagg

SEQ ID NO: 1241732 - RNA, 19 nt, Artificial Sequence
  Description of Artificial Sequence: Synthetic oligonucleotide
aggcccuuaccucucaggg

SEQ ID NO: 1241733 - RNA, 19 nt, Artificial Sequence
  Description of Artificial Sequence: Synthetic oligonucleotide
caagaccccaaugagaaac

SEQ ID NO: 1241734 - RNA, 19 nt, Artificial Sequence
  Description of Artificial Sequence: Synthetic oligonucleotide
uguuaaaaggggacaggaa

SEQ ID NO: 1241735 - RNA, 19 nt, Artificial Sequence
  Description of Artificial Sequence: Synthetic oligonucleotide
uguucgaagcaguuugcca

SEQ ID NO: 1241736 - RNA, 19 nt, Artificial Sequence
  Description of Artificial Sequence: Synthetic oligonucleotide
gcagaaaacaaucagggaa

SEQ ID NO: 1241737 - RNA, 19 nt, Artificial Sequence
  Description of Artificial Sequence: Synthetic oligonucleotide
ugggacuacugucucagcu

SEQ ID NO: 1241738 - RNA, 19 nt, Artificial Sequence
  Description of Artificial Sequence: Synthetic oligonucleotide
acuacugucucagcugugg

SEQ ID NO: 1241739 - RNA, 19 nt, Artificial Sequence
  Description of Artificial Sequence: Synthetic oligonucleotide
aaccuagcaccaugugagg

SEQ ID NO: 1241740 - RNA, 19 nt, Artificial Sequence
  Description of Artificial Sequence: Synthetic oligonucleotide
uacuuuagggccacugggu

SEQ ID NO: 1241741 - RNA, 19 nt, Artificial Sequence
  Description of Artificial Sequence: Synthetic oligonucleotide
aucgugggcucgcuggugc

SEQ ID NO: 1241742 - RNA, 19 nt, Artificial Sequence
  Description of Artificial Sequence: Synthetic oligonucleotide
ugguagucaacgguacugg

SEQ ID NO: 1241743 - RNA, 19 nt, Artificial Sequence
  Description of Artificial Sequence: Synthetic oligonucleotide
cacguacagagaaaagaag

SEQ ID NO: 1241744 - RNA, 19 nt, Artificial Sequence
  Description of Artificial Sequence: Synthetic oligonucleotide
acguacagagaaaagaaga

SEQ ID NO: 1241745 - RNA, 19 nt, Artificial Sequence
  Description of Artificial Sequence: Synthetic oligonucleotide
uggguugggacuacugucu

SEQ ID NO: 1241746 - RNA, 19 nt, Artificial Sequence
  Description of Artificial Sequence: Synthetic oligonucleotide
ggaagguguacuuuagggc

SEQ ID NO: 1241747 - RNA, 19 nt, Artificial Sequence
  Description of Artificial Sequence: Synthetic oligonucleotide
gacuagcucagaaugaaga

SEQ ID NO: 1241748 - RNA, 19 nt, Artificial Sequence
  Description of Artificial Sequence: Synthetic oligonucleotide
acuggcgaaugcuaaccuc

SEQ ID NO: 1241749 - RNA, 19 nt, Artificial Sequence
  Description of Artificial Sequence: Synthetic oligonucleotide
aguaagcucggucggccgg

SEQ ID NO: 1241750 - RNA, 19 nt, Artificial Sequence
  Description of Artificial Sequence: Synthetic oligonucleotide
agcguucaauaugaguggc

SEQ ID NO: 1241751 - RNA, 19 nt, Artificial Sequence
  Description of Artificial Sequence: Synthetic oligonucleotide
uguggcccaaaacaaccca

SEQ ID NO: 1241752 - RNA, 19 nt, Artificial Sequence
  Description of Artificial Sequence: Synthetic oligonucleotide
cagcguucaauaugagugg

SEQ ID NO: 1241753 - RNA, 19 nt, Artificial Sequence
  Description of Artificial Sequence: Synthetic oligonucleotide
agacaauucuguggguccc

SEQ ID NO: 1241754 - RNA, 19 nt, Artificial Sequence
  Description of Artificial Sequence: Synthetic oligonucleotide
uggcauggaaggcacugag

SEQ ID NO: 1241755 - RNA, 19 nt, Artificial Sequence
  Description of Artificial Sequence: Synthetic oligonucleotide
ugagacaguucugaacuug

SEQ ID NO: 1241756 - RNA, 19 nt, Artificial Sequence
  Description of Artificial Sequence: Synthetic oligonucleotide
ucauggaagguguacuuua

SEQ ID NO: 1241757 - RNA, 19 nt, Artificial Sequence
  Description of Artificial Sequence: Synthetic oligonucleotide
aacaggguagcugcccgcg

SEQ ID NO: 1241758 - RNA, 19 nt, Artificial Sequence
  Description of Artificial Sequence: Synthetic oligonucleotide
uguacccgcaaacucacuu

SEQ ID NO: 1241759 - RNA, 19 nt, Artificial Sequence
  Description of Artificial Sequence: Synthetic oligonucleotide
uggcucuacacaccaaaac

SEQ ID NO: 1241760 - RNA, 19 nt, Artificial Sequence
  Description of Artificial Sequence: Synthetic oligonucleotide
guacugggaaagcacuggg

SEQ ID NO: 1241761 - RNA, 19 nt, Artificial Sequence
  Description of Artificial Sequence: Synthetic oligonucleotide
aacuggcgaaugcuaaccu

SEQ ID NO: 1241762 - RNA, 19 nt, Artificial Sequence
  Description of Artificial Sequence: Synthetic oligonucleotide
acaugaugugacauggcuc

SEQ ID NO: 1241763 - RNA, 19 nt, Artificial Sequence
  Description of Artificial Sequence: Synthetic oligonucleotide
gaagcagggaaaggcaacc

SEQ ID NO: 1241764 - RNA, 19 nt, Artificial Sequence
  Description of Artificial Sequence: Synthetic oligonucleotide
acccaagcagaaaacaauc

SEQ ID NO: 1241765 - RNA, 19 nt, Artificial Sequence
  Description of Artificial Sequence: Synthetic oligonucleotide
ucaaacgccaagguuuugu

SEQ ID NO: 1241766 - RNA, 19 nt, Artificial Sequence
  Description of Artificial Sequence: Synthetic oligonucleotide
guacuggucaccccgagga

SEQ ID NO: 1241767 - RNA, 19 nt, Artificial Sequence
  Description of Artificial Sequence: Synthetic oligonucleotide
ccaggaguaagcucggucg

SEQ ID NO: 1241768 - RNA, 19 nt, Artificial Sequence
  Description of Artificial Sequence: Synthetic oligonucleotide
guugggacuacugucucag

SEQ ID NO: 1241769 - RNA, 19 nt, Artificial Sequence
  Description of Artificial Sequence: Synthetic oligonucleotide
gugguuuguccccaugucc

SEQ ID NO: 1241770 - RNA, 19 nt, Artificial Sequence
  Description of Artificial Sequence: Synthetic oligonucleotide
acacaccaaaaccacacau

SEQ ID NO: 1241771 - RNA, 19 nt, Artificial Sequence
  Description of Artificial Sequence: Synthetic oligonucleotide
caauaugaguggcauacca

SEQ ID NO: 1241772 - RNA, 19 nt, Artificial Sequence
  Description of Artificial Sequence: Synthetic oligonucleotide
augugacauggcucuacac

SEQ ID NO: 1241773 - RNA, 19 nt, Artificial Sequence
  Description of Artificial Sequence: Synthetic oligonucleotide
ucuugguacugcuuccaac

SEQ ID NO: 1241774 - RNA, 19 nt, Artificial Sequence
  Description of Artificial Sequence: Synthetic oligonucleotide
agcagaaaacaaucaggga

SEQ ID NO: 1241775 - RNA, 19 nt, Artificial Sequence
  Description of Artificial Sequence: Synthetic oligonucleotide
cauguacccgcaaacucac

SEQ ID NO: 1241776 - RNA, 19 nt, Artificial Sequence
  Description of Artificial Sequence: Synthetic oligonucleotide
ggucacuucacauuguuaa

SEQ ID NO: 1241777 - RNA, 19 nt, Artificial Sequence
  Description of Artificial Sequence: Synthetic oligonucleotide
agcaggaaagguggugugc

SEQ ID NO: 1241778 - RNA, 19 nt, Artificial Sequence
  Description of Artificial Sequence: Synthetic oligonucleotide
uugugguagucaacgguac

SEQ ID NO: 1241779 - RNA, 19 nt, Artificial Sequence
  Description of Artificial Sequence: Synthetic oligonucleotide
cucauguacccgcaaacuc

SEQ ID NO: 1241780 - RNA, 19 nt, Artificial Sequence
  Description of Artificial Sequence: Synthetic oligonucleotide
uaacagucucauguacccg

SEQ ID NO: 1241781 - RNA, 19 nt, Artificial Sequence
  Description of Artificial Sequence: Synthetic oligonucleotide
aacccaagcagaaaacaau

SEQ ID NO: 1241782 - RNA, 19 nt, Artificial Sequence
  Description of Artificial Sequence: Synthetic oligonucleotide
gcuguuaucaccucaugga

SEQ ID NO: 1241783 - RNA, 19 nt, Artificial Sequence
  Description of Artificial Sequence: Synthetic oligonucleotide
gacuggagacaauucugug

SEQ ID NO: 1241784 - RNA, 19 nt, Artificial Sequence
  Description of Artificial Sequence: Synthetic oligonucleotide
gggaaagacaggaaccugg

SEQ ID NO: 1241785 - RNA, 19 nt, Artificial Sequence
  Description of Artificial Sequence: Synthetic oligonucleotide
gauauuuccgucccuugcu

SEQ ID NO: 1241786 - RNA, 19 nt, Artificial Sequence
  Description of Artificial Sequence: Synthetic oligonucleotide
uggauauuuccgucccuug

SEQ ID NO: 1241787 - RNA, 19 nt, Artificial Sequence
  Description of Artificial Sequence: Synthetic oligonucleotide
cuuuggguacagacaagac

SEQ ID NO: 1241788 - RNA, 19 nt, Artificial Sequence
  Description of Artificial Sequence: Synthetic oligonucleotide
aggaaagguggugugcagg

SEQ ID NO: 1241789 - RNA, 19 nt, Artificial Sequence
  Description of Artificial Sequence: Synthetic oligonucleotide
agugugguacugggaaagc

SEQ ID NO: 1241790 - RNA, 19 nt, Artificial Sequence
  Description of Artificial Sequence: Synthetic oligonucleotide
caaacuggcgaaugcuaac

SEQ ID NO: 1241791 - RNA, 19 nt, Artificial Sequence
  Description of Artificial Sequence: Synthetic oligonucleotide
auaccagccagggaccagg

SEQ ID NO: 1241792 - RNA, 19 nt, Artificial Sequence
  Description of Artificial Sequence: Synthetic oligonucleotide
agaacucaaggagagacua

SEQ ID NO: 1241793 - RNA, 19 nt, Artificial Sequence
  Description of Artificial Sequence: Synthetic oligonucleotide
ccaagcagaaaacaaucag

SEQ ID NO: 1241794 - RNA, 19 nt, Artificial Sequence
  Description of Artificial Sequence: Synthetic oligonucleotide
gaugugacauggcucuaca

SEQ ID NO: 1241795 - RNA, 19 nt, Artificial Sequence
  Description of Artificial Sequence: Synthetic oligonucleotide
gguaguaauccuuuaggaa

SEQ ID NO: 1241796 - RNA, 19 nt, Artificial Sequence
  Description of Artificial Sequence: Synthetic oligonucleotide
caaacgccaagguuuugug

SEQ ID NO: 1241797 - RNA, 19 nt, Artificial Sequence
  Description of Artificial Sequence: Synthetic oligonucleotide
ucaauaugaguggcauacc

SEQ ID NO: 1241798 - RNA, 19 nt, Artificial Sequence
  Description of Artificial Sequence: Synthetic oligonucleotide
acacguacagagaaaagaa

SEQ ID NO: 1241799 - RNA, 19 nt, Artificial Sequence
  Description of Artificial Sequence: Synthetic oligonucleotide
caggaguaagcucggucgg

SEQ ID NO: 1241800 - RNA, 19 nt, Artificial Sequence
  Description of Artificial Sequence: Synthetic oligonucleotide
gaaaggcaacccaaccuug

SEQ ID NO: 1241801 - RNA, 19 nt, Artificial Sequence
  Description of Artificial Sequence: Synthetic oligonucleotide
gucucauguacccgcaaac

SEQ ID NO: 1241802 - RNA, 19 nt, Artificial Sequence
  Description of Artificial Sequence: Synthetic oligonucleotide
gagaguuggucuuccuuuc

SEQ ID NO: 1241803 - RNA, 19 nt, Artificial Sequence
  Description of Artificial Sequence: Synthetic oligonucleotide
cagaacccaagcagaaaac

SEQ ID NO: 1241804 - RNA, 19 nt, Artificial Sequence
  Description of Artificial Sequence: Synthetic oligonucleotide
ugguuggcauggaaggcac

SEQ ID NO: 1241805 - RNA, 19 nt, Artificial Sequence
  Description of Artificial Sequence: Synthetic oligonucleotide
uguggucccgguaguaauc

SEQ ID NO: 1241806 - RNA, 19 nt, Artificial Sequence
  Description of Artificial Sequence: Synthetic oligonucleotide
acauugaccaaggccacca

SEQ ID NO: 1241807 - RNA, 19 nt, Artificial Sequence
  Description of Artificial Sequence: Synthetic oligonucleotide
guggccugaauuuagcucu

SEQ ID NO: 1241808 - RNA, 19 nt, Artificial Sequence
  Description of Artificial Sequence: Synthetic oligonucleotide
cuguggcccaaaacaaccc

SEQ ID NO: 1241809 - RNA, 19 nt, Artificial Sequence
  Description of Artificial Sequence: Synthetic oligonucleotide
gugguagucaacgguacug

SEQ ID NO: 1241810 - RNA, 19 nt, Artificial Sequence
  Description of Artificial Sequence: Synthetic oligonucleotide
uaguggguugggacuacug

SEQ ID NO: 1241811 - RNA, 19 nt, Artificial Sequence
  Description of Artificial Sequence: Synthetic oligonucleotide
gacccuuccaagcccagga

SEQ ID NO: 1241812 - RNA, 19 nt, Artificial Sequence
  Description of Artificial Sequence: Synthetic oligonucleotide
ccaucucuggauauuuccg

SEQ ID NO: 1241813 - RNA, 19 nt, Artificial Sequence
  Description of Artificial Sequence: Synthetic oligonucleotide
uaccucucagggcaacaca

SEQ ID NO: 1241814 - RNA, 19 nt, Artificial Sequence
  Description of Artificial Sequence: Synthetic oligonucleotide
guagcugcccgcguggugc

SEQ ID NO: 1241815 - RNA, 19 nt, Artificial Sequence
  Description of Artificial Sequence: Synthetic oligonucleotide
agucaacgguacuggucac

SEQ ID NO: 1241816 - RNA, 19 nt, Artificial Sequence
  Description of Artificial Sequence: Synthetic oligonucleotide
cacgcagcuuugaggaugc

SEQ ID NO: 1241817 - RNA, 19 nt, Artificial Sequence
  Description of Artificial Sequence: Synthetic oligonucleotide
cacaagggauaacagucuc

SEQ ID NO: 1241818 - RNA, 19 nt, Artificial Sequence
  Description of Artificial Sequence: Synthetic oligonucleotide
ugagggauuuuggccuugg

SEQ ID NO: 1241819 - RNA, 19 nt, Artificial Sequence
  Description of Artificial Sequence: Synthetic oligonucleotide
uuuagggccacugggucau

SEQ ID NO: 1241820 - RNA, 19 nt, Artificial Sequence
  Description of Artificial Sequence: Synthetic oligonucleotide
aacaaucagggaaccugug

SEQ ID NO: 1241821 - RNA, 19 nt, Artificial Sequence
  Description of Artificial Sequence: Synthetic oligonucleotide
cucggaggcagugugguac

SEQ ID NO: 1241822 - RNA, 19 nt, Artificial Sequence
  Description of Artificial Sequence: Synthetic oligonucleotide
gaacucaaggagagacuag

SEQ ID NO: 1241823 - RNA, 19 nt, Artificial Sequence
  Description of Artificial Sequence: Synthetic oligonucleotide
gagccagcguucaauauga

SEQ ID NO: 1241824 - RNA, 19 nt, Artificial Sequence
  Description of Artificial Sequence: Synthetic oligonucleotide
gggaaagagugguuugucc

SEQ ID NO: 1241825 - RNA, 19 nt, Artificial Sequence
  Description of Artificial Sequence: Synthetic oligonucleotide
ggcucgggaauccaagucc

SEQ ID NO: 1241826 - RNA, 19 nt, Artificial Sequence
  Description of Artificial Sequence: Synthetic oligonucleotide
ccgguaguaauccuuuagg

SEQ ID NO: 1241827 - RNA, 19 nt, Artificial Sequence
  Description of Artificial Sequence: Synthetic oligonucleotide
ggcaacccaaccuugguca

SEQ ID NO: 1241828 - RNA, 19 nt, Artificial Sequence
  Description of Artificial Sequence: Synthetic oligonucleotide
cagugugguacugggaaag

SEQ ID NO: 1241829 - RNA, 19 nt, Artificial Sequence
  Description of Artificial Sequence: Synthetic oligonucleotide
ugaugugacauggcucuac

SEQ ID NO: 1241830 - RNA, 19 nt, Artificial Sequence
  Description of Artificial Sequence: Synthetic oligonucleotide
ugcuaaccuccuucagucc

SEQ ID NO: 1241831 - RNA, 19 nt, Artificial Sequence
  Description of Artificial Sequence: Synthetic oligonucleotide
agucucauguacccgcaaa

SEQ ID NO: 1241832 - RNA, 19 nt, Artificial Sequence
  Description of Artificial Sequence: Synthetic oligonucleotide
gcuguuaguggguugggac

SEQ ID NO: 1241833 - RNA, 19 nt, Artificial Sequence
  Description of Artificial Sequence: Synthetic oligonucleotide
ugaccaaggccaccaucca

SEQ ID NO: 1241834 - RNA, 19 nt, Artificial Sequence
  Description of Artificial Sequence: Synthetic oligonucleotide
aagguguacuuuagggcca

SEQ ID NO: 1241835 - RNA, 19 nt, Artificial Sequence
  Description of Artificial Sequence: Synthetic oligonucleotide
uacccgcaaacucacuuua

SEQ ID NO: 1241836 - RNA, 19 nt, Artificial Sequence
  Description of Artificial Sequence: Synthetic oligonucleotide
ugugccugucuugggaccc

SEQ ID NO: 1241837 - RNA, 19 nt, Artificial Sequence
  Description of Artificial Sequence: Synthetic oligonucleotide
gauaaagguggcuggcacu

SEQ ID NO: 1241838 - RNA, 19 nt, Artificial Sequence
  Description of Artificial Sequence: Synthetic oligonucleotide
gagacuagcucagaaugaa

SEQ ID NO: 1241839 - RNA, 19 nt, Artificial Sequence
  Description of Artificial Sequence: Synthetic oligonucleotide
uggcacucaccacccaaca

SEQ ID NO: 1241840 - RNA, 19 nt, Artificial Sequence
  Description of Artificial Sequence: Synthetic oligonucleotide
gagggcacgcagcuuugag

SEQ ID NO: 1241841 - RNA, 19 nt, Artificial Sequence
  Description of Artificial Sequence: Synthetic oligonucleotide
ugaacuugcucugcccacu

SEQ ID NO: 1241842 - RNA, 19 nt, Artificial Sequence
  Description of Artificial Sequence: Synthetic oligonucleotide
guucgaagcaguuugccau

SEQ ID NO: 1241843 - RNA, 19 nt, Artificial Sequence
  Description of Artificial Sequence: Synthetic oligonucleotide
acuaggcuuguaaacccag

SEQ ID NO: 1241844 - RNA, 19 nt, Artificial Sequence
  Description of Artificial Sequence: Synthetic oligonucleotide
auguccuggaaugaccaca

SEQ ID NO: 1241845 - RNA, 19 nt, Artificial Sequence
  Description of Artificial Sequence: Synthetic oligonucleotide
cagggaaaggcaacccaac

SEQ ID NO: 1241846 - RNA, 19 nt, Artificial Sequence
  Description of Artificial Sequence: Synthetic oligonucleotide
uuuugcccagacacuuggu

SEQ ID NO: 1241847 - RNA, 19 nt, Artificial Sequence
  Description of Artificial Sequence: Synthetic oligonucleotide
ugcccagacacuugguuuu

SEQ ID NO: 1241848 - RNA, 19 nt, Artificial Sequence
  Description of Artificial Sequence: Synthetic oligonucleotide
cugaacuugcucugcccac

SEQ ID NO: 1241849 - RNA, 19 nt, Artificial Sequence
  Description of Artificial Sequence: Synthetic oligonucleotide
aagaccccaaugagaaaca

SEQ ID NO: 1241850 - RNA, 19 nt, Artificial Sequence
  Description of Artificial Sequence: Synthetic oligonucleotide
agagacuagcucagaauga

SEQ ID NO: 1241851 - RNA, 19 nt, Artificial Sequence
  Description of Artificial Sequence: Synthetic oligonucleotide
ugcccacugacauggcugu

SEQ ID NO: 1241852 - RNA, 19 nt, Artificial Sequence
  Description of Artificial Sequence: Synthetic oligonucleotide
auauuuccgucccuugcuu

SEQ ID NO: 1241853 - RNA, 19 nt, Artificial Sequence
  Description of Artificial Sequence: Synthetic oligonucleotide
acugagccagcguucaaua

SEQ ID NO: 1241854 - RNA, 19 nt, Artificial Sequence
  Description of Artificial Sequence: Synthetic oligonucleotide
aagcaguuugccauccaaa

SEQ ID NO: 1241855 - RNA, 19 nt, Artificial Sequence
  Description of Artificial Sequence: Synthetic oligonucleotide
auacacguacagagaaaag

SEQ ID NO: 1241856 - RNA, 19 nt, Artificial Sequence
  Description of Artificial Sequence: Synthetic oligonucleotide
ucgaagcaguuugccaucc

SEQ ID NO: 1241857 - RNA, 19 nt, Artificial Sequence
  Description of Artificial Sequence: Synthetic oligonucleotide
guagucaacgguacugguc

SEQ ID NO: 1241858 - RNA, 19 nt, Artificial Sequence
  Description of Artificial Sequence: Synthetic oligonucleotide
uggucacuucacauuguua

SEQ ID NO: 1241859 - RNA, 19 nt, Artificial Sequence
  Description of Artificial Sequence: Synthetic oligonucleotide
gauuuuggccuugggcaac

SEQ ID NO: 1241860 - RNA, 19 nt, Artificial Sequence
  Description of Artificial Sequence: Synthetic oligonucleotide
cuuuagggccacuggguca

SEQ ID NO: 1241861 - RNA, 19 nt, Artificial Sequence
  Description of Artificial Sequence: Synthetic oligonucleotide
accucauggaagguguacu

SEQ ID NO: 1241862 - RNA, 19 nt, Artificial Sequence
  Description of Artificial Sequence: Synthetic oligonucleotide
agagugguuuguccccaug

SEQ ID NO: 1241863 - RNA, 19 nt, Artificial Sequence
  Description of Artificial Sequence: Synthetic oligonucleotide
uauuuccgucccuugcuuu

SEQ ID NO: 1241864 - RNA, 19 nt, Artificial Sequence
  Description of Artificial Sequence: Synthetic oligonucleotide
gaaggcccuuaccucucag

SEQ ID NO: 1241865 - RNA, 19 nt, Artificial Sequence
  Description of Artificial Sequence: Synthetic oligonucleotide
aacccaaccuuggucacuu

SEQ ID NO: 1241866 - RNA, 19 nt, Artificial Sequence
  Description of Artificial Sequence: Synthetic oligonucleotide
cuggcagaaggcccuuacc

SEQ ID NO: 1241867 - RNA, 19 nt, Artificial Sequence
  Description of Artificial Sequence: Synthetic oligonucleotide
agcauccaacgcucuccac

SEQ ID NO: 1241868 - RNA, 19 nt, Artificial Sequence
  Description of Artificial Sequence: Synthetic oligonucleotide
agacuagcucagaaugaag

SEQ ID NO: 1241869 - RNA, 19 nt, Artificial Sequence
  Description of Artificial Sequence: Synthetic oligonucleotide
agguguacuuuagggccac

SEQ ID NO: 1241870 - RNA, 19 nt, Artificial Sequence
  Description of Artificial Sequence: Synthetic oligonucleotide
caccacccaacacuggcug

SEQ ID NO: 1241871 - RNA, 19 nt, Artificial Sequence
  Description of Artificial Sequence: Synthetic oligonucleotide
agcuuugaggaugcaucag

SEQ ID NO: 1241872 - RNA, 19 nt, Artificial Sequence
  Description of Artificial Sequence: Synthetic oligonucleotide
cugugccugucuugggacc

SEQ ID NO: 1241873 - RNA, 19 nt, Artificial Sequence
  Description of Artificial Sequence: Synthetic oligonucleotide
cuacucugugccugucuug

SEQ ID NO: 1241874 - RNA, 19 nt, Artificial Sequence
  Description of Artificial Sequence: Synthetic oligonucleotide
gcgaaugcuaaccuccuuc

SEQ ID NO: 1241875 - RNA, 19 nt, Artificial Sequence
  Description of Artificial Sequence: Synthetic oligonucleotide
auccuuuaggaaggcucgg

SEQ ID NO: 1241876 - RNA, 19 nt, Artificial Sequence
  Description of Artificial Sequence: Synthetic oligonucleotide
acaagggauaacagucuca

SEQ ID NO: 1241877 - RNA, 19 nt, Artificial Sequence
  Description of Artificial Sequence: Synthetic oligonucleotide
gcagcuuugaggaugcauc

SEQ ID NO: 1241878 - RNA, 19 nt, Artificial Sequence
  Description of Artificial Sequence: Synthetic oligonucleotide
gcaacacaagggauaacag

SEQ ID NO: 1241879 - RNA, 19 nt, Artificial Sequence
  Description of Artificial Sequence: Synthetic oligonucleotide
gagugguuuguccccaugu

SEQ ID NO: 1241880 - RNA, 19 nt, Artificial Sequence
  Description of Artificial Sequence: Synthetic oligonucleotide
aagagugguuuguccccau

SEQ ID NO: 1241881 - RNA, 19 nt, Artificial Sequence
  Description of Artificial Sequence: Synthetic oligonucleotide
gucacuucacauuguuaaa

SEQ ID NO: 1241882 - RNA, 19 nt, Artificial Sequence
  Description of Artificial Sequence: Synthetic oligonucleotide
caacaggguagcugcccgc

SEQ ID NO: 1241883 - RNA, 19 nt, Artificial Sequence
  Description of Artificial Sequence: Synthetic oligonucleotide
gcccuuaccucucagggca

SEQ ID NO: 1241884 - RNA, 19 nt, Artificial Sequence
  Description of Artificial Sequence: Synthetic oligonucleotide
agggcaacacaagggauaa

SEQ ID NO: 1241885 - RNA, 19 nt, Artificial Sequence
  Description of Artificial Sequence: Synthetic oligonucleotide
guggucccgguaguaaucc

SEQ ID NO: 1241886 - RNA, 19 nt, Artificial Sequence
  Description of Artificial Sequence: Synthetic oligonucleotide
uuaucaccucauggaaggu

SEQ ID NO: 1241887 - RNA, 19 nt, Artificial Sequence
  Description of Artificial Sequence: Synthetic oligonucleotide
uccuuucuuugggucaaac

SEQ ID NO: 1241888 - RNA, 19 nt, Artificial Sequence
  Description of Artificial Sequence: Synthetic oligonucleotide
uggagacaauucugugggu

SEQ ID NO: 1241889 - RNA, 19 nt, Artificial Sequence
  Description of Artificial Sequence: Synthetic oligonucleotide
accuacucugugccugucu

SEQ ID NO: 1241890 - RNA, 19 nt, Artificial Sequence
  Description of Artificial Sequence: Synthetic oligonucleotide
cuaggcuuguaaacccaga

SEQ ID NO: 1241891 - RNA, 19 nt, Artificial Sequence
  Description of Artificial Sequence: Synthetic oligonucleotide
guaccaggaguaagcucgg

SEQ ID NO: 1241892 - RNA, 19 nt, Artificial Sequence
  Description of Artificial Sequence: Synthetic oligonucleotide
aguccagauaaagguggcu

SEQ ID NO: 1241893 - RNA, 19 nt, Artificial Sequence
  Description of Artificial Sequence: Synthetic oligonucleotide
caaccuuggucacuucaca

SEQ ID NO: 1241894 - RNA, 19 nt, Artificial Sequence
  Description of Artificial Sequence: Synthetic oligonucleotide
uugggacuacugucucagc

SEQ ID NO: 1241895 - RNA, 19 nt, Artificial Sequence
  Description of Artificial Sequence: Synthetic oligonucleotide
gaaaacaaucagggaaccu

SEQ ID NO: 1241896 - RNA, 19 nt, Artificial Sequence
  Description of Artificial Sequence: Synthetic oligonucleotide
ccaaccuuggucacuucac

SEQ ID NO: 1241897 - RNA, 19 nt, Artificial Sequence
  Description of Artificial Sequence: Synthetic oligonucleotide
cacuaggcuuguaaaccca

SEQ ID NO: 1241898 - RNA, 19 nt, Artificial Sequence
  Description of Artificial Sequence: Synthetic oligonucleotide
gucaacgguacuggucacc

SEQ ID NO: 1241899 - RNA, 19 nt, Artificial Sequence
  Description of Artificial Sequence: Synthetic oligonucleotide
ggccacuaggcuuguaaac

SEQ ID NO: 1241900 - RNA, 19 nt, Artificial Sequence
  Description of Artificial Sequence: Synthetic oligonucleotide
caacgguucuggagggcac

SEQ ID NO: 1241901 - RNA, 19 nt, Artificial Sequence
  Description of Artificial Sequence: Synthetic oligonucleotide
acuggucaccccgaggaau

SEQ ID NO: 1241902 - RNA, 19 nt, Artificial Sequence
  Description of Artificial Sequence: Synthetic oligonucleotide
caucucuggauauuuccgu

SEQ ID NO: 1241903 - RNA, 19 nt, Artificial Sequence
  Description of Artificial Sequence: Synthetic oligonucleotide
cagggcaacacaagggaua

SEQ ID NO: 1241904 - RNA, 19 nt, Artificial Sequence
  Description of Artificial Sequence: Synthetic oligonucleotide
ugugggucccugugggcau

SEQ ID NO: 1241905 - RNA, 19 nt, Artificial Sequence
  Description of Artificial Sequence: Synthetic oligonucleotide
ggaugaaugccagaagcaa

SEQ ID NO: 1241906 - RNA, 19 nt, Artificial Sequence
  Description of Artificial Sequence: Synthetic oligonucleotide
ugacugggaaagagugguu

SEQ ID NO: 1241907 - RNA, 19 nt, Artificial Sequence
  Description of Artificial Sequence: Synthetic oligonucleotide
cagacaagacagcagcugu

SEQ ID NO: 1241908 - RNA, 19 nt, Artificial Sequence
  Description of Artificial Sequence: Synthetic oligonucleotide
cagaaggcccuuaccucuc

SEQ ID NO: 1241909 - RNA, 19 nt, Artificial Sequence
  Description of Artificial Sequence: Synthetic oligonucleotide
gguggugugcaggucucgg

SEQ ID NO: 1241910 - RNA, 19 nt, Artificial Sequence
  Description of Artificial Sequence: Synthetic oligonucleotide
acauacacguacagagaaa

SEQ ID NO: 1241911 - RNA, 19 nt, Artificial Sequence
  Description of Artificial Sequence: Synthetic oligonucleotide
cccgguaguaauccuuuag

SEQ ID NO: 1241912 - RNA, 19 nt, Artificial Sequence
  Description of Artificial Sequence: Synthetic oligonucleotide
ugggucaucgugggcucgc

SEQ ID NO: 1241913 - RNA, 19 nt, Artificial Sequence
  Description of Artificial Sequence: Synthetic oligonucleotide
ucaccucauggaaggugua

SEQ ID NO: 1241914 - RNA, 19 nt, Artificial Sequence
  Description of Artificial Sequence: Synthetic oligonucleotide
ggaaagacaggaaccugga

SEQ ID NO: 1241915 - RNA, 19 nt, Artificial Sequence
  Description of Artificial Sequence: Synthetic oligonucleotide
caggucucggaaggggaag

SEQ ID NO: 1241916 - RNA, 19 nt, Artificial Sequence
  Description of Artificial Sequence: Synthetic oligonucleotide
cagcuguuaucaccucaug

SEQ ID NO: 1241917 - RNA, 19 nt, Artificial Sequence
  Description of Artificial Sequence: Synthetic oligonucleotide
gggauaacagucucaugua

SEQ ID NO: 1241918 - RNA, 19 nt, Artificial Sequence
  Description of Artificial Sequence: Synthetic oligonucleotide
gccagaagcaagagaacac

SEQ ID NO: 1241919 - RNA, 19 nt, Artificial Sequence
  Description of Artificial Sequence: Synthetic oligonucleotide
uguuguggucccgguagua

SEQ ID NO: 1241920 - RNA, 19 nt, Artificial Sequence
  Description of Artificial Sequence: Synthetic oligonucleotide
guuguggucccgguaguaa

SEQ ID NO: 1241921 - RNA, 19 nt, Artificial Sequence
  Description of Artificial Sequence: Synthetic oligonucleotide
ggaaagguggugugcaggu

SEQ ID NO: 1241922 - RNA, 19 nt, Artificial Sequence
  Description of Artificial Sequence: Synthetic oligonucleotide
agguucuguucgaagcagu

SEQ ID NO: 1241923 - RNA, 19 nt, Artificial Sequence
  Description of Artificial Sequence: Synthetic oligonucleotide
ggcccuuaccucucagggc

SEQ ID NO: 1241924 - RNA, 19 nt, Artificial Sequence
  Description of Artificial Sequence: Synthetic oligonucleotide
gacuacugucucagcugug

SEQ ID NO: 1241925 - RNA, 19 nt, Artificial Sequence
  Description of Artificial Sequence: Synthetic oligonucleotide
cauaccagccagggaccag

SEQ ID NO: 1241926 - RNA, 19 nt, Artificial Sequence
  Description of Artificial Sequence: Synthetic oligonucleotide
uggucccgguaguaauccu

SEQ ID NO: 1241927 - RNA, 19 nt, Artificial Sequence
  Description of Artificial Sequence: Synthetic oligonucleotide
ggcacucaccacccaacac

SEQ ID NO: 1241928 - RNA, 19 nt, Artificial Sequence
  Description of Artificial Sequence: Synthetic oligonucleotide
gcaggaaagguggugugca

SEQ ID NO: 1241929 - RNA, 19 nt, Artificial Sequence
  Description of Artificial Sequence: Synthetic oligonucleotide
agacaagacagcagcuguu

SEQ ID NO: 1241930 - RNA, 19 nt, Artificial Sequence
  Description of Artificial Sequence: Synthetic oligonucleotide
uagcugcccgcguggugcc

SEQ ID NO: 1241931 - RNA, 19 nt, Artificial Sequence
  Description of Artificial Sequence: Synthetic oligonucleotide
ggcaacaggguagcugccc

SEQ ID NO: 1241932 - RNA, 19 nt, Artificial Sequence
  Description of Artificial Sequence: Synthetic oligonucleotide
gggucaaacgccaagguuu

SEQ ID NO: 1241933 - RNA, 19 nt, Artificial Sequence
  Description of Artificial Sequence: Synthetic oligonucleotide
guuaguggguugggacuac

SEQ ID NO: 1241934 - RNA, 19 nt, Artificial Sequence
  Description of Artificial Sequence: Synthetic oligonucleotide
ggacuacugucucagcugu

SEQ ID NO: 1241935 - RNA, 19 nt, Artificial Sequence
  Description of Artificial Sequence: Synthetic oligonucleotide
ccuuuggguacagacaaga

SEQ ID NO: 1241936 - RNA, 19 nt, Artificial Sequence
  Description of Artificial Sequence: Synthetic oligonucleotide
cacugggucaucgugggcu

SEQ ID NO: 1241937 - RNA, 19 nt, Artificial Sequence
  Description of Artificial Sequence: Synthetic oligonucleotide
ucccgguaguaauccuuua

SEQ ID NO: 1241938 - RNA, 19 nt, Artificial Sequence
  Description of Artificial Sequence: Synthetic oligonucleotide
accaggcaacgguucugga

SEQ ID NO: 1241939 - RNA, 19 nt, Artificial Sequence
  Description of Artificial Sequence: Synthetic oligonucleotide
acgccaagguuuuguggua

SEQ ID NO: 1241940 - RNA, 19 nt, Artificial Sequence
  Description of Artificial Sequence: Synthetic oligonucleotide
guggcauaccagccaggga

SEQ ID NO: 1241941 - RNA, 19 nt, Artificial Sequence
  Description of Artificial Sequence: Synthetic oligonucleotide
acccaaccuuggucacuuc

SEQ ID NO: 1241942 - RNA, 19 nt, Artificial Sequence
  Description of Artificial Sequence: Synthetic oligonucleotide
gguugggacuacugucuca

SEQ ID NO: 1241943 - RNA, 19 nt, Artificial Sequence
  Description of Artificial Sequence: Synthetic oligonucleotide
guaagcucggucggccgga

SEQ ID NO: 1241944 - RNA, 19 nt, Artificial Sequence
  Description of Artificial Sequence: Synthetic oligonucleotide
cucuugguacugcuuccaa

SEQ ID NO: 1241945 - RNA, 19 nt, Artificial Sequence
  Description of Artificial Sequence: Synthetic oligonucleotide
ccgcaaacucacuuuaaaa

SEQ ID NO: 1241946 - RNA, 19 nt, Artificial Sequence
  Description of Artificial Sequence: Synthetic oligonucleotide
ucccuugcuuuugcccaga

SEQ ID NO: 1241947 - RNA, 19 nt, Artificial Sequence
  Description of Artificial Sequence: Synthetic oligonucleotide
cacaugcagguuccccuga

SEQ ID NO: 1241948 - RNA, 19 nt, Artificial Sequence
  Description of Artificial Sequence: Synthetic oligonucleotide
guacccgcaaacucacuuu

SEQ ID NO: 1241949 - RNA, 19 nt, Artificial Sequence
  Description of Artificial Sequence: Synthetic oligonucleotide
gguagcugcccgcguggug

SEQ ID NO: 1241950 - RNA, 19 nt, Artificial Sequence
  Description of Artificial Sequence: Synthetic oligonucleotide
caguggccugaauuuagcu

SEQ ID NO: 1241951 - RNA, 19 nt, Artificial Sequence
  Description of Artificial Sequence: Synthetic oligonucleotide
gacaauucugugggucccu

SEQ ID NO: 1241952 - RNA, 19 nt, Artificial Sequence
  Description of Artificial Sequence: Synthetic oligonucleotide
gucaccccgaggaauuucu

SEQ ID NO: 1241953 - RNA, 19 nt, Artificial Sequence
  Description of Artificial Sequence: Synthetic oligonucleotide
aguuggcaccaaaauccuu

SEQ ID NO: 1241954 - RNA, 19 nt, Artificial Sequence
  Description of Artificial Sequence: Synthetic oligonucleotide
gguagucaacgguacuggu

SEQ ID NO: 1241955 - RNA, 19 nt, Artificial Sequence
  Description of Artificial Sequence: Synthetic oligonucleotide
gugagggauuuuggccuug

SEQ ID NO: 1241956 - RNA, 19 nt, Artificial Sequence
  Description of Artificial Sequence: Synthetic oligonucleotide
gguggcuggcacucaccac

SEQ ID NO: 1241957 - RNA, 19 nt, Artificial Sequence
  Description of Artificial Sequence: Synthetic oligonucleotide
ggguugggacuacugucuc

SEQ ID NO: 1241958 - RNA, 19 nt, Artificial Sequence
  Description of Artificial Sequence: Synthetic oligonucleotide
caucgugggcucgcuggug

SEQ ID NO: 1241959 - RNA, 19 nt, Artificial Sequence
  Description of Artificial Sequence: Synthetic oligonucleotide
ccacacaugcagguucccc

SEQ ID NO: 1241960 - RNA, 19 nt, Artificial Sequence
  Description of Artificial Sequence: Synthetic oligonucleotide
gggugauccacaagcucca

SEQ ID NO: 1241961 - RNA, 19 nt, Artificial Sequence
  Description of Artificial Sequence: Synthetic oligonucleotide
gccagcguucaauaugagu

SEQ ID NO: 1241962 - RNA, 19 nt, Artificial Sequence
  Description of Artificial Sequence: Synthetic oligonucleotide
cgucccuugcuuuugccca

SEQ ID NO: 1241963 - RNA, 19 nt, Artificial Sequence
  Description of Artificial Sequence: Synthetic oligonucleotide
cccaaccuuggucacuuca

SEQ ID NO: 1241964 - RNA, 19 nt, Artificial Sequence
  Description of Artificial Sequence: Synthetic oligonucleotide
acgguacuggucaccccga

SEQ ID NO: 1241965 - RNA, 19 nt, Artificial Sequence
  Description of Artificial Sequence: Synthetic oligonucleotide
ccaaguccaucucuggaua

SEQ ID NO: 1241966 - RNA, 19 nt, Artificial Sequence
  Description of Artificial Sequence: Synthetic oligonucleotide
gcucggucggccggauugg

SEQ ID NO: 1241967 - RNA, 19 nt, Artificial Sequence
  Description of Artificial Sequence: Synthetic oligonucleotide
cuggucaccccgaggaauu

SEQ ID NO: 1241968 - RNA, 19 nt, Artificial Sequence
  Description of Artificial Sequence: Synthetic oligonucleotide
gaccuacucugugccuguc

SEQ ID NO: 1241969 - RNA, 19 nt, Artificial Sequence
  Description of Artificial Sequence: Synthetic oligonucleotide
ccaacgcucuccacaacaa

SEQ ID NO: 1241970 - RNA, 19 nt, Artificial Sequence
  Description of Artificial Sequence: Synthetic oligonucleotide
gcguucaauaugaguggca

SEQ ID NO: 1241971 - RNA, 19 nt, Artificial Sequence
  Description of Artificial Sequence: Synthetic oligonucleotide
acccgcaaacucacuuuaa

SEQ ID NO: 1241972 - RNA, 19 nt, Artificial Sequence
  Description of Artificial Sequence: Synthetic oligonucleotide
uggucaccccgaggaauuu

SEQ ID NO: 1241973 - RNA, 19 nt, Artificial Sequence
  Description of Artificial Sequence: Synthetic oligonucleotide
cccgaaggugggcucggag

SEQ ID NO: 1241974 - RNA, 19 nt, Artificial Sequence
  Description of Artificial Sequence: Synthetic oligonucleotide
ggaaggcucaaaggcaccu

SEQ ID NO: 1241975 - RNA, 19 nt, Artificial Sequence
  Description of Artificial Sequence: Synthetic oligonucleotide
auguacccgcaaacucacu

SEQ ID NO: 1241976 - RNA, 19 nt, Artificial Sequence
  Description of Artificial Sequence: Synthetic oligonucleotide
ggaaggcucgggaauccaa

SEQ ID NO: 1241977 - RNA, 19 nt, Artificial Sequence
  Description of Artificial Sequence: Synthetic oligonucleotide
cugagccagcguucaauau

SEQ ID NO: 1241978 - RNA, 19 nt, Artificial Sequence
  Description of Artificial Sequence: Synthetic oligonucleotide
cagucucauguacccgcaa

SEQ ID NO: 1241979 - RNA, 19 nt, Artificial Sequence
  Description of Artificial Sequence: Synthetic oligonucleotide
ggcaacgguucuggagggc

SEQ ID NO: 1241980 - RNA, 19 nt, Artificial Sequence
  Description of Artificial Sequence: Synthetic oligonucleotide
ggucaccccgaggaauuuc

SEQ ID NO: 1241981 - RNA, 19 nt, Artificial Sequence
  Description of Artificial Sequence: Synthetic oligonucleotide
ccuugcuuuugcccagaca

SEQ ID NO: 1241982 - RNA, 19 nt, Artificial Sequence
  Description of Artificial Sequence: Synthetic oligonucleotide
gcauaccagccagggacca

SEQ ID NO: 1241983 - RNA, 19 nt, Artificial Sequence
  Description of Artificial Sequence: Synthetic oligonucleotide
cuggaccuacucugugccu

SEQ ID NO: 1241984 - RNA, 19 nt, Artificial Sequence
  Description of Artificial Sequence: Synthetic oligonucleotide
gucccgguaguaauccuuu

SEQ ID NO: 1241985 - RNA, 19 nt, Artificial Sequence
  Description of Artificial Sequence: Synthetic oligonucleotide
ccagggaccaggcaacggu

SEQ ID NO: 1241986 - RNA, 19 nt, Artificial Sequence
  Description of Artificial Sequence: Synthetic oligonucleotide
ggucaaacgccaagguuuu

SEQ ID NO: 1241987 - RNA, 19 nt, Artificial Sequence
  Description of Artificial Sequence: Synthetic oligonucleotide
cagggaccaggcaacgguu

SEQ ID NO: 1241988 - RNA, 19 nt, Artificial Sequence
  Description of Artificial Sequence: Synthetic oligonucleotide
ggaccuacucugugccugu

SEQ ID NO: 1241989 - RNA, 19 nt, Artificial Sequence
  Description of Artificial Sequence: Synthetic oligonucleotide
gguucuguucgaagcaguu

SEQ ID NO: 1241990 - RNA, 19 nt, Artificial Sequence
  Description of Artificial Sequence: Synthetic oligonucleotide
gggcaacaggguagcugcc

SEQ ID NO: 1241991 - RNA, 19 nt, Artificial Sequence
  Description of Artificial Sequence: Synthetic oligonucleotide
agguuccccugagcaucca

SEQ ID NO: 1241992 - RNA, 19 nt, Artificial Sequence
  Description of Artificial Sequence: Synthetic oligonucleotide
cccuugcuuuugcccagac

SEQ ID NO: 1241993 - RNA, 19 nt, Artificial Sequence
  Description of Artificial Sequence: Synthetic oligonucleotide
cucgggaauccaaguccau

SEQ ID NO: 1241994 - RNA, 19 nt, Artificial Sequence
  Description of Artificial Sequence: Synthetic oligonucleotide
caacccaaccuuggucacu

SEQ ID NO: 1241995 - RNA, 19 nt, Artificial Sequence
  Description of Artificial Sequence: Synthetic oligonucleotide
ccuacucugugccugucuu

SEQ ID NO: 1241996 - RNA, 19 nt, Artificial Sequence
  Description of Artificial Sequence: Synthetic oligonucleotide
ccauguuguggucccggua

SEQ ID NO: 1241997 - RNA, 19 nt, Artificial Sequence
  Description of Artificial Sequence: Synthetic oligonucleotide
gccccgaaggugggcucgg

SEQ ID NO: 1241998 - RNA, 19 nt, Artificial Sequence
  Description of Artificial Sequence: Synthetic oligonucleotide
acgcagcuuugaggaugca

SEQ ID NO: 1241999 - RNA, 19 nt, Artificial Sequence
  Description of Artificial Sequence: Synthetic oligonucleotide
cuugggcaacaggguagcu

SEQ ID NO: 1242000 - RNA, 19 nt, Artificial Sequence
  Description of Artificial Sequence: Synthetic oligonucleotide
ccaaaaccaggaucugguu

SEQ ID NO: 1242001 - RNA, 19 nt, Artificial Sequence
  Description of Artificial Sequence: Synthetic oligonucleotide
ccccaaccuagcaccaugu

SEQ ID NO: 1242002 - RNA, 19 nt, Artificial Sequence
  Description of Artificial Sequence: Synthetic oligonucleotide
ggcgaaugcuaaccuccuu

SEQ ID NO: 1242003 - RNA, 19 nt, Artificial Sequence
  Description of Artificial Sequence: Synthetic oligonucleotide
gcucggaggcaguguggua

SEQ ID NO: 1242004 - RNA, 19 nt, Artificial Sequence
  Description of Artificial Sequence: Synthetic oligonucleotide
cccuuaccucucagggcaa

SEQ ID NO: 1242005 - RNA, 19 nt, Artificial Sequence
  Description of Artificial Sequence: Synthetic oligonucleotide
cgaggaauuucugcaccgu

SEQ ID NO: 1242006 - RNA, 19 nt, Artificial Sequence
  Description of Artificial Sequence: Synthetic oligonucleotide
ggguagcugcccgcguggu

SEQ ID NO: 1242007 - RNA, 19 nt, Artificial Sequence
  Description of Artificial Sequence: Synthetic oligonucleotide
gggucaucgugggcucgcu

SEQ ID NO: 1242008 - RNA, 19 nt, Artificial Sequence
  Description of Artificial Sequence: Synthetic oligonucleotide
ccccgaaggugggcucgga

SEQ ID NO: 1242009 - RNA, 19 nt, Artificial Sequence
  Description of Artificial Sequence: Synthetic oligonucleotide
aauucaguuggacaggugc

SEQ ID NO: 1242010 - RNA, 19 nt, Artificial Sequence
  Description of Artificial Sequence: Synthetic oligonucleotide
aacuggauaaaacauuugc

SEQ ID NO: 1242011 - RNA, 19 nt, Artificial Sequence
  Description of Artificial Sequence: Synthetic oligonucleotide
aacuuuaauucauaguuac

SEQ ID NO: 1242012 - RNA, 19 nt, Artificial Sequence
  Description of Artificial Sequence: Synthetic oligonucleotide
auagcuuauauccauuucc

SEQ ID NO: 1242013 - RNA, 19 nt, Artificial Sequence
  Description of Artificial Sequence: Synthetic oligonucleotide
caggauauagcuuauaucc

SEQ ID NO: 1242014 - RNA, 19 nt, Artificial Sequence
  Description of Artificial Sequence: Synthetic oligonucleotide
aauagcaugaacuuuaauu

SEQ ID NO: 1242015 - RNA, 19 nt, Artificial Sequence
  Description of Artificial Sequence: Synthetic oligonucleotide
ugaacuuuaauucauaguu

SEQ ID NO: 1242016 - RNA, 19 nt, Artificial Sequence
  Description of Artificial Sequence: Synthetic oligonucleotide
aaaucggacaccucaauuc

SEQ ID NO: 1242017 - RNA, 19 nt, Artificial Sequence
  Description of Artificial Sequence: Synthetic oligonucleotide
caaauaacaaaauagcaug

SEQ ID NO: 1242018 - RNA, 19 nt, Artificial Sequence
  Description of Artificial Sequence: Synthetic oligonucleotide
agaauuaucaccaaaucgg

SEQ ID NO: 1242019 - RNA, 19 nt, Artificial Sequence
  Description of Artificial Sequence: Synthetic oligonucleotide
uaauucagaauuaucacca

SEQ ID NO: 1242020 - RNA, 19 nt, Artificial Sequence
  Description of Artificial Sequence: Synthetic oligonucleotide
aaugucauaugcucgaaug

SEQ ID NO: 1242021 - RNA, 19 nt, Artificial Sequence
  Description of Artificial Sequence: Synthetic oligonucleotide
uuuuaaaucggggagaccc

SEQ ID NO: 1242022 - RNA, 19 nt, Artificial Sequence
  Description of Artificial Sequence: Synthetic oligonucleotide
uguaaauaaaugaauccug

SEQ ID NO: 1242023 - RNA, 19 nt, Artificial Sequence
  Description of Artificial Sequence: Synthetic oligonucleotide
uguguaaauaaaugaaucc

SEQ ID NO: 1242024 - RNA, 19 nt, Artificial Sequence
  Description of Artificial Sequence: Synthetic oligonucleotide
cagauuagaagguauaggg

SEQ ID NO: 1242025 - RNA, 19 nt, Artificial Sequence
  Description of Artificial Sequence: Synthetic oligonucleotide
uuuugaaucaaauaacaaa

SEQ ID NO: 1242026 - RNA, 19 nt, Artificial Sequence
  Description of Artificial Sequence: Synthetic oligonucleotide
aagaguacagugcugucac

SEQ ID NO: 1242027 - RNA, 19 nt, Artificial Sequence
  Description of Artificial Sequence: Synthetic oligonucleotide
auugcuguggucuugauga

SEQ ID NO: 1242028 - RNA, 19 nt, Artificial Sequence
  Description of Artificial Sequence: Synthetic oligonucleotide
uggauaaaacauuugcagg

SEQ ID NO: 1242029 - RNA, 19 nt, Artificial Sequence
  Description of Artificial Sequence: Synthetic oligonucleotide
uauaggguuauucaugaug

SEQ ID NO: 1242030 - RNA, 19 nt, Artificial Sequence
  Description of Artificial Sequence: Synthetic oligonucleotide
aaggcguuauccuuggccg

SEQ ID NO: 1242031 - RNA, 19 nt, Artificial Sequence
  Description of Artificial Sequence: Synthetic oligonucleotide
aauacgcccagcaaaacac

SEQ ID NO: 1242032 - RNA, 19 nt, Artificial Sequence
  Description of Artificial Sequence: Synthetic oligonucleotide
uaaaauucccuccaagugu

SEQ ID NO: 1242033 - RNA, 19 nt, Artificial Sequence
  Description of Artificial Sequence: Synthetic oligonucleotide
uucaaaagaguacagugcu

SEQ ID NO: 1242034 - RNA, 19 nt, Artificial Sequence
  Description of Artificial Sequence: Synthetic oligonucleotide
uuauucaugaugcccgccg

SEQ ID NO: 1242035 - RNA, 19 nt, Artificial Sequence
  Description of Artificial Sequence: Synthetic oligonucleotide
cuggauaaaacauuugcag

SEQ ID NO: 1242036 - RNA, 19 nt, Artificial Sequence
  Description of Artificial Sequence: Synthetic oligonucleotide
uuguguaaauaaaugaauc

SEQ ID NO: 1242037 - RNA, 19 nt, Artificial Sequence
  Description of Artificial Sequence: Synthetic oligonucleotide
ugaaucaaauaacaaaaua

SEQ ID NO: 1242038 - RNA, 19 nt, Artificial Sequence
  Description of Artificial Sequence: Synthetic oligonucleotide
aguggcguggccuagguuc

SEQ ID NO: 1242039 - RNA, 19 nt, Artificial Sequence
  Description of Artificial Sequence: Synthetic oligonucleotide
aguaaaauucccuccaagu

SEQ ID NO: 1242040 - RNA, 19 nt, Artificial Sequence
  Description of Artificial Sequence: Synthetic oligonucleotide
auaguuacauaguuggcug

SEQ ID NO: 1242041 - RNA, 19 nt, Artificial Sequence
  Description of Artificial Sequence: Synthetic oligonucleotide
aaaauucccuccaaguguc

SEQ ID NO: 1242042 - RNA, 19 nt, Artificial Sequence
  Description of Artificial Sequence: Synthetic oligonucleotide
agcucaauugcguccaccc

SEQ ID NO: 1242043 - RNA, 19 nt, Artificial Sequence
  Description of Artificial Sequence: Synthetic oligonucleotide
uuugcaguaagugaagaca

SEQ ID NO: 1242044 - RNA, 19 nt, Artificial Sequence
  Description of Artificial Sequence: Synthetic oligonucleotide
ggcuugaaaauucaaaucc

SEQ ID NO: 1242045 - RNA, 19 nt, Artificial Sequence
  Description of Artificial Sequence: Synthetic oligonucleotide
ucagauuagaagguauagg

SEQ ID NO: 1242046 - RNA, 19 nt, Artificial Sequence
  Description of Artificial Sequence: Synthetic oligonucleotide
caaucaaacagcuuccuuc

SEQ ID NO: 1242047 - RNA, 19 nt, Artificial Sequence
  Description of Artificial Sequence: Synthetic oligonucleotide
aauugaugcguuguccuuc

SEQ ID NO: 1242048 - RNA, 19 nt, Artificial Sequence
  Description of Artificial Sequence: Synthetic oligonucleotide
aauuaucaccaaaucggac

SEQ ID NO: 1242049 - RNA, 19 nt, Artificial Sequence
  Description of Artificial Sequence: Synthetic oligonucleotide
cacagcauagcucaauugc

SEQ ID NO: 1242050 - RNA, 19 nt, Artificial Sequence
  Description of Artificial Sequence: Synthetic oligonucleotide
caugaacuuuaauucauag

SEQ ID NO: 1242051 - RNA, 19 nt, Artificial Sequence
  Description of Artificial Sequence: Synthetic oligonucleotide
aaaagaguacagugcuguc

SEQ ID NO: 1242052 - RNA, 19 nt, Artificial Sequence
  Description of Artificial Sequence: Synthetic oligonucleotide
auauccauuuccauuacuc

SEQ ID NO: 1242053 - RNA, 19 nt, Artificial Sequence
  Description of Artificial Sequence: Synthetic oligonucleotide
gaagguauaggguuauuca

SEQ ID NO: 1242054 - RNA, 19 nt, Artificial Sequence
  Description of Artificial Sequence: Synthetic oligonucleotide
uggagguaauucuuuagcc

SEQ ID NO: 1242055 - RNA, 19 nt, Artificial Sequence
  Description of Artificial Sequence: Synthetic oligonucleotide
ucuggagcccacuaaacca

SEQ ID NO: 1242056 - RNA, 19 nt, Artificial Sequence
  Description of Artificial Sequence: Synthetic oligonucleotide
aggguuauucaugaugccc

SEQ ID NO: 1242057 - RNA, 19 nt, Artificial Sequence
  Description of Artificial Sequence: Synthetic oligonucleotide
uaauacgcccagcaaaaca

SEQ ID NO: 1242058 - RNA, 19 nt, Artificial Sequence
  Description of Artificial Sequence: Synthetic oligonucleotide
aagguauaggguuauucau

SEQ ID NO: 1242059 - RNA, 19 nt, Artificial Sequence
  Description of Artificial Sequence: Synthetic oligonucleotide
uccuauuucaaauccucca

SEQ ID NO: 1242060 - RNA, 19 nt, Artificial Sequence
  Description of Artificial Sequence: Synthetic oligonucleotide
ucuuaucagguccauuucu

SEQ ID NO: 1242061 - RNA, 19 nt, Artificial Sequence
  Description of Artificial Sequence: Synthetic oligonucleotide
uucagauuagaagguauag

SEQ ID NO: 1242062 - RNA, 19 nt, Artificial Sequence
  Description of Artificial Sequence: Synthetic oligonucleotide
uucaggauauagcuuauau

SEQ ID NO: 1242063 - RNA, 19 nt, Artificial Sequence
  Description of Artificial Sequence: Synthetic oligonucleotide
ugauuucagauuagaaggu

SEQ ID NO: 1242064 - RNA, 19 nt, Artificial Sequence
  Description of Artificial Sequence: Synthetic oligonucleotide
uagcuuauauccauuucca

SEQ ID NO: 1242065 - RNA, 19 nt, Artificial Sequence
  Description of Artificial Sequence: Synthetic oligonucleotide
uacucugggagccagaauu

SEQ ID NO: 1242066 - RNA, 19 nt, Artificial Sequence
  Description of Artificial Sequence: Synthetic oligonucleotide
aaaucggggagacccacug

SEQ ID NO: 1242067 - RNA, 19 nt, Artificial Sequence
  Description of Artificial Sequence: Synthetic oligonucleotide
cuacaguaaaauucccucc

SEQ ID NO: 1242068 - RNA, 19 nt, Artificial Sequence
  Description of Artificial Sequence: Synthetic oligonucleotide
uccagcuuuaaugacagac

SEQ ID NO: 1242069 - RNA, 19 nt, Artificial Sequence
  Description of Artificial Sequence: Synthetic oligonucleotide
uauuggcugauucaaacuu

SEQ ID NO: 1242070 - RNA, 19 nt, Artificial Sequence
  Description of Artificial Sequence: Synthetic oligonucleotide
uagagauaguuuugaauca

SEQ ID NO: 1242071 - RNA, 19 nt, Artificial Sequence
  Description of Artificial Sequence: Synthetic oligonucleotide
auaaagaucuucugcuuga

SEQ ID NO: 1242072 - RNA, 19 nt, Artificial Sequence
  Description of Artificial Sequence: Synthetic oligonucleotide
gauaguuuugaaucaaaua

SEQ ID NO: 1242073 - RNA, 19 nt, Artificial Sequence
  Description of Artificial Sequence: Synthetic oligonucleotide
aggagcaccgcccagggag

SEQ ID NO: 1242074 - RNA, 19 nt, Artificial Sequence
  Description of Artificial Sequence: Synthetic oligonucleotide
auauaacugugauucuguc

SEQ ID NO: 1242075 - RNA, 19 nt, Artificial Sequence
  Description of Artificial Sequence: Synthetic oligonucleotide
aauugcguccacccgccuc

SEQ ID NO: 1242076 - RNA, 19 nt, Artificial Sequence
  Description of Artificial Sequence: Synthetic oligonucleotide
aagaggaaggcguuauccu

SEQ ID NO: 1242077 - RNA, 19 nt, Artificial Sequence
  Description of Artificial Sequence: Synthetic oligonucleotide
uuuaauucauaguuacaua

SEQ ID NO: 1242078 - RNA, 19 nt, Artificial Sequence
  Description of Artificial Sequence: Synthetic oligonucleotide
cuauuucaaauccuccacc

SEQ ID NO: 1242079 - RNA, 19 nt, Artificial Sequence
  Description of Artificial Sequence: Synthetic oligonucleotide
agaagguauaggguuauuc

SEQ ID NO: 1242080 - RNA, 19 nt, Artificial Sequence
  Description of Artificial Sequence: Synthetic oligonucleotide
aaaaugccaguuugaccuc

SEQ ID NO: 1242081 - RNA, 19 nt, Artificial Sequence
  Description of Artificial Sequence: Synthetic oligonucleotide
aguuuugaaucaaauaaca

SEQ ID NO: 1242082 - RNA, 19 nt, Artificial Sequence
  Description of Artificial Sequence: Synthetic oligonucleotide
aaagaguacagugcuguca

SEQ ID NO: 1242083 - RNA, 19 nt, Artificial Sequence
  Description of Artificial Sequence: Synthetic oligonucleotide
uacuuuucucaaauugaug

SEQ ID NO: 1242084 - RNA, 19 nt, Artificial Sequence
  Description of Artificial Sequence: Synthetic oligonucleotide
aaauccccugguuguugcc

SEQ ID NO: 1242085 - RNA, 19 nt, Artificial Sequence
  Description of Artificial Sequence: Synthetic oligonucleotide
auuccuauuucaaauccuc

SEQ ID NO: 1242086 - RNA, 19 nt, Artificial Sequence
  Description of Artificial Sequence: Synthetic oligonucleotide
ucaccagaaauccagcuuu

SEQ ID NO: 1242087 - RNA, 19 nt, Artificial Sequence
  Description of Artificial Sequence: Synthetic oligonucleotide
uuguugcccuucaaaagag

SEQ ID NO: 1242088 - RNA, 19 nt, Artificial Sequence
  Description of Artificial Sequence: Synthetic oligonucleotide
auaaaugaauccugucugu

SEQ ID NO: 1242089 - RNA, 19 nt, Artificial Sequence
  Description of Artificial Sequence: Synthetic oligonucleotide
uuccuauuucaaauccucc

SEQ ID NO: 1242090 - RNA, 19 nt, Artificial Sequence
  Description of Artificial Sequence: Synthetic oligonucleotide
cuuaucagguccauuucug

SEQ ID NO: 1242091 - RNA, 19 nt, Artificial Sequence
  Description of Artificial Sequence: Synthetic oligonucleotide
uguguagagauaguuuuga

SEQ ID NO: 1242092 - RNA, 19 nt, Artificial Sequence
  Description of Artificial Sequence: Synthetic oligonucleotide
agcauagcucaauugcguc

SEQ ID NO: 1242093 - RNA, 19 nt, Artificial Sequence
  Description of Artificial Sequence: Synthetic oligonucleotide
uacgcccagcaaaacaccg

SEQ ID NO: 1242094 - RNA, 19 nt, Artificial Sequence
  Description of Artificial Sequence: Synthetic oligonucleotide
uaccuugcccggaagggcg

SEQ ID NO: 1242095 - RNA, 19 nt, Artificial Sequence
  Description of Artificial Sequence: Synthetic oligonucleotide
guuuccacccuuugcaaag

SEQ ID NO: 1242096 - RNA, 19 nt, Artificial Sequence
  Description of Artificial Sequence: Synthetic oligonucleotide
acuucuauuggcugauuca

SEQ ID NO: 1242097 - RNA, 19 nt, Artificial Sequence
  Description of Artificial Sequence: Synthetic oligonucleotide
uauagcuuauauccauuuc

SEQ ID NO: 1242098 - RNA, 19 nt, Artificial Sequence
  Description of Artificial Sequence: Synthetic oligonucleotide
gguuuguguaaauaaauga

SEQ ID NO: 1242099 - RNA, 19 nt, Artificial Sequence
  Description of Artificial Sequence: Synthetic oligonucleotide
aaaugugagucagucuuug

SEQ ID NO: 1242100 - RNA, 19 nt, Artificial Sequence
  Description of Artificial Sequence: Synthetic oligonucleotide
uuucagauuagaagguaua

SEQ ID NO: 1242101 - RNA, 19 nt, Artificial Sequence
  Description of Artificial Sequence: Synthetic oligonucleotide
uucgccgaugcaaucacca

SEQ ID NO: 1242102 - RNA, 19 nt, Artificial Sequence
  Description of Artificial Sequence: Synthetic oligonucleotide
ucaauugcguccacccgcc

SEQ ID NO: 1242103 - RNA, 19 nt, Artificial Sequence
  Description of Artificial Sequence: Synthetic oligonucleotide
gauuagaagguauaggguu

SEQ ID NO: 1242104 - RNA, 19 nt, Artificial Sequence
  Description of Artificial Sequence: Synthetic oligonucleotide
acgggcgcacaccugaccc

SEQ ID NO: 1242105 - RNA, 19 nt, Artificial Sequence
  Description of Artificial Sequence: Synthetic oligonucleotide
aaugaucuuaucaggucca

SEQ ID NO: 1242106 - RNA, 19 nt, Artificial Sequence
  Description of Artificial Sequence: Synthetic oligonucleotide
agcuagaaaguucaggaua

SEQ ID NO: 1242107 - RNA, 19 nt, Artificial Sequence
  Description of Artificial Sequence: Synthetic oligonucleotide
aacauuugcagggcaaaga

SEQ ID NO: 1242108 - RNA, 19 nt, Artificial Sequence
  Description of Artificial Sequence: Synthetic oligonucleotide
ccaccaaucaaaaugugag

SEQ ID NO: 1242109 - RNA, 19 nt, Artificial Sequence
  Description of Artificial Sequence: Synthetic oligonucleotide
guuuguguaaauaaaugaa

SEQ ID NO: 1242110 - RNA, 19 nt, Artificial Sequence
  Description of Artificial Sequence: Synthetic oligonucleotide
acauuugcagggcaaagau

SEQ ID NO: 1242111 - RNA, 19 nt, Artificial Sequence
  Description of Artificial Sequence: Synthetic oligonucleotide
ucuuuagccuuccucugcu

SEQ ID NO: 1242112 - RNA, 19 nt, Artificial Sequence
  Description of Artificial Sequence: Synthetic oligonucleotide
uauucaugaugcccgccgc

SEQ ID NO: 1242113 - RNA, 19 nt, Artificial Sequence
  Description of Artificial Sequence: Synthetic oligonucleotide
acagcauagcucaauugcg

SEQ ID NO: 1242114 - RNA, 19 nt, Artificial Sequence
  Description of Artificial Sequence: Synthetic oligonucleotide
ugguuguugcccuucaaaa

SEQ ID NO: 1242115 - RNA, 19 nt, Artificial Sequence
  Description of Artificial Sequence: Synthetic oligonucleotide
gacaggacccgcccaacgg

SEQ ID NO: 1242116 - RNA, 19 nt, Artificial Sequence
  Description of Artificial Sequence: Synthetic oligonucleotide
aauaggggaacgcccugcu

SEQ ID NO: 1242117 - RNA, 19 nt, Artificial Sequence
  Description of Artificial Sequence: Synthetic oligonucleotide
ucagggauacguuuccuuc

SEQ ID NO: 1242118 - RNA, 19 nt, Artificial Sequence
  Description of Artificial Sequence: Synthetic oligonucleotide
uuauccuuggccggccucg

SEQ ID NO: 1242119 - RNA, 19 nt, Artificial Sequence
  Description of Artificial Sequence: Synthetic oligonucleotide
ccuauaaccuuguucacag

SEQ ID NO: 1242120 - RNA, 19 nt, Artificial Sequence
  Description of Artificial Sequence: Synthetic oligonucleotide
ucccaauggcugaaggugc

SEQ ID NO: 1242121 - RNA, 19 nt, Artificial Sequence
  Description of Artificial Sequence: Synthetic oligonucleotide
uccggcuugaaaauucaaa

SEQ ID NO: 1242122 - RNA, 19 nt, Artificial Sequence
  Description of Artificial Sequence: Synthetic oligonucleotide
uuccauuacucugggagcc

SEQ ID NO: 1242123 - RNA, 19 nt, Artificial Sequence
  Description of Artificial Sequence: Synthetic oligonucleotide
agggaauaggggaacgccc

SEQ ID NO: 1242124 - RNA, 19 nt, Artificial Sequence
  Description of Artificial Sequence: Synthetic oligonucleotide
aaaaggccccgggauuugc

SEQ ID NO: 1242125 - RNA, 19 nt, Artificial Sequence
  Description of Artificial Sequence: Synthetic oligonucleotide
gaauuaucaccaaaucgga

SEQ ID NO: 1242126 - RNA, 19 nt, Artificial Sequence
  Description of Artificial Sequence: Synthetic oligonucleotide
aaugugagucagucuuuga

SEQ ID NO: 1242127 - RNA, 19 nt, Artificial Sequence
  Description of Artificial Sequence: Synthetic oligonucleotide
ucgaaguuuuccuucccac

SEQ ID NO: 1242128 - RNA, 19 nt, Artificial Sequence
  Description of Artificial Sequence: Synthetic oligonucleotide
uugucauaauucagaauua

SEQ ID NO: 1242129 - RNA, 19 nt, Artificial Sequence
  Description of Artificial Sequence: Synthetic oligonucleotide
aaauugaugcguuguccuu

SEQ ID NO: 1242130 - RNA, 19 nt, Artificial Sequence
  Description of Artificial Sequence: Synthetic oligonucleotide
cuaucccaauggcugaagg

SEQ ID NO: 1242131 - RNA, 19 nt, Artificial Sequence
  Description of Artificial Sequence: Synthetic oligonucleotide
ugcagagcuucucagggau

SEQ ID NO: 1242132 - RNA, 19 nt, Artificial Sequence
  Description of Artificial Sequence: Synthetic oligonucleotide
cuuuugcaaucacaugggc

SEQ ID NO: 1242133 - RNA, 19 nt, Artificial Sequence
  Description of Artificial Sequence: Synthetic oligonucleotide
ggguuauucaugaugcccg

SEQ ID NO: 1242134 - RNA, 19 nt, Artificial Sequence
  Description of Artificial Sequence: Synthetic oligonucleotide
agguuuguguaaauaaaug

SEQ ID NO: 1242135 - RNA, 19 nt, Artificial Sequence
  Description of Artificial Sequence: Synthetic oligonucleotide
caguaaaauucccuccaag

SEQ ID NO: 1242136 - RNA, 19 nt, Artificial Sequence
  Description of Artificial Sequence: Synthetic oligonucleotide
uccuauaaccuuguucaca

SEQ ID NO: 1242137 - RNA, 19 nt, Artificial Sequence
  Description of Artificial Sequence: Synthetic oligonucleotide
aguaaaggaguugaggauu

SEQ ID NO: 1242138 - RNA, 19 nt, Artificial Sequence
  Description of Artificial Sequence: Synthetic oligonucleotide
uuucucaaauugaugcguu

SEQ ID NO: 1242139 - RNA, 19 nt, Artificial Sequence
  Description of Artificial Sequence: Synthetic oligonucleotide
gguauaggguuauucauga

SEQ ID NO: 1242140 - RNA, 19 nt, Artificial Sequence
  Description of Artificial Sequence: Synthetic oligonucleotide
ugucauaauucagaauuau

SEQ ID NO: 1242141 - RNA, 19 nt, Artificial Sequence
  Description of Artificial Sequence: Synthetic oligonucleotide
aaccuuguucacagcauag

SEQ ID NO: 1242142 - RNA, 19 nt, Artificial Sequence
  Description of Artificial Sequence: Synthetic oligonucleotide
gauacguuuccuuccaggu

SEQ ID NO: 1242143 - RNA, 19 nt, Artificial Sequence
  Description of Artificial Sequence: Synthetic oligonucleotide
gguucggugguccaacggg

SEQ ID NO: 1242144 - RNA, 19 nt, Artificial Sequence
  Description of Artificial Sequence: Synthetic oligonucleotide
gguuguugcccuucaaaag

SEQ ID NO: 1242145 - RNA, 19 nt, Artificial Sequence
  Description of Artificial Sequence: Synthetic oligonucleotide
ggauacguuuccuuccagg

SEQ ID NO: 1242146 - RNA, 19 nt, Artificial Sequence
  Description of Artificial Sequence: Synthetic oligonucleotide
cagggauacguuuccuucc

SEQ ID NO: 1242147 - RNA, 19 nt, Artificial Sequence
  Description of Artificial Sequence: Synthetic oligonucleotide
auugcguccacccgccuca

SEQ ID NO: 1242148 - RNA, 19 nt, Artificial Sequence
  Description of Artificial Sequence: Synthetic oligonucleotide
gaauccugucuguguagag

SEQ ID NO: 1242149 - RNA, 19 nt, Artificial Sequence
  Description of Artificial Sequence: Synthetic oligonucleotide
auaugcucgaauguccuga

SEQ ID NO: 1242150 - RNA, 19 nt, Artificial Sequence
  Description of Artificial Sequence: Synthetic oligonucleotide
cucucaccagcccaggaag

SEQ ID NO: 1242151 - RNA, 19 nt, Artificial Sequence
  Description of Artificial Sequence: Synthetic oligonucleotide
gaugcguuguccuucauuu

SEQ ID NO: 1242152 - RNA, 19 nt, Artificial Sequence
  Description of Artificial Sequence: Synthetic oligonucleotide
aaggccccgggauuugcag

SEQ ID NO: 1242153 - RNA, 19 nt, Artificial Sequence
  Description of Artificial Sequence: Synthetic oligonucleotide
agauuagaagguauagggu

SEQ ID NO: 1242154 - RNA, 19 nt, Artificial Sequence
  Description of Artificial Sequence: Synthetic oligonucleotide
acaccucaauuccuauuuc

SEQ ID NO: 1242155 - RNA, 19 nt, Artificial Sequence
  Description of Artificial Sequence: Synthetic oligonucleotide
uaggggaacgcccugcuuu

SEQ ID NO: 1242156 - RNA, 19 nt, Artificial Sequence
  Description of Artificial Sequence: Synthetic oligonucleotide
gaacgcccugcuuucgccg

SEQ ID NO: 1242157 - RNA, 19 nt, Artificial Sequence
  Description of Artificial Sequence: Synthetic oligonucleotide
guguaaauaaaugaauccu

SEQ ID NO: 1242158 - RNA, 19 nt, Artificial Sequence
  Description of Artificial Sequence: Synthetic oligonucleotide
cuguguagagauaguuuug

SEQ ID NO: 1242159 - RNA, 19 nt, Artificial Sequence
  Description of Artificial Sequence: Synthetic oligonucleotide
ucgaauguccugacaguaa

SEQ ID NO: 1242160 - RNA, 19 nt, Artificial Sequence
  Description of Artificial Sequence: Synthetic oligonucleotide
agguauaggguuauucaug

SEQ ID NO: 1242161 - RNA, 19 nt, Artificial Sequence
  Description of Artificial Sequence: Synthetic oligonucleotide
ucuccggcuugaaaauuca

SEQ ID NO: 1242162 - RNA, 19 nt, Artificial Sequence
  Description of Artificial Sequence: Synthetic oligonucleotide
ugaauccugucuguguaga

SEQ ID NO: 1242163 - RNA, 19 nt, Artificial Sequence
  Description of Artificial Sequence: Synthetic oligonucleotide
uggcugucaccagaaaucc

SEQ ID NO: 1242164 - RNA, 19 nt, Artificial Sequence
  Description of Artificial Sequence: Synthetic oligonucleotide
uucuauuggcugauucaaa

SEQ ID NO: 1242165 - RNA, 19 nt, Artificial Sequence
  Description of Artificial Sequence: Synthetic oligonucleotide
gaagggcgguaccucagag

SEQ ID NO: 1242166 - RNA, 19 nt, Artificial Sequence
  Description of Artificial Sequence: Synthetic oligonucleotide
cugcuuugucauaauucag

SEQ ID NO: 1242167 - RNA, 19 nt, Artificial Sequence
  Description of Artificial Sequence: Synthetic oligonucleotide
uccugacaguaaaauuucu

SEQ ID NO: 1242168 - RNA, 19 nt, Artificial Sequence
  Description of Artificial Sequence: Synthetic oligonucleotide
uuaaaucggggagacccac

SEQ ID NO: 1242169 - RNA, 19 nt, Artificial Sequence
  Description of Artificial Sequence: Synthetic oligonucleotide
cuggcacguccuaauacgc

SEQ ID NO: 1242170 - RNA, 19 nt, Artificial Sequence
  Description of Artificial Sequence: Synthetic oligonucleotide
aucaccaguccuauaaccu

SEQ ID NO: 1242171 - RNA, 19 nt, Artificial Sequence
  Description of Artificial Sequence: Synthetic oligonucleotide
uggcacguccuaauacgcc

SEQ ID NO: 1242172 - RNA, 19 nt, Artificial Sequence
  Description of Artificial Sequence: Synthetic oligonucleotide
cacaugggcaggaaugauc

SEQ ID NO: 1242173 - RNA, 19 nt, Artificial Sequence
  Description of Artificial Sequence: Synthetic oligonucleotide
ugauucugucuccggcuug

SEQ ID NO: 1242174 - RNA, 19 nt, Artificial Sequence
  Description of Artificial Sequence: Synthetic oligonucleotide
caacuggauaaaacauuug

SEQ ID NO: 1242175 - RNA, 19 nt, Artificial Sequence
  Description of Artificial Sequence: Synthetic oligonucleotide
ugaaggugcagaccauuuu

SEQ ID NO: 1242176 - RNA, 19 nt, Artificial Sequence
  Description of Artificial Sequence: Synthetic oligonucleotide
gucauaauucagaauuauc

SEQ ID NO: 1242177 - RNA, 19 nt, Artificial Sequence
  Description of Artificial Sequence: Synthetic oligonucleotide
aggugcucgggauugcugu

SEQ ID NO: 1242178 - RNA, 19 nt, Artificial Sequence
  Description of Artificial Sequence: Synthetic oligonucleotide
auacgcccagcaaaacacc

SEQ ID NO: 1242179 - RNA, 19 nt, Artificial Sequence
  Description of Artificial Sequence: Synthetic oligonucleotide
ugggcaggaaugaucuuau

SEQ ID NO: 1242180 - RNA, 19 nt, Artificial Sequence
  Description of Artificial Sequence: Synthetic oligonucleotide
cuggaaguuauuucuguaa

SEQ ID NO: 1242181 - RNA, 19 nt, Artificial Sequence
  Description of Artificial Sequence: Synthetic oligonucleotide
cacuucuauuggcugauuc

SEQ ID NO: 1242182 - RNA, 19 nt, Artificial Sequence
  Description of Artificial Sequence: Synthetic oligonucleotide
uguugcccuucaaaagagu

SEQ ID NO: 1242183 - RNA, 19 nt, Artificial Sequence
  Description of Artificial Sequence: Synthetic oligonucleotide
uaugcucgaauguccugac

SEQ ID NO: 1242184 - RNA, 19 nt, Artificial Sequence
  Description of Artificial Sequence: Synthetic oligonucleotide
gaguugaggauuucauaaa

SEQ ID NO: 1242185 - RNA, 19 nt, Artificial Sequence
  Description of Artificial Sequence: Synthetic oligonucleotide
gaauaggggaacgcccugc

SEQ ID NO: 1242186 - RNA, 19 nt, Artificial Sequence
  Description of Artificial Sequence: Synthetic oligonucleotide
uaaaucggggagacccacu

SEQ ID NO: 1242187 - RNA, 19 nt, Artificial Sequence
  Description of Artificial Sequence: Synthetic oligonucleotide
agaggaaggcguuauccuu

SEQ ID NO: 1242188 - RNA, 19 nt, Artificial Sequence
  Description of Artificial Sequence: Synthetic oligonucleotide
agguucggugguccaacgg

SEQ ID NO: 1242189 - RNA, 19 nt, Artificial Sequence
  Description of Artificial Sequence: Synthetic oligonucleotide
ccuggcacguccuaauacg

SEQ ID NO: 1242190 - RNA, 19 nt, Artificial Sequence
  Description of Artificial Sequence: Synthetic oligonucleotide
uagguucggugguccaacg

SEQ ID NO: 1242191 - RNA, 19 nt, Artificial Sequence
  Description of Artificial Sequence: Synthetic oligonucleotide
agggauacguuuccuucca

SEQ ID NO: 1242192 - RNA, 19 nt, Artificial Sequence
  Description of Artificial Sequence: Synthetic oligonucleotide
aggggaacgcccugcuuuc

SEQ ID NO: 1242193 - RNA, 19 nt, Artificial Sequence
  Description of Artificial Sequence: Synthetic oligonucleotide
ggaaugaucuuaucagguc

SEQ ID NO: 1242194 - RNA, 19 nt, Artificial Sequence
  Description of Artificial Sequence: Synthetic oligonucleotide
agagauaguuuugaaucaa

SEQ ID NO: 1242195 - RNA, 19 nt, Artificial Sequence
  Description of Artificial Sequence: Synthetic oligonucleotide
caaucaccaguccuauaac

SEQ ID NO: 1242196 - RNA, 19 nt, Artificial Sequence
  Description of Artificial Sequence: Synthetic oligonucleotide
ucucaccagcccaggaaga

SEQ ID NO: 1242197 - RNA, 19 nt, Artificial Sequence
  Description of Artificial Sequence: Synthetic oligonucleotide
ugaugcguuguccuucauu

SEQ ID NO: 1242198 - RNA, 19 nt, Artificial Sequence
  Description of Artificial Sequence: Synthetic oligonucleotide
uuucgccgaugcaaucacc

SEQ ID NO: 1242199 - RNA, 19 nt, Artificial Sequence
  Description of Artificial Sequence: Synthetic oligonucleotide
cauaguuacauaguuggcu

SEQ ID NO: 1242200 - RNA, 19 nt, Artificial Sequence
  Description of Artificial Sequence: Synthetic oligonucleotide
agccagaauucaguuggac

SEQ ID NO: 1242201 - RNA, 19 nt, Artificial Sequence
  Description of Artificial Sequence: Synthetic oligonucleotide
cuauaaccuuguucacagc

SEQ ID NO: 1242202 - RNA, 19 nt, Artificial Sequence
  Description of Artificial Sequence: Synthetic oligonucleotide
cauaugcucgaauguccug

SEQ ID NO: 1242203 - RNA, 19 nt, Artificial Sequence
  Description of Artificial Sequence: Synthetic oligonucleotide
caaauugaugcguuguccu

SEQ ID NO: 1242204 - RNA, 19 nt, Artificial Sequence
  Description of Artificial Sequence: Synthetic oligonucleotide
agcuuauauccauuuccau

SEQ ID NO: 1242205 - RNA, 19 nt, Artificial Sequence
  Description of Artificial Sequence: Synthetic oligonucleotide
cuuucgccgaugcaaucac

SEQ ID NO: 1242206 - RNA, 19 nt, Artificial Sequence
  Description of Artificial Sequence: Synthetic oligonucleotide
auuagaagguauaggguua

SEQ ID NO: 1242207 - RNA, 19 nt, Artificial Sequence
  Description of Artificial Sequence: Synthetic oligonucleotide
acuuuaauucauaguuaca

SEQ ID NO: 1242208 - RNA, 19 nt, Artificial Sequence
  Description of Artificial Sequence: Synthetic oligonucleotide
aggauauagcuuauaucca

SEQ ID NO: 1242209 - RNA, 19 nt, Artificial Sequence
  Description of Artificial Sequence: Synthetic oligonucleotide
auucaugaugcccgccgcu

SEQ ID NO: 1242210 - RNA, 19 nt, Artificial Sequence
  Description of Artificial Sequence: Synthetic oligonucleotide
gagcccacuaaaccacccc

SEQ ID NO: 1242211 - RNA, 19 nt, Artificial Sequence
  Description of Artificial Sequence: Synthetic oligonucleotide
cugcuacaguaaaauuccc

SEQ ID NO: 1242212 - RNA, 19 nt, Artificial Sequence
  Description of Artificial Sequence: Synthetic oligonucleotide
aggaguugaggauuucaua

SEQ ID NO: 1242213 - RNA, 19 nt, Artificial Sequence
  Description of Artificial Sequence: Synthetic oligonucleotide
auguccugacaguaaaauu

SEQ ID NO: 1242214 - RNA, 19 nt, Artificial Sequence
  Description of Artificial Sequence: Synthetic oligonucleotide
caugaugcccgccgcuccg

SEQ ID NO: 1242215 - RNA, 19 nt, Artificial Sequence
  Description of Artificial Sequence: Synthetic oligonucleotide
gauuucagauuagaaggua

SEQ ID NO: 1242216 - RNA, 19 nt, Artificial Sequence
  Description of Artificial Sequence: Synthetic oligonucleotide
caccugacccaggugaggg

SEQ ID NO: 1242217 - RNA, 19 nt, Artificial Sequence
  Description of Artificial Sequence: Synthetic oligonucleotide
aggugcagaccauuuucca

SEQ ID NO: 1242218 - RNA, 19 nt, Artificial Sequence
  Description of Artificial Sequence: Synthetic oligonucleotide
auucaguuggacaggugcu

SEQ ID NO: 1242219 - RNA, 19 nt, Artificial Sequence
  Description of Artificial Sequence: Synthetic oligonucleotide
auuacucugggagccagaa

SEQ ID NO: 1242220 - RNA, 19 nt, Artificial Sequence
  Description of Artificial Sequence: Synthetic oligonucleotide
caucuggaagacgugccag

SEQ ID NO: 1242221 - RNA, 19 nt, Artificial Sequence
  Description of Artificial Sequence: Synthetic oligonucleotide
aacgcccugcuuucgccga

SEQ ID NO: 1242222 - RNA, 19 nt, Artificial Sequence
  Description of Artificial Sequence: Synthetic oligonucleotide
caccucaauuccuauuuca

SEQ ID NO: 1242223 - RNA, 19 nt, Artificial Sequence
  Description of Artificial Sequence: Synthetic oligonucleotide
ucgccgaugcaaucaccag

SEQ ID NO: 1242224 - RNA, 19 nt, Artificial Sequence
  Description of Artificial Sequence: Synthetic oligonucleotide
cauagcucaauugcgucca

SEQ ID NO: 1242225 - RNA, 19 nt, Artificial Sequence
  Description of Artificial Sequence: Synthetic oligonucleotide
gugagucagucuuugauau

SEQ ID NO: 1242226 - RNA, 19 nt, Artificial Sequence
  Description of Artificial Sequence: Synthetic oligonucleotide
auacguuuccuuccagguu

SEQ ID NO: 1242227 - RNA, 19 nt, Artificial Sequence
  Description of Artificial Sequence: Synthetic oligonucleotide
cuucuauuggcugauucaa

SEQ ID NO: 1242228 - RNA, 19 nt, Artificial Sequence
  Description of Artificial Sequence: Synthetic oligonucleotide
guuauucaugaugcccgcc

SEQ ID NO: 1242229 - RNA, 19 nt, Artificial Sequence
  Description of Artificial Sequence: Synthetic oligonucleotide
uugugcaguggcguggccu

SEQ ID NO: 1242230 - RNA, 19 nt, Artificial Sequence
  Description of Artificial Sequence: Synthetic oligonucleotide
agaccauuuuccaucugga

SEQ ID NO: 1242231 - RNA, 19 nt, Artificial Sequence
  Description of Artificial Sequence: Synthetic oligonucleotide
gagauaguuuugaaucaaa

SEQ ID NO: 1242232 - RNA, 19 nt, Artificial Sequence
  Description of Artificial Sequence: Synthetic oligonucleotide
cucucgugcuacuuuucuc

SEQ ID NO: 1242233 - RNA, 19 nt, Artificial Sequence
  Description of Artificial Sequence: Synthetic oligonucleotide
guaagugaagacagcugca

SEQ ID NO: 1242234 - RNA, 19 nt, Artificial Sequence
  Description of Artificial Sequence: Synthetic oligonucleotide
uucaugaugcccgccgcuc

SEQ ID NO: 1242235 - RNA, 19 nt, Artificial Sequence
  Description of Artificial Sequence: Synthetic oligonucleotide
cagcaaaacaccgggccac

SEQ ID NO: 1242236 - RNA, 19 nt, Artificial Sequence
  Description of Artificial Sequence: Synthetic oligonucleotide
cuagguucggugguccaac

SEQ ID NO: 1242237 - RNA, 19 nt, Artificial Sequence
  Description of Artificial Sequence: Synthetic oligonucleotide
ugaugguuuuggagguaau

SEQ ID NO: 1242238 - RNA, 19 nt, Artificial Sequence
  Description of Artificial Sequence: Synthetic oligonucleotide
acguuuccuuccagguucc

SEQ ID NO: 1242239 - RNA, 19 nt, Artificial Sequence
  Description of Artificial Sequence: Synthetic oligonucleotide
cuaauacgcccagcaaaac

SEQ ID NO: 1242240 - RNA, 19 nt, Artificial Sequence
  Description of Artificial Sequence: Synthetic oligonucleotide
ugcucgggauugcuguggu

SEQ ID NO: 1242241 - RNA, 19 nt, Artificial Sequence
  Description of Artificial Sequence: Synthetic oligonucleotide
gcucaauugcguccacccg

SEQ ID NO: 1242242 - RNA, 19 nt, Artificial Sequence
  Description of Artificial Sequence: Synthetic oligonucleotide
cuauuggcugauucaaacu

SEQ ID NO: 1242243 - RNA, 19 nt, Artificial Sequence
  Description of Artificial Sequence: Synthetic oligonucleotide
cauuggccgcccuggcacg

SEQ ID NO: 1242244 - RNA, 19 nt, Artificial Sequence
  Description of Artificial Sequence: Synthetic oligonucleotide
uagcucaauugcguccacc

SEQ ID NO: 1242245 - RNA, 19 nt, Artificial Sequence
  Description of Artificial Sequence: Synthetic oligonucleotide
caggacccgcccaacgggc

SEQ ID NO: 1242246 - RNA, 19 nt, Artificial Sequence
  Description of Artificial Sequence: Synthetic oligonucleotide
ugucagguuuccacccuuu

SEQ ID NO: 1242247 - RNA, 19 nt, Artificial Sequence
  Description of Artificial Sequence: Synthetic oligonucleotide
guaccuugcccggaagggc

SEQ ID NO: 1242248 - RNA, 19 nt, Artificial Sequence
  Description of Artificial Sequence: Synthetic oligonucleotide
uuacucugggagccagaau

SEQ ID NO: 1242249 - RNA, 19 nt, Artificial Sequence
  Description of Artificial Sequence: Synthetic oligonucleotide
guugcccuucaaaagagua

SEQ ID NO: 1242250 - RNA, 19 nt, Artificial Sequence
  Description of Artificial Sequence: Synthetic oligonucleotide
cuggaagacgugccaggac

SEQ ID NO: 1242251 - RNA, 19 nt, Artificial Sequence
  Description of Artificial Sequence: Synthetic oligonucleotide
guccuauaaccuuguucac

SEQ ID NO: 1242252 - RNA, 19 nt, Artificial Sequence
  Description of Artificial Sequence: Synthetic oligonucleotide
ggauauagcuuauauccau

SEQ ID NO: 1242253 - RNA, 19 nt, Artificial Sequence
  Description of Artificial Sequence: Synthetic oligonucleotide
ucgugcuacuuuucucaaa

SEQ ID NO: 1242254 - RNA, 19 nt, Artificial Sequence
  Description of Artificial Sequence: Synthetic oligonucleotide
agagcuucucagggauacg

SEQ ID NO: 1242255 - RNA, 19 nt, Artificial Sequence
  Description of Artificial Sequence: Synthetic oligonucleotide
cugguuguugcccuucaaa

SEQ ID NO: 1242256 - RNA, 19 nt, Artificial Sequence
  Description of Artificial Sequence: Synthetic oligonucleotide
uccauuacucugggagcca

SEQ ID NO: 1242257 - RNA, 19 nt, Artificial Sequence
  Description of Artificial Sequence: Synthetic oligonucleotide
agaguacagugcugucacu

SEQ ID NO: 1242258 - RNA, 19 nt, Artificial Sequence
  Description of Artificial Sequence: Synthetic oligonucleotide
ugcucucgugcuacuuuuc

SEQ ID NO: 1242259 - RNA, 19 nt, Artificial Sequence
  Description of Artificial Sequence: Synthetic oligonucleotide
ccuaauacgcccagcaaaa

SEQ ID NO: 1242260 - RNA, 19 nt, Artificial Sequence
  Description of Artificial Sequence: Synthetic oligonucleotide
augaugcccgccgcuccgc

SEQ ID NO: 1242261 - RNA, 19 nt, Artificial Sequence
  Description of Artificial Sequence: Synthetic oligonucleotide
gauauagcuuauauccauu

SEQ ID NO: 1242262 - RNA, 19 nt, Artificial Sequence
  Description of Artificial Sequence: Synthetic oligonucleotide
uaaaggaguugaggauuuc

SEQ ID NO: 1242263 - RNA, 19 nt, Artificial Sequence
  Description of Artificial Sequence: Synthetic oligonucleotide
uucaaauccccugguuguu

SEQ ID NO: 1242264 - RNA, 19 nt, Artificial Sequence
  Description of Artificial Sequence: Synthetic oligonucleotide
cacguccuaauacgcccag

SEQ ID NO: 1242265 - RNA, 19 nt, Artificial Sequence
  Description of Artificial Sequence: Synthetic oligonucleotide
caggugcucgggauugcug

SEQ ID NO: 1242266 - RNA, 19 nt, Artificial Sequence
  Description of Artificial Sequence: Synthetic oligonucleotide
ugcuuucgccgaugcaauc

SEQ ID NO: 1242267 - RNA, 19 nt, Artificial Sequence
  Description of Artificial Sequence: Synthetic oligonucleotide
ggaauaggggaacgcccug

SEQ ID NO: 1242268 - RNA, 19 nt, Artificial Sequence
  Description of Artificial Sequence: Synthetic oligonucleotide
cgugccaggacaaucccac

SEQ ID NO: 1242269 - RNA, 19 nt, Artificial Sequence
  Description of Artificial Sequence: Synthetic oligonucleotide
augcucgaauguccugaca

SEQ ID NO: 1242270 - RNA, 19 nt, Artificial Sequence
  Description of Artificial Sequence: Synthetic oligonucleotide
gccgaugcaaucaccaguc

SEQ ID NO: 1242271 - RNA, 19 nt, Artificial Sequence
  Description of Artificial Sequence: Synthetic oligonucleotide
uccugucuguguagagaua

SEQ ID NO: 1242272 - RNA, 19 nt, Artificial Sequence
  Description of Artificial Sequence: Synthetic oligonucleotide
augcaaucaccaguccuau

SEQ ID NO: 1242273 - RNA, 19 nt, Artificial Sequence
  Description of Artificial Sequence: Synthetic oligonucleotide
ugcaaucaccaguccuaua

SEQ ID NO: 1242274 - RNA, 19 nt, Artificial Sequence
  Description of Artificial Sequence: Synthetic oligonucleotide
ucauuccucuggagcccac

SEQ ID NO: 1242275 - RNA, 19 nt, Artificial Sequence
  Description of Artificial Sequence: Synthetic oligonucleotide
gaugguuuuggagguaauu

SEQ ID NO: 1242276 - RNA, 19 nt, Artificial Sequence
  Description of Artificial Sequence: Synthetic oligonucleotide
caccaaucaaaaugugagu

SEQ ID NO: 1242277 - RNA, 19 nt, Artificial Sequence
  Description of Artificial Sequence: Synthetic oligonucleotide
ugacccaggugagggaaua

SEQ ID NO: 1242278 - RNA, 19 nt, Artificial Sequence
  Description of Artificial Sequence: Synthetic oligonucleotide
cagcauagcucaauugcgu

SEQ ID NO: 1242279 - RNA, 19 nt, Artificial Sequence
  Description of Artificial Sequence: Synthetic oligonucleotide
gaguacagugcugucacuu

SEQ ID NO: 1242280 - RNA, 19 nt, Artificial Sequence
  Description of Artificial Sequence: Synthetic oligonucleotide
cucgccuccccgacaggac

SEQ ID NO: 1242281 - RNA, 19 nt, Artificial Sequence
  Description of Artificial Sequence: Synthetic oligonucleotide
cggcuugaaaauucaaauc

SEQ ID NO: 1242282 - RNA, 19 nt, Artificial Sequence
  Description of Artificial Sequence: Synthetic oligonucleotide
aggccccgggauuugcagu

SEQ ID NO: 1242283 - RNA, 19 nt, Artificial Sequence
  Description of Artificial Sequence: Synthetic oligonucleotide
augaucuuaucagguccau

SEQ ID NO: 1242284 - RNA, 19 nt, Artificial Sequence
  Description of Artificial Sequence: Synthetic oligonucleotide
gcguccacccgccucauuc

SEQ ID NO: 1242285 - RNA, 19 nt, Artificial Sequence
  Description of Artificial Sequence: Synthetic oligonucleotide
ugucuccggcuugaaaauu

SEQ ID NO: 1242286 - RNA, 19 nt, Artificial Sequence
  Description of Artificial Sequence: Synthetic oligonucleotide
ccaggacaaucccacugcc

SEQ ID NO: 1242287 - RNA, 19 nt, Artificial Sequence
  Description of Artificial Sequence: Synthetic oligonucleotide
acaggugcucgggauugcu

SEQ ID NO: 1242288 - RNA, 19 nt, Artificial Sequence
  Description of Artificial Sequence: Synthetic oligonucleotide
ggcgguaccucagagcaga

SEQ ID NO: 1242289 - RNA, 19 nt, Artificial Sequence
  Description of Artificial Sequence: Synthetic oligonucleotide
ccgggauuugcaguaagug

SEQ ID NO: 1242290 - RNA, 19 nt, Artificial Sequence
  Description of Artificial Sequence: Synthetic oligonucleotide
ccgagcuccucucaccagc

SEQ ID NO: 1242291 - RNA, 19 nt, Artificial Sequence
  Description of Artificial Sequence: Synthetic oligonucleotide
caaaucggacaccucaauu

SEQ ID NO: 1242292 - RNA, 19 nt, Artificial Sequence
  Description of Artificial Sequence: Synthetic oligonucleotide
gacaggugcucgggauugc

SEQ ID NO: 1242293 - RNA, 19 nt, Artificial Sequence
  Description of Artificial Sequence: Synthetic oligonucleotide
ggccucgccuccccgacag

SEQ ID NO: 1242294 - RNA, 19 nt, Artificial Sequence
  Description of Artificial Sequence: Synthetic oligonucleotide
gggauacguuuccuuccag

SEQ ID NO: 1242295 - RNA, 19 nt, Artificial Sequence
  Description of Artificial Sequence: Synthetic oligonucleotide
gcuuucgccgaugcaauca

SEQ ID NO: 1242296 - RNA, 19 nt, Artificial Sequence
  Description of Artificial Sequence: Synthetic oligonucleotide
ggugcucgggauugcugug

SEQ ID NO: 1242297 - RNA, 19 nt, Artificial Sequence
  Description of Artificial Sequence: Synthetic oligonucleotide
gggaacgcccugcuuucgc

SEQ ID NO: 1242298 - RNA, 19 nt, Artificial Sequence
  Description of Artificial Sequence: Synthetic oligonucleotide
guaaaggaguugaggauuu

SEQ ID NO: 1242299 - RNA, 19 nt, Artificial Sequence
  Description of Artificial Sequence: Synthetic oligonucleotide
aggacccgcccaacgggcg

SEQ ID NO: 1242300 - RNA, 19 nt, Artificial Sequence
  Description of Artificial Sequence: Synthetic oligonucleotide
caacgggcgcacaccugac

SEQ ID NO: 1242301 - RNA, 19 nt, Artificial Sequence
  Description of Artificial Sequence: Synthetic oligonucleotide
gacaaaacugcaaguccuu

SEQ ID NO: 1242302 - RNA, 19 nt, Artificial Sequence
  Description of Artificial Sequence: Synthetic oligonucleotide
augccaguuugaccucgaa

SEQ ID NO: 1242303 - RNA, 19 nt, Artificial Sequence
  Description of Artificial Sequence: Synthetic oligonucleotide
cuuggccggccucgccucc

SEQ ID NO: 1242304 - RNA, 19 nt, Artificial Sequence
  Description of Artificial Sequence: Synthetic oligonucleotide
accuugcccggaagggcgg

SEQ ID NO: 1242305 - RNA, 19 nt, Artificial Sequence
  Description of Artificial Sequence: Synthetic oligonucleotide
uugaugcguuguccuucau

SEQ ID NO: 1242306 - RNA, 19 nt, Artificial Sequence
  Description of Artificial Sequence: Synthetic oligonucleotide
cgggauuugcaguaaguga

SEQ ID NO: 1242307 - RNA, 19 nt, Artificial Sequence
  Description of Artificial Sequence: Synthetic oligonucleotide
ggcuguggaacaucuccaa

SEQ ID NO: 1242308 - RNA, 19 nt, Artificial Sequence
  Description of Artificial Sequence: Synthetic oligonucleotide
gucuguguagagauaguuu

SEQ ID NO: 1242309 - RNA, 19 nt, Artificial Sequence
  Description of Artificial Sequence: Synthetic oligonucleotide
ccggcuugaaaauucaaau

SEQ ID NO: 1242310 - RNA, 19 nt, Artificial Sequence
  Description of Artificial Sequence: Synthetic oligonucleotide
acgugccaggacaauccca

SEQ ID NO: 1242311 - RNA, 19 nt, Artificial Sequence
  Description of Artificial Sequence: Synthetic oligonucleotide
ggaagggcgguaccucaga

SEQ ID NO: 1242312 - RNA, 19 nt, Artificial Sequence
  Description of Artificial Sequence: Synthetic oligonucleotide
uggcguggccuagguucgg

SEQ ID NO: 1242313 - RNA, 19 nt, Artificial Sequence
  Description of Artificial Sequence: Synthetic oligonucleotide
ccaacgggcgcacaccuga

SEQ ID NO: 1242314 - RNA, 19 nt, Artificial Sequence
  Description of Artificial Sequence: Synthetic oligonucleotide
cugaaggugcagaccauuu

SEQ ID NO: 1242315 - RNA, 19 nt, Artificial Sequence
  Description of Artificial Sequence: Synthetic oligonucleotide
guauaggguuauucaugau

SEQ ID NO: 1242316 - RNA, 19 nt, Artificial Sequence
  Description of Artificial Sequence: Synthetic oligonucleotide
caacugcuacaguaaaauu

SEQ ID NO: 1242317 - RNA, 19 nt, Artificial Sequence
  Description of Artificial Sequence: Synthetic oligonucleotide
guucaggauauagcuuaua

SEQ ID NO: 1242318 - RNA, 19 nt, Artificial Sequence
  Description of Artificial Sequence: Synthetic oligonucleotide
ggguccgcaggccaccauc

SEQ ID NO: 1242319 - RNA, 19 nt, Artificial Sequence
  Description of Artificial Sequence: Synthetic oligonucleotide
caggacaaucccacugccu

SEQ ID NO: 1242320 - RNA, 19 nt, Artificial Sequence
  Description of Artificial Sequence: Synthetic oligonucleotide
gaggagcaccgcccaggga

SEQ ID NO: 1242321 - RNA, 19 nt, Artificial Sequence
  Description of Artificial Sequence: Synthetic oligonucleotide
agcuuccuucuagggaaau

SEQ ID NO: 1242322 - RNA, 19 nt, Artificial Sequence
  Description of Artificial Sequence: Synthetic oligonucleotide
agauguggucaaacagguu

SEQ ID NO: 1242323 - RNA, 19 nt, Artificial Sequence
  Description of Artificial Sequence: Synthetic oligonucleotide
cuagaaaguucaggauaua

SEQ ID NO: 1242324 - RNA, 19 nt, Artificial Sequence
  Description of Artificial Sequence: Synthetic oligonucleotide
uuggccggccucgccuccc

SEQ ID NO: 1242325 - RNA, 19 nt, Artificial Sequence
  Description of Artificial Sequence: Synthetic oligonucleotide
cugucuccggcuugaaaau

SEQ ID NO: 1242326 - RNA, 19 nt, Artificial Sequence
  Description of Artificial Sequence: Synthetic oligonucleotide
ggaaggcguuauccuuggc

SEQ ID NO: 1242327 - RNA, 19 nt, Artificial Sequence
  Description of Artificial Sequence: Synthetic oligonucleotide
auuggccgcccuggcacgu

SEQ ID NO: 1242328 - RNA, 19 nt, Artificial Sequence
  Description of Artificial Sequence: Synthetic oligonucleotide
gggagacccacugcuugug

SEQ ID NO: 1242329 - RNA, 19 nt, Artificial Sequence
  Description of Artificial Sequence: Synthetic oligonucleotide
gggguaccuugcccggaag

SEQ ID NO: 1242330 - RNA, 19 nt, Artificial Sequence
  Description of Artificial Sequence: Synthetic oligonucleotide
gggaauaggggaacgcccu

SEQ ID NO: 1242331 - RNA, 19 nt, Artificial Sequence
  Description of Artificial Sequence: Synthetic oligonucleotide
accgcccagggaggguccg

SEQ ID NO: 1242332 - RNA, 19 nt, Artificial Sequence
  Description of Artificial Sequence: Synthetic oligonucleotide
cugcuuucgccgaugcaau

SEQ ID NO: 1242333 - RNA, 19 nt, Artificial Sequence
  Description of Artificial Sequence: Synthetic oligonucleotide
ccgaugcaaucaccagucc

SEQ ID NO: 1242334 - RNA, 19 nt, Artificial Sequence
  Description of Artificial Sequence: Synthetic oligonucleotide
ggccuagguucgguggucc

SEQ ID NO: 1242335 - RNA, 19 nt, Artificial Sequence
  Description of Artificial Sequence: Synthetic oligonucleotide
gggcucauuggccgcccug

SEQ ID NO: 1242336 - RNA, 19 nt, Artificial Sequence
  Description of Artificial Sequence: Synthetic oligonucleotide
gcagaccauuuuccaucug

SEQ ID NO: 1242337 - RNA, 19 nt, Artificial Sequence
  Description of Artificial Sequence: Synthetic oligonucleotide
gcucucgugcuacuuuucu

SEQ ID NO: 1242338 - RNA, 19 nt, Artificial Sequence
  Description of Artificial Sequence: Synthetic oligonucleotide
ggaggguccgcaggccacc

SEQ ID NO: 1242339 - RNA, 19 nt, Artificial Sequence
  Description of Artificial Sequence: Synthetic oligonucleotide
ggggaacgcccugcuuucg

SEQ ID NO: 1242340 - RNA, 19 nt, Artificial Sequence
  Description of Artificial Sequence: Synthetic oligonucleotide
ggcccaacugcuacaguaa

SEQ ID NO: 1242341 - RNA, 19 nt, Artificial Sequence
  Description of Artificial Sequence: Synthetic oligonucleotide
cgacaggacccgcccaacg

SEQ ID NO: 1242342 - RNA, 19 nt, Artificial Sequence
  Description of Artificial Sequence: Synthetic oligonucleotide
gaagacgugccaggacaau

SEQ ID NO: 1242343 - RNA, 19 nt, Artificial Sequence
  Description of Artificial Sequence: Synthetic oligonucleotide
cggggagacccacugcuug

SEQ ID NO: 1242344 - RNA, 19 nt, Artificial Sequence
  Description of Artificial Sequence: Synthetic oligonucleotide
cugcucucgugcuacuuuu

SEQ ID NO: 1242345 - RNA, 19 nt, Artificial Sequence
  Description of Artificial Sequence: Synthetic oligonucleotide
gacccgcccaacgggcgca

SEQ ID NO: 1242346 - RNA, 19 nt, Artificial Sequence
  Description of Artificial Sequence: Synthetic oligonucleotide
gaggguccgcaggccacca

SEQ ID NO: 1242347 - RNA, 19 nt, Artificial Sequence
  Description of Artificial Sequence: Synthetic oligonucleotide
gggcaggaaugaucuuauc

SEQ ID NO: 1242348 - RNA, 19 nt, Artificial Sequence
  Description of Artificial Sequence: Synthetic oligonucleotide
gcacguccuaauacgccca

SEQ ID NO: 1242349 - RNA, 19 nt, Artificial Sequence
  Description of Artificial Sequence: Synthetic oligonucleotide
acgcccugcuuucgccgau

SEQ ID NO: 1242350 - RNA, 19 nt, Artificial Sequence
  Description of Artificial Sequence: Synthetic oligonucleotide
acccgcccaacgggcgcac

SEQ ID NO: 1242351 - RNA, 19 nt, Artificial Sequence
  Description of Artificial Sequence: Synthetic oligonucleotide
aggguccgcaggccaccau

SEQ ID NO: 1242352 - RNA, 19 nt, Artificial Sequence
  Description of Artificial Sequence: Synthetic oligonucleotide
gcguuauccuuggccggcc

SEQ ID NO: 1242353 - RNA, 19 nt, Artificial Sequence
  Description of Artificial Sequence: Synthetic oligonucleotide
ccccgggauuugcaguaag

SEQ ID NO: 1242354 - RNA, 19 nt, Artificial Sequence
  Description of Artificial Sequence: Synthetic oligonucleotide
ugcguccacccgccucauu

SEQ ID NO: 1242355 - RNA, 19 nt, Artificial Sequence
  Description of Artificial Sequence: Synthetic oligonucleotide
cuccgcccggugcccgagc

SEQ ID NO: 1242356 - RNA, 19 nt, Artificial Sequence
  Description of Artificial Sequence: Synthetic oligonucleotide
ccuuggccggccucgccuc

SEQ ID NO: 1242357 - RNA, 19 nt, Artificial Sequence
  Description of Artificial Sequence: Synthetic oligonucleotide
gccuagguucgguggucca

SEQ ID NO: 1242358 - RNA, 19 nt, Artificial Sequence
  Description of Artificial Sequence: Synthetic oligonucleotide
cgguaccucagagcagagg

SEQ ID NO: 1242359 - RNA, 19 nt, Artificial Sequence
  Description of Artificial Sequence: Synthetic oligonucleotide
cgaugcaaucaccaguccu

SEQ ID NO: 1242360 - RNA, 19 nt, Artificial Sequence
  Description of Artificial Sequence: Synthetic oligonucleotide
ccgccucauuccucuggag

SEQ ID NO: 1242361 - RNA, 19 nt, Artificial Sequence
  Description of Artificial Sequence: Synthetic oligonucleotide
cauuccucuggagcccacu

SEQ ID NO: 1242362 - RNA, 19 nt, Artificial Sequence
  Description of Artificial Sequence: Synthetic oligonucleotide
cccaacgggcgcacaccug

SEQ ID NO: 1242363 - RNA, 19 nt, Artificial Sequence
  Description of Artificial Sequence: Synthetic oligonucleotide
cgcccggugcccgagcucc

SEQ ID NO: 1242364 - RNA, 19 nt, Artificial Sequence
  Description of Artificial Sequence: Synthetic oligonucleotide
cugacccaggugagggaau

SEQ ID NO: 1242365 - RNA, 19 nt, Artificial Sequence
  Description of Artificial Sequence: Synthetic oligonucleotide
gcgguaccucagagcagag

SEQ ID NO: 1242366 - RNA, 19 nt, Artificial Sequence
  Description of Artificial Sequence: Synthetic oligonucleotide
ccaguuugaccucgaaguu

SEQ ID NO: 1242367 - RNA, 19 nt, Artificial Sequence
  Description of Artificial Sequence: Synthetic oligonucleotide
gcccaacgggcgcacaccu

SEQ ID NO: 1242368 - RNA, 19 nt, Artificial Sequence
  Description of Artificial Sequence: Synthetic oligonucleotide
cccgggauuugcaguaagu

SEQ ID NO: 1242369 - RNA, 19 nt, Artificial Sequence
  Description of Artificial Sequence: Synthetic oligonucleotide
ccuagguucggugguccaa

SEQ ID NO: 1242370 - RNA, 19 nt, Artificial Sequence
  Description of Artificial Sequence: Synthetic oligonucleotide
caauugcguccacccgccu

SEQ ID NO: 1242371 - RNA, 19 nt, Artificial Sequence
  Description of Artificial Sequence: Synthetic oligonucleotide
ccggccucgccuccccgac

SEQ ID NO: 1242372 - RNA, 19 nt, Artificial Sequence
  Description of Artificial Sequence: Synthetic oligonucleotide
cuugcccggaagggcggua

SEQ ID NO: 1242373 - RNA, 19 nt, Artificial Sequence
  Description of Artificial Sequence: Synthetic oligonucleotide
ccgacaggacccgcccaac

SEQ ID NO: 1242374 - RNA, 19 nt, Artificial Sequence
  Description of Artificial Sequence: Synthetic oligonucleotide
cgcccaacgggcgcacacc

SEQ ID NO: 1242375 - RNA, 19 nt, Artificial Sequence
  Description of Artificial Sequence: Synthetic oligonucleotide
cgccgaugcaaucaccagu

SEQ ID NO: 1242376 - RNA, 19 nt, Artificial Sequence
  Description of Artificial Sequence: Synthetic oligonucleotide
ggcguggccuagguucggu

SEQ ID NO: 1242377 - RNA, 19 nt, Artificial Sequence
  Description of Artificial Sequence: Synthetic oligonucleotide
ccgcccagggaggguccgc

SEQ ID NO: 1242378 - RNA, 19 nt, Artificial Sequence
  Description of Artificial Sequence: Synthetic oligonucleotide
gccccgggauuugcaguaa

SEQ ID NO: 1242379 - RNA, 19 nt, Artificial Sequence
  Description of Artificial Sequence: Synthetic oligonucleotide
cguuauccuuggccggccu

SEQ ID NO: 1242380 - RNA, 19 nt, Artificial Sequence
  Description of Artificial Sequence: Synthetic oligonucleotide
ccgcccuggcacguccuaa

SEQ ID NO: 1242381 - RNA, 19 nt, Artificial Sequence
  Description of Artificial Sequence: Synthetic oligonucleotide
ccuugcccggaagggcggu

SEQ ID NO: 1242382 - RNA, 19 nt, Artificial Sequence
  Description of Artificial Sequence: Synthetic oligonucleotide
cggccucgccuccccgaca

SEQ ID NO: 1242383 - RNA, 19 nt, Artificial Sequence
  Description of Artificial Sequence: Synthetic oligonucleotide
ugugguuucauaaagcugg

SEQ ID NO: 1242384 - RNA, 19 nt, Artificial Sequence
  Description of Artificial Sequence: Synthetic oligonucleotide
aaaucgagaccuuuugucc

SEQ ID NO: 1242385 - RNA, 19 nt, Artificial Sequence
  Description of Artificial Sequence: Synthetic oligonucleotide
aauucgaucugagaaaucg

SEQ ID NO: 1242386 - RNA, 19 nt, Artificial Sequence
  Description of Artificial Sequence: Synthetic oligonucleotide
aguuguacaguauuaacag

SEQ ID NO: 1242387 - RNA, 19 nt, Artificial Sequence
  Description of Artificial Sequence: Synthetic oligonucleotide
uuaauggucagaaacaguu

SEQ ID NO: 1242388 - RNA, 19 nt, Artificial Sequence
  Description of Artificial Sequence: Synthetic oligonucleotide
auaaacaucgggcucguuc

SEQ ID NO: 1242389 - RNA, 19 nt, Artificial Sequence
  Description of Artificial Sequence: Synthetic oligonucleotide
aauguaguucguaagugac

SEQ ID NO: 1242390 - RNA, 19 nt, Artificial Sequence
  Description of Artificial Sequence: Synthetic oligonucleotide
uuuaggguccgccauggcg

SEQ ID NO: 1242391 - RNA, 19 nt, Artificial Sequence
  Description of Artificial Sequence: Synthetic oligonucleotide
uaguucguaagugacaagg

SEQ ID NO: 1242392 - RNA, 19 nt, Artificial Sequence
  Description of Artificial Sequence: Synthetic oligonucleotide
uccacaagaacccuugccc

SEQ ID NO: 1242393 - RNA, 19 nt, Artificial Sequence
  Description of Artificial Sequence: Synthetic oligonucleotide
uucguaagugacaaggcug

SEQ ID NO: 1242394 - RNA, 19 nt, Artificial Sequence
  Description of Artificial Sequence: Synthetic oligonucleotide
uucgaucugagaaaucgag

SEQ ID NO: 1242395 - RNA, 19 nt, Artificial Sequence
  Description of Artificial Sequence: Synthetic oligonucleotide
uaaacaucgggcucguucc

SEQ ID NO: 1242396 - RNA, 19 nt, Artificial Sequence
  Description of Artificial Sequence: Synthetic oligonucleotide
acaguuguacaguauuaac

SEQ ID NO: 1242397 - RNA, 19 nt, Artificial Sequence
  Description of Artificial Sequence: Synthetic oligonucleotide
auagucuccagauucauau

SEQ ID NO: 1242398 - RNA, 19 nt, Artificial Sequence
  Description of Artificial Sequence: Synthetic oligonucleotide
uuggacuucaugcaggagu

SEQ ID NO: 1242399 - RNA, 19 nt, Artificial Sequence
  Description of Artificial Sequence: Synthetic oligonucleotide
uagaccugcagaaagggga

SEQ ID NO: 1242400 - RNA, 19 nt, Artificial Sequence
  Description of Artificial Sequence: Synthetic oligonucleotide
ugugugguuucauaaagcu

SEQ ID NO: 1242401 - RNA, 19 nt, Artificial Sequence
  Description of Artificial Sequence: Synthetic oligonucleotide
ucccaauucgaucugagaa

SEQ ID NO: 1242402 - RNA, 19 nt, Artificial Sequence
  Description of Artificial Sequence: Synthetic oligonucleotide
gaaaucgagaccuuuuguc

SEQ ID NO: 1242403 - RNA, 19 nt, Artificial Sequence
  Description of Artificial Sequence: Synthetic oligonucleotide
gguuucauaaagcuggugc

SEQ ID NO: 1242404 - RNA, 19 nt, Artificial Sequence
  Description of Artificial Sequence: Synthetic oligonucleotide
auuuaauggucagaaacag

SEQ ID NO: 1242405 - RNA, 19 nt, Artificial Sequence
  Description of Artificial Sequence: Synthetic oligonucleotide
aggguuaccccauuuguuc

SEQ ID NO: 1242406 - RNA, 19 nt, Artificial Sequence
  Description of Artificial Sequence: Synthetic oligonucleotide
ugguuucauaaacaucggg

SEQ ID NO: 1242407 - RNA, 19 nt, Artificial Sequence
  Description of Artificial Sequence: Synthetic oligonucleotide
ucguaagugacaaggcugc

SEQ ID NO: 1242408 - RNA, 19 nt, Artificial Sequence
  Description of Artificial Sequence: Synthetic oligonucleotide
ucuacuugguccagaacug

SEQ ID NO: 1242409 - RNA, 19 nt, Artificial Sequence
  Description of Artificial Sequence: Synthetic oligonucleotide
uguggcugggcccacaccc

SEQ ID NO: 1242410 - RNA, 19 nt, Artificial Sequence
  Description of Artificial Sequence: Synthetic oligonucleotide
cauagcuugcucaugcagc

SEQ ID NO: 1242411 - RNA, 19 nt, Artificial Sequence
  Description of Artificial Sequence: Synthetic oligonucleotide
aggccgagaauguaguucg

SEQ ID NO: 1242412 - RNA, 19 nt, Artificial Sequence
  Description of Artificial Sequence: Synthetic oligonucleotide
guuuccauaaggcaggcuc

SEQ ID NO: 1242413 - RNA, 19 nt, Artificial Sequence
  Description of Artificial Sequence: Synthetic oligonucleotide
gaggucggcguauuuaggg

SEQ ID NO: 1242414 - RNA, 19 nt, Artificial Sequence
  Description of Artificial Sequence: Synthetic oligonucleotide
ugauacuucugcuguggcg

SEQ ID NO: 1242415 - RNA, 19 nt, Artificial Sequence
  Description of Artificial Sequence: Synthetic oligonucleotide
aguuauuggacaugagcug

SEQ ID NO: 1242416 - RNA, 19 nt, Artificial Sequence
  Description of Artificial Sequence: Synthetic oligonucleotide
uguacaguauuaacagcca

SEQ ID NO: 1242417 - RNA, 19 nt, Artificial Sequence
  Description of Artificial Sequence: Synthetic oligonucleotide
gcauuuaauggucagaaac

SEQ ID NO: 1242418 - RNA, 19 nt, Artificial Sequence
  Description of Artificial Sequence: Synthetic oligonucleotide
uuuccauaaggcaggcucc

SEQ ID NO: 1242419 - RNA, 19 nt, Artificial Sequence
  Description of Artificial Sequence: Synthetic oligonucleotide
uaaggguuaccccauuugu

SEQ ID NO: 1242420 - RNA, 19 nt, Artificial Sequence
  Description of Artificial Sequence: Synthetic oligonucleotide
uuuaauggucagaaacagu

SEQ ID NO: 1242421 - RNA, 19 nt, Artificial Sequence
  Description of Artificial Sequence: Synthetic oligonucleotide
ugugcuagaggacggggcc

SEQ ID NO: 1242422 - RNA, 19 nt, Artificial Sequence
  Description of Artificial Sequence: Synthetic oligonucleotide
ugugucugcauccuccaca

SEQ ID NO: 1242423 - RNA, 19 nt, Artificial Sequence
  Description of Artificial Sequence: Synthetic oligonucleotide
uguaguucguaagugacaa

SEQ ID NO: 1242424 - RNA, 19 nt, Artificial Sequence
  Description of Artificial Sequence: Synthetic oligonucleotide
gagaaaucgagaccuuuug

SEQ ID NO: 1242425 - RNA, 19 nt, Artificial Sequence
  Description of Artificial Sequence: Synthetic oligonucleotide
agaccuuuuguccccacuc

SEQ ID NO: 1242426 - RNA, 19 nt, Artificial Sequence
  Description of Artificial Sequence: Synthetic oligonucleotide
agauucauauccuguccuc

SEQ ID NO: 1242427 - RNA, 19 nt, Artificial Sequence
  Description of Artificial Sequence: Synthetic oligonucleotide
uucaguugucagcucuugg

SEQ ID NO: 1242428 - RNA, 19 nt, Artificial Sequence
  Description of Artificial Sequence: Synthetic oligonucleotide
uaauggucagaaacaguug

SEQ ID NO: 1242429 - RNA, 19 nt, Artificial Sequence
  Description of Artificial Sequence: Synthetic oligonucleotide
uccgguaaggguuacccca

SEQ ID NO: 1242430 - RNA, 19 nt, Artificial Sequence
  Description of Artificial Sequence: Synthetic oligonucleotide
uguccuucagggaacuggc

SEQ ID NO: 1242431 - RNA, 19 nt, Artificial Sequence
  Description of Artificial Sequence: Synthetic oligonucleotide
gguuucauaaacaucgggc

SEQ ID NO: 1242432 - RNA, 19 nt, Artificial Sequence
  Description of Artificial Sequence: Synthetic oligonucleotide
aguucucgcgcauaguugu

SEQ ID NO: 1242433 - RNA, 19 nt, Artificial Sequence
  Description of Artificial Sequence: Synthetic oligonucleotide
aguucguaagugacaaggc

SEQ ID NO: 1242434 - RNA, 19 nt, Artificial Sequence
  Description of Artificial Sequence: Synthetic oligonucleotide
guuucauaaagcuggugca

SEQ ID NO: 1242435 - RNA, 19 nt, Artificial Sequence
  Description of Artificial Sequence: Synthetic oligonucleotide
auaaagcuggugcaccuug

SEQ ID NO: 1242436 - RNA, 19 nt, Artificial Sequence
  Description of Artificial Sequence: Synthetic oligonucleotide
ucagaaacaguuguacagu

SEQ ID NO: 1242437 - RNA, 19 nt, Artificial Sequence
  Description of Artificial Sequence: Synthetic oligonucleotide
caguuguacaguauuaaca

SEQ ID NO: 1242438 - RNA, 19 nt, Artificial Sequence
  Description of Artificial Sequence: Synthetic oligonucleotide
cauaguugucugcaccugg

SEQ ID NO: 1242439 - RNA, 19 nt, Artificial Sequence
  Description of Artificial Sequence: Synthetic oligonucleotide
uuauuggacaugagcuggc

SEQ ID NO: 1242440 - RNA, 19 nt, Artificial Sequence
  Description of Artificial Sequence: Synthetic oligonucleotide
ucgaucugagaaaucgaga

SEQ ID NO: 1242441 - RNA, 19 nt, Artificial Sequence
  Description of Artificial Sequence: Synthetic oligonucleotide
guuguacaguauuaacagc

SEQ ID NO: 1242442 - RNA, 19 nt, Artificial Sequence
  Description of Artificial Sequence: Synthetic oligonucleotide
uguaccagcucggggaggg

SEQ ID NO: 1242443 - RNA, 19 nt, Artificial Sequence
  Description of Artificial Sequence: Synthetic oligonucleotide
agaaaucgagaccuuuugu

SEQ ID NO: 1242444 - RNA, 19 nt, Artificial Sequence
  Description of Artificial Sequence: Synthetic oligonucleotide
gcaguuauuggacaugagc

SEQ ID NO: 1242445 - RNA, 19 nt, Artificial Sequence
  Description of Artificial Sequence: Synthetic oligonucleotide
ugagaaaucgagaccuuuu

SEQ ID NO: 1242446 - RNA, 19 nt, Artificial Sequence
  Description of Artificial Sequence: Synthetic oligonucleotide
guuucauaaacaucgggcu

SEQ ID NO: 1242447 - RNA, 19 nt, Artificial Sequence
  Description of Artificial Sequence: Synthetic oligonucleotide
ugucaggcgcuuuucaagu

SEQ ID NO: 1242448 - RNA, 19 nt, Artificial Sequence
  Description of Artificial Sequence: Synthetic oligonucleotide
guaaggguuaccccauuug

SEQ ID NO: 1242449 - RNA, 19 nt, Artificial Sequence
  Description of Artificial Sequence: Synthetic oligonucleotide
cugugugguuucauaaagc

SEQ ID NO: 1242450 - RNA, 19 nt, Artificial Sequence
  Description of Artificial Sequence: Synthetic oligonucleotide
ucgcugauacuucugcugu

SEQ ID NO: 1242451 - RNA, 19 nt, Artificial Sequence
  Description of Artificial Sequence: Synthetic oligonucleotide
aacugcauagcuugcucau

SEQ ID NO: 1242452 - RNA, 19 nt, Artificial Sequence
  Description of Artificial Sequence: Synthetic oligonucleotide
ggaacuggcgaucaucugc

SEQ ID NO: 1242453 - RNA, 19 nt, Artificial Sequence
  Description of Artificial Sequence: Synthetic oligonucleotide
guccaagugugucaggagc

SEQ ID NO: 1242454 - RNA, 19 nt, Artificial Sequence
  Description of Artificial Sequence: Synthetic oligonucleotide
aagugugucaggagcugac

SEQ ID NO: 1242455 - RNA, 19 nt, Artificial Sequence
  Description of Artificial Sequence: Synthetic oligonucleotide
uucauucgcucgucaaugc

SEQ ID NO: 1242456 - RNA, 19 nt, Artificial Sequence
  Description of Artificial Sequence: Synthetic oligonucleotide
cauucgcucgucaaugcug

SEQ ID NO: 1242457 - RNA, 19 nt, Artificial Sequence
  Description of Artificial Sequence: Synthetic oligonucleotide
cuugguuuucccaauucga

SEQ ID NO: 1242458 - RNA, 19 nt, Artificial Sequence
  Description of Artificial Sequence: Synthetic oligonucleotide
cuguggucaaguucucgcg

SEQ ID NO: 1242459 - RNA, 19 nt, Artificial Sequence
  Description of Artificial Sequence: Synthetic oligonucleotide
cuugucauaggcggcauug

SEQ ID NO: 1242460 - RNA, 19 nt, Artificial Sequence
  Description of Artificial Sequence: Synthetic oligonucleotide
cugguuucauaaacaucgg

SEQ ID NO: 1242461 - RNA, 19 nt, Artificial Sequence
  Description of Artificial Sequence: Synthetic oligonucleotide
gagaauguaguucguaagu

SEQ ID NO: 1242462 - RNA, 19 nt, Artificial Sequence
  Description of Artificial Sequence: Synthetic oligonucleotide
accuuuuguccccacucuc

SEQ ID NO: 1242463 - RNA, 19 nt, Artificial Sequence
  Description of Artificial Sequence: Synthetic oligonucleotide
cucguuccuggcaaugccg

SEQ ID NO: 1242464 - RNA, 19 nt, Artificial Sequence
  Description of Artificial Sequence: Synthetic oligonucleotide
ggugacuagucucuguacc

SEQ ID NO: 1242465 - RNA, 19 nt, Artificial Sequence
  Description of Artificial Sequence: Synthetic oligonucleotide
ugacuagucucuguaccag

SEQ ID NO: 1242466 - RNA, 19 nt, Artificial Sequence
  Description of Artificial Sequence: Synthetic oligonucleotide
cuucauucgcucgucaaug

SEQ ID NO: 1242467 - RNA, 19 nt, Artificial Sequence
  Description of Artificial Sequence: Synthetic oligonucleotide
gaaacaguuguacaguauu

SEQ ID NO: 1242468 - RNA, 19 nt, Artificial Sequence
  Description of Artificial Sequence: Synthetic oligonucleotide
auucgcucgucaaugcugg

SEQ ID NO: 1242469 - RNA, 19 nt, Artificial Sequence
  Description of Artificial Sequence: Synthetic oligonucleotide
ucauucgcucgucaaugcu

SEQ ID NO: 1242470 - RNA, 19 nt, Artificial Sequence
  Description of Artificial Sequence: Synthetic oligonucleotide
gacuucaugcaggagucgc

SEQ ID NO: 1242471 - RNA, 19 nt, Artificial Sequence
  Description of Artificial Sequence: Synthetic oligonucleotide
auaguugucugcaccuggg

SEQ ID NO: 1242472 - RNA, 19 nt, Artificial Sequence
  Description of Artificial Sequence: Synthetic oligonucleotide
cucuacuugguccagaacu

SEQ ID NO: 1242473 - RNA, 19 nt, Artificial Sequence
  Description of Artificial Sequence: Synthetic oligonucleotide
ugaccaaacugcauagcuu

SEQ ID NO: 1242474 - RNA, 19 nt, Artificial Sequence
  Description of Artificial Sequence: Synthetic oligonucleotide
ugcagcaguaagcgcuuag

SEQ ID NO: 1242475 - RNA, 19 nt, Artificial Sequence
  Description of Artificial Sequence: Synthetic oligonucleotide
gacuagucucuguaccagc

SEQ ID NO: 1242476 - RNA, 19 nt, Artificial Sequence
  Description of Artificial Sequence: Synthetic oligonucleotide
gauacuucugcuguggcgu

SEQ ID NO: 1242477 - RNA, 19 nt, Artificial Sequence
  Description of Artificial Sequence: Synthetic oligonucleotide
ugacaaggcugcugucugg

SEQ ID NO: 1242478 - RNA, 19 nt, Artificial Sequence
  Description of Artificial Sequence: Synthetic oligonucleotide
guauuuaggguccgccaug

SEQ ID NO: 1242479 - RNA, 19 nt, Artificial Sequence
  Description of Artificial Sequence: Synthetic oligonucleotide
uccgucugggucagugagg

SEQ ID NO: 1242480 - RNA, 19 nt, Artificial Sequence
  Description of Artificial Sequence: Synthetic oligonucleotide
ugugucaggagcugaccaa

SEQ ID NO: 1242481 - RNA, 19 nt, Artificial Sequence
  Description of Artificial Sequence: Synthetic oligonucleotide
aaacaguuguacaguauua

SEQ ID NO: 1242482 - RNA, 19 nt, Artificial Sequence
  Description of Artificial Sequence: Synthetic oligonucleotide
cagccgagccucuacuugg

SEQ ID NO: 1242483 - RNA, 19 nt, Artificial Sequence
  Description of Artificial Sequence: Synthetic oligonucleotide
uucccaauucgaucugaga

SEQ ID NO: 1242484 - RNA, 19 nt, Artificial Sequence
  Description of Artificial Sequence: Synthetic oligonucleotide
ucccuguagaccugcagaa

SEQ ID NO: 1242485 - RNA, 19 nt, Artificial Sequence
  Description of Artificial Sequence: Synthetic oligonucleotide
cugugcuagaggacggggc

SEQ ID NO: 1242486 - RNA, 19 nt, Artificial Sequence
  Description of Artificial Sequence: Synthetic oligonucleotide
ggcaaugccggggaggucg

SEQ ID NO: 1242487 - RNA, 19 nt, Artificial Sequence
  Description of Artificial Sequence: Synthetic oligonucleotide
ucgcugguuucauaaacau

SEQ ID NO: 1242488 - RNA, 19 nt, Artificial Sequence
  Description of Artificial Sequence: Synthetic oligonucleotide
guagaccugcagaaagggg

SEQ ID NO: 1242489 - RNA, 19 nt, Artificial Sequence
  Description of Artificial Sequence: Synthetic oligonucleotide
aaacaucgggcucguuccu

SEQ ID NO: 1242490 - RNA, 19 nt, Artificial Sequence
  Description of Artificial Sequence: Synthetic oligonucleotide
aaagcuccgucugggucag

SEQ ID NO: 1242491 - RNA, 19 nt, Artificial Sequence
  Description of Artificial Sequence: Synthetic oligonucleotide
ucucgcgcauaguugucug

SEQ ID NO: 1242492 - RNA, 19 nt, Artificial Sequence
  Description of Artificial Sequence: Synthetic oligonucleotide
uguguuccacacuggugcu

SEQ ID NO: 1242493 - RNA, 19 nt, Artificial Sequence
  Description of Artificial Sequence: Synthetic oligonucleotide
cuccgucugggucagugag

SEQ ID NO: 1242494 - RNA, 19 nt, Artificial Sequence
  Description of Artificial Sequence: Synthetic oligonucleotide
gcaguaagcgcuuagccaa

SEQ ID NO: 1242495 - RNA, 19 nt, Artificial Sequence
  Description of Artificial Sequence: Synthetic oligonucleotide
ugcauagcuugcucaugca

SEQ ID NO: 1242496 - RNA, 19 nt, Artificial Sequence
  Description of Artificial Sequence: Synthetic oligonucleotide
uuccauaaggcaggcuccc

SEQ ID NO: 1242497 - RNA, 19 nt, Artificial Sequence
  Description of Artificial Sequence: Synthetic oligonucleotide
gcgaucaucugcugagugg

SEQ ID NO: 1242498 - RNA, 19 nt, Artificial Sequence
  Description of Artificial Sequence: Synthetic oligonucleotide
gaggccucgguggagccgg

SEQ ID NO: 1242499 - RNA, 19 nt, Artificial Sequence
  Description of Artificial Sequence: Synthetic oligonucleotide
uggugacuagucucuguac

SEQ ID NO: 1242500 - RNA, 19 nt, Artificial Sequence
  Description of Artificial Sequence: Synthetic oligonucleotide
uaguugucugcaccugggu

SEQ ID NO: 1242501 - RNA, 19 nt, Artificial Sequence
  Description of Artificial Sequence: Synthetic oligonucleotide
guaagcgcuuagccaaagc

SEQ ID NO: 1242502 - RNA, 19 nt, Artificial Sequence
  Description of Artificial Sequence: Synthetic oligonucleotide
uaccagcucggggagggcg

SEQ ID NO: 1242503 - RNA, 19 nt, Artificial Sequence
  Description of Artificial Sequence: Synthetic oligonucleotide
uucagggaacuggcgauca

SEQ ID NO: 1242504 - RNA, 19 nt, Artificial Sequence
  Description of Artificial Sequence: Synthetic oligonucleotide
agcauuuaauggucagaaa

SEQ ID NO: 1242505 - RNA, 19 nt, Artificial Sequence
  Description of Artificial Sequence: Synthetic oligonucleotide
acugagcuccgguaagggu

SEQ ID NO: 1242506 - RNA, 19 nt, Artificial Sequence
  Description of Artificial Sequence: Synthetic oligonucleotide
cacucucuuguccuugaac

SEQ ID NO: 1242507 - RNA, 19 nt, Artificial Sequence
  Description of Artificial Sequence: Synthetic oligonucleotide
gggaggucggcguauuuag

SEQ ID NO: 1242508 - RNA, 19 nt, Artificial Sequence
  Description of Artificial Sequence: Synthetic oligonucleotide
ugagcuccgguaaggguua

SEQ ID NO: 1242509 - RNA, 19 nt, Artificial Sequence
  Description of Artificial Sequence: Synthetic oligonucleotide
guucguaagugacaaggcu

SEQ ID NO: 1242510 - RNA, 19 nt, Artificial Sequence
  Description of Artificial Sequence: Synthetic oligonucleotide
gcauagcuugcucaugcag

SEQ ID NO: 1242511 - RNA, 19 nt, Artificial Sequence
  Description of Artificial Sequence: Synthetic oligonucleotide
guaguucguaagugacaag

SEQ ID NO: 1242512 - RNA, 19 nt, Artificial Sequence
  Description of Artificial Sequence: Synthetic oligonucleotide
ccagauucauauccugucc

SEQ ID NO: 1242513 - RNA, 19 nt, Artificial Sequence
  Description of Artificial Sequence: Synthetic oligonucleotide
aacaucgggcucguuccug

SEQ ID NO: 1242514 - RNA, 19 nt, Artificial Sequence
  Description of Artificial Sequence: Synthetic oligonucleotide
guuaccccauuuguucucc

SEQ ID NO: 1242515 - RNA, 19 nt, Artificial Sequence
  Description of Artificial Sequence: Synthetic oligonucleotide
ucgggcucguuccuggcaa

SEQ ID NO: 1242516 - RNA, 19 nt, Artificial Sequence
  Description of Artificial Sequence: Synthetic oligonucleotide
ucgcgcauaguugucugca

SEQ ID NO: 1242517 - RNA, 19 nt, Artificial Sequence
  Description of Artificial Sequence: Synthetic oligonucleotide
cagcauuuaauggucagaa

SEQ ID NO: 1242518 - RNA, 19 nt, Artificial Sequence
  Description of Artificial Sequence: Synthetic oligonucleotide
uucacgcccacaccuucuc

SEQ ID NO: 1242519 - RNA, 19 nt, Artificial Sequence
  Description of Artificial Sequence: Synthetic oligonucleotide
aguaagcgcuuagccaaag

SEQ ID NO: 1242520 - RNA, 19 nt, Artificial Sequence
  Description of Artificial Sequence: Synthetic oligonucleotide
aacuggcgaucaucugcug

SEQ ID NO: 1242521 - RNA, 19 nt, Artificial Sequence
  Description of Artificial Sequence: Synthetic oligonucleotide
uucucgcgcauaguugucu

SEQ ID NO: 1242522 - RNA, 19 nt, Artificial Sequence
  Description of Artificial Sequence: Synthetic oligonucleotide
cuccgguaaggguuacccc

SEQ ID NO: 1242523 - RNA, 19 nt, Artificial Sequence
  Description of Artificial Sequence: Synthetic oligonucleotide
auucgaucugagaaaucga

SEQ ID NO: 1242524 - RNA, 19 nt, Artificial Sequence
  Description of Artificial Sequence: Synthetic oligonucleotide
auguaguucguaagugaca

SEQ ID NO: 1242525 - RNA, 19 nt, Artificial Sequence
  Description of Artificial Sequence: Synthetic oligonucleotide
guucuacaguuuccauaag

SEQ ID NO: 1242526 - RNA, 19 nt, Artificial Sequence
  Description of Artificial Sequence: Synthetic oligonucleotide
caauucgaucugagaaauc

SEQ ID NO: 1242527 - RNA, 19 nt, Artificial Sequence
  Description of Artificial Sequence: Synthetic oligonucleotide
ucacagcggacaguggccu

SEQ ID NO: 1242528 - RNA, 19 nt, Artificial Sequence
  Description of Artificial Sequence: Synthetic oligonucleotide
gucggcguauuuagggucc

SEQ ID NO: 1242529 - RNA, 19 nt, Artificial Sequence
  Description of Artificial Sequence: Synthetic oligonucleotide
gugcaccuugcucugugug

SEQ ID NO: 1242530 - RNA, 19 nt, Artificial Sequence
  Description of Artificial Sequence: Synthetic oligonucleotide
cgagaauguaguucguaag

SEQ ID NO: 1242531 - RNA, 19 nt, Artificial Sequence
  Description of Artificial Sequence: Synthetic oligonucleotide
auccuggucacagcggaca

SEQ ID NO: 1242532 - RNA, 19 nt, Artificial Sequence
  Description of Artificial Sequence: Synthetic oligonucleotide
caacagcauuuaaugguca

SEQ ID NO: 1242533 - RNA, 19 nt, Artificial Sequence
  Description of Artificial Sequence: Synthetic oligonucleotide
ggcguuguccuucagggaa

SEQ ID NO: 1242534 - RNA, 19 nt, Artificial Sequence
  Description of Artificial Sequence: Synthetic oligonucleotide
gacaaggcugcugucugga

SEQ ID NO: 1242535 - RNA, 19 nt, Artificial Sequence
  Description of Artificial Sequence: Synthetic oligonucleotide
gucgcugguuucauaaaca

SEQ ID NO: 1242536 - RNA, 19 nt, Artificial Sequence
  Description of Artificial Sequence: Synthetic oligonucleotide
cucgcgcauaguugucugc

SEQ ID NO: 1242537 - RNA, 19 nt, Artificial Sequence
  Description of Artificial Sequence: Synthetic oligonucleotide
ucgcucgucaaugcuggca

SEQ ID NO: 1242538 - RNA, 19 nt, Artificial Sequence
  Description of Artificial Sequence: Synthetic oligonucleotide
ggauggggcugugagcucg

SEQ ID NO: 1242539 - RNA, 19 nt, Artificial Sequence
  Description of Artificial Sequence: Synthetic oligonucleotide
cagaaacaguuguacagua

SEQ ID NO: 1242540 - RNA, 19 nt, Artificial Sequence
  Description of Artificial Sequence: Synthetic oligonucleotide
agaguggcguuguccuuca

SEQ ID NO: 1242541 - RNA, 19 nt, Artificial Sequence
  Description of Artificial Sequence: Synthetic oligonucleotide
ucaaguucucgcgcauagu

SEQ ID NO: 1242542 - RNA, 19 nt, Artificial Sequence
  Description of Artificial Sequence: Synthetic oligonucleotide
agcauccuggucacagcgg

SEQ ID NO: 1242543 - RNA, 19 nt, Artificial Sequence
  Description of Artificial Sequence: Synthetic oligonucleotide
gcaaagcaguuauuggaca

SEQ ID NO: 1242544 - RNA, 19 nt, Artificial Sequence
  Description of Artificial Sequence: Synthetic oligonucleotide
uggucaaguucucgcgcau

SEQ ID NO: 1242545 - RNA, 19 nt, Artificial Sequence
  Description of Artificial Sequence: Synthetic oligonucleotide
uggcauguggcugggccca

SEQ ID NO: 1242546 - RNA, 19 nt, Artificial Sequence
  Description of Artificial Sequence: Synthetic oligonucleotide
ucggcguauuuaggguccg

SEQ ID NO: 1242547 - RNA, 19 nt, Artificial Sequence
  Description of Artificial Sequence: Synthetic oligonucleotide
ucugcugagugguguccaa

SEQ ID NO: 1242548 - RNA, 19 nt, Artificial Sequence
  Description of Artificial Sequence: Synthetic oligonucleotide
gagccggggccggugaccg

SEQ ID NO: 1242549 - RNA, 19 nt, Artificial Sequence
  Description of Artificial Sequence: Synthetic oligonucleotide
gaacuggcgaucaucugcu

SEQ ID NO: 1242550 - RNA, 19 nt, Artificial Sequence
  Description of Artificial Sequence: Synthetic oligonucleotide
cagaguggcguuguccuuc

SEQ ID NO: 1242551 - RNA, 19 nt, Artificial Sequence
  Description of Artificial Sequence: Synthetic oligonucleotide
ccugcucaggccgagaaug

SEQ ID NO: 1242552 - RNA, 19 nt, Artificial Sequence
  Description of Artificial Sequence: Synthetic oligonucleotide
cagauucauauccuguccu

SEQ ID NO: 1242553 - RNA, 19 nt, Artificial Sequence
  Description of Artificial Sequence: Synthetic oligonucleotide
caaagcaguuauuggacau

SEQ ID NO: 1242554 - RNA, 19 nt, Artificial Sequence
  Description of Artificial Sequence: Synthetic oligonucleotide
gcggcauugggguugacaa

SEQ ID NO: 1242555 - RNA, 19 nt, Artificial Sequence
  Description of Artificial Sequence: Synthetic oligonucleotide
uccuggcaaugccggggag

SEQ ID NO: 1242556 - RNA, 19 nt, Artificial Sequence
  Description of Artificial Sequence: Synthetic oligonucleotide
gcuccgguaaggguuaccc

SEQ ID NO: 1242557 - RNA, 19 nt, Artificial Sequence
  Description of Artificial Sequence: Synthetic oligonucleotide
uaggguccgccauggcggc

SEQ ID NO: 1242558 - RNA, 19 nt, Artificial Sequence
  Description of Artificial Sequence: Synthetic oligonucleotide
gcgcauaguugucugcacc

SEQ ID NO: 1242559 - RNA, 19 nt, Artificial Sequence
  Description of Artificial Sequence: Synthetic oligonucleotide
cauucaccuuucccaggac

SEQ ID NO: 1242560 - RNA, 19 nt, Artificial Sequence
  Description of Artificial Sequence: Synthetic oligonucleotide
cuuagccaaagcuccgucu

SEQ ID NO: 1242561 - RNA, 19 nt, Artificial Sequence
  Description of Artificial Sequence: Synthetic oligonucleotide
cccuaaagucccuuugcug

SEQ ID NO: 1242562 - RNA, 19 nt, Artificial Sequence
  Description of Artificial Sequence: Synthetic oligonucleotide
ggcguauuuaggguccgcc

SEQ ID NO: 1242563 - RNA, 19 nt, Artificial Sequence
  Description of Artificial Sequence: Synthetic oligonucleotide
agcuccgguaaggguuacc

SEQ ID NO: 1242564 - RNA, 19 nt, Artificial Sequence
  Description of Artificial Sequence: Synthetic oligonucleotide
agcaguuauuggacaugag

SEQ ID NO: 1242565 - RNA, 19 nt, Artificial Sequence
  Description of Artificial Sequence: Synthetic oligonucleotide
gcucaggccgagaauguag

SEQ ID NO: 1242566 - RNA, 19 nt, Artificial Sequence
  Description of Artificial Sequence: Synthetic oligonucleotide
uccuucacgcccacaccuu

SEQ ID NO: 1242567 - RNA, 19 nt, Artificial Sequence
  Description of Artificial Sequence: Synthetic oligonucleotide
ccaaccacagaagcugugc

SEQ ID NO: 1242568 - RNA, 19 nt, Artificial Sequence
  Description of Artificial Sequence: Synthetic oligonucleotide
agguaggucgcugguuuca

SEQ ID NO: 1242569 - RNA, 19 nt, Artificial Sequence
  Description of Artificial Sequence: Synthetic oligonucleotide
cacccucauccacaagaac

SEQ ID NO: 1242570 - RNA, 19 nt, Artificial Sequence
  Description of Artificial Sequence: Synthetic oligonucleotide
uccugcucaggccgagaau

SEQ ID NO: 1242571 - RNA, 19 nt, Artificial Sequence
  Description of Artificial Sequence: Synthetic oligonucleotide
caaguucucgcgcauaguu

SEQ ID NO: 1242572 - RNA, 19 nt, Artificial Sequence
  Description of Artificial Sequence: Synthetic oligonucleotide
cauaaggcaggcucccugu

SEQ ID NO: 1242573 - RNA, 19 nt, Artificial Sequence
  Description of Artificial Sequence: Synthetic oligonucleotide
cuucagggaacuggcgauc

SEQ ID NO: 1242574 - RNA, 19 nt, Artificial Sequence
  Description of Artificial Sequence: Synthetic oligonucleotide
uucgcucgucaaugcuggc

SEQ ID NO: 1242575 - RNA, 19 nt, Artificial Sequence
  Description of Artificial Sequence: Synthetic oligonucleotide
gcagccgagccucuacuug

SEQ ID NO: 1242576 - RNA, 19 nt, Artificial Sequence
  Description of Artificial Sequence: Synthetic oligonucleotide
cugagcuccgguaaggguu

SEQ ID NO: 1242577 - RNA, 19 nt, Artificial Sequence
  Description of Artificial Sequence: Synthetic oligonucleotide
uucagguaggucgcugguu

SEQ ID NO: 1242578 - RNA, 19 nt, Artificial Sequence
  Description of Artificial Sequence: Synthetic oligonucleotide
gguuaccccauuuguucuc

SEQ ID NO: 1242579 - RNA, 19 nt, Artificial Sequence
  Description of Artificial Sequence: Synthetic oligonucleotide
caucgggcucguuccuggc

SEQ ID NO: 1242580 - RNA, 19 nt, Artificial Sequence
  Description of Artificial Sequence: Synthetic oligonucleotide
gguccagaacugcaagguc

SEQ ID NO: 1242581 - RNA, 19 nt, Artificial Sequence
  Description of Artificial Sequence: Synthetic oligonucleotide
caacuguggucaaguucuc

SEQ ID NO: 1242582 - RNA, 19 nt, Artificial Sequence
  Description of Artificial Sequence: Synthetic oligonucleotide
cagguaggucgcugguuuc

SEQ ID NO: 1242583 - RNA, 19 nt, Artificial Sequence
  Description of Artificial Sequence: Synthetic oligonucleotide
ccggguucccggcaaaggc

SEQ ID NO: 1242584 - RNA, 19 nt, Artificial Sequence
  Description of Artificial Sequence: Synthetic oligonucleotide
cugacuccuucacaguugu

SEQ ID NO: 1242585 - RNA, 19 nt, Artificial Sequence
  Description of Artificial Sequence: Synthetic oligonucleotide
gugcuagaggacggggccc

SEQ ID NO: 1242586 - RNA, 19 nt, Artificial Sequence
  Description of Artificial Sequence: Synthetic oligonucleotide
ggaggucggcguauuuagg

SEQ ID NO: 1242587 - RNA, 19 nt, Artificial Sequence
  Description of Artificial Sequence: Synthetic oligonucleotide
gcguauuuaggguccgcca

SEQ ID NO: 1242588 - RNA, 19 nt, Artificial Sequence
  Description of Artificial Sequence: Synthetic oligonucleotide
cccaauucgaucugagaaa

SEQ ID NO: 1242589 - RNA, 19 nt, Artificial Sequence
  Description of Artificial Sequence: Synthetic oligonucleotide
cucaggccgagaauguagu

SEQ ID NO: 1242590 - RNA, 19 nt, Artificial Sequence
  Description of Artificial Sequence: Synthetic oligonucleotide
gugucaggagcugaccaaa

SEQ ID NO: 1242591 - RNA, 19 nt, Artificial Sequence
  Description of Artificial Sequence: Synthetic oligonucleotide
ccgagaauguaguucguaa

SEQ ID NO: 1242592 - RNA, 19 nt, Artificial Sequence
  Description of Artificial Sequence: Synthetic oligonucleotide
ugcucaggccgagaaugua

SEQ ID NO: 1242593 - RNA, 19 nt, Artificial Sequence
  Description of Artificial Sequence: Synthetic oligonucleotide
acaccaggcaaagcaguua

SEQ ID NO: 1242594 - RNA, 19 nt, Artificial Sequence
  Description of Artificial Sequence: Synthetic oligonucleotide
cuguaccagcucggggagg

SEQ ID NO: 1242595 - RNA, 19 nt, Artificial Sequence
  Description of Artificial Sequence: Synthetic oligonucleotide
caaccacagaagcugugcu

SEQ ID NO: 1242596 - RNA, 19 nt, Artificial Sequence
  Description of Artificial Sequence: Synthetic oligonucleotide
acgcccacaccuucuccaa

SEQ ID NO: 1242597 - RNA, 19 nt, Artificial Sequence
  Description of Artificial Sequence: Synthetic oligonucleotide
gcauaguugucugcaccug

SEQ ID NO: 1242598 - RNA, 19 nt, Artificial Sequence
  Description of Artificial Sequence: Synthetic oligonucleotide
cucgaagggcagcccugug

SEQ ID NO: 1242599 - RNA, 19 nt, Artificial Sequence
  Description of Artificial Sequence: Synthetic oligonucleotide
ggagucgcugauacuucug

SEQ ID NO: 1242600 - RNA, 19 nt, Artificial Sequence
  Description of Artificial Sequence: Synthetic oligonucleotide
gaguggcguuguccuucag

SEQ ID NO: 1242601 - RNA, 19 nt, Artificial Sequence
  Description of Artificial Sequence: Synthetic oligonucleotide
caguaagcgcuuagccaaa

SEQ ID NO: 1242602 - RNA, 19 nt, Artificial Sequence
  Description of Artificial Sequence: Synthetic oligonucleotide
ggguccgccauggcggcgg

SEQ ID NO: 1242603 - RNA, 19 nt, Artificial Sequence
  Description of Artificial Sequence: Synthetic oligonucleotide
cugcaacaguucuacaguu

SEQ ID NO: 1242604 - RNA, 19 nt, Artificial Sequence
  Description of Artificial Sequence: Synthetic oligonucleotide
ggguuaccccauuuguucu

SEQ ID NO: 1242605 - RNA, 19 nt, Artificial Sequence
  Description of Artificial Sequence: Synthetic oligonucleotide
gcccuugugcagugggaug

SEQ ID NO: 1242606 - RNA, 19 nt, Artificial Sequence
  Description of Artificial Sequence: Synthetic oligonucleotide
gccucgguggagccggggc

SEQ ID NO: 1242607 - RNA, 19 nt, Artificial Sequence
  Description of Artificial Sequence: Synthetic oligonucleotide
agcggacaguggccuccag

SEQ ID NO: 1242608 - RNA, 19 nt, Artificial Sequence
  Description of Artificial Sequence: Synthetic oligonucleotide
gaccgaggccucgguggag

SEQ ID NO: 1242609 - RNA, 19 nt, Artificial Sequence
  Description of Artificial Sequence: Synthetic oligonucleotide
gauggggcugugagcucga

SEQ ID NO: 1242610 - RNA, 19 nt, Artificial Sequence
  Description of Artificial Sequence: Synthetic oligonucleotide
cuucacgcccacaccuucu

SEQ ID NO: 1242611 - RNA, 19 nt, Artificial Sequence
  Description of Artificial Sequence: Synthetic oligonucleotide
ggacacucugcagccgagc

SEQ ID NO: 1242612 - RNA, 19 nt, Artificial Sequence
  Description of Artificial Sequence: Synthetic oligonucleotide
guucucgcgcauaguuguc

SEQ ID NO: 1242613 - RNA, 19 nt, Artificial Sequence
  Description of Artificial Sequence: Synthetic oligonucleotide
cuucagguaggucgcuggu

SEQ ID NO: 1242614 - RNA, 19 nt, Artificial Sequence
  Description of Artificial Sequence: Synthetic oligonucleotide
cgcugguuucauaaacauc

SEQ ID NO: 1242615 - RNA, 19 nt, Artificial Sequence
  Description of Artificial Sequence: Synthetic oligonucleotide
gcuucauucgcucgucaau

SEQ ID NO: 1242616 - RNA, 19 nt, Artificial Sequence
  Description of Artificial Sequence: Synthetic oligonucleotide
ccuucacgcccacaccuuc

SEQ ID NO: 1242617 - RNA, 19 nt, Artificial Sequence
  Description of Artificial Sequence: Synthetic oligonucleotide
gcgcuuagccaaagcuccg

SEQ ID NO: 1242618 - RNA, 19 nt, Artificial Sequence
  Description of Artificial Sequence: Synthetic oligonucleotide
ggguucccggcaaaggcga

SEQ ID NO: 1242619 - RNA, 19 nt, Artificial Sequence
  Description of Artificial Sequence: Synthetic oligonucleotide
ggucagcagaguggcguug

SEQ ID NO: 1242620 - RNA, 19 nt, Artificial Sequence
  Description of Artificial Sequence: Synthetic oligonucleotide
ugccggggaggucggcgua

SEQ ID NO: 1242621 - RNA, 19 nt, Artificial Sequence
  Description of Artificial Sequence: Synthetic oligonucleotide
gguaaggguuaccccauuu

SEQ ID NO: 1242622 - RNA, 19 nt, Artificial Sequence
  Description of Artificial Sequence: Synthetic oligonucleotide
aggcgcuuuucaaguucug

SEQ ID NO: 1242623 - RNA, 19 nt, Artificial Sequence
  Description of Artificial Sequence: Synthetic oligonucleotide
ggaccgaggccucggugga

SEQ ID NO: 1242624 - RNA, 19 nt, Artificial Sequence
  Description of Artificial Sequence: Synthetic oligonucleotide
gcaaugccggggaggucgg

SEQ ID NO: 1242625 - RNA, 19 nt, Artificial Sequence
  Description of Artificial Sequence: Synthetic oligonucleotide
ccacaagaacccuugcccu

SEQ ID NO: 1242626 - RNA, 19 nt, Artificial Sequence
  Description of Artificial Sequence: Synthetic oligonucleotide
aggguccgccauggcggcg

SEQ ID NO: 1242627 - RNA, 19 nt, Artificial Sequence
  Description of Artificial Sequence: Synthetic oligonucleotide
ccaauucgaucugagaaau

SEQ ID NO: 1242628 - RNA, 19 nt, Artificial Sequence
  Description of Artificial Sequence: Synthetic oligonucleotide
guaccagcucggggagggc

SEQ ID NO: 1242629 - RNA, 19 nt, Artificial Sequence
  Description of Artificial Sequence: Synthetic oligonucleotide
gggcccacacccucaucca

SEQ ID NO: 1242630 - RNA, 19 nt, Artificial Sequence
  Description of Artificial Sequence: Synthetic oligonucleotide
accaggcaaagcaguuauu

SEQ ID NO: 1242631 - RNA, 19 nt, Artificial Sequence
  Description of Artificial Sequence: Synthetic oligonucleotide
ggggagggcggaggcaaug

SEQ ID NO: 1242632 - RNA, 19 nt, Artificial Sequence
  Description of Artificial Sequence: Synthetic oligonucleotide
gcggaggcaaugggacucc

SEQ ID NO: 1242633 - RNA, 19 nt, Artificial Sequence
  Description of Artificial Sequence: Synthetic oligonucleotide
gcccacacccucauccaca

SEQ ID NO: 1242634 - RNA, 19 nt, Artificial Sequence
  Description of Artificial Sequence: Synthetic oligonucleotide
gagcuccgguaaggguuac

SEQ ID NO: 1242635 - RNA, 19 nt, Artificial Sequence
  Description of Artificial Sequence: Synthetic oligonucleotide
cgcauaguugucugcaccu

SEQ ID NO: 1242636 - RNA, 19 nt, Artificial Sequence
  Description of Artificial Sequence: Synthetic oligonucleotide
gccgagaauguaguucgua

SEQ ID NO: 1242637 - RNA, 19 nt, Artificial Sequence
  Description of Artificial Sequence: Synthetic oligonucleotide
ccuucagggaacuggcgau

SEQ ID NO: 1242638 - RNA, 19 nt, Artificial Sequence
  Description of Artificial Sequence: Synthetic oligonucleotide
ggcguucaccuuggccugc

SEQ ID NO: 1242639 - RNA, 19 nt, Artificial Sequence
  Description of Artificial Sequence: Synthetic oligonucleotide
cgcucgucaaugcuggcaa

SEQ ID NO: 1242640 - RNA, 19 nt, Artificial Sequence
  Description of Artificial Sequence: Synthetic oligonucleotide
ccgaggccucgguggagcc

SEQ ID NO: 1242641 - RNA, 19 nt, Artificial Sequence
  Description of Artificial Sequence: Synthetic oligonucleotide
cguauuuaggguccgccau

SEQ ID NO: 1242642 - RNA, 19 nt, Artificial Sequence
  Description of Artificial Sequence: Synthetic oligonucleotide
cauaggcggcauugggguu

SEQ ID NO: 1242643 - RNA, 19 nt, Artificial Sequence
  Description of Artificial Sequence: Synthetic oligonucleotide
ggagcugaccaaacugcau

SEQ ID NO: 1242644 - RNA, 19 nt, Artificial Sequence
  Description of Artificial Sequence: Synthetic oligonucleotide
gguucccggcaaaggcgac

SEQ ID NO: 1242645 - RNA, 19 nt, Artificial Sequence
  Description of Artificial Sequence: Synthetic oligonucleotide
caucuggucccagcaacuu

SEQ ID NO: 1242646 - RNA, 19 nt, Artificial Sequence
  Description of Artificial Sequence: Synthetic oligonucleotide
gaccugcagaaaggggauu

SEQ ID NO: 1242647 - RNA, 19 nt, Artificial Sequence
  Description of Artificial Sequence: Synthetic oligonucleotide
caucuucagguaggucgcu

SEQ ID NO: 1242648 - RNA, 19 nt, Artificial Sequence
  Description of Artificial Sequence: Synthetic oligonucleotide
gguccggguucccggcaaa

SEQ ID NO: 1242649 - RNA, 19 nt, Artificial Sequence
  Description of Artificial Sequence: Synthetic oligonucleotide
gguaggucgcugguuucau

SEQ ID NO: 1242650 - RNA, 19 nt, Artificial Sequence
  Description of Artificial Sequence: Synthetic oligonucleotide
aagcuccgucugggucagu

SEQ ID NO: 1242651 - RNA, 19 nt, Artificial Sequence
  Description of Artificial Sequence: Synthetic oligonucleotide
gcucgaagggcagcccugu

SEQ ID NO: 1242652 - RNA, 19 nt, Artificial Sequence
  Description of Artificial Sequence: Synthetic oligonucleotide
ccgguaaggguuaccccau

SEQ ID NO: 1242653 - RNA, 19 nt, Artificial Sequence
  Description of Artificial Sequence: Synthetic oligonucleotide
gcagugggauggggcugug

SEQ ID NO: 1242654 - RNA, 19 nt, Artificial Sequence
  Description of Artificial Sequence: Synthetic oligonucleotide
cggcguauuuaggguccgc

SEQ ID NO: 1242655 - RNA, 19 nt, Artificial Sequence
  Description of Artificial Sequence: Synthetic oligonucleotide
ggccgagaauguaguucgu

SEQ ID NO: 1242656 - RNA, 19 nt, Artificial Sequence
  Description of Artificial Sequence: Synthetic oligonucleotide
cugggucagugagguugau

SEQ ID NO: 1242657 - RNA, 19 nt, Artificial Sequence
  Description of Artificial Sequence: Synthetic oligonucleotide
cugcaagguccagggcguu

SEQ ID NO: 1242658 - RNA, 19 nt, Artificial Sequence
  Description of Artificial Sequence: Synthetic oligonucleotide
cggcauugggguugacaau

SEQ ID NO: 1242659 - RNA, 19 nt, Artificial Sequence
  Description of Artificial Sequence: Synthetic oligonucleotide
gccggggaggucggcguau

SEQ ID NO: 1242660 - RNA, 19 nt, Artificial Sequence
  Description of Artificial Sequence: Synthetic oligonucleotide
cgucuccuucacgcccaca

SEQ ID NO: 1242661 - RNA, 19 nt, Artificial Sequence
  Description of Artificial Sequence: Synthetic oligonucleotide
cgguaaggguuaccccauu

SEQ ID NO: 1242662 - RNA, 19 nt, Artificial Sequence
  Description of Artificial Sequence: Synthetic oligonucleotide
cgggcucguuccuggcaau

SEQ ID NO: 1242663 - RNA, 19 nt, Artificial Sequence
  Description of Artificial Sequence: Synthetic oligonucleotide
ccggggaggucggcguauu

SEQ ID NO: 1242664 - RNA, 19 nt, Artificial Sequence
  Description of Artificial Sequence: Synthetic oligonucleotide
uuuagaucuauccagcuca

SEQ ID NO: 1242665 - RNA, 19 nt, Artificial Sequence
  Description of Artificial Sequence: Synthetic oligonucleotide
gauguuuagaucuauccag

SEQ ID NO: 1242666 - RNA, 19 nt, Artificial Sequence
  Description of Artificial Sequence: Synthetic oligonucleotide
auuccaaggagucacacgg

SEQ ID NO: 1242667 - RNA, 19 nt, Artificial Sequence
  Description of Artificial Sequence: Synthetic oligonucleotide
ugcguuaacacuuuggucu

SEQ ID NO: 1242668 - RNA, 19 nt, Artificial Sequence
  Description of Artificial Sequence: Synthetic oligonucleotide
aaaugagugaguauagacg

SEQ ID NO: 1242669 - RNA, 19 nt, Artificial Sequence
  Description of Artificial Sequence: Synthetic oligonucleotide
uuagaaucaauuccaagga

SEQ ID NO: 1242670 - RNA, 19 nt, Artificial Sequence
  Description of Artificial Sequence: Synthetic oligonucleotide
uuugauuaaguuuguaaga

SEQ ID NO: 1242671 - RNA, 19 nt, Artificial Sequence
  Description of Artificial Sequence: Synthetic oligonucleotide
uugauuaaguuuguaagag

SEQ ID NO: 1242672 - RNA, 19 nt, Artificial Sequence
  Description of Artificial Sequence: Synthetic oligonucleotide
aucaccuuagaaucaauuc

SEQ ID NO: 1242673 - RNA, 19 nt, Artificial Sequence
  Description of Artificial Sequence: Synthetic oligonucleotide
ucgagauuaaaacaaaauu

SEQ ID NO: 1242674 - RNA, 19 nt, Artificial Sequence
  Description of Artificial Sequence: Synthetic oligonucleotide
uugggcuuaacccuuaaga

SEQ ID NO: 1242675 - RNA, 19 nt, Artificial Sequence
  Description of Artificial Sequence: Synthetic oligonucleotide
auagacgcaucucuucucc

SEQ ID NO: 1242676 - RNA, 19 nt, Artificial Sequence
  Description of Artificial Sequence: Synthetic oligonucleotide
ucaauucgagcagagacgg

SEQ ID NO: 1242677 - RNA, 19 nt, Artificial Sequence
  Description of Artificial Sequence: Synthetic oligonucleotide
ucgaagucggcauggaugg

SEQ ID NO: 1242678 - RNA, 19 nt, Artificial Sequence
  Description of Artificial Sequence: Synthetic oligonucleotide
aaaacugcggacaaugucu

SEQ ID NO: 1242679 - RNA, 19 nt, Artificial Sequence
  Description of Artificial Sequence: Synthetic oligonucleotide
ugaguauagacgcaucucu

SEQ ID NO: 1242680 - RNA, 19 nt, Artificial Sequence
  Description of Artificial Sequence: Synthetic oligonucleotide
ggaacacuaacauagauca

SEQ ID NO: 1242681 - RNA, 19 nt, Artificial Sequence
  Description of Artificial Sequence: Synthetic oligonucleotide
uuugaaagauguucccagg

SEQ ID NO: 1242682 - RNA, 19 nt, Artificial Sequence
  Description of Artificial Sequence: Synthetic oligonucleotide
agugcuaagaacaucaccu

SEQ ID NO: 1242683 - RNA, 19 nt, Artificial Sequence
  Description of Artificial Sequence: Synthetic oligonucleotide
aguauagacgcaucucuuc

SEQ ID NO: 1242684 - RNA, 19 nt, Artificial Sequence
  Description of Artificial Sequence: Synthetic oligonucleotide
cacaauagcugcuuugggg

SEQ ID NO: 1242685 - RNA, 19 nt, Artificial Sequence
  Description of Artificial Sequence: Synthetic oligonucleotide
aagaccaugccagaagguc

SEQ ID NO: 1242686 - RNA, 19 nt, Artificial Sequence
  Description of Artificial Sequence: Synthetic oligonucleotide
aaauugacaggagcuaaag

SEQ ID NO: 1242687 - RNA, 19 nt, Artificial Sequence
  Description of Artificial Sequence: Synthetic oligonucleotide
aauccgggaacauguguuc

SEQ ID NO: 1242688 - RNA, 19 nt, Artificial Sequence
  Description of Artificial Sequence: Synthetic oligonucleotide
ucaggaaugauguccauau

SEQ ID NO: 1242689 - RNA, 19 nt, Artificial Sequence
  Description of Artificial Sequence: Synthetic oligonucleotide
aagaucugagagaaagugg

SEQ ID NO: 1242690 - RNA, 19 nt, Artificial Sequence
  Description of Artificial Sequence: Synthetic oligonucleotide
acucguauuuguuuccagg

SEQ ID NO: 1242691 - RNA, 19 nt, Artificial Sequence
  Description of Artificial Sequence: Synthetic oligonucleotide
auaguaguagaguuuacau

SEQ ID NO: 1242692 - RNA, 19 nt, Artificial Sequence
  Description of Artificial Sequence: Synthetic oligonucleotide
cauacauaaagauagggcu

SEQ ID NO: 1242693 - RNA, 19 nt, Artificial Sequence
  Description of Artificial Sequence: Synthetic oligonucleotide
cugcaaucgagauuaaaac

SEQ ID NO: 1242694 - RNA, 19 nt, Artificial Sequence
  Description of Artificial Sequence: Synthetic oligonucleotide
uggcuuuuauggcuguugg

SEQ ID NO: 1242695 - RNA, 19 nt, Artificial Sequence
  Description of Artificial Sequence: Synthetic oligonucleotide
ggggcauacauaaagauag

SEQ ID NO: 1242696 - RNA, 19 nt, Artificial Sequence
  Description of Artificial Sequence: Synthetic oligonucleotide
acauccacuagauccauca

SEQ ID NO: 1242697 - RNA, 19 nt, Artificial Sequence
  Description of Artificial Sequence: Synthetic oligonucleotide
uuaaaucagggguauugac

SEQ ID NO: 1242698 - RNA, 19 nt, Artificial Sequence
  Description of Artificial Sequence: Synthetic oligonucleotide
aaaauggcuuuuauggcug

SEQ ID NO: 1242699 - RNA, 19 nt, Artificial Sequence
  Description of Artificial Sequence: Synthetic oligonucleotide
gaggggaaagaaaugagug

SEQ ID NO: 1242700 - RNA, 19 nt, Artificial Sequence
  Description of Artificial Sequence: Synthetic oligonucleotide
ugggcuuaacccuuaagac

SEQ ID NO: 1242701 - RNA, 19 nt, Artificial Sequence
  Description of Artificial Sequence: Synthetic oligonucleotide
auguuuagaucuauccagc

SEQ ID NO: 1242702 - RNA, 19 nt, Artificial Sequence
  Description of Artificial Sequence: Synthetic oligonucleotide
uuuuagcggauaccggugc

SEQ ID NO: 1242703 - RNA, 19 nt, Artificial Sequence
  Description of Artificial Sequence: Synthetic oligonucleotide
acccuuaagacacauagua

SEQ ID NO: 1242704 - RNA, 19 nt, Artificial Sequence
  Description of Artificial Sequence: Synthetic oligonucleotide
ugaacaugcaggaaacuuu

SEQ ID NO: 1242705 - RNA, 19 nt, Artificial Sequence
  Description of Artificial Sequence: Synthetic oligonucleotide
ucauaacgcagguuagucc

SEQ ID NO: 1242706 - RNA, 19 nt, Artificial Sequence
  Description of Artificial Sequence: Synthetic oligonucleotide
ugcaacuggcuguaaaaug

SEQ ID NO: 1242707 - RNA, 19 nt, Artificial Sequence
  Description of Artificial Sequence: Synthetic oligonucleotide
agugaguauagacgcaucu

SEQ ID NO: 1242708 - RNA, 19 nt, Artificial Sequence
  Description of Artificial Sequence: Synthetic oligonucleotide
ucuguuugcacugcugaag

SEQ ID NO: 1242709 - RNA, 19 nt, Artificial Sequence
  Description of Artificial Sequence: Synthetic oligonucleotide
cucgaagucggcauggaug

SEQ ID NO: 1242710 - RNA, 19 nt, Artificial Sequence
  Description of Artificial Sequence: Synthetic oligonucleotide
uccacuagauccaucacuu

SEQ ID NO: 1242711 - RNA, 19 nt, Artificial Sequence
  Description of Artificial Sequence: Synthetic oligonucleotide
uugaucacccagaugugga

SEQ ID NO: 1242712 - RNA, 19 nt, Artificial Sequence
  Description of Artificial Sequence: Synthetic oligonucleotide
gacccuugcauccacagga

SEQ ID NO: 1242713 - RNA, 19 nt, Artificial Sequence
  Description of Artificial Sequence: Synthetic oligonucleotide
uguuggcuggucuucuagg

SEQ ID NO: 1242714 - RNA, 19 nt, Artificial Sequence
  Description of Artificial Sequence: Synthetic oligonucleotide
cauaacgcagguuagucca

SEQ ID NO: 1242715 - RNA, 19 nt, Artificial Sequence
  Description of Artificial Sequence: Synthetic oligonucleotide
agagaaaguggacgggguc

SEQ ID NO: 1242716 - RNA, 19 nt, Artificial Sequence
  Description of Artificial Sequence: Synthetic oligonucleotide
uaguaguagaguuuacauc

SEQ ID NO: 1242717 - RNA, 19 nt, Artificial Sequence
  Description of Artificial Sequence: Synthetic oligonucleotide
agaaucaauuccaaggagu

SEQ ID NO: 1242718 - RNA, 19 nt, Artificial Sequence
  Description of Artificial Sequence: Synthetic oligonucleotide
ucuucuaggaggagcgugu

SEQ ID NO: 1242719 - RNA, 19 nt, Artificial Sequence
  Description of Artificial Sequence: Synthetic oligonucleotide
auuucagagcucguucggc

SEQ ID NO: 1242720 - RNA, 19 nt, Artificial Sequence
  Description of Artificial Sequence: Synthetic oligonucleotide
uguuuagaucuauccagcu

SEQ ID NO: 1242721 - RNA, 19 nt, Artificial Sequence
  Description of Artificial Sequence: Synthetic oligonucleotide
uucagacuaagucucugaa

SEQ ID NO: 1242722 - RNA, 19 nt, Artificial Sequence
  Description of Artificial Sequence: Synthetic oligonucleotide
uaagaacaucaccuuagaa

SEQ ID NO: 1242723 - RNA, 19 nt, Artificial Sequence
  Description of Artificial Sequence: Synthetic oligonucleotide
uuguuguuguuguuguugu

SEQ ID NO: 1242724 - RNA, 19 nt, Artificial Sequence
  Description of Artificial Sequence: Synthetic oligonucleotide
gggauguuuagaucuaucc

SEQ ID NO: 1242725 - RNA, 19 nt, Artificial Sequence
  Description of Artificial Sequence: Synthetic oligonucleotide
guuguuguuguuguuguug

SEQ ID NO: 1242726 - RNA, 19 nt, Artificial Sequence
  Description of Artificial Sequence: Synthetic oligonucleotide
gauagcuucugcguuaaca

SEQ ID NO: 1242727 - RNA, 19 nt, Artificial Sequence
  Description of Artificial Sequence: Synthetic oligonucleotide
aucuauccagcucauuuca

SEQ ID NO: 1242728 - RNA, 19 nt, Artificial Sequence
  Description of Artificial Sequence: Synthetic oligonucleotide
ugugccgagccacaauagc

SEQ ID NO: 1242729 - RNA, 19 nt, Artificial Sequence
  Description of Artificial Sequence: Synthetic oligonucleotide
gcaacuggcuguaaaaugg

SEQ ID NO: 1242730 - RNA, 19 nt, Artificial Sequence
  Description of Artificial Sequence: Synthetic oligonucleotide
auacauaaagauagggcug

SEQ ID NO: 1242731 - RNA, 19 nt, Artificial Sequence
  Description of Artificial Sequence: Synthetic oligonucleotide
ccguauuuuccuuugaaag

SEQ ID NO: 1242732 - RNA, 19 nt, Artificial Sequence
  Description of Artificial Sequence: Synthetic oligonucleotide
acaaccguauuuuccuuug

SEQ ID NO: 1242733 - RNA, 19 nt, Artificial Sequence
  Description of Artificial Sequence: Synthetic oligonucleotide
aaacacuggcguccaagca

SEQ ID NO: 1242734 - RNA, 19 nt, Artificial Sequence
  Description of Artificial Sequence: Synthetic oligonucleotide
cagggaauacuccacgcgc

SEQ ID NO: 1242735 - RNA, 19 nt, Artificial Sequence
  Description of Artificial Sequence: Synthetic oligonucleotide
agcaaacgcuccuacacca

SEQ ID NO: 1242736 - RNA, 19 nt, Artificial Sequence
  Description of Artificial Sequence: Synthetic oligonucleotide
guugaucacccagaugugg

SEQ ID NO: 1242737 - RNA, 19 nt, Artificial Sequence
  Description of Artificial Sequence: Synthetic oligonucleotide
uuguuguuguuguuguuaa

SEQ ID NO: 1242738 - RNA, 19 nt, Artificial Sequence
  Description of Artificial Sequence: Synthetic oligonucleotide
auuaaaucagggguauuga

SEQ ID NO: 1242739 - RNA, 19 nt, Artificial Sequence
  Description of Artificial Sequence: Synthetic oligonucleotide
uuuagcggauaccggugcc

SEQ ID NO: 1242740 - RNA, 19 nt, Artificial Sequence
  Description of Artificial Sequence: Synthetic oligonucleotide
uuucagagcucguucggcu

SEQ ID NO: 1242741 - RNA, 19 nt, Artificial Sequence
  Description of Artificial Sequence: Synthetic oligonucleotide
ggagcgugucuucauaacg

SEQ ID NO: 1242742 - RNA, 19 nt, Artificial Sequence
  Description of Artificial Sequence: Synthetic oligonucleotide
cauaaagauagggcugucc

SEQ ID NO: 1242743 - RNA, 19 nt, Artificial Sequence
  Description of Artificial Sequence: Synthetic oligonucleotide
uucauaacgcagguuaguc

SEQ ID NO: 1242744 - RNA, 19 nt, Artificial Sequence
  Description of Artificial Sequence: Synthetic oligonucleotide
ucagacuaagucucugaaa

SEQ ID NO: 1242745 - RNA, 19 nt, Artificial Sequence
  Description of Artificial Sequence: Synthetic oligonucleotide
ugucaucuagcagaggcgu

SEQ ID NO: 1242746 - RNA, 19 nt, Artificial Sequence
  Description of Artificial Sequence: Synthetic oligonucleotide
cuagcagaggcgugguggg

SEQ ID NO: 1242747 - RNA, 19 nt, Artificial Sequence
  Description of Artificial Sequence: Synthetic oligonucleotide
caccuuagaaucaauucca

SEQ ID NO: 1242748 - RNA, 19 nt, Artificial Sequence
  Description of Artificial Sequence: Synthetic oligonucleotide
guuuccaggucucaugauc

SEQ ID NO: 1242749 - RNA, 19 nt, Artificial Sequence
  Description of Artificial Sequence: Synthetic oligonucleotide
ugucugcgccacuugaagc

SEQ ID NO: 1242750 - RNA, 19 nt, Artificial Sequence
  Description of Artificial Sequence: Synthetic oligonucleotide
ggcauacauaaagauaggg

SEQ ID NO: 1242751 - RNA, 19 nt, Artificial Sequence
  Description of Artificial Sequence: Synthetic oligonucleotide
ucguauuuguuuccagguc

SEQ ID NO: 1242752 - RNA, 19 nt, Artificial Sequence
  Description of Artificial Sequence: Synthetic oligonucleotide
cucugaaacacuggcgucc

SEQ ID NO: 1242753 - RNA, 19 nt, Artificial Sequence
  Description of Artificial Sequence: Synthetic oligonucleotide
gagcgugucuucauaacgc

SEQ ID NO: 1242754 - RNA, 19 nt, Artificial Sequence
  Description of Artificial Sequence: Synthetic oligonucleotide
gcauacauaaagauagggc

SEQ ID NO: 1242755 - RNA, 19 nt, Artificial Sequence
  Description of Artificial Sequence: Synthetic oligonucleotide
aagccuucacccaguaguc

SEQ ID NO: 1242756 - RNA, 19 nt, Artificial Sequence
  Description of Artificial Sequence: Synthetic oligonucleotide
ccaguagucgacacaaccg

SEQ ID NO: 1242757 - RNA, 19 nt, Artificial Sequence
  Description of Artificial Sequence: Synthetic oligonucleotide
cucguucucaccuguuggc

SEQ ID NO: 1242758 - RNA, 19 nt, Artificial Sequence
  Description of Artificial Sequence: Synthetic oligonucleotide
uagaucagcagggaauacu

SEQ ID NO: 1242759 - RNA, 19 nt, Artificial Sequence
  Description of Artificial Sequence: Synthetic oligonucleotide
ggcuuaacccuuaagacac

SEQ ID NO: 1242760 - RNA, 19 nt, Artificial Sequence
  Description of Artificial Sequence: Synthetic oligonucleotide
uucgagcagagacggacac

SEQ ID NO: 1242761 - RNA, 19 nt, Artificial Sequence
  Description of Artificial Sequence: Synthetic oligonucleotide
gcuuuuauggcuguuggug

SEQ ID NO: 1242762 - RNA, 19 nt, Artificial Sequence
  Description of Artificial Sequence: Synthetic oligonucleotide
aucgagauuaaaacaaaau

SEQ ID NO: 1242763 - RNA, 19 nt, Artificial Sequence
  Description of Artificial Sequence: Synthetic oligonucleotide
aaacgcuccuacaccacag

SEQ ID NO: 1242764 - RNA, 19 nt, Artificial Sequence
  Description of Artificial Sequence: Synthetic oligonucleotide
acguuguuguuguuguugu

SEQ ID NO: 1242765 - RNA, 19 nt, Artificial Sequence
  Description of Artificial Sequence: Synthetic oligonucleotide
ugagugaguauagacgcau

SEQ ID NO: 1242766 - RNA, 19 nt, Artificial Sequence
  Description of Artificial Sequence: Synthetic oligonucleotide
cacuagauccaucacuuca

SEQ ID NO: 1242767 - RNA, 19 nt, Artificial Sequence
  Description of Artificial Sequence: Synthetic oligonucleotide
acaauccgggaacaugugu

SEQ ID NO: 1242768 - RNA, 19 nt, Artificial Sequence
  Description of Artificial Sequence: Synthetic oligonucleotide
uacucguauuuguuuccag

SEQ ID NO: 1242769 - RNA, 19 nt, Artificial Sequence
  Description of Artificial Sequence: Synthetic oligonucleotide
auugggcuuaacccuuaag

SEQ ID NO: 1242770 - RNA, 19 nt, Artificial Sequence
  Description of Artificial Sequence: Synthetic oligonucleotide
aacugcggacaaugucuuc

SEQ ID NO: 1242771 - RNA, 19 nt, Artificial Sequence
  Description of Artificial Sequence: Synthetic oligonucleotide
ggauguuuagaucuaucca

SEQ ID NO: 1242772 - RNA, 19 nt, Artificial Sequence
  Description of Artificial Sequence: Synthetic oligonucleotide
acauagaucagcagggaau

SEQ ID NO: 1242773 - RNA, 19 nt, Artificial Sequence
  Description of Artificial Sequence: Synthetic oligonucleotide
uucuauccacccagcaaac

SEQ ID NO: 1242774 - RNA, 19 nt, Artificial Sequence
  Description of Artificial Sequence: Synthetic oligonucleotide
cugagcaccguccauguca

SEQ ID NO: 1242775 - RNA, 19 nt, Artificial Sequence
  Description of Artificial Sequence: Synthetic oligonucleotide
uccauauagcaaggagggg

SEQ ID NO: 1242776 - RNA, 19 nt, Artificial Sequence
  Description of Artificial Sequence: Synthetic oligonucleotide
agugugccgagccacaaua

SEQ ID NO: 1242777 - RNA, 19 nt, Artificial Sequence
  Description of Artificial Sequence: Synthetic oligonucleotide
agacccuugcauccacagg

SEQ ID NO: 1242778 - RNA, 19 nt, Artificial Sequence
  Description of Artificial Sequence: Synthetic oligonucleotide
acugcggacaaugucuuca

SEQ ID NO: 1242779 - RNA, 19 nt, Artificial Sequence
  Description of Artificial Sequence: Synthetic oligonucleotide
augucaucuagcagaggcg

SEQ ID NO: 1242780 - RNA, 19 nt, Artificial Sequence
  Description of Artificial Sequence: Synthetic oligonucleotide
uacaucugcaaucgagauu

SEQ ID NO: 1242781 - RNA, 19 nt, Artificial Sequence
  Description of Artificial Sequence: Synthetic oligonucleotide
auagaucagcagggaauac

SEQ ID NO: 1242782 - RNA, 19 nt, Artificial Sequence
  Description of Artificial Sequence: Synthetic oligonucleotide
uaacauagaucagcaggga

SEQ ID NO: 1242783 - RNA, 19 nt, Artificial Sequence
  Description of Artificial Sequence: Synthetic oligonucleotide
gugucugcgccacuugaag

SEQ ID NO: 1242784 - RNA, 19 nt, Artificial Sequence
  Description of Artificial Sequence: Synthetic oligonucleotide
agccacaauagcugcuuug

SEQ ID NO: 1242785 - RNA, 19 nt, Artificial Sequence
  Description of Artificial Sequence: Synthetic oligonucleotide
guuaacacuuuggucuggc

SEQ ID NO: 1242786 - RNA, 19 nt, Artificial Sequence
  Description of Artificial Sequence: Synthetic oligonucleotide
uuagaucuauccagcucau

SEQ ID NO: 1242787 - RNA, 19 nt, Artificial Sequence
  Description of Artificial Sequence: Synthetic oligonucleotide
uaucugggauguuuagauc

SEQ ID NO: 1242788 - RNA, 19 nt, Artificial Sequence
  Description of Artificial Sequence: Synthetic oligonucleotide
ugggauguuuagaucuauc

SEQ ID NO: 1242789 - RNA, 19 nt, Artificial Sequence
  Description of Artificial Sequence: Synthetic oligonucleotide
uggcaagguaagugugccg

SEQ ID NO: 1242790 - RNA, 19 nt, Artificial Sequence
  Description of Artificial Sequence: Synthetic oligonucleotide
uggccugaucuucugcaca

SEQ ID NO: 1242791 - RNA, 19 nt, Artificial Sequence
  Description of Artificial Sequence: Synthetic oligonucleotide
agcgugucuucauaacgca

SEQ ID NO: 1242792 - RNA, 19 nt, Artificial Sequence
  Description of Artificial Sequence: Synthetic oligonucleotide
uguuaacagugcagggauc

SEQ ID NO: 1242793 - RNA, 19 nt, Artificial Sequence
  Description of Artificial Sequence: Synthetic oligonucleotide
agacgcaucucuucuccca

SEQ ID NO: 1242794 - RNA, 19 nt, Artificial Sequence
  Description of Artificial Sequence: Synthetic oligonucleotide
guucggcuggccaugcugg

SEQ ID NO: 1242795 - RNA, 19 nt, Artificial Sequence
  Description of Artificial Sequence: Synthetic oligonucleotide
gaacccguucuccacuuuc

SEQ ID NO: 1242796 - RNA, 19 nt, Artificial Sequence
  Description of Artificial Sequence: Synthetic oligonucleotide
gggaugaacaugcaggaaa

SEQ ID NO: 1242797 - RNA, 19 nt, Artificial Sequence
  Description of Artificial Sequence: Synthetic oligonucleotide
aggagucacacggaaauaa

SEQ ID NO: 1242798 - RNA, 19 nt, Artificial Sequence
  Description of Artificial Sequence: Synthetic oligonucleotide
cuaagaacaucaccuuaga

SEQ ID NO: 1242799 - RNA, 19 nt, Artificial Sequence
  Description of Artificial Sequence: Synthetic oligonucleotide
uuaacccuuaagacacaua

SEQ ID NO: 1242800 - RNA, 19 nt, Artificial Sequence
  Description of Artificial Sequence: Synthetic oligonucleotide
auggcuuuuauggcuguug

SEQ ID NO: 1242801 - RNA, 19 nt, Artificial Sequence
  Description of Artificial Sequence: Synthetic oligonucleotide
aguggacggggucugaauu

SEQ ID NO: 1242802 - RNA, 19 nt, Artificial Sequence
  Description of Artificial Sequence: Synthetic oligonucleotide
uuugccuccugagucggcu

SEQ ID NO: 1242803 - RNA, 19 nt, Artificial Sequence
  Description of Artificial Sequence: Synthetic oligonucleotide
cugcguuaacacuuugguc

SEQ ID NO: 1242804 - RNA, 19 nt, Artificial Sequence
  Description of Artificial Sequence: Synthetic oligonucleotide
uucacccaguagucgacac

SEQ ID NO: 1242805 - RNA, 19 nt, Artificial Sequence
  Description of Artificial Sequence: Synthetic oligonucleotide
acgcagguuaguccaaggu

SEQ ID NO: 1242806 - RNA, 19 nt, Artificial Sequence
  Description of Artificial Sequence: Synthetic oligonucleotide
gacgcaucucuucucccac

SEQ ID NO: 1242807 - RNA, 19 nt, Artificial Sequence
  Description of Artificial Sequence: Synthetic oligonucleotide
agggguauugacauccacu

SEQ ID NO: 1242808 - RNA, 19 nt, Artificial Sequence
  Description of Artificial Sequence: Synthetic oligonucleotide
guauagacgcaucucuucu

SEQ ID NO: 1242809 - RNA, 19 nt, Artificial Sequence
  Description of Artificial Sequence: Synthetic oligonucleotide
aaguggacggggucugaau

SEQ ID NO: 1242810 - RNA, 19 nt, Artificial Sequence
  Description of Artificial Sequence: Synthetic oligonucleotide
aagccagggacccgccugu

SEQ ID NO: 1242811 - RNA, 19 nt, Artificial Sequence
  Description of Artificial Sequence: Synthetic oligonucleotide
ucgacacaaccguauuuuc

SEQ ID NO: 1242812 - RNA, 19 nt, Artificial Sequence
  Description of Artificial Sequence: Synthetic oligonucleotide
guuguuguuguuguuguua

SEQ ID NO: 1242813 - RNA, 19 nt, Artificial Sequence
  Description of Artificial Sequence: Synthetic oligonucleotide
gggcuuaacccuuaagaca

SEQ ID NO: 1242814 - RNA, 19 nt, Artificial Sequence
  Description of Artificial Sequence: Synthetic oligonucleotide
gugggugcagccacgacug

SEQ ID NO: 1242815 - RNA, 19 nt, Artificial Sequence
  Description of Artificial Sequence: Synthetic oligonucleotide
ucagggguauugacaucca

SEQ ID NO: 1242816 - RNA, 19 nt, Artificial Sequence
  Description of Artificial Sequence: Synthetic oligonucleotide
gaacaucaccuuagaauca

SEQ ID NO: 1242817 - RNA, 19 nt, Artificial Sequence
  Description of Artificial Sequence: Synthetic oligonucleotide
cccaguagucgacacaacc

SEQ ID NO: 1242818 - RNA, 19 nt, Artificial Sequence
  Description of Artificial Sequence: Synthetic oligonucleotide
cacauaguaguagaguuua

SEQ ID NO: 1242819 - RNA, 19 nt, Artificial Sequence
  Description of Artificial Sequence: Synthetic oligonucleotide
cccuuaagacacauaguag

SEQ ID NO: 1242820 - RNA, 19 nt, Artificial Sequence
  Description of Artificial Sequence: Synthetic oligonucleotide
agucgacacaaccguauuu

SEQ ID NO: 1242821 - RNA, 19 nt, Artificial Sequence
  Description of Artificial Sequence: Synthetic oligonucleotide
cucguauuuguuuccaggu

SEQ ID NO: 1242822 - RNA, 19 nt, Artificial Sequence
  Description of Artificial Sequence: Synthetic oligonucleotide
cagguuaguccaaggucug

SEQ ID NO: 1242823 - RNA, 19 nt, Artificial Sequence
  Description of Artificial Sequence: Synthetic oligonucleotide
cacacgcccaucagggaug

SEQ ID NO: 1242824 - RNA, 19 nt, Artificial Sequence
  Description of Artificial Sequence: Synthetic oligonucleotide
gucuucuaggaggagcgug

SEQ ID NO: 1242825 - RNA, 19 nt, Artificial Sequence
  Description of Artificial Sequence: Synthetic oligonucleotide
acauaaagauagggcuguc

SEQ ID NO: 1242826 - RNA, 19 nt, Artificial Sequence
  Description of Artificial Sequence: Synthetic oligonucleotide
ucuagucgguggucuucag

SEQ ID NO: 1242827 - RNA, 19 nt, Artificial Sequence
  Description of Artificial Sequence: Synthetic oligonucleotide
ggcaugaacuggaacucgg

SEQ ID NO: 1242828 - RNA, 19 nt, Artificial Sequence
  Description of Artificial Sequence: Synthetic oligonucleotide
aaaguggacggggucugaa

SEQ ID NO: 1242829 - RNA, 19 nt, Artificial Sequence
  Description of Artificial Sequence: Synthetic oligonucleotide
gugaguauagacgcaucuc

SEQ ID NO: 1242830 - RNA, 19 nt, Artificial Sequence
  Description of Artificial Sequence: Synthetic oligonucleotide
uagucgacacaaccguauu

SEQ ID NO: 1242831 - RNA, 19 nt, Artificial Sequence
  Description of Artificial Sequence: Synthetic oligonucleotide
cacaauccgggaacaugug

SEQ ID NO: 1242832 - RNA, 19 nt, Artificial Sequence
  Description of Artificial Sequence: Synthetic oligonucleotide
gguaagugugccgagccac

SEQ ID NO: 1242833 - RNA, 19 nt, Artificial Sequence
  Description of Artificial Sequence: Synthetic oligonucleotide
uccgggaacauguguucuc

SEQ ID NO: 1242834 - RNA, 19 nt, Artificial Sequence
  Description of Artificial Sequence: Synthetic oligonucleotide
aaacugcggacaaugucuu

SEQ ID NO: 1242835 - RNA, 19 nt, Artificial Sequence
  Description of Artificial Sequence: Synthetic oligonucleotide
acgggcucacugcacguug

SEQ ID NO: 1242836 - RNA, 19 nt, Artificial Sequence
  Description of Artificial Sequence: Synthetic oligonucleotide
cauagaucagcagggaaua

SEQ ID NO: 1242837 - RNA, 19 nt, Artificial Sequence
  Description of Artificial Sequence: Synthetic oligonucleotide
caggagcuaaagugcuaag

SEQ ID NO: 1242838 - RNA, 19 nt, Artificial Sequence
  Description of Artificial Sequence: Synthetic oligonucleotide
cauccacuagauccaucac

SEQ ID NO: 1242839 - RNA, 19 nt, Artificial Sequence
  Description of Artificial Sequence: Synthetic oligonucleotide
gggaauacuccacgcgcag

SEQ ID NO: 1242840 - RNA, 19 nt, Artificial Sequence
  Description of Artificial Sequence: Synthetic oligonucleotide
agaccugaccugcugccaa

SEQ ID NO: 1242841 - RNA, 19 nt, Artificial Sequence
  Description of Artificial Sequence: Synthetic oligonucleotide
gguggguggaggcaugaac

SEQ ID NO: 1242842 - RNA, 19 nt, Artificial Sequence
  Description of Artificial Sequence: Synthetic oligonucleotide
ggguauugacauccacuag

SEQ ID NO: 1242843 - RNA, 19 nt, Artificial Sequence
  Description of Artificial Sequence: Synthetic oligonucleotide
uguuguuguuguuguuguu

SEQ ID NO: 1242844 - RNA, 19 nt, Artificial Sequence
  Description of Artificial Sequence: Synthetic oligonucleotide
ucauugggcuuaacccuua

SEQ ID NO: 1242845 - RNA, 19 nt, Artificial Sequence
  Description of Artificial Sequence: Synthetic oligonucleotide
caaacgcuccuacaccaca

SEQ ID NO: 1242846 - RNA, 19 nt, Artificial Sequence
  Description of Artificial Sequence: Synthetic oligonucleotide
agcucguucggcuggccau

SEQ ID NO: 1242847 - RNA, 19 nt, Artificial Sequence
  Description of Artificial Sequence: Synthetic oligonucleotide
cuccuacaccacagggcgg

SEQ ID NO: 1242848 - RNA, 19 nt, Artificial Sequence
  Description of Artificial Sequence: Synthetic oligonucleotide
ggcaagguaagugugccga

SEQ ID NO: 1242849 - RNA, 19 nt, Artificial Sequence
  Description of Artificial Sequence: Synthetic oligonucleotide
agggaauacuccacgcgca

SEQ ID NO: 1242850 - RNA, 19 nt, Artificial Sequence
  Description of Artificial Sequence: Synthetic oligonucleotide
ucucuagucgguggucuuc

SEQ ID NO: 1242851 - RNA, 19 nt, Artificial Sequence
  Description of Artificial Sequence: Synthetic oligonucleotide
cauucacaccgacucaaaa

SEQ ID NO: 1242852 - RNA, 19 nt, Artificial Sequence
  Description of Artificial Sequence: Synthetic oligonucleotide
aaggagucacacggaaaua

SEQ ID NO: 1242853 - RNA, 19 nt, Artificial Sequence
  Description of Artificial Sequence: Synthetic oligonucleotide
ggaauacuccacgcgcagg

SEQ ID NO: 1242854 - RNA, 19 nt, Artificial Sequence
  Description of Artificial Sequence: Synthetic oligonucleotide
uaagugugccgagccacaa

SEQ ID NO: 1242855 - RNA, 19 nt, Artificial Sequence
  Description of Artificial Sequence: Synthetic oligonucleotide
cuuguacucguauuuguuu

SEQ ID NO: 1242856 - RNA, 19 nt, Artificial Sequence
  Description of Artificial Sequence: Synthetic oligonucleotide
cgacacaaccguauuuucc

SEQ ID NO: 1242857 - RNA, 19 nt, Artificial Sequence
  Description of Artificial Sequence: Synthetic oligonucleotide
gcguuaacacuuuggucug

SEQ ID NO: 1242858 - RNA, 19 nt, Artificial Sequence
  Description of Artificial Sequence: Synthetic oligonucleotide
aucuagcagaggcguggug

SEQ ID NO: 1242859 - RNA, 19 nt, Artificial Sequence
  Description of Artificial Sequence: Synthetic oligonucleotide
auucgagcagagacggaca

SEQ ID NO: 1242860 - RNA, 19 nt, Artificial Sequence
  Description of Artificial Sequence: Synthetic oligonucleotide
cuggggcgaucaaggaaag

SEQ ID NO: 1242861 - RNA, 19 nt, Artificial Sequence
  Description of Artificial Sequence: Synthetic oligonucleotide
cuucugcguuaacacuuug

SEQ ID NO: 1242862 - RNA, 19 nt, Artificial Sequence
  Description of Artificial Sequence: Synthetic oligonucleotide
cagggguauugacauccac

SEQ ID NO: 1242863 - RNA, 19 nt, Artificial Sequence
  Description of Artificial Sequence: Synthetic oligonucleotide
agccacgacugcucuaaaa

SEQ ID NO: 1242864 - RNA, 19 nt, Artificial Sequence
  Description of Artificial Sequence: Synthetic oligonucleotide
caguagucgacacaaccgu

SEQ ID NO: 1242865 - RNA, 19 nt, Artificial Sequence
  Description of Artificial Sequence: Synthetic oligonucleotide
gagugaguauagacgcauc

SEQ ID NO: 1242866 - RNA, 19 nt, Artificial Sequence
  Description of Artificial Sequence: Synthetic oligonucleotide
augagugaguauagacgca

SEQ ID NO: 1242867 - RNA, 19 nt, Artificial Sequence
  Description of Artificial Sequence: Synthetic oligonucleotide
guauugacauccacuagau

SEQ ID NO: 1242868 - RNA, 19 nt, Artificial Sequence
  Description of Artificial Sequence: Synthetic oligonucleotide
guggguggaggcaugaacu

SEQ ID NO: 1242869 - RNA, 19 nt, Artificial Sequence
  Description of Artificial Sequence: Synthetic oligonucleotide
ucgagcagagacggacaca

SEQ ID NO: 1242870 - RNA, 19 nt, Artificial Sequence
  Description of Artificial Sequence: Synthetic oligonucleotide
gggcauacauaaagauagg

SEQ ID NO: 1242871 - RNA, 19 nt, Artificial Sequence
  Description of Artificial Sequence: Synthetic oligonucleotide
auccgggaacauguguucu

SEQ ID NO: 1242872 - RNA, 19 nt, Artificial Sequence
  Description of Artificial Sequence: Synthetic oligonucleotide
cucaguguaggugggugga

SEQ ID NO: 1242873 - RNA, 19 nt, Artificial Sequence
  Description of Artificial Sequence: Synthetic oligonucleotide
ugacauccacuagauccau

SEQ ID NO: 1242874 - RNA, 19 nt, Artificial Sequence
  Description of Artificial Sequence: Synthetic oligonucleotide
caauccgggaacauguguu

SEQ ID NO: 1242875 - RNA, 19 nt, Artificial Sequence
  Description of Artificial Sequence: Synthetic oligonucleotide
gcagguuaguccaaggucu

SEQ ID NO: 1242876 - RNA, 19 nt, Artificial Sequence
  Description of Artificial Sequence: Synthetic oligonucleotide
aucugcaaucgagauuaaa

SEQ ID NO: 1242877 - RNA, 19 nt, Artificial Sequence
  Description of Artificial Sequence: Synthetic oligonucleotide
gagcucguucggcuggcca

SEQ ID NO: 1242878 - RNA, 19 nt, Artificial Sequence
  Description of Artificial Sequence: Synthetic oligonucleotide
caccaucucguucucaccu

SEQ ID NO: 1242879 - RNA, 19 nt, Artificial Sequence
  Description of Artificial Sequence: Synthetic oligonucleotide
uggacggggucugaauuuu

SEQ ID NO: 1242880 - RNA, 19 nt, Artificial Sequence
  Description of Artificial Sequence: Synthetic oligonucleotide
guaagugugccgagccaca

SEQ ID NO: 1242881 - RNA, 19 nt, Artificial Sequence
  Description of Artificial Sequence: Synthetic oligonucleotide
cugcgccacuugaagccag

SEQ ID NO: 1242882 - RNA, 19 nt, Artificial Sequence
  Description of Artificial Sequence: Synthetic oligonucleotide
ugucuucauaacgcagguu

SEQ ID NO: 1242883 - RNA, 19 nt, Artificial Sequence
  Description of Artificial Sequence: Synthetic oligonucleotide
cuucuaggaggagcguguc

SEQ ID NO: 1242884 - RNA, 19 nt, Artificial Sequence
  Description of Artificial Sequence: Synthetic oligonucleotide
aguagucgacacaaccgua

SEQ ID NO: 1242885 - RNA, 19 nt, Artificial Sequence
  Description of Artificial Sequence: Synthetic oligonucleotide
ggucauucacaccgacuca

SEQ ID NO: 1242886 - RNA, 19 nt, Artificial Sequence
  Description of Artificial Sequence: Synthetic oligonucleotide
gcaucucuucucccacggg

SEQ ID NO: 1242887 - RNA, 19 nt, Artificial Sequence
  Description of Artificial Sequence: Synthetic oligonucleotide
ugaacccguucuccacuuu

SEQ ID NO: 1242888 - RNA, 19 nt, Artificial Sequence
  Description of Artificial Sequence: Synthetic oligonucleotide
agagacggacacacgccca

SEQ ID NO: 1242889 - RNA, 19 nt, Artificial Sequence
  Description of Artificial Sequence: Synthetic oligonucleotide
gcucacugcacguuguugu

SEQ ID NO: 1242890 - RNA, 19 nt, Artificial Sequence
  Description of Artificial Sequence: Synthetic oligonucleotide
gucgacacaaccguauuuu

SEQ ID NO: 1242891 - RNA, 19 nt, Artificial Sequence
  Description of Artificial Sequence: Synthetic oligonucleotide
guagucgacacaaccguau

SEQ ID NO: 1242892 - RNA, 19 nt, Artificial Sequence
  Description of Artificial Sequence: Synthetic oligonucleotide
cccacgggcucacugcacg

SEQ ID NO: 1242893 - RNA, 19 nt, Artificial Sequence
  Description of Artificial Sequence: Synthetic oligonucleotide
ccgggaacauguguucucg

SEQ ID NO: 1242894 - RNA, 19 nt, Artificial Sequence
  Description of Artificial Sequence: Synthetic oligonucleotide
cucuagucgguggucuuca

SEQ ID NO: 1242895 - RNA, 19 nt, Artificial Sequence
  Description of Artificial Sequence: Synthetic oligonucleotide
caaccguauuuuccuuuga

SEQ ID NO: 1242896 - RNA, 19 nt, Artificial Sequence
  Description of Artificial Sequence: Synthetic oligonucleotide
acuggcguccaagcagaga

SEQ ID NO: 1242897 - RNA, 19 nt, Artificial Sequence
  Description of Artificial Sequence: Synthetic oligonucleotide
gggacccgccuguugauca

SEQ ID NO: 1242898 - RNA, 19 nt, Artificial Sequence
  Description of Artificial Sequence: Synthetic oligonucleotide
acccaguagucgacacaac

SEQ ID NO: 1242899 - RNA, 19 nt, Artificial Sequence
  Description of Artificial Sequence: Synthetic oligonucleotide
ccgccuguugaucacccag

SEQ ID NO: 1242900 - RNA, 19 nt, Artificial Sequence
  Description of Artificial Sequence: Synthetic oligonucleotide
gaguauagacgcaucucuu

SEQ ID NO: 1242901 - RNA, 19 nt, Artificial Sequence
  Description of Artificial Sequence: Synthetic oligonucleotide
gaaaguggacggggucuga

SEQ ID NO: 1242902 - RNA, 19 nt, Artificial Sequence
  Description of Artificial Sequence: Synthetic oligonucleotide
gugccgagccacaauagcu

SEQ ID NO: 1242903 - RNA, 19 nt, Artificial Sequence
  Description of Artificial Sequence: Synthetic oligonucleotide
ccgagaugaugugauugcc

SEQ ID NO: 1242904 - RNA, 19 nt, Artificial Sequence
  Description of Artificial Sequence: Synthetic oligonucleotide
ggggugaacccguucucca

SEQ ID NO: 1242905 - RNA, 19 nt, Artificial Sequence
  Description of Artificial Sequence: Synthetic oligonucleotide
cuucauaacgcagguuagu

SEQ ID NO: 1242906 - RNA, 19 nt, Artificial Sequence
  Description of Artificial Sequence: Synthetic oligonucleotide
cacgaggcgcagguccccg

SEQ ID NO: 1242907 - RNA, 19 nt, Artificial Sequence
  Description of Artificial Sequence: Synthetic oligonucleotide
auaacgcagguuaguccaa

SEQ ID NO: 1242908 - RNA, 19 nt, Artificial Sequence
  Description of Artificial Sequence: Synthetic oligonucleotide
gcgugucuucauaacgcag

SEQ ID NO: 1242909 - RNA, 19 nt, Artificial Sequence
  Description of Artificial Sequence: Synthetic oligonucleotide
cacuggcguccaagcagag

SEQ ID NO: 1242910 - RNA, 19 nt, Artificial Sequence
  Description of Artificial Sequence: Synthetic oligonucleotide
gagacggacacacgcccau

SEQ ID NO: 1242911 - RNA, 19 nt, Artificial Sequence
  Description of Artificial Sequence: Synthetic oligonucleotide
uagaucuauccagcucauu

SEQ ID NO: 1242912 - RNA, 19 nt, Artificial Sequence
  Description of Artificial Sequence: Synthetic oligonucleotide
cucguucggcuggccaugc

SEQ ID NO: 1242913 - RNA, 19 nt, Artificial Sequence
  Description of Artificial Sequence: Synthetic oligonucleotide
caauucgagcagagacgga

SEQ ID NO: 1242914 - RNA, 19 nt, Artificial Sequence
  Description of Artificial Sequence: Synthetic oligonucleotide
cuucacccaguagucgaca

SEQ ID NO: 1242915 - RNA, 19 nt, Artificial Sequence
  Description of Artificial Sequence: Synthetic oligonucleotide
gcgcagguccccgagauga

SEQ ID NO: 1242916 - RNA, 19 nt, Artificial Sequence
  Description of Artificial Sequence: Synthetic oligonucleotide
gaaggucaaggaugacuuu

SEQ ID NO: 1242917 - RNA, 19 nt, Artificial Sequence
  Description of Artificial Sequence: Synthetic oligonucleotide
cagagcucguucggcuggc

SEQ ID NO: 1242918 - RNA, 19 nt, Artificial Sequence
  Description of Artificial Sequence: Synthetic oligonucleotide
ggugaacccguucuccacu

SEQ ID NO: 1242919 - RNA, 19 nt, Artificial Sequence
  Description of Artificial Sequence: Synthetic oligonucleotide
uucucaccuguuggcuggu

SEQ ID NO: 1242920 - RNA, 19 nt, Artificial Sequence
  Description of Artificial Sequence: Synthetic oligonucleotide
cucccacgggcucacugca

SEQ ID NO: 1242921 - RNA, 19 nt, Artificial Sequence
  Description of Artificial Sequence: Synthetic oligonucleotide
uccccgagaugaugugauu

SEQ ID NO: 1242922 - RNA, 19 nt, Artificial Sequence
  Description of Artificial Sequence: Synthetic oligonucleotide
ccuugcauccacaggaccu

SEQ ID NO: 1242923 - RNA, 19 nt, Artificial Sequence
  Description of Artificial Sequence: Synthetic oligonucleotide
acacgcccaucagggauga

SEQ ID NO: 1242924 - RNA, 19 nt, Artificial Sequence
  Description of Artificial Sequence: Synthetic oligonucleotide
gauccaccucaguguaggu

SEQ ID NO: 1242925 - RNA, 19 nt, Artificial Sequence
  Description of Artificial Sequence: Synthetic oligonucleotide
cacaaccguauuuuccuuu

SEQ ID NO: 1242926 - RNA, 19 nt, Artificial Sequence
  Description of Artificial Sequence: Synthetic oligonucleotide
ggcuggggcgaucaaggaa

SEQ ID NO: 1242927 - RNA, 19 nt, Artificial Sequence
  Description of Artificial Sequence: Synthetic oligonucleotide
cauugggcuuaacccuuaa

SEQ ID NO: 1242928 - RNA, 19 nt, Artificial Sequence
  Description of Artificial Sequence: Synthetic oligonucleotide
cucgccacgaggcgcaggu

SEQ ID NO: 1242929 - RNA, 19 nt, Artificial Sequence
  Description of Artificial Sequence: Synthetic oligonucleotide
gcgugguggggcucucuag

SEQ ID NO: 1242930 - RNA, 19 nt, Artificial Sequence
  Description of Artificial Sequence: Synthetic oligonucleotide
gcgaucaaggaaagccuuc

SEQ ID NO: 1242931 - RNA, 19 nt, Artificial Sequence
  Description of Artificial Sequence: Synthetic oligonucleotide
acgaggcgcagguccccga

SEQ ID NO: 1242932 - RNA, 19 nt, Artificial Sequence
  Description of Artificial Sequence: Synthetic oligonucleotide
gcggauaccggugccauua

SEQ ID NO: 1242933 - RNA, 19 nt, Artificial Sequence
  Description of Artificial Sequence: Synthetic oligonucleotide
ccacuagauccaucacuuc

SEQ ID NO: 1242934 - RNA, 19 nt, Artificial Sequence
  Description of Artificial Sequence: Synthetic oligonucleotide
gcaaacgcuccuacaccac

SEQ ID NO: 1242935 - RNA, 19 nt, Artificial Sequence
  Description of Artificial Sequence: Synthetic oligonucleotide
ggauaccggugccauuaaa

SEQ ID NO: 1242936 - RNA, 19 nt, Artificial Sequence
  Description of Artificial Sequence: Synthetic oligonucleotide
gggauccaccucaguguag

SEQ ID NO: 1242937 - RNA, 19 nt, Artificial Sequence
  Description of Artificial Sequence: Synthetic oligonucleotide
ucugcacacggaggcucuu

SEQ ID NO: 1242938 - RNA, 19 nt, Artificial Sequence
  Description of Artificial Sequence: Synthetic oligonucleotide
ggacccgccuguugaucac

SEQ ID NO: 1242939 - RNA, 19 nt, Artificial Sequence
  Description of Artificial Sequence: Synthetic oligonucleotide
gccauuaaaucagggguau

SEQ ID NO: 1242940 - RNA, 19 nt, Artificial Sequence
  Description of Artificial Sequence: Synthetic oligonucleotide
gugaacccguucuccacuu

SEQ ID NO: 1242941 - RNA, 19 nt, Artificial Sequence
  Description of Artificial Sequence: Synthetic oligonucleotide
cucacugcacguuguuguu

SEQ ID NO: 1242942 - RNA, 19 nt, Artificial Sequence
  Description of Artificial Sequence: Synthetic oligonucleotide
gggcgaucaaggaaagccu

SEQ ID NO: 1242943 - RNA, 19 nt, Artificial Sequence
  Description of Artificial Sequence: Synthetic oligonucleotide
acagugcaacuggcuguaa

SEQ ID NO: 1242944 - RNA, 19 nt, Artificial Sequence
  Description of Artificial Sequence: Synthetic oligonucleotide
gcuuaacccuuaagacaca

SEQ ID NO: 1242945 - RNA, 19 nt, Artificial Sequence
  Description of Artificial Sequence: Synthetic oligonucleotide
caucuagcagaggcguggu

SEQ ID NO: 1242946 - RNA, 19 nt, Artificial Sequence
  Description of Artificial Sequence: Synthetic oligonucleotide
ggggcccuugaggaaguuc

SEQ ID NO: 1242947 - RNA, 19 nt, Artificial Sequence
  Description of Artificial Sequence: Synthetic oligonucleotide
ggcgugguggggcucucua

SEQ ID NO: 1242948 - RNA, 19 nt, Artificial Sequence
  Description of Artificial Sequence: Synthetic oligonucleotide
ggcgaucaaggaaagccuu

SEQ ID NO: 1242949 - RNA, 19 nt, Artificial Sequence
  Description of Artificial Sequence: Synthetic oligonucleotide
cucucuagucgguggucuu

SEQ ID NO: 1242950 - RNA, 19 nt, Artificial Sequence
  Description of Artificial Sequence: Synthetic oligonucleotide
ucgccacgaggcgcagguc

SEQ ID NO: 1242951 - RNA, 19 nt, Artificial Sequence
  Description of Artificial Sequence: Synthetic oligonucleotide
aggcgugguggggcucucu

SEQ ID NO: 1242952 - RNA, 19 nt, Artificial Sequence
  Description of Artificial Sequence: Synthetic oligonucleotide
ccugagcaccguccauguc

SEQ ID NO: 1242953 - RNA, 19 nt, Artificial Sequence
  Description of Artificial Sequence: Synthetic oligonucleotide
ccuacaccacagggcgggc

SEQ ID NO: 1242954 - RNA, 19 nt, Artificial Sequence
  Description of Artificial Sequence: Synthetic oligonucleotide
gaggcgugguggggcucuc

SEQ ID NO: 1242955 - RNA, 19 nt, Artificial Sequence
  Description of Artificial Sequence: Synthetic oligonucleotide
ccaucucguucucaccugu

SEQ ID NO: 1242956 - RNA, 19 nt, Artificial Sequence
  Description of Artificial Sequence: Synthetic oligonucleotide
ccacgaggcgcaggucccc

SEQ ID NO: 1242957 - RNA, 19 nt, Artificial Sequence
  Description of Artificial Sequence: Synthetic oligonucleotide
cagggacccgccuguugau

SEQ ID NO: 1242958 - RNA, 19 nt, Artificial Sequence
  Description of Artificial Sequence: Synthetic oligonucleotide
agccagggacccgccuguu

SEQ ID NO: 1242959 - RNA, 19 nt, Artificial Sequence
  Description of Artificial Sequence: Synthetic oligonucleotide
ccucgccacgaggcgcagg

SEQ ID NO: 1242960 - RNA, 19 nt, Artificial Sequence
  Description of Artificial Sequence: Synthetic oligonucleotide
cgggaacauguguucucga

SEQ ID NO: 1242961 - RNA, 19 nt, Artificial Sequence
  Description of Artificial Sequence: Synthetic oligonucleotide
aggggcccuugaggaaguu

SEQ ID NO: 1242962 - RNA, 19 nt, Artificial Sequence
  Description of Artificial Sequence: Synthetic oligonucleotide
cggauaccggugccauuaa

SEQ ID NO: 1242963 - RNA, 19 nt, Artificial Sequence
  Description of Artificial Sequence: Synthetic oligonucleotide
cguuguuguuguuguuguu

SEQ ID NO: 1242964 - RNA, 19 nt, Artificial Sequence
  Description of Artificial Sequence: Synthetic oligonucleotide
cugggguaucugggauguu

SEQ ID NO: 1242965 - RNA, 19 nt, Artificial Sequence
  Description of Artificial Sequence: Synthetic oligonucleotide
aauauuguuuauuaugagc

SEQ ID NO: 1242966 - RNA, 19 nt, Artificial Sequence
  Description of Artificial Sequence: Synthetic oligonucleotide
aauacuguauuucuagcuc

SEQ ID NO: 1242967 - RNA, 19 nt, Artificial Sequence
  Description of Artificial Sequence: Synthetic oligonucleotide
auaaauauuguuuauuaug

SEQ ID NO: 1242968 - RNA, 19 nt, Artificial Sequence
  Description of Artificial Sequence: Synthetic oligonucleotide
aaauaauucacagugauau

SEQ ID NO: 1242969 - RNA, 19 nt, Artificial Sequence
  Description of Artificial Sequence: Synthetic oligonucleotide
uauaagucucuuaacagag

SEQ ID NO: 1242970 - RNA, 19 nt, Artificial Sequence
  Description of Artificial Sequence: Synthetic oligonucleotide
uguucauugacugaggugc

SEQ ID NO: 1242971 - RNA, 19 nt, Artificial Sequence
  Description of Artificial Sequence: Synthetic oligonucleotide
cuaucuaacguauaccacg

SEQ ID NO: 1242972 - RNA, 19 nt, Artificial Sequence
  Description of Artificial Sequence: Synthetic oligonucleotide
aagggaguaacacuucugg

SEQ ID NO: 1242973 - RNA, 19 nt, Artificial Sequence
  Description of Artificial Sequence: Synthetic oligonucleotide
agauuuucuagccugggcg

SEQ ID NO: 1242974 - RNA, 19 nt, Artificial Sequence
  Description of Artificial Sequence: Synthetic oligonucleotide
uuuccuaauagcuucaggu

SEQ ID NO: 1242975 - RNA, 19 nt, Artificial Sequence
  Description of Artificial Sequence: Synthetic oligonucleotide
aaauauuguuuauuaugag

SEQ ID NO: 1242976 - RNA, 19 nt, Artificial Sequence
  Description of Artificial Sequence: Synthetic oligonucleotide
ugauaucuugaauagagac

SEQ ID NO: 1242977 - RNA, 19 nt, Artificial Sequence
  Description of Artificial Sequence: Synthetic oligonucleotide
agaccaaggagcuugcccc

SEQ ID NO: 1242978 - RNA, 19 nt, Artificial Sequence
  Description of Artificial Sequence: Synthetic oligonucleotide
guaauagacaacuuccucc

SEQ ID NO: 1242979 - RNA, 19 nt, Artificial Sequence
  Description of Artificial Sequence: Synthetic oligonucleotide
aucguaauagacaacuucc

SEQ ID NO: 1242980 - RNA, 19 nt, Artificial Sequence
  Description of Artificial Sequence: Synthetic oligonucleotide
caacacuucauucauagag

SEQ ID NO: 1242981 - RNA, 19 nt, Artificial Sequence
  Description of Artificial Sequence: Synthetic oligonucleotide
acauucaagccuuuaaguc

SEQ ID NO: 1242982 - RNA, 19 nt, Artificial Sequence
  Description of Artificial Sequence: Synthetic oligonucleotide
uaucuugauacucaggagu

SEQ ID NO: 1242983 - RNA, 19 nt, Artificial Sequence
  Description of Artificial Sequence: Synthetic oligonucleotide
uaucuaacguauaccacgg

SEQ ID NO: 1242984 - RNA, 19 nt, Artificial Sequence
  Description of Artificial Sequence: Synthetic oligonucleotide
guuaucgguaucuugauac

SEQ ID NO: 1242985 - RNA, 19 nt, Artificial Sequence
  Description of Artificial Sequence: Synthetic oligonucleotide
uuauaagucucuuaacaga

SEQ ID NO: 1242986 - RNA, 19 nt, Artificial Sequence
  Description of Artificial Sequence: Synthetic oligonucleotide
auugcuaaaauuauguuca

SEQ ID NO: 1242987 - RNA, 19 nt, Artificial Sequence
  Description of Artificial Sequence: Synthetic oligonucleotide
ucucgcauaucucugaaug

SEQ ID NO: 1242988 - RNA, 19 nt, Artificial Sequence
  Description of Artificial Sequence: Synthetic oligonucleotide
ucuaacguauaccacgggc

SEQ ID NO: 1242989 - RNA, 19 nt, Artificial Sequence
  Description of Artificial Sequence: Synthetic oligonucleotide
auucauagagccugggaac

SEQ ID NO: 1242990 - RNA, 19 nt, Artificial Sequence
  Description of Artificial Sequence: Synthetic oligonucleotide
guaauccuggaauauaugc

SEQ ID NO: 1242991 - RNA, 19 nt, Artificial Sequence
  Description of Artificial Sequence: Synthetic oligonucleotide
agugauaucuugaauagag

SEQ ID NO: 1242992 - RNA, 19 nt, Artificial Sequence
  Description of Artificial Sequence: Synthetic oligonucleotide
auauuguuuauuaugagcu

SEQ ID NO: 1242993 - RNA, 19 nt, Artificial Sequence
  Description of Artificial Sequence: Synthetic oligonucleotide
auaucuugaauagagacca

SEQ ID NO: 1242994 - RNA, 19 nt, Artificial Sequence
  Description of Artificial Sequence: Synthetic oligonucleotide
uuuauucugauuauugcua

SEQ ID NO: 1242995 - RNA, 19 nt, Artificial Sequence
  Description of Artificial Sequence: Synthetic oligonucleotide
uugaauagagaccacugcu

SEQ ID NO: 1242996 - RNA, 19 nt, Artificial Sequence
  Description of Artificial Sequence: Synthetic oligonucleotide
uuauguucacauucaagcc

SEQ ID NO: 1242997 - RNA, 19 nt, Artificial Sequence
  Description of Artificial Sequence: Synthetic oligonucleotide
uuaacagaguccaaccgug

SEQ ID NO: 1242998 - RNA, 19 nt, Artificial Sequence
  Description of Artificial Sequence: Synthetic oligonucleotide
acagugauaucuugaauag

SEQ ID NO: 1242999 - RNA, 19 nt, Artificial Sequence
  Description of Artificial Sequence: Synthetic oligonucleotide
ucuugaauagagaccacug

SEQ ID NO: 1243000 - RNA, 19 nt, Artificial Sequence
  Description of Artificial Sequence: Synthetic oligonucleotide
auauuucacacucuguuga

SEQ ID NO: 1243001 - RNA, 19 nt, Artificial Sequence
  Description of Artificial Sequence: Synthetic oligonucleotide
uaauccuggaauauaugca

SEQ ID NO: 1243002 - RNA, 19 nt, Artificial Sequence
  Description of Artificial Sequence: Synthetic oligonucleotide
auuguuuauuaugagcuuc

SEQ ID NO: 1243003 - RNA, 19 nt, Artificial Sequence
  Description of Artificial Sequence: Synthetic oligonucleotide
ugcauuccuguuaaugccg

SEQ ID NO: 1243004 - RNA, 19 nt, Artificial Sequence
  Description of Artificial Sequence: Synthetic oligonucleotide
augaggucgaaacuucucg

SEQ ID NO: 1243005 - RNA, 19 nt, Artificial Sequence
  Description of Artificial Sequence: Synthetic oligonucleotide
uccugagcuaacaugagcu

SEQ ID NO: 1243006 - RNA, 19 nt, Artificial Sequence
  Description of Artificial Sequence: Synthetic oligonucleotide
cugauuauugcuaaaauua

SEQ ID NO: 1243007 - RNA, 19 nt, Artificial Sequence
  Description of Artificial Sequence: Synthetic oligonucleotide
uaauagacaacuuccuccu

SEQ ID NO: 1243008 - RNA, 19 nt, Artificial Sequence
  Description of Artificial Sequence: Synthetic oligonucleotide
gauuucagcgcaccugugg

SEQ ID NO: 1243009 - RNA, 19 nt, Artificial Sequence
  Description of Artificial Sequence: Synthetic oligonucleotide
aaucucguaauacuguauu

SEQ ID NO: 1243010 - RNA, 19 nt, Artificial Sequence
  Description of Artificial Sequence: Synthetic oligonucleotide
caucucuucgcuuuucagg

SEQ ID NO: 1243011 - RNA, 19 nt, Artificial Sequence
  Description of Artificial Sequence: Synthetic oligonucleotide
uuaagucugaggaaccagu

SEQ ID NO: 1243012 - RNA, 19 nt, Artificial Sequence
  Description of Artificial Sequence: Synthetic oligonucleotide
ucugagagcguccaccuga

SEQ ID NO: 1243013 - RNA, 19 nt, Artificial Sequence
  Description of Artificial Sequence: Synthetic oligonucleotide
uccuaauagcuucagguaa

SEQ ID NO: 1243014 - RNA, 19 nt, Artificial Sequence
  Description of Artificial Sequence: Synthetic oligonucleotide
cugaauauuguggugcugg

SEQ ID NO: 1243015 - RNA, 19 nt, Artificial Sequence
  Description of Artificial Sequence: Synthetic oligonucleotide
ugacguucgugauuuaacc

SEQ ID NO: 1243016 - RNA, 19 nt, Artificial Sequence
  Description of Artificial Sequence: Synthetic oligonucleotide
uacugaaagaaacaugguu

SEQ ID NO: 1243017 - RNA, 19 nt, Artificial Sequence
  Description of Artificial Sequence: Synthetic oligonucleotide
gagagcguccaccugacag

SEQ ID NO: 1243018 - RNA, 19 nt, Artificial Sequence
  Description of Artificial Sequence: Synthetic oligonucleotide
uacacauggaagcacacua

SEQ ID NO: 1243019 - RNA, 19 nt, Artificial Sequence
  Description of Artificial Sequence: Synthetic oligonucleotide
cuugaauagagaccacugc

SEQ ID NO: 1243020 - RNA, 19 nt, Artificial Sequence
  Description of Artificial Sequence: Synthetic oligonucleotide
ucacgcuuacaugaggucg

SEQ ID NO: 1243021 - RNA, 19 nt, Artificial Sequence
  Description of Artificial Sequence: Synthetic oligonucleotide
agggcaagcacccuuuuag

SEQ ID NO: 1243022 - RNA, 19 nt, Artificial Sequence
  Description of Artificial Sequence: Synthetic oligonucleotide
gacuuguucauugacugag

SEQ ID NO: 1243023 - RNA, 19 nt, Artificial Sequence
  Description of Artificial Sequence: Synthetic oligonucleotide
uauuuaaaguaauccugga

SEQ ID NO: 1243024 - RNA, 19 nt, Artificial Sequence
  Description of Artificial Sequence: Synthetic oligonucleotide
uaucacgcuuacaugaggu

SEQ ID NO: 1243025 - RNA, 19 nt, Artificial Sequence
  Description of Artificial Sequence: Synthetic oligonucleotide
uauaccacgggcugcaccu

SEQ ID NO: 1243026 - RNA, 19 nt, Artificial Sequence
  Description of Artificial Sequence: Synthetic oligonucleotide
caucugaauauuguggugc

SEQ ID NO: 1243027 - RNA, 19 nt, Artificial Sequence
  Description of Artificial Sequence: Synthetic oligonucleotide
uauuucuagcucaucuaca

SEQ ID NO: 1243028 - RNA, 19 nt, Artificial Sequence
  Description of Artificial Sequence: Synthetic oligonucleotide
ugaugagcaguugaggacc

SEQ ID NO: 1243029 - RNA, 19 nt, Artificial Sequence
  Description of Artificial Sequence: Synthetic oligonucleotide
auuuaaaguaauccuggaa

SEQ ID NO: 1243030 - RNA, 19 nt, Artificial Sequence
  Description of Artificial Sequence: Synthetic oligonucleotide
acacuaucuaacguauacc

SEQ ID NO: 1243031 - RNA, 19 nt, Artificial Sequence
  Description of Artificial Sequence: Synthetic oligonucleotide
cacacuaucuaacguauac

SEQ ID NO: 1243032 - RNA, 19 nt, Artificial Sequence
  Description of Artificial Sequence: Synthetic oligonucleotide
aaugccguuacuguuuccu

SEQ ID NO: 1243033 - RNA, 19 nt, Artificial Sequence
  Description of Artificial Sequence: Synthetic oligonucleotide
auuccugauaugcuucauc

SEQ ID NO: 1243034 - RNA, 19 nt, Artificial Sequence
  Description of Artificial Sequence: Synthetic oligonucleotide
uuauucugauuauugcuaa

SEQ ID NO: 1243035 - RNA, 19 nt, Artificial Sequence
  Description of Artificial Sequence: Synthetic oligonucleotide
uaacguauaccacgggcug

SEQ ID NO: 1243036 - RNA, 19 nt, Artificial Sequence
  Description of Artificial Sequence: Synthetic oligonucleotide
aacguauaccacgggcugc

SEQ ID NO: 1243037 - RNA, 19 nt, Artificial Sequence
  Description of Artificial Sequence: Synthetic oligonucleotide
accuacguggacuuucuuc

SEQ ID NO: 1243038 - RNA, 19 nt, Artificial Sequence
  Description of Artificial Sequence: Synthetic oligonucleotide
caagcacccuuuuaggacc

SEQ ID NO: 1243039 - RNA, 19 nt, Artificial Sequence
  Description of Artificial Sequence: Synthetic oligonucleotide
aggguagacacaguacugc

SEQ ID NO: 1243040 - RNA, 19 nt, Artificial Sequence
  Description of Artificial Sequence: Synthetic oligonucleotide
agccacguucuccagcucc

SEQ ID NO: 1243041 - RNA, 19 nt, Artificial Sequence
  Description of Artificial Sequence: Synthetic oligonucleotide
ucucccuauaugcucuuag

SEQ ID NO: 1243042 - RNA, 19 nt, Artificial Sequence
  Description of Artificial Sequence: Synthetic oligonucleotide
cuaauuccugauaugcuuc

SEQ ID NO: 1243043 - RNA, 19 nt, Artificial Sequence
  Description of Artificial Sequence: Synthetic oligonucleotide
gaauagagaccacugcuuc

SEQ ID NO: 1243044 - RNA, 19 nt, Artificial Sequence
  Description of Artificial Sequence: Synthetic oligonucleotide
aagcacacuaucuaacgua

SEQ ID NO: 1243045 - RNA, 19 nt, Artificial Sequence
  Description of Artificial Sequence: Synthetic oligonucleotide
auaucacgcuuacaugagg

SEQ ID NO: 1243046 - RNA, 19 nt, Artificial Sequence
  Description of Artificial Sequence: Synthetic oligonucleotide
acuguuaucgguaucuuga

SEQ ID NO: 1243047 - RNA, 19 nt, Artificial Sequence
  Description of Artificial Sequence: Synthetic oligonucleotide
aaaauauuucacacucugu

SEQ ID NO: 1243048 - RNA, 19 nt, Artificial Sequence
  Description of Artificial Sequence: Synthetic oligonucleotide
ggcacgaugagcuacuuug

SEQ ID NO: 1243049 - RNA, 19 nt, Artificial Sequence
  Description of Artificial Sequence: Synthetic oligonucleotide
cacuaucuaacguauacca

SEQ ID NO: 1243050 - RNA, 19 nt, Artificial Sequence
  Description of Artificial Sequence: Synthetic oligonucleotide
uugacguucgugauuuaac

SEQ ID NO: 1243051 - RNA, 19 nt, Artificial Sequence
  Description of Artificial Sequence: Synthetic oligonucleotide
agagcguccaccugacagg

SEQ ID NO: 1243052 - RNA, 19 nt, Artificial Sequence
  Description of Artificial Sequence: Synthetic oligonucleotide
ucauucauagagccuggga

SEQ ID NO: 1243053 - RNA, 19 nt, Artificial Sequence
  Description of Artificial Sequence: Synthetic oligonucleotide
ucguaauagacaacuuccu

SEQ ID NO: 1243054 - RNA, 19 nt, Artificial Sequence
  Description of Artificial Sequence: Synthetic oligonucleotide
gaccgggauacuguuaucg

SEQ ID NO: 1243055 - RNA, 19 nt, Artificial Sequence
  Description of Artificial Sequence: Synthetic oligonucleotide
guaacuaauuccugauaug

SEQ ID NO: 1243056 - RNA, 19 nt, Artificial Sequence
  Description of Artificial Sequence: Synthetic oligonucleotide
ggaagcacacuaucuaacg

SEQ ID NO: 1243057 - RNA, 19 nt, Artificial Sequence
  Description of Artificial Sequence: Synthetic oligonucleotide
aggaguuuuccuaauagcu

SEQ ID NO: 1243058 - RNA, 19 nt, Artificial Sequence
  Description of Artificial Sequence: Synthetic oligonucleotide
cucgcauaucucugaaugg

SEQ ID NO: 1243059 - RNA, 19 nt, Artificial Sequence
  Description of Artificial Sequence: Synthetic oligonucleotide
ugaggucgaaacuucucgc

SEQ ID NO: 1243060 - RNA, 19 nt, Artificial Sequence
  Description of Artificial Sequence: Synthetic oligonucleotide
ucaucugaauauuguggug

SEQ ID NO: 1243061 - RNA, 19 nt, Artificial Sequence
  Description of Artificial Sequence: Synthetic oligonucleotide
ucccuauaugcucuuaguc

SEQ ID NO: 1243062 - RNA, 19 nt, Artificial Sequence
  Description of Artificial Sequence: Synthetic oligonucleotide
aaguaauccuggaauauau

SEQ ID NO: 1243063 - RNA, 19 nt, Artificial Sequence
  Description of Artificial Sequence: Synthetic oligonucleotide
uuguucauugacugaggug

SEQ ID NO: 1243064 - RNA, 19 nt, Artificial Sequence
  Description of Artificial Sequence: Synthetic oligonucleotide
auauucuuuccuuggucug

SEQ ID NO: 1243065 - RNA, 19 nt, Artificial Sequence
  Description of Artificial Sequence: Synthetic oligonucleotide
ugucugguccauucacugg

SEQ ID NO: 1243066 - RNA, 19 nt, Artificial Sequence
  Description of Artificial Sequence: Synthetic oligonucleotide
uggaagcacacuaucuaac

SEQ ID NO: 1243067 - RNA, 19 nt, Artificial Sequence
  Description of Artificial Sequence: Synthetic oligonucleotide
ucucguaauacuguauuuc

SEQ ID NO: 1243068 - RNA, 19 nt, Artificial Sequence
  Description of Artificial Sequence: Synthetic oligonucleotide
ugauacucaggaguuuucc

SEQ ID NO: 1243069 - RNA, 19 nt, Artificial Sequence
  Description of Artificial Sequence: Synthetic oligonucleotide
gagauuuucuagccugggc

SEQ ID NO: 1243070 - RNA, 19 nt, Artificial Sequence
  Description of Artificial Sequence: Synthetic oligonucleotide
ucuuagucgcucaaguguu

SEQ ID NO: 1243071 - RNA, 19 nt, Artificial Sequence
  Description of Artificial Sequence: Synthetic oligonucleotide
ugccacgguaacuaauucc

SEQ ID NO: 1243072 - RNA, 19 nt, Artificial Sequence
  Description of Artificial Sequence: Synthetic oligonucleotide
cacacaucguaauagacaa

SEQ ID NO: 1243073 - RNA, 19 nt, Artificial Sequence
  Description of Artificial Sequence: Synthetic oligonucleotide
cccuauaugcucuuagucg

SEQ ID NO: 1243074 - RNA, 19 nt, Artificial Sequence
  Description of Artificial Sequence: Synthetic oligonucleotide
ugaaucucguaauacugua

SEQ ID NO: 1243075 - RNA, 19 nt, Artificial Sequence
  Description of Artificial Sequence: Synthetic oligonucleotide
ccuauaugcucuuagucgc

SEQ ID NO: 1243076 - RNA, 19 nt, Artificial Sequence
  Description of Artificial Sequence: Synthetic oligonucleotide
gcuuacaugaggucgaaac

SEQ ID NO: 1243077 - RNA, 19 nt, Artificial Sequence
  Description of Artificial Sequence: Synthetic oligonucleotide
auuucagcgcaccuguggu

SEQ ID NO: 1243078 - RNA, 19 nt, Artificial Sequence
  Description of Artificial Sequence: Synthetic oligonucleotide
ucgguaucuugauacucag

SEQ ID NO: 1243079 - RNA, 19 nt, Artificial Sequence
  Description of Artificial Sequence: Synthetic oligonucleotide
uuaaugccguuacuguuuc

SEQ ID NO: 1243080 - RNA, 19 nt, Artificial Sequence
  Description of Artificial Sequence: Synthetic oligonucleotide
uacaugaggucgaaacuuc

SEQ ID NO: 1243081 - RNA, 19 nt, Artificial Sequence
  Description of Artificial Sequence: Synthetic oligonucleotide
uuccuguuaaugccguuac

SEQ ID NO: 1243082 - RNA, 19 nt, Artificial Sequence
  Description of Artificial Sequence: Synthetic oligonucleotide
uacuguuaucgguaucuug

SEQ ID NO: 1243083 - RNA, 19 nt, Artificial Sequence
  Description of Artificial Sequence: Synthetic oligonucleotide
agucuccugagcuaacaug

SEQ ID NO: 1243084 - RNA, 19 nt, Artificial Sequence
  Description of Artificial Sequence: Synthetic oligonucleotide
uguuaaugccguuacuguu

SEQ ID NO: 1243085 - RNA, 19 nt, Artificial Sequence
  Description of Artificial Sequence: Synthetic oligonucleotide
aacuaauuccugauaugcu

SEQ ID NO: 1243086 - RNA, 19 nt, Artificial Sequence
  Description of Artificial Sequence: Synthetic oligonucleotide
uuacaugaggucgaaacuu

SEQ ID NO: 1243087 - RNA, 19 nt, Artificial Sequence
  Description of Artificial Sequence: Synthetic oligonucleotide
uccaacugaaucucguaau

SEQ ID NO: 1243088 - RNA, 19 nt, Artificial Sequence
  Description of Artificial Sequence: Synthetic oligonucleotide
acguucgugauuuaaccau

SEQ ID NO: 1243089 - RNA, 19 nt, Artificial Sequence
  Description of Artificial Sequence: Synthetic oligonucleotide
uggaccgggauacuguuau

SEQ ID NO: 1243090 - RNA, 19 nt, Artificial Sequence
  Description of Artificial Sequence: Synthetic oligonucleotide
aucacgcuuacaugagguc

SEQ ID NO: 1243091 - RNA, 19 nt, Artificial Sequence
  Description of Artificial Sequence: Synthetic oligonucleotide
cuaauagcuucagguaagg

SEQ ID NO: 1243092 - RNA, 19 nt, Artificial Sequence
  Description of Artificial Sequence: Synthetic oligonucleotide
ugagcuacuuugugaugag

SEQ ID NO: 1243093 - RNA, 19 nt, Artificial Sequence
  Description of Artificial Sequence: Synthetic oligonucleotide
aacaaacaccuggaccggg

SEQ ID NO: 1243094 - RNA, 19 nt, Artificial Sequence
  Description of Artificial Sequence: Synthetic oligonucleotide
cguaauacuguauuucuag

SEQ ID NO: 1243095 - RNA, 19 nt, Artificial Sequence
  Description of Artificial Sequence: Synthetic oligonucleotide
uucgugauuuaaccauucu

SEQ ID NO: 1243096 - RNA, 19 nt, Artificial Sequence
  Description of Artificial Sequence: Synthetic oligonucleotide
gggaacaaacaccuggacc

SEQ ID NO: 1243097 - RNA, 19 nt, Artificial Sequence
  Description of Artificial Sequence: Synthetic oligonucleotide
auaugcaauuuauucugau

SEQ ID NO: 1243098 - RNA, 19 nt, Artificial Sequence
  Description of Artificial Sequence: Synthetic oligonucleotide
cagaguccaaccgugagac

SEQ ID NO: 1243099 - RNA, 19 nt, Artificial Sequence
  Description of Artificial Sequence: Synthetic oligonucleotide
cagaccaaggagcuugccc

SEQ ID NO: 1243100 - RNA, 19 nt, Artificial Sequence
  Description of Artificial Sequence: Synthetic oligonucleotide
gacguucgugauuuaacca

SEQ ID NO: 1243101 - RNA, 19 nt, Artificial Sequence
  Description of Artificial Sequence: Synthetic oligonucleotide
gaguccaaccgugagacca

SEQ ID NO: 1243102 - RNA, 19 nt, Artificial Sequence
  Description of Artificial Sequence: Synthetic oligonucleotide
aaacaugguugccacggua

SEQ ID NO: 1243103 - RNA, 19 nt, Artificial Sequence
  Description of Artificial Sequence: Synthetic oligonucleotide
uccugaucaaggugcagcu

SEQ ID NO: 1243104 - RNA, 19 nt, Artificial Sequence
  Description of Artificial Sequence: Synthetic oligonucleotide
ugaccaaccuacguggacu

SEQ ID NO: 1243105 - RNA, 19 nt, Artificial Sequence
  Description of Artificial Sequence: Synthetic oligonucleotide
aucugaauauuguggugcu

SEQ ID NO: 1243106 - RNA, 19 nt, Artificial Sequence
  Description of Artificial Sequence: Synthetic oligonucleotide
auggaagcacacuaucuaa

SEQ ID NO: 1243107 - RNA, 19 nt, Artificial Sequence
  Description of Artificial Sequence: Synthetic oligonucleotide
aggaucaucucuucgcuuu

SEQ ID NO: 1243108 - RNA, 19 nt, Artificial Sequence
  Description of Artificial Sequence: Synthetic oligonucleotide
auagagccugggaacaaac

SEQ ID NO: 1243109 - RNA, 19 nt, Artificial Sequence
  Description of Artificial Sequence: Synthetic oligonucleotide
ccaugaccaaccuacgugg

SEQ ID NO: 1243110 - RNA, 19 nt, Artificial Sequence
  Description of Artificial Sequence: Synthetic oligonucleotide
acagaguccaaccgugaga

SEQ ID NO: 1243111 - RNA, 19 nt, Artificial Sequence
  Description of Artificial Sequence: Synthetic oligonucleotide
ucuggauuucagcgcaccu

SEQ ID NO: 1243112 - RNA, 19 nt, Artificial Sequence
  Description of Artificial Sequence: Synthetic oligonucleotide
acacacaucguaauagaca

SEQ ID NO: 1243113 - RNA, 19 nt, Artificial Sequence
  Description of Artificial Sequence: Synthetic oligonucleotide
ucauccugaucaaggugca

SEQ ID NO: 1243114 - RNA, 19 nt, Artificial Sequence
  Description of Artificial Sequence: Synthetic oligonucleotide
cauucaagccuuuaagucu

SEQ ID NO: 1243115 - RNA, 19 nt, Artificial Sequence
  Description of Artificial Sequence: Synthetic oligonucleotide
uucauucauagagccuggg

SEQ ID NO: 1243116 - RNA, 19 nt, Artificial Sequence
  Description of Artificial Sequence: Synthetic oligonucleotide
uuugacguucgugauuuaa

SEQ ID NO: 1243117 - RNA, 19 nt, Artificial Sequence
  Description of Artificial Sequence: Synthetic oligonucleotide
uucagcgcaccugugguug

SEQ ID NO: 1243118 - RNA, 19 nt, Artificial Sequence
  Description of Artificial Sequence: Synthetic oligonucleotide
gaugagcuacuuugugaug

SEQ ID NO: 1243119 - RNA, 19 nt, Artificial Sequence
  Description of Artificial Sequence: Synthetic oligonucleotide
uaacagaguccaaccguga

SEQ ID NO: 1243120 - RNA, 19 nt, Artificial Sequence
  Description of Artificial Sequence: Synthetic oligonucleotide
gaacaaacaccuggaccgg

SEQ ID NO: 1243121 - RNA, 19 nt, Artificial Sequence
  Description of Artificial Sequence: Synthetic oligonucleotide
ucugaggaaccagugugca

SEQ ID NO: 1243122 - RNA, 19 nt, Artificial Sequence
  Description of Artificial Sequence: Synthetic oligonucleotide
cagcucagugccucuaggg

SEQ ID NO: 1243123 - RNA, 19 nt, Artificial Sequence
  Description of Artificial Sequence: Synthetic oligonucleotide
uuuucuagccugggcguag

SEQ ID NO: 1243124 - RNA, 19 nt, Artificial Sequence
  Description of Artificial Sequence: Synthetic oligonucleotide
aucuaacguauaccacggg

SEQ ID NO: 1243125 - RNA, 19 nt, Artificial Sequence
  Description of Artificial Sequence: Synthetic oligonucleotide
ggacuucaaaauaucacgc

SEQ ID NO: 1243126 - RNA, 19 nt, Artificial Sequence
  Description of Artificial Sequence: Synthetic oligonucleotide
uguuaucgguaucuugaua

SEQ ID NO: 1243127 - RNA, 19 nt, Artificial Sequence
  Description of Artificial Sequence: Synthetic oligonucleotide
uaugcucuuagucgcucaa

SEQ ID NO: 1243128 - RNA, 19 nt, Artificial Sequence
  Description of Artificial Sequence: Synthetic oligonucleotide
acccuuuuaggacccaggu

SEQ ID NO: 1243129 - RNA, 19 nt, Artificial Sequence
  Description of Artificial Sequence: Synthetic oligonucleotide
cauugacugaggugcuggg

SEQ ID NO: 1243130 - RNA, 19 nt, Artificial Sequence
  Description of Artificial Sequence: Synthetic oligonucleotide
caacugaaucucguaauac

SEQ ID NO: 1243131 - RNA, 19 nt, Artificial Sequence
  Description of Artificial Sequence: Synthetic oligonucleotide
ucgcuuuucaggaucucua

SEQ ID NO: 1243132 - RNA, 19 nt, Artificial Sequence
  Description of Artificial Sequence: Synthetic oligonucleotide
gugccucuaggguagacac

SEQ ID NO: 1243133 - RNA, 19 nt, Artificial Sequence
  Description of Artificial Sequence: Synthetic oligonucleotide
acuucucgcauaucucuga

SEQ ID NO: 1243134 - RNA, 19 nt, Artificial Sequence
  Description of Artificial Sequence: Synthetic oligonucleotide
ugggaacaaacaccuggac

SEQ ID NO: 1243135 - RNA, 19 nt, Artificial Sequence
  Description of Artificial Sequence: Synthetic oligonucleotide
ugagcaguugaggaccucu

SEQ ID NO: 1243136 - RNA, 19 nt, Artificial Sequence
  Description of Artificial Sequence: Synthetic oligonucleotide
ucacagugauaucuugaau

SEQ ID NO: 1243137 - RNA, 19 nt, Artificial Sequence
  Description of Artificial Sequence: Synthetic oligonucleotide
gaggucgaaacuucucgca

SEQ ID NO: 1243138 - RNA, 19 nt, Artificial Sequence
  Description of Artificial Sequence: Synthetic oligonucleotide
acgguaacuaauuccugau

SEQ ID NO: 1243139 - RNA, 19 nt, Artificial Sequence
  Description of Artificial Sequence: Synthetic oligonucleotide
uguagggcaagcacccuuu

SEQ ID NO: 1243140 - RNA, 19 nt, Artificial Sequence
  Description of Artificial Sequence: Synthetic oligonucleotide
ccuaauagcuucagguaag

SEQ ID NO: 1243141 - RNA, 19 nt, Artificial Sequence
  Description of Artificial Sequence: Synthetic oligonucleotide
caaccgugagaccaggauc

SEQ ID NO: 1243142 - RNA, 19 nt, Artificial Sequence
  Description of Artificial Sequence: Synthetic oligonucleotide
gcuacuuugugaugagcag

SEQ ID NO: 1243143 - RNA, 19 nt, Artificial Sequence
  Description of Artificial Sequence: Synthetic oligonucleotide
ugacagguuuggcaccaug

SEQ ID NO: 1243144 - RNA, 19 nt, Artificial Sequence
  Description of Artificial Sequence: Synthetic oligonucleotide
cacgguaacuaauuccuga

SEQ ID NO: 1243145 - RNA, 19 nt, Artificial Sequence
  Description of Artificial Sequence: Synthetic oligonucleotide
uaucgguaucuugauacuc

SEQ ID NO: 1243146 - RNA, 19 nt, Artificial Sequence
  Description of Artificial Sequence: Synthetic oligonucleotide
cacccuuuuaggacccagg

SEQ ID NO: 1243147 - RNA, 19 nt, Artificial Sequence
  Description of Artificial Sequence: Synthetic oligonucleotide
gguaacuaauuccugauau

SEQ ID NO: 1243148 - RNA, 19 nt, Artificial Sequence
  Description of Artificial Sequence: Synthetic oligonucleotide
agaguccaaccgugagacc

SEQ ID NO: 1243149 - RNA, 19 nt, Artificial Sequence
  Description of Artificial Sequence: Synthetic oligonucleotide
agggaguaacacuucuggu

SEQ ID NO: 1243150 - RNA, 19 nt, Artificial Sequence
  Description of Artificial Sequence: Synthetic oligonucleotide
aguaauccuggaauauaug

SEQ ID NO: 1243151 - RNA, 19 nt, Artificial Sequence
  Description of Artificial Sequence: Synthetic oligonucleotide
cuaacguauaccacgggcu

SEQ ID NO: 1243152 - RNA, 19 nt, Artificial Sequence
  Description of Artificial Sequence: Synthetic oligonucleotide
aguaacacuucugguuuug

SEQ ID NO: 1243153 - RNA, 19 nt, Artificial Sequence
  Description of Artificial Sequence: Synthetic oligonucleotide
ucccaugaccaaccuacgu

SEQ ID NO: 1243154 - RNA, 19 nt, Artificial Sequence
  Description of Artificial Sequence: Synthetic oligonucleotide
cuaggguagacacaguacu

SEQ ID NO: 1243155 - RNA, 19 nt, Artificial Sequence
  Description of Artificial Sequence: Synthetic oligonucleotide
ugcagucugagcugauggu

SEQ ID NO: 1243156 - RNA, 19 nt, Artificial Sequence
  Description of Artificial Sequence: Synthetic oligonucleotide
cuuaacagaguccaaccgu

SEQ ID NO: 1243157 - RNA, 19 nt, Artificial Sequence
  Description of Artificial Sequence: Synthetic oligonucleotide
gcuaacaugagcuggagau

SEQ ID NO: 1243158 - RNA, 19 nt, Artificial Sequence
  Description of Artificial Sequence: Synthetic oligonucleotide
gaagcacacuaucuaacgu

SEQ ID NO: 1243159 - RNA, 19 nt, Artificial Sequence
  Description of Artificial Sequence: Synthetic oligonucleotide
aucucguaauacuguauuu

SEQ ID NO: 1243160 - RNA, 19 nt, Artificial Sequence
  Description of Artificial Sequence: Synthetic oligonucleotide
ugccaaaccucuuccgauc

SEQ ID NO: 1243161 - RNA, 19 nt, Artificial Sequence
  Description of Artificial Sequence: Synthetic oligonucleotide
cugggcguagcuguggccc

SEQ ID NO: 1243162 - RNA, 19 nt, Artificial Sequence
  Description of Artificial Sequence: Synthetic oligonucleotide
gaggaaccagugugcauac

SEQ ID NO: 1243163 - RNA, 19 nt, Artificial Sequence
  Description of Artificial Sequence: Synthetic oligonucleotide
gcaagcacccuuuuaggac

SEQ ID NO: 1243164 - RNA, 19 nt, Artificial Sequence
  Description of Artificial Sequence: Synthetic oligonucleotide
caggaucucuaguuuaaca

SEQ ID NO: 1243165 - RNA, 19 nt, Artificial Sequence
  Description of Artificial Sequence: Synthetic oligonucleotide
agguuuggcaccaugguuu

SEQ ID NO: 1243166 - RNA, 19 nt, Artificial Sequence
  Description of Artificial Sequence: Synthetic oligonucleotide
uauaugcucuuagucgcuc

SEQ ID NO: 1243167 - RNA, 19 nt, Artificial Sequence
  Description of Artificial Sequence: Synthetic oligonucleotide
cagguuguuuucagugcag

SEQ ID NO: 1243168 - RNA, 19 nt, Artificial Sequence
  Description of Artificial Sequence: Synthetic oligonucleotide
ccuguuaaugccguuacug

SEQ ID NO: 1243169 - RNA, 19 nt, Artificial Sequence
  Description of Artificial Sequence: Synthetic oligonucleotide
cucguaauacuguauuucu

SEQ ID NO: 1243170 - RNA, 19 nt, Artificial Sequence
  Description of Artificial Sequence: Synthetic oligonucleotide
cucuuagucgcucaagugu

SEQ ID NO: 1243171 - RNA, 19 nt, Artificial Sequence
  Description of Artificial Sequence: Synthetic oligonucleotide
cacaucguaauagacaacu

SEQ ID NO: 1243172 - RNA, 19 nt, Artificial Sequence
  Description of Artificial Sequence: Synthetic oligonucleotide
gcaccugugguugagacac

SEQ ID NO: 1243173 - RNA, 19 nt, Artificial Sequence
  Description of Artificial Sequence: Synthetic oligonucleotide
gcucccaugaccaaccuac

SEQ ID NO: 1243174 - RNA, 19 nt, Artificial Sequence
  Description of Artificial Sequence: Synthetic oligonucleotide
agcuaacaugagcuggaga

SEQ ID NO: 1243175 - RNA, 19 nt, Artificial Sequence
  Description of Artificial Sequence: Synthetic oligonucleotide
agccugggaacaaacaccu

SEQ ID NO: 1243176 - RNA, 19 nt, Artificial Sequence
  Description of Artificial Sequence: Synthetic oligonucleotide
aggucgaaacuucucgcau

SEQ ID NO: 1243177 - RNA, 19 nt, Artificial Sequence
  Description of Artificial Sequence: Synthetic oligonucleotide
uugccacgguaacuaauuc

SEQ ID NO: 1243178 - RNA, 19 nt, Artificial Sequence
  Description of Artificial Sequence: Synthetic oligonucleotide
ccuuuaagucugaggaacc

SEQ ID NO: 1243179 - RNA, 19 nt, Artificial Sequence
  Description of Artificial Sequence: Synthetic oligonucleotide
cuacguggacuuucuucag

SEQ ID NO: 1243180 - RNA, 19 nt, Artificial Sequence
  Description of Artificial Sequence: Synthetic oligonucleotide
ugccguuacuguuuccuua

SEQ ID NO: 1243181 - RNA, 19 nt, Artificial Sequence
  Description of Artificial Sequence: Synthetic oligonucleotide
auauuguggugcuggugaa

SEQ ID NO: 1243182 - RNA, 19 nt, Artificial Sequence
  Description of Artificial Sequence: Synthetic oligonucleotide
cuuacaugaggucgaaacu

SEQ ID NO: 1243183 - RNA, 19 nt, Artificial Sequence
  Description of Artificial Sequence: Synthetic oligonucleotide
agcacacuaucuaacguau

SEQ ID NO: 1243184 - RNA, 19 nt, Artificial Sequence
  Description of Artificial Sequence: Synthetic oligonucleotide
ccuacguggacuuucuuca

SEQ ID NO: 1243185 - RNA, 19 nt, Artificial Sequence
  Description of Artificial Sequence: Synthetic oligonucleotide
cucccaugaccaaccuacg

SEQ ID NO: 1243186 - RNA, 19 nt, Artificial Sequence
  Description of Artificial Sequence: Synthetic oligonucleotide
aauuccugauaugcuucau

SEQ ID NO: 1243187 - RNA, 19 nt, Artificial Sequence
  Description of Artificial Sequence: Synthetic oligonucleotide
uccgggcuuucacacacau

SEQ ID NO: 1243188 - RNA, 19 nt, Artificial Sequence
  Description of Artificial Sequence: Synthetic oligonucleotide
uggcaccaugguuucugag

SEQ ID NO: 1243189 - RNA, 19 nt, Artificial Sequence
  Description of Artificial Sequence: Synthetic oligonucleotide
cacgcuuacaugaggucga

SEQ ID NO: 1243190 - RNA, 19 nt, Artificial Sequence
  Description of Artificial Sequence: Synthetic oligonucleotide
cugauacacaaaauaaguu

SEQ ID NO: 1243191 - RNA, 19 nt, Artificial Sequence
  Description of Artificial Sequence: Synthetic oligonucleotide
uucaagccuuuaagucuga

SEQ ID NO: 1243192 - RNA, 19 nt, Artificial Sequence
  Description of Artificial Sequence: Synthetic oligonucleotide
gugauaucuugaauagaga

SEQ ID NO: 1243193 - RNA, 19 nt, Artificial Sequence
  Description of Artificial Sequence: Synthetic oligonucleotide
cccaugaccaaccuacgug

SEQ ID NO: 1243194 - RNA, 19 nt, Artificial Sequence
  Description of Artificial Sequence: Synthetic oligonucleotide
gagcuaacaugagcuggag

SEQ ID NO: 1243195 - RNA, 19 nt, Artificial Sequence
  Description of Artificial Sequence: Synthetic oligonucleotide
ggagauuuucuagccuggg

SEQ ID NO: 1243196 - RNA, 19 nt, Artificial Sequence
  Description of Artificial Sequence: Synthetic oligonucleotide
acacaucguaauagacaac

SEQ ID NO: 1243197 - RNA, 19 nt, Artificial Sequence
  Description of Artificial Sequence: Synthetic oligonucleotide
uccaaccgugagaccagga

SEQ ID NO: 1243198 - RNA, 19 nt, Artificial Sequence
  Description of Artificial Sequence: Synthetic oligonucleotide
cucuaggguagacacagua

SEQ ID NO: 1243199 - RNA, 19 nt, Artificial Sequence
  Description of Artificial Sequence: Synthetic oligonucleotide
cugagagcguccaccugac

SEQ ID NO: 1243200 - RNA, 19 nt, Artificial Sequence
  Description of Artificial Sequence: Synthetic oligonucleotide
uuagucgcucaaguguuuu

SEQ ID NO: 1243201 - RNA, 19 nt, Artificial Sequence
  Description of Artificial Sequence: Synthetic oligonucleotide
uucucgcauaucucugaau

SEQ ID NO: 1243202 - RNA, 19 nt, Artificial Sequence
  Description of Artificial Sequence: Synthetic oligonucleotide
cuguuaaugccguuacugu

SEQ ID NO: 1243203 - RNA, 19 nt, Artificial Sequence
  Description of Artificial Sequence: Synthetic oligonucleotide
cacacucuguugagccugc

SEQ ID NO: 1243204 - RNA, 19 nt, Artificial Sequence
  Description of Artificial Sequence: Synthetic oligonucleotide
guucgugauuuaaccauuc

SEQ ID NO: 1243205 - RNA, 19 nt, Artificial Sequence
  Description of Artificial Sequence: Synthetic oligonucleotide
acguauaccacgggcugca

SEQ ID NO: 1243206 - RNA, 19 nt, Artificial Sequence
  Description of Artificial Sequence: Synthetic oligonucleotide
gccaaaccucuuccgaucc

SEQ ID NO: 1243207 - RNA, 19 nt, Artificial Sequence
  Description of Artificial Sequence: Synthetic oligonucleotide
uguuccugaggugggcccu

SEQ ID NO: 1243208 - RNA, 19 nt, Artificial Sequence
  Description of Artificial Sequence: Synthetic oligonucleotide
cuagccugggcguagcugu

SEQ ID NO: 1243209 - RNA, 19 nt, Artificial Sequence
  Description of Artificial Sequence: Synthetic oligonucleotide
ucuugauacucaggaguuu

SEQ ID NO: 1243210 - RNA, 19 nt, Artificial Sequence
  Description of Artificial Sequence: Synthetic oligonucleotide
acaugaggucgaaacuucu

SEQ ID NO: 1243211 - RNA, 19 nt, Artificial Sequence
  Description of Artificial Sequence: Synthetic oligonucleotide
uuguuucugcauuccuguu

SEQ ID NO: 1243212 - RNA, 19 nt, Artificial Sequence
  Description of Artificial Sequence: Synthetic oligonucleotide
uuucagcgcaccugugguu

SEQ ID NO: 1243213 - RNA, 19 nt, Artificial Sequence
  Description of Artificial Sequence: Synthetic oligonucleotide
aguccaaccgugagaccag

SEQ ID NO: 1243214 - RNA, 19 nt, Artificial Sequence
  Description of Artificial Sequence: Synthetic oligonucleotide
augcucuuagucgcucaag

SEQ ID NO: 1243215 - RNA, 19 nt, Artificial Sequence
  Description of Artificial Sequence: Synthetic oligonucleotide
uucuagccugggcguagcu

SEQ ID NO: 1243216 - RNA, 19 nt, Artificial Sequence
  Description of Artificial Sequence: Synthetic oligonucleotide
ucucuucgcuuuucaggau

SEQ ID NO: 1243217 - RNA, 19 nt, Artificial Sequence
  Description of Artificial Sequence: Synthetic oligonucleotide
cugggaggggacaagggua

SEQ ID NO: 1243218 - RNA, 19 nt, Artificial Sequence
  Description of Artificial Sequence: Synthetic oligonucleotide
ugagagcguccaccugaca

SEQ ID NO: 1243219 - RNA, 19 nt, Artificial Sequence
  Description of Artificial Sequence: Synthetic oligonucleotide
ugccguagggaggccaaca

SEQ ID NO: 1243220 - RNA, 19 nt, Artificial Sequence
  Description of Artificial Sequence: Synthetic oligonucleotide
caccaugguuucugagcag

SEQ ID NO: 1243221 - RNA, 19 nt, Artificial Sequence
  Description of Artificial Sequence: Synthetic oligonucleotide
cguaauagacaacuuccuc

SEQ ID NO: 1243222 - RNA, 19 nt, Artificial Sequence
  Description of Artificial Sequence: Synthetic oligonucleotide
caugaccaaccuacgugga

SEQ ID NO: 1243223 - RNA, 19 nt, Artificial Sequence
  Description of Artificial Sequence: Synthetic oligonucleotide
ucagcgcaccugugguuga

SEQ ID NO: 1243224 - RNA, 19 nt, Artificial Sequence
  Description of Artificial Sequence: Synthetic oligonucleotide
gucgaaacuucucgcauau

SEQ ID NO: 1243225 - RNA, 19 nt, Artificial Sequence
  Description of Artificial Sequence: Synthetic oligonucleotide
ugcucccaugaccaaccua

SEQ ID NO: 1243226 - RNA, 19 nt, Artificial Sequence
  Description of Artificial Sequence: Synthetic oligonucleotide
gagagaggcccugcccugc

SEQ ID NO: 1243227 - RNA, 19 nt, Artificial Sequence
  Description of Artificial Sequence: Synthetic oligonucleotide
gguuuggcaccaugguuuc

SEQ ID NO: 1243228 - RNA, 19 nt, Artificial Sequence
  Description of Artificial Sequence: Synthetic oligonucleotide
ccugagcuaacaugagcug

SEQ ID NO: 1243229 - RNA, 19 nt, Artificial Sequence
  Description of Artificial Sequence: Synthetic oligonucleotide
gcugcaguaaauacugaaa

SEQ ID NO: 1243230 - RNA, 19 nt, Artificial Sequence
  Description of Artificial Sequence: Synthetic oligonucleotide
ugggcguagcuguggccca

SEQ ID NO: 1243231 - RNA, 19 nt, Artificial Sequence
  Description of Artificial Sequence: Synthetic oligonucleotide
aaccuacguggacuuucuu

SEQ ID NO: 1243232 - RNA, 19 nt, Artificial Sequence
  Description of Artificial Sequence: Synthetic oligonucleotide
cuucugagagcguccaccu

SEQ ID NO: 1243233 - RNA, 19 nt, Artificial Sequence
  Description of Artificial Sequence: Synthetic oligonucleotide
gggaguaacacuucugguu

SEQ ID NO: 1243234 - RNA, 19 nt, Artificial Sequence
  Description of Artificial Sequence: Synthetic oligonucleotide
uugccccuucucccuauau

SEQ ID NO: 1243235 - RNA, 19 nt, Artificial Sequence
  Description of Artificial Sequence: Synthetic oligonucleotide
ugguugccacgguaacuaa

SEQ ID NO: 1243236 - RNA, 19 nt, Artificial Sequence
  Description of Artificial Sequence: Synthetic oligonucleotide
caugagcuggagauuuucu

SEQ ID NO: 1243237 - RNA, 19 nt, Artificial Sequence
  Description of Artificial Sequence: Synthetic oligonucleotide
cuucucgcauaucucugaa

SEQ ID NO: 1243238 - RNA, 19 nt, Artificial Sequence
  Description of Artificial Sequence: Synthetic oligonucleotide
augccguuacuguuuccuu

SEQ ID NO: 1243239 - RNA, 19 nt, Artificial Sequence
  Description of Artificial Sequence: Synthetic oligonucleotide
gaaucucguaauacuguau

SEQ ID NO: 1243240 - RNA, 19 nt, Artificial Sequence
  Description of Artificial Sequence: Synthetic oligonucleotide
guccaaccgugagaccagg

SEQ ID NO: 1243241 - RNA, 19 nt, Artificial Sequence
  Description of Artificial Sequence: Synthetic oligonucleotide
cuugauacucaggaguuuu

SEQ ID NO: 1243242 - RNA, 19 nt, Artificial Sequence
  Description of Artificial Sequence: Synthetic oligonucleotide
gcuuucacacacaucguaa

SEQ ID NO: 1243243 - RNA, 19 nt, Artificial Sequence
  Description of Artificial Sequence: Synthetic oligonucleotide
auacuguuaucgguaucuu

SEQ ID NO: 1243244 - RNA, 19 nt, Artificial Sequence
  Description of Artificial Sequence: Synthetic oligonucleotide
cagugauaucuugaauaga

SEQ ID NO: 1243245 - RNA, 19 nt, Artificial Sequence
  Description of Artificial Sequence: Synthetic oligonucleotide
cuauaugcucuuagucgcu

SEQ ID NO: 1243246 - RNA, 19 nt, Artificial Sequence
  Description of Artificial Sequence: Synthetic oligonucleotide
acaucguaauagacaacuu

SEQ ID NO: 1243247 - RNA, 19 nt, Artificial Sequence
  Description of Artificial Sequence: Synthetic oligonucleotide
ugccgguacugcugccuga

SEQ ID NO: 1243248 - RNA, 19 nt, Artificial Sequence
  Description of Artificial Sequence: Synthetic oligonucleotide
acacagcucuuuggcuuuc

SEQ ID NO: 1243249 - RNA, 19 nt, Artificial Sequence
  Description of Artificial Sequence: Synthetic oligonucleotide
uuuugacguucgugauuua

SEQ ID NO: 1243250 - RNA, 19 nt, Artificial Sequence
  Description of Artificial Sequence: Synthetic oligonucleotide
augagcaguugaggaccuc

SEQ ID NO: 1243251 - RNA, 19 nt, Artificial Sequence
  Description of Artificial Sequence: Synthetic oligonucleotide
ggauacuguuaucgguauc

SEQ ID NO: 1243252 - RNA, 19 nt, Artificial Sequence
  Description of Artificial Sequence: Synthetic oligonucleotide
guagggaggccaacacuuc

SEQ ID NO: 1243253 - RNA, 19 nt, Artificial Sequence
  Description of Artificial Sequence: Synthetic oligonucleotide
guugccacgguaacuaauu

SEQ ID NO: 1243254 - RNA, 19 nt, Artificial Sequence
  Description of Artificial Sequence: Synthetic oligonucleotide
ccuccgggcuuucacacac

SEQ ID NO: 1243255 - RNA, 19 nt, Artificial Sequence
  Description of Artificial Sequence: Synthetic oligonucleotide
ggucgaaacuucucgcaua

SEQ ID NO: 1243256 - RNA, 19 nt, Artificial Sequence
  Description of Artificial Sequence: Synthetic oligonucleotide
cucccuauaugcucuuagu

SEQ ID NO: 1243257 - RNA, 19 nt, Artificial Sequence
  Description of Artificial Sequence: Synthetic oligonucleotide
cgcuuuucaggaucucuag

SEQ ID NO: 1243258 - RNA, 19 nt, Artificial Sequence
  Description of Artificial Sequence: Synthetic oligonucleotide
ucgaaacuucucgcauauc

SEQ ID NO: 1243259 - RNA, 19 nt, Artificial Sequence
  Description of Artificial Sequence: Synthetic oligonucleotide
gaugagcaguugaggaccu

SEQ ID NO: 1243260 - RNA, 19 nt, Artificial Sequence
  Description of Artificial Sequence: Synthetic oligonucleotide
aggcacgaugagcuacuuu

SEQ ID NO: 1243261 - RNA, 19 nt, Artificial Sequence
  Description of Artificial Sequence: Synthetic oligonucleotide
gaccaaggagcuugccccu

SEQ ID NO: 1243262 - RNA, 19 nt, Artificial Sequence
  Description of Artificial Sequence: Synthetic oligonucleotide
cccuuuuaggacccagguc

SEQ ID NO: 1243263 - RNA, 19 nt, Artificial Sequence
  Description of Artificial Sequence: Synthetic oligonucleotide
caaccuacguggacuuucu

SEQ ID NO: 1243264 - RNA, 19 nt, Artificial Sequence
  Description of Artificial Sequence: Synthetic oligonucleotide
gccguagggaggccaacac

SEQ ID NO: 1243265 - RNA, 19 nt, Artificial Sequence
  Description of Artificial Sequence: Synthetic oligonucleotide
ccacgguaacuaauuccug

SEQ ID NO: 1243266 - RNA, 19 nt, Artificial Sequence
  Description of Artificial Sequence: Synthetic oligonucleotide
gaguaacacuucugguuuu

SEQ ID NO: 1243267 - RNA, 19 nt, Artificial Sequence
  Description of Artificial Sequence: Synthetic oligonucleotide
uucucccuauaugcucuua

SEQ ID NO: 1243268 - RNA, 19 nt, Artificial Sequence
  Description of Artificial Sequence: Synthetic oligonucleotide
ccaacugaaucucguaaua

SEQ ID NO: 1243269 - RNA, 19 nt, Artificial Sequence
  Description of Artificial Sequence: Synthetic oligonucleotide
ggugcugggaggggacaag

SEQ ID NO: 1243270 - RNA, 19 nt, Artificial Sequence
  Description of Artificial Sequence: Synthetic oligonucleotide
ucagugccucuaggguaga

SEQ ID NO: 1243271 - RNA, 19 nt, Artificial Sequence
  Description of Artificial Sequence: Synthetic oligonucleotide
gagcguccaccugacaggu

SEQ ID NO: 1243272 - RNA, 19 nt, Artificial Sequence
  Description of Artificial Sequence: Synthetic oligonucleotide
aggaaccagugugcauaca

SEQ ID NO: 1243273 - RNA, 19 nt, Artificial Sequence
  Description of Artificial Sequence: Synthetic oligonucleotide
gccugggcguagcuguggc

SEQ ID NO: 1243274 - RNA, 19 nt, Artificial Sequence
  Description of Artificial Sequence: Synthetic oligonucleotide
gucucuuaacagaguccaa

SEQ ID NO: 1243275 - RNA, 19 nt, Artificial Sequence
  Description of Artificial Sequence: Synthetic oligonucleotide
cuuagucgcucaaguguuu

SEQ ID NO: 1243276 - RNA, 19 nt, Artificial Sequence
  Description of Artificial Sequence: Synthetic oligonucleotide
cagcgcaccugugguugag

SEQ ID NO: 1243277 - RNA, 19 nt, Artificial Sequence
  Description of Artificial Sequence: Synthetic oligonucleotide
acgcuuacaugaggucgaa

SEQ ID NO: 1243278 - RNA, 19 nt, Artificial Sequence
  Description of Artificial Sequence: Synthetic oligonucleotide
cgggauacuguuaucggua

SEQ ID NO: 1243279 - RNA, 19 nt, Artificial Sequence
  Description of Artificial Sequence: Synthetic oligonucleotide
cuggaccgggauacuguua

SEQ ID NO: 1243280 - RNA, 19 nt, Artificial Sequence
  Description of Artificial Sequence: Synthetic oligonucleotide
cagugccucuaggguagac

SEQ ID NO: 1243281 - RNA, 19 nt, Artificial Sequence
  Description of Artificial Sequence: Synthetic oligonucleotide
cgaugagcuacuuugugau

SEQ ID NO: 1243282 - RNA, 19 nt, Artificial Sequence
  Description of Artificial Sequence: Synthetic oligonucleotide
ggcagugauccuuucuguu

SEQ ID NO: 1243283 - RNA, 19 nt, Artificial Sequence
  Description of Artificial Sequence: Synthetic oligonucleotide
ggcguagcuguggcccagg

SEQ ID NO: 1243284 - RNA, 19 nt, Artificial Sequence
  Description of Artificial Sequence: Synthetic oligonucleotide
ccaaggagcuugccccuuc

SEQ ID NO: 1243285 - RNA, 19 nt, Artificial Sequence
  Description of Artificial Sequence: Synthetic oligonucleotide
accaaggagcuugccccuu

SEQ ID NO: 1243286 - RNA, 19 nt, Artificial Sequence
  Description of Artificial Sequence: Synthetic oligonucleotide
agcacccuuuuaggaccca

SEQ ID NO: 1243287 - RNA, 19 nt, Artificial Sequence
  Description of Artificial Sequence: Synthetic oligonucleotide
gcguccaccugacagguuu

SEQ ID NO: 1243288 - RNA, 19 nt, Artificial Sequence
  Description of Artificial Sequence: Synthetic oligonucleotide
cugaggaaccagugugcau

SEQ ID NO: 1243289 - RNA, 19 nt, Artificial Sequence
  Description of Artificial Sequence: Synthetic oligonucleotide
ggaccgggauacuguuauc

SEQ ID NO: 1243290 - RNA, 19 nt, Artificial Sequence
  Description of Artificial Sequence: Synthetic oligonucleotide
cugccguagggaggccaac

SEQ ID NO: 1243291 - RNA, 19 nt, Artificial Sequence
  Description of Artificial Sequence: Synthetic oligonucleotide
gcagaccaaggagcuugcc

SEQ ID NO: 1243292 - RNA, 19 nt, Artificial Sequence
  Description of Artificial Sequence: Synthetic oligonucleotide
caugguuucugagcagguu

SEQ ID NO: 1243293 - RNA, 19 nt, Artificial Sequence
  Description of Artificial Sequence: Synthetic oligonucleotide
cguagggaggccaacacuu

SEQ ID NO: 1243294 - RNA, 19 nt, Artificial Sequence
  Description of Artificial Sequence: Synthetic oligonucleotide
accaaccuacguggacuuu

SEQ ID NO: 1243295 - RNA, 19 nt, Artificial Sequence
  Description of Artificial Sequence: Synthetic oligonucleotide
caucuacagcaucuauauu

SEQ ID NO: 1243296 - RNA, 19 nt, Artificial Sequence
  Description of Artificial Sequence: Synthetic oligonucleotide
caccugugguugagacaca

SEQ ID NO: 1243297 - RNA, 19 nt, Artificial Sequence
  Description of Artificial Sequence: Synthetic oligonucleotide
cuugccccuucucccuaua

SEQ ID NO: 1243298 - RNA, 19 nt, Artificial Sequence
  Description of Artificial Sequence: Synthetic oligonucleotide
guagggcaagcacccuuuu

SEQ ID NO: 1243299 - RNA, 19 nt, Artificial Sequence
  Description of Artificial Sequence: Synthetic oligonucleotide
ccaaccgugagaccaggau

SEQ ID NO: 1243300 - RNA, 19 nt, Artificial Sequence
  Description of Artificial Sequence: Synthetic oligonucleotide
ccgggcuuucacacacauc

SEQ ID NO: 1243301 - RNA, 19 nt, Artificial Sequence
  Description of Artificial Sequence: Synthetic oligonucleotide
gguugccacgguaacuaau

SEQ ID NO: 1243302 - RNA, 19 nt, Artificial Sequence
  Description of Artificial Sequence: Synthetic oligonucleotide
guuuggcaccaugguuucu

SEQ ID NO: 1243303 - RNA, 19 nt, Artificial Sequence
  Description of Artificial Sequence: Synthetic oligonucleotide
gcacacuaucuaacguaua

SEQ ID NO: 1243304 - RNA, 19 nt, Artificial Sequence
  Description of Artificial Sequence: Synthetic oligonucleotide
cgguaacuaauuccugaua

SEQ ID NO: 1243305 - RNA, 19 nt, Artificial Sequence
  Description of Artificial Sequence: Synthetic oligonucleotide
ccaugguuucugagcaggu

SEQ ID NO: 1243306 - RNA, 19 nt, Artificial Sequence
  Description of Artificial Sequence: Synthetic oligonucleotide
ccgauccugcuccauuugu

SEQ ID NO: 1243307 - RNA, 19 nt, Artificial Sequence
  Description of Artificial Sequence: Synthetic oligonucleotide
cguucgugauuuaaccauu

SEQ ID NO: 1243308 - RNA, 19 nt, Artificial Sequence
  Description of Artificial Sequence: Synthetic oligonucleotide
ccguagggaggccaacacu

SEQ ID NO: 1243309 - RNA, 19 nt, Artificial Sequence
  Description of Artificial Sequence: Synthetic oligonucleotide
agcguccaccugacagguu

SEQ ID NO: 1243310 - RNA, 19 nt, Artificial Sequence
  Description of Artificial Sequence: Synthetic oligonucleotide
ccguuacuguuuccuuaaa

SEQ ID NO: 1243311 - RNA, 19 nt, Artificial Sequence
  Description of Artificial Sequence: Synthetic oligonucleotide
ccuggaccgggauacuguu

SEQ ID NO: 1243312 - RNA, 19 nt, Artificial Sequence
  Description of Artificial Sequence: Synthetic oligonucleotide
gcuugccccuucucccuau

SEQ ID NO: 1243313 - RNA, 19 nt, Artificial Sequence
  Description of Artificial Sequence: Synthetic oligonucleotide
cgauccugcuccauuuguu

SEQ ID NO: 1243314 - RNA, 19 nt, Artificial Sequence
  Description of Artificial Sequence: Synthetic oligonucleotide
cugacagguuuggcaccau

SEQ ID NO: 1243315 - RNA, 19 nt, Artificial Sequence
  Description of Artificial Sequence: Synthetic oligonucleotide
cgcuuacaugaggucgaaa

SEQ ID NO: 1243316 - RNA, 19 nt, Artificial Sequence
  Description of Artificial Sequence: Synthetic oligonucleotide
auauguauuuaguagcugc

SEQ ID NO: 1243317 - RNA, 19 nt, Artificial Sequence
  Description of Artificial Sequence: Synthetic oligonucleotide
uguacaucauacuugaucc

SEQ ID NO: 1243318 - RNA, 19 nt, Artificial Sequence
  Description of Artificial Sequence: Synthetic oligonucleotide
aauaccaccuauaacauag

SEQ ID NO: 1243319 - RNA, 19 nt, Artificial Sequence
  Description of Artificial Sequence: Synthetic oligonucleotide
aaacgguucccguauaggc

SEQ ID NO: 1243320 - RNA, 19 nt, Artificial Sequence
  Description of Artificial Sequence: Synthetic oligonucleotide
uucauaucgaggaauauug

SEQ ID NO: 1243321 - RNA, 19 nt, Artificial Sequence
  Description of Artificial Sequence: Synthetic oligonucleotide
aguuaaacaaaagcaaugc

SEQ ID NO: 1243322 - RNA, 19 nt, Artificial Sequence
  Description of Artificial Sequence: Synthetic oligonucleotide
aauccaaaauugcagcgac

SEQ ID NO: 1243323 - RNA, 19 nt, Artificial Sequence
  Description of Artificial Sequence: Synthetic oligonucleotide
uuaaaguaugggcugaugc

SEQ ID NO: 1243324 - RNA, 19 nt, Artificial Sequence
  Description of Artificial Sequence: Synthetic oligonucleotide
ugugcuaaguauuucuugg

SEQ ID NO: 1243325 - RNA, 19 nt, Artificial Sequence
  Description of Artificial Sequence: Synthetic oligonucleotide
ugcaguuaauccaaaauug

SEQ ID NO: 1243326 - RNA, 19 nt, Artificial Sequence
  Description of Artificial Sequence: Synthetic oligonucleotide
gugaacauagucuuuaaag

SEQ ID NO: 1243327 - RNA, 19 nt, Artificial Sequence
  Description of Artificial Sequence: Synthetic oligonucleotide
uuucaagaaaugcacaaca

SEQ ID NO: 1243328 - RNA, 19 nt, Artificial Sequence
  Description of Artificial Sequence: Synthetic oligonucleotide
cagauugcaaguaagacug

SEQ ID NO: 1243329 - RNA, 19 nt, Artificial Sequence
  Description of Artificial Sequence: Synthetic oligonucleotide
gagcauguaauuuacauca

SEQ ID NO: 1243330 - RNA, 19 nt, Artificial Sequence
  Description of Artificial Sequence: Synthetic oligonucleotide
aguacuucggcucucguuc

SEQ ID NO: 1243331 - RNA, 19 nt, Artificial Sequence
  Description of Artificial Sequence: Synthetic oligonucleotide
uguaucugagauagggucg

SEQ ID NO: 1243332 - RNA, 19 nt, Artificial Sequence
  Description of Artificial Sequence: Synthetic oligonucleotide
aauauugagggcgccagac

SEQ ID NO: 1243333 - RNA, 19 nt, Artificial Sequence
  Description of Artificial Sequence: Synthetic oligonucleotide
aauuccaauacaguuacca

SEQ ID NO: 1243334 - RNA, 19 nt, Artificial Sequence
  Description of Artificial Sequence: Synthetic oligonucleotide
aaguccacguauuuguauc

SEQ ID NO: 1243335 - RNA, 19 nt, Artificial Sequence
  Description of Artificial Sequence: Synthetic oligonucleotide
acuagucucugucaguagc

SEQ ID NO: 1243336 - RNA, 19 nt, Artificial Sequence
  Description of Artificial Sequence: Synthetic oligonucleotide
ucagcaaugguaaucguac

SEQ ID NO: 1243337 - RNA, 19 nt, Artificial Sequence
  Description of Artificial Sequence: Synthetic oligonucleotide
guuaauccaaaauugcagc

SEQ ID NO: 1243338 - RNA, 19 nt, Artificial Sequence
  Description of Artificial Sequence: Synthetic oligonucleotide
ugcuaaguauuucuuggcg

SEQ ID NO: 1243339 - RNA, 19 nt, Artificial Sequence
  Description of Artificial Sequence: Synthetic oligonucleotide
ucugucaguagcuacauuc

SEQ ID NO: 1243340 - RNA, 19 nt, Artificial Sequence
  Description of Artificial Sequence: Synthetic oligonucleotide
ucaagagcgauucaaacua

SEQ ID NO: 1243341 - RNA, 19 nt, Artificial Sequence
  Description of Artificial Sequence: Synthetic oligonucleotide
uauguauuuaguagcugcc

SEQ ID NO: 1243342 - RNA, 19 nt, Artificial Sequence
  Description of Artificial Sequence: Synthetic oligonucleotide
uugauucacuguaaaauca

SEQ ID NO: 1243343 - RNA, 19 nt, Artificial Sequence
  Description of Artificial Sequence: Synthetic oligonucleotide
cuuacuuggaucguaacgc

SEQ ID NO: 1243344 - RNA, 19 nt, Artificial Sequence
  Description of Artificial Sequence: Synthetic oligonucleotide
uggcauauguauuuaguag

SEQ ID NO: 1243345 - RNA, 19 nt, Artificial Sequence
  Description of Artificial Sequence: Synthetic oligonucleotide
auugguuuugaugaggguc

SEQ ID NO: 1243346 - RNA, 19 nt, Artificial Sequence
  Description of Artificial Sequence: Synthetic oligonucleotide
aagacucuaaggcauaaaa

SEQ ID NO: 1243347 - RNA, 19 nt, Artificial Sequence
  Description of Artificial Sequence: Synthetic oligonucleotide
agcgauucaaacuauuugu

SEQ ID NO: 1243348 - RNA, 19 nt, Artificial Sequence
  Description of Artificial Sequence: Synthetic oligonucleotide
ugcaaaacgggaaauucca

SEQ ID NO: 1243349 - RNA, 19 nt, Artificial Sequence
  Description of Artificial Sequence: Synthetic oligonucleotide
ucauagugcaguuaaucca

SEQ ID NO: 1243350 - RNA, 19 nt, Artificial Sequence
  Description of Artificial Sequence: Synthetic oligonucleotide
acuauuugucaguucagag

SEQ ID NO: 1243351 - RNA, 19 nt, Artificial Sequence
  Description of Artificial Sequence: Synthetic oligonucleotide
  modified_base (9)..(9): a, c, u, g, unknown or other
ucucuuucncagaaguugc

SEQ ID NO: 1243352 - RNA, 19 nt, Artificial Sequence
  Description of Artificial Sequence: Synthetic oligonucleotide
agcaaugguaaucguacac

SEQ ID NO: 1243353 - RNA, 19 nt, Artificial Sequence
  Description of Artificial Sequence: Synthetic oligonucleotide
guaguugucaacuacugca

SEQ ID NO: 1243354 - RNA, 19 nt, Artificial Sequence
  Description of Artificial Sequence: Synthetic oligonucleotide
aaaaucaagagcgauucaa

SEQ ID NO: 1243355 - RNA, 19 nt, Artificial Sequence
  Description of Artificial Sequence: Synthetic oligonucleotide
aaaacgggaaauuccaaua

SEQ ID NO: 1243356 - RNA, 19 nt, Artificial Sequence
  Description of Artificial Sequence: Synthetic oligonucleotide
uugguuuugaugaggguca

SEQ ID NO: 1243357 - RNA, 19 nt, Artificial Sequence
  Description of Artificial Sequence: Synthetic oligonucleotide
auaucgaggaauauugagg

SEQ ID NO: 1243358 - RNA, 19 nt, Artificial Sequence
  Description of Artificial Sequence: Synthetic oligonucleotide
gauucaaccguauccugag

SEQ ID NO: 1243359 - RNA, 19 nt, Artificial Sequence
  Description of Artificial Sequence: Synthetic oligonucleotide
  modified_base (5)..(5): a, c, u, g, unknown or other
uuugngagcauguaauuua

SEQ ID NO: 1243360 - RNA, 19 nt, Artificial Sequence
  Description of Artificial Sequence: Synthetic oligonucleotide
ucuuucauuggucuacaca

SEQ ID NO: 1243361 - RNA, 19 nt, Artificial Sequence
  Description of Artificial Sequence: Synthetic oligonucleotide
cauaucgaggaauauugag

SEQ ID NO: 1243362 - RNA, 19 nt, Artificial Sequence
  Description of Artificial Sequence: Synthetic oligonucleotide
aguuaauccaaaauugcag

SEQ ID NO: 1243363 - RNA, 19 nt, Artificial Sequence
  Description of Artificial Sequence: Synthetic oligonucleotide
caaacuauuugucaguuca

SEQ ID NO: 1243364 - RNA, 19 nt, Artificial Sequence
  Description of Artificial Sequence: Synthetic oligonucleotide
uacccaacaagacuuugag

SEQ ID NO: 1243365 - RNA, 19 nt, Artificial Sequence
  Description of Artificial Sequence: Synthetic oligonucleotide
uugcaaguaagacugucca

SEQ ID NO: 1243366 - RNA, 19 nt, Artificial Sequence
  Description of Artificial Sequence: Synthetic oligonucleotide
auaaaaccuagcauaacuc

SEQ ID NO: 1243367 - RNA, 19 nt, Artificial Sequence
  Description of Artificial Sequence: Synthetic oligonucleotide
ggaauccuuacuuggaucg

SEQ ID NO: 1243368 - RNA, 19 nt, Artificial Sequence
  Description of Artificial Sequence: Synthetic oligonucleotide
uguaaaaucaagagcgauu

SEQ ID NO: 1243369 - RNA, 19 nt, Artificial Sequence
  Description of Artificial Sequence: Synthetic oligonucleotide
uaaaguaugggcugaugcu

SEQ ID NO: 1243370 - RNA, 19 nt, Artificial Sequence
  Description of Artificial Sequence: Synthetic oligonucleotide
uacgucucugcaaaacggg

SEQ ID NO: 1243371 - RNA, 19 nt, Artificial Sequence
  Description of Artificial Sequence: Synthetic oligonucleotide
uaucaugccagcugagucc

SEQ ID NO: 1243372 - RNA, 19 nt, Artificial Sequence
  Description of Artificial Sequence: Synthetic oligonucleotide
uuuuaucuggaguagguuu

SEQ ID NO: 1243373 - RNA, 19 nt, Artificial Sequence
  Description of Artificial Sequence: Synthetic oligonucleotide
auaaagguaguugucaacu

SEQ ID NO: 1243374 - RNA, 19 nt, Artificial Sequence
  Description of Artificial Sequence: Synthetic oligonucleotide
aaaacgguucccguauagg

SEQ ID NO: 1243375 - RNA, 19 nt, Artificial Sequence
  Description of Artificial Sequence: Synthetic oligonucleotide
acuuggaucguaacgcucc

SEQ ID NO: 1243376 - RNA, 19 nt, Artificial Sequence
  Description of Artificial Sequence: Synthetic oligonucleotide
ucccguauaggcauacucc

SEQ ID NO: 1243377 - RNA, 19 nt, Artificial Sequence
  Description of Artificial Sequence: Synthetic oligonucleotide
ucaagcaaucauuggagac

SEQ ID NO: 1243378 - RNA, 19 nt, Artificial Sequence
  Description of Artificial Sequence: Synthetic oligonucleotide
guaaaaucaagagcgauuc

SEQ ID NO: 1243379 - RNA, 19 nt, Artificial Sequence
  Description of Artificial Sequence: Synthetic oligonucleotide
auuaugcccaccuaccaca

SEQ ID NO: 1243380 - RNA, 19 nt, Artificial Sequence
  Description of Artificial Sequence: Synthetic oligonucleotide
cauagucuuuaaaguaugg

SEQ ID NO: 1243381 - RNA, 19 nt, Artificial Sequence
  Description of Artificial Sequence: Synthetic oligonucleotide
auauugagggcgccagacc

SEQ ID NO: 1243382 - RNA, 19 nt, Artificial Sequence
  Description of Artificial Sequence: Synthetic oligonucleotide
auuuccacgacuucacacu

SEQ ID NO: 1243383 - RNA, 19 nt, Artificial Sequence
  Description of Artificial Sequence: Synthetic oligonucleotide
uaaucguacacuguucagc

SEQ ID NO: 1243384 - RNA, 19 nt, Artificial Sequence
  Description of Artificial Sequence: Synthetic oligonucleotide
aaacucuucugucuggcaa

SEQ ID NO: 1243385 - RNA, 19 nt, Artificial Sequence
  Description of Artificial Sequence: Synthetic oligonucleotide
  modified_base (4)..(4): a, c, u, g, unknown or other
uugngagcauguaauuuac

SEQ ID NO: 1243386 - RNA, 19 nt, Artificial Sequence
  Description of Artificial Sequence: Synthetic oligonucleotide
aaccuagcauaacuccgac

SEQ ID NO: 1243387 - RNA, 19 nt, Artificial Sequence
  Description of Artificial Sequence: Synthetic oligonucleotide
gacuacauaaagguaguug

SEQ ID NO: 1243388 - RNA, 19 nt, Artificial Sequence
  Description of Artificial Sequence: Synthetic oligonucleotide
aacgggaaauuccaauaca

SEQ ID NO: 1243389 - RNA, 19 nt, Artificial Sequence
  Description of Artificial Sequence: Synthetic oligonucleotide
aaccauacgucucugcaaa

SEQ ID NO: 1243390 - RNA, 19 nt, Artificial Sequence
  Description of Artificial Sequence: Synthetic oligonucleotide
gagcgauucaaacuauuug

SEQ ID NO: 1243391 - RNA, 19 nt, Artificial Sequence
  Description of Artificial Sequence: Synthetic oligonucleotide
  modified_base (6)..(6): a, c, u, g, unknown or other
cuuucncagaaguugccag

SEQ ID NO: 1243392 - RNA, 19 nt, Artificial Sequence
  Description of Artificial Sequence: Synthetic oligonucleotide
gaacuuaacacucagcaau

SEQ ID NO: 1243393 - RNA, 19 nt, Artificial Sequence
  Description of Artificial Sequence: Synthetic oligonucleotide
gacaguauaucaugccagc

SEQ ID NO: 1243394 - RNA, 19 nt, Artificial Sequence
  Description of Artificial Sequence: Synthetic oligonucleotide
uucaaccguauccugagaa

SEQ ID NO: 1243395 - RNA, 19 nt, Artificial Sequence
  Description of Artificial Sequence: Synthetic oligonucleotide
agugcaguuaauccaaaau

SEQ ID NO: 1243396 - RNA, 19 nt, Artificial Sequence
  Description of Artificial Sequence: Synthetic oligonucleotide
ucguucauucucucuagag

SEQ ID NO: 1243397 - RNA, 19 nt, Artificial Sequence
  Description of Artificial Sequence: Synthetic oligonucleotide
uuugucaguucagaguacc

SEQ ID NO: 1243398 - RNA, 19 nt, Artificial Sequence
  Description of Artificial Sequence: Synthetic oligonucleotide
auccaccuaaagcauaaag

SEQ ID NO: 1243399 - RNA, 19 nt, Artificial Sequence
  Description of Artificial Sequence: Synthetic oligonucleotide
aguacgccgagugaggaac

SEQ ID NO: 1243400 - RNA, 19 nt, Artificial Sequence
  Description of Artificial Sequence: Synthetic oligonucleotide
uccgacaccaaagugaauc

SEQ ID NO: 1243401 - RNA, 19 nt, Artificial Sequence
  Description of Artificial Sequence: Synthetic oligonucleotide
cugcaaaacgggaaauucc

SEQ ID NO: 1243402 - RNA, 19 nt, Artificial Sequence
  Description of Artificial Sequence: Synthetic oligonucleotide
aaaucagcgugcguaagcu

SEQ ID NO: 1243403 - RNA, 19 nt, Artificial Sequence
  Description of Artificial Sequence: Synthetic oligonucleotide
caucaaugcacugaaacuc

SEQ ID NO: 1243404 - RNA, 19 nt, Artificial Sequence
  Description of Artificial Sequence: Synthetic oligonucleotide
auugcagcgacaguauauc

SEQ ID NO: 1243405 - RNA, 19 nt, Artificial Sequence
  Description of Artificial Sequence: Synthetic oligonucleotide
aggaauccuuacuuggauc

SEQ ID NO: 1243406 - RNA, 19 nt, Artificial Sequence
  Description of Artificial Sequence: Synthetic oligonucleotide
uucauucucucuagagaag

SEQ ID NO: 1243407 - RNA, 19 nt, Artificial Sequence
  Description of Artificial Sequence: Synthetic oligonucleotide
caaugguaaucguacacug

SEQ ID NO: 1243408 - RNA, 19 nt, Artificial Sequence
  Description of Artificial Sequence: Synthetic oligonucleotide
accacgugcgauuuccacg

SEQ ID NO: 1243409 - RNA, 19 nt, Artificial Sequence
  Description of Artificial Sequence: Synthetic oligonucleotide
cuugacaaaugggagacac

SEQ ID NO: 1243410 - RNA, 19 nt, Artificial Sequence
  Description of Artificial Sequence: Synthetic oligonucleotide
uggaucguaacgcuccaca

SEQ ID NO: 1243411 - RNA, 19 nt, Artificial Sequence
  Description of Artificial Sequence: Synthetic oligonucleotide
cacucagcaaugguaaucg

SEQ ID NO: 1243412 - RNA, 19 nt, Artificial Sequence
  Description of Artificial Sequence: Synthetic oligonucleotide
uacagauugcaaguaagac

SEQ ID NO: 1243413 - RNA, 19 nt, Artificial Sequence
  Description of Artificial Sequence: Synthetic oligonucleotide
augacaaccauacgucucu

SEQ ID NO: 1243414 - RNA, 19 nt, Artificial Sequence
  Description of Artificial Sequence: Synthetic oligonucleotide
aacuauuugucaguucaga

SEQ ID NO: 1243415 - RNA, 19 nt, Artificial Sequence
  Description of Artificial Sequence: Synthetic oligonucleotide
  modified_base (7)..(7): a, c, u, g, unknown or other
ucuuucncagaaguugcca

SEQ ID NO: 1243416 - RNA, 19 nt, Artificial Sequence
  Description of Artificial Sequence: Synthetic oligonucleotide
aaucagcgugcguaagcuc

SEQ ID NO: 1243417 - RNA, 19 nt, Artificial Sequence
  Description of Artificial Sequence: Synthetic oligonucleotide
uccaagaguacuucggcuc

SEQ ID NO: 1243418 - RNA, 19 nt, Artificial Sequence
  Description of Artificial Sequence: Synthetic oligonucleotide
ucguauuucuguacugugu

SEQ ID NO: 1243419 - RNA, 19 nt, Artificial Sequence
  Description of Artificial Sequence: Synthetic oligonucleotide
aaaugggagacaccauuau

SEQ ID NO: 1243420 - RNA, 19 nt, Artificial Sequence
  Description of Artificial Sequence: Synthetic oligonucleotide
guugccagugaacauaguc

SEQ ID NO: 1243421 - RNA, 19 nt, Artificial Sequence
  Description of Artificial Sequence: Synthetic oligonucleotide
ucauaucgaggaauauuga

SEQ ID NO: 1243422 - RNA, 19 nt, Artificial Sequence
  Description of Artificial Sequence: Synthetic oligonucleotide
aaguaugggcugaugcugg

SEQ ID NO: 1243423 - RNA, 19 nt, Artificial Sequence
  Description of Artificial Sequence: Synthetic oligonucleotide
agagauucaaccguauccu

SEQ ID NO: 1243424 - RNA, 19 nt, Artificial Sequence
  Description of Artificial Sequence: Synthetic oligonucleotide
acguauuuguaucaggauu

SEQ ID NO: 1243425 - RNA, 19 nt, Artificial Sequence
  Description of Artificial Sequence: Synthetic oligonucleotide
ucauccaaaucagcgugcg

SEQ ID NO: 1243426 - RNA, 19 nt, Artificial Sequence
  Description of Artificial Sequence: Synthetic oligonucleotide
uccacgacuucacacuucu

SEQ ID NO: 1243427 - RNA, 19 nt, Artificial Sequence
  Description of Artificial Sequence: Synthetic oligonucleotide
ucucuagagaaguccacgu

SEQ ID NO: 1243428 - RNA, 19 nt, Artificial Sequence
  Description of Artificial Sequence: Synthetic oligonucleotide
uuuccuauuggcccaccac

SEQ ID NO: 1243429 - RNA, 19 nt, Artificial Sequence
  Description of Artificial Sequence: Synthetic oligonucleotide
ugcuugacaaaugggagac

SEQ ID NO: 1243430 - RNA, 19 nt, Artificial Sequence
  Description of Artificial Sequence: Synthetic oligonucleotide
gaaaguacgccgagugagg

SEQ ID NO: 1243431 - RNA, 19 nt, Artificial Sequence
  Description of Artificial Sequence: Synthetic oligonucleotide
aacuagucucugucaguag

SEQ ID NO: 1243432 - RNA, 19 nt, Artificial Sequence
  Description of Artificial Sequence: Synthetic oligonucleotide
caauacaguuaccaggguc

SEQ ID NO: 1243433 - RNA, 19 nt, Artificial Sequence
  Description of Artificial Sequence: Synthetic oligonucleotide
uucuuucaggacaaguuuu

SEQ ID NO: 1243434 - RNA, 19 nt, Artificial Sequence
  Description of Artificial Sequence: Synthetic oligonucleotide
aaacuagucucugucagua

SEQ ID NO: 1243435 - RNA, 19 nt, Artificial Sequence
  Description of Artificial Sequence: Synthetic oligonucleotide
cuauuggcccaccacgugc

SEQ ID NO: 1243436 - RNA, 19 nt, Artificial Sequence
  Description of Artificial Sequence: Synthetic oligonucleotide
caaaucagcgugcguaagc

SEQ ID NO: 1243437 - RNA, 19 nt, Artificial Sequence
  Description of Artificial Sequence: Synthetic oligonucleotide
augaaaacgguucccguau

SEQ ID NO: 1243438 - RNA, 19 nt, Artificial Sequence
  Description of Artificial Sequence: Synthetic oligonucleotide
ugcgauuuccacgacuuca

SEQ ID NO: 1243439 - RNA, 19 nt, Artificial Sequence
  Description of Artificial Sequence: Synthetic oligonucleotide
auacgucucugcaaaacgg

SEQ ID NO: 1243440 - RNA, 19 nt, Artificial Sequence
  Description of Artificial Sequence: Synthetic oligonucleotide
uucuggcauauguauuuag

SEQ ID NO: 1243441 - RNA, 19 nt, Artificial Sequence
  Description of Artificial Sequence: Synthetic oligonucleotide
ucuuuaaaguaugggcuga

SEQ ID NO: 1243442 - RNA, 19 nt, Artificial Sequence
  Description of Artificial Sequence: Synthetic oligonucleotide
auuggucuacacacugucc

SEQ ID NO: 1243443 - RNA, 19 nt, Artificial Sequence
  Description of Artificial Sequence: Synthetic oligonucleotide
caguuaauccaaaauugca

SEQ ID NO: 1243444 - RNA, 19 nt, Artificial Sequence
  Description of Artificial Sequence: Synthetic oligonucleotide
aaaccuagcauaacuccga

SEQ ID NO: 1243445 - RNA, 19 nt, Artificial Sequence
  Description of Artificial Sequence: Synthetic oligonucleotide
acgggaaauuccaauacag

SEQ ID NO: 1243446 - RNA, 19 nt, Artificial Sequence
  Description of Artificial Sequence: Synthetic oligonucleotide
aaaauugcagcgacaguau

SEQ ID NO: 1243447 - RNA, 19 nt, Artificial Sequence
  Description of Artificial Sequence: Synthetic oligonucleotide
uucccguauaggcauacuc

SEQ ID NO: 1243448 - RNA, 19 nt, Artificial Sequence
  Description of Artificial Sequence: Synthetic oligonucleotide
caaaauugcagcgacagua

SEQ ID NO: 1243449 - RNA, 19 nt, Artificial Sequence
  Description of Artificial Sequence: Synthetic oligonucleotide
guugucaacuacugcagca

SEQ ID NO: 1243450 - RNA, 19 nt, Artificial Sequence
  Description of Artificial Sequence: Synthetic oligonucleotide
aguuaccagggucaagcug

SEQ ID NO: 1243451 - RNA, 19 nt, Artificial Sequence
  Description of Artificial Sequence: Synthetic oligonucleotide
ggcaggagagauucaaccg

SEQ ID NO: 1243452 - RNA, 19 nt, Artificial Sequence
  Description of Artificial Sequence: Synthetic oligonucleotide
uauaucaugccagcugagu

SEQ ID NO: 1243453 - RNA, 19 nt, Artificial Sequence
  Description of Artificial Sequence: Synthetic oligonucleotide
aaguauuucuuggcguucu

SEQ ID NO: 1243454 - RNA, 19 nt, Artificial Sequence
  Description of Artificial Sequence: Synthetic oligonucleotide
accaccgacuacauaaagg

SEQ ID NO: 1243455 - RNA, 19 nt, Artificial Sequence
  Description of Artificial Sequence: Synthetic oligonucleotide
guaaucguacacuguucag

SEQ ID NO: 1243456 - RNA, 19 nt, Artificial Sequence
  Description of Artificial Sequence: Synthetic oligonucleotide
agggccauacccuccaaug

SEQ ID NO: 1243457 - RNA, 19 nt, Artificial Sequence
  Description of Artificial Sequence: Synthetic oligonucleotide
uggggauauauuucucuac

SEQ ID NO: 1243458 - RNA, 19 nt, Artificial Sequence
  Description of Artificial Sequence: Synthetic oligonucleotide
ggaaaguacgccgagugag

SEQ ID NO: 1243459 - RNA, 19 nt, Artificial Sequence
  Description of Artificial Sequence: Synthetic oligonucleotide
cauuggucuacacacuguc

SEQ ID NO: 1243460 - RNA, 19 nt, Artificial Sequence
  Description of Artificial Sequence: Synthetic oligonucleotide
  modified_base (3)..(3): a, c, u, g, unknown or other
ugngagcauguaauuuaca

SEQ ID NO: 1243461 - RNA, 19 nt, Artificial Sequence
  Description of Artificial Sequence: Synthetic oligonucleotide
uugucaguucagaguaccc

SEQ ID NO: 1243462 - RNA, 19 nt, Artificial Sequence
  Description of Artificial Sequence: Synthetic oligonucleotide
caugacaaccauacgucuc

SEQ ID NO: 1243463 - RNA, 19 nt, Artificial Sequence
  Description of Artificial Sequence: Synthetic oligonucleotide
augcuugacaaaugggaga

SEQ ID NO: 1243464 - RNA, 19 nt, Artificial Sequence
  Description of Artificial Sequence: Synthetic oligonucleotide
  modified_base (17)..(17): a, c, u, g, unknown or other
uggcaaguccacuuugnga

SEQ ID NO: 1243465 - RNA, 19 nt, Artificial Sequence
  Description of Artificial Sequence: Synthetic oligonucleotide
acuuaacacucagcaaugg

SEQ ID NO: 1243466 - RNA, 19 nt, Artificial Sequence
  Description of Artificial Sequence: Synthetic oligonucleotide
ugcagcgacaguauaucau

SEQ ID NO: 1243467 - RNA, 19 nt, Artificial Sequence
  Description of Artificial Sequence: Synthetic oligonucleotide
aaaguacgccgagugagga

SEQ ID NO: 1243468 - RNA, 19 nt, Artificial Sequence
  Description of Artificial Sequence: Synthetic oligonucleotide
accuauaacauagacuuuu

SEQ ID NO: 1243469 - RNA, 19 nt, Artificial Sequence
  Description of Artificial Sequence: Synthetic oligonucleotide
ugggcucuuucauuggucu

SEQ ID NO: 1243470 - RNA, 19 nt, Artificial Sequence
  Description of Artificial Sequence: Synthetic oligonucleotide
ucauuggucuacacacugu

SEQ ID NO: 1243471 - RNA, 19 nt, Artificial Sequence
  Description of Artificial Sequence: Synthetic oligonucleotide
cugugcuaaguauuucuug

SEQ ID NO: 1243472 - RNA, 19 nt, Artificial Sequence
  Description of Artificial Sequence: Synthetic oligonucleotide
cauuaugcccaccuaccac

SEQ ID NO: 1243473 - RNA, 19 nt, Artificial Sequence
  Description of Artificial Sequence: Synthetic oligonucleotide
  modified_base (2)..(2): a, c, u, g, unknown or other
gngagcauguaauuuacau

SEQ ID NO: 1243474 - RNA, 19 nt, Artificial Sequence
  Description of Artificial Sequence: Synthetic oligonucleotide
uccuauuggcccaccacgu

SEQ ID NO: 1243475 - RNA, 19 nt, Artificial Sequence
  Description of Artificial Sequence: Synthetic oligonucleotide
aucuggaguagguuugcug

SEQ ID NO: 1243476 - RNA, 19 nt, Artificial Sequence
  Description of Artificial Sequence: Synthetic oligonucleotide
gucguauuucuguacugug

SEQ ID NO: 1243477 - RNA, 19 nt, Artificial Sequence
  Description of Artificial Sequence: Synthetic oligonucleotide
cacgacuucacacuucuca

SEQ ID NO: 1243478 - RNA, 19 nt, Artificial Sequence
  Description of Artificial Sequence: Synthetic oligonucleotide
acgcacacuaguuucaaua

SEQ ID NO: 1243479 - RNA, 19 nt, Artificial Sequence
  Description of Artificial Sequence: Synthetic oligonucleotide
ccuuacuuggaucguaacg

SEQ ID NO: 1243480 - RNA, 19 nt, Artificial Sequence
  Description of Artificial Sequence: Synthetic oligonucleotide
aaauugcagcgacaguaua

SEQ ID NO: 1243481 - RNA, 19 nt, Artificial Sequence
  Description of Artificial Sequence: Synthetic oligonucleotide
cacuacuacuccaagagua

SEQ ID NO: 1243482 - RNA, 19 nt, Artificial Sequence
  Description of Artificial Sequence: Synthetic oligonucleotide
gguaaucguacacuguuca

SEQ ID NO: 1243483 - RNA, 19 nt, Artificial Sequence
  Description of Artificial Sequence: Synthetic oligonucleotide
ucaaccguauccugagaaa

SEQ ID NO: 1243484 - RNA, 19 nt, Artificial Sequence
  Description of Artificial Sequence: Synthetic oligonucleotide
aacgguucccguauaggca

SEQ ID NO: 1243485 - RNA, 19 nt, Artificial Sequence
  Description of Artificial Sequence: Synthetic oligonucleotide
aguccacguauuuguauca

SEQ ID NO: 1243486 - RNA, 19 nt, Artificial Sequence
  Description of Artificial Sequence: Synthetic oligonucleotide
  modified_base (8)..(8): a, c, u, g, unknown or other
cucuuucncagaaguugcc

SEQ ID NO: 1243487 - RNA, 19 nt, Artificial Sequence
  Description of Artificial Sequence: Synthetic oligonucleotide
ccauugguuuugaugaggg

SEQ ID NO: 1243488 - RNA, 19 nt, Artificial Sequence
  Description of Artificial Sequence: Synthetic oligonucleotide
caauggcauaaaucauucc

SEQ ID NO: 1243489 - RNA, 19 nt, Artificial Sequence
  Description of Artificial Sequence: Synthetic oligonucleotide
  modified_base (3)..(3): a, c, u, g, unknown or other
ucncagaaguugccaguga

SEQ ID NO: 1243490 - RNA, 19 nt, Artificial Sequence
  Description of Artificial Sequence: Synthetic oligonucleotide
ugguaaucguacacuguuc

SEQ ID NO: 1243491 - RNA, 19 nt, Artificial Sequence
  Description of Artificial Sequence: Synthetic oligonucleotide
auucauaucgaggaauauu

SEQ ID NO: 1243492 - RNA, 19 nt, Artificial Sequence
  Description of Artificial Sequence: Synthetic oligonucleotide
aguucagaguacccaacaa

SEQ ID NO: 1243493 - RNA, 19 nt, Artificial Sequence
  Description of Artificial Sequence: Synthetic oligonucleotide
gagugaggaacuuaacacu

SEQ ID NO: 1243494 - RNA, 19 nt, Artificial Sequence
  Description of Artificial Sequence: Synthetic oligonucleotide
gacaaccauacgucucugc

SEQ ID NO: 1243495 - RNA, 19 nt, Artificial Sequence
  Description of Artificial Sequence: Synthetic oligonucleotide
gauugcaaguaagacuguc

SEQ ID NO: 1243496 - RNA, 19 nt, Artificial Sequence
  Description of Artificial Sequence: Synthetic oligonucleotide
cuagcauaacuccgacacc

SEQ ID NO: 1243497 - RNA, 19 nt, Artificial Sequence
  Description of Artificial Sequence: Synthetic oligonucleotide
caggacgcacacuaguuuc

SEQ ID NO: 1243498 - RNA, 19 nt, Artificial Sequence
  Description of Artificial Sequence: Synthetic oligonucleotide
uuuaucagccauggaugca

SEQ ID NO: 1243499 - RNA, 19 nt, Artificial Sequence
  Description of Artificial Sequence: Synthetic oligonucleotide
ucggcucucguucauucuc

SEQ ID NO: 1243500 - RNA, 19 nt, Artificial Sequence
  Description of Artificial Sequence: Synthetic oligonucleotide
acacugggcauucuuuccu

SEQ ID NO: 1243501 - RNA, 19 nt, Artificial Sequence
  Description of Artificial Sequence: Synthetic oligonucleotide
cagcgacaguauaucaugc

SEQ ID NO: 1243502 - RNA, 19 nt, Artificial Sequence
  Description of Artificial Sequence: Synthetic oligonucleotide
acgacuucacacuucucau

SEQ ID NO: 1243503 - RNA, 19 nt, Artificial Sequence
  Description of Artificial Sequence: Synthetic oligonucleotide
gaauccuuuuaucagccau

SEQ ID NO: 1243504 - RNA, 19 nt, Artificial Sequence
  Description of Artificial Sequence: Synthetic oligonucleotide
uuuugaugagggucauauc

SEQ ID NO: 1243505 - RNA, 19 nt, Artificial Sequence
  Description of Artificial Sequence: Synthetic oligonucleotide
agaccaauccaagagucau

SEQ ID NO: 1243506 - RNA, 19 nt, Artificial Sequence
  Description of Artificial Sequence: Synthetic oligonucleotide
agauucaaccguauccuga

SEQ ID NO: 1243507 - RNA, 19 nt, Artificial Sequence
  Description of Artificial Sequence: Synthetic oligonucleotide
agcauguaauuuacaucac

SEQ ID NO: 1243508 - RNA, 19 nt, Artificial Sequence
  Description of Artificial Sequence: Synthetic oligonucleotide
aucagcgugcguaagcuca

SEQ ID NO: 1243509 - RNA, 19 nt, Artificial Sequence
  Description of Artificial Sequence: Synthetic oligonucleotide
gcagcaaaacaacuucuug

SEQ ID NO: 1243510 - RNA, 19 nt, Artificial Sequence
  Description of Artificial Sequence: Synthetic oligonucleotide
acaucauacuugauccaag

SEQ ID NO: 1243511 - RNA, 19 nt, Artificial Sequence
  Description of Artificial Sequence: Synthetic oligonucleotide
aggaaaguacgccgaguga

SEQ ID NO: 1243512 - RNA, 19 nt, Artificial Sequence
  Description of Artificial Sequence: Synthetic oligonucleotide
uugcagcgacaguauauca

SEQ ID NO: 1243513 - RNA, 19 nt, Artificial Sequence
  Description of Artificial Sequence: Synthetic oligonucleotide
ggaauauugagggcgccag

SEQ ID NO: 1243514 - RNA, 19 nt, Artificial Sequence
  Description of Artificial Sequence: Synthetic oligonucleotide
ggggauauauuucucuaca

SEQ ID NO: 1243515 - RNA, 19 nt, Artificial Sequence
  Description of Artificial Sequence: Synthetic oligonucleotide
cuggcauauguauuuagua

SEQ ID NO: 1243516 - RNA, 19 nt, Artificial Sequence
  Description of Artificial Sequence: Synthetic oligonucleotide
auuuaguagcugccaaaua

SEQ ID NO: 1243517 - RNA, 19 nt, Artificial Sequence
  Description of Artificial Sequence: Synthetic oligonucleotide
acgguucccguauaggcau

SEQ ID NO: 1243518 - RNA, 19 nt, Artificial Sequence
  Description of Artificial Sequence: Synthetic oligonucleotide
aauccuuacuuggaucgua

SEQ ID NO: 1243519 - RNA, 19 nt, Artificial Sequence
  Description of Artificial Sequence: Synthetic oligonucleotide
  modified_base (10)..(10): a, c, u, g, unknown or other
uccacuuugngagcaugua

SEQ ID NO: 1243520 - RNA, 19 nt, Artificial Sequence
  Description of Artificial Sequence: Synthetic oligonucleotide
ugcaaguaagacuguccau

SEQ ID NO: 1243521 - RNA, 19 nt, Artificial Sequence
  Description of Artificial Sequence: Synthetic oligonucleotide
uuaugcccaccuaccacaa

SEQ ID NO: 1243522 - RNA, 19 nt, Artificial Sequence
  Description of Artificial Sequence: Synthetic oligonucleotide
ggaugcaaccaucucccag

SEQ ID NO: 1243523 - RNA, 19 nt, Artificial Sequence
  Description of Artificial Sequence: Synthetic oligonucleotide
aguagguuugcugcuggca

SEQ ID NO: 1243524 - RNA, 19 nt, Artificial Sequence
  Description of Artificial Sequence: Synthetic oligonucleotide
gcaaguaagacuguccauc

SEQ ID NO: 1243525 - RNA, 19 nt, Artificial Sequence
  Description of Artificial Sequence: Synthetic oligonucleotide
acaguauaucaugccagcu

SEQ ID NO: 1243526 - RNA, 19 nt, Artificial Sequence
  Description of Artificial Sequence: Synthetic oligonucleotide
cugaggaaaguacgccgag

SEQ ID NO: 1243527 - RNA, 19 nt, Artificial Sequence
  Description of Artificial Sequence: Synthetic oligonucleotide
cuucggcucucguucauuc

SEQ ID NO: 1243528 - RNA, 19 nt, Artificial Sequence
  Description of Artificial Sequence: Synthetic oligonucleotide
uccuuacuuggaucguaac

SEQ ID NO: 1243529 - RNA, 19 nt, Artificial Sequence
  Description of Artificial Sequence: Synthetic oligonucleotide
gggcauucuuuccuauugg

SEQ ID NO: 1243530 - RNA, 19 nt, Artificial Sequence
  Description of Artificial Sequence: Synthetic oligonucleotide
aaguacgccgagugaggaa

SEQ ID NO: 1243531 - RNA, 19 nt, Artificial Sequence
  Description of Artificial Sequence: Synthetic oligonucleotide
aaaggucaugacaaccaua

SEQ ID NO: 1243532 - RNA, 19 nt, Artificial Sequence
  Description of Artificial Sequence: Synthetic oligonucleotide
gagauagggucguauuucu

SEQ ID NO: 1243533 - RNA, 19 nt, Artificial Sequence
  Description of Artificial Sequence: Synthetic oligonucleotide
ugaggaaaguacgccgagu

SEQ ID NO: 1243534 - RNA, 19 nt, Artificial Sequence
  Description of Artificial Sequence: Synthetic oligonucleotide
auacccuccaauggcauaa

SEQ ID NO: 1243535 - RNA, 19 nt, Artificial Sequence
  Description of Artificial Sequence: Synthetic oligonucleotide
ugaaaacgguucccguaua

SEQ ID NO: 1243536 - RNA, 19 nt, Artificial Sequence
  Description of Artificial Sequence: Synthetic oligonucleotide
uggaguagguuugcugcug

SEQ ID NO: 1243537 - RNA, 19 nt, Artificial Sequence
  Description of Artificial Sequence: Synthetic oligonucleotide
guccauugguuuugaugag

SEQ ID NO: 1243538 - RNA, 19 nt, Artificial Sequence
  Description of Artificial Sequence: Synthetic oligonucleotide
caaaugggagacaccauua

SEQ ID NO: 1243539 - RNA, 19 nt, Artificial Sequence
  Description of Artificial Sequence: Synthetic oligonucleotide
ggccauacccuccaauggc

SEQ ID NO: 1243540 - RNA, 19 nt, Artificial Sequence
  Description of Artificial Sequence: Synthetic oligonucleotide
aucaugccagcugagucca

SEQ ID NO: 1243541 - RNA, 19 nt, Artificial Sequence
  Description of Artificial Sequence: Synthetic oligonucleotide
gcacacuaguuucaauacc

SEQ ID NO: 1243542 - RNA, 19 nt, Artificial Sequence
  Description of Artificial Sequence: Synthetic oligonucleotide
aggaauauugagggcgcca

SEQ ID NO: 1243543 - RNA, 19 nt, Artificial Sequence
  Description of Artificial Sequence: Synthetic oligonucleotide
guauaucaugccagcugag

SEQ ID NO: 1243544 - RNA, 19 nt, Artificial Sequence
  Description of Artificial Sequence: Synthetic oligonucleotide
  modified_base (8)..(8): a, c, u, g, unknown or other
cacuuugngagcauguaau

SEQ ID NO: 1243545 - RNA, 19 nt, Artificial Sequence
  Description of Artificial Sequence: Synthetic oligonucleotide
  modified_base (2)..(2): a, c, u, g, unknown or other
cncagaaguugccagugaa

SEQ ID NO: 1243546 - RNA, 19 nt, Artificial Sequence
  Description of Artificial Sequence: Synthetic oligonucleotide
auucaaccguauccugaga

SEQ ID NO: 1243547 - RNA, 19 nt, Artificial Sequence
  Description of Artificial Sequence: Synthetic oligonucleotide
agagcgauucaaacuauuu

SEQ ID NO: 1243548 - RNA, 19 nt, Artificial Sequence
  Description of Artificial Sequence: Synthetic oligonucleotide
ugcccaccuaccacaaaau

SEQ ID NO: 1243549 - RNA, 19 nt, Artificial Sequence
  Description of Artificial Sequence: Synthetic oligonucleotide
acuccgacaccaaagugaa

SEQ ID NO: 1243550 - RNA, 19 nt, Artificial Sequence
  Description of Artificial Sequence: Synthetic oligonucleotide
gaggaauauugagggcgcc

SEQ ID NO: 1243551 - RNA, 19 nt, Artificial Sequence
  Description of Artificial Sequence: Synthetic oligonucleotide
ucagcgugcguaagcucaa

SEQ ID NO: 1243552 - RNA, 19 nt, Artificial Sequence
  Description of Artificial Sequence: Synthetic oligonucleotide
acgugcgauuuccacgacu

SEQ ID NO: 1243553 - RNA, 19 nt, Artificial Sequence
  Description of Artificial Sequence: Synthetic oligonucleotide
aagagcgauucaaacuauu

SEQ ID NO: 1243554 - RNA, 19 nt, Artificial Sequence
  Description of Artificial Sequence: Synthetic oligonucleotide
ggaucguaacgcuccacac

SEQ ID NO: 1243555 - RNA, 19 nt, Artificial Sequence
  Description of Artificial Sequence: Synthetic oligonucleotide
caaaacgggaaauuccaau

SEQ ID NO: 1243556 - RNA, 19 nt, Artificial Sequence
  Description of Artificial Sequence: Synthetic oligonucleotide
gaaacucaaccucacuguu

SEQ ID NO: 1243557 - RNA, 19 nt, Artificial Sequence
  Description of Artificial Sequence: Synthetic oligonucleotide
cgacaguauaucaugccag

SEQ ID NO: 1243558 - RNA, 19 nt, Artificial Sequence
  Description of Artificial Sequence: Synthetic oligonucleotide
cugagugaccaccgacuac

SEQ ID NO: 1243559 - RNA, 19 nt, Artificial Sequence
  Description of Artificial Sequence: Synthetic oligonucleotide
cucuuucauuggucuacac

SEQ ID NO: 1243560 - RNA, 19 nt, Artificial Sequence
  Description of Artificial Sequence: Synthetic oligonucleotide
augcaaccaucucccagga

SEQ ID NO: 1243561 - RNA, 19 nt, Artificial Sequence
  Description of Artificial Sequence: Synthetic oligonucleotide
guaagacuguccaucauau

SEQ ID NO: 1243562 - RNA, 19 nt, Artificial Sequence
  Description of Artificial Sequence: Synthetic oligonucleotide
ggagagauucaaccguauc

SEQ ID NO: 1243563 - RNA, 19 nt, Artificial Sequence
  Description of Artificial Sequence: Synthetic oligonucleotide
gcuaaguauuucuuggcgu

SEQ ID NO: 1243564 - RNA, 19 nt, Artificial Sequence
  Description of Artificial Sequence: Synthetic oligonucleotide
cuagucucugucaguagcu

SEQ ID NO: 1243565 - RNA, 19 nt, Artificial Sequence
  Description of Artificial Sequence: Synthetic oligonucleotide
ugaugcuggcaaguccacu

SEQ ID NO: 1243566 - RNA, 19 nt, Artificial Sequence
  Description of Artificial Sequence: Synthetic oligonucleotide
agauagggucguauuucug

SEQ ID NO: 1243567 - RNA, 19 nt, Artificial Sequence
  Description of Artificial Sequence: Synthetic oligonucleotide
aucugagauagggucguau

SEQ ID NO: 1243568 - RNA, 19 nt, Artificial Sequence
  Description of Artificial Sequence: Synthetic oligonucleotide
ggauuccaacacuccacug

SEQ ID NO: 1243569 - RNA, 19 nt, Artificial Sequence
  Description of Artificial Sequence: Synthetic oligonucleotide
uaugcccaccuaccacaaa

SEQ ID NO: 1243570 - RNA, 19 nt, Artificial Sequence
  Description of Artificial Sequence: Synthetic oligonucleotide
caccuaccacaaaauaaaa

SEQ ID NO: 1243571 - RNA, 19 nt, Artificial Sequence
  Description of Artificial Sequence: Synthetic oligonucleotide
acgucucugcaaaacggga

SEQ ID NO: 1243572 - RNA, 19 nt, Artificial Sequence
  Description of Artificial Sequence: Synthetic oligonucleotide
cgcacacuaguuucaauac

SEQ ID NO: 1243573 - RNA, 19 nt, Artificial Sequence
  Description of Artificial Sequence: Synthetic oligonucleotide
cccaccuaccacaaaauaa

SEQ ID NO: 1243574 - RNA, 19 nt, Artificial Sequence
  Description of Artificial Sequence: Synthetic oligonucleotide
guacuucggcucucguuca

SEQ ID NO: 1243575 - RNA, 19 nt, Artificial Sequence
  Description of Artificial Sequence: Synthetic oligonucleotide
gcgauucaaacuauuuguc

SEQ ID NO: 1243576 - RNA, 19 nt, Artificial Sequence
  Description of Artificial Sequence: Synthetic oligonucleotide
cagcaaugguaaucguaca

SEQ ID NO: 1243577 - RNA, 19 nt, Artificial Sequence
  Description of Artificial Sequence: Synthetic oligonucleotide
cuuggaucguaacgcucca

SEQ ID NO: 1243578 - RNA, 19 nt, Artificial Sequence
  Description of Artificial Sequence: Synthetic oligonucleotide
cgauucaaacuauuuguca

SEQ ID NO: 1243579 - RNA, 19 nt, Artificial Sequence
  Description of Artificial Sequence: Synthetic oligonucleotide
auccuuacuuggaucguaa

SEQ ID NO: 1243580 - RNA, 19 nt, Artificial Sequence
  Description of Artificial Sequence: Synthetic oligonucleotide
ccaccgacuacauaaaggu

SEQ ID NO: 1243581 - RNA, 19 nt, Artificial Sequence
  Description of Artificial Sequence: Synthetic oligonucleotide
uuggaucguaacgcuccac

SEQ ID NO: 1243582 - RNA, 19 nt, Artificial Sequence
  Description of Artificial Sequence: Synthetic oligonucleotide
uacuucggcucucguucau

SEQ ID NO: 1243583 - RNA, 19 nt, Artificial Sequence
  Description of Artificial Sequence: Synthetic oligonucleotide
aggacgcacacuaguuuca

SEQ ID NO: 1243584 - RNA, 19 nt, Artificial Sequence
  Description of Artificial Sequence: Synthetic oligonucleotide
ggaagacccugagugacca

SEQ ID NO: 1243585 - RNA, 19 nt, Artificial Sequence
  Description of Artificial Sequence: Synthetic oligonucleotide
cccguauaggcauacucca

SEQ ID NO: 1243586 - RNA, 19 nt, Artificial Sequence
  Description of Artificial Sequence: Synthetic oligonucleotide
cucguucauucucucuaga

SEQ ID NO: 1243587 - RNA, 19 nt, Artificial Sequence
  Description of Artificial Sequence: Synthetic oligonucleotide
cuccaagaguacuucggcu

SEQ ID NO: 1243588 - RNA, 19 nt, Artificial Sequence
  Description of Artificial Sequence: Synthetic oligonucleotide
uggcccaccacgugcgauu

SEQ ID NO: 1243589 - RNA, 19 nt, Artificial Sequence
  Description of Artificial Sequence: Synthetic oligonucleotide
  modified_base (13)..(13): a, c, u, g, unknown or other
aaguccacuuugngagcau

SEQ ID NO: 1243590 - RNA, 19 nt, Artificial Sequence
  Description of Artificial Sequence: Synthetic oligonucleotide
cguucauucucucuagaga

SEQ ID NO: 1243591 - RNA, 19 nt, Artificial Sequence
  Description of Artificial Sequence: Synthetic oligonucleotide
cguauaggcauacuccaca

SEQ ID NO: 1243592 - RNA, 19 nt, Artificial Sequence
  Description of Artificial Sequence: Synthetic oligonucleotide
agauugcaaguaagacugu

SEQ ID NO: 1243593 - RNA, 19 nt, Artificial Sequence
  Description of Artificial Sequence: Synthetic oligonucleotide
gcgauuuccacgacuucac

SEQ ID NO: 1243594 - RNA, 19 nt, Artificial Sequence
  Description of Artificial Sequence: Synthetic oligonucleotide
gcaaugguaaucguacacu

SEQ ID NO: 1243595 - RNA, 19 nt, Artificial Sequence
  Description of Artificial Sequence: Synthetic oligonucleotide
cacguauuuguaucaggau

SEQ ID NO: 1243596 - RNA, 19 nt, Artificial Sequence
  Description of Artificial Sequence: Synthetic oligonucleotide
ggcgccagaccaauccaag

SEQ ID NO: 1243597 - RNA, 19 nt, Artificial Sequence
  Description of Artificial Sequence: Synthetic oligonucleotide
cguauccugagaaaugaaa

SEQ ID NO: 1243598 - RNA, 19 nt, Artificial Sequence
  Description of Artificial Sequence: Synthetic oligonucleotide
aggagagauucaaccguau

SEQ ID NO: 1243599 - RNA, 19 nt, Artificial Sequence
  Description of Artificial Sequence: Synthetic oligonucleotide
ccguauaggcauacuccac

SEQ ID NO: 1243600 - RNA, 19 nt, Artificial Sequence
  Description of Artificial Sequence: Synthetic oligonucleotide
gaauccuuacuuggaucgu

SEQ ID NO: 1243601 - RNA, 19 nt, Artificial Sequence
  Description of Artificial Sequence: Synthetic oligonucleotide
guuuuaucuggaguagguu

SEQ ID NO: 1243602 - RNA, 19 nt, Artificial Sequence
  Description of Artificial Sequence: Synthetic oligonucleotide
caaccguauccugagaaau

SEQ ID NO: 1243603 - RNA, 19 nt, Artificial Sequence
  Description of Artificial Sequence: Synthetic oligonucleotide
caccgacuacauaaaggua

SEQ ID NO: 1243604 - RNA, 19 nt, Artificial Sequence
  Description of Artificial Sequence: Synthetic oligonucleotide
gugcgauuuccacgacuuc

SEQ ID NO: 1243605 - RNA, 19 nt, Artificial Sequence
  Description of Artificial Sequence: Synthetic oligonucleotide
ccuauuggcccaccacgug

SEQ ID NO: 1243606 - RNA, 19 nt, Artificial Sequence
  Description of Artificial Sequence: Synthetic oligonucleotide
gcaagcacuacuacuccaa

SEQ ID NO: 1243607 - RNA, 19 nt, Artificial Sequence
  Description of Artificial Sequence: Synthetic oligonucleotide
ccauuaugcccaccuacca

SEQ ID NO: 1243608 - RNA, 19 nt, Artificial Sequence
  Description of Artificial Sequence: Synthetic oligonucleotide
  modified_base (9)..(9): a, c, u, g, unknown or other
ccacuuugngagcauguaa

SEQ ID NO: 1243609 - RNA, 19 nt, Artificial Sequence
  Description of Artificial Sequence: Synthetic oligonucleotide
caagagcgauucaaacuau

SEQ ID NO: 1243610 - RNA, 19 nt, Artificial Sequence
  Description of Artificial Sequence: Synthetic oligonucleotide
ccaaaucagcgugcguaag

SEQ ID NO: 1243611 - RNA, 19 nt, Artificial Sequence
  Description of Artificial Sequence: Synthetic oligonucleotide
gccauacccuccaauggca

SEQ ID NO: 1243612 - RNA, 19 nt, Artificial Sequence
  Description of Artificial Sequence: Synthetic oligonucleotide
gacgcacacuaguuucaau

SEQ ID NO: 1243613 - RNA, 19 nt, Artificial Sequence
  Description of Artificial Sequence: Synthetic oligonucleotide
uacgccgagugaggaacuu

SEQ ID NO: 1243614 - RNA, 19 nt, Artificial Sequence
  Description of Artificial Sequence: Synthetic oligonucleotide
acuucggcucucguucauu

SEQ ID NO: 1243615 - RNA, 19 nt, Artificial Sequence
  Description of Artificial Sequence: Synthetic oligonucleotide
caacaagacuuugagucuu

SEQ ID NO: 1243616 - RNA, 19 nt, Artificial Sequence
  Description of Artificial Sequence: Synthetic oligonucleotide
ucaugugagcagggccaua

SEQ ID NO: 1243617 - RNA, 19 nt, Artificial Sequence
  Description of Artificial Sequence: Synthetic oligonucleotide
caguuaccagggucaagcu

SEQ ID NO: 1243618 - RNA, 19 nt, Artificial Sequence
  Description of Artificial Sequence: Synthetic oligonucleotide
cagggucaagcuggcuuuc

SEQ ID NO: 1243619 - RNA, 19 nt, Artificial Sequence
  Description of Artificial Sequence: Synthetic oligonucleotide
gcacuacuacuccaagagu

SEQ ID NO: 1243620 - RNA, 19 nt, Artificial Sequence
  Description of Artificial Sequence: Synthetic oligonucleotide
gcccaccuaccacaaaaua

SEQ ID NO: 1243621 - RNA, 19 nt, Artificial Sequence
  Description of Artificial Sequence: Synthetic oligonucleotide
acgccgagugaggaacuua

SEQ ID NO: 1243622 - RNA, 19 nt, Artificial Sequence
  Description of Artificial Sequence: Synthetic oligonucleotide
cauccaaaucagcgugcgu

SEQ ID NO: 1243623 - RNA, 19 nt, Artificial Sequence
  Description of Artificial Sequence: Synthetic oligonucleotide
ccugagugaccaccgacua

SEQ ID NO: 1243624 - RNA, 19 nt, Artificial Sequence
  Description of Artificial Sequence: Synthetic oligonucleotide
ccaagaguacuucggcucu

SEQ ID NO: 1243625 - RNA, 19 nt, Artificial Sequence
  Description of Artificial Sequence: Synthetic oligonucleotide
gaguacccaacaagacuuu

SEQ ID NO: 1243626 - RNA, 19 nt, Artificial Sequence
  Description of Artificial Sequence: Synthetic oligonucleotide
cugggcauucuuuccuauu

SEQ ID NO: 1243627 - RNA, 19 nt, Artificial Sequence
  Description of Artificial Sequence: Synthetic oligonucleotide
ggacgcacacuaguuucaa

SEQ ID NO: 1243628 - RNA, 19 nt, Artificial Sequence
  Description of Artificial Sequence: Synthetic oligonucleotide
caccuauaacauagacuuu

SEQ ID NO: 1243629 - RNA, 19 nt, Artificial Sequence
  Description of Artificial Sequence: Synthetic oligonucleotide
gcuugacaaaugggagaca

SEQ ID NO: 1243630 - RNA, 19 nt, Artificial Sequence
  Description of Artificial Sequence: Synthetic oligonucleotide
ccguauccugagaaaugaa

SEQ ID NO: 1243631 - RNA, 19 nt, Artificial Sequence
  Description of Artificial Sequence: Synthetic oligonucleotide
cgccgagugaggaacuuaa

SEQ ID NO: 1243632 - RNA, 19 nt, Artificial Sequence
  Description of Artificial Sequence: Synthetic oligonucleotide
guucccguauaggcauacu

SEQ ID NO: 1243633 - RNA, 19 nt, Artificial Sequence
  Description of Artificial Sequence: Synthetic oligonucleotide
cgugcgauuuccacgacuu

SEQ ID NO: 1243634 - RNA, 19 nt, Artificial Sequence
  Description of Artificial Sequence: Synthetic oligonucleotide
gguuuugaugagggucaua

SEQ ID NO: 1243635 - RNA, 19 nt, Artificial Sequence
  Description of Artificial Sequence: Synthetic oligonucleotide
guacgccgagugaggaacu

SEQ ID NO: 1243636 - RNA, 19 nt, Artificial Sequence
  Description of Artificial Sequence: Synthetic oligonucleotide
cagggccauacccuccaau

SEQ ID NO: 1243637 - RNA, 19 nt, Artificial Sequence
  Description of Artificial Sequence: Synthetic oligonucleotide
ccacgacuucacacuucuc

SEQ ID NO: 1243638 - RNA, 19 nt, Artificial Sequence
  Description of Artificial Sequence: Synthetic oligonucleotide
ccaccacgugcgauuucca

SEQ ID NO: 1243639 - RNA, 19 nt, Artificial Sequence
  Description of Artificial Sequence: Synthetic oligonucleotide
ccaggacgcacacuaguuu

SEQ ID NO: 1243640 - RNA, 19 nt, Artificial Sequence
  Description of Artificial Sequence: Synthetic oligonucleotide
ccauacccuccaauggcau

SEQ ID NO: 1243641 - RNA, 19 nt, Artificial Sequence
  Description of Artificial Sequence: Synthetic oligonucleotide
cuccgacaccaaagugaau

SEQ ID NO: 1243642 - RNA, 19 nt, Artificial Sequence
  Description of Artificial Sequence: Synthetic oligonucleotide
cgguucccguauaggcaua

SEQ ID NO: 1243643 - RNA, 19 nt, Artificial Sequence
  Description of Artificial Sequence: Synthetic oligonucleotide
  modified_base (1)..(1): a, c, u, g, unknown or other
ngagcauguaauuuacauc

SEQ ID NO: 1243644 - RNA, 19 nt, Artificial Sequence
  Description of Artificial Sequence: Synthetic oligonucleotide
aaugauucauuugacaaac

SEQ ID NO: 1243645 - RNA, 19 nt, Artificial Sequence
  Description of Artificial Sequence: Synthetic oligonucleotide
acaucaaucauaaugauuc

SEQ ID NO: 1243646 - RNA, 19 nt, Artificial Sequence
  Description of Artificial Sequence: Synthetic oligonucleotide
aaggguacagugcucaggc

SEQ ID NO: 1243647 - RNA, 19 nt, Artificial Sequence
  Description of Artificial Sequence: Synthetic oligonucleotide
uguugaacggacuugaagc

SEQ ID NO: 1243648 - RNA, 19 nt, Artificial Sequence
  Description of Artificial Sequence: Synthetic oligonucleotide
aucauaaugauucauuuga

SEQ ID NO: 1243649 - RNA, 19 nt, Artificial Sequence
  Description of Artificial Sequence: Synthetic oligonucleotide
ucauuugacaaacacacau

SEQ ID NO: 1243650 - RNA, 19 nt, Artificial Sequence
  Description of Artificial Sequence: Synthetic oligonucleotide
agagucaccgcauccagcc

SEQ ID NO: 1243651 - RNA, 19 nt, Artificial Sequence
  Description of Artificial Sequence: Synthetic oligonucleotide
accagaaagacugagacag

SEQ ID NO: 1243652 - RNA, 19 nt, Artificial Sequence
  Description of Artificial Sequence: Synthetic oligonucleotide
guuucuaacaguuugccca

SEQ ID NO: 1243653 - RNA, 19 nt, Artificial Sequence
  Description of Artificial Sequence: Synthetic oligonucleotide
ugauucauuugacaaacac

SEQ ID NO: 1243654 - RNA, 19 nt, Artificial Sequence
  Description of Artificial Sequence: Synthetic oligonucleotide
accacagauaagcagcagc

SEQ ID NO: 1243655 - RNA, 19 nt, Artificial Sequence
  Description of Artificial Sequence: Synthetic oligonucleotide
aaagacugagacaggagac

SEQ ID NO: 1243656 - RNA, 19 nt, Artificial Sequence
  Description of Artificial Sequence: Synthetic oligonucleotide
uucauccuaacacauugag

SEQ ID NO: 1243657 - RNA, 19 nt, Artificial Sequence
  Description of Artificial Sequence: Synthetic oligonucleotide
cacauaccagacuugaacc

SEQ ID NO: 1243658 - RNA, 19 nt, Artificial Sequence
  Description of Artificial Sequence: Synthetic oligonucleotide
gaaagggugagugcgaugc

SEQ ID NO: 1243659 - RNA, 19 nt, Artificial Sequence
  Description of Artificial Sequence: Synthetic oligonucleotide
aguacguggacggugaggg

SEQ ID NO: 1243660 - RNA, 19 nt, Artificial Sequence
  Description of Artificial Sequence: Synthetic oligonucleotide
uguaaugccgagaguagca

SEQ ID NO: 1243661 - RNA, 19 nt, Artificial Sequence
  Description of Artificial Sequence: Synthetic oligonucleotide
ugugcuagauccaagggua

SEQ ID NO: 1243662 - RNA, 19 nt, Artificial Sequence
  Description of Artificial Sequence: Synthetic oligonucleotide
gaaagacugagacaggaga

SEQ ID NO: 1243663 - RNA, 19 nt, Artificial Sequence
  Description of Artificial Sequence: Synthetic oligonucleotide
ucaaucauaaugauucauu

SEQ ID NO: 1243664 - RNA, 19 nt, Artificial Sequence
  Description of Artificial Sequence: Synthetic oligonucleotide
ugugguaaacaaacauucc

SEQ ID NO: 1243665 - RNA, 19 nt, Artificial Sequence
  Description of Artificial Sequence: Synthetic oligonucleotide
uccugaaagggugagugcg

SEQ ID NO: 1243666 - RNA, 19 nt, Artificial Sequence
  Description of Artificial Sequence: Synthetic oligonucleotide
augucuucguccaaguagc

SEQ ID NO: 1243667 - RNA, 19 nt, Artificial Sequence
  Description of Artificial Sequence: Synthetic oligonucleotide
aguugugguaaacaaacau

SEQ ID NO: 1243668 - RNA, 19 nt, Artificial Sequence
  Description of Artificial Sequence: Synthetic oligonucleotide
ugauuccucagacaagaga

SEQ ID NO: 1243669 - RNA, 19 nt, Artificial Sequence
  Description of Artificial Sequence: Synthetic oligonucleotide
aagaagacacagccaacug

SEQ ID NO: 1243670 - RNA, 19 nt, Artificial Sequence
  Description of Artificial Sequence: Synthetic oligonucleotide
ucauaaugauucauuugac

SEQ ID NO: 1243671 - RNA, 19 nt, Artificial Sequence
  Description of Artificial Sequence: Synthetic oligonucleotide
cagagcacucuguugaacg

SEQ ID NO: 1243672 - RNA, 19 nt, Artificial Sequence
  Description of Artificial Sequence: Synthetic oligonucleotide
aagggugagugcgaugccc

SEQ ID NO: 1243673 - RNA, 19 nt, Artificial Sequence
  Description of Artificial Sequence: Synthetic oligonucleotide
gagguugcccaguacgugg

SEQ ID NO: 1243674 - RNA, 19 nt, Artificial Sequence
  Description of Artificial Sequence: Synthetic oligonucleotide
agaugugagugccagcaag

SEQ ID NO: 1243675 - RNA, 19 nt, Artificial Sequence
  Description of Artificial Sequence: Synthetic oligonucleotide
uucauggcgcugcaguggg

SEQ ID NO: 1243676 - RNA, 19 nt, Artificial Sequence
  Description of Artificial Sequence: Synthetic oligonucleotide
guagaccacagauaagcag

SEQ ID NO: 1243677 - RNA, 19 nt, Artificial Sequence
  Description of Artificial Sequence: Synthetic oligonucleotide
aaagccgugcacugugaag

SEQ ID NO: 1243678 - RNA, 19 nt, Artificial Sequence
  Description of Artificial Sequence: Synthetic oligonucleotide
gagagaucguggcuguugg

SEQ ID NO: 1243679 - RNA, 19 nt, Artificial Sequence
  Description of Artificial Sequence: Synthetic oligonucleotide
gcuacuagcaagaagacac

SEQ ID NO: 1243680 - RNA, 19 nt, Artificial Sequence
  Description of Artificial Sequence: Synthetic oligonucleotide
gcugagaucgcugaggugg

SEQ ID NO: 1243681 - RNA, 19 nt, Artificial Sequence
  Description of Artificial Sequence: Synthetic oligonucleotide
agaucgcugaggugggugc

SEQ ID NO: 1243682 - RNA, 19 nt, Artificial Sequence
  Description of Artificial Sequence: Synthetic oligonucleotide
guugaacggacuugaagcc

SEQ ID NO: 1243683 - RNA, 19 nt, Artificial Sequence
  Description of Artificial Sequence: Synthetic oligonucleotide
acauugaggguuucuaaca

SEQ ID NO: 1243684 - RNA, 19 nt, Artificial Sequence
  Description of Artificial Sequence: Synthetic oligonucleotide
guggcuacuagcaagaaga

SEQ ID NO: 1243685 - RNA, 19 nt, Artificial Sequence
  Description of Artificial Sequence: Synthetic oligonucleotide
guugugcuagauccaaggg

SEQ ID NO: 1243686 - RNA, 19 nt, Artificial Sequence
  Description of Artificial Sequence: Synthetic oligonucleotide
agauccaaggguacagugc

SEQ ID NO: 1243687 - RNA, 19 nt, Artificial Sequence
  Description of Artificial Sequence: Synthetic oligonucleotide
agugguguggugguggugg

SEQ ID NO: 1243688 - RNA, 19 nt, Artificial Sequence
  Description of Artificial Sequence: Synthetic oligonucleotide
agacuugaaccugccaucc

SEQ ID NO: 1243689 - RNA, 19 nt, Artificial Sequence
  Description of Artificial Sequence: Synthetic oligonucleotide
acugcuucggcugagguca

SEQ ID NO: 1243690 - RNA, 19 nt, Artificial Sequence
  Description of Artificial Sequence: Synthetic oligonucleotide
cauaaugauucauuugaca

SEQ ID NO: 1243691 - RNA, 19 nt, Artificial Sequence
  Description of Artificial Sequence: Synthetic oligonucleotide
ucuaacaguuugcccagca

SEQ ID NO: 1243692 - RNA, 19 nt, Artificial Sequence
  Description of Artificial Sequence: Synthetic oligonucleotide
uaaugccgagaguagcagg

SEQ ID NO: 1243693 - RNA, 19 nt, Artificial Sequence
  Description of Artificial Sequence: Synthetic oligonucleotide
cauugaggguuucuaacag

SEQ ID NO: 1243694 - RNA, 19 nt, Artificial Sequence
  Description of Artificial Sequence: Synthetic oligonucleotide
agaguaggcccauggcagc

SEQ ID NO: 1243695 - RNA, 19 nt, Artificial Sequence
  Description of Artificial Sequence: Synthetic oligonucleotide
aagccgugcacugugaaga

SEQ ID NO: 1243696 - RNA, 19 nt, Artificial Sequence
  Description of Artificial Sequence: Synthetic oligonucleotide
uagauccaaggguacagug

SEQ ID NO: 1243697 - RNA, 19 nt, Artificial Sequence
  Description of Artificial Sequence: Synthetic oligonucleotide
cauccugccuucauggcgc

SEQ ID NO: 1243698 - RNA, 19 nt, Artificial Sequence
  Description of Artificial Sequence: Synthetic oligonucleotide
gacuugaagccucggagac

SEQ ID NO: 1243699 - RNA, 19 nt, Artificial Sequence
  Description of Artificial Sequence: Synthetic oligonucleotide
ggucauccugccuucaugg

SEQ ID NO: 1243700 - RNA, 19 nt, Artificial Sequence
  Description of Artificial Sequence: Synthetic oligonucleotide
acauaccagacuugaaccu

SEQ ID NO: 1243701 - RNA, 19 nt, Artificial Sequence
  Description of Artificial Sequence: Synthetic oligonucleotide
gacaagcccaaugugaaca

SEQ ID NO: 1243702 - RNA, 19 nt, Artificial Sequence
  Description of Artificial Sequence: Synthetic oligonucleotide
ugaacggacuugaagccuc

SEQ ID NO: 1243703 - RNA, 19 nt, Artificial Sequence
  Description of Artificial Sequence: Synthetic oligonucleotide
auaccagacuugaaccugc

SEQ ID NO: 1243704 - RNA, 19 nt, Artificial Sequence
  Description of Artificial Sequence: Synthetic oligonucleotide
aggguuucuaacaguuugc

SEQ ID NO: 1243705 - RNA, 19 nt, Artificial Sequence
  Description of Artificial Sequence: Synthetic oligonucleotide
cuguugaacggacuugaag

SEQ ID NO: 1243706 - RNA, 19 nt, Artificial Sequence
  Description of Artificial Sequence: Synthetic oligonucleotide
cacgaacucacaguugugg

SEQ ID NO: 1243707 - RNA, 19 nt, Artificial Sequence
  Description of Artificial Sequence: Synthetic oligonucleotide
agcacucugccuuggauga

SEQ ID NO: 1243708 - RNA, 19 nt, Artificial Sequence
  Description of Artificial Sequence: Synthetic oligonucleotide
aagacugagacaggagaca

SEQ ID NO: 1243709 - RNA, 19 nt, Artificial Sequence
  Description of Artificial Sequence: Synthetic oligonucleotide
agacaagcccaaugugaac

SEQ ID NO: 1243710 - RNA, 19 nt, Artificial Sequence
  Description of Artificial Sequence: Synthetic oligonucleotide
uguugggaugcugaacugc

SEQ ID NO: 1243711 - RNA, 19 nt, Artificial Sequence
  Description of Artificial Sequence: Synthetic oligonucleotide
guugcccacaacugugagg

SEQ ID NO: 1243712 - RNA, 19 nt, Artificial Sequence
  Description of Artificial Sequence: Synthetic oligonucleotide
uggucccugugccacaacc

SEQ ID NO: 1243713 - RNA, 19 nt, Artificial Sequence
  Description of Artificial Sequence: Synthetic oligonucleotide
uccucagacaagagagggc

SEQ ID NO: 1243714 - RNA, 19 nt, Artificial Sequence
  Description of Artificial Sequence: Synthetic oligonucleotide
agguaugguucaugcacuc

SEQ ID NO: 1243715 - RNA, 19 nt, Artificial Sequence
  Description of Artificial Sequence: Synthetic oligonucleotide
gauccaaggguacagugcu

SEQ ID NO: 1243716 - RNA, 19 nt, Artificial Sequence
  Description of Artificial Sequence: Synthetic oligonucleotide
agcuagccagguuguagac

SEQ ID NO: 1243717 - RNA, 19 nt, Artificial Sequence
  Description of Artificial Sequence: Synthetic oligonucleotide
uaccagaaagacugagaca

SEQ ID NO: 1243718 - RNA, 19 nt, Artificial Sequence
  Description of Artificial Sequence: Synthetic oligonucleotide
ucaccagagcagcaccugc

SEQ ID NO: 1243719 - RNA, 19 nt, Artificial Sequence
  Description of Artificial Sequence: Synthetic oligonucleotide
agcgcagacaagcccaaug

SEQ ID NO: 1243720 - RNA, 19 nt, Artificial Sequence
  Description of Artificial Sequence: Synthetic oligonucleotide
uucagguaugguucaugca

SEQ ID NO: 1243721 - RNA, 19 nt, Artificial Sequence
  Description of Artificial Sequence: Synthetic oligonucleotide
gaacucacaguugugguaa

SEQ ID NO: 1243722 - RNA, 19 nt, Artificial Sequence
  Description of Artificial Sequence: Synthetic oligonucleotide
guugggaugcugaacugcc

SEQ ID NO: 1243723 - RNA, 19 nt, Artificial Sequence
  Description of Artificial Sequence: Synthetic oligonucleotide
gcccacguagcugagaucg

SEQ ID NO: 1243724 - RNA, 19 nt, Artificial Sequence
  Description of Artificial Sequence: Synthetic oligonucleotide
cuuucaagugcuggauccg

SEQ ID NO: 1243725 - RNA, 19 nt, Artificial Sequence
  Description of Artificial Sequence: Synthetic oligonucleotide
caacauguguaaugccgag

SEQ ID NO: 1243726 - RNA, 19 nt, Artificial Sequence
  Description of Artificial Sequence: Synthetic oligonucleotide
ugccgagaguagcaggggc

SEQ ID NO: 1243727 - RNA, 19 nt, Artificial Sequence
  Description of Artificial Sequence: Synthetic oligonucleotide
uguucagguaugguucaug

SEQ ID NO: 1243728 - RNA, 19 nt, Artificial Sequence
  Description of Artificial Sequence: Synthetic oligonucleotide
agaaagacugagacaggag

SEQ ID NO: 1243729 - RNA, 19 nt, Artificial Sequence
  Description of Artificial Sequence: Synthetic oligonucleotide
gaucguggcuguugggaug

SEQ ID NO: 1243730 - RNA, 19 nt, Artificial Sequence
  Description of Artificial Sequence: Synthetic oligonucleotide
gagcuagccagguuguaga

SEQ ID NO: 1243731 - RNA, 19 nt, Artificial Sequence
  Description of Artificial Sequence: Synthetic oligonucleotide
cagacuugaaccugccauc

SEQ ID NO: 1243732 - RNA, 19 nt, Artificial Sequence
  Description of Artificial Sequence: Synthetic oligonucleotide
uagcagcgcagacaagccc

SEQ ID NO: 1243733 - RNA, 19 nt, Artificial Sequence
  Description of Artificial Sequence: Synthetic oligonucleotide
guugucaggaggccacuug

SEQ ID NO: 1243734 - RNA, 19 nt, Artificial Sequence
  Description of Artificial Sequence: Synthetic oligonucleotide
uuccugaaagggugagugc

SEQ ID NO: 1243735 - RNA, 19 nt, Artificial Sequence
  Description of Artificial Sequence: Synthetic oligonucleotide
accgcuuucaagugcugga

SEQ ID NO: 1243736 - RNA, 19 nt, Artificial Sequence
  Description of Artificial Sequence: Synthetic oligonucleotide
uuucaagugcuggauccga

SEQ ID NO: 1243737 - RNA, 19 nt, Artificial Sequence
  Description of Artificial Sequence: Synthetic oligonucleotide
uccuaacacauugaggguu

SEQ ID NO: 1243738 - RNA, 19 nt, Artificial Sequence
  Description of Artificial Sequence: Synthetic oligonucleotide
cucaggcccacguugccgc

SEQ ID NO: 1243739 - RNA, 19 nt, Artificial Sequence
  Description of Artificial Sequence: Synthetic oligonucleotide
cauugucagauucaggcua

SEQ ID NO: 1243740 - RNA, 19 nt, Artificial Sequence
  Description of Artificial Sequence: Synthetic oligonucleotide
guaaugccgagaguagcag

SEQ ID NO: 1243741 - RNA, 19 nt, Artificial Sequence
  Description of Artificial Sequence: Synthetic oligonucleotide
agagagaucguggcuguug

SEQ ID NO: 1243742 - RNA, 19 nt, Artificial Sequence
  Description of Artificial Sequence: Synthetic oligonucleotide
cgauuauucucccucagag

SEQ ID NO: 1243743 - RNA, 19 nt, Artificial Sequence
  Description of Artificial Sequence: Synthetic oligonucleotide
ccgugcacugugaagaucc

SEQ ID NO: 1243744 - RNA, 19 nt, Artificial Sequence
  Description of Artificial Sequence: Synthetic oligonucleotide
gagagguggcauacaacag

SEQ ID NO: 1243745 - RNA, 19 nt, Artificial Sequence
  Description of Artificial Sequence: Synthetic oligonucleotide
ugaaagggugagugcgaug

SEQ ID NO: 1243746 - RNA, 19 nt, Artificial Sequence
  Description of Artificial Sequence: Synthetic oligonucleotide
cugagaucgcugagguggg

SEQ ID NO: 1243747 - RNA, 19 nt, Artificial Sequence
  Description of Artificial Sequence: Synthetic oligonucleotide
uugaacggacuugaagccu

SEQ ID NO: 1243748 - RNA, 19 nt, Artificial Sequence
  Description of Artificial Sequence: Synthetic oligonucleotide
cagacaagagagggcaccg

SEQ ID NO: 1243749 - RNA, 19 nt, Artificial Sequence
  Description of Artificial Sequence: Synthetic oligonucleotide
agugggcagcggcccaucc

SEQ ID NO: 1243750 - RNA, 19 nt, Artificial Sequence
  Description of Artificial Sequence: Synthetic oligonucleotide
cagauucaggcuagggcug

SEQ ID NO: 1243751 - RNA, 19 nt, Artificial Sequence
  Description of Artificial Sequence: Synthetic oligonucleotide
agacaagagagggcaccgc

SEQ ID NO: 1243752 - RNA, 19 nt, Artificial Sequence
  Description of Artificial Sequence: Synthetic oligonucleotide
caauucucaucauaguacu

SEQ ID NO: 1243753 - RNA, 19 nt, Artificial Sequence
  Description of Artificial Sequence: Synthetic oligonucleotide
uggcuacuagcaagaagac

SEQ ID NO: 1243754 - RNA, 19 nt, Artificial Sequence
  Description of Artificial Sequence: Synthetic oligonucleotide
caaggguacagugcucagg

SEQ ID NO: 1243755 - RNA, 19 nt, Artificial Sequence
  Description of Artificial Sequence: Synthetic oligonucleotide
gacggggugggucucucug

SEQ ID NO: 1243756 - RNA, 19 nt, Artificial Sequence
  Description of Artificial Sequence: Synthetic oligonucleotide
ugagguugcccaguacgug

SEQ ID NO: 1243757 - RNA, 19 nt, Artificial Sequence
  Description of Artificial Sequence: Synthetic oligonucleotide
ucuggcaccacgggaaauc

SEQ ID NO: 1243758 - RNA, 19 nt, Artificial Sequence
  Description of Artificial Sequence: Synthetic oligonucleotide
guguaaugccgagaguagc

SEQ ID NO: 1243759 - RNA, 19 nt, Artificial Sequence
  Description of Artificial Sequence: Synthetic oligonucleotide
agcccaaugugaacagugg

SEQ ID NO: 1243760 - RNA, 19 nt, Artificial Sequence
  Description of Artificial Sequence: Synthetic oligonucleotide
acguagcugagaucgcuga

SEQ ID NO: 1243761 - RNA, 19 nt, Artificial Sequence
  Description of Artificial Sequence: Synthetic oligonucleotide
cucggagacagguggcuac

SEQ ID NO: 1243762 - RNA, 19 nt, Artificial Sequence
  Description of Artificial Sequence: Synthetic oligonucleotide
ucuguugaacggacuugaa

SEQ ID NO: 1243763 - RNA, 19 nt, Artificial Sequence
  Description of Artificial Sequence: Synthetic oligonucleotide
gguaccucuggcaccacgg

SEQ ID NO: 1243764 - RNA, 19 nt, Artificial Sequence
  Description of Artificial Sequence: Synthetic oligonucleotide
ugucuucguccaaguagca

SEQ ID NO: 1243765 - RNA, 19 nt, Artificial Sequence
  Description of Artificial Sequence: Synthetic oligonucleotide
augugaacagugguguggu

SEQ ID NO: 1243766 - RNA, 19 nt, Artificial Sequence
  Description of Artificial Sequence: Synthetic oligonucleotide
cugauuccucagacaagag

SEQ ID NO: 1243767 - RNA, 19 nt, Artificial Sequence
  Description of Artificial Sequence: Synthetic oligonucleotide
ugcuagauccaaggguaca

SEQ ID NO: 1243768 - RNA, 19 nt, Artificial Sequence
  Description of Artificial Sequence: Synthetic oligonucleotide
guuguagaccacagauaag

SEQ ID NO: 1243769 - RNA, 19 nt, Artificial Sequence
  Description of Artificial Sequence: Synthetic oligonucleotide
acauuccugaaagggugag

SEQ ID NO: 1243770 - RNA, 19 nt, Artificial Sequence
  Description of Artificial Sequence: Synthetic oligonucleotide
caucaaucauaaugauuca

SEQ ID NO: 1243771 - RNA, 19 nt, Artificial Sequence
  Description of Artificial Sequence: Synthetic oligonucleotide
ugaggguuucuaacaguuu

SEQ ID NO: 1243772 - RNA, 19 nt, Artificial Sequence
  Description of Artificial Sequence: Synthetic oligonucleotide
uagggcuguucagguaugg

SEQ ID NO: 1243773 - RNA, 19 nt, Artificial Sequence
  Description of Artificial Sequence: Synthetic oligonucleotide
cacguagcugagaucgcug

SEQ ID NO: 1243774 - RNA, 19 nt, Artificial Sequence
  Description of Artificial Sequence: Synthetic oligonucleotide
aacggacuugaagccucgg

SEQ ID NO: 1243775 - RNA, 19 nt, Artificial Sequence
  Description of Artificial Sequence: Synthetic oligonucleotide
agccgcccgauuauucucc

SEQ ID NO: 1243776 - RNA, 19 nt, Artificial Sequence
  Description of Artificial Sequence: Synthetic oligonucleotide
agagggcaccgcuuucaag

SEQ ID NO: 1243777 - RNA, 19 nt, Artificial Sequence
  Description of Artificial Sequence: Synthetic oligonucleotide
aacugugagguugcccagu

SEQ ID NO: 1243778 - RNA, 19 nt, Artificial Sequence
  Description of Artificial Sequence: Synthetic oligonucleotide
gaacggacuugaagccucg

SEQ ID NO: 1243779 - RNA, 19 nt, Artificial Sequence
  Description of Artificial Sequence: Synthetic oligonucleotide
acggacuugaagccucgga

SEQ ID NO: 1243780 - RNA, 19 nt, Artificial Sequence
  Description of Artificial Sequence: Synthetic oligonucleotide
guggcauacaacagaguca

SEQ ID NO: 1243781 - RNA, 19 nt, Artificial Sequence
  Description of Artificial Sequence: Synthetic oligonucleotide
gcuagauccaaggguacag

SEQ ID NO: 1243782 - RNA, 19 nt, Artificial Sequence
  Description of Artificial Sequence: Synthetic oligonucleotide
accgcauccagccucucuu

SEQ ID NO: 1243783 - RNA, 19 nt, Artificial Sequence
  Description of Artificial Sequence: Synthetic oligonucleotide
agcagcgcagacaagccca

SEQ ID NO: 1243784 - RNA, 19 nt, Artificial Sequence
  Description of Artificial Sequence: Synthetic oligonucleotide
gauccgagccgcccgauua

SEQ ID NO: 1243785 - RNA, 19 nt, Artificial Sequence
  Description of Artificial Sequence: Synthetic oligonucleotide
gacaagagagggcaccgcu

SEQ ID NO: 1243786 - RNA, 19 nt, Artificial Sequence
  Description of Artificial Sequence: Synthetic oligonucleotide
cuacuagcaagaagacaca

SEQ ID NO: 1243787 - RNA, 19 nt, Artificial Sequence
  Description of Artificial Sequence: Synthetic oligonucleotide
caguugugcuagauccaag

SEQ ID NO: 1243788 - RNA, 19 nt, Artificial Sequence
  Description of Artificial Sequence: Synthetic oligonucleotide
uuugccaggcuggucccug

SEQ ID NO: 1243789 - RNA, 19 nt, Artificial Sequence
  Description of Artificial Sequence: Synthetic oligonucleotide
cagguuguagaccacagau

SEQ ID NO: 1243790 - RNA, 19 nt, Artificial Sequence
  Description of Artificial Sequence: Synthetic oligonucleotide
gucuucguccaaguagcag

SEQ ID NO: 1243791 - RNA, 19 nt, Artificial Sequence
  Description of Artificial Sequence: Synthetic oligonucleotide
uccguaccagaaagacuga

SEQ ID NO: 1243792 - RNA, 19 nt, Artificial Sequence
  Description of Artificial Sequence: Synthetic oligonucleotide
agggcaccgcuuucaagug

SEQ ID NO: 1243793 - RNA, 19 nt, Artificial Sequence
  Description of Artificial Sequence: Synthetic oligonucleotide
cacaacugugagguugccc

SEQ ID NO: 1243794 - RNA, 19 nt, Artificial Sequence
  Description of Artificial Sequence: Synthetic oligonucleotide
caggggccguccaaagccg

SEQ ID NO: 1243795 - RNA, 19 nt, Artificial Sequence
  Description of Artificial Sequence: Synthetic oligonucleotide
gaagagagaucguggcugu

SEQ ID NO: 1243796 - RNA, 19 nt, Artificial Sequence
  Description of Artificial Sequence: Synthetic oligonucleotide
gcccauccguaccagaaag

SEQ ID NO: 1243797 - RNA, 19 nt, Artificial Sequence
  Description of Artificial Sequence: Synthetic oligonucleotide
caacugugagguugcccag

SEQ ID NO: 1243798 - RNA, 19 nt, Artificial Sequence
  Description of Artificial Sequence: Synthetic oligonucleotide
aacucacaguugugguaaa

SEQ ID NO: 1243799 - RNA, 19 nt, Artificial Sequence
  Description of Artificial Sequence: Synthetic oligonucleotide
ggguuucuaacaguuugcc

SEQ ID NO: 1243800 - RNA, 19 nt, Artificial Sequence
  Description of Artificial Sequence: Synthetic oligonucleotide
ggacuugaagccucggaga

SEQ ID NO: 1243801 - RNA, 19 nt, Artificial Sequence
  Description of Artificial Sequence: Synthetic oligonucleotide
gccucguaagcccugguac

SEQ ID NO: 1243802 - RNA, 19 nt, Artificial Sequence
  Description of Artificial Sequence: Synthetic oligonucleotide
uggcagacauagcaccuuu

SEQ ID NO: 1243803 - RNA, 19 nt, Artificial Sequence
  Description of Artificial Sequence: Synthetic oligonucleotide
caccgcuuucaagugcugg

SEQ ID NO: 1243804 - RNA, 19 nt, Artificial Sequence
  Description of Artificial Sequence: Synthetic oligonucleotide
uggacggugagggcagaug

SEQ ID NO: 1243805 - RNA, 19 nt, Artificial Sequence
  Description of Artificial Sequence: Synthetic oligonucleotide
gaggccacgaacucacagu

SEQ ID NO: 1243806 - RNA, 19 nt, Artificial Sequence
  Description of Artificial Sequence: Synthetic oligonucleotide
ugcccggaacucuccagcu

SEQ ID NO: 1243807 - RNA, 19 nt, Artificial Sequence
  Description of Artificial Sequence: Synthetic oligonucleotide
ggcuugacaugcuggcucc

SEQ ID NO: 1243808 - RNA, 19 nt, Artificial Sequence
  Description of Artificial Sequence: Synthetic oligonucleotide
uccccggccuggcagacau

SEQ ID NO: 1243809 - RNA, 19 nt, Artificial Sequence
  Description of Artificial Sequence: Synthetic oligonucleotide
caguacguggacggugagg

SEQ ID NO: 1243810 - RNA, 19 nt, Artificial Sequence
  Description of Artificial Sequence: Synthetic oligonucleotide
caagaagacacagccaacu

SEQ ID NO: 1243811 - RNA, 19 nt, Artificial Sequence
  Description of Artificial Sequence: Synthetic oligonucleotide
caguugugguaaacaaaca

SEQ ID NO: 1243812 - RNA, 19 nt, Artificial Sequence
  Description of Artificial Sequence: Synthetic oligonucleotide
gacaucaaucauaaugauu

SEQ ID NO: 1243813 - RNA, 19 nt, Artificial Sequence
  Description of Artificial Sequence: Synthetic oligonucleotide
cuugacaugcuggcuccug

SEQ ID NO: 1243814 - RNA, 19 nt, Artificial Sequence
  Description of Artificial Sequence: Synthetic oligonucleotide
ccucguaagcccugguacc

SEQ ID NO: 1243815 - RNA, 19 nt, Artificial Sequence
  Description of Artificial Sequence: Synthetic oligonucleotide
cuaacaguuugcccagcaa

SEQ ID NO: 1243816 - RNA, 19 nt, Artificial Sequence
  Description of Artificial Sequence: Synthetic oligonucleotide
augccgagaguagcagggg

SEQ ID NO: 1243817 - RNA, 19 nt, Artificial Sequence
  Description of Artificial Sequence: Synthetic oligonucleotide
gagccgcccgauuauucuc

SEQ ID NO: 1243818 - RNA, 19 nt, Artificial Sequence
  Description of Artificial Sequence: Synthetic oligonucleotide
agauucaggcuagggcugu

SEQ ID NO: 1243819 - RNA, 19 nt, Artificial Sequence
  Description of Artificial Sequence: Synthetic oligonucleotide
agugguggggccaccccag

SEQ ID NO: 1243820 - RNA, 19 nt, Artificial Sequence
  Description of Artificial Sequence: Synthetic oligonucleotide
agguaccaaaggugaggcu

SEQ ID NO: 1243821 - RNA, 19 nt, Artificial Sequence
  Description of Artificial Sequence: Synthetic oligonucleotide
ccaacauguguaaugccga

SEQ ID NO: 1243822 - RNA, 19 nt, Artificial Sequence
  Description of Artificial Sequence: Synthetic oligonucleotide
ccauccguaccagaaagac

SEQ ID NO: 1243823 - RNA, 19 nt, Artificial Sequence
  Description of Artificial Sequence: Synthetic oligonucleotide
gagcacucuguugaacgga

SEQ ID NO: 1243824 - RNA, 19 nt, Artificial Sequence
  Description of Artificial Sequence: Synthetic oligonucleotide
ccugauuccucagacaaga

SEQ ID NO: 1243825 - RNA, 19 nt, Artificial Sequence
  Description of Artificial Sequence: Synthetic oligonucleotide
ggcaccacgggaaaucuuc

SEQ ID NO: 1243826 - RNA, 19 nt, Artificial Sequence
  Description of Artificial Sequence: Synthetic oligonucleotide
augauucauuugacaaaca

SEQ ID NO: 1243827 - RNA, 19 nt, Artificial Sequence
  Description of Artificial Sequence: Synthetic oligonucleotide
cgacggguagcccaggagg

SEQ ID NO: 1243828 - RNA, 19 nt, Artificial Sequence
  Description of Artificial Sequence: Synthetic oligonucleotide
gguaugguucaugcacucc

SEQ ID NO: 1243829 - RNA, 19 nt, Artificial Sequence
  Description of Artificial Sequence: Synthetic oligonucleotide
acaaccacucuggcucgag

SEQ ID NO: 1243830 - RNA, 19 nt, Artificial Sequence
  Description of Artificial Sequence: Synthetic oligonucleotide
uggcuguugggaugcugaa

SEQ ID NO: 1243831 - RNA, 19 nt, Artificial Sequence
  Description of Artificial Sequence: Synthetic oligonucleotide
ucggagacagguggcuacu

SEQ ID NO: 1243832 - RNA, 19 nt, Artificial Sequence
  Description of Artificial Sequence: Synthetic oligonucleotide
cagaggcgugagucagugg

SEQ ID NO: 1243833 - RNA, 19 nt, Artificial Sequence
  Description of Artificial Sequence: Synthetic oligonucleotide
uccacuuguugaggcuuga

SEQ ID NO: 1243834 - RNA, 19 nt, Artificial Sequence
  Description of Artificial Sequence: Synthetic oligonucleotide
cucauggccauugucagau

SEQ ID NO: 1243835 - RNA, 19 nt, Artificial Sequence
  Description of Artificial Sequence: Synthetic oligonucleotide
uucguccaaguagcagcgc

SEQ ID NO: 1243836 - RNA, 19 nt, Artificial Sequence
  Description of Artificial Sequence: Synthetic oligonucleotide
ggcugccacaaccacucug

SEQ ID NO: 1243837 - RNA, 19 nt, Artificial Sequence
  Description of Artificial Sequence: Synthetic oligonucleotide
agggugagugcgaugccca

SEQ ID NO: 1243838 - RNA, 19 nt, Artificial Sequence
  Description of Artificial Sequence: Synthetic oligonucleotide
ggccauggagguaccaaag

SEQ ID NO: 1243839 - RNA, 19 nt, Artificial Sequence
  Description of Artificial Sequence: Synthetic oligonucleotide
gccacgaacucacaguugu

SEQ ID NO: 1243840 - RNA, 19 nt, Artificial Sequence
  Description of Artificial Sequence: Synthetic oligonucleotide
agguuguagaccacagaua

SEQ ID NO: 1243841 - RNA, 19 nt, Artificial Sequence
  Description of Artificial Sequence: Synthetic oligonucleotide
gaugcggggcaugggccgc

SEQ ID NO: 1243842 - RNA, 19 nt, Artificial Sequence
  Description of Artificial Sequence: Synthetic oligonucleotide
guacguggacggugagggc

SEQ ID NO: 1243843 - RNA, 19 nt, Artificial Sequence
  Description of Artificial Sequence: Synthetic oligonucleotide
cauccguaccagaaagacu

SEQ ID NO: 1243844 - RNA, 19 nt, Artificial Sequence
  Description of Artificial Sequence: Synthetic oligonucleotide
guggugugguggugguggc

SEQ ID NO: 1243845 - RNA, 19 nt, Artificial Sequence
  Description of Artificial Sequence: Synthetic oligonucleotide
acguggacggugagggcag

SEQ ID NO: 1243846 - RNA, 19 nt, Artificial Sequence
  Description of Artificial Sequence: Synthetic oligonucleotide
gagagggcaccgcuuucaa

SEQ ID NO: 1243847 - RNA, 19 nt, Artificial Sequence
  Description of Artificial Sequence: Synthetic oligonucleotide
gcugaggugggugccaaac

SEQ ID NO: 1243848 - RNA, 19 nt, Artificial Sequence
  Description of Artificial Sequence: Synthetic oligonucleotide
gcuagccagguuguagacc

SEQ ID NO: 1243849 - RNA, 19 nt, Artificial Sequence
  Description of Artificial Sequence: Synthetic oligonucleotide
auccgagccgcccgauuau

SEQ ID NO: 1243850 - RNA, 19 nt, Artificial Sequence
  Description of Artificial Sequence: Synthetic oligonucleotide
uagccagguuguagaccac

SEQ ID NO: 1243851 - RNA, 19 nt, Artificial Sequence
  Description of Artificial Sequence: Synthetic oligonucleotide
gcuagggcuguucagguau

SEQ ID NO: 1243852 - RNA, 19 nt, Artificial Sequence
  Description of Artificial Sequence: Synthetic oligonucleotide
gaacugccugguacccacc

SEQ ID NO: 1243853 - RNA, 19 nt, Artificial Sequence
  Description of Artificial Sequence: Synthetic oligonucleotide
caaagccgugcacugugaa

SEQ ID NO: 1243854 - RNA, 19 nt, Artificial Sequence
  Description of Artificial Sequence: Synthetic oligonucleotide
gugcuagauccaaggguac

SEQ ID NO: 1243855 - RNA, 19 nt, Artificial Sequence
  Description of Artificial Sequence: Synthetic oligonucleotide
ucguaagcccugguaccuc

SEQ ID NO: 1243856 - RNA, 19 nt, Artificial Sequence
  Description of Artificial Sequence: Synthetic oligonucleotide
gccgagaguagcaggggcc

SEQ ID NO: 1243857 - RNA, 19 nt, Artificial Sequence
  Description of Artificial Sequence: Synthetic oligonucleotide
ugguacccacccaggccuc

SEQ ID NO: 1243858 - RNA, 19 nt, Artificial Sequence
  Description of Artificial Sequence: Synthetic oligonucleotide
ccgagaguagcaggggccg

SEQ ID NO: 1243859 - RNA, 19 nt, Artificial Sequence
  Description of Artificial Sequence: Synthetic oligonucleotide
agguugcccaguacgugga

SEQ ID NO: 1243860 - RNA, 19 nt, Artificial Sequence
  Description of Artificial Sequence: Synthetic oligonucleotide
guaagcccugguaccucug

SEQ ID NO: 1243861 - RNA, 19 nt, Artificial Sequence
  Description of Artificial Sequence: Synthetic oligonucleotide
gcccugguaccucuggcac

SEQ ID NO: 1243862 - RNA, 19 nt, Artificial Sequence
  Description of Artificial Sequence: Synthetic oligonucleotide
ucccgggcacucccagcca

SEQ ID NO: 1243863 - RNA, 19 nt, Artificial Sequence
  Description of Artificial Sequence: Synthetic oligonucleotide
aagagagaucguggcuguu

SEQ ID NO: 1243864 - RNA, 19 nt, Artificial Sequence
  Description of Artificial Sequence: Synthetic oligonucleotide
cccgauuauucucccucag

SEQ ID NO: 1243865 - RNA, 19 nt, Artificial Sequence
  Description of Artificial Sequence: Synthetic oligonucleotide
ugcccacguagcugagauc

SEQ ID NO: 1243866 - RNA, 19 nt, Artificial Sequence
  Description of Artificial Sequence: Synthetic oligonucleotide
ugccauccaguggcaggcc

SEQ ID NO: 1243867 - RNA, 19 nt, Artificial Sequence
  Description of Artificial Sequence: Synthetic oligonucleotide
cguaccagaaagacugaga

SEQ ID NO: 1243868 - RNA, 19 nt, Artificial Sequence
  Description of Artificial Sequence: Synthetic oligonucleotide
ccaaugugaacaguggugu

SEQ ID NO: 1243869 - RNA, 19 nt, Artificial Sequence
  Description of Artificial Sequence: Synthetic oligonucleotide
gugagguugcccaguacgu

SEQ ID NO: 1243870 - RNA, 19 nt, Artificial Sequence
  Description of Artificial Sequence: Synthetic oligonucleotide
ugagugcgaugcccacgua

SEQ ID NO: 1243871 - RNA, 19 nt, Artificial Sequence
  Description of Artificial Sequence: Synthetic oligonucleotide
ccaggucucuuugccaggc

SEQ ID NO: 1243872 - RNA, 19 nt, Artificial Sequence
  Description of Artificial Sequence: Synthetic oligonucleotide
cucgagcaggcugcccaag

SEQ ID NO: 1243873 - RNA, 19 nt, Artificial Sequence
  Description of Artificial Sequence: Synthetic oligonucleotide
uuggggcggccaugcuccc

SEQ ID NO: 1243874 - RNA, 19 nt, Artificial Sequence
  Description of Artificial Sequence: Synthetic oligonucleotide
cauguguaaugccgagagu

SEQ ID NO: 1243875 - RNA, 19 nt, Artificial Sequence
  Description of Artificial Sequence: Synthetic oligonucleotide
gcgcagacaagcccaaugu

SEQ ID NO: 1243876 - RNA, 19 nt, Artificial Sequence
  Description of Artificial Sequence: Synthetic oligonucleotide
ugcggggcaugggccgccg

SEQ ID NO: 1243877 - RNA, 19 nt, Artificial Sequence
  Description of Artificial Sequence: Synthetic oligonucleotide
ccguaccagaaagacugag

SEQ ID NO: 1243878 - RNA, 19 nt, Artificial Sequence
  Description of Artificial Sequence: Synthetic oligonucleotide
guagcaagccagggcagcu

SEQ ID NO: 1243879 - RNA, 19 nt, Artificial Sequence
  Description of Artificial Sequence: Synthetic oligonucleotide
cccaguacguggacgguga

SEQ ID NO: 1243880 - RNA, 19 nt, Artificial Sequence
  Description of Artificial Sequence: Synthetic oligonucleotide
ggcagcggcccauccguac

SEQ ID NO: 1243881 - RNA, 19 nt, Artificial Sequence
  Description of Artificial Sequence: Synthetic oligonucleotide
gcccgauuauucucccuca

SEQ ID NO: 1243882 - RNA, 19 nt, Artificial Sequence
  Description of Artificial Sequence: Synthetic oligonucleotide
cuggauccgagccgcccga

SEQ ID NO: 1243883 - RNA, 19 nt, Artificial Sequence
  Description of Artificial Sequence: Synthetic oligonucleotide
ggaugagguugcccacaac

SEQ ID NO: 1243884 - RNA, 19 nt, Artificial Sequence
  Description of Artificial Sequence: Synthetic oligonucleotide
cucguaagcccugguaccu

SEQ ID NO: 1243885 - RNA, 19 nt, Artificial Sequence
  Description of Artificial Sequence: Synthetic oligonucleotide
gcagagcacucuguugaac

SEQ ID NO: 1243886 - RNA, 19 nt, Artificial Sequence
  Description of Artificial Sequence: Synthetic oligonucleotide
ccacgaacucacaguugug

SEQ ID NO: 1243887 - RNA, 19 nt, Artificial Sequence
  Description of Artificial Sequence: Synthetic oligonucleotide
gguugcccaguacguggac

SEQ ID NO: 1243888 - RNA, 19 nt, Artificial Sequence
  Description of Artificial Sequence: Synthetic oligonucleotide
aggccucguaagcccuggu

SEQ ID NO: 1243889 - RNA, 19 nt, Artificial Sequence
  Description of Artificial Sequence: Synthetic oligonucleotide
gggcuguucagguaugguu

SEQ ID NO: 1243890 - RNA, 19 nt, Artificial Sequence
  Description of Artificial Sequence: Synthetic oligonucleotide
gggugagugcgaugcccac

SEQ ID NO: 1243891 - RNA, 19 nt, Artificial Sequence
  Description of Artificial Sequence: Synthetic oligonucleotide
agguggcuacuagcaagaa

SEQ ID NO: 1243892 - RNA, 19 nt, Artificial Sequence
  Description of Artificial Sequence: Synthetic oligonucleotide
ggcagacauagcaccuuuc

SEQ ID NO: 1243893 - RNA, 19 nt, Artificial Sequence
  Description of Artificial Sequence: Synthetic oligonucleotide
gcccaguacguggacggug

SEQ ID NO: 1243894 - RNA, 19 nt, Artificial Sequence
  Description of Artificial Sequence: Synthetic oligonucleotide
ccgacggguagcccaggag

SEQ ID NO: 1243895 - RNA, 19 nt, Artificial Sequence
  Description of Artificial Sequence: Synthetic oligonucleotide
ccauugucagauucaggcu

SEQ ID NO: 1243896 - RNA, 19 nt, Artificial Sequence
  Description of Artificial Sequence: Synthetic oligonucleotide
ccagguuguagaccacaga

SEQ ID NO: 1243897 - RNA, 19 nt, Artificial Sequence
  Description of Artificial Sequence: Synthetic oligonucleotide
gccgcccgauuauucuccc

SEQ ID NO: 1243898 - RNA, 19 nt, Artificial Sequence
  Description of Artificial Sequence: Synthetic oligonucleotide
ggcaccgcuuucaagugcu

SEQ ID NO: 1243899 - RNA, 19 nt, Artificial Sequence
  Description of Artificial Sequence: Synthetic oligonucleotide
cugaaagggugagugcgau

SEQ ID NO: 1243900 - RNA, 19 nt, Artificial Sequence
  Description of Artificial Sequence: Synthetic oligonucleotide
ggcccauccguaccagaaa

SEQ ID NO: 1243901 - RNA, 19 nt, Artificial Sequence
  Description of Artificial Sequence: Synthetic oligonucleotide
cccagcaauucucaucaua

SEQ ID NO: 1243902 - RNA, 19 nt, Artificial Sequence
  Description of Artificial Sequence: Synthetic oligonucleotide
cccauccguaccagaaaga

SEQ ID NO: 1243903 - RNA, 19 nt, Artificial Sequence
  Description of Artificial Sequence: Synthetic oligonucleotide
gccaguugugcuagaucca

SEQ ID NO: 1243904 - RNA, 19 nt, Artificial Sequence
  Description of Artificial Sequence: Synthetic oligonucleotide
ggccucguaagcccuggua

SEQ ID NO: 1243905 - RNA, 19 nt, Artificial Sequence
  Description of Artificial Sequence: Synthetic oligonucleotide
aggggccguccaaagccgu

SEQ ID NO: 1243906 - RNA, 19 nt, Artificial Sequence
  Description of Artificial Sequence: Synthetic oligonucleotide
uuccccggccuggcagaca

SEQ ID NO: 1243907 - RNA, 19 nt, Artificial Sequence
  Description of Artificial Sequence: Synthetic oligonucleotide
aggagcuagccagguugua

SEQ ID NO: 1243908 - RNA, 19 nt, Artificial Sequence
  Description of Artificial Sequence: Synthetic oligonucleotide
agggacggggugggucucu

SEQ ID NO: 1243909 - RNA, 19 nt, Artificial Sequence
  Description of Artificial Sequence: Synthetic oligonucleotide
gccguccaaagccgugcac

SEQ ID NO: 1243910 - RNA, 19 nt, Artificial Sequence
  Description of Artificial Sequence: Synthetic oligonucleotide
gcaccacgggaaaucuuca

SEQ ID NO: 1243911 - RNA, 19 nt, Artificial Sequence
  Description of Artificial Sequence: Synthetic oligonucleotide
cgaacucacaguuguggua

SEQ ID NO: 1243912 - RNA, 19 nt, Artificial Sequence
  Description of Artificial Sequence: Synthetic oligonucleotide
ccuaacacauugaggguuu

SEQ ID NO: 1243913 - RNA, 19 nt, Artificial Sequence
  Description of Artificial Sequence: Synthetic oligonucleotide
caagcccaaugugaacagu

SEQ ID NO: 1243914 - RNA, 19 nt, Artificial Sequence
  Description of Artificial Sequence: Synthetic oligonucleotide
ggcagagagguggcauaca

SEQ ID NO: 1243915 - RNA, 19 nt, Artificial Sequence
  Description of Artificial Sequence: Synthetic oligonucleotide
ggcuagggcuguucaggua

SEQ ID NO: 1243916 - RNA, 19 nt, Artificial Sequence
  Description of Artificial Sequence: Synthetic oligonucleotide
aggccacuuggggcggcca

SEQ ID NO: 1243917 - RNA, 19 nt, Artificial Sequence
  Description of Artificial Sequence: Synthetic oligonucleotide
gcccacguugccgcaggcc

SEQ ID NO: 1243918 - RNA, 19 nt, Artificial Sequence
  Description of Artificial Sequence: Synthetic oligonucleotide
cacaaccacucuggcucga

SEQ ID NO: 1243919 - RNA, 19 nt, Artificial Sequence
  Description of Artificial Sequence: Synthetic oligonucleotide
ggggccguccaaagccgug

SEQ ID NO: 1243920 - RNA, 19 nt, Artificial Sequence
  Description of Artificial Sequence: Synthetic oligonucleotide
ggggugcccggaacucucc

SEQ ID NO: 1243921 - RNA, 19 nt, Artificial Sequence
  Description of Artificial Sequence: Synthetic oligonucleotide
guggccaguugugcuagau

SEQ ID NO: 1243922 - RNA, 19 nt, Artificial Sequence
  Description of Artificial Sequence: Synthetic oligonucleotide
gcuaggcugcaugcagcuc

SEQ ID NO: 1243923 - RNA, 19 nt, Artificial Sequence
  Description of Artificial Sequence: Synthetic oligonucleotide
gccauccaguggcaggccu

SEQ ID NO: 1243924 - RNA, 19 nt, Artificial Sequence
  Description of Artificial Sequence: Synthetic oligonucleotide
caggucucuuugccaggcu

SEQ ID NO: 1243925 - RNA, 19 nt, Artificial Sequence
  Description of Artificial Sequence: Synthetic oligonucleotide
gcaccgcuuucaagugcug

SEQ ID NO: 1243926 - RNA, 19 nt, Artificial Sequence
  Description of Artificial Sequence: Synthetic oligonucleotide
gcggggcaugggccgccgg

SEQ ID NO: 1243927 - RNA, 19 nt, Artificial Sequence
  Description of Artificial Sequence: Synthetic oligonucleotide
caccuccuuuccccggccu

SEQ ID NO: 1243928 - RNA, 19 nt, Artificial Sequence
  Description of Artificial Sequence: Synthetic oligonucleotide
gcagcgcagacaagcccaa

SEQ ID NO: 1243929 - RNA, 19 nt, Artificial Sequence
  Description of Artificial Sequence: Synthetic oligonucleotide
cguaagcccugguaccucu

SEQ ID NO: 1243930 - RNA, 19 nt, Artificial Sequence
  Description of Artificial Sequence: Synthetic oligonucleotide
ccacguagcugagaucgcu

SEQ ID NO: 1243931 - RNA, 19 nt, Artificial Sequence
  Description of Artificial Sequence: Synthetic oligonucleotide
gggacggggugggucucuc

SEQ ID NO: 1243932 - RNA, 19 nt, Artificial Sequence
  Description of Artificial Sequence: Synthetic oligonucleotide
gccucggagacagguggcu

SEQ ID NO: 1243933 - RNA, 19 nt, Artificial Sequence
  Description of Artificial Sequence: Synthetic oligonucleotide
cccgacggguagcccagga

SEQ ID NO: 1243934 - RNA, 19 nt, Artificial Sequence
  Description of Artificial Sequence: Synthetic oligonucleotide
gguugucaggaggccacuu

SEQ ID NO: 1243935 - RNA, 19 nt, Artificial Sequence
  Description of Artificial Sequence: Synthetic oligonucleotide
ggacggggugggucucucu

SEQ ID NO: 1243936 - RNA, 19 nt, Artificial Sequence
  Description of Artificial Sequence: Synthetic oligonucleotide
ccucggagacagguggcua

SEQ ID NO: 1243937 - RNA, 19 nt, Artificial Sequence
  Description of Artificial Sequence: Synthetic oligonucleotide
cugcuucggcugaggucau

SEQ ID NO: 1243938 - RNA, 19 nt, Artificial Sequence
  Description of Artificial Sequence: Synthetic oligonucleotide
ccgcuuucaagugcuggau

SEQ ID NO: 1243939 - RNA, 19 nt, Artificial Sequence
  Description of Artificial Sequence: Synthetic oligonucleotide
gggcugccacaaccacucu

SEQ ID NO: 1243940 - RNA, 19 nt, Artificial Sequence
  Description of Artificial Sequence: Synthetic oligonucleotide
cguugccgcaggccaugga

SEQ ID NO: 1243941 - RNA, 19 nt, Artificial Sequence
  Description of Artificial Sequence: Synthetic oligonucleotide
cagcgcagacaagcccaau

SEQ ID NO: 1243942 - RNA, 19 nt, Artificial Sequence
  Description of Artificial Sequence: Synthetic oligonucleotide
ccgcccgauuauucucccu

SEQ ID NO: 1243943 - RNA, 19 nt, Artificial Sequence
  Description of Artificial Sequence: Synthetic oligonucleotide
cguggacggugagggcaga

SEQ ID NO: 1243944 - RNA, 19 nt, Artificial Sequence
  Description of Artificial Sequence: Synthetic oligonucleotide
ucuacaauaauuuuaaacc

SEQ ID NO: 1243945 - RNA, 19 nt, Artificial Sequence
  Description of Artificial Sequence: Synthetic oligonucleotide
auagcaauagcuuuuaauc

SEQ ID NO: 1243946 - RNA, 19 nt, Artificial Sequence
  Description of Artificial Sequence: Synthetic oligonucleotide
gauaccaucagauugggcc

SEQ ID NO: 1243947 - RNA, 19 nt, Artificial Sequence
  Description of Artificial Sequence: Synthetic oligonucleotide
uuaaagcacaaaaucaacg

SEQ ID NO: 1243948 - RNA, 19 nt, Artificial Sequence
  Description of Artificial Sequence: Synthetic oligonucleotide
acaagaagacacuaaaagc

SEQ ID NO: 1243949 - RNA, 19 nt, Artificial Sequence
  Description of Artificial Sequence: Synthetic oligonucleotide
aaaugguuuaaguuauccc

SEQ ID NO: 1243950 - RNA, 19 nt, Artificial Sequence
  Description of Artificial Sequence: Synthetic oligonucleotide
aaugguuuaaguuauccca

SEQ ID NO: 1243951 - RNA, 19 nt, Artificial Sequence
  Description of Artificial Sequence: Synthetic oligonucleotide
uucaguauuaaacaagaag

SEQ ID NO: 1243952 - RNA, 19 nt, Artificial Sequence
  Description of Artificial Sequence: Synthetic oligonucleotide
aaaucugugggccaagcac

SEQ ID NO: 1243953 - RNA, 19 nt, Artificial Sequence
  Description of Artificial Sequence: Synthetic oligonucleotide
aucuccuuauaauauaugc

SEQ ID NO: 1243954 - RNA, 19 nt, Artificial Sequence
  Description of Artificial Sequence: Synthetic oligonucleotide
uauaauauaugccuauuca

SEQ ID NO: 1243955 - RNA, 19 nt, Artificial Sequence
  Description of Artificial Sequence: Synthetic oligonucleotide
aaauuauucauuacacagc

SEQ ID NO: 1243956 - RNA, 19 nt, Artificial Sequence
  Description of Artificial Sequence: Synthetic oligonucleotide
auuaauauuugaucuguac

SEQ ID NO: 1243957 - RNA, 19 nt, Artificial Sequence
  Description of Artificial Sequence: Synthetic oligonucleotide
ugaacuuuuacuuaccaca

SEQ ID NO: 1243958 - RNA, 19 nt, Artificial Sequence
  Description of Artificial Sequence: Synthetic oligonucleotide
gaaucaacaacccaugacc

SEQ ID NO: 1243959 - RNA, 19 nt, Artificial Sequence
  Description of Artificial Sequence: Synthetic oligonucleotide
ugcuauaauuauuuuaagg

SEQ ID NO: 1243960 - RNA, 19 nt, Artificial Sequence
  Description of Artificial Sequence: Synthetic oligonucleotide
aguuaauuuaacuucacca

SEQ ID NO: 1243961 - RNA, 19 nt, Artificial Sequence
  Description of Artificial Sequence: Synthetic oligonucleotide
uuuuacuuaccacaaagca

SEQ ID NO: 1243962 - RNA, 19 nt, Artificial Sequence
  Description of Artificial Sequence: Synthetic oligonucleotide
uauuuuaaggacuagggaa

SEQ ID NO: 1243963 - RNA, 19 nt, Artificial Sequence
  Description of Artificial Sequence: Synthetic oligonucleotide
uuaaguaguaaaacaaucu

SEQ ID NO: 1243964 - RNA, 19 nt, Artificial Sequence
  Description of Artificial Sequence: Synthetic oligonucleotide
aaaaucuucaauucauaca

SEQ ID NO: 1243965 - RNA, 19 nt, Artificial Sequence
  Description of Artificial Sequence: Synthetic oligonucleotide
uauuggugaaacaaccugg

SEQ ID NO: 1243966 - RNA, 19 nt, Artificial Sequence
  Description of Artificial Sequence: Synthetic oligonucleotide
uguuagauaaugcauuuca

SEQ ID NO: 1243967 - RNA, 19 nt, Artificial Sequence
  Description of Artificial Sequence: Synthetic oligonucleotide
aauggaugacuacagcaac

SEQ ID NO: 1243968 - RNA, 19 nt, Artificial Sequence
  Description of Artificial Sequence: Synthetic oligonucleotide
ucuuagaaugguuaaagca

SEQ ID NO: 1243969 - RNA, 19 nt, Artificial Sequence
  Description of Artificial Sequence: Synthetic oligonucleotide
uuuaauccuaaccaguuac

SEQ ID NO: 1243970 - RNA, 19 nt, Artificial Sequence
  Description of Artificial Sequence: Synthetic oligonucleotide
cuuagaaugguuaaagcac

SEQ ID NO: 1243971 - RNA, 19 nt, Artificial Sequence
  Description of Artificial Sequence: Synthetic oligonucleotide
aacuauuggugaaacaacc

SEQ ID NO: 1243972 - RNA, 19 nt, Artificial Sequence
  Description of Artificial Sequence: Synthetic oligonucleotide
aauucagcuuuuaagcgcc

SEQ ID NO: 1243973 - RNA, 19 nt, Artificial Sequence
  Description of Artificial Sequence: Synthetic oligonucleotide
uaauuuuaaaccacggagu

SEQ ID NO: 1243974 - RNA, 19 nt, Artificial Sequence
  Description of Artificial Sequence: Synthetic oligonucleotide
aauuuaacuucaccacugg

SEQ ID NO: 1243975 - RNA, 19 nt, Artificial Sequence
  Description of Artificial Sequence: Synthetic oligonucleotide
agcauuuaagucuaaagcu

SEQ ID NO: 1243976 - RNA, 19 nt, Artificial Sequence
  Description of Artificial Sequence: Synthetic oligonucleotide
ugccuauucauuaaaauuc

SEQ ID NO: 1243977 - RNA, 19 nt, Artificial Sequence
  Description of Artificial Sequence: Synthetic oligonucleotide
aucuucaauucauacacac

SEQ ID NO: 1243978 - RNA, 19 nt, Artificial Sequence
  Description of Artificial Sequence: Synthetic oligonucleotide
ugccuaaucuauaacauca

SEQ ID NO: 1243979 - RNA, 19 nt, Artificial Sequence
  Description of Artificial Sequence: Synthetic oligonucleotide
uuacacagcauuuaagucu

SEQ ID NO: 1243980 - RNA, 19 nt, Artificial Sequence
  Description of Artificial Sequence: Synthetic oligonucleotide
aucaugguaccacugagcg

SEQ ID NO: 1243981 - RNA, 19 nt, Artificial Sequence
  Description of Artificial Sequence: Synthetic oligonucleotide
ucgaagauaaauaaauaaa

SEQ ID NO: 1243982 - RNA, 19 nt, Artificial Sequence
  Description of Artificial Sequence: Synthetic oligonucleotide
aauaaucauuuauguuagc

SEQ ID NO: 1243983 - RNA, 19 nt, Artificial Sequence
  Description of Artificial Sequence: Synthetic oligonucleotide
uucauuuggaucaaccucu

SEQ ID NO: 1243984 - RNA, 19 nt, Artificial Sequence
  Description of Artificial Sequence: Synthetic oligonucleotide
uuaauuuaacuucaccacu

SEQ ID NO: 1243985 - RNA, 19 nt, Artificial Sequence
  Description of Artificial Sequence: Synthetic oligonucleotide
uuugauacauagcaauagc

SEQ ID NO: 1243986 - RNA, 19 nt, Artificial Sequence
  Description of Artificial Sequence: Synthetic oligonucleotide
aauuagcauauagaacugc

SEQ ID NO: 1243987 - RNA, 19 nt, Artificial Sequence
  Description of Artificial Sequence: Synthetic oligonucleotide
uuauuuauuucaggcaucg

SEQ ID NO: 1243988 - RNA, 19 nt, Artificial Sequence
  Description of Artificial Sequence: Synthetic oligonucleotide
guaaauucguguuagauaa

SEQ ID NO: 1243989 - RNA, 19 nt, Artificial Sequence
  Description of Artificial Sequence: Synthetic oligonucleotide
aguaguaaaacaaucuuag

SEQ ID NO: 1243990 - RNA, 19 nt, Artificial Sequence
  Description of Artificial Sequence: Synthetic oligonucleotide
ugaucuguacugaauauga

SEQ ID NO: 1243991 - RNA, 19 nt, Artificial Sequence
  Description of Artificial Sequence: Synthetic oligonucleotide
cugguuauuuauuucaggc

SEQ ID NO: 1243992 - RNA, 19 nt, Artificial Sequence
  Description of Artificial Sequence: Synthetic oligonucleotide
uuauuuuaaggacuaggga

SEQ ID NO: 1243993 - RNA, 19 nt, Artificial Sequence
  Description of Artificial Sequence: Synthetic oligonucleotide
uguucaucgagauggcugg

SEQ ID NO: 1243994 - RNA, 19 nt, Artificial Sequence
  Description of Artificial Sequence: Synthetic oligonucleotide
agcaauagcuuuuaaucuc

SEQ ID NO: 1243995 - RNA, 19 nt, Artificial Sequence
  Description of Artificial Sequence: Synthetic oligonucleotide
uguaguaaauucguguuag

SEQ ID NO: 1243996 - RNA, 19 nt, Artificial Sequence
  Description of Artificial Sequence: Synthetic oligonucleotide
auuaaguaguaaaacaauc

SEQ ID NO: 1243997 - RNA, 19 nt, Artificial Sequence
  Description of Artificial Sequence: Synthetic oligonucleotide
auucuaacuagguagaaaa

SEQ ID NO: 1243998 - RNA, 19 nt, Artificial Sequence
  Description of Artificial Sequence: Synthetic oligonucleotide
ugcauauuaauauuugauc

SEQ ID NO: 1243999 - RNA, 19 nt, Artificial Sequence
  Description of Artificial Sequence: Synthetic oligonucleotide
aucuuagaaugguuaaagc

SEQ ID NO: 1244000 - RNA, 19 nt, Artificial Sequence
  Description of Artificial Sequence: Synthetic oligonucleotide
aauucguguuagauaaugc

SEQ ID NO: 1244001 - RNA, 19 nt, Artificial Sequence
  Description of Artificial Sequence: Synthetic oligonucleotide
uuagaaugguuaaagcaca

SEQ ID NO: 1244002 - RNA, 19 nt, Artificial Sequence
  Description of Artificial Sequence: Synthetic oligonucleotide
auaguuguaucuucgaaga

SEQ ID NO: 1244003 - RNA, 19 nt, Artificial Sequence
  Description of Artificial Sequence: Synthetic oligonucleotide
auaugccuaaucuauaaca

SEQ ID NO: 1244004 - RNA, 19 nt, Artificial Sequence
  Description of Artificial Sequence: Synthetic oligonucleotide
auuagcauauagaacugcc

SEQ ID NO: 1244005 - RNA, 19 nt, Artificial Sequence
  Description of Artificial Sequence: Synthetic oligonucleotide
uugauacauagcaauagcu

SEQ ID NO: 1244006 - RNA, 19 nt, Artificial Sequence
  Description of Artificial Sequence: Synthetic oligonucleotide
uuucucguggucaacaaac

SEQ ID NO: 1244007 - RNA, 19 nt, Artificial Sequence
  Description of Artificial Sequence: Synthetic oligonucleotide
gcuauaauuauuuuaagga

SEQ ID NO: 1244008 - RNA, 19 nt, Artificial Sequence
  Description of Artificial Sequence: Synthetic oligonucleotide
ucaauguuuucauucaggu

SEQ ID NO: 1244009 - RNA, 19 nt, Artificial Sequence
  Description of Artificial Sequence: Synthetic oligonucleotide
auacuugcuacauaguugu

SEQ ID NO: 1244010 - RNA, 19 nt, Artificial Sequence
  Description of Artificial Sequence: Synthetic oligonucleotide
caauaauuuuaaaccacgg

SEQ ID NO: 1244011 - RNA, 19 nt, Artificial Sequence
  Description of Artificial Sequence: Synthetic oligonucleotide
aaaagcucgauguaauaau

SEQ ID NO: 1244012 - RNA, 19 nt, Artificial Sequence
  Description of Artificial Sequence: Synthetic oligonucleotide
aauacuugcuacauaguug

SEQ ID NO: 1244013 - RNA, 19 nt, Artificial Sequence
  Description of Artificial Sequence: Synthetic oligonucleotide
gagagagagagagagagag

SEQ ID NO: 1244014 - RNA, 19 nt, Artificial Sequence
  Description of Artificial Sequence: Synthetic oligonucleotide
ucaguggagagagagagag

SEQ ID NO: 1244015 - RNA, 19 nt, Artificial Sequence
  Description of Artificial Sequence: Synthetic oligonucleotide
aaggcaaucaugguaccac

SEQ ID NO: 1244016 - RNA, 19 nt, Artificial Sequence
  Description of Artificial Sequence: Synthetic oligonucleotide
acaauaauuuuaaaccacg

SEQ ID NO: 1244017 - RNA, 19 nt, Artificial Sequence
  Description of Artificial Sequence: Synthetic oligonucleotide
acaacccaugaccucaugc

SEQ ID NO: 1244018 - RNA, 19 nt, Artificial Sequence
  Description of Artificial Sequence: Synthetic oligonucleotide
uuuuaagcgccucugugca

SEQ ID NO: 1244019 - RNA, 19 nt, Artificial Sequence
  Description of Artificial Sequence: Synthetic oligonucleotide
auaccuauguaucauacaa

SEQ ID NO: 1244020 - RNA, 19 nt, Artificial Sequence
  Description of Artificial Sequence: Synthetic oligonucleotide
uggagagagagagagagag

SEQ ID NO: 1244021 - RNA, 19 nt, Artificial Sequence
  Description of Artificial Sequence: Synthetic oligonucleotide
gagagagagagagagagcc

SEQ ID NO: 1244022 - RNA, 19 nt, Artificial Sequence
  Description of Artificial Sequence: Synthetic oligonucleotide
guuccuuuaauccuaacca

SEQ ID NO: 1244023 - RNA, 19 nt, Artificial Sequence
  Description of Artificial Sequence: Synthetic oligonucleotide
auuucaggcaucgugacag

SEQ ID NO: 1244024 - RNA, 19 nt, Artificial Sequence
  Description of Artificial Sequence: Synthetic oligonucleotide
uuagcauauagaacugccc

SEQ ID NO: 1244025 - RNA, 19 nt, Artificial Sequence
  Description of Artificial Sequence: Synthetic oligonucleotide
gacacuaaaagcucgaugu

SEQ ID NO: 1244026 - RNA, 19 nt, Artificial Sequence
  Description of Artificial Sequence: Synthetic oligonucleotide
uugaaccuguuguucaucg

SEQ ID NO: 1244027 - RNA, 19 nt, Artificial Sequence
  Description of Artificial Sequence: Synthetic oligonucleotide
ugaccucaugccuacaagg

SEQ ID NO: 1244028 - RNA, 19 nt, Artificial Sequence
  Description of Artificial Sequence: Synthetic oligonucleotide
aguggagagagagagagag

SEQ ID NO: 1244029 - RNA, 19 nt, Artificial Sequence
  Description of Artificial Sequence: Synthetic oligonucleotide
aucagauugggccuuguag

SEQ ID NO: 1244030 - RNA, 19 nt, Artificial Sequence
  Description of Artificial Sequence: Synthetic oligonucleotide
augaacuuuuacuuaccac

SEQ ID NO: 1244031 - RNA, 19 nt, Artificial Sequence
  Description of Artificial Sequence: Synthetic oligonucleotide
uuaacuguuauugcuauaa

SEQ ID NO: 1244032 - RNA, 19 nt, Artificial Sequence
  Description of Artificial Sequence: Synthetic oligonucleotide
aagcucgauguaauaaucc

SEQ ID NO: 1244033 - RNA, 19 nt, Artificial Sequence
  Description of Artificial Sequence: Synthetic oligonucleotide
uggugaaacaaccuggaaa

SEQ ID NO: 1244034 - RNA, 19 nt, Artificial Sequence
  Description of Artificial Sequence: Synthetic oligonucleotide
ucuauuacugcuguuuuga

SEQ ID NO: 1244035 - RNA, 19 nt, Artificial Sequence
  Description of Artificial Sequence: Synthetic oligonucleotide
uuuagcaucugaucucugc

SEQ ID NO: 1244036 - RNA, 19 nt, Artificial Sequence
  Description of Artificial Sequence: Synthetic oligonucleotide
uaucuucgaagauaaauaa

SEQ ID NO: 1244037 - RNA, 19 nt, Artificial Sequence
  Description of Artificial Sequence: Synthetic oligonucleotide
acucaaaugguuuaaguua

SEQ ID NO: 1244038 - RNA, 19 nt, Artificial Sequence
  Description of Artificial Sequence: Synthetic oligonucleotide
uacaagggagcacaguuca

SEQ ID NO: 1244039 - RNA, 19 nt, Artificial Sequence
  Description of Artificial Sequence: Synthetic oligonucleotide
uaugccuaaucuauaacau

SEQ ID NO: 1244040 - RNA, 19 nt, Artificial Sequence
  Description of Artificial Sequence: Synthetic oligonucleotide
uaaaccacggaguuaauuu

SEQ ID NO: 1244041 - RNA, 19 nt, Artificial Sequence
  Description of Artificial Sequence: Synthetic oligonucleotide
ucagauugggccuuguagu

SEQ ID NO: 1244042 - RNA, 19 nt, Artificial Sequence
  Description of Artificial Sequence: Synthetic oligonucleotide
uuuaaguuaucccaccauu

SEQ ID NO: 1244043 - RNA, 19 nt, Artificial Sequence
  Description of Artificial Sequence: Synthetic oligonucleotide
aaagcucgauguaauaauc

SEQ ID NO: 1244044 - RNA, 19 nt, Artificial Sequence
  Description of Artificial Sequence: Synthetic oligonucleotide
gaaccuguuguucaucgag

SEQ ID NO: 1244045 - RNA, 19 nt, Artificial Sequence
  Description of Artificial Sequence: Synthetic oligonucleotide
uaguccguuccuuuaaucc

SEQ ID NO: 1244046 - RNA, 19 nt, Artificial Sequence
  Description of Artificial Sequence: Synthetic oligonucleotide
gacuagggaaucaacaacc

SEQ ID NO: 1244047 - RNA, 19 nt, Artificial Sequence
  Description of Artificial Sequence: Synthetic oligonucleotide
uaaacuuuugaguuaucaa

SEQ ID NO: 1244048 - RNA, 19 nt, Artificial Sequence
  Description of Artificial Sequence: Synthetic oligonucleotide
ugauacauagcaauagcuu

SEQ ID NO: 1244049 - RNA, 19 nt, Artificial Sequence
  Description of Artificial Sequence: Synthetic oligonucleotide
aacuguuauugcuauaauu

SEQ ID NO: 1244050 - RNA, 19 nt, Artificial Sequence
  Description of Artificial Sequence: Synthetic oligonucleotide
ucaagacacaaucucaaua

SEQ ID NO: 1244051 - RNA, 19 nt, Artificial Sequence
  Description of Artificial Sequence: Synthetic oligonucleotide
uuauguuagcauuuacacu

SEQ ID NO: 1244052 - RNA, 19 nt, Artificial Sequence
  Description of Artificial Sequence: Synthetic oligonucleotide
ugucuuaagaucucaaauu

SEQ ID NO: 1244053 - RNA, 19 nt, Artificial Sequence
  Description of Artificial Sequence: Synthetic oligonucleotide
uagcaauagcuuuuaaucu

SEQ ID NO: 1244054 - RNA, 19 nt, Artificial Sequence
  Description of Artificial Sequence: Synthetic oligonucleotide
cuacaauaauuuuaaacca

SEQ ID NO: 1244055 - RNA, 19 nt, Artificial Sequence
  Description of Artificial Sequence: Synthetic oligonucleotide
guaauuuuagcaucugauc

SEQ ID NO: 1244056 - RNA, 19 nt, Artificial Sequence
  Description of Artificial Sequence: Synthetic oligonucleotide
aguauuaaacaagaagaca

SEQ ID NO: 1244057 - RNA, 19 nt, Artificial Sequence
  Description of Artificial Sequence: Synthetic oligonucleotide
uucucaaacgaauucuggu

SEQ ID NO: 1244058 - RNA, 19 nt, Artificial Sequence
  Description of Artificial Sequence: Synthetic oligonucleotide
uguaucauacaagggagca

SEQ ID NO: 1244059 - RNA, 19 nt, Artificial Sequence
  Description of Artificial Sequence: Synthetic oligonucleotide
ugguuauuuauuucaggca

SEQ ID NO: 1244060 - RNA, 19 nt, Artificial Sequence
  Description of Artificial Sequence: Synthetic oligonucleotide
aguaaauucguguuagaua

SEQ ID NO: 1244061 - RNA, 19 nt, Artificial Sequence
  Description of Artificial Sequence: Synthetic oligonucleotide
uuagcaucugaucucugcu

SEQ ID NO: 1244062 - RNA, 19 nt, Artificial Sequence
  Description of Artificial Sequence: Synthetic oligonucleotide
ucaauuucauguucacccc

SEQ ID NO: 1244063 - RNA, 19 nt, Artificial Sequence
  Description of Artificial Sequence: Synthetic oligonucleotide
guggucaacaaacugacuc

SEQ ID NO: 1244064 - RNA, 19 nt, Artificial Sequence
  Description of Artificial Sequence: Synthetic oligonucleotide
aacgaauucugguuguaaa

SEQ ID NO: 1244065 - RNA, 19 nt, Artificial Sequence
  Description of Artificial Sequence: Synthetic oligonucleotide
uucguguuagauaaugcau

SEQ ID NO: 1244066 - RNA, 19 nt, Artificial Sequence
  Description of Artificial Sequence: Synthetic oligonucleotide
agcacccaaagguucaaac

SEQ ID NO: 1244067 - RNA, 19 nt, Artificial Sequence
  Description of Artificial Sequence: Synthetic oligonucleotide
gacacaaucucaauauaug

SEQ ID NO: 1244068 - RNA, 19 nt, Artificial Sequence
  Description of Artificial Sequence: Synthetic oligonucleotide
ggaucaaccucuucuaagg

SEQ ID NO: 1244069 - RNA, 19 nt, Artificial Sequence
  Description of Artificial Sequence: Synthetic oligonucleotide
aaggguauucccaauucag

SEQ ID NO: 1244070 - RNA, 19 nt, Artificial Sequence
  Description of Artificial Sequence: Synthetic oligonucleotide
auuugaucuguacugaaua

SEQ ID NO: 1244071 - RNA, 19 nt, Artificial Sequence
  Description of Artificial Sequence: Synthetic oligonucleotide
uggaucaaccucuucuaag

SEQ ID NO: 1244072 - RNA, 19 nt, Artificial Sequence
  Description of Artificial Sequence: Synthetic oligonucleotide
acuacagcaacuauuggug

SEQ ID NO: 1244073 - RNA, 19 nt, Artificial Sequence
  Description of Artificial Sequence: Synthetic oligonucleotide
ucaacaacccaugaccuca

SEQ ID NO: 1244074 - RNA, 19 nt, Artificial Sequence
  Description of Artificial Sequence: Synthetic oligonucleotide
uauaugccuaaucuauaac

SEQ ID NO: 1244075 - RNA, 19 nt, Artificial Sequence
  Description of Artificial Sequence: Synthetic oligonucleotide
auaaacuuuugaguuauca

SEQ ID NO: 1244076 - RNA, 19 nt, Artificial Sequence
  Description of Artificial Sequence: Synthetic oligonucleotide
guuaucccaccauuuaaag

SEQ ID NO: 1244077 - RNA, 19 nt, Artificial Sequence
  Description of Artificial Sequence: Synthetic oligonucleotide
acuguuauugcuauaauua

SEQ ID NO: 1244078 - RNA, 19 nt, Artificial Sequence
  Description of Artificial Sequence: Synthetic oligonucleotide
uccuuuaauccuaaccagu

SEQ ID NO: 1244079 - RNA, 19 nt, Artificial Sequence
  Description of Artificial Sequence: Synthetic oligonucleotide
cuggauuacuuaauggaug

SEQ ID NO: 1244080 - RNA, 19 nt, Artificial Sequence
  Description of Artificial Sequence: Synthetic oligonucleotide
ucuccuggauuacuuaaug

SEQ ID NO: 1244081 - RNA, 19 nt, Artificial Sequence
  Description of Artificial Sequence: Synthetic oligonucleotide
uuaaguuaucccaccauuu

SEQ ID NO: 1244082 - RNA, 19 nt, Artificial Sequence
  Description of Artificial Sequence: Synthetic oligonucleotide
uaaggguauucccaauuca

SEQ ID NO: 1244083 - RNA, 19 nt, Artificial Sequence
  Description of Artificial Sequence: Synthetic oligonucleotide
aaguuaucccaccauuuaa

SEQ ID NO: 1244084 - RNA, 19 nt, Artificial Sequence
  Description of Artificial Sequence: Synthetic oligonucleotide
uuaagucuaaagcugucuu

SEQ ID NO: 1244085 - RNA, 19 nt, Artificial Sequence
  Description of Artificial Sequence: Synthetic oligonucleotide
cuaaccaguuaccauuacc

SEQ ID NO: 1244086 - RNA, 19 nt, Artificial Sequence
  Description of Artificial Sequence: Synthetic oligonucleotide
cucguuuuacaccaauggc

SEQ ID NO: 1244087 - RNA, 19 nt, Artificial Sequence
  Description of Artificial Sequence: Synthetic oligonucleotide
cucaaacgaauucugguug

SEQ ID NO: 1244088 - RNA, 19 nt, Artificial Sequence
  Description of Artificial Sequence: Synthetic oligonucleotide
uaaaagcucgauguaauaa

SEQ ID NO: 1244089 - RNA, 19 nt, Artificial Sequence
  Description of Artificial Sequence: Synthetic oligonucleotide
aaauuagcauauagaacug

SEQ ID NO: 1244090 - RNA, 19 nt, Artificial Sequence
  Description of Artificial Sequence: Synthetic oligonucleotide
cugaauaugaacuuuuacu

SEQ ID NO: 1244091 - RNA, 19 nt, Artificial Sequence
  Description of Artificial Sequence: Synthetic oligonucleotide
caacccaugaccucaugcc

SEQ ID NO: 1244092 - RNA, 19 nt, Artificial Sequence
  Description of Artificial Sequence: Synthetic oligonucleotide
augccuaaucuauaacauc

SEQ ID NO: 1244093 - RNA, 19 nt, Artificial Sequence
  Description of Artificial Sequence: Synthetic oligonucleotide
uuuaagucuaaagcugucu

SEQ ID NO: 1244094 - RNA, 19 nt, Artificial Sequence
  Description of Artificial Sequence: Synthetic oligonucleotide
uugcuauaauuauuuuaag

SEQ ID NO: 1244095 - RNA, 19 nt, Artificial Sequence
  Description of Artificial Sequence: Synthetic oligonucleotide
acugagcguauccccagcc

SEQ ID NO: 1244096 - RNA, 19 nt, Artificial Sequence
  Description of Artificial Sequence: Synthetic oligonucleotide
ugucuauuuucaucaauaa

SEQ ID NO: 1244097 - RNA, 19 nt, Artificial Sequence
  Description of Artificial Sequence: Synthetic oligonucleotide
aaucaacaacccaugaccu

SEQ ID NO: 1244098 - RNA, 19 nt, Artificial Sequence
  Description of Artificial Sequence: Synthetic oligonucleotide
uaaguuaucccaccauuua

SEQ ID NO: 1244099 - RNA, 19 nt, Artificial Sequence
  Description of Artificial Sequence: Synthetic oligonucleotide
uggucaacaaacugacuca

SEQ ID NO: 1244100 - RNA, 19 nt, Artificial Sequence
  Description of Artificial Sequence: Synthetic oligonucleotide
gaguuaucaagaaauuaac

SEQ ID NO: 1244101 - RNA, 19 nt, Artificial Sequence
  Description of Artificial Sequence: Synthetic oligonucleotide
agaagacacuaaaagcucg

SEQ ID NO: 1244102 - RNA, 19 nt, Artificial Sequence
  Description of Artificial Sequence: Synthetic oligonucleotide
aagucuaaagcugucuuaa

SEQ ID NO: 1244103 - RNA, 19 nt, Artificial Sequence
  Description of Artificial Sequence: Synthetic oligonucleotide
augccuauucauuaaaauu

SEQ ID NO: 1244104 - RNA, 19 nt, Artificial Sequence
  Description of Artificial Sequence: Synthetic oligonucleotide
aacauucuaacuagguaga

SEQ ID NO: 1244105 - RNA, 19 nt, Artificial Sequence
  Description of Artificial Sequence: Synthetic oligonucleotide
uguuaacuguuauugcuau

SEQ ID NO: 1244106 - RNA, 19 nt, Artificial Sequence
  Description of Artificial Sequence: Synthetic oligonucleotide
ucguggucaacaaacugac

SEQ ID NO: 1244107 - RNA, 19 nt, Artificial Sequence
  Description of Artificial Sequence: Synthetic oligonucleotide
agccuugaccauuuaaucu

SEQ ID NO: 1244108 - RNA, 19 nt, Artificial Sequence
  Description of Artificial Sequence: Synthetic oligonucleotide
ugacucaaaugguuuaagu

SEQ ID NO: 1244109 - RNA, 19 nt, Artificial Sequence
  Description of Artificial Sequence: Synthetic oligonucleotide
ugguuguaaaauaccuaug

SEQ ID NO: 1244110 - RNA, 19 nt, Artificial Sequence
  Description of Artificial Sequence: Synthetic oligonucleotide
agccuguuaacuguuauug

SEQ ID NO: 1244111 - RNA, 19 nt, Artificial Sequence
  Description of Artificial Sequence: Synthetic oligonucleotide
gcucguuuuacaccaaugg

SEQ ID NO: 1244112 - RNA, 19 nt, Artificial Sequence
  Description of Artificial Sequence: Synthetic oligonucleotide
aagcacaaaaucaacgaaa

SEQ ID NO: 1244113 - RNA, 19 nt, Artificial Sequence
  Description of Artificial Sequence: Synthetic oligonucleotide
agaauacacaucucugcca

SEQ ID NO: 1244114 - RNA, 19 nt, Artificial Sequence
  Description of Artificial Sequence: Synthetic oligonucleotide
ucguguuagauaaugcauu

SEQ ID NO: 1244115 - RNA, 19 nt, Artificial Sequence
  Description of Artificial Sequence: Synthetic oligonucleotide
ucucguggucaacaaacug

SEQ ID NO: 1244116 - RNA, 19 nt, Artificial Sequence
  Description of Artificial Sequence: Synthetic oligonucleotide
accaguuaccauuaccacu

SEQ ID NO: 1244117 - RNA, 19 nt, Artificial Sequence
  Description of Artificial Sequence: Synthetic oligonucleotide
ucagccccguauuuuauug

SEQ ID NO: 1244118 - RNA, 19 nt, Artificial Sequence
  Description of Artificial Sequence: Synthetic oligonucleotide
cuccuggauuacuuaaugg

SEQ ID NO: 1244119 - RNA, 19 nt, Artificial Sequence
  Description of Artificial Sequence: Synthetic oligonucleotide
guuaccauuaccacuaaaa

SEQ ID NO: 1244120 - RNA, 19 nt, Artificial Sequence
  Description of Artificial Sequence: Synthetic oligonucleotide
aaagcugucuuaagaucuc

SEQ ID NO: 1244121 - RNA, 19 nt, Artificial Sequence
  Description of Artificial Sequence: Synthetic oligonucleotide
ucugguuguaaaauaccua

SEQ ID NO: 1244122 - RNA, 19 nt, Artificial Sequence
  Description of Artificial Sequence: Synthetic oligonucleotide
aacccaugaccucaugccu

SEQ ID NO: 1244123 - RNA, 19 nt, Artificial Sequence
  Description of Artificial Sequence: Synthetic oligonucleotide
aaaccacggaguuaauuua

SEQ ID NO: 1244124 - RNA, 19 nt, Artificial Sequence
  Description of Artificial Sequence: Synthetic oligonucleotide
ucaaacgaauucugguugu

SEQ ID NO: 1244125 - RNA, 19 nt, Artificial Sequence
  Description of Artificial Sequence: Synthetic oligonucleotide
aucaacaacccaugaccuc

SEQ ID NO: 1244126 - RNA, 19 nt, Artificial Sequence
  Description of Artificial Sequence: Synthetic oligonucleotide
auaauuauuuuaaggacua

SEQ ID NO: 1244127 - RNA, 19 nt, Artificial Sequence
  Description of Artificial Sequence: Synthetic oligonucleotide
aggguauucccaauucagc

SEQ ID NO: 1244128 - RNA, 19 nt, Artificial Sequence
  Description of Artificial Sequence: Synthetic oligonucleotide
uccuuauaauauaugccua

SEQ ID NO: 1244129 - RNA, 19 nt, Artificial Sequence
  Description of Artificial Sequence: Synthetic oligonucleotide
uacauaguuguaucuucga

SEQ ID NO: 1244130 - RNA, 19 nt, Artificial Sequence
  Description of Artificial Sequence: Synthetic oligonucleotide
gagagagagagagagccug

SEQ ID NO: 1244131 - RNA, 19 nt, Artificial Sequence
  Description of Artificial Sequence: Synthetic oligonucleotide
guaacaguuauuaaguagu

SEQ ID NO: 1244132 - RNA, 19 nt, Artificial Sequence
  Description of Artificial Sequence: Synthetic oligonucleotide
uuucauguucaccccagau

SEQ ID NO: 1244133 - RNA, 19 nt, Artificial Sequence
  Description of Artificial Sequence: Synthetic oligonucleotide
auaccaucagauugggccu

SEQ ID NO: 1244134 - RNA, 19 nt, Artificial Sequence
  Description of Artificial Sequence: Synthetic oligonucleotide
uaguaaauucguguuagau

SEQ ID NO: 1244135 - RNA, 19 nt, Artificial Sequence
  Description of Artificial Sequence: Synthetic oligonucleotide
auccuaaccaguuaccauu

SEQ ID NO: 1244136 - RNA, 19 nt, Artificial Sequence
  Description of Artificial Sequence: Synthetic oligonucleotide
auauagaacugcccuuuca

SEQ ID NO: 1244137 - RNA, 19 nt, Artificial Sequence
  Description of Artificial Sequence: Synthetic oligonucleotide
gucuaaagcugucuuaaga

SEQ ID NO: 1244138 - RNA, 19 nt, Artificial Sequence
  Description of Artificial Sequence: Synthetic oligonucleotide
gacuacagcaacuauuggu

SEQ ID NO: 1244139 - RNA, 19 nt, Artificial Sequence
  Description of Artificial Sequence: Synthetic oligonucleotide
cuccuuauaauauaugccu

SEQ ID NO: 1244140 - RNA, 19 nt, Artificial Sequence
  Description of Artificial Sequence: Synthetic oligonucleotide
gcauauuaauauuugaucu

SEQ ID NO: 1244141 - RNA, 19 nt, Artificial Sequence
  Description of Artificial Sequence: Synthetic oligonucleotide
uugaguuaucaagaaauua

SEQ ID NO: 1244142 - RNA, 19 nt, Artificial Sequence
  Description of Artificial Sequence: Synthetic oligonucleotide
cuuuuaaucucauugggau

SEQ ID NO: 1244143 - RNA, 19 nt, Artificial Sequence
  Description of Artificial Sequence: Synthetic oligonucleotide
uccggauucaagguuacgu

SEQ ID NO: 1244144 - RNA, 19 nt, Artificial Sequence
  Description of Artificial Sequence: Synthetic oligonucleotide
auauaugccuauucauuaa

SEQ ID NO: 1244145 - RNA, 19 nt, Artificial Sequence
  Description of Artificial Sequence: Synthetic oligonucleotide
agccccguauuuuauuguc

SEQ ID NO: 1244146 - RNA, 19 nt, Artificial Sequence
  Description of Artificial Sequence: Synthetic oligonucleotide
uaagucuaaagcugucuua

SEQ ID NO: 1244147 - RNA, 19 nt, Artificial Sequence
  Description of Artificial Sequence: Synthetic oligonucleotide
uuuaaggacuagggaauca

SEQ ID NO: 1244148 - RNA, 19 nt, Artificial Sequence
  Description of Artificial Sequence: Synthetic oligonucleotide
gauuacuuaauggaugacu

SEQ ID NO: 1244149 - RNA, 19 nt, Artificial Sequence
  Description of Artificial Sequence: Synthetic oligonucleotide
uguacugaauaugaacuuu

SEQ ID NO: 1244150 - RNA, 19 nt, Artificial Sequence
  Description of Artificial Sequence: Synthetic oligonucleotide
agguaauuuuagcaucuga

SEQ ID NO: 1244151 - RNA, 19 nt, Artificial Sequence
  Description of Artificial Sequence: Synthetic oligonucleotide
cauuuauguuagcauuuac

SEQ ID NO: 1244152 - RNA, 19 nt, Artificial Sequence
  Description of Artificial Sequence: Synthetic oligonucleotide
augaccucaugccuacaag

SEQ ID NO: 1244153 - RNA, 19 nt, Artificial Sequence
  Description of Artificial Sequence: Synthetic oligonucleotide
ucgauguaauaauccuuug

SEQ ID NO: 1244154 - RNA, 19 nt, Artificial Sequence
  Description of Artificial Sequence: Synthetic oligonucleotide
auuuaagucuaaagcuguc

SEQ ID NO: 1244155 - RNA, 19 nt, Artificial Sequence
  Description of Artificial Sequence: Synthetic oligonucleotide
uuuucucguggucaacaaa

SEQ ID NO: 1244156 - RNA, 19 nt, Artificial Sequence
  Description of Artificial Sequence: Synthetic oligonucleotide
cacccaaagguucaaacca

SEQ ID NO: 1244157 - RNA, 19 nt, Artificial Sequence
  Description of Artificial Sequence: Synthetic oligonucleotide
uucaagcucuccuggauua

SEQ ID NO: 1244158 - RNA, 19 nt, Artificial Sequence
  Description of Artificial Sequence: Synthetic oligonucleotide
uucaauucauacacacauu

SEQ ID NO: 1244159 - RNA, 19 nt, Artificial Sequence
  Description of Artificial Sequence: Synthetic oligonucleotide
uagaaugguuaaagcacaa

SEQ ID NO: 1244160 - RNA, 19 nt, Artificial Sequence
  Description of Artificial Sequence: Synthetic oligonucleotide
auacaagggagcacaguuc

SEQ ID NO: 1244161 - RNA, 19 nt, Artificial Sequence
  Description of Artificial Sequence: Synthetic oligonucleotide
auguucaccccagauacca

SEQ ID NO: 1244162 - RNA, 19 nt, Artificial Sequence
  Description of Artificial Sequence: Synthetic oligonucleotide
agagagagagagagagagc

SEQ ID NO: 1244163 - RNA, 19 nt, Artificial Sequence
  Description of Artificial Sequence: Synthetic oligonucleotide
auagaacugcccuuucaaa

SEQ ID NO: 1244164 - RNA, 19 nt, Artificial Sequence
  Description of Artificial Sequence: Synthetic oligonucleotide
gguuguaaaauaccuaugu

SEQ ID NO: 1244165 - RNA, 19 nt, Artificial Sequence
  Description of Artificial Sequence: Synthetic oligonucleotide
aaacugacucaaaugguuu

SEQ ID NO: 1244166 - RNA, 19 nt, Artificial Sequence
  Description of Artificial Sequence: Synthetic oligonucleotide
ccuauguaucauacaaggg

SEQ ID NO: 1244167 - RNA, 19 nt, Artificial Sequence
  Description of Artificial Sequence: Synthetic oligonucleotide
uuuaagcgccucugugcag

SEQ ID NO: 1244168 - RNA, 19 nt, Artificial Sequence
  Description of Artificial Sequence: Synthetic oligonucleotide
acuaaaagcucgauguaau

SEQ ID NO: 1244169 - RNA, 19 nt, Artificial Sequence
  Description of Artificial Sequence: Synthetic oligonucleotide
uuaccacaaagcacaguau

SEQ ID NO: 1244170 - RNA, 19 nt, Artificial Sequence
  Description of Artificial Sequence: Synthetic oligonucleotide
caugguaccacugagcgua

SEQ ID NO: 1244171 - RNA, 19 nt, Artificial Sequence
  Description of Artificial Sequence: Synthetic oligonucleotide
acuauuggugaaacaaccu

SEQ ID NO: 1244172 - RNA, 19 nt, Artificial Sequence
  Description of Artificial Sequence: Synthetic oligonucleotide
aaucuucaauucauacaca

SEQ ID NO: 1244173 - RNA, 19 nt, Artificial Sequence
  Description of Artificial Sequence: Synthetic oligonucleotide
ugcuguaacaggagcuuau

SEQ ID NO: 1244174 - RNA, 19 nt, Artificial Sequence
  Description of Artificial Sequence: Synthetic oligonucleotide
uaacuguuauugcuauaau

SEQ ID NO: 1244175 - RNA, 19 nt, Artificial Sequence
  Description of Artificial Sequence: Synthetic oligonucleotide
gguaccacugagcguaucc

SEQ ID NO: 1244176 - RNA, 19 nt, Artificial Sequence
  Description of Artificial Sequence: Synthetic oligonucleotide
acuugcuacauaguuguau

SEQ ID NO: 1244177 - RNA, 19 nt, Artificial Sequence
  Description of Artificial Sequence: Synthetic oligonucleotide
uuacguucuucuucagaaa

SEQ ID NO: 1244178 - RNA, 19 nt, Artificial Sequence
  Description of Artificial Sequence: Synthetic oligonucleotide
cauuuaagucuaaagcugu

SEQ ID NO: 1244179 - RNA, 19 nt, Artificial Sequence
  Description of Artificial Sequence: Synthetic oligonucleotide
auuggugaaacaaccugga

SEQ ID NO: 1244180 - RNA, 19 nt, Artificial Sequence
  Description of Artificial Sequence: Synthetic oligonucleotide
cagccuugaccauuuaauc

SEQ ID NO: 1244181 - RNA, 19 nt, Artificial Sequence
  Description of Artificial Sequence: Synthetic oligonucleotide
uucaguggagagagagaga

SEQ ID NO: 1244182 - RNA, 19 nt, Artificial Sequence
  Description of Artificial Sequence: Synthetic oligonucleotide
uuaaaccacggaguuaauu

SEQ ID NO: 1244183 - RNA, 19 nt, Artificial Sequence
  Description of Artificial Sequence: Synthetic oligonucleotide
ugagcguauccccagccuu

SEQ ID NO: 1244184 - RNA, 19 nt, Artificial Sequence
  Description of Artificial Sequence: Synthetic oligonucleotide
uggucugaccuacgaacac

SEQ ID NO: 1244185 - RNA, 19 nt, Artificial Sequence
  Description of Artificial Sequence: Synthetic oligonucleotide
uaaucucauugggauccgg

SEQ ID NO: 1244186 - RNA, 19 nt, Artificial Sequence
  Description of Artificial Sequence: Synthetic oligonucleotide
gaagacacuaaaagcucga

SEQ ID NO: 1244187 - RNA, 19 nt, Artificial Sequence
  Description of Artificial Sequence: Synthetic oligonucleotide
uucauucaggugacuaauu

SEQ ID NO: 1244188 - RNA, 19 nt, Artificial Sequence
  Description of Artificial Sequence: Synthetic oligonucleotide
uuggugaaacaaccuggaa

SEQ ID NO: 1244189 - RNA, 19 nt, Artificial Sequence
  Description of Artificial Sequence: Synthetic oligonucleotide
cugguuguaaaauaccuau

SEQ ID NO: 1244190 - RNA, 19 nt, Artificial Sequence
  Description of Artificial Sequence: Synthetic oligonucleotide
ugaaccuguuguucaucga

SEQ ID NO: 1244191 - RNA, 19 nt, Artificial Sequence
  Description of Artificial Sequence: Synthetic oligonucleotide
aguuaucccaccauuuaaa

SEQ ID NO: 1244192 - RNA, 19 nt, Artificial Sequence
  Description of Artificial Sequence: Synthetic oligonucleotide
agcaacuauuggugaaaca

SEQ ID NO: 1244193 - RNA, 19 nt, Artificial Sequence
  Description of Artificial Sequence: Synthetic oligonucleotide
ugguaguccguuccuuuaa

SEQ ID NO: 1244194 - RNA, 19 nt, Artificial Sequence
  Description of Artificial Sequence: Synthetic oligonucleotide
ugucuacaauaauuuuaaa

SEQ ID NO: 1244195 - RNA, 19 nt, Artificial Sequence
  Description of Artificial Sequence: Synthetic oligonucleotide
agagccuguuaacuguuau

SEQ ID NO: 1244196 - RNA, 19 nt, Artificial Sequence
  Description of Artificial Sequence: Synthetic oligonucleotide
cacaaagcacaguauaaua

SEQ ID NO: 1244197 - RNA, 19 nt, Artificial Sequence
  Description of Artificial Sequence: Synthetic oligonucleotide
ggaaagguaauuuuagcau

SEQ ID NO: 1244198 - RNA, 19 nt, Artificial Sequence
  Description of Artificial Sequence: Synthetic oligonucleotide
ugcuacauaguuguaucuu

SEQ ID NO: 1244199 - RNA, 19 nt, Artificial Sequence
  Description of Artificial Sequence: Synthetic oligonucleotide
gcuacauaguuguaucuuc

SEQ ID NO: 1244200 - RNA, 19 nt, Artificial Sequence
  Description of Artificial Sequence: Synthetic oligonucleotide
aacaacccaugaccucaug

SEQ ID NO: 1244201 - RNA, 19 nt, Artificial Sequence
  Description of Artificial Sequence: Synthetic oligonucleotide
uaguuguaucuucgaagau

SEQ ID NO: 1244202 - RNA, 19 nt, Artificial Sequence
  Description of Artificial Sequence: Synthetic oligonucleotide
cguuccuuuaauccuaacc

SEQ ID NO: 1244203 - RNA, 19 nt, Artificial Sequence
  Description of Artificial Sequence: Synthetic oligonucleotide
gugaaacaaccuggaaagg

SEQ ID NO: 1244204 - RNA, 19 nt, Artificial Sequence
  Description of Artificial Sequence: Synthetic oligonucleotide
aagacacuaaaagcucgau

SEQ ID NO: 1244205 - RNA, 19 nt, Artificial Sequence
  Description of Artificial Sequence: Synthetic oligonucleotide
cucaaaugguuuaaguuau

SEQ ID NO: 1244206 - RNA, 19 nt, Artificial Sequence
  Description of Artificial Sequence: Synthetic oligonucleotide
cuuguaguaaauucguguu

SEQ ID NO: 1244207 - RNA, 19 nt, Artificial Sequence
  Description of Artificial Sequence: Synthetic oligonucleotide
gagagagccuguuaacugu

SEQ ID NO: 1244208 - RNA, 19 nt, Artificial Sequence
  Description of Artificial Sequence: Synthetic oligonucleotide
agauaccaucagauugggc

SEQ ID NO: 1244209 - RNA, 19 nt, Artificial Sequence
  Description of Artificial Sequence: Synthetic oligonucleotide
cugcauauuaauauuugau

SEQ ID NO: 1244210 - RNA, 19 nt, Artificial Sequence
  Description of Artificial Sequence: Synthetic oligonucleotide
cugacucaaaugguuuaag

SEQ ID NO: 1244211 - RNA, 19 nt, Artificial Sequence
  Description of Artificial Sequence: Synthetic oligonucleotide
agggaaucaacaacccaug

SEQ ID NO: 1244212 - RNA, 19 nt, Artificial Sequence
  Description of Artificial Sequence: Synthetic oligonucleotide
caauuucauguucacccca

SEQ ID NO: 1244213 - RNA, 19 nt, Artificial Sequence
  Description of Artificial Sequence: Synthetic oligonucleotide
ggguaugguaguccguucc

SEQ ID NO: 1244214 - RNA, 19 nt, Artificial Sequence
  Description of Artificial Sequence: Synthetic oligonucleotide
aggcaaucaugguaccacu

SEQ ID NO: 1244215 - RNA, 19 nt, Artificial Sequence
  Description of Artificial Sequence: Synthetic oligonucleotide
guaguaaauucguguuaga

SEQ ID NO: 1244216 - RNA, 19 nt, Artificial Sequence
  Description of Artificial Sequence: Synthetic oligonucleotide
cuagggaaucaacaaccca

SEQ ID NO: 1244217 - RNA, 19 nt, Artificial Sequence
  Description of Artificial Sequence: Synthetic oligonucleotide
guaguccguuccuuuaauc

SEQ ID NO: 1244218 - RNA, 19 nt, Artificial Sequence
  Description of Artificial Sequence: Synthetic oligonucleotide
uauuuauuucaggcaucgu

SEQ ID NO: 1244219 - RNA, 19 nt, Artificial Sequence
  Description of Artificial Sequence: Synthetic oligonucleotide
guaucauacaagggagcac

SEQ ID NO: 1244220 - RNA, 19 nt, Artificial Sequence
  Description of Artificial Sequence: Synthetic oligonucleotide
cauacaagggagcacaguu

SEQ ID NO: 1244221 - RNA, 19 nt, Artificial Sequence
  Description of Artificial Sequence: Synthetic oligonucleotide
guaccacugagcguauccc

SEQ ID NO: 1244222 - RNA, 19 nt, Artificial Sequence
  Description of Artificial Sequence: Synthetic oligonucleotide
auuuuaaaccacggaguua

SEQ ID NO: 1244223 - RNA, 19 nt, Artificial Sequence
  Description of Artificial Sequence: Synthetic oligonucleotide
cucgauguaauaauccuuu

SEQ ID NO: 1244224 - RNA, 19 nt, Artificial Sequence
  Description of Artificial Sequence: Synthetic oligonucleotide
uucuaaggguauucccaau

SEQ ID NO: 1244225 - RNA, 19 nt, Artificial Sequence
  Description of Artificial Sequence: Synthetic oligonucleotide
agaaugguuaaagcacaaa

SEQ ID NO: 1244226 - RNA, 19 nt, Artificial Sequence
  Description of Artificial Sequence: Synthetic oligonucleotide
cuaaaagcucgauguaaua

SEQ ID NO: 1244227 - RNA, 19 nt, Artificial Sequence
  Description of Artificial Sequence: Synthetic oligonucleotide
agagagagagagccuguua

SEQ ID NO: 1244228 - RNA, 19 nt, Artificial Sequence
  Description of Artificial Sequence: Synthetic oligonucleotide
uccguuccuuuaauccuaa

SEQ ID NO: 1244229 - RNA, 19 nt, Artificial Sequence
  Description of Artificial Sequence: Synthetic oligonucleotide
cuuuaauccuaaccaguua

SEQ ID NO: 1244230 - RNA, 19 nt, Artificial Sequence
  Description of Artificial Sequence: Synthetic oligonucleotide
gcaaucaugguaccacuga

SEQ ID NO: 1244231 - RNA, 19 nt, Artificial Sequence
  Description of Artificial Sequence: Synthetic oligonucleotide
cacggaguuaauuuaacuu

SEQ ID NO: 1244232 - RNA, 19 nt, Artificial Sequence
  Description of Artificial Sequence: Synthetic oligonucleotide
agcucguuuuacaccaaug

SEQ ID NO: 1244233 - RNA, 19 nt, Artificial Sequence
  Description of Artificial Sequence: Synthetic oligonucleotide
ccuauucauuaaaauucug

SEQ ID NO: 1244234 - RNA, 19 nt, Artificial Sequence
  Description of Artificial Sequence: Synthetic oligonucleotide
gcacaguucaaaagaaaac

SEQ ID NO: 1244235 - RNA, 19 nt, Artificial Sequence
  Description of Artificial Sequence: Synthetic oligonucleotide
uguucaccccagauaccau

SEQ ID NO: 1244236 - RNA, 19 nt, Artificial Sequence
  Description of Artificial Sequence: Synthetic oligonucleotide
ccaguuaccauuaccacua

SEQ ID NO: 1244237 - RNA, 19 nt, Artificial Sequence
  Description of Artificial Sequence: Synthetic oligonucleotide
aucucaauauaugccuaau

SEQ ID NO: 1244238 - RNA, 19 nt, Artificial Sequence
  Description of Artificial Sequence: Synthetic oligonucleotide
cauucuaacuagguagaaa

SEQ ID NO: 1244239 - RNA, 19 nt, Artificial Sequence
  Description of Artificial Sequence: Synthetic oligonucleotide
caaaucugugggccaagca

SEQ ID NO: 1244240 - RNA, 19 nt, Artificial Sequence
  Description of Artificial Sequence: Synthetic oligonucleotide
gcuuuuaaucucauuggga

SEQ ID NO: 1244241 - RNA, 19 nt, Artificial Sequence
  Description of Artificial Sequence: Synthetic oligonucleotide
gccuguuaacuguuauugc

SEQ ID NO: 1244242 - RNA, 19 nt, Artificial Sequence
  Description of Artificial Sequence: Synthetic oligonucleotide
ggguauucccaauucagcu

SEQ ID NO: 1244243 - RNA, 19 nt, Artificial Sequence
  Description of Artificial Sequence: Synthetic oligonucleotide
gguuacguucuucuucaga

SEQ ID NO: 1244244 - RNA, 19 nt, Artificial Sequence
  Description of Artificial Sequence: Synthetic oligonucleotide
uggguaugguaguccguuc

SEQ ID NO: 1244245 - RNA, 19 nt, Artificial Sequence
  Description of Artificial Sequence: Synthetic oligonucleotide
guguuagauaaugcauuuc

SEQ ID NO: 1244246 - RNA, 19 nt, Artificial Sequence
  Description of Artificial Sequence: Synthetic oligonucleotide
gauccggauucaagguuac

SEQ ID NO: 1244247 - RNA, 19 nt, Artificial Sequence
  Description of Artificial Sequence: Synthetic oligonucleotide
cuauuacugcuguuuugaa

SEQ ID NO: 1244248 - RNA, 19 nt, Artificial Sequence
  Description of Artificial Sequence: Synthetic oligonucleotide
agguuacguucuucuucag

SEQ ID NO: 1244249 - RNA, 19 nt, Artificial Sequence
  Description of Artificial Sequence: Synthetic oligonucleotide
acauucuaacuagguagaa

SEQ ID NO: 1244250 - RNA, 19 nt, Artificial Sequence
  Description of Artificial Sequence: Synthetic oligonucleotide
uauucccaauucagcuuuu

SEQ ID NO: 1244251 - RNA, 19 nt, Artificial Sequence
  Description of Artificial Sequence: Synthetic oligonucleotide
guuaacuguuauugcuaua

SEQ ID NO: 1244252 - RNA, 19 nt, Artificial Sequence
  Description of Artificial Sequence: Synthetic oligonucleotide
cacugagcguauccccagc

SEQ ID NO: 1244253 - RNA, 19 nt, Artificial Sequence
  Description of Artificial Sequence: Synthetic oligonucleotide
agauugggccuuguaguaa

SEQ ID NO: 1244254 - RNA, 19 nt, Artificial Sequence
  Description of Artificial Sequence: Synthetic oligonucleotide
cacaccuguagcaaguuuu

SEQ ID NO: 1244255 - RNA, 19 nt, Artificial Sequence
  Description of Artificial Sequence: Synthetic oligonucleotide
agagagagagagagagaga

SEQ ID NO: 1244256 - RNA, 19 nt, Artificial Sequence
  Description of Artificial Sequence: Synthetic oligonucleotide
uuacaccaauggcaucauu

SEQ ID NO: 1244257 - RNA, 19 nt, Artificial Sequence
  Description of Artificial Sequence: Synthetic oligonucleotide
agagagagagagagagccu

SEQ ID NO: 1244258 - RNA, 19 nt, Artificial Sequence
  Description of Artificial Sequence: Synthetic oligonucleotide
aagcucuccuggauuacuu

SEQ ID NO: 1244259 - RNA, 19 nt, Artificial Sequence
  Description of Artificial Sequence: Synthetic oligonucleotide
caagggagcacaguucaaa

SEQ ID NO: 1244260 - RNA, 19 nt, Artificial Sequence
  Description of Artificial Sequence: Synthetic oligonucleotide
acacaccuguagcaaguuu

SEQ ID NO: 1244261 - RNA, 19 nt, Artificial Sequence
  Description of Artificial Sequence: Synthetic oligonucleotide
uucaucgagauggcugguu

SEQ ID NO: 1244262 - RNA, 19 nt, Artificial Sequence
  Description of Artificial Sequence: Synthetic oligonucleotide
cauucaggugacuaauuuu

SEQ ID NO: 1244263 - RNA, 19 nt, Artificial Sequence
  Description of Artificial Sequence: Synthetic oligonucleotide
auccggauucaagguuacg

SEQ ID NO: 1244264 - RNA, 19 nt, Artificial Sequence
  Description of Artificial Sequence: Synthetic oligonucleotide
agagagagagagagccugu

SEQ ID NO: 1244265 - RNA, 19 nt, Artificial Sequence
  Description of Artificial Sequence: Synthetic oligonucleotide
uacuugcuacauaguugua

SEQ ID NO: 1244266 - RNA, 19 nt, Artificial Sequence
  Description of Artificial Sequence: Synthetic oligonucleotide
gugucagccccguauuuua

SEQ ID NO: 1244267 - RNA, 19 nt, Artificial Sequence
  Description of Artificial Sequence: Synthetic oligonucleotide
aucgagauggcugguuauu

SEQ ID NO: 1244268 - RNA, 19 nt, Artificial Sequence
  Description of Artificial Sequence: Synthetic oligonucleotide
ucgugacaggaugucuggu

SEQ ID NO: 1244269 - RNA, 19 nt, Artificial Sequence
  Description of Artificial Sequence: Synthetic oligonucleotide
acccaaagguucaaaccaa

SEQ ID NO: 1244270 - RNA, 19 nt, Artificial Sequence
  Description of Artificial Sequence: Synthetic oligonucleotide
ggauucaagguuacguucu

SEQ ID NO: 1244271 - RNA, 19 nt, Artificial Sequence
  Description of Artificial Sequence: Synthetic oligonucleotide
ggagcacaguucaaaagaa

SEQ ID NO: 1244272 - RNA, 19 nt, Artificial Sequence
  Description of Artificial Sequence: Synthetic oligonucleotide
cggauucaagguuacguuc

SEQ ID NO: 1244273 - RNA, 19 nt, Artificial Sequence
  Description of Artificial Sequence: Synthetic oligonucleotide
augucuggucugaccuacg

SEQ ID NO: 1244274 - RNA, 19 nt, Artificial Sequence
  Description of Artificial Sequence: Synthetic oligonucleotide
gauucaagguuacguucuu

SEQ ID NO: 1244275 - RNA, 19 nt, Artificial Sequence
  Description of Artificial Sequence: Synthetic oligonucleotide
agauggcugguuauuuauu

SEQ ID NO: 1244276 - RNA, 19 nt, Artificial Sequence
  Description of Artificial Sequence: Synthetic oligonucleotide
ggauuacuuaauggaugac

SEQ ID NO: 1244277 - RNA, 19 nt, Artificial Sequence
  Description of Artificial Sequence: Synthetic oligonucleotide
agcugucuuaagaucucaa

SEQ ID NO: 1244278 - RNA, 19 nt, Artificial Sequence
  Description of Artificial Sequence: Synthetic oligonucleotide
agguucaaaccaacugcau

SEQ ID NO: 1244279 - RNA, 19 nt, Artificial Sequence
  Description of Artificial Sequence: Synthetic oligonucleotide
aggcaucgugacaggaugu

SEQ ID NO: 1244280 - RNA, 19 nt, Artificial Sequence
  Description of Artificial Sequence: Synthetic oligonucleotide
uaccaucagauugggccuu

SEQ ID NO: 1244281 - RNA, 19 nt, Artificial Sequence
  Description of Artificial Sequence: Synthetic oligonucleotide
gagccuguuaacuguuauu

SEQ ID NO: 1244282 - RNA, 19 nt, Artificial Sequence
  Description of Artificial Sequence: Synthetic oligonucleotide
cccaugaccucaugccuac

SEQ ID NO: 1244283 - RNA, 19 nt, Artificial Sequence
  Description of Artificial Sequence: Synthetic oligonucleotide
ggauccggauucaagguua

SEQ ID NO: 1244284 - RNA, 19 nt, Artificial Sequence
  Description of Artificial Sequence: Synthetic oligonucleotide
accaucagauugggccuug

SEQ ID NO: 1244285 - RNA, 19 nt, Artificial Sequence
  Description of Artificial Sequence: Synthetic oligonucleotide
ccuuauaauauaugccuau

SEQ ID NO: 1244286 - RNA, 19 nt, Artificial Sequence
  Description of Artificial Sequence: Synthetic oligonucleotide
cgugacaggaugucugguc

SEQ ID NO: 1244287 - RNA, 19 nt, Artificial Sequence
  Description of Artificial Sequence: Synthetic oligonucleotide
acccaugaccucaugccua

SEQ ID NO: 1244288 - RNA, 19 nt, Artificial Sequence
  Description of Artificial Sequence: Synthetic oligonucleotide
gguaugguaguccguuccu

SEQ ID NO: 1244289 - RNA, 19 nt, Artificial Sequence
  Description of Artificial Sequence: Synthetic oligonucleotide
gccuauucauuaaaauucu

SEQ ID NO: 1244290 - RNA, 19 nt, Artificial Sequence
  Description of Artificial Sequence: Synthetic oligonucleotide
caguggagagagagagaga

SEQ ID NO: 1244291 - RNA, 19 nt, Artificial Sequence
  Description of Artificial Sequence: Synthetic oligonucleotide
guggagagagagagagaga

SEQ ID NO: 1244292 - RNA, 19 nt, Artificial Sequence
  Description of Artificial Sequence: Synthetic oligonucleotide
ccacuaaaaguaacaguua

SEQ ID NO: 1244293 - RNA, 19 nt, Artificial Sequence
  Description of Artificial Sequence: Synthetic oligonucleotide
ccauuaccacuaaaaguaa

SEQ ID NO: 1244294 - RNA, 19 nt, Artificial Sequence
  Description of Artificial Sequence: Synthetic oligonucleotide
caucagauugggccuugua

SEQ ID NO: 1244295 - RNA, 19 nt, Artificial Sequence
  Description of Artificial Sequence: Synthetic oligonucleotide
ggcaucgugacaggauguc

SEQ ID NO: 1244296 - RNA, 19 nt, Artificial Sequence
  Description of Artificial Sequence: Synthetic oligonucleotide
ggagagagagagagagaga

SEQ ID NO: 1244297 - RNA, 19 nt, Artificial Sequence
  Description of Artificial Sequence: Synthetic oligonucleotide
cguuuuacaccaauggcau

SEQ ID NO: 1244298 - RNA, 19 nt, Artificial Sequence
  Description of Artificial Sequence: Synthetic oligonucleotide
acaagggagcacaguucaa

SEQ ID NO: 1244299 - RNA, 19 nt, Artificial Sequence
  Description of Artificial Sequence: Synthetic oligonucleotide
auugggccuuguaguaaau

SEQ ID NO: 1244300 - RNA, 19 nt, Artificial Sequence
  Description of Artificial Sequence: Synthetic oligonucleotide
ugguaccacugagcguauc

SEQ ID NO: 1244301 - RNA, 19 nt, Artificial Sequence
  Description of Artificial Sequence: Synthetic oligonucleotide
cugagcguauccccagccu

SEQ ID NO: 1244302 - RNA, 19 nt, Artificial Sequence
  Description of Artificial Sequence: Synthetic oligonucleotide
gccuaaucuauaacaucaa

SEQ ID NO: 1244303 - RNA, 19 nt, Artificial Sequence
  Description of Artificial Sequence: Synthetic oligonucleotide
gagagagagagagccuguu

SEQ ID NO: 1244304 - RNA, 19 nt, Artificial Sequence
  Description of Artificial Sequence: Synthetic oligonucleotide
ggaugucuggucugaccua

SEQ ID NO: 1244305 - RNA, 19 nt, Artificial Sequence
  Description of Artificial Sequence: Synthetic oligonucleotide
gguaguccguuccuuuaau

SEQ ID NO: 1244306 - RNA, 19 nt, Artificial Sequence
  Description of Artificial Sequence: Synthetic oligonucleotide
gucagccccguauuuuauu

SEQ ID NO: 1244307 - RNA, 19 nt, Artificial Sequence
  Description of Artificial Sequence: Synthetic oligonucleotide
cagccccguauuuuauugu

SEQ ID NO: 1244308 - RNA, 19 nt, Artificial Sequence
  Description of Artificial Sequence: Synthetic oligonucleotide
ccacggaguuaauuuaacu

SEQ ID NO: 1244309 - RNA, 19 nt, Artificial Sequence
  Description of Artificial Sequence: Synthetic oligonucleotide
cccaccauuuaaagagaaa

SEQ ID NO: 1244310 - RNA, 19 nt, Artificial Sequence
  Description of Artificial Sequence: Synthetic oligonucleotide
guaugguaguccguuccuu

SEQ ID NO: 1244311 - RNA, 19 nt, Artificial Sequence
  Description of Artificial Sequence: Synthetic oligonucleotide
gggauccggauucaagguu

SEQ ID NO: 1244312 - RNA, 19 nt, Artificial Sequence
  Description of Artificial Sequence: Synthetic oligonucleotide
caacaacccaugaccucau

SEQ ID NO: 1244313 - RNA, 19 nt, Artificial Sequence
  Description of Artificial Sequence: Synthetic oligonucleotide
augguaccacugagcguau

SEQ ID NO: 1244314 - RNA, 19 nt, Artificial Sequence
  Description of Artificial Sequence: Synthetic oligonucleotide
cguguuagauaaugcauuu

SEQ ID NO: 1244315 - RNA, 19 nt, Artificial Sequence
  Description of Artificial Sequence: Synthetic oligonucleotide
cagcucguuuuacaccaau

SEQ ID NO: 1244316 - RNA, 19 nt, Artificial Sequence
  Description of Artificial Sequence: Synthetic oligonucleotide
ccguuccuuuaauccuaac

SEQ ID NO: 1244317 - RNA, 19 nt, Artificial Sequence
  Description of Artificial Sequence: Synthetic oligonucleotide
guucaucgagauggcuggu

SEQ ID NO: 1244318 - RNA, 19 nt, Artificial Sequence
  Description of Artificial Sequence: Synthetic oligonucleotide
gcaucgugacaggaugucu

SEQ ID NO: 1244319 - RNA, 19 nt, Artificial Sequence
  Description of Artificial Sequence: Synthetic oligonucleotide
ggugucagccccguauuuu

SEQ ID NO: 1244320 - RNA, 19 nt, Artificial Sequence
  Description of Artificial Sequence: Synthetic oligonucleotide
ccggauucaagguuacguu

SEQ ID NO: 1244321 - RNA, 19 nt, Artificial Sequence
  Description of Artificial Sequence: Synthetic oligonucleotide
gcguauccccagccuugac

SEQ ID NO: 1244322 - RNA, 19 nt, Artificial Sequence
  Description of Artificial Sequence: Synthetic oligonucleotide
gccccguauuuuauugucu

SEQ ID NO: 1244323 - RNA, 19 nt, Artificial Sequence
  Description of Artificial Sequence: Synthetic oligonucleotide
cccguauuuuauugucuau

SEQ ID NO: 1244324 - RNA, 19 nt, Artificial Sequence
  Description of Artificial Sequence: Synthetic oligonucleotide
gcagcucguuuuacaccaa

SEQ ID NO: 1244325 - RNA, 19 nt, Artificial Sequence
  Description of Artificial Sequence: Synthetic oligonucleotide
cguggucaacaaacugacu

SEQ ID NO: 1244326 - RNA, 19 nt, Artificial Sequence
  Description of Artificial Sequence: Synthetic oligonucleotide
ccaugaccucaugccuaca

SEQ ID NO: 1244327 - RNA, 19 nt, Artificial Sequence
  Description of Artificial Sequence: Synthetic oligonucleotide
gcgccucugugcagcucgu

SEQ ID NO: 1244328 - RNA, 19 nt, Artificial Sequence
  Description of Artificial Sequence: Synthetic oligonucleotide
aaaggcaucagucuguacg

SEQ ID NO: 1244329 - RNA, 19 nt, Artificial Sequence
  Description of Artificial Sequence: Synthetic oligonucleotide
aauccuuucguguaggaac

SEQ ID NO: 1244330 - RNA, 19 nt, Artificial Sequence
  Description of Artificial Sequence: Synthetic oligonucleotide
acuacaagggaucaugccc

SEQ ID NO: 1244331 - RNA, 19 nt, Artificial Sequence
  Description of Artificial Sequence: Synthetic oligonucleotide
uuauuuacaagaucccugg

SEQ ID NO: 1244332 - RNA, 19 nt, Artificial Sequence
  Description of Artificial Sequence: Synthetic oligonucleotide
uguuguguaauccugaauc

SEQ ID NO: 1244333 - RNA, 19 nt, Artificial Sequence
  Description of Artificial Sequence: Synthetic oligonucleotide
aguacugcagaccaagucg

SEQ ID NO: 1244334 - RNA, 19 nt, Artificial Sequence
  Description of Artificial Sequence: Synthetic oligonucleotide
aauugccugagcugcaagc

SEQ ID NO: 1244335 - RNA, 19 nt, Artificial Sequence
  Description of Artificial Sequence: Synthetic oligonucleotide
aaggcaucagucuguacgc

SEQ ID NO: 1244336 - RNA, 19 nt, Artificial Sequence
  Description of Artificial Sequence: Synthetic oligonucleotide
uguacauaccgaucaaugg

SEQ ID NO: 1244337 - RNA, 19 nt, Artificial Sequence
  Description of Artificial Sequence: Synthetic oligonucleotide
uauguuucacagcagacca

SEQ ID NO: 1244338 - RNA, 19 nt, Artificial Sequence
  Description of Artificial Sequence: Synthetic oligonucleotide
aacuacaagggaucaugcc

SEQ ID NO: 1244339 - RNA, 19 nt, Artificial Sequence
  Description of Artificial Sequence: Synthetic oligonucleotide
aaguguggggccuucgacc

SEQ ID NO: 1244340 - RNA, 19 nt, Artificial Sequence
  Description of Artificial Sequence: Synthetic oligonucleotide
acauccauauaccaggauc

SEQ ID NO: 1244341 - RNA, 19 nt, Artificial Sequence
  Description of Artificial Sequence: Synthetic oligonucleotide
gaacuuguauguuucacag

SEQ ID NO: 1244342 - RNA, 19 nt, Artificial Sequence
  Description of Artificial Sequence: Synthetic oligonucleotide
auauaccaggaucacgucc

SEQ ID NO: 1244343 - RNA, 19 nt, Artificial Sequence
  Description of Artificial Sequence: Synthetic oligonucleotide
uuucuaacaagccuccuca

SEQ ID NO: 1244344 - RNA, 19 nt, Artificial Sequence
  Description of Artificial Sequence: Synthetic oligonucleotide
ucaacaaccggagcgaugg

SEQ ID NO: 1244345 - RNA, 19 nt, Artificial Sequence
  Description of Artificial Sequence: Synthetic oligonucleotide
aacgucuuggucuggcccc

SEQ ID NO: 1244346 - RNA, 19 nt, Artificial Sequence
  Description of Artificial Sequence: Synthetic oligonucleotide
uguguaauccugaaucacc

SEQ ID NO: 1244347 - RNA, 19 nt, Artificial Sequence
  Description of Artificial Sequence: Synthetic oligonucleotide
auuuacaagaucccuggag

SEQ ID NO: 1244348 - RNA, 19 nt, Artificial Sequence
  Description of Artificial Sequence: Synthetic oligonucleotide
ugacuuuggauccauaauc

SEQ ID NO: 1244349 - RNA, 19 nt, Artificial Sequence
  Description of Artificial Sequence: Synthetic oligonucleotide
aauagcaccuuagaaaccu

SEQ ID NO: 1244350 - RNA, 19 nt, Artificial Sequence
  Description of Artificial Sequence: Synthetic oligonucleotide
ugaaucaccugcugcaagg

SEQ ID NO: 1244351 - RNA, 19 nt, Artificial Sequence
  Description of Artificial Sequence: Synthetic oligonucleotide
ugggucaagaagcugaugu

SEQ ID NO: 1244352 - RNA, 19 nt, Artificial Sequence
  Description of Artificial Sequence: Synthetic oligonucleotide
uuguacauaccgaucaaug

SEQ ID NO: 1244353 - RNA, 19 nt, Artificial Sequence
  Description of Artificial Sequence: Synthetic oligonucleotide
caaaccgugaaauugccug

SEQ ID NO: 1244354 - RNA, 19 nt, Artificial Sequence
  Description of Artificial Sequence: Synthetic oligonucleotide
ugcgccuucccucaagucg

SEQ ID NO: 1244355 - RNA, 19 nt, Artificial Sequence
  Description of Artificial Sequence: Synthetic oligonucleotide
uaaguucugacuuugccuc

SEQ ID NO: 1244356 - RNA, 19 nt, Artificial Sequence
  Description of Artificial Sequence: Synthetic oligonucleotide
gagaguucuucauugggag

SEQ ID NO: 1244357 - RNA, 19 nt, Artificial Sequence
  Description of Artificial Sequence: Synthetic oligonucleotide
agagccaacgucuuggucu

SEQ ID NO: 1244358 - RNA, 19 nt, Artificial Sequence
  Description of Artificial Sequence: Synthetic oligonucleotide
acugcucuugacucgaagg

SEQ ID NO: 1244359 - RNA, 19 nt, Artificial Sequence
  Description of Artificial Sequence: Synthetic oligonucleotide
guacauaccgaucaauggc

SEQ ID NO: 1244360 - RNA, 19 nt, Artificial Sequence
  Description of Artificial Sequence: Synthetic oligonucleotide
uuaaggaacuugauggcgu

SEQ ID NO: 1244361 - RNA, 19 nt, Artificial Sequence
  Description of Artificial Sequence: Synthetic oligonucleotide
uucagcgcgaaguucagcc

SEQ ID NO: 1244362 - RNA, 19 nt, Artificial Sequence
  Description of Artificial Sequence: Synthetic oligonucleotide
ucguguaggaaccuguugu

SEQ ID NO: 1244363 - RNA, 19 nt, Artificial Sequence
  Description of Artificial Sequence: Synthetic oligonucleotide
ugguuuucuaacaagccuc

SEQ ID NO: 1244364 - RNA, 19 nt, Artificial Sequence
  Description of Artificial Sequence: Synthetic oligonucleotide
ucguagaccagguucaaca

SEQ ID NO: 1244365 - RNA, 19 nt, Artificial Sequence
  Description of Artificial Sequence: Synthetic oligonucleotide
ucuuuccgaagucugaagu

SEQ ID NO: 1244366 - RNA, 19 nt, Artificial Sequence
  Description of Artificial Sequence: Synthetic oligonucleotide
cucugguuuucuaacaagc

SEQ ID NO: 1244367 - RNA, 19 nt, Artificial Sequence
  Description of Artificial Sequence: Synthetic oligonucleotide
agauccauuggccaggagu

SEQ ID NO: 1244368 - RNA, 19 nt, Artificial Sequence
  Description of Artificial Sequence: Synthetic oligonucleotide
ucguuagagacaaaggcau

SEQ ID NO: 1244369 - RNA, 19 nt, Artificial Sequence
  Description of Artificial Sequence: Synthetic oligonucleotide
uucuuagaggcaaaccgug

SEQ ID NO: 1244370 - RNA, 19 nt, Artificial Sequence
  Description of Artificial Sequence: Synthetic oligonucleotide
uuagaaaccucugggagca

SEQ ID NO: 1244371 - RNA, 19 nt, Artificial Sequence
  Description of Artificial Sequence: Synthetic oligonucleotide
gacucgaaggacaacaggc

SEQ ID NO: 1244372 - RNA, 19 nt, Artificial Sequence
  Description of Artificial Sequence: Synthetic oligonucleotide
uguaggaaccuguugucgc

SEQ ID NO: 1244373 - RNA, 19 nt, Artificial Sequence
  Description of Artificial Sequence: Synthetic oligonucleotide
cuugcacugcagaucaucg

SEQ ID NO: 1244374 - RNA, 19 nt, Artificial Sequence
  Description of Artificial Sequence: Synthetic oligonucleotide
guuaaggaacuugauggcg

SEQ ID NO: 1244375 - RNA, 19 nt, Artificial Sequence
  Description of Artificial Sequence: Synthetic oligonucleotide
auggacaagagaacggagc

SEQ ID NO: 1244376 - RNA, 19 nt, Artificial Sequence
  Description of Artificial Sequence: Synthetic oligonucleotide
auacaccgggcauuggagc

SEQ ID NO: 1244377 - RNA, 19 nt, Artificial Sequence
  Description of Artificial Sequence: Synthetic oligonucleotide
uuuauuggccccacuuccc

SEQ ID NO: 1244378 - RNA, 19 nt, Artificial Sequence
  Description of Artificial Sequence: Synthetic oligonucleotide
gauccauaauccuuucgug

SEQ ID NO: 1244379 - RNA, 19 nt, Artificial Sequence
  Description of Artificial Sequence: Synthetic oligonucleotide
agaacuacaagggaucaug

SEQ ID NO: 1244380 - RNA, 19 nt, Artificial Sequence
  Description of Artificial Sequence: Synthetic oligonucleotide
ugauacaccgggcauugga

SEQ ID NO: 1244381 - RNA, 19 nt, Artificial Sequence
  Description of Artificial Sequence: Synthetic oligonucleotide
ugauguaggguuuuaguuu

SEQ ID NO: 1244382 - RNA, 19 nt, Artificial Sequence
  Description of Artificial Sequence: Synthetic oligonucleotide
gaacauuaugcgcucgagc

SEQ ID NO: 1244383 - RNA, 19 nt, Artificial Sequence
  Description of Artificial Sequence: Synthetic oligonucleotide
caccuuagaaaccucuggg

SEQ ID NO: 1244384 - RNA, 19 nt, Artificial Sequence
  Description of Artificial Sequence: Synthetic oligonucleotide
cauccagcucguuagagac

SEQ ID NO: 1244385 - RNA, 19 nt, Artificial Sequence
  Description of Artificial Sequence: Synthetic oligonucleotide
uguacgcguucacagaacu

SEQ ID NO: 1244386 - RNA, 19 nt, Artificial Sequence
  Description of Artificial Sequence: Synthetic oligonucleotide
gucuacuugacucugagcu

SEQ ID NO: 1244387 - RNA, 19 nt, Artificial Sequence
  Description of Artificial Sequence: Synthetic oligonucleotide
ugcgcucgagcuacgaggg

SEQ ID NO: 1244388 - RNA, 19 nt, Artificial Sequence
  Description of Artificial Sequence: Synthetic oligonucleotide
uucucuuguacauaccgau

SEQ ID NO: 1244389 - RNA, 19 nt, Artificial Sequence
  Description of Artificial Sequence: Synthetic oligonucleotide
uggcucuccuuucagcgcg

SEQ ID NO: 1244390 - RNA, 19 nt, Artificial Sequence
  Description of Artificial Sequence: Synthetic oligonucleotide
uacgcguucacagaacuug

SEQ ID NO: 1244391 - RNA, 19 nt, Artificial Sequence
  Description of Artificial Sequence: Synthetic oligonucleotide
uggagaauucgugacacca

SEQ ID NO: 1244392 - RNA, 19 nt, Artificial Sequence
  Description of Artificial Sequence: Synthetic oligonucleotide
ucuguacgcguucacagaa

SEQ ID NO: 1244393 - RNA, 19 nt, Artificial Sequence
  Description of Artificial Sequence: Synthetic oligonucleotide
aaaccgugaaauugccuga

SEQ ID NO: 1244394 - RNA, 19 nt, Artificial Sequence
  Description of Artificial Sequence: Synthetic oligonucleotide
auccauaauccuuucgugu

SEQ ID NO: 1244395 - RNA, 19 nt, Artificial Sequence
  Description of Artificial Sequence: Synthetic oligonucleotide
augcgcucgagcuacgagg

SEQ ID NO: 1244396 - RNA, 19 nt, Artificial Sequence
  Description of Artificial Sequence: Synthetic oligonucleotide
gaucaugcccaauucugug

SEQ ID NO: 1244397 - RNA, 19 nt, Artificial Sequence
  Description of Artificial Sequence: Synthetic oligonucleotide
agagaacggagcaugcgcc

SEQ ID NO: 1244398 - RNA, 19 nt, Artificial Sequence
  Description of Artificial Sequence: Synthetic oligonucleotide
auucgugacaccaaagaug

SEQ ID NO: 1244399 - RNA, 19 nt, Artificial Sequence
  Description of Artificial Sequence: Synthetic oligonucleotide
aaauugccugagcugcaag

SEQ ID NO: 1244400 - RNA, 19 nt, Artificial Sequence
  Description of Artificial Sequence: Synthetic oligonucleotide
cauccauauaccaggauca

SEQ ID NO: 1244401 - RNA, 19 nt, Artificial Sequence
  Description of Artificial Sequence: Synthetic oligonucleotide
uugacucgaaggacaacag

SEQ ID NO: 1244402 - RNA, 19 nt, Artificial Sequence
  Description of Artificial Sequence: Synthetic oligonucleotide
uggauccauaauccuuucg

SEQ ID NO: 1244403 - RNA, 19 nt, Artificial Sequence
  Description of Artificial Sequence: Synthetic oligonucleotide
aagucugaagucuuuucuu

SEQ ID NO: 1244404 - RNA, 19 nt, Artificial Sequence
  Description of Artificial Sequence: Synthetic oligonucleotide
guauguuucacagcagacc

SEQ ID NO: 1244405 - RNA, 19 nt, Artificial Sequence
  Description of Artificial Sequence: Synthetic oligonucleotide
ucgaaggacaacaggcaca

SEQ ID NO: 1244406 - RNA, 19 nt, Artificial Sequence
  Description of Artificial Sequence: Synthetic oligonucleotide
gauguaggguuuuaguuua

SEQ ID NO: 1244407 - RNA, 19 nt, Artificial Sequence
  Description of Artificial Sequence: Synthetic oligonucleotide
ucuacuugacucugagcug

SEQ ID NO: 1244408 - RNA, 19 nt, Artificial Sequence
  Description of Artificial Sequence: Synthetic oligonucleotide
uccauauaccaggaucacg

SEQ ID NO: 1244409 - RNA, 19 nt, Artificial Sequence
  Description of Artificial Sequence: Synthetic oligonucleotide
gcucguuagagacaaaggc

SEQ ID NO: 1244410 - RNA, 19 nt, Artificial Sequence
  Description of Artificial Sequence: Synthetic oligonucleotide
ucagggagucgcuucacgc

SEQ ID NO: 1244411 - RNA, 19 nt, Artificial Sequence
  Description of Artificial Sequence: Synthetic oligonucleotide
agggcuaccugcucucccc

SEQ ID NO: 1244412 - RNA, 19 nt, Artificial Sequence
  Description of Artificial Sequence: Synthetic oligonucleotide
cuacuugacucugagcugc

SEQ ID NO: 1244413 - RNA, 19 nt, Artificial Sequence
  Description of Artificial Sequence: Synthetic oligonucleotide
auccuuucguguaggaacc

SEQ ID NO: 1244414 - RNA, 19 nt, Artificial Sequence
  Description of Artificial Sequence: Synthetic oligonucleotide
aagcacaaucuucucuugu

SEQ ID NO: 1244415 - RNA, 19 nt, Artificial Sequence
  Description of Artificial Sequence: Synthetic oligonucleotide
ucuuagaggcaaaccguga

SEQ ID NO: 1244416 - RNA, 19 nt, Artificial Sequence
  Description of Artificial Sequence: Synthetic oligonucleotide
uuagaggcaaaccgugaaa

SEQ ID NO: 1244417 - RNA, 19 nt, Artificial Sequence
  Description of Artificial Sequence: Synthetic oligonucleotide
uucguguaggaaccuguug

SEQ ID NO: 1244418 - RNA, 19 nt, Artificial Sequence
  Description of Artificial Sequence: Synthetic oligonucleotide
ugugauacaccgggcauug

SEQ ID NO: 1244419 - RNA, 19 nt, Artificial Sequence
  Description of Artificial Sequence: Synthetic oligonucleotide
uauuuacaagaucccugga

SEQ ID NO: 1244420 - RNA, 19 nt, Artificial Sequence
  Description of Artificial Sequence: Synthetic oligonucleotide
guuguguaauccugaauca

SEQ ID NO: 1244421 - RNA, 19 nt, Artificial Sequence
  Description of Artificial Sequence: Synthetic oligonucleotide
gaugcucauguacuggguc

SEQ ID NO: 1244422 - RNA, 19 nt, Artificial Sequence
  Description of Artificial Sequence: Synthetic oligonucleotide
uaugcgcucgagcuacgag

SEQ ID NO: 1244423 - RNA, 19 nt, Artificial Sequence
  Description of Artificial Sequence: Synthetic oligonucleotide
uggaacauuaugcgcucga

SEQ ID NO: 1244424 - RNA, 19 nt, Artificial Sequence
  Description of Artificial Sequence: Synthetic oligonucleotide
aggcacagaacuacaaggg

SEQ ID NO: 1244425 - RNA, 19 nt, Artificial Sequence
  Description of Artificial Sequence: Synthetic oligonucleotide
cauuaugcgcucgagcuac

SEQ ID NO: 1244426 - RNA, 19 nt, Artificial Sequence
  Description of Artificial Sequence: Synthetic oligonucleotide
uucaucucggaucucgauu

SEQ ID NO: 1244427 - RNA, 19 nt, Artificial Sequence
  Description of Artificial Sequence: Synthetic oligonucleotide
uuauuggccccacuucccu

SEQ ID NO: 1244428 - RNA, 19 nt, Artificial Sequence
  Description of Artificial Sequence: Synthetic oligonucleotide
acuacccggaaccgccugc

SEQ ID NO: 1244429 - RNA, 19 nt, Artificial Sequence
  Description of Artificial Sequence: Synthetic oligonucleotide
cagcauggacaagagaacg

SEQ ID NO: 1244430 - RNA, 19 nt, Artificial Sequence
  Description of Artificial Sequence: Synthetic oligonucleotide
ucuagucuuguuucuuuuc

SEQ ID NO: 1244431 - RNA, 19 nt, Artificial Sequence
  Description of Artificial Sequence: Synthetic oligonucleotide
aggggagucacaucguaga

SEQ ID NO: 1244432 - RNA, 19 nt, Artificial Sequence
  Description of Artificial Sequence: Synthetic oligonucleotide
cauggacaagagaacggag

SEQ ID NO: 1244433 - RNA, 19 nt, Artificial Sequence
  Description of Artificial Sequence: Synthetic oligonucleotide
cuacaagggaucaugccca

SEQ ID NO: 1244434 - RNA, 19 nt, Artificial Sequence
  Description of Artificial Sequence: Synthetic oligonucleotide
ugggucaaggaauuuuguc

SEQ ID NO: 1244435 - RNA, 19 nt, Artificial Sequence
  Description of Artificial Sequence: Synthetic oligonucleotide
ucuaccaggugcugggagu

SEQ ID NO: 1244436 - RNA, 19 nt, Artificial Sequence
  Description of Artificial Sequence: Synthetic oligonucleotide
gaacuacaagggaucaugc

SEQ ID NO: 1244437 - RNA, 19 nt, Artificial Sequence
  Description of Artificial Sequence: Synthetic oligonucleotide
acugcagaucaucgggguc

SEQ ID NO: 1244438 - RNA, 19 nt, Artificial Sequence
  Description of Artificial Sequence: Synthetic oligonucleotide
cuugacucgaaggacaaca

SEQ ID NO: 1244439 - RNA, 19 nt, Artificial Sequence
  Description of Artificial Sequence: Synthetic oligonucleotide
ucaugcccaauucugugau

SEQ ID NO: 1244440 - RNA, 19 nt, Artificial Sequence
  Description of Artificial Sequence: Synthetic oligonucleotide
gaauuuucuccccagcagu

SEQ ID NO: 1244441 - RNA, 19 nt, Artificial Sequence
  Description of Artificial Sequence: Synthetic oligonucleotide
accgugaaauugccugagc

SEQ ID NO: 1244442 - RNA, 19 nt, Artificial Sequence
  Description of Artificial Sequence: Synthetic oligonucleotide
uucuaacaagccuccucag

SEQ ID NO: 1244443 - RNA, 19 nt, Artificial Sequence
  Description of Artificial Sequence: Synthetic oligonucleotide
uccuggagaauucgugaca

SEQ ID NO: 1244444 - RNA, 19 nt, Artificial Sequence
  Description of Artificial Sequence: Synthetic oligonucleotide
ugcagaccaagucgcacca

SEQ ID NO: 1244445 - RNA, 19 nt, Artificial Sequence
  Description of Artificial Sequence: Synthetic oligonucleotide
ucucuuguacauaccgauc

SEQ ID NO: 1244446 - RNA, 19 nt, Artificial Sequence
  Description of Artificial Sequence: Synthetic oligonucleotide
gaucacguccccgucacug

SEQ ID NO: 1244447 - RNA, 19 nt, Artificial Sequence
  Description of Artificial Sequence: Synthetic oligonucleotide
gaguacugcagaccaaguc

SEQ ID NO: 1244448 - RNA, 19 nt, Artificial Sequence
  Description of Artificial Sequence: Synthetic oligonucleotide
accaagucgcaccauggcu

SEQ ID NO: 1244449 - RNA, 19 nt, Artificial Sequence
  Description of Artificial Sequence: Synthetic oligonucleotide
ucuuguacauaccgaucaa

SEQ ID NO: 1244450 - RNA, 19 nt, Artificial Sequence
  Description of Artificial Sequence: Synthetic oligonucleotide
uagcaccuuagaaaccucu

SEQ ID NO: 1244451 - RNA, 19 nt, Artificial Sequence
  Description of Artificial Sequence: Synthetic oligonucleotide
uucaacaaccggagcgaug

SEQ ID NO: 1244452 - RNA, 19 nt, Artificial Sequence
  Description of Artificial Sequence: Synthetic oligonucleotide
cugcagaccaagucgcacc

SEQ ID NO: 1244453 - RNA, 19 nt, Artificial Sequence
  Description of Artificial Sequence: Synthetic oligonucleotide
aucaugcccaauucuguga

SEQ ID NO: 1244454 - RNA, 19 nt, Artificial Sequence
  Description of Artificial Sequence: Synthetic oligonucleotide
aacggagcaugcgccuucc

SEQ ID NO: 1244455 - RNA, 19 nt, Artificial Sequence
  Description of Artificial Sequence: Synthetic oligonucleotide
cccgugacaucacagaucc

SEQ ID NO: 1244456 - RNA, 19 nt, Artificial Sequence
  Description of Artificial Sequence: Synthetic oligonucleotide
agcauggacaagagaacgg

SEQ ID NO: 1244457 - RNA, 19 nt, Artificial Sequence
  Description of Artificial Sequence: Synthetic oligonucleotide
ucaucucccgcccggcugc

SEQ ID NO: 1244458 - RNA, 19 nt, Artificial Sequence
  Description of Artificial Sequence: Synthetic oligonucleotide
gaaguguggggccuucgac

SEQ ID NO: 1244459 - RNA, 19 nt, Artificial Sequence
  Description of Artificial Sequence: Synthetic oligonucleotide
uagaggcaaaccgugaaau

SEQ ID NO: 1244460 - RNA, 19 nt, Artificial Sequence
  Description of Artificial Sequence: Synthetic oligonucleotide
agugcaugagcucccaaua

SEQ ID NO: 1244461 - RNA, 19 nt, Artificial Sequence
  Description of Artificial Sequence: Synthetic oligonucleotide
caacgucuuggucuggccc

SEQ ID NO: 1244462 - RNA, 19 nt, Artificial Sequence
  Description of Artificial Sequence: Synthetic oligonucleotide
ccaacucucuaccaggugc

SEQ ID NO: 1244463 - RNA, 19 nt, Artificial Sequence
  Description of Artificial Sequence: Synthetic oligonucleotide
aacaaccggagcgaugggu

SEQ ID NO: 1244464 - RNA, 19 nt, Artificial Sequence
  Description of Artificial Sequence: Synthetic oligonucleotide
gagguguuguguaauccug

SEQ ID NO: 1244465 - RNA, 19 nt, Artificial Sequence
  Description of Artificial Sequence: Synthetic oligonucleotide
agugugauacaccgggcau

SEQ ID NO: 1244466 - RNA, 19 nt, Artificial Sequence
  Description of Artificial Sequence: Synthetic oligonucleotide
aacauccauauaccaggau

SEQ ID NO: 1244467 - RNA, 19 nt, Artificial Sequence
  Description of Artificial Sequence: Synthetic oligonucleotide
agcucguuagagacaaagg

SEQ ID NO: 1244468 - RNA, 19 nt, Artificial Sequence
  Description of Artificial Sequence: Synthetic oligonucleotide
guguaggaaccuguugucg

SEQ ID NO: 1244469 - RNA, 19 nt, Artificial Sequence
  Description of Artificial Sequence: Synthetic oligonucleotide
acugggucaaggaauuuug

SEQ ID NO: 1244470 - RNA, 19 nt, Artificial Sequence
  Description of Artificial Sequence: Synthetic oligonucleotide
cacugggucaagaagcuga

SEQ ID NO: 1244471 - RNA, 19 nt, Artificial Sequence
  Description of Artificial Sequence: Synthetic oligonucleotide
gggucauccagcucguuag

SEQ ID NO: 1244472 - RNA, 19 nt, Artificial Sequence
  Description of Artificial Sequence: Synthetic oligonucleotide
augcccaauucugugauca

SEQ ID NO: 1244473 - RNA, 19 nt, Artificial Sequence
  Description of Artificial Sequence: Synthetic oligonucleotide
cucugguugggucuacuug

SEQ ID NO: 1244474 - RNA, 19 nt, Artificial Sequence
  Description of Artificial Sequence: Synthetic oligonucleotide
uacccgugacaucacagau

SEQ ID NO: 1244475 - RNA, 19 nt, Artificial Sequence
  Description of Artificial Sequence: Synthetic oligonucleotide
auaauccuuucguguagga

SEQ ID NO: 1244476 - RNA, 19 nt, Artificial Sequence
  Description of Artificial Sequence: Synthetic oligonucleotide
cgaaguucagccuuacucc

SEQ ID NO: 1244477 - RNA, 19 nt, Artificial Sequence
  Description of Artificial Sequence: Synthetic oligonucleotide
cuaaguucugacuuugccu

SEQ ID NO: 1244478 - RNA, 19 nt, Artificial Sequence
  Description of Artificial Sequence: Synthetic oligonucleotide
agcuacgagggccaacugu

SEQ ID NO: 1244479 - RNA, 19 nt, Artificial Sequence
  Description of Artificial Sequence: Synthetic oligonucleotide
agcacaaucuucucuugua

SEQ ID NO: 1244480 - RNA, 19 nt, Artificial Sequence
  Description of Artificial Sequence: Synthetic oligonucleotide
guacugcagaccaagucgc

SEQ ID NO: 1244481 - RNA, 19 nt, Artificial Sequence
  Description of Artificial Sequence: Synthetic oligonucleotide
cagcucguuagagacaaag

SEQ ID NO: 1244482 - RNA, 19 nt, Artificial Sequence
  Description of Artificial Sequence: Synthetic oligonucleotide
gagccaacgucuuggucug

SEQ ID NO: 1244483 - RNA, 19 nt, Artificial Sequence
  Description of Artificial Sequence: Synthetic oligonucleotide
cagggagucgcuucacgcc

SEQ ID NO: 1244484 - RNA, 19 nt, Artificial Sequence
  Description of Artificial Sequence: Synthetic oligonucleotide
auaccgaucaauggcuucu

SEQ ID NO: 1244485 - RNA, 19 nt, Artificial Sequence
  Description of Artificial Sequence: Synthetic oligonucleotide
gcaccuuagaaaccucugg

SEQ ID NO: 1244486 - RNA, 19 nt, Artificial Sequence
  Description of Artificial Sequence: Synthetic oligonucleotide
agaauucgugacaccaaag

SEQ ID NO: 1244487 - RNA, 19 nt, Artificial Sequence
  Description of Artificial Sequence: Synthetic oligonucleotide
ugucgcucugguuuucuaa

SEQ ID NO: 1244488 - RNA, 19 nt, Artificial Sequence
  Description of Artificial Sequence: Synthetic oligonucleotide
acaucguagaccagguuca

SEQ ID NO: 1244489 - RNA, 19 nt, Artificial Sequence
  Description of Artificial Sequence: Synthetic oligonucleotide
agaccaagucgcaccaugg

SEQ ID NO: 1244490 - RNA, 19 nt, Artificial Sequence
  Description of Artificial Sequence: Synthetic oligonucleotide
acaagaucccuggagaguu

SEQ ID NO: 1244491 - RNA, 19 nt, Artificial Sequence
  Description of Artificial Sequence: Synthetic oligonucleotide
uaauccuuucguguaggaa

SEQ ID NO: 1244492 - RNA, 19 nt, Artificial Sequence
  Description of Artificial Sequence: Synthetic oligonucleotide
ucauugggagguguugugu

SEQ ID NO: 1244493 - RNA, 19 nt, Artificial Sequence
  Description of Artificial Sequence: Synthetic oligonucleotide
uuucguguaggaaccuguu

SEQ ID NO: 1244494 - RNA, 19 nt, Artificial Sequence
  Description of Artificial Sequence: Synthetic oligonucleotide
agaaguguggggccuucga

SEQ ID NO: 1244495 - RNA, 19 nt, Artificial Sequence
  Description of Artificial Sequence: Synthetic oligonucleotide
agggagucgcuucacgccu

SEQ ID NO: 1244496 - RNA, 19 nt, Artificial Sequence
  Description of Artificial Sequence: Synthetic oligonucleotide
ucgaccugaaggugcucag

SEQ ID NO: 1244497 - RNA, 19 nt, Artificial Sequence
  Description of Artificial Sequence: Synthetic oligonucleotide
gaugggaugcucauguacu

SEQ ID NO: 1244498 - RNA, 19 nt, Artificial Sequence
  Description of Artificial Sequence: Synthetic oligonucleotide
cagugauuuccuuguuaag

SEQ ID NO: 1244499 - RNA, 19 nt, Artificial Sequence
  Description of Artificial Sequence: Synthetic oligonucleotide
cauaccgaucaauggcuuc

SEQ ID NO: 1244500 - RNA, 19 nt, Artificial Sequence
  Description of Artificial Sequence: Synthetic oligonucleotide
ugcucuugacucgaaggac

SEQ ID NO: 1244501 - RNA, 19 nt, Artificial Sequence
  Description of Artificial Sequence: Synthetic oligonucleotide
auggcguugcacaugcuug

SEQ ID NO: 1244502 - RNA, 19 nt, Artificial Sequence
  Description of Artificial Sequence: Synthetic oligonucleotide
cuucucuuguacauaccga

SEQ ID NO: 1244503 - RNA, 19 nt, Artificial Sequence
  Description of Artificial Sequence: Synthetic oligonucleotide
cagaccaagucgcaccaug

SEQ ID NO: 1244504 - RNA, 19 nt, Artificial Sequence
  Description of Artificial Sequence: Synthetic oligonucleotide
caggggagucacaucguag

SEQ ID NO: 1244505 - RNA, 19 nt, Artificial Sequence
  Description of Artificial Sequence: Synthetic oligonucleotide
caagcacaaucuucucuug

SEQ ID NO: 1244506 - RNA, 19 nt, Artificial Sequence
  Description of Artificial Sequence: Synthetic oligonucleotide
cuuucagcgcgaaguucag

SEQ ID NO: 1244507 - RNA, 19 nt, Artificial Sequence
  Description of Artificial Sequence: Synthetic oligonucleotide
cucagggagucgcuucacg

SEQ ID NO: 1244508 - RNA, 19 nt, Artificial Sequence
  Description of Artificial Sequence: Synthetic oligonucleotide
cauauaccaggaucacguc

SEQ ID NO: 1244509 - RNA, 19 nt, Artificial Sequence
  Description of Artificial Sequence: Synthetic oligonucleotide
caaccggagcgaugggugg

SEQ ID NO: 1244510 - RNA, 19 nt, Artificial Sequence
  Description of Artificial Sequence: Synthetic oligonucleotide
ucgaagcagugugauacac

SEQ ID NO: 1244511 - RNA, 19 nt, Artificial Sequence
  Description of Artificial Sequence: Synthetic oligonucleotide
ucgcucugguuuucuaaca

SEQ ID NO: 1244512 - RNA, 19 nt, Artificial Sequence
  Description of Artificial Sequence: Synthetic oligonucleotide
uggccgcggagaaaguucu

SEQ ID NO: 1244513 - RNA, 19 nt, Artificial Sequence
  Description of Artificial Sequence: Synthetic oligonucleotide
gucccuacccgugacauca

SEQ ID NO: 1244514 - RNA, 19 nt, Artificial Sequence
  Description of Artificial Sequence: Synthetic oligonucleotide
aucguagaccagguucaac

SEQ ID NO: 1244515 - RNA, 19 nt, Artificial Sequence
  Description of Artificial Sequence: Synthetic oligonucleotide
gguuuucuaacaagccucc

SEQ ID NO: 1244516 - RNA, 19 nt, Artificial Sequence
  Description of Artificial Sequence: Synthetic oligonucleotide
cuucuuagaggcaaaccgu

SEQ ID NO: 1244517 - RNA, 19 nt, Artificial Sequence
  Description of Artificial Sequence: Synthetic oligonucleotide
aacaggcacagaacuacaa

SEQ ID NO: 1244518 - RNA, 19 nt, Artificial Sequence
  Description of Artificial Sequence: Synthetic oligonucleotide
ugccaguuagccagggcua

SEQ ID NO: 1244519 - RNA, 19 nt, Artificial Sequence
  Description of Artificial Sequence: Synthetic oligonucleotide
ccaagucgcaccauggcug

SEQ ID NO: 1244520 - RNA, 19 nt, Artificial Sequence
  Description of Artificial Sequence: Synthetic oligonucleotide
ggauccauaauccuuucgu

SEQ ID NO: 1244521 - RNA, 19 nt, Artificial Sequence
  Description of Artificial Sequence: Synthetic oligonucleotide
ucccgcuuggaagugcuca

SEQ ID NO: 1244522 - RNA, 19 nt, Artificial Sequence
  Description of Artificial Sequence: Synthetic oligonucleotide
cuacgagggccaacugugc

SEQ ID NO: 1244523 - RNA, 19 nt, Artificial Sequence
  Description of Artificial Sequence: Synthetic oligonucleotide
ucagcgcgaaguucagccu

SEQ ID NO: 1244524 - RNA, 19 nt, Artificial Sequence
  Description of Artificial Sequence: Synthetic oligonucleotide
agaggcaaaccgugaaauu

SEQ ID NO: 1244525 - RNA, 19 nt, Artificial Sequence
  Description of Artificial Sequence: Synthetic oligonucleotide
gaacauccauauaccagga

SEQ ID NO: 1244526 - RNA, 19 nt, Artificial Sequence
  Description of Artificial Sequence: Synthetic oligonucleotide
cuggccgcggagaaaguuc

SEQ ID NO: 1244527 - RNA, 19 nt, Artificial Sequence
  Description of Artificial Sequence: Synthetic oligonucleotide
uacugggucaaggaauuuu

SEQ ID NO: 1244528 - RNA, 19 nt, Artificial Sequence
  Description of Artificial Sequence: Synthetic oligonucleotide
gucgcuucacgccugaggu

SEQ ID NO: 1244529 - RNA, 19 nt, Artificial Sequence
  Description of Artificial Sequence: Synthetic oligonucleotide
gggaguacugcagaccaag

SEQ ID NO: 1244530 - RNA, 19 nt, Artificial Sequence
  Description of Artificial Sequence: Synthetic oligonucleotide
acauuaugcgcucgagcua

SEQ ID NO: 1244531 - RNA, 19 nt, Artificial Sequence
  Description of Artificial Sequence: Synthetic oligonucleotide
cuagucuuguuucuuuucu

SEQ ID NO: 1244532 - RNA, 19 nt, Artificial Sequence
  Description of Artificial Sequence: Synthetic oligonucleotide
gcuacgagggccaacugug

SEQ ID NO: 1244533 - RNA, 19 nt, Artificial Sequence
  Description of Artificial Sequence: Synthetic oligonucleotide
gcucugguuuucuaacaag

SEQ ID NO: 1244534 - RNA, 19 nt, Artificial Sequence
  Description of Artificial Sequence: Synthetic oligonucleotide
gggucuacuugacucugag

SEQ ID NO: 1244535 - RNA, 19 nt, Artificial Sequence
  Description of Artificial Sequence: Synthetic oligonucleotide
gucugcuguacugggguag

SEQ ID NO: 1244536 - RNA, 19 nt, Artificial Sequence
  Description of Artificial Sequence: Synthetic oligonucleotide
agcaccuuagaaaccucug

SEQ ID NO: 1244537 - RNA, 19 nt, Artificial Sequence
  Description of Artificial Sequence: Synthetic oligonucleotide
acaugcuugcagacagggg

SEQ ID NO: 1244538 - RNA, 19 nt, Artificial Sequence
  Description of Artificial Sequence: Synthetic oligonucleotide
acccgugacaucacagauc

SEQ ID NO: 1244539 - RNA, 19 nt, Artificial Sequence
  Description of Artificial Sequence: Synthetic oligonucleotide
cucaagucggggccggcug

SEQ ID NO: 1244540 - RNA, 19 nt, Artificial Sequence
  Description of Artificial Sequence: Synthetic oligonucleotide
cuguacgcguucacagaac

SEQ ID NO: 1244541 - RNA, 19 nt, Artificial Sequence
  Description of Artificial Sequence: Synthetic oligonucleotide
uuucagcgcgaaguucagc

SEQ ID NO: 1244542 - RNA, 19 nt, Artificial Sequence
  Description of Artificial Sequence: Synthetic oligonucleotide
ggaacauuaugcgcucgag

SEQ ID NO: 1244543 - RNA, 19 nt, Artificial Sequence
  Description of Artificial Sequence: Synthetic oligonucleotide
gccuucaucucggaucucg

SEQ ID NO: 1244544 - RNA, 19 nt, Artificial Sequence
  Description of Artificial Sequence: Synthetic oligonucleotide
ccuuucagcgcgaaguuca

SEQ ID NO: 1244545 - RNA, 19 nt, Artificial Sequence
  Description of Artificial Sequence: Synthetic oligonucleotide
cugcagaucaucgggguca

SEQ ID NO: 1244546 - RNA, 19 nt, Artificial Sequence
  Description of Artificial Sequence: Synthetic oligonucleotide
gagcaugcgccuucccuca

SEQ ID NO: 1244547 - RNA, 19 nt, Artificial Sequence
  Description of Artificial Sequence: Synthetic oligonucleotide
cugugaucaccagauccac

SEQ ID NO: 1244548 - RNA, 19 nt, Artificial Sequence
  Description of Artificial Sequence: Synthetic oligonucleotide
uccccgucacugaucuucu

SEQ ID NO: 1244549 - RNA, 19 nt, Artificial Sequence
  Description of Artificial Sequence: Synthetic oligonucleotide
uacuccggccagcuggaau

SEQ ID NO: 1244550 - RNA, 19 nt, Artificial Sequence
  Description of Artificial Sequence: Synthetic oligonucleotide
gaacggagcaugcgccuuc

SEQ ID NO: 1244551 - RNA, 19 nt, Artificial Sequence
  Description of Artificial Sequence: Synthetic oligonucleotide
cuuucguguaggaaccugu

SEQ ID NO: 1244552 - RNA, 19 nt, Artificial Sequence
  Description of Artificial Sequence: Synthetic oligonucleotide
aggcuuccuggagaauucg

SEQ ID NO: 1244553 - RNA, 19 nt, Artificial Sequence
  Description of Artificial Sequence: Synthetic oligonucleotide
gucuguacgcguucacaga

SEQ ID NO: 1244554 - RNA, 19 nt, Artificial Sequence
  Description of Artificial Sequence: Synthetic oligonucleotide
gauggcguugcacaugcuu

SEQ ID NO: 1244555 - RNA, 19 nt, Artificial Sequence
  Description of Artificial Sequence: Synthetic oligonucleotide
cuggaacauuaugcgcucg

SEQ ID NO: 1244556 - RNA, 19 nt, Artificial Sequence
  Description of Artificial Sequence: Synthetic oligonucleotide
uuaugcgcucgagcuacga

SEQ ID NO: 1244557 - RNA, 19 nt, Artificial Sequence
  Description of Artificial Sequence: Synthetic oligonucleotide
cgugacaccaaagaugaac

SEQ ID NO: 1244558 - RNA, 19 nt, Artificial Sequence
  Description of Artificial Sequence: Synthetic oligonucleotide
cgugaaauugccugagcug

SEQ ID NO: 1244559 - RNA, 19 nt, Artificial Sequence
  Description of Artificial Sequence: Synthetic oligonucleotide
agaggaugggaugcucaug

SEQ ID NO: 1244560 - RNA, 19 nt, Artificial Sequence
  Description of Artificial Sequence: Synthetic oligonucleotide
ucgcuucacgccugaggug

SEQ ID NO: 1244561 - RNA, 19 nt, Artificial Sequence
  Description of Artificial Sequence: Synthetic oligonucleotide
uugggagguguuguguaau

SEQ ID NO: 1244562 - RNA, 19 nt, Artificial Sequence
  Description of Artificial Sequence: Synthetic oligonucleotide
gaccaguacuggaacauua

SEQ ID NO: 1244563 - RNA, 19 nt, Artificial Sequence
  Description of Artificial Sequence: Synthetic oligonucleotide
agguguuguguaauccuga

SEQ ID NO: 1244564 - RNA, 19 nt, Artificial Sequence
  Description of Artificial Sequence: Synthetic oligonucleotide
caacugugcugucccuacc

SEQ ID NO: 1244565 - RNA, 19 nt, Artificial Sequence
  Description of Artificial Sequence: Synthetic oligonucleotide
cugccaguuagccagggcu

SEQ ID NO: 1244566 - RNA, 19 nt, Artificial Sequence
  Description of Artificial Sequence: Synthetic oligonucleotide
ggucuacuugacucugagc

SEQ ID NO: 1244567 - RNA, 19 nt, Artificial Sequence
  Description of Artificial Sequence: Synthetic oligonucleotide
ugcccaauucugugaucac

SEQ ID NO: 1244568 - RNA, 19 nt, Artificial Sequence
  Description of Artificial Sequence: Synthetic oligonucleotide
cauugggagguguugugua

SEQ ID NO: 1244569 - RNA, 19 nt, Artificial Sequence
  Description of Artificial Sequence: Synthetic oligonucleotide
ccagcauggacaagagaac

SEQ ID NO: 1244570 - RNA, 19 nt, Artificial Sequence
  Description of Artificial Sequence: Synthetic oligonucleotide
acggagcaugcgccuuccc

SEQ ID NO: 1244571 - RNA, 19 nt, Artificial Sequence
  Description of Artificial Sequence: Synthetic oligonucleotide
gcggcacugggucaagaag

SEQ ID NO: 1244572 - RNA, 19 nt, Artificial Sequence
  Description of Artificial Sequence: Synthetic oligonucleotide
ugucugcuguacuggggua

SEQ ID NO: 1244573 - RNA, 19 nt, Artificial Sequence
  Description of Artificial Sequence: Synthetic oligonucleotide
acugaucuucuuagaggca

SEQ ID NO: 1244574 - RNA, 19 nt, Artificial Sequence
  Description of Artificial Sequence: Synthetic oligonucleotide
gguguuguguaauccugaa

SEQ ID NO: 1244575 - RNA, 19 nt, Artificial Sequence
  Description of Artificial Sequence: Synthetic oligonucleotide
guaggaaccuguugucgcu

SEQ ID NO: 1244576 - RNA, 19 nt, Artificial Sequence
  Description of Artificial Sequence: Synthetic oligonucleotide
guacugggguaggugggag

SEQ ID NO: 1244577 - RNA, 19 nt, Artificial Sequence
  Description of Artificial Sequence: Synthetic oligonucleotide
uaggaaccuguugucgcuc

SEQ ID NO: 1244578 - RNA, 19 nt, Artificial Sequence
  Description of Artificial Sequence: Synthetic oligonucleotide
gcgccuucccucaagucgg

SEQ ID NO: 1244579 - RNA, 19 nt, Artificial Sequence
  Description of Artificial Sequence: Synthetic oligonucleotide
gcugcaagcacaaucuucu

SEQ ID NO: 1244580 - RNA, 19 nt, Artificial Sequence
  Description of Artificial Sequence: Synthetic oligonucleotide
auuaugcgcucgagcuacg

SEQ ID NO: 1244581 - RNA, 19 nt, Artificial Sequence
  Description of Artificial Sequence: Synthetic oligonucleotide
caacaaccggagcgauggg

SEQ ID NO: 1244582 - RNA, 19 nt, Artificial Sequence
  Description of Artificial Sequence: Synthetic oligonucleotide
caugcccaauucugugauc

SEQ ID NO: 1244583 - RNA, 19 nt, Artificial Sequence
  Description of Artificial Sequence: Synthetic oligonucleotide
agucgcaccauggcugggu

SEQ ID NO: 1244584 - RNA, 19 nt, Artificial Sequence
  Description of Artificial Sequence: Synthetic oligonucleotide
gcauggacaagagaacgga

SEQ ID NO: 1244585 - RNA, 19 nt, Artificial Sequence
  Description of Artificial Sequence: Synthetic oligonucleotide
gagaacggagcaugcgccu

SEQ ID NO: 1244586 - RNA, 19 nt, Artificial Sequence
  Description of Artificial Sequence: Synthetic oligonucleotide
gcugauguaggguuuuagu

SEQ ID NO: 1244587 - RNA, 19 nt, Artificial Sequence
  Description of Artificial Sequence: Synthetic oligonucleotide
cagaaguguggggccuucg

SEQ ID NO: 1244588 - RNA, 19 nt, Artificial Sequence
  Description of Artificial Sequence: Synthetic oligonucleotide
gagcuacgagggccaacug

SEQ ID NO: 1244589 - RNA, 19 nt, Artificial Sequence
  Description of Artificial Sequence: Synthetic oligonucleotide
caagggaucaugcccaauu

SEQ ID NO: 1244590 - RNA, 19 nt, Artificial Sequence
  Description of Artificial Sequence: Synthetic oligonucleotide
ugucccuacccgugacauc

SEQ ID NO: 1244591 - RNA, 19 nt, Artificial Sequence
  Description of Artificial Sequence: Synthetic oligonucleotide
acagauccauuggccagga

SEQ ID NO: 1244592 - RNA, 19 nt, Artificial Sequence
  Description of Artificial Sequence: Synthetic oligonucleotide
uccuuucguguaggaaccu

SEQ ID NO: 1244593 - RNA, 19 nt, Artificial Sequence
  Description of Artificial Sequence: Synthetic oligonucleotide
gagcacauaggaggcugca

SEQ ID NO: 1244594 - RNA, 19 nt, Artificial Sequence
  Description of Artificial Sequence: Synthetic oligonucleotide
uggguggaucacagaggau

SEQ ID NO: 1244595 - RNA, 19 nt, Artificial Sequence
  Description of Artificial Sequence: Synthetic oligonucleotide
uaccgaucaauggcuucuc

SEQ ID NO: 1244596 - RNA, 19 nt, Artificial Sequence
  Description of Artificial Sequence: Synthetic oligonucleotide
agucggggccggcugucca

SEQ ID NO: 1244597 - RNA, 19 nt, Artificial Sequence
  Description of Artificial Sequence: Synthetic oligonucleotide
acgcguucacagaacuugu

SEQ ID NO: 1244598 - RNA, 19 nt, Artificial Sequence
  Description of Artificial Sequence: Synthetic oligonucleotide
gugauacaccgggcauugg

SEQ ID NO: 1244599 - RNA, 19 nt, Artificial Sequence
  Description of Artificial Sequence: Synthetic oligonucleotide
ccgcggagaaaguucugcc

SEQ ID NO: 1244600 - RNA, 19 nt, Artificial Sequence
  Description of Artificial Sequence: Synthetic oligonucleotide
cacagaggaugggaugcuc

SEQ ID NO: 1244601 - RNA, 19 nt, Artificial Sequence
  Description of Artificial Sequence: Synthetic oligonucleotide
ugccagugauuuccuuguu

SEQ ID NO: 1244602 - RNA, 19 nt, Artificial Sequence
  Description of Artificial Sequence: Synthetic oligonucleotide
ucgugacaccaaagaugaa

SEQ ID NO: 1244603 - RNA, 19 nt, Artificial Sequence
  Description of Artificial Sequence: Synthetic oligonucleotide
cacuacccggaaccgccug

SEQ ID NO: 1244604 - RNA, 19 nt, Artificial Sequence
  Description of Artificial Sequence: Synthetic oligonucleotide
ugcagaucaucggggucau

SEQ ID NO: 1244605 - RNA, 19 nt, Artificial Sequence
  Description of Artificial Sequence: Synthetic oligonucleotide
ggagcgaugggugguucug

SEQ ID NO: 1244606 - RNA, 19 nt, Artificial Sequence
  Description of Artificial Sequence: Synthetic oligonucleotide
acauaccgaucaauggcuu

SEQ ID NO: 1244607 - RNA, 19 nt, Artificial Sequence
  Description of Artificial Sequence: Synthetic oligonucleotide
uguugucgcucugguuuuc

SEQ ID NO: 1244608 - RNA, 19 nt, Artificial Sequence
  Description of Artificial Sequence: Synthetic oligonucleotide
ccaacgucuuggucuggcc

SEQ ID NO: 1244609 - RNA, 19 nt, Artificial Sequence
  Description of Artificial Sequence: Synthetic oligonucleotide
gccgcggagaaaguucugc

SEQ ID NO: 1244610 - RNA, 19 nt, Artificial Sequence
  Description of Artificial Sequence: Synthetic oligonucleotide
ucccuacccgugacaucac

SEQ ID NO: 1244611 - RNA, 19 nt, Artificial Sequence
  Description of Artificial Sequence: Synthetic oligonucleotide
accuguugucgcucugguu

SEQ ID NO: 1244612 - RNA, 19 nt, Artificial Sequence
  Description of Artificial Sequence: Synthetic oligonucleotide
agaacggagcaugcgccuu

SEQ ID NO: 1244613 - RNA, 19 nt, Artificial Sequence
  Description of Artificial Sequence: Synthetic oligonucleotide
gaaaccucugggagcacau

SEQ ID NO: 1244614 - RNA, 19 nt, Artificial Sequence
  Description of Artificial Sequence: Synthetic oligonucleotide
gggccuucgaccugaaggu

SEQ ID NO: 1244615 - RNA, 19 nt, Artificial Sequence
  Description of Artificial Sequence: Synthetic oligonucleotide
cugggucaaggaauuuugu

SEQ ID NO: 1244616 - RNA, 19 nt, Artificial Sequence
  Description of Artificial Sequence: Synthetic oligonucleotide
cguguaggaaccuguuguc

SEQ ID NO: 1244617 - RNA, 19 nt, Artificial Sequence
  Description of Artificial Sequence: Synthetic oligonucleotide
ucgagcuacgagggccaac

SEQ ID NO: 1244618 - RNA, 19 nt, Artificial Sequence
  Description of Artificial Sequence: Synthetic oligonucleotide
ccuguugucgcucugguuu

SEQ ID NO: 1244619 - RNA, 19 nt, Artificial Sequence
  Description of Artificial Sequence: Synthetic oligonucleotide
gaagcugauguaggguuuu

SEQ ID NO: 1244620 - RNA, 19 nt, Artificial Sequence
  Description of Artificial Sequence: Synthetic oligonucleotide
cacugcagaucaucggggu

SEQ ID NO: 1244621 - RNA, 19 nt, Artificial Sequence
  Description of Artificial Sequence: Synthetic oligonucleotide
ggaaccgccugcccucgac

SEQ ID NO: 1244622 - RNA, 19 nt, Artificial Sequence
  Description of Artificial Sequence: Synthetic oligonucleotide
caccauggcuggguggauc

SEQ ID NO: 1244623 - RNA, 19 nt, Artificial Sequence
  Description of Artificial Sequence: Synthetic oligonucleotide
guaggagguggggacccca

SEQ ID NO: 1244624 - RNA, 19 nt, Artificial Sequence
  Description of Artificial Sequence: Synthetic oligonucleotide
ccgcuugcacugcagauca

SEQ ID NO: 1244625 - RNA, 19 nt, Artificial Sequence
  Description of Artificial Sequence: Synthetic oligonucleotide
cagauccauuggccaggag

SEQ ID NO: 1244626 - RNA, 19 nt, Artificial Sequence
  Description of Artificial Sequence: Synthetic oligonucleotide
accgccugcccucgaccca

SEQ ID NO: 1244627 - RNA, 19 nt, Artificial Sequence
  Description of Artificial Sequence: Synthetic oligonucleotide
gccagugauuuccuuguua

SEQ ID NO: 1244628 - RNA, 19 nt, Artificial Sequence
  Description of Artificial Sequence: Synthetic oligonucleotide
ggggucauccagcucguua

SEQ ID NO: 1244629 - RNA, 19 nt, Artificial Sequence
  Description of Artificial Sequence: Synthetic oligonucleotide
cugcccucgacccaggcuu

SEQ ID NO: 1244630 - RNA, 19 nt, Artificial Sequence
  Description of Artificial Sequence: Synthetic oligonucleotide
gucggggccggcuguccac

SEQ ID NO: 1244631 - RNA, 19 nt, Artificial Sequence
  Description of Artificial Sequence: Synthetic oligonucleotide
ggucauccagcucguuaga

SEQ ID NO: 1244632 - RNA, 19 nt, Artificial Sequence
  Description of Artificial Sequence: Synthetic oligonucleotide
cuucaucucggaucucgau

SEQ ID NO: 1244633 - RNA, 19 nt, Artificial Sequence
  Description of Artificial Sequence: Synthetic oligonucleotide
caugcgccuucccucaagu

SEQ ID NO: 1244634 - RNA, 19 nt, Artificial Sequence
  Description of Artificial Sequence: Synthetic oligonucleotide
ggaucaugcccaauucugu

SEQ ID NO: 1244635 - RNA, 19 nt, Artificial Sequence
  Description of Artificial Sequence: Synthetic oligonucleotide
acaagggaucaugcccaau

SEQ ID NO: 1244636 - RNA, 19 nt, Artificial Sequence
  Description of Artificial Sequence: Synthetic oligonucleotide
uagaaaccucugggagcac

SEQ ID NO: 1244637 - RNA, 19 nt, Artificial Sequence
  Description of Artificial Sequence: Synthetic oligonucleotide
ccuuucguguaggaaccug

SEQ ID NO: 1244638 - RNA, 19 nt, Artificial Sequence
  Description of Artificial Sequence: Synthetic oligonucleotide
ggcaucagucuguacgcgu

SEQ ID NO: 1244639 - RNA, 19 nt, Artificial Sequence
  Description of Artificial Sequence: Synthetic oligonucleotide
acgucuuggucuggccccu

SEQ ID NO: 1244640 - RNA, 19 nt, Artificial Sequence
  Description of Artificial Sequence: Synthetic oligonucleotide
gcguucacagaacuuguau

SEQ ID NO: 1244641 - RNA, 19 nt, Artificial Sequence
  Description of Artificial Sequence: Synthetic oligonucleotide
cgcucgagcuacgagggcc

SEQ ID NO: 1244642 - RNA, 19 nt, Artificial Sequence
  Description of Artificial Sequence: Synthetic oligonucleotide
ccgugaaauugccugagcu

SEQ ID NO: 1244643 - RNA, 19 nt, Artificial Sequence
  Description of Artificial Sequence: Synthetic oligonucleotide
caagucggggccggcuguc

SEQ ID NO: 1244644 - RNA, 19 nt, Artificial Sequence
  Description of Artificial Sequence: Synthetic oligonucleotide
gaaggacaacaggcacaga

SEQ ID NO: 1244645 - RNA, 19 nt, Artificial Sequence
  Description of Artificial Sequence: Synthetic oligonucleotide
ggcggcacugggucaagaa

SEQ ID NO: 1244646 - RNA, 19 nt, Artificial Sequence
  Description of Artificial Sequence: Synthetic oligonucleotide
aggcugacuuuggauccau

SEQ ID NO: 1244647 - RNA, 19 nt, Artificial Sequence
  Description of Artificial Sequence: Synthetic oligonucleotide
agccaacgucuuggucugg

SEQ ID NO: 1244648 - RNA, 19 nt, Artificial Sequence
  Description of Artificial Sequence: Synthetic oligonucleotide
agcgcgaaguucagccuua

SEQ ID NO: 1244649 - RNA, 19 nt, Artificial Sequence
  Description of Artificial Sequence: Synthetic oligonucleotide
gcugucccuacccgugaca

SEQ ID NO: 1244650 - RNA, 19 nt, Artificial Sequence
  Description of Artificial Sequence: Synthetic oligonucleotide
ccgaucaauggcuucucua

SEQ ID NO: 1244651 - RNA, 19 nt, Artificial Sequence
  Description of Artificial Sequence: Synthetic oligonucleotide
ggagucgcuucacgccuga

SEQ ID NO: 1244652 - RNA, 19 nt, Artificial Sequence
  Description of Artificial Sequence: Synthetic oligonucleotide
ggccuucgaccugaaggug

SEQ ID NO: 1244653 - RNA, 19 nt, Artificial Sequence
  Description of Artificial Sequence: Synthetic oligonucleotide
gcgaugggugguucugcca

SEQ ID NO: 1244654 - RNA, 19 nt, Artificial Sequence
  Description of Artificial Sequence: Synthetic oligonucleotide
gugugauacaccgggcauu

SEQ ID NO: 1244655 - RNA, 19 nt, Artificial Sequence
  Description of Artificial Sequence: Synthetic oligonucleotide
ccaguuagccagggcuacc

SEQ ID NO: 1244656 - RNA, 19 nt, Artificial Sequence
  Description of Artificial Sequence: Synthetic oligonucleotide
caucguagaccagguucaa

SEQ ID NO: 1244657 - RNA, 19 nt, Artificial Sequence
  Description of Artificial Sequence: Synthetic oligonucleotide
gagggccaacugugcuguc

SEQ ID NO: 1244658 - RNA, 19 nt, Artificial Sequence
  Description of Artificial Sequence: Synthetic oligonucleotide
cuguugucgcucugguuuu

SEQ ID NO: 1244659 - RNA, 19 nt, Artificial Sequence
  Description of Artificial Sequence: Synthetic oligonucleotide
cuccuuucagcgcgaaguu

SEQ ID NO: 1244660 - RNA, 19 nt, Artificial Sequence
  Description of Artificial Sequence: Synthetic oligonucleotide
gcucgagcuacgagggcca

SEQ ID NO: 1244661 - RNA, 19 nt, Artificial Sequence
  Description of Artificial Sequence: Synthetic oligonucleotide
cugucccuacccgugacau

SEQ ID NO: 1244662 - RNA, 19 nt, Artificial Sequence
  Description of Artificial Sequence: Synthetic oligonucleotide
ccucgacccaggcuuccug

SEQ ID NO: 1244663 - RNA, 19 nt, Artificial Sequence
  Description of Artificial Sequence: Synthetic oligonucleotide
cgugacaucacagauccau

SEQ ID NO: 1244664 - RNA, 19 nt, Artificial Sequence
  Description of Artificial Sequence: Synthetic oligonucleotide
accggagcgaugggugguu

SEQ ID NO: 1244665 - RNA, 19 nt, Artificial Sequence
  Description of Artificial Sequence: Synthetic oligonucleotide
ggcguugcacaugcuugca

SEQ ID NO: 1244666 - RNA, 19 nt, Artificial Sequence
  Description of Artificial Sequence: Synthetic oligonucleotide
uccggccagcuggaauuuu

SEQ ID NO: 1244667 - RNA, 19 nt, Artificial Sequence
  Description of Artificial Sequence: Synthetic oligonucleotide
ggagugcaugagcucccaa

SEQ ID NO: 1244668 - RNA, 19 nt, Artificial Sequence
  Description of Artificial Sequence: Synthetic oligonucleotide
cagaacuacaagggaucau

SEQ ID NO: 1244669 - RNA, 19 nt, Artificial Sequence
  Description of Artificial Sequence: Synthetic oligonucleotide
cuaccaggugcugggaguu

SEQ ID NO: 1244670 - RNA, 19 nt, Artificial Sequence
  Description of Artificial Sequence: Synthetic oligonucleotide
ggaguacugcagaccaagu

SEQ ID NO: 1244671 - RNA, 19 nt, Artificial Sequence
  Description of Artificial Sequence: Synthetic oligonucleotide
ccuucgaccugaaggugcu

SEQ ID NO: 1244672 - RNA, 19 nt, Artificial Sequence
  Description of Artificial Sequence: Synthetic oligonucleotide
gcuucacgccugagguggc

SEQ ID NO: 1244673 - RNA, 19 nt, Artificial Sequence
  Description of Artificial Sequence: Synthetic oligonucleotide
cagugccucccaacucucu

SEQ ID NO: 1244674 - RNA, 19 nt, Artificial Sequence
  Description of Artificial Sequence: Synthetic oligonucleotide
gcgcucgagcuacgagggc

SEQ ID NO: 1244675 - RNA, 19 nt, Artificial Sequence
  Description of Artificial Sequence: Synthetic oligonucleotide
guacgcguucacagaacuu

SEQ ID NO: 1244676 - RNA, 19 nt, Artificial Sequence
  Description of Artificial Sequence: Synthetic oligonucleotide
ccgcuuggaagugcucaug

SEQ ID NO: 1244677 - RNA, 19 nt, Artificial Sequence
  Description of Artificial Sequence: Synthetic oligonucleotide
ccgccugcccucgacccag

SEQ ID NO: 1244678 - RNA, 19 nt, Artificial Sequence
  Description of Artificial Sequence: Synthetic oligonucleotide
gcaucagucuguacgcguu

SEQ ID NO: 1244679 - RNA, 19 nt, Artificial Sequence
  Description of Artificial Sequence: Synthetic oligonucleotide
cgagcuacgagggccaacu

SEQ ID NO: 1244680 - RNA, 19 nt, Artificial Sequence
  Description of Artificial Sequence: Synthetic oligonucleotide
gcaaggcucgaagcagugu

SEQ ID NO: 1244681 - RNA, 19 nt, Artificial Sequence
  Description of Artificial Sequence: Synthetic oligonucleotide
cccuacccgugacaucaca

SEQ ID NO: 1244682 - RNA, 19 nt, Artificial Sequence
  Description of Artificial Sequence: Synthetic oligonucleotide
ggccgcggagaaaguucug

SEQ ID NO: 1244683 - RNA, 19 nt, Artificial Sequence
  Description of Artificial Sequence: Synthetic oligonucleotide
cucgagcuacgagggccaa

SEQ ID NO: 1244684 - RNA, 19 nt, Artificial Sequence
  Description of Artificial Sequence: Synthetic oligonucleotide
gcgcgaaguucagccuuac

SEQ ID NO: 1244685 - RNA, 19 nt, Artificial Sequence
  Description of Artificial Sequence: Synthetic oligonucleotide
gcccucgacccaggcuucc

SEQ ID NO: 1244686 - RNA, 19 nt, Artificial Sequence
  Description of Artificial Sequence: Synthetic oligonucleotide
ggaucacguccccgucacu

SEQ ID NO: 1244687 - RNA, 19 nt, Artificial Sequence
  Description of Artificial Sequence: Synthetic oligonucleotide
ggcugacuuuggauccaua

SEQ ID NO: 1244688 - RNA, 19 nt, Artificial Sequence
  Description of Artificial Sequence: Synthetic oligonucleotide
ccucagaaguguggggccu

SEQ ID NO: 1244689 - RNA, 19 nt, Artificial Sequence
  Description of Artificial Sequence: Synthetic oligonucleotide
ccggagcgaugggugguuc

SEQ ID NO: 1244690 - RNA, 19 nt, Artificial Sequence
  Description of Artificial Sequence: Synthetic oligonucleotide
caccugcugcaaggcucga

SEQ ID NO: 1244691 - RNA, 19 nt, Artificial Sequence
  Description of Artificial Sequence: Synthetic oligonucleotide
cccgcuuggaagugcucau

SEQ ID NO: 1244692 - RNA, 19 nt, Artificial Sequence
  Description of Artificial Sequence: Synthetic oligonucleotide
ccgugacaucacagaucca

SEQ ID NO: 1244693 - RNA, 19 nt, Artificial Sequence
  Description of Artificial Sequence: Synthetic oligonucleotide
ccacuacccggaaccgccu

SEQ ID NO: 1244694 - RNA, 19 nt, Artificial Sequence
  Description of Artificial Sequence: Synthetic oligonucleotide
ccccgcuugcacugcagau

SEQ ID NO: 1244695 - RNA, 19 nt, Artificial Sequence
  Description of Artificial Sequence: Synthetic oligonucleotide
cgccugcccucgacccagg

SEQ ID NO: 1244696 - RNA, 19 nt, Artificial Sequence
  Description of Artificial Sequence: Synthetic oligonucleotide
gcagaccaagucgcaccau

SEQ ID NO: 1244697 - RNA, 19 nt, Artificial Sequence
  Description of Artificial Sequence: Synthetic oligonucleotide
cggagcgaugggugguucu

SEQ ID NO: 1244698 - RNA, 19 nt, Artificial Sequence
  Description of Artificial Sequence: Synthetic oligonucleotide
cgcgaaguucagccuuacu

SEQ ID NO: 1244699 - RNA, 19 nt, Artificial Sequence
  Description of Artificial Sequence: Synthetic oligonucleotide
cccuggccgcggagaaagu

SEQ ID NO: 1244700 - RNA, 19 nt, Artificial Sequence
  Description of Artificial Sequence: Synthetic oligonucleotide
aguagaaaaccaucggucc

SEQ ID NO: 1244701 - RNA, 19 nt, Artificial Sequence
  Description of Artificial Sequence: Synthetic oligonucleotide
ugugaaaacucccucgagg

SEQ ID NO: 1244702 - RNA, 19 nt, Artificial Sequence
  Description of Artificial Sequence: Synthetic oligonucleotide
aguuuggacacacagauga

SEQ ID NO: 1244703 - RNA, 19 nt, Artificial Sequence
  Description of Artificial Sequence: Synthetic oligonucleotide
aaaccaucgguccucacag

SEQ ID NO: 1244704 - RNA, 19 nt, Artificial Sequence
  Description of Artificial Sequence: Synthetic oligonucleotide
aagaaacccaugaagaaag

SEQ ID NO: 1244705 - RNA, 19 nt, Artificial Sequence
  Description of Artificial Sequence: Synthetic oligonucleotide
augccgaacacucagagug

SEQ ID NO: 1244706 - RNA, 19 nt, Artificial Sequence
  Description of Artificial Sequence: Synthetic oligonucleotide
ucugaccccgaccacagcg

SEQ ID NO: 1244707 - RNA, 19 nt, Artificial Sequence
  Description of Artificial Sequence: Synthetic oligonucleotide
aaauucuugucugcagagc

SEQ ID NO: 1244708 - RNA, 19 nt, Artificial Sequence
  Description of Artificial Sequence: Synthetic oligonucleotide
ucuuggacccauuucaggc

SEQ ID NO: 1244709 - RNA, 19 nt, Artificial Sequence
  Description of Artificial Sequence: Synthetic oligonucleotide
aaaaccaucgguccucaca

SEQ ID NO: 1244710 - RNA, 19 nt, Artificial Sequence
  Description of Artificial Sequence: Synthetic oligonucleotide
uguaccagcgccauguccu

SEQ ID NO: 1244711 - RNA, 19 nt, Artificial Sequence
  Description of Artificial Sequence: Synthetic oligonucleotide
agaacauuuuggaacaggg

SEQ ID NO: 1244712 - RNA, 19 nt, Artificial Sequence
  Description of Artificial Sequence: Synthetic oligonucleotide
uuggacacacagaugaugu

SEQ ID NO: 1244713 - RNA, 19 nt, Artificial Sequence
  Description of Artificial Sequence: Synthetic oligonucleotide
cugauuggcacucaggcac

SEQ ID NO: 1244714 - RNA, 19 nt, Artificial Sequence
  Description of Artificial Sequence: Synthetic oligonucleotide
gaaaagaccuacugucucc

SEQ ID NO: 1244715 - RNA, 19 nt, Artificial Sequence
  Description of Artificial Sequence: Synthetic oligonucleotide
gaggcagccagccaucugg

SEQ ID NO: 1244716 - RNA, 19 nt, Artificial Sequence
  Description of Artificial Sequence: Synthetic oligonucleotide
aaauggggugccaaacacc

SEQ ID NO: 1244717 - RNA, 19 nt, Artificial Sequence
  Description of Artificial Sequence: Synthetic oligonucleotide
aguucuguucauccaacuc

SEQ ID NO: 1244718 - RNA, 19 nt, Artificial Sequence
  Description of Artificial Sequence: Synthetic oligonucleotide
accaucgguccucacaggc

SEQ ID NO: 1244719 - RNA, 19 nt, Artificial Sequence
  Description of Artificial Sequence: Synthetic oligonucleotide
aacgcaccgaacuugccug

SEQ ID NO: 1244720 - RNA, 19 nt, Artificial Sequence
  Description of Artificial Sequence: Synthetic oligonucleotide
gaacacucacuccagggcc

SEQ ID NO: 1244721 - RNA, 19 nt, Artificial Sequence
  Description of Artificial Sequence: Synthetic oligonucleotide
gucugauuggcacucaggc

SEQ ID NO: 1244722 - RNA, 19 nt, Artificial Sequence
  Description of Artificial Sequence: Synthetic oligonucleotide
gaaaggaugagggugccgc

SEQ ID NO: 1244723 - RNA, 19 nt, Artificial Sequence
  Description of Artificial Sequence: Synthetic oligonucleotide
gaacucagcucccaguuug

SEQ ID NO: 1244724 - RNA, 19 nt, Artificial Sequence
  Description of Artificial Sequence: Synthetic oligonucleotide
guguaguagggguagacgc

SEQ ID NO: 1244725 - RNA, 19 nt, Artificial Sequence
  Description of Artificial Sequence: Synthetic oligonucleotide
accugugaaaacucccucg

SEQ ID NO: 1244726 - RNA, 19 nt, Artificial Sequence
  Description of Artificial Sequence: Synthetic oligonucleotide
uguguaguagggguagacg

SEQ ID NO: 1244727 - RNA, 19 nt, Artificial Sequence
  Description of Artificial Sequence: Synthetic oligonucleotide
ucaccauugcuuccaacgc

SEQ ID NO: 1244728 - RNA, 19 nt, Artificial Sequence
  Description of Artificial Sequence: Synthetic oligonucleotide
uuacaggaccgcuuccugg

SEQ ID NO: 1244729 - RNA, 19 nt, Artificial Sequence
  Description of Artificial Sequence: Synthetic oligonucleotide
aaacccaugaagaaaggau

SEQ ID NO: 1244730 - RNA, 19 nt, Artificial Sequence
  Description of Artificial Sequence: Synthetic oligonucleotide
ggaaucucuugucagaggc

SEQ ID NO: 1244731 - RNA, 19 nt, Artificial Sequence
  Description of Artificial Sequence: Synthetic oligonucleotide
uguaguagggguagacgca

SEQ ID NO: 1244732 - RNA, 19 nt, Artificial Sequence
  Description of Artificial Sequence: Synthetic oligonucleotide
uggaaaagaccuacugucu

SEQ ID NO: 1244733 - RNA, 19 nt, Artificial Sequence
  Description of Artificial Sequence: Synthetic oligonucleotide
cuccagucacuguagaacc

SEQ ID NO: 1244734 - RNA, 19 nt, Artificial Sequence
  Description of Artificial Sequence: Synthetic oligonucleotide
aaguagucguggcccaggg

SEQ ID NO: 1244735 - RNA, 19 nt, Artificial Sequence
  Description of Artificial Sequence: Synthetic oligonucleotide
agggaguagaaaaccaucg

SEQ ID NO: 1244736 - RNA, 19 nt, Artificial Sequence
  Description of Artificial Sequence: Synthetic oligonucleotide
aacacucacuccagggccc

SEQ ID NO: 1244737 - RNA, 19 nt, Artificial Sequence
  Description of Artificial Sequence: Synthetic oligonucleotide
gaguagaaaaccaucgguc

SEQ ID NO: 1244738 - RNA, 19 nt, Artificial Sequence
  Description of Artificial Sequence: Synthetic oligonucleotide
uggaacuccagucacugua

SEQ ID NO: 1244739 - RNA, 19 nt, Artificial Sequence
  Description of Artificial Sequence: Synthetic oligonucleotide
cacacucugaggaacacuc

SEQ ID NO: 1244740 - RNA, 19 nt, Artificial Sequence
  Description of Artificial Sequence: Synthetic oligonucleotide
uuuuggaacagggcuacug

SEQ ID NO: 1244741 - RNA, 19 nt, Artificial Sequence
  Description of Artificial Sequence: Synthetic oligonucleotide
ugaggaacacucacuccag

SEQ ID NO: 1244742 - RNA, 19 nt, Artificial Sequence
  Description of Artificial Sequence: Synthetic oligonucleotide
uuggacccauuucaggcag

SEQ ID NO: 1244743 - RNA, 19 nt, Artificial Sequence
  Description of Artificial Sequence: Synthetic oligonucleotide
gaugucucugugcugugug

SEQ ID NO: 1244744 - RNA, 19 nt, Artificial Sequence
  Description of Artificial Sequence: Synthetic oligonucleotide
acaucgggugcugagaguc

SEQ ID NO: 1244745 - RNA, 19 nt, Artificial Sequence
  Description of Artificial Sequence: Synthetic oligonucleotide
cucucagcugcucauuucc

SEQ ID NO: 1244746 - RNA, 19 nt, Artificial Sequence
  Description of Artificial Sequence: Synthetic oligonucleotide
gucacauugaacucagcuc

SEQ ID NO: 1244747 - RNA, 19 nt, Artificial Sequence
  Description of Artificial Sequence: Synthetic oligonucleotide
cauguccucucacagggcc

SEQ ID NO: 1244748 - RNA, 19 nt, Artificial Sequence
  Description of Artificial Sequence: Synthetic oligonucleotide
acucacgggaaaugcagag

SEQ ID NO: 1244749 - RNA, 19 nt, Artificial Sequence
  Description of Artificial Sequence: Synthetic oligonucleotide
auuccugucccgcacucag

SEQ ID NO: 1244750 - RNA, 19 nt, Artificial Sequence
  Description of Artificial Sequence: Synthetic oligonucleotide
ucugauuggcacucaggca

SEQ ID NO: 1244751 - RNA, 19 nt, Artificial Sequence
  Description of Artificial Sequence: Synthetic oligonucleotide
aggguuggcuguuacagga

SEQ ID NO: 1244752 - RNA, 19 nt, Artificial Sequence
  Description of Artificial Sequence: Synthetic oligonucleotide
cagugguggcauaagaaac

SEQ ID NO: 1244753 - RNA, 19 nt, Artificial Sequence
  Description of Artificial Sequence: Synthetic oligonucleotide
uccaacgcaccgaacuugc

SEQ ID NO: 1244754 - RNA, 19 nt, Artificial Sequence
  Description of Artificial Sequence: Synthetic oligonucleotide
auugaacucagcucccagu

SEQ ID NO: 1244755 - RNA, 19 nt, Artificial Sequence
  Description of Artificial Sequence: Synthetic oligonucleotide
guagucguggcccagggga

SEQ ID NO: 1244756 - RNA, 19 nt, Artificial Sequence
  Description of Artificial Sequence: Synthetic oligonucleotide
acgucccucgucugcaugc

SEQ ID NO: 1244757 - RNA, 19 nt, Artificial Sequence
  Description of Artificial Sequence: Synthetic oligonucleotide
gaacauuuuggaacagggc

SEQ ID NO: 1244758 - RNA, 19 nt, Artificial Sequence
  Description of Artificial Sequence: Synthetic oligonucleotide
gucaucagggcgcugguug

SEQ ID NO: 1244759 - RNA, 19 nt, Artificial Sequence
  Description of Artificial Sequence: Synthetic oligonucleotide
uuucaggcaggcuccagcu

SEQ ID NO: 1244760 - RNA, 19 nt, Artificial Sequence
  Description of Artificial Sequence: Synthetic oligonucleotide
ggagacgucacauugaacu

SEQ ID NO: 1244761 - RNA, 19 nt, Artificial Sequence
  Description of Artificial Sequence: Synthetic oligonucleotide
aggcagaccacagagcguc

SEQ ID NO: 1244762 - RNA, 19 nt, Artificial Sequence
  Description of Artificial Sequence: Synthetic oligonucleotide
aagaccuacugucuccaaa

SEQ ID NO: 1244763 - RNA, 19 nt, Artificial Sequence
  Description of Artificial Sequence: Synthetic oligonucleotide
cauggcacaguucuguuca

SEQ ID NO: 1244764 - RNA, 19 nt, Artificial Sequence
  Description of Artificial Sequence: Synthetic oligonucleotide
ugugguacagggucccaug

SEQ ID NO: 1244765 - RNA, 19 nt, Artificial Sequence
  Description of Artificial Sequence: Synthetic oligonucleotide
cucuuggacccauuucagg

SEQ ID NO: 1244766 - RNA, 19 nt, Artificial Sequence
  Description of Artificial Sequence: Synthetic oligonucleotide
ugacauggcugcagggcag

SEQ ID NO: 1244767 - RNA, 19 nt, Artificial Sequence
  Description of Artificial Sequence: Synthetic oligonucleotide
cagaacauuuuggaacagg

SEQ ID NO: 1244768 - RNA, 19 nt, Artificial Sequence
  Description of Artificial Sequence: Synthetic oligonucleotide
gggaguagaaaaccaucgg

SEQ ID NO: 1244769 - RNA, 19 nt, Artificial Sequence
  Description of Artificial Sequence: Synthetic oligonucleotide
aaaggaugagggugccgcu

SEQ ID NO: 1244770 - RNA, 19 nt, Artificial Sequence
  Description of Artificial Sequence: Synthetic oligonucleotide
gagagcuguccuugcauug

SEQ ID NO: 1244771 - RNA, 19 nt, Artificial Sequence
  Description of Artificial Sequence: Synthetic oligonucleotide
ugugccagacccacacucu

SEQ ID NO: 1244772 - RNA, 19 nt, Artificial Sequence
  Description of Artificial Sequence: Synthetic oligonucleotide
aguccacucaccagccucc

SEQ ID NO: 1244773 - RNA, 19 nt, Artificial Sequence
  Description of Artificial Sequence: Synthetic oligonucleotide
ugaaaacucccucgagguc

SEQ ID NO: 1244774 - RNA, 19 nt, Artificial Sequence
  Description of Artificial Sequence: Synthetic oligonucleotide
cauggcaggguucagggga

SEQ ID NO: 1244775 - RNA, 19 nt, Artificial Sequence
  Description of Artificial Sequence: Synthetic oligonucleotide
aggccugccccugacaugg

SEQ ID NO: 1244776 - RNA, 19 nt, Artificial Sequence
  Description of Artificial Sequence: Synthetic oligonucleotide
cauuuuggaacagggcuac

SEQ ID NO: 1244777 - RNA, 19 nt, Artificial Sequence
  Description of Artificial Sequence: Synthetic oligonucleotide
cagggaguagaaaaccauc

SEQ ID NO: 1244778 - RNA, 19 nt, Artificial Sequence
  Description of Artificial Sequence: Synthetic oligonucleotide
gacgucacauugaacucag

SEQ ID NO: 1244779 - RNA, 19 nt, Artificial Sequence
  Description of Artificial Sequence: Synthetic oligonucleotide
gagacgucacauugaacuc

SEQ ID NO: 1244780 - RNA, 19 nt, Artificial Sequence
  Description of Artificial Sequence: Synthetic oligonucleotide
uugucagaggcagccagcc

SEQ ID NO: 1244781 - RNA, 19 nt, Artificial Sequence
  Description of Artificial Sequence: Synthetic oligonucleotide
cugggaccgguccaggacg

SEQ ID NO: 1244782 - RNA, 19 nt, Artificial Sequence
  Description of Artificial Sequence: Synthetic oligonucleotide
acagagcgucucuggauuc

SEQ ID NO: 1244783 - RNA, 19 nt, Artificial Sequence
  Description of Artificial Sequence: Synthetic oligonucleotide
uagaaaaccaucgguccuc

SEQ ID NO: 1244784 - RNA, 19 nt, Artificial Sequence
  Description of Artificial Sequence: Synthetic oligonucleotide
guuggcuguuacaggaccg

SEQ ID NO: 1244785 - RNA, 19 nt, Artificial Sequence
  Description of Artificial Sequence: Synthetic oligonucleotide
agaacacggacuccaggga

SEQ ID NO: 1244786 - RNA, 19 nt, Artificial Sequence
  Description of Artificial Sequence: Synthetic oligonucleotide
cuccucuccugacucacgg

SEQ ID NO: 1244787 - RNA, 19 nt, Artificial Sequence
  Description of Artificial Sequence: Synthetic oligonucleotide
gagucugauuggcacucag

SEQ ID NO: 1244788 - RNA, 19 nt, Artificial Sequence
  Description of Artificial Sequence: Synthetic oligonucleotide
uuugccacaggaugccgaa

SEQ ID NO: 1244789 - RNA, 19 nt, Artificial Sequence
  Description of Artificial Sequence: Synthetic oligonucleotide
uccuaaggcagaccacaga

SEQ ID NO: 1244790 - RNA, 19 nt, Artificial Sequence
  Description of Artificial Sequence: Synthetic oligonucleotide
uucgucaccauugcuucca

SEQ ID NO: 1244791 - RNA, 19 nt, Artificial Sequence
  Description of Artificial Sequence: Synthetic oligonucleotide
cacauugaacucagcuccc

SEQ ID NO: 1244792 - RNA, 19 nt, Artificial Sequence
  Description of Artificial Sequence: Synthetic oligonucleotide
cauugaacucagcucccag

SEQ ID NO: 1244793 - RNA, 19 nt, Artificial Sequence
  Description of Artificial Sequence: Synthetic oligonucleotide
ucuggauuccugucccgca

SEQ ID NO: 1244794 - RNA, 19 nt, Artificial Sequence
  Description of Artificial Sequence: Synthetic oligonucleotide
guagcuguguaguaggggu

SEQ ID NO: 1244795 - RNA, 19 nt, Artificial Sequence
  Description of Artificial Sequence: Synthetic oligonucleotide
gaagcacacuccugcuugc

SEQ ID NO: 1244796 - RNA, 19 nt, Artificial Sequence
  Description of Artificial Sequence: Synthetic oligonucleotide
aguagucguggcccagggg

SEQ ID NO: 1244797 - RNA, 19 nt, Artificial Sequence
  Description of Artificial Sequence: Synthetic oligonucleotide
gaacagggcuacugggagc

SEQ ID NO: 1244798 - RNA, 19 nt, Artificial Sequence
  Description of Artificial Sequence: Synthetic oligonucleotide
auugcuuccaacgcaccga

SEQ ID NO: 1244799 - RNA, 19 nt, Artificial Sequence
  Description of Artificial Sequence: Synthetic oligonucleotide
ucccgcacucagcugagca

SEQ ID NO: 1244800 - RNA, 19 nt, Artificial Sequence
  Description of Artificial Sequence: Synthetic oligonucleotide
aggcgcgcaugucaggagg

SEQ ID NO: 1244801 - RNA, 19 nt, Artificial Sequence
  Description of Artificial Sequence: Synthetic oligonucleotide
agcacacuccugcuugcuc

SEQ ID NO: 1244802 - RNA, 19 nt, Artificial Sequence
  Description of Artificial Sequence: Synthetic oligonucleotide
caaggcugagugacauugg

SEQ ID NO: 1244803 - RNA, 19 nt, Artificial Sequence
  Description of Artificial Sequence: Synthetic oligonucleotide
guuacaggaccgcuuccug

SEQ ID NO: 1244804 - RNA, 19 nt, Artificial Sequence
  Description of Artificial Sequence: Synthetic oligonucleotide
ugauuggcacucaggcacu

SEQ ID NO: 1244805 - RNA, 19 nt, Artificial Sequence
  Description of Artificial Sequence: Synthetic oligonucleotide
ucgucugcaugccucccug

SEQ ID NO: 1244806 - RNA, 19 nt, Artificial Sequence
  Description of Artificial Sequence: Synthetic oligonucleotide
ggaaaagaccuacugucuc

SEQ ID NO: 1244807 - RNA, 19 nt, Artificial Sequence
  Description of Artificial Sequence: Synthetic oligonucleotide
caccgaacuugccugcucc

SEQ ID NO: 1244808 - RNA, 19 nt, Artificial Sequence
  Description of Artificial Sequence: Synthetic oligonucleotide
gaacuugccugcuccucug

SEQ ID NO: 1244809 - RNA, 19 nt, Artificial Sequence
  Description of Artificial Sequence: Synthetic oligonucleotide
guagacgcagagccgggcc

SEQ ID NO: 1244810 - RNA, 19 nt, Artificial Sequence
  Description of Artificial Sequence: Synthetic oligonucleotide
uccuggaaggucgcaggcg

SEQ ID NO: 1244811 - RNA, 19 nt, Artificial Sequence
  Description of Artificial Sequence: Synthetic oligonucleotide
ggcaggagcgagaacacgg

SEQ ID NO: 1244812 - RNA, 19 nt, Artificial Sequence
  Description of Artificial Sequence: Synthetic oligonucleotide
uuccaacgcaccgaacuug

SEQ ID NO: 1244813 - RNA, 19 nt, Artificial Sequence
  Description of Artificial Sequence: Synthetic oligonucleotide
ggacgugggcacaugagcg

SEQ ID NO: 1244814 - RNA, 19 nt, Artificial Sequence
  Description of Artificial Sequence: Synthetic oligonucleotide
agacgucacauugaacuca

SEQ ID NO: 1244815 - RNA, 19 nt, Artificial Sequence
  Description of Artificial Sequence: Synthetic oligonucleotide
gguacagggucccauguca

SEQ ID NO: 1244816 - RNA, 19 nt, Artificial Sequence
  Description of Artificial Sequence: Synthetic oligonucleotide
aggcgaggaggacaucggg

SEQ ID NO: 1244817 - RNA, 19 nt, Artificial Sequence
  Description of Artificial Sequence: Synthetic oligonucleotide
cucacgggaaaugcagagg

SEQ ID NO: 1244818 - RNA, 19 nt, Artificial Sequence
  Description of Artificial Sequence: Synthetic oligonucleotide
ugcuccucugaccccgacc

SEQ ID NO: 1244819 - RNA, 19 nt, Artificial Sequence
  Description of Artificial Sequence: Synthetic oligonucleotide
ggagcgagaacacggacuc

SEQ ID NO: 1244820 - RNA, 19 nt, Artificial Sequence
  Description of Artificial Sequence: Synthetic oligonucleotide
uugcuuccaacgcaccgaa

SEQ ID NO: 1244821 - RNA, 19 nt, Artificial Sequence
  Description of Artificial Sequence: Synthetic oligonucleotide
caggguuggcuguuacagg

SEQ ID NO: 1244822 - RNA, 19 nt, Artificial Sequence
  Description of Artificial Sequence: Synthetic oligonucleotide
ugacaaggcugagugacau

SEQ ID NO: 1244823 - RNA, 19 nt, Artificial Sequence
  Description of Artificial Sequence: Synthetic oligonucleotide
accagcgccauguccucuc

SEQ ID NO: 1244824 - RNA, 19 nt, Artificial Sequence
  Description of Artificial Sequence: Synthetic oligonucleotide
uccccuggaaaagaccuac

SEQ ID NO: 1244825 - RNA, 19 nt, Artificial Sequence
  Description of Artificial Sequence: Synthetic oligonucleotide
acgcaccgaacuugccugc

SEQ ID NO: 1244826 - RNA, 19 nt, Artificial Sequence
  Description of Artificial Sequence: Synthetic oligonucleotide
gaccugugaaaacucccuc

SEQ ID NO: 1244827 - RNA, 19 nt, Artificial Sequence
  Description of Artificial Sequence: Synthetic oligonucleotide
gagagucugauuggcacuc

SEQ ID NO: 1244828 - RNA, 19 nt, Artificial Sequence
  Description of Artificial Sequence: Synthetic oligonucleotide
gcugacaaggcugagugac

SEQ ID NO: 1244829 - RNA, 19 nt, Artificial Sequence
  Description of Artificial Sequence: Synthetic oligonucleotide
cuuggacccauuucaggca

SEQ ID NO: 1244830 - RNA, 19 nt, Artificial Sequence
  Description of Artificial Sequence: Synthetic oligonucleotide
gugugccagacccacacuc

SEQ ID NO: 1244831 - RNA, 19 nt, Artificial Sequence
  Description of Artificial Sequence: Synthetic oligonucleotide
cagaggugcagcugacaag

SEQ ID NO: 1244832 - RNA, 19 nt, Artificial Sequence
  Description of Artificial Sequence: Synthetic oligonucleotide
gcugagugacauugggccg

SEQ ID NO: 1244833 - RNA, 19 nt, Artificial Sequence
  Description of Artificial Sequence: Synthetic oligonucleotide
aacacggacuccagggagu

SEQ ID NO: 1244834 - RNA, 19 nt, Artificial Sequence
  Description of Artificial Sequence: Synthetic oligonucleotide
cuccuaaggcagaccacag

SEQ ID NO: 1244835 - RNA, 19 nt, Artificial Sequence
  Description of Artificial Sequence: Synthetic oligonucleotide
gcaggguuggcuguuacag

SEQ ID NO: 1244836 - RNA, 19 nt, Artificial Sequence
  Description of Artificial Sequence: Synthetic oligonucleotide
ucuggggaccugugaaaac

SEQ ID NO: 1244837 - RNA, 19 nt, Artificial Sequence
  Description of Artificial Sequence: Synthetic oligonucleotide
aaagaccuacugucuccaa

SEQ ID NO: 1244838 - RNA, 19 nt, Artificial Sequence
  Description of Artificial Sequence: Synthetic oligonucleotide
augucaggagggcggcuuc

SEQ ID NO: 1244839 - RNA, 19 nt, Artificial Sequence
  Description of Artificial Sequence: Synthetic oligonucleotide
ggcuggaaucucuugucag

SEQ ID NO: 1244840 - RNA, 19 nt, Artificial Sequence
  Description of Artificial Sequence: Synthetic oligonucleotide
ggacaucgggugcugagag

SEQ ID NO: 1244841 - RNA, 19 nt, Artificial Sequence
  Description of Artificial Sequence: Synthetic oligonucleotide
cucucacagggcccuaagc

SEQ ID NO: 1244842 - RNA, 19 nt, Artificial Sequence
  Description of Artificial Sequence: Synthetic oligonucleotide
uggggacuguuccaacccu

SEQ ID NO: 1244843 - RNA, 19 nt, Artificial Sequence
  Description of Artificial Sequence: Synthetic oligonucleotide
acgggaaaugcagaggaaa

SEQ ID NO: 1244844 - RNA, 19 nt, Artificial Sequence
  Description of Artificial Sequence: Synthetic oligonucleotide
gaaggucgcaggcgaggag

SEQ ID NO: 1244845 - RNA, 19 nt, Artificial Sequence
  Description of Artificial Sequence: Synthetic oligonucleotide
ugccagacccacacucuga

SEQ ID NO: 1244846 - RNA, 19 nt, Artificial Sequence
  Description of Artificial Sequence: Synthetic oligonucleotide
cugaccccgaccacagcgc

SEQ ID NO: 1244847 - RNA, 19 nt, Artificial Sequence
  Description of Artificial Sequence: Synthetic oligonucleotide
cuucgucaccauugcuucc

SEQ ID NO: 1244848 - RNA, 19 nt, Artificial Sequence
  Description of Artificial Sequence: Synthetic oligonucleotide
ugccgaacacucagagugu

SEQ ID NO: 1244849 - RNA, 19 nt, Artificial Sequence
  Description of Artificial Sequence: Synthetic oligonucleotide
ugcucagugcuuccugcuc

SEQ ID NO: 1244850 - RNA, 19 nt, Artificial Sequence
  Description of Artificial Sequence: Synthetic oligonucleotide
ggaggggcaaggcuccugg

SEQ ID NO: 1244851 - RNA, 19 nt, Artificial Sequence
  Description of Artificial Sequence: Synthetic oligonucleotide
ugcaggguuggcuguuaca

SEQ ID NO: 1244852 - RNA, 19 nt, Artificial Sequence
  Description of Artificial Sequence: Synthetic oligonucleotide
guagaaaaccaucgguccu

SEQ ID NO: 1244853 - RNA, 19 nt, Artificial Sequence
  Description of Artificial Sequence: Synthetic oligonucleotide
guguaccagcgccaugucc

SEQ ID NO: 1244854 - RNA, 19 nt, Artificial Sequence
  Description of Artificial Sequence: Synthetic oligonucleotide
ugagugacauugggccggg

SEQ ID NO: 1244855 - RNA, 19 nt, Artificial Sequence
  Description of Artificial Sequence: Synthetic oligonucleotide
aguugcugggagacgucac

SEQ ID NO: 1244856 - RNA, 19 nt, Artificial Sequence
  Description of Artificial Sequence: Synthetic oligonucleotide
cauccaacuccucuccuga

SEQ ID NO: 1244857 - RNA, 19 nt, Artificial Sequence
  Description of Artificial Sequence: Synthetic oligonucleotide
uaaucucccaguggccaca

SEQ ID NO: 1244858 - RNA, 19 nt, Artificial Sequence
  Description of Artificial Sequence: Synthetic oligonucleotide
ccgaccacagcgcacagag

SEQ ID NO: 1244859 - RNA, 19 nt, Artificial Sequence
  Description of Artificial Sequence: Synthetic oligonucleotide
ucccucgucugcaugccuc

SEQ ID NO: 1244860 - RNA, 19 nt, Artificial Sequence
  Description of Artificial Sequence: Synthetic oligonucleotide
ugaccccgaccacagcgca

SEQ ID NO: 1244861 - RNA, 19 nt, Artificial Sequence
  Description of Artificial Sequence: Synthetic oligonucleotide
ugucccgcacucagcugag

SEQ ID NO: 1244862 - RNA, 19 nt, Artificial Sequence
  Description of Artificial Sequence: Synthetic oligonucleotide
cccauuucaggcaggcucc

SEQ ID NO: 1244863 - RNA, 19 nt, Artificial Sequence
  Description of Artificial Sequence: Synthetic oligonucleotide
ucgaggucucccguguccc

SEQ ID NO: 1244864 - RNA, 19 nt, Artificial Sequence
  Description of Artificial Sequence: Synthetic oligonucleotide
gggguagacgcagagccgg

SEQ ID NO: 1244865 - RNA, 19 nt, Artificial Sequence
  Description of Artificial Sequence: Synthetic oligonucleotide
ggcccuguguaccagcgcc

SEQ ID NO: 1244866 - RNA, 19 nt, Artificial Sequence
  Description of Artificial Sequence: Synthetic oligonucleotide
gaagggaaaggaugagggu

SEQ ID NO: 1244867 - RNA, 19 nt, Artificial Sequence
  Description of Artificial Sequence: Synthetic oligonucleotide
cucuggauuccugucccgc

SEQ ID NO: 1244868 - RNA, 19 nt, Artificial Sequence
  Description of Artificial Sequence: Synthetic oligonucleotide
gaacuccagucacuguaga

SEQ ID NO: 1244869 - RNA, 19 nt, Artificial Sequence
  Description of Artificial Sequence: Synthetic oligonucleotide
uccugacucacgggaaaug

SEQ ID NO: 1244870 - RNA, 19 nt, Artificial Sequence
  Description of Artificial Sequence: Synthetic oligonucleotide
acggacuccagggaguaga

SEQ ID NO: 1244871 - RNA, 19 nt, Artificial Sequence
  Description of Artificial Sequence: Synthetic oligonucleotide
gggucuggcacccauggca

SEQ ID NO: 1244872 - RNA, 19 nt, Artificial Sequence
  Description of Artificial Sequence: Synthetic oligonucleotide
aggagcgagaacacggacu

SEQ ID NO: 1244873 - RNA, 19 nt, Artificial Sequence
  Description of Artificial Sequence: Synthetic oligonucleotide
cuuugccacaggaugccga

SEQ ID NO: 1244874 - RNA, 19 nt, Artificial Sequence
  Description of Artificial Sequence: Synthetic oligonucleotide
uagcuguguaguaggggua

SEQ ID NO: 1244875 - RNA, 19 nt, Artificial Sequence
  Description of Artificial Sequence: Synthetic oligonucleotide
cuggacgucccucgucugc

SEQ ID NO: 1244876 - RNA, 19 nt, Artificial Sequence
  Description of Artificial Sequence: Synthetic oligonucleotide
uguucccuggggacuguuc

SEQ ID NO: 1244877 - RNA, 19 nt, Artificial Sequence
  Description of Artificial Sequence: Synthetic oligonucleotide
uuccugucccgcacucagc

SEQ ID NO: 1244878 - RNA, 19 nt, Artificial Sequence
  Description of Artificial Sequence: Synthetic oligonucleotide
augcucagugcuuccugcu

SEQ ID NO: 1244879 - RNA, 19 nt, Artificial Sequence
  Description of Artificial Sequence: Synthetic oligonucleotide
cugacucacgggaaaugca

SEQ ID NO: 1244880 - RNA, 19 nt, Artificial Sequence
  Description of Artificial Sequence: Synthetic oligonucleotide
ggcccuaagcugcaggcgc

SEQ ID NO: 1244881 - RNA, 19 nt, Artificial Sequence
  Description of Artificial Sequence: Synthetic oligonucleotide
cuguguaguagggguagac

SEQ ID NO: 1244882 - RNA, 19 nt, Artificial Sequence
  Description of Artificial Sequence: Synthetic oligonucleotide
gcauuggucaucagggcgc

SEQ ID NO: 1244883 - RNA, 19 nt, Artificial Sequence
  Description of Artificial Sequence: Synthetic oligonucleotide
guguggagagcuguccuug

SEQ ID NO: 1244884 - RNA, 19 nt, Artificial Sequence
  Description of Artificial Sequence: Synthetic oligonucleotide
gggagcuaaucucccagug

SEQ ID NO: 1244885 - RNA, 19 nt, Artificial Sequence
  Description of Artificial Sequence: Synthetic oligonucleotide
ggaacuccagucacuguag

SEQ ID NO: 1244886 - RNA, 19 nt, Artificial Sequence
  Description of Artificial Sequence: Synthetic oligonucleotide
ucgcaggcgaggaggacau

SEQ ID NO: 1244887 - RNA, 19 nt, Artificial Sequence
  Description of Artificial Sequence: Synthetic oligonucleotide
caggggauccccuggaaaa

SEQ ID NO: 1244888 - RNA, 19 nt, Artificial Sequence
  Description of Artificial Sequence: Synthetic oligonucleotide
cacuguagaaccaggcugu

SEQ ID NO: 1244889 - RNA, 19 nt, Artificial Sequence
  Description of Artificial Sequence: Synthetic oligonucleotide
ggggagauguccacaacgc

SEQ ID NO: 1244890 - RNA, 19 nt, Artificial Sequence
  Description of Artificial Sequence: Synthetic oligonucleotide
cugucccgcacucagcuga

SEQ ID NO: 1244891 - RNA, 19 nt, Artificial Sequence
  Description of Artificial Sequence: Synthetic oligonucleotide
ugcuggccucuacuccggg

SEQ ID NO: 1244892 - RNA, 19 nt, Artificial Sequence
  Description of Artificial Sequence: Synthetic oligonucleotide
gacccacacucugaggaac

SEQ ID NO: 1244893 - RNA, 19 nt, Artificial Sequence
  Description of Artificial Sequence: Synthetic oligonucleotide
ugagggugccgcucuguuc

SEQ ID NO: 1244894 - RNA, 19 nt, Artificial Sequence
  Description of Artificial Sequence: Synthetic oligonucleotide
uguguaccagcgccauguc

SEQ ID NO: 1244895 - RNA, 19 nt, Artificial Sequence
  Description of Artificial Sequence: Synthetic oligonucleotide
guggcauaagaaacccaug

SEQ ID NO: 1244896 - RNA, 19 nt, Artificial Sequence
  Description of Artificial Sequence: Synthetic oligonucleotide
acauugaacucagcuccca

SEQ ID NO: 1244897 - RNA, 19 nt, Artificial Sequence
  Description of Artificial Sequence: Synthetic oligonucleotide
ggacuguuccaacccuggg

SEQ ID NO: 1244898 - RNA, 19 nt, Artificial Sequence
  Description of Artificial Sequence: Synthetic oligonucleotide
gcccgaagcacacuccugc

SEQ ID NO: 1244899 - RNA, 19 nt, Artificial Sequence
  Description of Artificial Sequence: Synthetic oligonucleotide
gcuccucugaccccgacca

SEQ ID NO: 1244900 - RNA, 19 nt, Artificial Sequence
  Description of Artificial Sequence: Synthetic oligonucleotide
cacuccuaaggcagaccac

SEQ ID NO: 1244901 - RNA, 19 nt, Artificial Sequence
  Description of Artificial Sequence: Synthetic oligonucleotide
cccagaacauuuuggaaca

SEQ ID NO: 1244902 - RNA, 19 nt, Artificial Sequence
  Description of Artificial Sequence: Synthetic oligonucleotide
caccauugcuuccaacgca

SEQ ID NO: 1244903 - RNA, 19 nt, Artificial Sequence
  Description of Artificial Sequence: Synthetic oligonucleotide
cugagcacuuggaacucca

SEQ ID NO: 1244904 - RNA, 19 nt, Artificial Sequence
  Description of Artificial Sequence: Synthetic oligonucleotide
agggucuccccacuccuaa

SEQ ID NO: 1244905 - RNA, 19 nt, Artificial Sequence
  Description of Artificial Sequence: Synthetic oligonucleotide
caggaccgcuuccuggaag

SEQ ID NO: 1244906 - RNA, 19 nt, Artificial Sequence
  Description of Artificial Sequence: Synthetic oligonucleotide
uagucguggcccaggggau

SEQ ID NO: 1244907 - RNA, 19 nt, Artificial Sequence
  Description of Artificial Sequence: Synthetic oligonucleotide
gaaaaccaucgguccucac

SEQ ID NO: 1244908 - RNA, 19 nt, Artificial Sequence
  Description of Artificial Sequence: Synthetic oligonucleotide
aaggcagaccacagagcgu

SEQ ID NO: 1244909 - RNA, 19 nt, Artificial Sequence
  Description of Artificial Sequence: Synthetic oligonucleotide
agggugccgcucuguuccc

SEQ ID NO: 1244910 - RNA, 19 nt, Artificial Sequence
  Description of Artificial Sequence: Synthetic oligonucleotide
ccaaauucuugucugcaga

SEQ ID NO: 1244911 - RNA, 19 nt, Artificial Sequence
  Description of Artificial Sequence: Synthetic oligonucleotide
gaugccgaacacucagagu

SEQ ID NO: 1244912 - RNA, 19 nt, Artificial Sequence
  Description of Artificial Sequence: Synthetic oligonucleotide
ucgggugcugagagucuga

SEQ ID NO: 1244913 - RNA, 19 nt, Artificial Sequence
  Description of Artificial Sequence: Synthetic oligonucleotide
ugggaccgguccaggacgu

SEQ ID NO: 1244914 - RNA, 19 nt, Artificial Sequence
  Description of Artificial Sequence: Synthetic oligonucleotide
aagcacacuccugcuugcu

SEQ ID NO: 1244915 - RNA, 19 nt, Artificial Sequence
  Description of Artificial Sequence: Synthetic oligonucleotide
ucccguguccccugcucug

SEQ ID NO: 1244916 - RNA, 19 nt, Artificial Sequence
  Description of Artificial Sequence: Synthetic oligonucleotide
ccugacucacgggaaaugc

SEQ ID NO: 1244917 - RNA, 19 nt, Artificial Sequence
  Description of Artificial Sequence: Synthetic oligonucleotide
aucgggugcugagagucug

SEQ ID NO: 1244918 - RNA, 19 nt, Artificial Sequence
  Description of Artificial Sequence: Synthetic oligonucleotide
agggguagacgcagagccg

SEQ ID NO: 1244919 - RNA, 19 nt, Artificial Sequence
  Description of Artificial Sequence: Synthetic oligonucleotide
caggguucaggggaagcug

SEQ ID NO: 1244920 - RNA, 19 nt, Artificial Sequence
  Description of Artificial Sequence: Synthetic oligonucleotide
ggucccaugucacaggccu

SEQ ID NO: 1244921 - RNA, 19 nt, Artificial Sequence
  Description of Artificial Sequence: Synthetic oligonucleotide
gauuggcacucaggcacug

SEQ ID NO: 1244922 - RNA, 19 nt, Artificial Sequence
  Description of Artificial Sequence: Synthetic oligonucleotide
accgaacuugccugcuccu

SEQ ID NO: 1244923 - RNA, 19 nt, Artificial Sequence
  Description of Artificial Sequence: Synthetic oligonucleotide
cagagcgucucuggauucc

SEQ ID NO: 1244924 - RNA, 19 nt, Artificial Sequence
  Description of Artificial Sequence: Synthetic oligonucleotide
acuuggaacuccagucacu

SEQ ID NO: 1244925 - RNA, 19 nt, Artificial Sequence
  Description of Artificial Sequence: Synthetic oligonucleotide
ccuggggacuguuccaacc

SEQ ID NO: 1244926 - RNA, 19 nt, Artificial Sequence
  Description of Artificial Sequence: Synthetic oligonucleotide
acuggacgucccucgucug

SEQ ID NO: 1244927 - RNA, 19 nt, Artificial Sequence
  Description of Artificial Sequence: Synthetic oligonucleotide
uugcugggagacgucacau

SEQ ID NO: 1244928 - RNA, 19 nt, Artificial Sequence
  Description of Artificial Sequence: Synthetic oligonucleotide
ggggacagaagggaaagga

SEQ ID NO: 1244929 - RNA, 19 nt, Artificial Sequence
  Description of Artificial Sequence: Synthetic oligonucleotide
agcagguagcuguguagua

SEQ ID NO: 1244930 - RNA, 19 nt, Artificial Sequence
  Description of Artificial Sequence: Synthetic oligonucleotide
gcuaaucucccaguggcca

SEQ ID NO: 1244931 - RNA, 19 nt, Artificial Sequence
  Description of Artificial Sequence: Synthetic oligonucleotide
agggcccuguguaccagcg

SEQ ID NO: 1244932 - RNA, 19 nt, Artificial Sequence
  Description of Artificial Sequence: Synthetic oligonucleotide
guccuugcauuggucauca

SEQ ID NO: 1244933 - RNA, 19 nt, Artificial Sequence
  Description of Artificial Sequence: Synthetic oligonucleotide
gggaccugugaaaacuccc

SEQ ID NO: 1244934 - RNA, 19 nt, Artificial Sequence
  Description of Artificial Sequence: Synthetic oligonucleotide
agucguggcccaggggauc

SEQ ID NO: 1244935 - RNA, 19 nt, Artificial Sequence
  Description of Artificial Sequence: Synthetic oligonucleotide
ugcacauugcagggcccug

SEQ ID NO: 1244936 - RNA, 19 nt, Artificial Sequence
  Description of Artificial Sequence: Synthetic oligonucleotide
uccccacuccuaaggcaga

SEQ ID NO: 1244937 - RNA, 19 nt, Artificial Sequence
  Description of Artificial Sequence: Synthetic oligonucleotide
cugacaaggcugagugaca

SEQ ID NO: 1244938 - RNA, 19 nt, Artificial Sequence
  Description of Artificial Sequence: Synthetic oligonucleotide
cuguguaccagcgccaugu

SEQ ID NO: 1244939 - RNA, 19 nt, Artificial Sequence
  Description of Artificial Sequence: Synthetic oligonucleotide
aucagggcgcugguugcag

SEQ ID NO: 1244940 - RNA, 19 nt, Artificial Sequence
  Description of Artificial Sequence: Synthetic oligonucleotide
uccucacaggccugccccu

SEQ ID NO: 1244941 - RNA, 19 nt, Artificial Sequence
  Description of Artificial Sequence: Synthetic oligonucleotide
agaggaaaauggggugcca

SEQ ID NO: 1244942 - RNA, 19 nt, Artificial Sequence
  Description of Artificial Sequence: Synthetic oligonucleotide
uggcuguuacaggaccgcu

SEQ ID NO: 1244943 - RNA, 19 nt, Artificial Sequence
  Description of Artificial Sequence: Synthetic oligonucleotide
cucaggcacuggacguccc

SEQ ID NO: 1244944 - RNA, 19 nt, Artificial Sequence
  Description of Artificial Sequence: Synthetic oligonucleotide
agcugggaccgguccagga

SEQ ID NO: 1244945 - RNA, 19 nt, Artificial Sequence
  Description of Artificial Sequence: Synthetic oligonucleotide
gucgcaggcgaggaggaca

SEQ ID NO: 1244946 - RNA, 19 nt, Artificial Sequence
  Description of Artificial Sequence: Synthetic oligonucleotide
ggaaaggaugagggugccg

SEQ ID NO: 1244947 - RNA, 19 nt, Artificial Sequence
  Description of Artificial Sequence: Synthetic oligonucleotide
ggaccgguccaggacgugg

SEQ ID NO: 1244948 - RNA, 19 nt, Artificial Sequence
  Description of Artificial Sequence: Synthetic oligonucleotide
ccaucgguccucacaggcc

SEQ ID NO: 1244949 - RNA, 19 nt, Artificial Sequence
  Description of Artificial Sequence: Synthetic oligonucleotide
ugcugggagacgucacauu

SEQ ID NO: 1244950 - RNA, 19 nt, Artificial Sequence
  Description of Artificial Sequence: Synthetic oligonucleotide
gcgccauguccucucacag

SEQ ID NO: 1244951 - RNA, 19 nt, Artificial Sequence
  Description of Artificial Sequence: Synthetic oligonucleotide
ugucaggagggcggcuucu

SEQ ID NO: 1244952 - RNA, 19 nt, Artificial Sequence
  Description of Artificial Sequence: Synthetic oligonucleotide
gauuccugucccgcacuca

SEQ ID NO: 1244953 - RNA, 19 nt, Artificial Sequence
  Description of Artificial Sequence: Synthetic oligonucleotide
ggauccccuggaaaagacc

SEQ ID NO: 1244954 - RNA, 19 nt, Artificial Sequence
  Description of Artificial Sequence: Synthetic oligonucleotide
ggggcuggaaucucuuguc

SEQ ID NO: 1244955 - RNA, 19 nt, Artificial Sequence
  Description of Artificial Sequence: Synthetic oligonucleotide
gucguggcccaggggaucc

SEQ ID NO: 1244956 - RNA, 19 nt, Artificial Sequence
  Description of Artificial Sequence: Synthetic oligonucleotide
caucgguccucacaggccu

SEQ ID NO: 1244957 - RNA, 19 nt, Artificial Sequence
  Description of Artificial Sequence: Synthetic oligonucleotide
gcgcaugucaggagggcgg

SEQ ID NO: 1244958 - RNA, 19 nt, Artificial Sequence
  Description of Artificial Sequence: Synthetic oligonucleotide
acgucacauugaacucagc

SEQ ID NO: 1244959 - RNA, 19 nt, Artificial Sequence
  Description of Artificial Sequence: Synthetic oligonucleotide
ggacccauuucaggcaggc

SEQ ID NO: 1244960 - RNA, 19 nt, Artificial Sequence
  Description of Artificial Sequence: Synthetic oligonucleotide
gcuggccucuacuccgggg

SEQ ID NO: 1244961 - RNA, 19 nt, Artificial Sequence
  Description of Artificial Sequence: Synthetic oligonucleotide
aggucucccguguccccug

SEQ ID NO: 1244962 - RNA, 19 nt, Artificial Sequence
  Description of Artificial Sequence: Synthetic oligonucleotide
caacgcaccgaacuugccu

SEQ ID NO: 1244963 - RNA, 19 nt, Artificial Sequence
  Description of Artificial Sequence: Synthetic oligonucleotide
ggucuggcacccauggcac

SEQ ID NO: 1244964 - RNA, 19 nt, Artificial Sequence
  Description of Artificial Sequence: Synthetic oligonucleotide
agggcuacugggagcaaaa

SEQ ID NO: 1244965 - RNA, 19 nt, Artificial Sequence
  Description of Artificial Sequence: Synthetic oligonucleotide
cuggggaccugugaaaacu

SEQ ID NO: 1244966 - RNA, 19 nt, Artificial Sequence
  Description of Artificial Sequence: Synthetic oligonucleotide
cacccauggcacaguucug

SEQ ID NO: 1244967 - RNA, 19 nt, Artificial Sequence
  Description of Artificial Sequence: Synthetic oligonucleotide
gggugccaaacaccuuugc

SEQ ID NO: 1244968 - RNA, 19 nt, Artificial Sequence
  Description of Artificial Sequence: Synthetic oligonucleotide
acccacacucugaggaaca

SEQ ID NO: 1244969 - RNA, 19 nt, Artificial Sequence
  Description of Artificial Sequence: Synthetic oligonucleotide
gcgcacagagcacuggcuc

SEQ ID NO: 1244970 - RNA, 19 nt, Artificial Sequence
  Description of Artificial Sequence: Synthetic oligonucleotide
gagcgucucuggauuccug

SEQ ID NO: 1244971 - RNA, 19 nt, Artificial Sequence
  Description of Artificial Sequence: Synthetic oligonucleotide
gaggaggacaucgggugcu

SEQ ID NO: 1244972 - RNA, 19 nt, Artificial Sequence
  Description of Artificial Sequence: Synthetic oligonucleotide
cacuggacgucccucgucu

SEQ ID NO: 1244973 - RNA, 19 nt, Artificial Sequence
  Description of Artificial Sequence: Synthetic oligonucleotide
ggugccgcucuguucccug

SEQ ID NO: 1244974 - RNA, 19 nt, Artificial Sequence
  Description of Artificial Sequence: Synthetic oligonucleotide
ccauugcuuccaacgcacc

SEQ ID NO: 1244975 - RNA, 19 nt, Artificial Sequence
  Description of Artificial Sequence: Synthetic oligonucleotide
gagcuguccuugcauuggu

SEQ ID NO: 1244976 - RNA, 19 nt, Artificial Sequence
  Description of Artificial Sequence: Synthetic oligonucleotide
aggaggacaucgggugcug

SEQ ID NO: 1244977 - RNA, 19 nt, Artificial Sequence
  Description of Artificial Sequence: Synthetic oligonucleotide
ggcgcgcaugucaggaggg

SEQ ID NO: 1244978 - RNA, 19 nt, Artificial Sequence
  Description of Artificial Sequence: Synthetic oligonucleotide
gguagacgcagagccgggc

SEQ ID NO: 1244979 - RNA, 19 nt, Artificial Sequence
  Description of Artificial Sequence: Synthetic oligonucleotide
ggggaggugggaacaguug

SEQ ID NO: 1244980 - RNA, 19 nt, Artificial Sequence
  Description of Artificial Sequence: Synthetic oligonucleotide
ggauuccugucccgcacuc

SEQ ID NO: 1244981 - RNA, 19 nt, Artificial Sequence
  Description of Artificial Sequence: Synthetic oligonucleotide
gacaucgggugcugagagu

SEQ ID NO: 1244982 - RNA, 19 nt, Artificial Sequence
  Description of Artificial Sequence: Synthetic oligonucleotide
ccuggaaaagaccuacugu

SEQ ID NO: 1244983 - RNA, 19 nt, Artificial Sequence
  Description of Artificial Sequence: Synthetic oligonucleotide
ccucuccugacucacggga

SEQ ID NO: 1244984 - RNA, 19 nt, Artificial Sequence
  Description of Artificial Sequence: Synthetic oligonucleotide
cacagagcgucucuggauu

SEQ ID NO: 1244985 - RNA, 19 nt, Artificial Sequence
  Description of Artificial Sequence: Synthetic oligonucleotide
uggcggugcugggugccag

SEQ ID NO: 1244986 - RNA, 19 nt, Artificial Sequence
  Description of Artificial Sequence: Synthetic oligonucleotide
ccccugacauggcugcagg

SEQ ID NO: 1244987 - RNA, 19 nt, Artificial Sequence
  Description of Artificial Sequence: Synthetic oligonucleotide
uaccagcgccauguccucu

SEQ ID NO: 1244988 - RNA, 19 nt, Artificial Sequence
  Description of Artificial Sequence: Synthetic oligonucleotide
cucccuggcaggagcgaga

SEQ ID NO: 1244989 - RNA, 19 nt, Artificial Sequence
  Description of Artificial Sequence: Synthetic oligonucleotide
ggaaggucgcaggcgagga

SEQ ID NO: 1244990 - RNA, 19 nt, Artificial Sequence
  Description of Artificial Sequence: Synthetic oligonucleotide
gccagugguggcauaagaa

SEQ ID NO: 1244991 - RNA, 19 nt, Artificial Sequence
  Description of Artificial Sequence: Synthetic oligonucleotide
gcaggcucucagcugcuca

SEQ ID NO: 1244992 - RNA, 19 nt, Artificial Sequence
  Description of Artificial Sequence: Synthetic oligonucleotide
cccucgucugcaugccucc

SEQ ID NO: 1244993 - RNA, 19 nt, Artificial Sequence
  Description of Artificial Sequence: Synthetic oligonucleotide
gaugagggugccgcucugu

SEQ ID NO: 1244994 - RNA, 19 nt, Artificial Sequence
  Description of Artificial Sequence: Synthetic oligonucleotide
guggccagugguggcauaa

SEQ ID NO: 1244995 - RNA, 19 nt, Artificial Sequence
  Description of Artificial Sequence: Synthetic oligonucleotide
cuuccaacgcaccgaacuu

SEQ ID NO: 1244996 - RNA, 19 nt, Artificial Sequence
  Description of Artificial Sequence: Synthetic oligonucleotide
auuggucaucagggcgcug

SEQ ID NO: 1244997 - RNA, 19 nt, Artificial Sequence
  Description of Artificial Sequence: Synthetic oligonucleotide
ccaacgcaccgaacuugcc

SEQ ID NO: 1244998 - RNA, 19 nt, Artificial Sequence
  Description of Artificial Sequence: Synthetic oligonucleotide
guccccugcucugcuggcc

SEQ ID NO: 1244999 - RNA, 19 nt, Artificial Sequence
  Description of Artificial Sequence: Synthetic oligonucleotide
cccgcacucagcugagcac

SEQ ID NO: 1245000 - RNA, 19 nt, Artificial Sequence
  Description of Artificial Sequence: Synthetic oligonucleotide
ggaccugugaaaacucccu

SEQ ID NO: 1245001 - RNA, 19 nt, Artificial Sequence
  Description of Artificial Sequence: Synthetic oligonucleotide
cucccaguuuggacacaca

SEQ ID NO: 1245002 - RNA, 19 nt, Artificial Sequence
  Description of Artificial Sequence: Synthetic oligonucleotide
cccaugaagaaaggaucuc

SEQ ID NO: 1245003 - RNA, 19 nt, Artificial Sequence
  Description of Artificial Sequence: Synthetic oligonucleotide
cagcagguagcuguguagu

SEQ ID NO: 1245004 - RNA, 19 nt, Artificial Sequence
  Description of Artificial Sequence: Synthetic oligonucleotide
gaccccgaccacagcgcac

SEQ ID NO: 1245005 - RNA, 19 nt, Artificial Sequence
  Description of Artificial Sequence: Synthetic oligonucleotide
cugcucugcuggccucuac

SEQ ID NO: 1245006 - RNA, 19 nt, Artificial Sequence
  Description of Artificial Sequence: Synthetic oligonucleotide
ccucucacagggcccuaag

SEQ ID NO: 1245007 - RNA, 19 nt, Artificial Sequence
  Description of Artificial Sequence: Synthetic oligonucleotide
gcugcucauuuccccagaa

SEQ ID NO: 1245008 - RNA, 19 nt, Artificial Sequence
  Description of Artificial Sequence: Synthetic oligonucleotide
cgcucuguucccuggggac

SEQ ID NO: 1245009 - RNA, 19 nt, Artificial Sequence
  Description of Artificial Sequence: Synthetic oligonucleotide
ccaugaagaaaggaucucu

SEQ ID NO: 1245010 - RNA, 19 nt, Artificial Sequence
  Description of Artificial Sequence: Synthetic oligonucleotide
aucgguccucacaggccug

SEQ ID NO: 1245011 - RNA, 19 nt, Artificial Sequence
  Description of Artificial Sequence: Synthetic oligonucleotide
gcaggagcgagaacacgga

SEQ ID NO: 1245012 - RNA, 19 nt, Artificial Sequence
  Description of Artificial Sequence: Synthetic oligonucleotide
ggcgcugguugcaggguug

SEQ ID NO: 1245013 - RNA, 19 nt, Artificial Sequence
  Description of Artificial Sequence: Synthetic oligonucleotide
gacaaggcugagugacauu

SEQ ID NO: 1245014 - RNA, 19 nt, Artificial Sequence
  Description of Artificial Sequence: Synthetic oligonucleotide
agggcgcugguugcagggu

SEQ ID NO: 1245015 - RNA, 19 nt, Artificial Sequence
  Description of Artificial Sequence: Synthetic oligonucleotide
guuuggacacacagaugau

SEQ ID NO: 1245016 - RNA, 19 nt, Artificial Sequence
  Description of Artificial Sequence: Synthetic oligonucleotide
ggaucucuuggacccauuu

SEQ ID NO: 1245017 - RNA, 19 nt, Artificial Sequence
  Description of Artificial Sequence: Synthetic oligonucleotide
gcgcugguugcaggguugg

SEQ ID NO: 1245018 - RNA, 19 nt, Artificial Sequence
  Description of Artificial Sequence: Synthetic oligonucleotide
caucagggcgcugguugca

SEQ ID NO: 1245019 - RNA, 19 nt, Artificial Sequence
  Description of Artificial Sequence: Synthetic oligonucleotide
cuaagcugcaggcgcgcau

SEQ ID NO: 1245020 - RNA, 19 nt, Artificial Sequence
  Description of Artificial Sequence: Synthetic oligonucleotide
cacaggccugccccugaca

SEQ ID NO: 1245021 - RNA, 19 nt, Artificial Sequence
  Description of Artificial Sequence: Synthetic oligonucleotide
gcucauuuccccagaacau

SEQ ID NO: 1245022 - RNA, 19 nt, Artificial Sequence
  Description of Artificial Sequence: Synthetic oligonucleotide
gggagacgucacauugaac

SEQ ID NO: 1245023 - RNA, 19 nt, Artificial Sequence
  Description of Artificial Sequence: Synthetic oligonucleotide
ucguggcccaggggauccc

SEQ ID NO: 1245024 - RNA, 19 nt, Artificial Sequence
  Description of Artificial Sequence: Synthetic oligonucleotide
ggucucccguguccccugc

SEQ ID NO: 1245025 - RNA, 19 nt, Artificial Sequence
  Description of Artificial Sequence: Synthetic oligonucleotide
cagggcuacugggagcaaa

SEQ ID NO: 1245026 - RNA, 19 nt, Artificial Sequence
  Description of Artificial Sequence: Synthetic oligonucleotide
gcaccgaacuugccugcuc

SEQ ID NO: 1245027 - RNA, 19 nt, Artificial Sequence
  Description of Artificial Sequence: Synthetic oligonucleotide
gcacuggacgucccucguc

SEQ ID NO: 1245028 - RNA, 19 nt, Artificial Sequence
  Description of Artificial Sequence: Synthetic oligonucleotide
cgcgcaugucaggagggcg

SEQ ID NO: 1245029 - RNA, 19 nt, Artificial Sequence
  Description of Artificial Sequence: Synthetic oligonucleotide
cucccguguccccugcucu

SEQ ID NO: 1245030 - RNA, 19 nt, Artificial Sequence
  Description of Artificial Sequence: Synthetic oligonucleotide
ggacuggcugcaggaaguc

SEQ ID NO: 1245031 - RNA, 19 nt, Artificial Sequence
  Description of Artificial Sequence: Synthetic oligonucleotide
caggcucucagcugcucau

SEQ ID NO: 1245032 - RNA, 19 nt, Artificial Sequence
  Description of Artificial Sequence: Synthetic oligonucleotide
ggggagcuaaucucccagu

SEQ ID NO: 1245033 - RNA, 19 nt, Artificial Sequence
  Description of Artificial Sequence: Synthetic oligonucleotide
gagggucuccccacuccua

SEQ ID NO: 1245034 - RNA, 19 nt, Artificial Sequence
  Description of Artificial Sequence: Synthetic oligonucleotide
cgucugcaugccucccugg

SEQ ID NO: 1245035 - RNA, 19 nt, Artificial Sequence
  Description of Artificial Sequence: Synthetic oligonucleotide
ccgaacacucagaguguca

SEQ ID NO: 1245036 - RNA, 19 nt, Artificial Sequence
  Description of Artificial Sequence: Synthetic oligonucleotide
caucgggugcugagagucu

SEQ ID NO: 1245037 - RNA, 19 nt, Artificial Sequence
  Description of Artificial Sequence: Synthetic oligonucleotide
cccacuccuaaggcagacc

SEQ ID NO: 1245038 - RNA, 19 nt, Artificial Sequence
  Description of Artificial Sequence: Synthetic oligonucleotide
gacccauuucaggcaggcu

SEQ ID NO: 1245039 - RNA, 19 nt, Artificial Sequence
  Description of Artificial Sequence: Synthetic oligonucleotide
ggggcccgaagcacacucc

SEQ ID NO: 1245040 - RNA, 19 nt, Artificial Sequence
  Description of Artificial Sequence: Synthetic oligonucleotide
ggcgaggaggacaucgggu

SEQ ID NO: 1245041 - RNA, 19 nt, Artificial Sequence
  Description of Artificial Sequence: Synthetic oligonucleotide
gggucccaugucacaggcc

SEQ ID NO: 1245042 - RNA, 19 nt, Artificial Sequence
  Description of Artificial Sequence: Synthetic oligonucleotide
ccuguguaccagcgccaug

SEQ ID NO: 1245043 - RNA, 19 nt, Artificial Sequence
  Description of Artificial Sequence: Synthetic oligonucleotide
ggcccgaagcacacuccug

SEQ ID NO: 1245044 - RNA, 19 nt, Artificial Sequence
  Description of Artificial Sequence: Synthetic oligonucleotide
cugcacauugcagggcccu

SEQ ID NO: 1245045 - RNA, 19 nt, Artificial Sequence
  Description of Artificial Sequence: Synthetic oligonucleotide
cccacacucugaggaacac

SEQ ID NO: 1245046 - RNA, 19 nt, Artificial Sequence
  Description of Artificial Sequence: Synthetic oligonucleotide
gucccgcacucagcugagc

SEQ ID NO: 1245047 - RNA, 19 nt, Artificial Sequence
  Description of Artificial Sequence: Synthetic oligonucleotide
gggcccgaagcacacuccu

SEQ ID NO: 1245048 - RNA, 19 nt, Artificial Sequence
  Description of Artificial Sequence: Synthetic oligonucleotide
cccuaagcugcaggcgcgc

SEQ ID NO: 1245049 - RNA, 19 nt, Artificial Sequence
  Description of Artificial Sequence: Synthetic oligonucleotide
aggaucucuuggacccauu

SEQ ID NO: 1245050 - RNA, 19 nt, Artificial Sequence
  Description of Artificial Sequence: Synthetic oligonucleotide
caguggccacagaggugca

SEQ ID NO: 1245051 - RNA, 19 nt, Artificial Sequence
  Description of Artificial Sequence: Synthetic oligonucleotide
cccuggggacuguuccaac

SEQ ID NO: 1245052 - RNA, 19 nt, Artificial Sequence
  Description of Artificial Sequence: Synthetic oligonucleotide
ggcacccauggcacaguuc

SEQ ID NO: 1245053 - RNA, 19 nt, Artificial Sequence
  Description of Artificial Sequence: Synthetic oligonucleotide
cccguguccccugcucugc

SEQ ID NO: 1245054 - RNA, 19 nt, Artificial Sequence
  Description of Artificial Sequence: Synthetic oligonucleotide
ggcucucagcugcucauuu

SEQ ID NO: 1245055 - RNA, 19 nt, Artificial Sequence
  Description of Artificial Sequence: Synthetic oligonucleotide
gcgcgcaugucaggagggc

SEQ ID NO: 1245056 - RNA, 19 nt, Artificial Sequence
  Description of Artificial Sequence: Synthetic oligonucleotide
gucccucgucugcaugccu

SEQ ID NO: 1245057 - RNA, 19 nt, Artificial Sequence
  Description of Artificial Sequence: Synthetic oligonucleotide
cuccugacucacgggaaau

SEQ ID NO: 1245058 - RNA, 19 nt, Artificial Sequence
  Description of Artificial Sequence: Synthetic oligonucleotide
ccucgucugcaugccuccc

SEQ ID NO: 1245059 - RNA, 19 nt, Artificial Sequence
  Description of Artificial Sequence: Synthetic oligonucleotide
ggcacuggacgucccucgu

SEQ ID NO: 1245060 - RNA, 19 nt, Artificial Sequence
  Description of Artificial Sequence: Synthetic oligonucleotide
gcucuguucccuggggacu

SEQ ID NO: 1245061 - RNA, 19 nt, Artificial Sequence
  Description of Artificial Sequence: Synthetic oligonucleotide
ggcuguuacaggaccgcuu

SEQ ID NO: 1245062 - RNA, 19 nt, Artificial Sequence
  Description of Artificial Sequence: Synthetic oligonucleotide
gccgcaggacuggcugcag

SEQ ID NO: 1245063 - RNA, 19 nt, Artificial Sequence
  Description of Artificial Sequence: Synthetic oligonucleotide
ggggcccauggcaggguuc

SEQ ID NO: 1245064 - RNA, 19 nt, Artificial Sequence
  Description of Artificial Sequence: Synthetic oligonucleotide
gggaccgguccaggacgug

SEQ ID NO: 1245065 - RNA, 19 nt, Artificial Sequence
  Description of Artificial Sequence: Synthetic oligonucleotide
ccagggccgcaggacuggc

SEQ ID NO: 1245066 - RNA, 19 nt, Artificial Sequence
  Description of Artificial Sequence: Synthetic oligonucleotide
ccauuucaggcaggcucca

SEQ ID NO: 1245067 - RNA, 19 nt, Artificial Sequence
  Description of Artificial Sequence: Synthetic oligonucleotide
ccgcacucagcugagcacu

SEQ ID NO: 1245068 - RNA, 19 nt, Artificial Sequence
  Description of Artificial Sequence: Synthetic oligonucleotide
cagggccgcaggacuggcu

SEQ ID NO: 1245069 - RNA, 19 nt, Artificial Sequence
  Description of Artificial Sequence: Synthetic oligonucleotide
ccuaagcugcaggcgcgca

SEQ ID NO: 1245070 - RNA, 19 nt, Artificial Sequence
  Description of Artificial Sequence: Synthetic oligonucleotide
cccgaagcacacuccugcu

SEQ ID NO: 1245071 - RNA, 19 nt, Artificial Sequence
  Description of Artificial Sequence: Synthetic oligonucleotide
ccccgaccacagcgcacag

SEQ ID NO: 1245072 - RNA, 19 nt, Artificial Sequence
  Description of Artificial Sequence: Synthetic oligonucleotide
gguugcaggguuggcuguu

SEQ ID NO: 1245073 - RNA, 19 nt, Artificial Sequence
  Description of Artificial Sequence: Synthetic oligonucleotide
ccaccgucuccaaauucuu

SEQ ID NO: 1245074 - RNA, 19 nt, Artificial Sequence
  Description of Artificial Sequence: Synthetic oligonucleotide
ccacacucugaggaacacu

SEQ ID NO: 1245075 - RNA, 19 nt, Artificial Sequence
  Description of Artificial Sequence: Synthetic oligonucleotide
ccccuggaaaagaccuacu

SEQ ID NO: 1245076 - RNA, 19 nt, Artificial Sequence
  Description of Artificial Sequence: Synthetic oligonucleotide
ccgaagcacacuccugcuu

SEQ ID NO: 1245077 - RNA, 19 nt, Artificial Sequence
  Description of Artificial Sequence: Synthetic oligonucleotide
gggugccgcucuguucccu

SEQ ID NO: 1245078 - RNA, 19 nt, Artificial Sequence
  Description of Artificial Sequence: Synthetic oligonucleotide
cccuguguaccagcgccau

SEQ ID NO: 1245079 - RNA, 19 nt, Artificial Sequence
  Description of Artificial Sequence: Synthetic oligonucleotide
ccguguccccugcucugcu

SEQ ID NO: 1245080 - RNA, 19 nt, Artificial Sequence
  Description of Artificial Sequence: Synthetic oligonucleotide
cgcaccgaacuugccugcu

SEQ ID NO: 1245081 - RNA, 19 nt, Artificial Sequence
  Description of Artificial Sequence: Synthetic oligonucleotide
cgcaggcgaggaggacauc

SEQ ID NO: 1245082 - RNA, 19 nt, Artificial Sequence
  Description of Artificial Sequence: Synthetic oligonucleotide
aauaagucaacccagagac

SEQ ID NO: 1245083 - RNA, 19 nt, Artificial Sequence
  Description of Artificial Sequence: Synthetic oligonucleotide
agaauuuggaaauagagag

SEQ ID NO: 1245084 - RNA, 19 nt, Artificial Sequence
  Description of Artificial Sequence: Synthetic oligonucleotide
gaugaguccaucuacaccg

SEQ ID NO: 1245085 - RNA, 19 nt, Artificial Sequence
  Description of Artificial Sequence: Synthetic oligonucleotide
aaggagacaucuuaucucc

SEQ ID NO: 1245086 - RNA, 19 nt, Artificial Sequence
  Description of Artificial Sequence: Synthetic oligonucleotide
aaauagagaggcuuaagag

SEQ ID NO: 1245087 - RNA, 19 nt, Artificial Sequence
  Description of Artificial Sequence: Synthetic oligonucleotide
ugagaauuuggaaauagag

SEQ ID NO: 1245088 - RNA, 19 nt, Artificial Sequence
  Description of Artificial Sequence: Synthetic oligonucleotide
aaaauagaugcuuaaggaa

SEQ ID NO: 1245089 - RNA, 19 nt, Artificial Sequence
  Description of Artificial Sequence: Synthetic oligonucleotide
aaggaaugcacccaacaag

SEQ ID NO: 1245090 - RNA, 19 nt, Artificial Sequence
  Description of Artificial Sequence: Synthetic oligonucleotide
gaaaauagaugcuuaagga

SEQ ID NO: 1245091 - RNA, 19 nt, Artificial Sequence
  Description of Artificial Sequence: Synthetic oligonucleotide
uacaacuauguacugauga

SEQ ID NO: 1245092 - RNA, 19 nt, Artificial Sequence
  Description of Artificial Sequence: Synthetic oligonucleotide
ucaacgaugaccagguacc

SEQ ID NO: 1245093 - RNA, 19 nt, Artificial Sequence
  Description of Artificial Sequence: Synthetic oligonucleotide
aaauaagucaacccagaga

SEQ ID NO: 1245094 - RNA, 19 nt, Artificial Sequence
  Description of Artificial Sequence: Synthetic oligonucleotide
agguaauagauuuguaaac

SEQ ID NO: 1245095 - RNA, 19 nt, Artificial Sequence
  Description of Artificial Sequence: Synthetic oligonucleotide
aaaaucuggggauagcccu

SEQ ID NO: 1245096 - RNA, 19 nt, Artificial Sequence
  Description of Artificial Sequence: Synthetic oligonucleotide
uuuucacacacacacacac

SEQ ID NO: 1245097 - RNA, 19 nt, Artificial Sequence
  Description of Artificial Sequence: Synthetic oligonucleotide
aagaugagaauuuggaaau

SEQ ID NO: 1245098 - RNA, 19 nt, Artificial Sequence
  Description of Artificial Sequence: Synthetic oligonucleotide
ggaaaauagaugcuuaagg

SEQ ID NO: 1245099 - RNA, 19 nt, Artificial Sequence
  Description of Artificial Sequence: Synthetic oligonucleotide
uaaagugugaacucaucag

SEQ ID NO: 1245100 - RNA, 19 nt, Artificial Sequence
  Description of Artificial Sequence: Synthetic oligonucleotide
ucuuuucacacacacacac

SEQ ID NO: 1245101 - RNA, 19 nt, Artificial Sequence
  Description of Artificial Sequence: Synthetic oligonucleotide
uccuguacaacuauguacu

SEQ ID NO: 1245102 - RNA, 19 nt, Artificial Sequence
  Description of Artificial Sequence: Synthetic oligonucleotide
ugcaucgaagcucagguug

SEQ ID NO: 1245103 - RNA, 19 nt, Artificial Sequence
  Description of Artificial Sequence: Synthetic oligonucleotide
uucacacacacacacacac

SEQ ID NO: 1245104 - RNA, 19 nt, Artificial Sequence
  Description of Artificial Sequence: Synthetic oligonucleotide
gagagagagagagagagag

SEQ ID NO: 1245105 - RNA, 19 nt, Artificial Sequence
  Description of Artificial Sequence: Synthetic oligonucleotide
gaaauagagaggcuuaaga

SEQ ID NO: 1245106 - RNA, 19 nt, Artificial Sequence
  Description of Artificial Sequence: Synthetic oligonucleotide
uuuaaguguuuauaaggca

SEQ ID NO: 1245107 - RNA, 19 nt, Artificial Sequence
  Description of Artificial Sequence: Synthetic oligonucleotide
aaauagaugcuuaaggaaa

SEQ ID NO: 1245108 - RNA, 19 nt, Artificial Sequence
  Description of Artificial Sequence: Synthetic oligonucleotide
ucugcaucgaagcucaggu

SEQ ID NO: 1245109 - RNA, 19 nt, Artificial Sequence
  Description of Artificial Sequence: Synthetic oligonucleotide
uguacaacuauguacugau

SEQ ID NO: 1245110 - RNA, 19 nt, Artificial Sequence
  Description of Artificial Sequence: Synthetic oligonucleotide
aggaaaacagcugaggcuc

SEQ ID NO: 1245111 - RNA, 19 nt, Artificial Sequence
  Description of Artificial Sequence: Synthetic oligonucleotide
aucuacaccguugugacgg

SEQ ID NO: 1245112 - RNA, 19 nt, Artificial Sequence
  Description of Artificial Sequence: Synthetic oligonucleotide
agacacuuggaaaugaggg

SEQ ID NO: 1245113 - RNA, 19 nt, Artificial Sequence
  Description of Artificial Sequence: Synthetic oligonucleotide
cugaauaagaaaggaaugc

SEQ ID NO: 1245114 - RNA, 19 nt, Artificial Sequence
  Description of Artificial Sequence: Synthetic oligonucleotide
aguaagaugccagcgcucc

SEQ ID NO: 1245115 - RNA, 19 nt, Artificial Sequence
  Description of Artificial Sequence: Synthetic oligonucleotide
ugugucagguaauagauuu

SEQ ID NO: 1245116 - RNA, 19 nt, Artificial Sequence
  Description of Artificial Sequence: Synthetic oligonucleotide
gagagagagagagaggagg

SEQ ID NO: 1245117 - RNA, 19 nt, Artificial Sequence
  Description of Artificial Sequence: Synthetic oligonucleotide
uaagucaacccagagacga

SEQ ID NO: 1245118 - RNA, 19 nt, Artificial Sequence
  Description of Artificial Sequence: Synthetic oligonucleotide
caucuuaucuccugggugc

SEQ ID NO: 1245119 - RNA, 19 nt, Artificial Sequence
  Description of Artificial Sequence: Synthetic oligonucleotide
aaaggaaugcacccaacaa

SEQ ID NO: 1245120 - RNA, 19 nt, Artificial Sequence
  Description of Artificial Sequence: Synthetic oligonucleotide
acaacuauguacugaugag

SEQ ID NO: 1245121 - RNA, 19 nt, Artificial Sequence
  Description of Artificial Sequence: Synthetic oligonucleotide
aauggacggcuccauuuac

SEQ ID NO: 1245122 - RNA, 19 nt, Artificial Sequence
  Description of Artificial Sequence: Synthetic oligonucleotide
uuuuggcucaggcugucgg

SEQ ID NO: 1245123 - RNA, 19 nt, Artificial Sequence
  Description of Artificial Sequence: Synthetic oligonucleotide
agaggcuuaagagggaggc

SEQ ID NO: 1245124 - RNA, 19 nt, Artificial Sequence
  Description of Artificial Sequence: Synthetic oligonucleotide
auagcccugggauacaaag

SEQ ID NO: 1245125 - RNA, 19 nt, Artificial Sequence
  Description of Artificial Sequence: Synthetic oligonucleotide
auuguuucaaauguaugug

SEQ ID NO: 1245126 - RNA, 19 nt, Artificial Sequence
  Description of Artificial Sequence: Synthetic oligonucleotide
aggagaguaagaugccagc

SEQ ID NO: 1245127 - RNA, 19 nt, Artificial Sequence
  Description of Artificial Sequence: Synthetic oligonucleotide
agaugcuuaaggaaaacag

SEQ ID NO: 1245128 - RNA, 19 nt, Artificial Sequence
  Description of Artificial Sequence: Synthetic oligonucleotide
gugagagagagagagagag

SEQ ID NO: 1245129 - RNA, 19 nt, Artificial Sequence
  Description of Artificial Sequence: Synthetic oligonucleotide
agcucauugcucuuuucac

SEQ ID NO: 1245130 - RNA, 19 nt, Artificial Sequence
  Description of Artificial Sequence: Synthetic oligonucleotide
aacgaagggagccccaugu

SEQ ID NO: 1245131 - RNA, 19 nt, Artificial Sequence
  Description of Artificial Sequence: Synthetic oligonucleotide
cacacacacacacacacgc

SEQ ID NO: 1245132 - RNA, 19 nt, Artificial Sequence
  Description of Artificial Sequence: Synthetic oligonucleotide
ucucaagagaaugaggccu

SEQ ID NO: 1245133 - RNA, 19 nt, Artificial Sequence
  Description of Artificial Sequence: Synthetic oligonucleotide
agggcucucaauccguccc

SEQ ID NO: 1245134 - RNA, 19 nt, Artificial Sequence
  Description of Artificial Sequence: Synthetic oligonucleotide
ugcgcuucccuaaagugug

SEQ ID NO: 1245135 - RNA, 19 nt, Artificial Sequence
  Description of Artificial Sequence: Synthetic oligonucleotide
agagaugugcucugugggg

SEQ ID NO: 1245136 - RNA, 19 nt, Artificial Sequence
  Description of Artificial Sequence: Synthetic oligonucleotide
gugugugagagagagagag

SEQ ID NO: 1245137 - RNA, 19 nt, Artificial Sequence
  Description of Artificial Sequence: Synthetic oligonucleotide
agaguaagaugccagcgcu

SEQ ID NO: 1245138 - RNA, 19 nt, Artificial Sequence
  Description of Artificial Sequence: Synthetic oligonucleotide
gagaauuuggaaauagaga

SEQ ID NO: 1245139 - RNA, 19 nt, Artificial Sequence
  Description of Artificial Sequence: Synthetic oligonucleotide
gcucuuuucacacacacac

SEQ ID NO: 1245140 - RNA, 19 nt, Artificial Sequence
  Description of Artificial Sequence: Synthetic oligonucleotide
gagaguaagaugccagcgc

SEQ ID NO: 1245141 - RNA, 19 nt, Artificial Sequence
  Description of Artificial Sequence: Synthetic oligonucleotide
gagagagagagagagagga

SEQ ID NO: 1245142 - RNA, 19 nt, Artificial Sequence
  Description of Artificial Sequence: Synthetic oligonucleotide
auguaugugcacuggccac

SEQ ID NO: 1245143 - RNA, 19 nt, Artificial Sequence
  Description of Artificial Sequence: Synthetic oligonucleotide
gaugccaacgaagggagcc

SEQ ID NO: 1245144 - RNA, 19 nt, Artificial Sequence
  Description of Artificial Sequence: Synthetic oligonucleotide
gugugagagagagagagag

SEQ ID NO: 1245145 - RNA, 19 nt, Artificial Sequence
  Description of Artificial Sequence: Synthetic oligonucleotide
cucaacgaugaccagguac

SEQ ID NO: 1245146 - RNA, 19 nt, Artificial Sequence
  Description of Artificial Sequence: Synthetic oligonucleotide
agagagagagaggaggagg

SEQ ID NO: 1245147 - RNA, 19 nt, Artificial Sequence
  Description of Artificial Sequence: Synthetic oligonucleotide
aagugugugucggggaugg

SEQ ID NO: 1245148 - RNA, 19 nt, Artificial Sequence
  Description of Artificial Sequence: Synthetic oligonucleotide
uugucaucgagcaguggcc

SEQ ID NO: 1245149 - RNA, 19 nt, Artificial Sequence
  Description of Artificial Sequence: Synthetic oligonucleotide
uucucaagagaaugaggcc

SEQ ID NO: 1245150 - RNA, 19 nt, Artificial Sequence
  Description of Artificial Sequence: Synthetic oligonucleotide
ucacacacacacacacacg

SEQ ID NO: 1245151 - RNA, 19 nt, Artificial Sequence
  Description of Artificial Sequence: Synthetic oligonucleotide
ucuaugcugggacccaagc

SEQ ID NO: 1245152 - RNA, 19 nt, Artificial Sequence
  Description of Artificial Sequence: Synthetic oligonucleotide
aagccguaaucagagaugu

SEQ ID NO: 1245153 - RNA, 19 nt, Artificial Sequence
  Description of Artificial Sequence: Synthetic oligonucleotide
aaagccguaaucagagaug

SEQ ID NO: 1245154 - RNA, 19 nt, Artificial Sequence
  Description of Artificial Sequence: Synthetic oligonucleotide
ugucagguaauagauuugu

SEQ ID NO: 1245155 - RNA, 19 nt, Artificial Sequence
  Description of Artificial Sequence: Synthetic oligonucleotide
gagagagaggaggaggagg

SEQ ID NO: 1245156 - RNA, 19 nt, Artificial Sequence
  Description of Artificial Sequence: Synthetic oligonucleotide
auuaccacagcuagaagca

SEQ ID NO: 1245157 - RNA, 19 nt, Artificial Sequence
  Description of Artificial Sequence: Synthetic oligonucleotide
caugcaggggaccagauga

SEQ ID NO: 1245158 - RNA, 19 nt, Artificial Sequence
  Description of Artificial Sequence: Synthetic oligonucleotide
gugugugugugugagagag

SEQ ID NO: 1245159 - RNA, 19 nt, Artificial Sequence
  Description of Artificial Sequence: Synthetic oligonucleotide
ucaacccagagacgaaucu

SEQ ID NO: 1245160 - RNA, 19 nt, Artificial Sequence
  Description of Artificial Sequence: Synthetic oligonucleotide
uucgcucuaguguggagcc

SEQ ID NO: 1245161 - RNA, 19 nt, Artificial Sequence
  Description of Artificial Sequence: Synthetic oligonucleotide
gaaugcacccaacaaggca

SEQ ID NO: 1245162 - RNA, 19 nt, Artificial Sequence
  Description of Artificial Sequence: Synthetic oligonucleotide
gagguaaauggacuuaaaa

SEQ ID NO: 1245163 - RNA, 19 nt, Artificial Sequence
  Description of Artificial Sequence: Synthetic oligonucleotide
ugugucuaugcugggaccc

SEQ ID NO: 1245164 - RNA, 19 nt, Artificial Sequence
  Description of Artificial Sequence: Synthetic oligonucleotide
uaaucagagaugugcucug

SEQ ID NO: 1245165 - RNA, 19 nt, Artificial Sequence
  Description of Artificial Sequence: Synthetic oligonucleotide
uggacggcuccauuuaccc

SEQ ID NO: 1245166 - RNA, 19 nt, Artificial Sequence
  Description of Artificial Sequence: Synthetic oligonucleotide
auaacuggcauuaggugug

SEQ ID NO: 1245167 - RNA, 19 nt, Artificial Sequence
  Description of Artificial Sequence: Synthetic oligonucleotide
agcauaacuggcauuaggu

SEQ ID NO: 1245168 - RNA, 19 nt, Artificial Sequence
  Description of Artificial Sequence: Synthetic oligonucleotide
cacacacacacacgcaucc

SEQ ID NO: 1245169 - RNA, 19 nt, Artificial Sequence
  Description of Artificial Sequence: Synthetic oligonucleotide
uagaugcuuaaggaaaaca

SEQ ID NO: 1245170 - RNA, 19 nt, Artificial Sequence
  Description of Artificial Sequence: Synthetic oligonucleotide
uuucacacacacacacaca

SEQ ID NO: 1245171 - RNA, 19 nt, Artificial Sequence
  Description of Artificial Sequence: Synthetic oligonucleotide
agagaggaggaggaggagg

SEQ ID NO: 1245172 - RNA, 19 nt, Artificial Sequence
  Description of Artificial Sequence: Synthetic oligonucleotide
gagacgaaucugcacagca

SEQ ID NO: 1245173 - RNA, 19 nt, Artificial Sequence
  Description of Artificial Sequence: Synthetic oligonucleotide
uuaagagggaggccauugu

SEQ ID NO: 1245174 - RNA, 19 nt, Artificial Sequence
  Description of Artificial Sequence: Synthetic oligonucleotide
gguggugugucuaugcugg

SEQ ID NO: 1245175 - RNA, 19 nt, Artificial Sequence
  Description of Artificial Sequence: Synthetic oligonucleotide
gugugugugugugugagag

SEQ ID NO: 1245176 - RNA, 19 nt, Artificial Sequence
  Description of Artificial Sequence: Synthetic oligonucleotide
ucacgagauguccuccugc

SEQ ID NO: 1245177 - RNA, 19 nt, Artificial Sequence
  Description of Artificial Sequence: Synthetic oligonucleotide
agugugaacucaucagcca

SEQ ID NO: 1245178 - RNA, 19 nt, Artificial Sequence
  Description of Artificial Sequence: Synthetic oligonucleotide
cacagcuagaagcaccagc

SEQ ID NO: 1245179 - RNA, 19 nt, Artificial Sequence
  Description of Artificial Sequence: Synthetic oligonucleotide
aguguuuauaaggcagauc

SEQ ID NO: 1245180 - RNA, 19 nt, Artificial Sequence
  Description of Artificial Sequence: Synthetic oligonucleotide
uaguguggagccaucugga

SEQ ID NO: 1245181 - RNA, 19 nt, Artificial Sequence
  Description of Artificial Sequence: Synthetic oligonucleotide
uccgucagaccguagucgc

SEQ ID NO: 1245182 - RNA, 19 nt, Artificial Sequence
  Description of Artificial Sequence: Synthetic oligonucleotide
cuaugcugggacccaagcc

SEQ ID NO: 1245183 - RNA, 19 nt, Artificial Sequence
  Description of Artificial Sequence: Synthetic oligonucleotide
agucgcacucggcccaucc

SEQ ID NO: 1245184 - RNA, 19 nt, Artificial Sequence
  Description of Artificial Sequence: Synthetic oligonucleotide
agaugaagugugugucggg

SEQ ID NO: 1245185 - RNA, 19 nt, Artificial Sequence
  Description of Artificial Sequence: Synthetic oligonucleotide
ugugagagagagagagaga

SEQ ID NO: 1245186 - RNA, 19 nt, Artificial Sequence
  Description of Artificial Sequence: Synthetic oligonucleotide
cagccaguagccaauggac

SEQ ID NO: 1245187 - RNA, 19 nt, Artificial Sequence
  Description of Artificial Sequence: Synthetic oligonucleotide
cagaugaagugugugucgg

SEQ ID NO: 1245188 - RNA, 19 nt, Artificial Sequence
  Description of Artificial Sequence: Synthetic oligonucleotide
ucucaauccguccccggcu

SEQ ID NO: 1245189 - RNA, 19 nt, Artificial Sequence
  Description of Artificial Sequence: Synthetic oligonucleotide
gcuuaaggaaaacagcuga

SEQ ID NO: 1245190 - RNA, 19 nt, Artificial Sequence
  Description of Artificial Sequence: Synthetic oligonucleotide
gaggaggaggaggaggagg

SEQ ID NO: 1245191 - RNA, 19 nt, Artificial Sequence
  Description of Artificial Sequence: Synthetic oligonucleotide
cucgucugccaucugugcg

SEQ ID NO: 1245192 - RNA, 19 nt, Artificial Sequence
  Description of Artificial Sequence: Synthetic oligonucleotide
aggccuucgcucuagugug

SEQ ID NO: 1245193 - RNA, 19 nt, Artificial Sequence
  Description of Artificial Sequence: Synthetic oligonucleotide
ugagagagagagagagaga

SEQ ID NO: 1245194 - RNA, 19 nt, Artificial Sequence
  Description of Artificial Sequence: Synthetic oligonucleotide
cauaacuggcauuaggugu

SEQ ID NO: 1245195 - RNA, 19 nt, Artificial Sequence
  Description of Artificial Sequence: Synthetic oligonucleotide
ugcacuggccacucaacga

SEQ ID NO: 1245196 - RNA, 19 nt, Artificial Sequence
  Description of Artificial Sequence: Synthetic oligonucleotide
cauuaggugugucagguaa

SEQ ID NO: 1245197 - RNA, 19 nt, Artificial Sequence
  Description of Artificial Sequence: Synthetic oligonucleotide
ugugugagagagagagaga

SEQ ID NO: 1245198 - RNA, 19 nt, Artificial Sequence
  Description of Artificial Sequence: Synthetic oligonucleotide
gauuuuguggggacugcug

SEQ ID NO: 1245199 - RNA, 19 nt, Artificial Sequence
  Description of Artificial Sequence: Synthetic oligonucleotide
guugugacggcccucccac

SEQ ID NO: 1245200 - RNA, 19 nt, Artificial Sequence
  Description of Artificial Sequence: Synthetic oligonucleotide
ugagacaugcaggggacca

SEQ ID NO: 1245201 - RNA, 19 nt, Artificial Sequence
  Description of Artificial Sequence: Synthetic oligonucleotide
accguugugacggcccucc

SEQ ID NO: 1245202 - RNA, 19 nt, Artificial Sequence
  Description of Artificial Sequence: Synthetic oligonucleotide
cuucgcucuaguguggagc

SEQ ID NO: 1245203 - RNA, 19 nt, Artificial Sequence
  Description of Artificial Sequence: Synthetic oligonucleotide
gugcacuggccacucaacg

SEQ ID NO: 1245204 - RNA, 19 nt, Artificial Sequence
  Description of Artificial Sequence: Synthetic oligonucleotide
ugucggagaaggcaucguc

SEQ ID NO: 1245205 - RNA, 19 nt, Artificial Sequence
  Description of Artificial Sequence: Synthetic oligonucleotide
aacgaugaccagguaccag

SEQ ID NO: 1245206 - RNA, 19 nt, Artificial Sequence
  Description of Artificial Sequence: Synthetic oligonucleotide
ucguccauguccuguacaa

SEQ ID NO: 1245207 - RNA, 19 nt, Artificial Sequence
  Description of Artificial Sequence: Synthetic oligonucleotide
gccguaaucagagaugugc

SEQ ID NO: 1245208 - RNA, 19 nt, Artificial Sequence
  Description of Artificial Sequence: Synthetic oligonucleotide
gacgaaucugcacagcaua

SEQ ID NO: 1245209 - RNA, 19 nt, Artificial Sequence
  Description of Artificial Sequence: Synthetic oligonucleotide
acggugguacaggagggcc

SEQ ID NO: 1245210 - RNA, 19 nt, Artificial Sequence
  Description of Artificial Sequence: Synthetic oligonucleotide
gccaguagccaauggacgg

SEQ ID NO: 1245211 - RNA, 19 nt, Artificial Sequence
  Description of Artificial Sequence: Synthetic oligonucleotide
cugguuccagccaguagcc

SEQ ID NO: 1245212 - RNA, 19 nt, Artificial Sequence
  Description of Artificial Sequence: Synthetic oligonucleotide
aaguguuuauaaggcagau

SEQ ID NO: 1245213 - RNA, 19 nt, Artificial Sequence
  Description of Artificial Sequence: Synthetic oligonucleotide
ggagaguaagaugccagcg

SEQ ID NO: 1245214 - RNA, 19 nt, Artificial Sequence
  Description of Artificial Sequence: Synthetic oligonucleotide
cucauuaccacagcuagaa

SEQ ID NO: 1245215 - RNA, 19 nt, Artificial Sequence
  Description of Artificial Sequence: Synthetic oligonucleotide
aggcuuaagagggaggcca

SEQ ID NO: 1245216 - RNA, 19 nt, Artificial Sequence
  Description of Artificial Sequence: Synthetic oligonucleotide
ugucaucgagcaguggccc

SEQ ID NO: 1245217 - RNA, 19 nt, Artificial Sequence
  Description of Artificial Sequence: Synthetic oligonucleotide
ucgucugccaucugugcgu

SEQ ID NO: 1245218 - RNA, 19 nt, Artificial Sequence
  Description of Artificial Sequence: Synthetic oligonucleotide
auggacggcuccauuuacc

SEQ ID NO: 1245219 - RNA, 19 nt, Artificial Sequence
  Description of Artificial Sequence: Synthetic oligonucleotide
uguaugugcacuggccacu

SEQ ID NO: 1245220 - RNA, 19 nt, Artificial Sequence
  Description of Artificial Sequence: Synthetic oligonucleotide
uccauguccuguacaacua

SEQ ID NO: 1245221 - RNA, 19 nt, Artificial Sequence
  Description of Artificial Sequence: Synthetic oligonucleotide
cugcucuugggacauuuug

SEQ ID NO: 1245222 - RNA, 19 nt, Artificial Sequence
  Description of Artificial Sequence: Synthetic oligonucleotide
ugugugugagagagagaga

SEQ ID NO: 1245223 - RNA, 19 nt, Artificial Sequence
  Description of Artificial Sequence: Synthetic oligonucleotide
agcgcucccgaaugucgcc

SEQ ID NO: 1245224 - RNA, 19 nt, Artificial Sequence
  Description of Artificial Sequence: Synthetic oligonucleotide
agccaauguugcauuuugc

SEQ ID NO: 1245225 - RNA, 19 nt, Artificial Sequence
  Description of Artificial Sequence: Synthetic oligonucleotide
auaagucaacccagagacg

SEQ ID NO: 1245226 - RNA, 19 nt, Artificial Sequence
  Description of Artificial Sequence: Synthetic oligonucleotide
gagagagagaggaggagga

SEQ ID NO: 1245227 - RNA, 19 nt, Artificial Sequence
  Description of Artificial Sequence: Synthetic oligonucleotide
augccaacgaagggagccc

SEQ ID NO: 1245228 - RNA, 19 nt, Artificial Sequence
  Description of Artificial Sequence: Synthetic oligonucleotide
gcauaacuggcauuaggug

SEQ ID NO: 1245229 - RNA, 19 nt, Artificial Sequence
  Description of Artificial Sequence: Synthetic oligonucleotide
gagagagagagaggaggag

SEQ ID NO: 1245230 - RNA, 19 nt, Artificial Sequence
  Description of Artificial Sequence: Synthetic oligonucleotide
aggaggagaguaagaugcc

SEQ ID NO: 1245231 - RNA, 19 nt, Artificial Sequence
  Description of Artificial Sequence: Synthetic oligonucleotide
ggugugucuaugcugggac

SEQ ID NO: 1245232 - RNA, 19 nt, Artificial Sequence
  Description of Artificial Sequence: Synthetic oligonucleotide
augagaauuuggaaauaga

SEQ ID NO: 1245233 - RNA, 19 nt, Artificial Sequence
  Description of Artificial Sequence: Synthetic oligonucleotide
guaaucagagaugugcucu

SEQ ID NO: 1245234 - RNA, 19 nt, Artificial Sequence
  Description of Artificial Sequence: Synthetic oligonucleotide
gugugugugugugugugag

SEQ ID NO: 1245235 - RNA, 19 nt, Artificial Sequence
  Description of Artificial Sequence: Synthetic oligonucleotide
aggaggaggaggaggagag

SEQ ID NO: 1245236 - RNA, 19 nt, Artificial Sequence
  Description of Artificial Sequence: Synthetic oligonucleotide
uguguguguguguguguga

SEQ ID NO: 1245237 - RNA, 19 nt, Artificial Sequence
  Description of Artificial Sequence: Synthetic oligonucleotide
ugguacaggagggccaagc

SEQ ID NO: 1245238 - RNA, 19 nt, Artificial Sequence
  Description of Artificial Sequence: Synthetic oligonucleotide
agagagagagagaggagga

SEQ ID NO: 1245239 - RNA, 19 nt, Artificial Sequence
  Description of Artificial Sequence: Synthetic oligonucleotide
agagagagagagagagagg

SEQ ID NO: 1245240 - RNA, 19 nt, Artificial Sequence
  Description of Artificial Sequence: Synthetic oligonucleotide
auccguccccggcugaggg

SEQ ID NO: 1245241 - RNA, 19 nt, Artificial Sequence
  Description of Artificial Sequence: Synthetic oligonucleotide
uagagaggcuuaagaggga

SEQ ID NO: 1245242 - RNA, 19 nt, Artificial Sequence
  Description of Artificial Sequence: Synthetic oligonucleotide
gguaauagauuuguaaacu

SEQ ID NO: 1245243 - RNA, 19 nt, Artificial Sequence
  Description of Artificial Sequence: Synthetic oligonucleotide
aagaugccagcgcucccga

SEQ ID NO: 1245244 - RNA, 19 nt, Artificial Sequence
  Description of Artificial Sequence: Synthetic oligonucleotide
ucgagcaguggcccacugc

SEQ ID NO: 1245245 - RNA, 19 nt, Artificial Sequence
  Description of Artificial Sequence: Synthetic oligonucleotide
cuuuucacacacacacaca

SEQ ID NO: 1245246 - RNA, 19 nt, Artificial Sequence
  Description of Artificial Sequence: Synthetic oligonucleotide
ugugugugugugagagaga

SEQ ID NO: 1245247 - RNA, 19 nt, Artificial Sequence
  Description of Artificial Sequence: Synthetic oligonucleotide
gagaggaggaggaggagga

SEQ ID NO: 1245248 - RNA, 19 nt, Artificial Sequence
  Description of Artificial Sequence: Synthetic oligonucleotide
gacucgucugccaucugug

SEQ ID NO: 1245249 - RNA, 19 nt, Artificial Sequence
  Description of Artificial Sequence: Synthetic oligonucleotide
caucuacaccguugugacg

SEQ ID NO: 1245250 - RNA, 19 nt, Artificial Sequence
  Description of Artificial Sequence: Synthetic oligonucleotide
uaccagggucacgagaugu

SEQ ID NO: 1245251 - RNA, 19 nt, Artificial Sequence
  Description of Artificial Sequence: Synthetic oligonucleotide
ugugugugugugugugugu

SEQ ID NO: 1245252 - RNA, 19 nt, Artificial Sequence
  Description of Artificial Sequence: Synthetic oligonucleotide
ugaggccuucgcucuagug

SEQ ID NO: 1245253 - RNA, 19 nt, Artificial Sequence
  Description of Artificial Sequence: Synthetic oligonucleotide
cuuggaaaugagggcuucc

SEQ ID NO: 1245254 - RNA, 19 nt, Artificial Sequence
  Description of Artificial Sequence: Synthetic oligonucleotide
aauccguccccggcugagg

SEQ ID NO: 1245255 - RNA, 19 nt, Artificial Sequence
  Description of Artificial Sequence: Synthetic oligonucleotide
ccagaugaagugugugucg

SEQ ID NO: 1245256 - RNA, 19 nt, Artificial Sequence
  Description of Artificial Sequence: Synthetic oligonucleotide
ugugugugugugugugaga

SEQ ID NO: 1245257 - RNA, 19 nt, Artificial Sequence
  Description of Artificial Sequence: Synthetic oligonucleotide
ugugugugugugugagaga

SEQ ID NO: 1245258 - RNA, 19 nt, Artificial Sequence
  Description of Artificial Sequence: Synthetic oligonucleotide
accuuguguaccacaaaug

SEQ ID NO: 1245259 - RNA, 19 nt, Artificial Sequence
  Description of Artificial Sequence: Synthetic oligonucleotide
acacacacacacacgcauc

SEQ ID NO: 1245260 - RNA, 19 nt, Artificial Sequence
  Description of Artificial Sequence: Synthetic oligonucleotide
ucagaccguagucgcacuc

SEQ ID NO: 1245261 - RNA, 19 nt, Artificial Sequence
  Description of Artificial Sequence: Synthetic oligonucleotide
cagaccguagucgcacucg

SEQ ID NO: 1245262 - RNA, 19 nt, Artificial Sequence
  Description of Artificial Sequence: Synthetic oligonucleotide
gugugugugugugugugug

SEQ ID NO: 1245263 - RNA, 19 nt, Artificial Sequence
  Description of Artificial Sequence: Synthetic oligonucleotide
ggaaauagagaggcuuaag

SEQ ID NO: 1245264 - RNA, 19 nt, Artificial Sequence
  Description of Artificial Sequence: Synthetic oligonucleotide
augugcacuggccacucaa

SEQ ID NO: 1245265 - RNA, 19 nt, Artificial Sequence
  Description of Artificial Sequence: Synthetic oligonucleotide
agugugugugugugugugu

SEQ ID NO: 1245266 - RNA, 19 nt, Artificial Sequence
  Description of Artificial Sequence: Synthetic oligonucleotide
gugugucuaugcugggacc

SEQ ID NO: 1245267 - RNA, 19 nt, Artificial Sequence
  Description of Artificial Sequence: Synthetic oligonucleotide
agagagagaggaggaggag

SEQ ID NO: 1245268 - RNA, 19 nt, Artificial Sequence
  Description of Artificial Sequence: Synthetic oligonucleotide
ucuacaccguugugacggc

SEQ ID NO: 1245269 - RNA, 19 nt, Artificial Sequence
  Description of Artificial Sequence: Synthetic oligonucleotide
ggauacaaaggagacaucu

SEQ ID NO: 1245270 - RNA, 19 nt, Artificial Sequence
  Description of Artificial Sequence: Synthetic oligonucleotide
gaagugugugucggggaug

SEQ ID NO: 1245271 - RNA, 19 nt, Artificial Sequence
  Description of Artificial Sequence: Synthetic oligonucleotide
gaccagaugaagugugugu

SEQ ID NO: 1245272 - RNA, 19 nt, Artificial Sequence
  Description of Artificial Sequence: Synthetic oligonucleotide
cacuccaggagaugccaac

SEQ ID NO: 1245273 - RNA, 19 nt, Artificial Sequence
  Description of Artificial Sequence: Synthetic oligonucleotide
agagagagagagagaggag

SEQ ID NO: 1245274 - RNA, 19 nt, Artificial Sequence
  Description of Artificial Sequence: Synthetic oligonucleotide
caacccagagacgaaucug

SEQ ID NO: 1245275 - RNA, 19 nt, Artificial Sequence
  Description of Artificial Sequence: Synthetic oligonucleotide
ugaugagggaugaguccau

SEQ ID NO: 1245276 - RNA, 19 nt, Artificial Sequence
  Description of Artificial Sequence: Synthetic oligonucleotide
uccaguauucaggcagcca

SEQ ID NO: 1245277 - RNA, 19 nt, Artificial Sequence
  Description of Artificial Sequence: Synthetic oligonucleotide
cagugugugugugugugug

SEQ ID NO: 1245278 - RNA, 19 nt, Artificial Sequence
  Description of Artificial Sequence: Synthetic oligonucleotide
cucaauccguccccggcug

SEQ ID NO: 1245279 - RNA, 19 nt, Artificial Sequence
  Description of Artificial Sequence: Synthetic oligonucleotide
aucugugcgugcgcuuccc

SEQ ID NO: 1245280 - RNA, 19 nt, Artificial Sequence
  Description of Artificial Sequence: Synthetic oligonucleotide
cagcuagaagcaccagccc

SEQ ID NO: 1245281 - RNA, 19 nt, Artificial Sequence
  Description of Artificial Sequence: Synthetic oligonucleotide
gaggcuuaagagggaggcc

SEQ ID NO: 1245282 - RNA, 19 nt, Artificial Sequence
  Description of Artificial Sequence: Synthetic oligonucleotide
guaagaugccagcgcuccc

SEQ ID NO: 1245283 - RNA, 19 nt, Artificial Sequence
  Description of Artificial Sequence: Synthetic oligonucleotide
agccccauguacagguuuc

SEQ ID NO: 1245284 - RNA, 19 nt, Artificial Sequence
  Description of Artificial Sequence: Synthetic oligonucleotide
cucuuuucacacacacaca

SEQ ID NO: 1245285 - RNA, 19 nt, Artificial Sequence
  Description of Artificial Sequence: Synthetic oligonucleotide
cacgagauguccuccugca

SEQ ID NO: 1245286 - RNA, 19 nt, Artificial Sequence
  Description of Artificial Sequence: Synthetic oligonucleotide
ggagaaggcaucguccaug

SEQ ID NO: 1245287 - RNA, 19 nt, Artificial Sequence
  Description of Artificial Sequence: Synthetic oligonucleotide
acagcauaacuggcauuag

SEQ ID NO: 1245288 - RNA, 19 nt, Artificial Sequence
  Description of Artificial Sequence: Synthetic oligonucleotide
aggaggaggaggaggagga

SEQ ID NO: 1245289 - RNA, 19 nt, Artificial Sequence
  Description of Artificial Sequence: Synthetic oligonucleotide
gaggaggaggaggaggaga

SEQ ID NO: 1245290 - RNA, 19 nt, Artificial Sequence
  Description of Artificial Sequence: Synthetic oligonucleotide
uccauuuguucugcaucga

SEQ ID NO: 1245291 - RNA, 19 nt, Artificial Sequence
  Description of Artificial Sequence: Synthetic oligonucleotide
ucaauccguccccggcuga

SEQ ID NO: 1245292 - RNA, 19 nt, Artificial Sequence
  Description of Artificial Sequence: Synthetic oligonucleotide
gucacgagauguccuccug

SEQ ID NO: 1245293 - RNA, 19 nt, Artificial Sequence
  Description of Artificial Sequence: Synthetic oligonucleotide
cacucaacgaugaccaggu

SEQ ID NO: 1245294 - RNA, 19 nt, Artificial Sequence
  Description of Artificial Sequence: Synthetic oligonucleotide
gugucagguaauagauuug

SEQ ID NO: 1245295 - RNA, 19 nt, Artificial Sequence
  Description of Artificial Sequence: Synthetic oligonucleotide
gaggcacggugguacagga

SEQ ID NO: 1245296 - RNA, 19 nt, Artificial Sequence
  Description of Artificial Sequence: Synthetic oligonucleotide
cuguacaacuauguacuga

SEQ ID NO: 1245297 - RNA, 19 nt, Artificial Sequence
  Description of Artificial Sequence: Synthetic oligonucleotide
cagggcucucaauccgucc

SEQ ID NO: 1245298 - RNA, 19 nt, Artificial Sequence
  Description of Artificial Sequence: Synthetic oligonucleotide
uagccaauggacggcucca

SEQ ID NO: 1245299 - RNA, 19 nt, Artificial Sequence
  Description of Artificial Sequence: Synthetic oligonucleotide
cagcgcucccgaaugucgc

SEQ ID NO: 1245300 - RNA, 19 nt, Artificial Sequence
  Description of Artificial Sequence: Synthetic oligonucleotide
cauuuugccugggagguaa

SEQ ID NO: 1245301 - RNA, 19 nt, Artificial Sequence
  Description of Artificial Sequence: Synthetic oligonucleotide
gcaucgaagcucagguugg

SEQ ID NO: 1245302 - RNA, 19 nt, Artificial Sequence
  Description of Artificial Sequence: Synthetic oligonucleotide
cuuuuggcucaggcugucg

SEQ ID NO: 1245303 - RNA, 19 nt, Artificial Sequence
  Description of Artificial Sequence: Synthetic oligonucleotide
uccguccccggcugagggg

SEQ ID NO: 1245304 - RNA, 19 nt, Artificial Sequence
  Description of Artificial Sequence: Synthetic oligonucleotide
gagagaggaggaggaggag

SEQ ID NO: 1245305 - RNA, 19 nt, Artificial Sequence
  Description of Artificial Sequence: Synthetic oligonucleotide
guacaacuauguacugaug

SEQ ID NO: 1245306 - RNA, 19 nt, Artificial Sequence
  Description of Artificial Sequence: Synthetic oligonucleotide
caucgaagcucagguuggg

SEQ ID NO: 1245307 - RNA, 19 nt, Artificial Sequence
  Description of Artificial Sequence: Synthetic oligonucleotide
gauggccgcuccgucagac

SEQ ID NO: 1245308 - RNA, 19 nt, Artificial Sequence
  Description of Artificial Sequence: Synthetic oligonucleotide
ugggagguaaauggacuua

SEQ ID NO: 1245309 - RNA, 19 nt, Artificial Sequence
  Description of Artificial Sequence: Synthetic oligonucleotide
accagcuccccaccuugug

SEQ ID NO: 1245310 - RNA, 19 nt, Artificial Sequence
  Description of Artificial Sequence: Synthetic oligonucleotide
guggugugucuaugcuggg

SEQ ID NO: 1245311 - RNA, 19 nt, Artificial Sequence
  Description of Artificial Sequence: Synthetic oligonucleotide
uccgccagugugugugugu

SEQ ID NO: 1245312 - RNA, 19 nt, Artificial Sequence
  Description of Artificial Sequence: Synthetic oligonucleotide
ucugugcgugcgcuucccu

SEQ ID NO: 1245313 - RNA, 19 nt, Artificial Sequence
  Description of Artificial Sequence: Synthetic oligonucleotide
acaccguugugacggcccu

SEQ ID NO: 1245314 - RNA, 19 nt, Artificial Sequence
  Description of Artificial Sequence: Synthetic oligonucleotide
gaguaagaugccagcgcuc

SEQ ID NO: 1245315 - RNA, 19 nt, Artificial Sequence
  Description of Artificial Sequence: Synthetic oligonucleotide
gggauggccgcuccgucag

SEQ ID NO: 1245316 - RNA, 19 nt, Artificial Sequence
  Description of Artificial Sequence: Synthetic oligonucleotide
cacuggccacucaacgaug

SEQ ID NO: 1245317 - RNA, 19 nt, Artificial Sequence
  Description of Artificial Sequence: Synthetic oligonucleotide
agagagagagagagagaga

SEQ ID NO: 1245318 - RNA, 19 nt, Artificial Sequence
  Description of Artificial Sequence: Synthetic oligonucleotide
guauucaggcagccaaugu

SEQ ID NO: 1245319 - RNA, 19 nt, Artificial Sequence
  Description of Artificial Sequence: Synthetic oligonucleotide
ccagcgcucccgaaugucg

SEQ ID NO: 1245320 - RNA, 19 nt, Artificial Sequence
  Description of Artificial Sequence: Synthetic oligonucleotide
aggggaccagaugaagugu

SEQ ID NO: 1245321 - RNA, 19 nt, Artificial Sequence
  Description of Artificial Sequence: Synthetic oligonucleotide
ugacggcccucccaccagu

SEQ ID NO: 1245322 - RNA, 19 nt, Artificial Sequence
  Description of Artificial Sequence: Synthetic oligonucleotide
gaugccagcgcucccgaau

SEQ ID NO: 1245323 - RNA, 19 nt, Artificial Sequence
  Description of Artificial Sequence: Synthetic oligonucleotide
gcugucggagaaggcaucg

SEQ ID NO: 1245324 - RNA, 19 nt, Artificial Sequence
  Description of Artificial Sequence: Synthetic oligonucleotide
gauacaaaggagacaucuu

SEQ ID NO: 1245325 - RNA, 19 nt, Artificial Sequence
  Description of Artificial Sequence: Synthetic oligonucleotide
acucauuaccacagcuaga

SEQ ID NO: 1245326 - RNA, 19 nt, Artificial Sequence
  Description of Artificial Sequence: Synthetic oligonucleotide
ggggauuuuguggggacug

SEQ ID NO: 1245327 - RNA, 19 nt, Artificial Sequence
  Description of Artificial Sequence: Synthetic oligonucleotide
agaggaggaggaggaggag

SEQ ID NO: 1245328 - RNA, 19 nt, Artificial Sequence
  Description of Artificial Sequence: Synthetic oligonucleotide
caucguccauguccuguac

SEQ ID NO: 1245329 - RNA, 19 nt, Artificial Sequence
  Description of Artificial Sequence: Synthetic oligonucleotide
cuuguguaccacaaauguu

SEQ ID NO: 1245330 - RNA, 19 nt, Artificial Sequence
  Description of Artificial Sequence: Synthetic oligonucleotide
ugucuaugcugggacccaa

SEQ ID NO: 1245331 - RNA, 19 nt, Artificial Sequence
  Description of Artificial Sequence: Synthetic oligonucleotide
ggaaugcacccaacaaggc

SEQ ID NO: 1245332 - RNA, 19 nt, Artificial Sequence
  Description of Artificial Sequence: Synthetic oligonucleotide
aagucaacccagagacgaa

SEQ ID NO: 1245333 - RNA, 19 nt, Artificial Sequence
  Description of Artificial Sequence: Synthetic oligonucleotide
gucaacccagagacgaauc

SEQ ID NO: 1245334 - RNA, 19 nt, Artificial Sequence
  Description of Artificial Sequence: Synthetic oligonucleotide
agacgaaucugcacagcau

SEQ ID NO: 1245335 - RNA, 19 nt, Artificial Sequence
  Description of Artificial Sequence: Synthetic oligonucleotide
uaacuggcauuaggugugu

SEQ ID NO: 1245336 - RNA, 19 nt, Artificial Sequence
  Description of Artificial Sequence: Synthetic oligonucleotide
ggacuggaggucauucuug

SEQ ID NO: 1245337 - RNA, 19 nt, Artificial Sequence
  Description of Artificial Sequence: Synthetic oligonucleotide
caauggacggcuccauuua

SEQ ID NO: 1245338 - RNA, 19 nt, Artificial Sequence
  Description of Artificial Sequence: Synthetic oligonucleotide
cuccauuuacccugugucu

SEQ ID NO: 1245339 - RNA, 19 nt, Artificial Sequence
  Description of Artificial Sequence: Synthetic oligonucleotide
caccuuguguaccacaaau

SEQ ID NO: 1245340 - RNA, 19 nt, Artificial Sequence
  Description of Artificial Sequence: Synthetic oligonucleotide
gucuaugcugggacccaag

SEQ ID NO: 1245341 - RNA, 19 nt, Artificial Sequence
  Description of Artificial Sequence: Synthetic oligonucleotide
gccagugugugugugugug

SEQ ID NO: 1245342 - RNA, 19 nt, Artificial Sequence
  Description of Artificial Sequence: Synthetic oligonucleotide
aucgagcaguggcccacug

SEQ ID NO: 1245343 - RNA, 19 nt, Artificial Sequence
  Description of Artificial Sequence: Synthetic oligonucleotide
acacacacacacacacgca

SEQ ID NO: 1245344 - RNA, 19 nt, Artificial Sequence
  Description of Artificial Sequence: Synthetic oligonucleotide
uggggauggccgcuccguc

SEQ ID NO: 1245345 - RNA, 19 nt, Artificial Sequence
  Description of Artificial Sequence: Synthetic oligonucleotide
aggggauuuuguggggacu

SEQ ID NO: 1245346 - RNA, 19 nt, Artificial Sequence
  Description of Artificial Sequence: Synthetic oligonucleotide
cuacaccguugugacggcc

SEQ ID NO: 1245347 - RNA, 19 nt, Artificial Sequence
  Description of Artificial Sequence: Synthetic oligonucleotide
caauccguccccggcugag

SEQ ID NO: 1245348 - RNA, 19 nt, Artificial Sequence
  Description of Artificial Sequence: Synthetic oligonucleotide
gaggaguuggggacucguc

SEQ ID NO: 1245349 - RNA, 19 nt, Artificial Sequence
  Description of Artificial Sequence: Synthetic oligonucleotide
cacacacacacacacgcau

SEQ ID NO: 1245350 - RNA, 19 nt, Artificial Sequence
  Description of Artificial Sequence: Synthetic oligonucleotide
cgaugaccagguaccaggg

SEQ ID NO: 1245351 - RNA, 19 nt, Artificial Sequence
  Description of Artificial Sequence: Synthetic oligonucleotide
acacacacacacgcaucca

SEQ ID NO: 1245352 - RNA, 19 nt, Artificial Sequence
  Description of Artificial Sequence: Synthetic oligonucleotide
ccuguacaacuauguacug

SEQ ID NO: 1245353 - RNA, 19 nt, Artificial Sequence
  Description of Artificial Sequence: Synthetic oligonucleotide
gcuucccuaaagugugaac

SEQ ID NO: 1245354 - RNA, 19 nt, Artificial Sequence
  Description of Artificial Sequence: Synthetic oligonucleotide
cuggccacucaacgaugac

SEQ ID NO: 1245355 - RNA, 19 nt, Artificial Sequence
  Description of Artificial Sequence: Synthetic oligonucleotide
cgugcgcuucccuaaagug

SEQ ID NO: 1245356 - RNA, 19 nt, Artificial Sequence
  Description of Artificial Sequence: Synthetic oligonucleotide
cuccccaccuuguguacca

SEQ ID NO: 1245357 - RNA, 19 nt, Artificial Sequence
  Description of Artificial Sequence: Synthetic oligonucleotide
acgaagggagccccaugua

SEQ ID NO: 1245358 - RNA, 19 nt, Artificial Sequence
  Description of Artificial Sequence: Synthetic oligonucleotide
gcucucaauccguccccgg

SEQ ID NO: 1245359 - RNA, 19 nt, Artificial Sequence
  Description of Artificial Sequence: Synthetic oligonucleotide
ucuuaucuccugggugcau

SEQ ID NO: 1245360 - RNA, 19 nt, Artificial Sequence
  Description of Artificial Sequence: Synthetic oligonucleotide
ggcauuaggugugucaggu

SEQ ID NO: 1245361 - RNA, 19 nt, Artificial Sequence
  Description of Artificial Sequence: Synthetic oligonucleotide
uuccgccagugugugugug

SEQ ID NO: 1245362 - RNA, 19 nt, Artificial Sequence
  Description of Artificial Sequence: Synthetic oligonucleotide
ccagccaguagccaaugga

SEQ ID NO: 1245363 - RNA, 19 nt, Artificial Sequence
  Description of Artificial Sequence: Synthetic oligonucleotide
gaaugaggccuucgcucua

SEQ ID NO: 1245364 - RNA, 19 nt, Artificial Sequence
  Description of Artificial Sequence: Synthetic oligonucleotide
aggagacaucuuaucuccu

SEQ ID NO: 1245365 - RNA, 19 nt, Artificial Sequence
  Description of Artificial Sequence: Synthetic oligonucleotide
ccguagucgcacucggccc

SEQ ID NO: 1245366 - RNA, 19 nt, Artificial Sequence
  Description of Artificial Sequence: Synthetic oligonucleotide
ggcucucaauccguccccg

SEQ ID NO: 1245367 - RNA, 19 nt, Artificial Sequence
  Description of Artificial Sequence: Synthetic oligonucleotide
gggcucucaauccgucccc

SEQ ID NO: 1245368 - RNA, 19 nt, Artificial Sequence
  Description of Artificial Sequence: Synthetic oligonucleotide
augaguccaucuacaccgu

SEQ ID NO: 1245369 - RNA, 19 nt, Artificial Sequence
  Description of Artificial Sequence: Synthetic oligonucleotide
cucaagagaaugaggccuu

SEQ ID NO: 1245370 - RNA, 19 nt, Artificial Sequence
  Description of Artificial Sequence: Synthetic oligonucleotide
gguacaggagggccaagcu

SEQ ID NO: 1245371 - RNA, 19 nt, Artificial Sequence
  Description of Artificial Sequence: Synthetic oligonucleotide
gggauuuuguggggacugc

SEQ ID NO: 1245372 - RNA, 19 nt, Artificial Sequence
  Description of Artificial Sequence: Synthetic oligonucleotide
gucagguaauagauuugua

SEQ ID NO: 1245373 - RNA, 19 nt, Artificial Sequence
  Description of Artificial Sequence: Synthetic oligonucleotide
cugggagguaaauggacuu

SEQ ID NO: 1245374 - RNA, 19 nt, Artificial Sequence
  Description of Artificial Sequence: Synthetic oligonucleotide
cuucggcgccuggggaugg

SEQ ID NO: 1245375 - RNA, 19 nt, Artificial Sequence
  Description of Artificial Sequence: Synthetic oligonucleotide
ggugggcugugugugucgc

SEQ ID NO: 1245376 - RNA, 19 nt, Artificial Sequence
  Description of Artificial Sequence: Synthetic oligonucleotide
caacgaugaccagguacca

SEQ ID NO: 1245377 - RNA, 19 nt, Artificial Sequence
  Description of Artificial Sequence: Synthetic oligonucleotide
gugucuaugcugggaccca

SEQ ID NO: 1245378 - RNA, 19 nt, Artificial Sequence
  Description of Artificial Sequence: Synthetic oligonucleotide
ucgcucuaguguggagcca

SEQ ID NO: 1245379 - RNA, 19 nt, Artificial Sequence
  Description of Artificial Sequence: Synthetic oligonucleotide
ggacucgucugccaucugu

SEQ ID NO: 1245380 - RNA, 19 nt, Artificial Sequence
  Description of Artificial Sequence: Synthetic oligonucleotide
aggcacggugguacaggag

SEQ ID NO: 1245381 - RNA, 19 nt, Artificial Sequence
  Description of Artificial Sequence: Synthetic oligonucleotide
ggcgccuggggauggccgc

SEQ ID NO: 1245382 - RNA, 19 nt, Artificial Sequence
  Description of Artificial Sequence: Synthetic oligonucleotide
agccguaaucagagaugug

SEQ ID NO: 1245383 - RNA, 19 nt, Artificial Sequence
  Description of Artificial Sequence: Synthetic oligonucleotide
ggaggaggaggaggaggag

SEQ ID NO: 1245384 - RNA, 19 nt, Artificial Sequence
  Description of Artificial Sequence: Synthetic oligonucleotide
caguauucaggcagccaau

SEQ ID NO: 1245385 - RNA, 19 nt, Artificial Sequence
  Description of Artificial Sequence: Synthetic oligonucleotide
guccuccugcauccaugac

SEQ ID NO: 1245386 - RNA, 19 nt, Artificial Sequence
  Description of Artificial Sequence: Synthetic oligonucleotide
cagccacuugccggauggg

SEQ ID NO: 1245387 - RNA, 19 nt, Artificial Sequence
  Description of Artificial Sequence: Synthetic oligonucleotide
agccaauggacggcuccau

SEQ ID NO: 1245388 - RNA, 19 nt, Artificial Sequence
  Description of Artificial Sequence: Synthetic oligonucleotide
augcaggggaccagaugaa

SEQ ID NO: 1245389 - RNA, 19 nt, Artificial Sequence
  Description of Artificial Sequence: Synthetic oligonucleotide
gcacuggccacucaacgau

SEQ ID NO: 1245390 - RNA, 19 nt, Artificial Sequence
  Description of Artificial Sequence: Synthetic oligonucleotide
ccaucugugcgugcgcuuc

SEQ ID NO: 1245391 - RNA, 19 nt, Artificial Sequence
  Description of Artificial Sequence: Synthetic oligonucleotide
ggcuccauuuacccugugu

SEQ ID NO: 1245392 - RNA, 19 nt, Artificial Sequence
  Description of Artificial Sequence: Synthetic oligonucleotide
acggcuccauuuacccugu

SEQ ID NO: 1245393 - RNA, 19 nt, Artificial Sequence
  Description of Artificial Sequence: Synthetic oligonucleotide
ccguaaucagagaugugcu

SEQ ID NO: 1245394 - RNA, 19 nt, Artificial Sequence
  Description of Artificial Sequence: Synthetic oligonucleotide
ggccuucgcucuagugugg

SEQ ID NO: 1245395 - RNA, 19 nt, Artificial Sequence
  Description of Artificial Sequence: Synthetic oligonucleotide
ggucacgagauguccuccu

SEQ ID NO: 1245396 - RNA, 19 nt, Artificial Sequence
  Description of Artificial Sequence: Synthetic oligonucleotide
ggauuuuguggggacugcu

SEQ ID NO: 1245397 - RNA, 19 nt, Artificial Sequence
  Description of Artificial Sequence: Synthetic oligonucleotide
uucggcgccuggggauggc

SEQ ID NO: 1245398 - RNA, 19 nt, Artificial Sequence
  Description of Artificial Sequence: Synthetic oligonucleotide
gucagaccguagucgcacu

SEQ ID NO: 1245399 - RNA, 19 nt, Artificial Sequence
  Description of Artificial Sequence: Synthetic oligonucleotide
gugaacucaucagccacuu

SEQ ID NO: 1245400 - RNA, 19 nt, Artificial Sequence
  Description of Artificial Sequence: Synthetic oligonucleotide
uccccggcugaggggauuu

SEQ ID NO: 1245401 - RNA, 19 nt, Artificial Sequence
  Description of Artificial Sequence: Synthetic oligonucleotide
ggauagcccugggauacaa

SEQ ID NO: 1245402 - RNA, 19 nt, Artificial Sequence
  Description of Artificial Sequence: Synthetic oligonucleotide
gcuucggcgccuggggaug

SEQ ID NO: 1245403 - RNA, 19 nt, Artificial Sequence
  Description of Artificial Sequence: Synthetic oligonucleotide
cgcacucggcccauccacc

SEQ ID NO: 1245404 - RNA, 19 nt, Artificial Sequence
  Description of Artificial Sequence: Synthetic oligonucleotide
gggacugaguuggggccug

SEQ ID NO: 1245405 - RNA, 19 nt, Artificial Sequence
  Description of Artificial Sequence: Synthetic oligonucleotide
gugcgugcgcuucccuaaa

SEQ ID NO: 1245406 - RNA, 19 nt, Artificial Sequence
  Description of Artificial Sequence: Synthetic oligonucleotide
gcaggggaccagaugaagu

SEQ ID NO: 1245407 - RNA, 19 nt, Artificial Sequence
  Description of Artificial Sequence: Synthetic oligonucleotide
gggauacaaaggagacauc

SEQ ID NO: 1245408 - RNA, 19 nt, Artificial Sequence
  Description of Artificial Sequence: Synthetic oligonucleotide
caguagccaauggacggcu

SEQ ID NO: 1245409 - RNA, 19 nt, Artificial Sequence
  Description of Artificial Sequence: Synthetic oligonucleotide
ggacugaguuggggccugg

SEQ ID NO: 1245410 - RNA, 19 nt, Artificial Sequence
  Description of Artificial Sequence: Synthetic oligonucleotide
ccgccagugugugugugug

SEQ ID NO: 1245411 - RNA, 19 nt, Artificial Sequence
  Description of Artificial Sequence: Synthetic oligonucleotide
ccauuuacccugugucucu

SEQ ID NO: 1245412 - RNA, 19 nt, Artificial Sequence
  Description of Artificial Sequence: Synthetic oligonucleotide
ggcagaucucugaacugcu

SEQ ID NO: 1245413 - RNA, 19 nt, Artificial Sequence
  Description of Artificial Sequence: Synthetic oligonucleotide
cguagucgcacucggccca

SEQ ID NO: 1245414 - RNA, 19 nt, Artificial Sequence
  Description of Artificial Sequence: Synthetic oligonucleotide
ggggacucgucugccaucu

SEQ ID NO: 1245415 - RNA, 19 nt, Artificial Sequence
  Description of Artificial Sequence: Synthetic oligonucleotide
ggcugucggagaaggcauc

SEQ ID NO: 1245416 - RNA, 19 nt, Artificial Sequence
  Description of Artificial Sequence: Synthetic oligonucleotide
cugcaucgaagcucagguu

SEQ ID NO: 1245417 - RNA, 19 nt, Artificial Sequence
  Description of Artificial Sequence: Synthetic oligonucleotide
cuuccgccagugugugugu

SEQ ID NO: 1245418 - RNA, 19 nt, Artificial Sequence
  Description of Artificial Sequence: Synthetic oligonucleotide
gggacucgucugccaucug

SEQ ID NO: 1245419 - RNA, 19 nt, Artificial Sequence
  Description of Artificial Sequence: Synthetic oligonucleotide
gccagcgcucccgaauguc

SEQ ID NO: 1245420 - RNA, 19 nt, Artificial Sequence
  Description of Artificial Sequence: Synthetic oligonucleotide
gcucccgaaugucgccauc

SEQ ID NO: 1245421 - RNA, 19 nt, Artificial Sequence
  Description of Artificial Sequence: Synthetic oligonucleotide
cggcgccuggggauggccg

SEQ ID NO: 1245422 - RNA, 19 nt, Artificial Sequence
  Description of Artificial Sequence: Synthetic oligonucleotide
cguugugacggcccuccca

SEQ ID NO: 1245423 - RNA, 19 nt, Artificial Sequence
  Description of Artificial Sequence: Synthetic oligonucleotide
cacgggguggugugucuau

SEQ ID NO: 1245424 - RNA, 19 nt, Artificial Sequence
  Description of Artificial Sequence: Synthetic oligonucleotide
gcucuaguguggagccauc

SEQ ID NO: 1245425 - RNA, 19 nt, Artificial Sequence
  Description of Artificial Sequence: Synthetic oligonucleotide
gggauagcccugggauaca

SEQ ID NO: 1245426 - RNA, 19 nt, Artificial Sequence
  Description of Artificial Sequence: Synthetic oligonucleotide
ccgucagaccguagucgca

SEQ ID NO: 1245427 - RNA, 19 nt, Artificial Sequence
  Description of Artificial Sequence: Synthetic oligonucleotide
ccccaccuuguguaccaca

SEQ ID NO: 1245428 - RNA, 19 nt, Artificial Sequence
  Description of Artificial Sequence: Synthetic oligonucleotide
cugucggagaaggcaucgu

SEQ ID NO: 1245429 - RNA, 19 nt, Artificial Sequence
  Description of Artificial Sequence: Synthetic oligonucleotide
ccguugugacggcccuccc

SEQ ID NO: 1245430 - RNA, 19 nt, Artificial Sequence
  Description of Artificial Sequence: Synthetic oligonucleotide
ccaccuuguguaccacaaa

SEQ ID NO: 1245431 - RNA, 19 nt, Artificial Sequence
  Description of Artificial Sequence: Synthetic oligonucleotide
ccauguccuguacaacuau

SEQ ID NO: 1245432 - RNA, 19 nt, Artificial Sequence
  Description of Artificial Sequence: Synthetic oligonucleotide
gcgcucccgaaugucgcca

SEQ ID NO: 1245433 - RNA, 19 nt, Artificial Sequence
  Description of Artificial Sequence: Synthetic oligonucleotide
ggauggccgcuccgucaga

SEQ ID NO: 1245434 - RNA, 19 nt, Artificial Sequence
  Description of Artificial Sequence: Synthetic oligonucleotide
ggcucugcucuugggacau

SEQ ID NO: 1245435 - RNA, 19 nt, Artificial Sequence
  Description of Artificial Sequence: Synthetic oligonucleotide
caucgagcaguggcccacu

SEQ ID NO: 1245436 - RNA, 19 nt, Artificial Sequence
  Description of Artificial Sequence: Synthetic oligonucleotide
cgaaugucgccauccuccu

SEQ ID NO: 1245437 - RNA, 19 nt, Artificial Sequence
  Description of Artificial Sequence: Synthetic oligonucleotide
guagucgcacucggcccau

SEQ ID NO: 1245438 - RNA, 19 nt, Artificial Sequence
  Description of Artificial Sequence: Synthetic oligonucleotide
ccagugugugugugugugu

SEQ ID NO: 1245439 - RNA, 19 nt, Artificial Sequence
  Description of Artificial Sequence: Synthetic oligonucleotide
ggaggaggaggaggagagu

SEQ ID NO: 1245440 - RNA, 19 nt, Artificial Sequence
  Description of Artificial Sequence: Synthetic oligonucleotide
gccaauggacggcuccauu

SEQ ID NO: 1245441 - RNA, 19 nt, Artificial Sequence
  Description of Artificial Sequence: Synthetic oligonucleotide
gcgcuucccuaaaguguga

SEQ ID NO: 1245442 - RNA, 19 nt, Artificial Sequence
  Description of Artificial Sequence: Synthetic oligonucleotide
cgcuccgucagaccguagu

SEQ ID NO: 1245443 - RNA, 19 nt, Artificial Sequence
  Description of Artificial Sequence: Synthetic oligonucleotide
gcacgggguggugugucua

SEQ ID NO: 1245444 - RNA, 19 nt, Artificial Sequence
  Description of Artificial Sequence: Synthetic oligonucleotide
gcuuaagagggaggccauu

SEQ ID NO: 1245445 - RNA, 19 nt, Artificial Sequence
  Description of Artificial Sequence: Synthetic oligonucleotide
ccgcuucggcgccugggga

SEQ ID NO: 1245446 - RNA, 19 nt, Artificial Sequence
  Description of Artificial Sequence: Synthetic oligonucleotide
gccgcuccgucagaccgua

SEQ ID NO: 1245447 - RNA, 19 nt, Artificial Sequence
  Description of Artificial Sequence: Synthetic oligonucleotide
ccaacgaagggagccccau

SEQ ID NO: 1245448 - RNA, 19 nt, Artificial Sequence
  Description of Artificial Sequence: Synthetic oligonucleotide
ccgcuccgucagaccguag

SEQ ID NO: 1245449 - RNA, 19 nt, Artificial Sequence
  Description of Artificial Sequence: Synthetic oligonucleotide
cgcucuaguguggagccau

SEQ ID NO: 1245450 - RNA, 19 nt, Artificial Sequence
  Description of Artificial Sequence: Synthetic oligonucleotide
ggccgcuccgucagaccgu

SEQ ID NO: 1245451 - RNA, 19 nt, Artificial Sequence
  Description of Artificial Sequence: Synthetic oligonucleotide
guccccggcugaggggauu

SEQ ID NO: 1245452 - RNA, 19 nt, Artificial Sequence
  Description of Artificial Sequence: Synthetic oligonucleotide
gcgccuggggauggccgcu

SEQ ID NO: 1245453 - RNA, 19 nt, Artificial Sequence
  Description of Artificial Sequence: Synthetic oligonucleotide
cgccagugugugugugugu

SEQ ID NO: 1245454 - RNA, 19 nt, Artificial Sequence
  Description of Artificial Sequence: Synthetic oligonucleotide
aaauagcucaaguuuaacg

SEQ ID NO: 1245455 - RNA, 19 nt, Artificial Sequence
  Description of Artificial Sequence: Synthetic oligonucleotide
acuacaucgagauccaucc

SEQ ID NO: 1245456 - RNA, 19 nt, Artificial Sequence
  Description of Artificial Sequence: Synthetic oligonucleotide
aauagcucaaguuuaacgu

SEQ ID NO: 1245457 - RNA, 19 nt, Artificial Sequence
  Description of Artificial Sequence: Synthetic oligonucleotide
aauagauccuuaucagugc

SEQ ID NO: 1245458 - RNA, 19 nt, Artificial Sequence
  Description of Artificial Sequence: Synthetic oligonucleotide
uaauagauccuuaucagug

SEQ ID NO: 1245459 - RNA, 19 nt, Artificial Sequence
  Description of Artificial Sequence: Synthetic oligonucleotide
guuaacuacaucgagaucc

SEQ ID NO: 1245460 - RNA, 19 nt, Artificial Sequence
  Description of Artificial Sequence: Synthetic oligonucleotide
gaauuaagaaucuaaauaa

SEQ ID NO: 1245461 - RNA, 19 nt, Artificial Sequence
  Description of Artificial Sequence: Synthetic oligonucleotide
uuagcaauagacuuggcca

SEQ ID NO: 1245462 - RNA, 19 nt, Artificial Sequence
  Description of Artificial Sequence: Synthetic oligonucleotide
uuaagaaucuaaauaagaa

SEQ ID NO: 1245463 - RNA, 19 nt, Artificial Sequence
  Description of Artificial Sequence: Synthetic oligonucleotide
ucuaguugcauuuagguuc

SEQ ID NO: 1245464 - RNA, 19 nt, Artificial Sequence
  Description of Artificial Sequence: Synthetic oligonucleotide
aguaacagaacugauaguc

SEQ ID NO: 1245465 - RNA, 19 nt, Artificial Sequence
  Description of Artificial Sequence: Synthetic oligonucleotide
aucaacgaggccuugaagg

SEQ ID NO: 1245466 - RNA, 19 nt, Artificial Sequence
  Description of Artificial Sequence: Synthetic oligonucleotide
gaaaccauggagcaugagg

SEQ ID NO: 1245467 - RNA, 19 nt, Artificial Sequence
  Description of Artificial Sequence: Synthetic oligonucleotide
guagaaacuguuaugaggg

SEQ ID NO: 1245468 - RNA, 19 nt, Artificial Sequence
  Description of Artificial Sequence: Synthetic oligonucleotide
uuuugucucagucaguagc

SEQ ID NO: 1245469 - RNA, 19 nt, Artificial Sequence
  Description of Artificial Sequence: Synthetic oligonucleotide
aagaauacuaguauaggag

SEQ ID NO: 1245470 - RNA, 19 nt, Artificial Sequence
  Description of Artificial Sequence: Synthetic oligonucleotide
ucgacaaugagcuuggcug

SEQ ID NO: 1245471 - RNA, 19 nt, Artificial Sequence
  Description of Artificial Sequence: Synthetic oligonucleotide
gaugcgaacaucaacgagg

SEQ ID NO: 1245472 - RNA, 19 nt, Artificial Sequence
  Description of Artificial Sequence: Synthetic oligonucleotide
uucaugaccaggcaugucc

SEQ ID NO: 1245473 - RNA, 19 nt, Artificial Sequence
  Description of Artificial Sequence: Synthetic oligonucleotide
gaacugauaguccucgugg

SEQ ID NO: 1245474 - RNA, 19 nt, Artificial Sequence
  Description of Artificial Sequence: Synthetic oligonucleotide
aaugccaggauuggaaugg

SEQ ID NO: 1245475 - RNA, 19 nt, Artificial Sequence
  Description of Artificial Sequence: Synthetic oligonucleotide
guauacuccagccacgugg

SEQ ID NO: 1245476 - RNA, 19 nt, Artificial Sequence
  Description of Artificial Sequence: Synthetic oligonucleotide
uugaaucggacauaggagc

SEQ ID NO: 1245477 - RNA, 19 nt, Artificial Sequence
  Description of Artificial Sequence: Synthetic oligonucleotide
uuagcauuggcuuaucagu

SEQ ID NO: 1245478 - RNA, 19 nt, Artificial Sequence
  Description of Artificial Sequence: Synthetic oligonucleotide
aacaaaugacuaaagcuuc

SEQ ID NO: 1245479 - RNA, 19 nt, Artificial Sequence
  Description of Artificial Sequence: Synthetic oligonucleotide
uuaucagugacaugaaccu

SEQ ID NO: 1245480 - RNA, 19 nt, Artificial Sequence
  Description of Artificial Sequence: Synthetic oligonucleotide
aaacuguuaugagggaugc

SEQ ID NO: 1245481 - RNA, 19 nt, Artificial Sequence
  Description of Artificial Sequence: Synthetic oligonucleotide
auagcggacuugcauaccc

SEQ ID NO: 1245482 - RNA, 19 nt, Artificial Sequence
  Description of Artificial Sequence: Synthetic oligonucleotide
ugugaggaaugucuuaaag

SEQ ID NO: 1245483 - RNA, 19 nt, Artificial Sequence
  Description of Artificial Sequence: Synthetic oligonucleotide
caauaauagauccuuauca

SEQ ID NO: 1245484 - RNA, 19 nt, Artificial Sequence
  Description of Artificial Sequence: Synthetic oligonucleotide
agaauacuaguauaggaga

SEQ ID NO: 1245485 - RNA, 19 nt, Artificial Sequence
  Description of Artificial Sequence: Synthetic oligonucleotide
uguguuaugcacagaagcu

SEQ ID NO: 1245486 - RNA, 19 nt, Artificial Sequence
  Description of Artificial Sequence: Synthetic oligonucleotide
gguagaaacuguuaugagg

SEQ ID NO: 1245487 - RNA, 19 nt, Artificial Sequence
  Description of Artificial Sequence: Synthetic oligonucleotide
uacagaagaagccauugac

SEQ ID NO: 1245488 - RNA, 19 nt, Artificial Sequence
  Description of Artificial Sequence: Synthetic oligonucleotide
ucuaguaggcuucauggcu

SEQ ID NO: 1245489 - RNA, 19 nt, Artificial Sequence
  Description of Artificial Sequence: Synthetic oligonucleotide
ugucaguugaauacugcag

SEQ ID NO: 1245490 - RNA, 19 nt, Artificial Sequence
  Description of Artificial Sequence: Synthetic oligonucleotide
uuaucagugcugaaggcca

SEQ ID NO: 1245491 - RNA, 19 nt, Artificial Sequence
  Description of Artificial Sequence: Synthetic oligonucleotide
ugaucacgguccaaggugg

SEQ ID NO: 1245492 - RNA, 19 nt, Artificial Sequence
  Description of Artificial Sequence: Synthetic oligonucleotide
uaacgugugaggaaugucu

SEQ ID NO: 1245493 - RNA, 19 nt, Artificial Sequence
  Description of Artificial Sequence: Synthetic oligonucleotide
cuggcaguuagcaauagac

SEQ ID NO: 1245494 - RNA, 19 nt, Artificial Sequence
  Description of Artificial Sequence: Synthetic oligonucleotide
uacaucgagauccauccug

SEQ ID NO: 1245495 - RNA, 19 nt, Artificial Sequence
  Description of Artificial Sequence: Synthetic oligonucleotide
ucuacaaacugguguaccc

SEQ ID NO: 1245496 - RNA, 19 nt, Artificial Sequence
  Description of Artificial Sequence: Synthetic oligonucleotide
uauguaaaacuuagaauua

SEQ ID NO: 1245497 - RNA, 19 nt, Artificial Sequence
  Description of Artificial Sequence: Synthetic oligonucleotide
uacuccaauggcauuuagg

SEQ ID NO: 1245498 - RNA, 19 nt, Artificial Sequence
  Description of Artificial Sequence: Synthetic oligonucleotide
aguauaggagacuggcuuc

SEQ ID NO: 1245499 - RNA, 19 nt, Artificial Sequence
  Description of Artificial Sequence: Synthetic oligonucleotide
auguuaacuacaucgagau

SEQ ID NO: 1245500 - RNA, 19 nt, Artificial Sequence
  Description of Artificial Sequence: Synthetic oligonucleotide
agggaugcgaacaucaacg

SEQ ID NO: 1245501 - RNA, 19 nt, Artificial Sequence
  Description of Artificial Sequence: Synthetic oligonucleotide
aauacuaguauaggagacu

SEQ ID NO: 1245502 - RNA, 19 nt, Artificial Sequence
  Description of Artificial Sequence: Synthetic oligonucleotide
uguuaugcacagaagcuaa

SEQ ID NO: 1245503 - RNA, 19 nt, Artificial Sequence
  Description of Artificial Sequence: Synthetic oligonucleotide
uaguauaggagacuggcuu

SEQ ID NO: 1245504 - RNA, 19 nt, Artificial Sequence
  Description of Artificial Sequence: Synthetic oligonucleotide
auacccagcguccuccgcc

SEQ ID NO: 1245505 - RNA, 19 nt, Artificial Sequence
  Description of Artificial Sequence: Synthetic oligonucleotide
uugaugaucacgguccaag

SEQ ID NO: 1245506 - RNA, 19 nt, Artificial Sequence
  Description of Artificial Sequence: Synthetic oligonucleotide
ucuaaauaagaaguucaac

SEQ ID NO: 1245507 - RNA, 19 nt, Artificial Sequence
  Description of Artificial Sequence: Synthetic oligonucleotide
uguagcaagggccucaguu

SEQ ID NO: 1245508 - RNA, 19 nt, Artificial Sequence
  Description of Artificial Sequence: Synthetic oligonucleotide
cuuaucagugcugaaggcc

SEQ ID NO: 1245509 - RNA, 19 nt, Artificial Sequence
  Description of Artificial Sequence: Synthetic oligonucleotide
uagcauuggcuuaucagug

SEQ ID NO: 1245510 - RNA, 19 nt, Artificial Sequence
  Description of Artificial Sequence: Synthetic oligonucleotide
uuaacuacaucgagaucca

SEQ ID NO: 1245511 - RNA, 19 nt, Artificial Sequence
  Description of Artificial Sequence: Synthetic oligonucleotide
gaaacuguuaugagggaug

SEQ ID NO: 1245512 - RNA, 19 nt, Artificial Sequence
  Description of Artificial Sequence: Synthetic oligonucleotide
uuuagggcaggauuccuga

SEQ ID NO: 1245513 - RNA, 19 nt, Artificial Sequence
  Description of Artificial Sequence: Synthetic oligonucleotide
cuaguugcauuuagguucc

SEQ ID NO: 1245514 - RNA, 19 nt, Artificial Sequence
  Description of Artificial Sequence: Synthetic oligonucleotide
gccacaauuuuccagaagc

SEQ ID NO: 1245515 - RNA, 19 nt, Artificial Sequence
  Description of Artificial Sequence: Synthetic oligonucleotide
agcucuaccuggcaguuag

SEQ ID NO: 1245516 - RNA, 19 nt, Artificial Sequence
  Description of Artificial Sequence: Synthetic oligonucleotide
ugugcugagaaaccaugga

SEQ ID NO: 1245517 - RNA, 19 nt, Artificial Sequence
  Description of Artificial Sequence: Synthetic oligonucleotide
aacauguuaacuacaucga

SEQ ID NO: 1245518 - RNA, 19 nt, Artificial Sequence
  Description of Artificial Sequence: Synthetic oligonucleotide
ugacuaaagcuucuacaga

SEQ ID NO: 1245519 - RNA, 19 nt, Artificial Sequence
  Description of Artificial Sequence: Synthetic oligonucleotide
uaguaagcggcguauacuc

SEQ ID NO: 1245520 - RNA, 19 nt, Artificial Sequence
  Description of Artificial Sequence: Synthetic oligonucleotide
aguaucuggauuucucacu

SEQ ID NO: 1245521 - RNA, 19 nt, Artificial Sequence
  Description of Artificial Sequence: Synthetic oligonucleotide
acuguuaugagggaugcga

SEQ ID NO: 1245522 - RNA, 19 nt, Artificial Sequence
  Description of Artificial Sequence: Synthetic oligonucleotide
uguaccucaggcaagccuu

SEQ ID NO: 1245523 - RNA, 19 nt, Artificial Sequence
  Description of Artificial Sequence: Synthetic oligonucleotide
cuauggacaggucauccag

SEQ ID NO: 1245524 - RNA, 19 nt, Artificial Sequence
  Description of Artificial Sequence: Synthetic oligonucleotide
gaauacuaguauaggagac

SEQ ID NO: 1245525 - RNA, 19 nt, Artificial Sequence
  Description of Artificial Sequence: Synthetic oligonucleotide
aacugauaguccucguggu

SEQ ID NO: 1245526 - RNA, 19 nt, Artificial Sequence
  Description of Artificial Sequence: Synthetic oligonucleotide
auuucuaguugcauuuagg

SEQ ID NO: 1245527 - RNA, 19 nt, Artificial Sequence
  Description of Artificial Sequence: Synthetic oligonucleotide
ucuuaacuugcccaucuau

SEQ ID NO: 1245528 - RNA, 19 nt, Artificial Sequence
  Description of Artificial Sequence: Synthetic oligonucleotide
cauguuaacuacaucgaga

SEQ ID NO: 1245529 - RNA, 19 nt, Artificial Sequence
  Description of Artificial Sequence: Synthetic oligonucleotide
gaagcaacgaaugccagga

SEQ ID NO: 1245530 - RNA, 19 nt, Artificial Sequence
  Description of Artificial Sequence: Synthetic oligonucleotide
auacuaguauaggagacug

SEQ ID NO: 1245531 - RNA, 19 nt, Artificial Sequence
  Description of Artificial Sequence: Synthetic oligonucleotide
uuugucaaguuuuggggau

SEQ ID NO: 1245532 - RNA, 19 nt, Artificial Sequence
  Description of Artificial Sequence: Synthetic oligonucleotide
aaguuuaacgugugaggaa

SEQ ID NO: 1245533 - RNA, 19 nt, Artificial Sequence
  Description of Artificial Sequence: Synthetic oligonucleotide
uguucugauggagagagua

SEQ ID NO: 1245534 - RNA, 19 nt, Artificial Sequence
  Description of Artificial Sequence: Synthetic oligonucleotide
caguuagcaauagacuugg

SEQ ID NO: 1245535 - RNA, 19 nt, Artificial Sequence
  Description of Artificial Sequence: Synthetic oligonucleotide
acaucgagauccauccugc

SEQ ID NO: 1245536 - RNA, 19 nt, Artificial Sequence
  Description of Artificial Sequence: Synthetic oligonucleotide
uagacuuggccaaaauauc

SEQ ID NO: 1245537 - RNA, 19 nt, Artificial Sequence
  Description of Artificial Sequence: Synthetic oligonucleotide
gugcugagaaaccauggag

SEQ ID NO: 1245538 - RNA, 19 nt, Artificial Sequence
  Description of Artificial Sequence: Synthetic oligonucleotide
aucgagauccauccugcuc

SEQ ID NO: 1245539 - RNA, 19 nt, Artificial Sequence
  Description of Artificial Sequence: Synthetic oligonucleotide
aguagugacuuugucaagu

SEQ ID NO: 1245540 - RNA, 19 nt, Artificial Sequence
  Description of Artificial Sequence: Synthetic oligonucleotide
gaaugccaggauuggaaug

SEQ ID NO: 1245541 - RNA, 19 nt, Artificial Sequence
  Description of Artificial Sequence: Synthetic oligonucleotide
uggcaguuagcaauagacu

SEQ ID NO: 1245542 - RNA, 19 nt, Artificial Sequence
  Description of Artificial Sequence: Synthetic oligonucleotide
acuugcauacccagcgucc

SEQ ID NO: 1245543 - RNA, 19 nt, Artificial Sequence
  Description of Artificial Sequence: Synthetic oligonucleotide
uacccucuuaacuugccca

SEQ ID NO: 1245544 - RNA, 19 nt, Artificial Sequence
  Description of Artificial Sequence: Synthetic oligonucleotide
uguuaugagggaugcgaac

SEQ ID NO: 1245545 - RNA, 19 nt, Artificial Sequence
  Description of Artificial Sequence: Synthetic oligonucleotide
guccacgcagaccaaaugc

SEQ ID NO: 1245546 - RNA, 19 nt, Artificial Sequence
  Description of Artificial Sequence: Synthetic oligonucleotide
uuugagccguugcacaaac

SEQ ID NO: 1245547 - RNA, 19 nt, Artificial Sequence
  Description of Artificial Sequence: Synthetic oligonucleotide
aacugguguacccucuuaa

SEQ ID NO: 1245548 - RNA, 19 nt, Artificial Sequence
  Description of Artificial Sequence: Synthetic oligonucleotide
uuuaacgugugaggaaugu

SEQ ID NO: 1245549 - RNA, 19 nt, Artificial Sequence
  Description of Artificial Sequence: Synthetic oligonucleotide
ugcauucacaccugggccu

SEQ ID NO: 1245550 - RNA, 19 nt, Artificial Sequence
  Description of Artificial Sequence: Synthetic oligonucleotide
uggcuguuuagcauuggcu

SEQ ID NO: 1245551 - RNA, 19 nt, Artificial Sequence
  Description of Artificial Sequence: Synthetic oligonucleotide
cacgcagaccaaaugcagg

SEQ ID NO: 1245552 - RNA, 19 nt, Artificial Sequence
  Description of Artificial Sequence: Synthetic oligonucleotide
agcggaauccugcagcucu

SEQ ID NO: 1245553 - RNA, 19 nt, Artificial Sequence
  Description of Artificial Sequence: Synthetic oligonucleotide
ugauugucaguugaauacu

SEQ ID NO: 1245554 - RNA, 19 nt, Artificial Sequence
  Description of Artificial Sequence: Synthetic oligonucleotide
caaggggauuuucugaaug

SEQ ID NO: 1245555 - RNA, 19 nt, Artificial Sequence
  Description of Artificial Sequence: Synthetic oligonucleotide
aguuuaacgugugaggaau

SEQ ID NO: 1245556 - RNA, 19 nt, Artificial Sequence
  Description of Artificial Sequence: Synthetic oligonucleotide
agaucuuggagauuuccuu

SEQ ID NO: 1245557 - RNA, 19 nt, Artificial Sequence
  Description of Artificial Sequence: Synthetic oligonucleotide
ugguguacccucuuaacuu

SEQ ID NO: 1245558 - RNA, 19 nt, Artificial Sequence
  Description of Artificial Sequence: Synthetic oligonucleotide
cacgcugagccacaugucc

SEQ ID NO: 1245559 - RNA, 19 nt, Artificial Sequence
  Description of Artificial Sequence: Synthetic oligonucleotide
uucuaguugcauuuagguu

SEQ ID NO: 1245560 - RNA, 19 nt, Artificial Sequence
  Description of Artificial Sequence: Synthetic oligonucleotide
guuaugagggaugcgaaca

SEQ ID NO: 1245561 - RNA, 19 nt, Artificial Sequence
  Description of Artificial Sequence: Synthetic oligonucleotide
guagcuuaggcuguccuug

SEQ ID NO: 1245562 - RNA, 19 nt, Artificial Sequence
  Description of Artificial Sequence: Synthetic oligonucleotide
uguacccucuuaacuugcc

SEQ ID NO: 1245563 - RNA, 19 nt, Artificial Sequence
  Description of Artificial Sequence: Synthetic oligonucleotide
cucguggugugcauagcgg

SEQ ID NO: 1245564 - RNA, 19 nt, Artificial Sequence
  Description of Artificial Sequence: Synthetic oligonucleotide
ugagaguagugacuuuguc

SEQ ID NO: 1245565 - RNA, 19 nt, Artificial Sequence
  Description of Artificial Sequence: Synthetic oligonucleotide
uagauccuuaucagugcug

SEQ ID NO: 1245566 - RNA, 19 nt, Artificial Sequence
  Description of Artificial Sequence: Synthetic oligonucleotide
uccgccaguacccaauaau

SEQ ID NO: 1245567 - RNA, 19 nt, Artificial Sequence
  Description of Artificial Sequence: Synthetic oligonucleotide
cuuggucucuccaucacca

SEQ ID NO: 1245568 - RNA, 19 nt, Artificial Sequence
  Description of Artificial Sequence: Synthetic oligonucleotide
ggagauuuccuuguggccc

SEQ ID NO: 1245569 - RNA, 19 nt, Artificial Sequence
  Description of Artificial Sequence: Synthetic oligonucleotide
uguccacgcagaccaaaug

SEQ ID NO: 1245570 - RNA, 19 nt, Artificial Sequence
  Description of Artificial Sequence: Synthetic oligonucleotide
guagcaagggccucaguuc

SEQ ID NO: 1245571 - RNA, 19 nt, Artificial Sequence
  Description of Artificial Sequence: Synthetic oligonucleotide
gaaccaagaauacuaguau

SEQ ID NO: 1245572 - RNA, 19 nt, Artificial Sequence
  Description of Artificial Sequence: Synthetic oligonucleotide
ggugccuauaaggugaaag

SEQ ID NO: 1245573 - RNA, 19 nt, Artificial Sequence
  Description of Artificial Sequence: Synthetic oligonucleotide
aguaagcggcguauacucc

SEQ ID NO: 1245574 - RNA, 19 nt, Artificial Sequence
  Description of Artificial Sequence: Synthetic oligonucleotide
aaucggacauaggagcaga

SEQ ID NO: 1245575 - RNA, 19 nt, Artificial Sequence
  Description of Artificial Sequence: Synthetic oligonucleotide
agacuuggccaaaauaucu

SEQ ID NO: 1245576 - RNA, 19 nt, Artificial Sequence
  Description of Artificial Sequence: Synthetic oligonucleotide
acgcagaccaaaugcaggu

SEQ ID NO: 1245577 - RNA, 19 nt, Artificial Sequence
  Description of Artificial Sequence: Synthetic oligonucleotide
ucguggugugcauagcgga

SEQ ID NO: 1245578 - RNA, 19 nt, Artificial Sequence
  Description of Artificial Sequence: Synthetic oligonucleotide
agaaucuaaauaagaaguu

SEQ ID NO: 1245579 - RNA, 19 nt, Artificial Sequence
  Description of Artificial Sequence: Synthetic oligonucleotide
acuaaagcuucuacagaag

SEQ ID NO: 1245580 - RNA, 19 nt, Artificial Sequence
  Description of Artificial Sequence: Synthetic oligonucleotide
aacuguuaugagggaugcg

SEQ ID NO: 1245581 - RNA, 19 nt, Artificial Sequence
  Description of Artificial Sequence: Synthetic oligonucleotide
ggugguaccuucaugacca

SEQ ID NO: 1245582 - RNA, 19 nt, Artificial Sequence
  Description of Artificial Sequence: Synthetic oligonucleotide
uaguaggcuucauggcuag

SEQ ID NO: 1245583 - RNA, 19 nt, Artificial Sequence
  Description of Artificial Sequence: Synthetic oligonucleotide
ggaucaaggggauuuucug

SEQ ID NO: 1245584 - RNA, 19 nt, Artificial Sequence
  Description of Artificial Sequence: Synthetic oligonucleotide
gacuugcauacccagcguc

SEQ ID NO: 1245585 - RNA, 19 nt, Artificial Sequence
  Description of Artificial Sequence: Synthetic oligonucleotide
gaaucggacauaggagcag

SEQ ID NO: 1245586 - RNA, 19 nt, Artificial Sequence
  Description of Artificial Sequence: Synthetic oligonucleotide
caaucuccgguagaaacug

SEQ ID NO: 1245587 - RNA, 19 nt, Artificial Sequence
  Description of Artificial Sequence: Synthetic oligonucleotide
uagaaacuguuaugaggga

SEQ ID NO: 1245588 - RNA, 19 nt, Artificial Sequence
  Description of Artificial Sequence: Synthetic oligonucleotide
agaaacuguuaugagggau

SEQ ID NO: 1245589 - RNA, 19 nt, Artificial Sequence
  Description of Artificial Sequence: Synthetic oligonucleotide
ugcauacccagcguccucc

SEQ ID NO: 1245590 - RNA, 19 nt, Artificial Sequence
  Description of Artificial Sequence: Synthetic oligonucleotide
uguuaacuacaucgagauc

SEQ ID NO: 1245591 - RNA, 19 nt, Artificial Sequence
  Description of Artificial Sequence: Synthetic oligonucleotide
uuucugaauggcagcggaa

SEQ ID NO: 1245592 - RNA, 19 nt, Artificial Sequence
  Description of Artificial Sequence: Synthetic oligonucleotide
ucuaccuggcaguuagcaa

SEQ ID NO: 1245593 - RNA, 19 nt, Artificial Sequence
  Description of Artificial Sequence: Synthetic oligonucleotide
agcaacgaaugccaggauu

SEQ ID NO: 1245594 - RNA, 19 nt, Artificial Sequence
  Description of Artificial Sequence: Synthetic oligonucleotide
guauaggagacuggcuucc

SEQ ID NO: 1245595 - RNA, 19 nt, Artificial Sequence
  Description of Artificial Sequence: Synthetic oligonucleotide
gccucuauguaaaacuuag

SEQ ID NO: 1245596 - RNA, 19 nt, Artificial Sequence
  Description of Artificial Sequence: Synthetic oligonucleotide
ccuugaaucggacauagga

SEQ ID NO: 1245597 - RNA, 19 nt, Artificial Sequence
  Description of Artificial Sequence: Synthetic oligonucleotide
cagcuuaaggcauucuaca

SEQ ID NO: 1245598 - RNA, 19 nt, Artificial Sequence
  Description of Artificial Sequence: Synthetic oligonucleotide
guugcacaaacugauuguc

SEQ ID NO: 1245599 - RNA, 19 nt, Artificial Sequence
  Description of Artificial Sequence: Synthetic oligonucleotide
aucuaaauaagaaguucaa

SEQ ID NO: 1245600 - RNA, 19 nt, Artificial Sequence
  Description of Artificial Sequence: Synthetic oligonucleotide
aacgaaugccaggauugga

SEQ ID NO: 1245601 - RNA, 19 nt, Artificial Sequence
  Description of Artificial Sequence: Synthetic oligonucleotide
gcaacgaaugccaggauug

SEQ ID NO: 1245602 - RNA, 19 nt, Artificial Sequence
  Description of Artificial Sequence: Synthetic oligonucleotide
caccuugaaucggacauag

SEQ ID NO: 1245603 - RNA, 19 nt, Artificial Sequence
  Description of Artificial Sequence: Synthetic oligonucleotide
gguguacccucuuaacuug

SEQ ID NO: 1245604 - RNA, 19 nt, Artificial Sequence
  Description of Artificial Sequence: Synthetic oligonucleotide
ucuccgguagaaacuguua

SEQ ID NO: 1245605 - RNA, 19 nt, Artificial Sequence
  Description of Artificial Sequence: Synthetic oligonucleotide
caguacccaauaauagauc

SEQ ID NO: 1245606 - RNA, 19 nt, Artificial Sequence
  Description of Artificial Sequence: Synthetic oligonucleotide
ugagggaugcgaacaucaa

SEQ ID NO: 1245607 - RNA, 19 nt, Artificial Sequence
  Description of Artificial Sequence: Synthetic oligonucleotide
ucuuccggggucgauggga

SEQ ID NO: 1245608 - RNA, 19 nt, Artificial Sequence
  Description of Artificial Sequence: Synthetic oligonucleotide
guacccucuuaacuugccc

SEQ ID NO: 1245609 - RNA, 19 nt, Artificial Sequence
  Description of Artificial Sequence: Synthetic oligonucleotide
uuaacgugugaggaauguc

SEQ ID NO: 1245610 - RNA, 19 nt, Artificial Sequence
  Description of Artificial Sequence: Synthetic oligonucleotide
gguaguaagcggcguauac

SEQ ID NO: 1245611 - RNA, 19 nt, Artificial Sequence
  Description of Artificial Sequence: Synthetic oligonucleotide
ucggacauaggagcagagc

SEQ ID NO: 1245612 - RNA, 19 nt, Artificial Sequence
  Description of Artificial Sequence: Synthetic oligonucleotide
ccaagaauacuaguauagg

SEQ ID NO: 1245613 - RNA, 19 nt, Artificial Sequence
  Description of Artificial Sequence: Synthetic oligonucleotide
uccggggucgaugggauca

SEQ ID NO: 1245614 - RNA, 19 nt, Artificial Sequence
  Description of Artificial Sequence: Synthetic oligonucleotide
aaaagucgacaaugagcuu

SEQ ID NO: 1245615 - RNA, 19 nt, Artificial Sequence
  Description of Artificial Sequence: Synthetic oligonucleotide
auacuccagccacguggcc

SEQ ID NO: 1245616 - RNA, 19 nt, Artificial Sequence
  Description of Artificial Sequence: Synthetic oligonucleotide
caucaacgaggccuugaag

SEQ ID NO: 1245617 - RNA, 19 nt, Artificial Sequence
  Description of Artificial Sequence: Synthetic oligonucleotide
aggagcgggugguaccuuc

SEQ ID NO: 1245618 - RNA, 19 nt, Artificial Sequence
  Description of Artificial Sequence: Synthetic oligonucleotide
guccucguggugugcauag

SEQ ID NO: 1245619 - RNA, 19 nt, Artificial Sequence
  Description of Artificial Sequence: Synthetic oligonucleotide
caggauuggaauggccagg

SEQ ID NO: 1245620 - RNA, 19 nt, Artificial Sequence
  Description of Artificial Sequence: Synthetic oligonucleotide
ggaugcgaacaucaacgag

SEQ ID NO: 1245621 - RNA, 19 nt, Artificial Sequence
  Description of Artificial Sequence: Synthetic oligonucleotide
caacgaaugccaggauugg

SEQ ID NO: 1245622 - RNA, 19 nt, Artificial Sequence
  Description of Artificial Sequence: Synthetic oligonucleotide
aaggaguaacagaacugau

SEQ ID NO: 1245623 - RNA, 19 nt, Artificial Sequence
  Description of Artificial Sequence: Synthetic oligonucleotide
gcaguuagcaauagacuug

SEQ ID NO: 1245624 - RNA, 19 nt, Artificial Sequence
  Description of Artificial Sequence: Synthetic oligonucleotide
ccggcaaucacaaacaugu

SEQ ID NO: 1245625 - RNA, 19 nt, Artificial Sequence
  Description of Artificial Sequence: Synthetic oligonucleotide
gcauucuacaaacuggugu

SEQ ID NO: 1245626 - RNA, 19 nt, Artificial Sequence
  Description of Artificial Sequence: Synthetic oligonucleotide
acgaaugccaggauuggaa

SEQ ID NO: 1245627 - RNA, 19 nt, Artificial Sequence
  Description of Artificial Sequence: Synthetic oligonucleotide
cccaaaugaucuguguugg

SEQ ID NO: 1245628 - RNA, 19 nt, Artificial Sequence
  Description of Artificial Sequence: Synthetic oligonucleotide
aacgugugaggaaugucuu

SEQ ID NO: 1245629 - RNA, 19 nt, Artificial Sequence
  Description of Artificial Sequence: Synthetic oligonucleotide
gcuucuacagaagaagcca

SEQ ID NO: 1245630 - RNA, 19 nt, Artificial Sequence
  Description of Artificial Sequence: Synthetic oligonucleotide
guuuaacgugugaggaaug

SEQ ID NO: 1245631 - RNA, 19 nt, Artificial Sequence
  Description of Artificial Sequence: Synthetic oligonucleotide
aggaguaacagaacugaua

SEQ ID NO: 1245632 - RNA, 19 nt, Artificial Sequence
  Description of Artificial Sequence: Synthetic oligonucleotide
aucucuuccggggucgaug

SEQ ID NO: 1245633 - RNA, 19 nt, Artificial Sequence
  Description of Artificial Sequence: Synthetic oligonucleotide
gccaguacccaauaauaga

SEQ ID NO: 1245634 - RNA, 19 nt, Artificial Sequence
  Description of Artificial Sequence: Synthetic oligonucleotide
cggacuugcauacccagcg

SEQ ID NO: 1245635 - RNA, 19 nt, Artificial Sequence
  Description of Artificial Sequence: Synthetic oligonucleotide
agcaugaggauggaugguu

SEQ ID NO: 1245636 - RNA, 19 nt, Artificial Sequence
  Description of Artificial Sequence: Synthetic oligonucleotide
gggugguaccuucaugacc

SEQ ID NO: 1245637 - RNA, 19 nt, Artificial Sequence
  Description of Artificial Sequence: Synthetic oligonucleotide
gcuuaaggcauucuacaaa

SEQ ID NO: 1245638 - RNA, 19 nt, Artificial Sequence
  Description of Artificial Sequence: Synthetic oligonucleotide
gcgggugguaccuucauga

SEQ ID NO: 1245639 - RNA, 19 nt, Artificial Sequence
  Description of Artificial Sequence: Synthetic oligonucleotide
ccguugcacaaacugauug

SEQ ID NO: 1245640 - RNA, 19 nt, Artificial Sequence
  Description of Artificial Sequence: Synthetic oligonucleotide
uggguaguaagcggcguau

SEQ ID NO: 1245641 - RNA, 19 nt, Artificial Sequence
  Description of Artificial Sequence: Synthetic oligonucleotide
ugcgaacaucaacgaggcc

SEQ ID NO: 1245642 - RNA, 19 nt, Artificial Sequence
  Description of Artificial Sequence: Synthetic oligonucleotide
ggauacaucugaagcaaca

SEQ ID NO: 1245643 - RNA, 19 nt, Artificial Sequence
  Description of Artificial Sequence: Synthetic oligonucleotide
uggccccugaugcucugug

SEQ ID NO: 1245644 - RNA, 19 nt, Artificial Sequence
  Description of Artificial Sequence: Synthetic oligonucleotide
ccucguggugugcauagcg

SEQ ID NO: 1245645 - RNA, 19 nt, Artificial Sequence
  Description of Artificial Sequence: Synthetic oligonucleotide
gcuuaucagugacaugaac

SEQ ID NO: 1245646 - RNA, 19 nt, Artificial Sequence
  Description of Artificial Sequence: Synthetic oligonucleotide
aagcaacgaaugccaggau

SEQ ID NO: 1245647 - RNA, 19 nt, Artificial Sequence
  Description of Artificial Sequence: Synthetic oligonucleotide
guguuaugcacagaagcua

SEQ ID NO: 1245648 - RNA, 19 nt, Artificial Sequence
  Description of Artificial Sequence: Synthetic oligonucleotide
uuguggccccugaugcucu

SEQ ID NO: 1245649 - RNA, 19 nt, Artificial Sequence
  Description of Artificial Sequence: Synthetic oligonucleotide
uugagccguugcacaaacu

SEQ ID NO: 1245650 - RNA, 19 nt, Artificial Sequence
  Description of Artificial Sequence: Synthetic oligonucleotide
agcgggugguaccuucaug

SEQ ID NO: 1245651 - RNA, 19 nt, Artificial Sequence
  Description of Artificial Sequence: Synthetic oligonucleotide
cuguuaugagggaugcgaa

SEQ ID NO: 1245652 - RNA, 19 nt, Artificial Sequence
  Description of Artificial Sequence: Synthetic oligonucleotide
uacccagcguccuccgcca

SEQ ID NO: 1245653 - RNA, 19 nt, Artificial Sequence
  Description of Artificial Sequence: Synthetic oligonucleotide
gaccaugcaaaggauacau

SEQ ID NO: 1245654 - RNA, 19 nt, Artificial Sequence
  Description of Artificial Sequence: Synthetic oligonucleotide
ggcaguuagcaauagacuu

SEQ ID NO: 1245655 - RNA, 19 nt, Artificial Sequence
  Description of Artificial Sequence: Synthetic oligonucleotide
uauaggagacuggcuuccu

SEQ ID NO: 1245656 - RNA, 19 nt, Artificial Sequence
  Description of Artificial Sequence: Synthetic oligonucleotide
ccuuaucagugcugaaggc

SEQ ID NO: 1245657 - RNA, 19 nt, Artificial Sequence
  Description of Artificial Sequence: Synthetic oligonucleotide
acaaacugguguacccucu

SEQ ID NO: 1245658 - RNA, 19 nt, Artificial Sequence
  Description of Artificial Sequence: Synthetic oligonucleotide
agccguugcacaaacugau

SEQ ID NO: 1245659 - RNA, 19 nt, Artificial Sequence
  Description of Artificial Sequence: Synthetic oligonucleotide
auggguaguaagcggcgua

SEQ ID NO: 1245660 - RNA, 19 nt, Artificial Sequence
  Description of Artificial Sequence: Synthetic oligonucleotide
agcucaaguuuaacgugug

SEQ ID NO: 1245661 - RNA, 19 nt, Artificial Sequence
  Description of Artificial Sequence: Synthetic oligonucleotide
gccaaaauaucugccccag

SEQ ID NO: 1245662 - RNA, 19 nt, Artificial Sequence
  Description of Artificial Sequence: Synthetic oligonucleotide
accggcaaucacaaacaug

SEQ ID NO: 1245663 - RNA, 19 nt, Artificial Sequence
  Description of Artificial Sequence: Synthetic oligonucleotide
cuuggauccgcugcauuca

SEQ ID NO: 1245664 - RNA, 19 nt, Artificial Sequence
  Description of Artificial Sequence: Synthetic oligonucleotide
cccggaaggaguaacagaa

SEQ ID NO: 1245665 - RNA, 19 nt, Artificial Sequence
  Description of Artificial Sequence: Synthetic oligonucleotide
cauagcggacuugcauacc

SEQ ID NO: 1245666 - RNA, 19 nt, Artificial Sequence
  Description of Artificial Sequence: Synthetic oligonucleotide
agucaguagcuuaggcugu

SEQ ID NO: 1245667 - RNA, 19 nt, Artificial Sequence
  Description of Artificial Sequence: Synthetic oligonucleotide
gaucacgguccaagguggc

SEQ ID NO: 1245668 - RNA, 19 nt, Artificial Sequence
  Description of Artificial Sequence: Synthetic oligonucleotide
ugggaucaaggggauuuuc

SEQ ID NO: 1245669 - RNA, 19 nt, Artificial Sequence
  Description of Artificial Sequence: Synthetic oligonucleotide
guguacccucuuaacuugc

SEQ ID NO: 1245670 - RNA, 19 nt, Artificial Sequence
  Description of Artificial Sequence: Synthetic oligonucleotide
guaguaagcggcguauacu

SEQ ID NO: 1245671 - RNA, 19 nt, Artificial Sequence
  Description of Artificial Sequence: Synthetic oligonucleotide
cauacccagcguccuccgc

SEQ ID NO: 1245672 - RNA, 19 nt, Artificial Sequence
  Description of Artificial Sequence: Synthetic oligonucleotide
caucuauggacaggucauc

SEQ ID NO: 1245673 - RNA, 19 nt, Artificial Sequence
  Description of Artificial Sequence: Synthetic oligonucleotide
ggggucgaugggaucaagg

SEQ ID NO: 1245674 - RNA, 19 nt, Artificial Sequence
  Description of Artificial Sequence: Synthetic oligonucleotide
ggcaccuugaaucggacau

SEQ ID NO: 1245675 - RNA, 19 nt, Artificial Sequence
  Description of Artificial Sequence: Synthetic oligonucleotide
ccacgcagaccaaaugcag

SEQ ID NO: 1245676 - RNA, 19 nt, Artificial Sequence
  Description of Artificial Sequence: Synthetic oligonucleotide
aucggacauaggagcagag

SEQ ID NO: 1245677 - RNA, 19 nt, Artificial Sequence
  Description of Artificial Sequence: Synthetic oligonucleotide
acgugugaggaaugucuua

SEQ ID NO: 1245678 - RNA, 19 nt, Artificial Sequence
  Description of Artificial Sequence: Synthetic oligonucleotide
guuccaccggcaaucacaa

SEQ ID NO: 1245679 - RNA, 19 nt, Artificial Sequence
  Description of Artificial Sequence: Synthetic oligonucleotide
guaggcuucauggcuaggu

SEQ ID NO: 1245680 - RNA, 19 nt, Artificial Sequence
  Description of Artificial Sequence: Synthetic oligonucleotide
cccaucuauggacagguca

SEQ ID NO: 1245681 - RNA, 19 nt, Artificial Sequence
  Description of Artificial Sequence: Synthetic oligonucleotide
ggcuguuuagcauuggcuu

SEQ ID NO: 1245682 - RNA, 19 nt, Artificial Sequence
  Description of Artificial Sequence: Synthetic oligonucleotide
ggggauuuucugaauggca

SEQ ID NO: 1245683 - RNA, 19 nt, Artificial Sequence
  Description of Artificial Sequence: Synthetic oligonucleotide
gggaugcgaacaucaacga

SEQ ID NO: 1245684 - RNA, 19 nt, Artificial Sequence
  Description of Artificial Sequence: Synthetic oligonucleotide
ggcguauacuccagccacg

SEQ ID NO: 1245685 - RNA, 19 nt, Artificial Sequence
  Description of Artificial Sequence: Synthetic oligonucleotide
accuugaaucggacauagg

SEQ ID NO: 1245686 - RNA, 19 nt, Artificial Sequence
  Description of Artificial Sequence: Synthetic oligonucleotide
uucacaccugggccucuau

SEQ ID NO: 1245687 - RNA, 19 nt, Artificial Sequence
  Description of Artificial Sequence: Synthetic oligonucleotide
aguugcauuuagguuccua

SEQ ID NO: 1245688 - RNA, 19 nt, Artificial Sequence
  Description of Artificial Sequence: Synthetic oligonucleotide
ggaauggccaggguuccac

SEQ ID NO: 1245689 - RNA, 19 nt, Artificial Sequence
  Description of Artificial Sequence: Synthetic oligonucleotide
uguggccccugaugcucug

SEQ ID NO: 1245690 - RNA, 19 nt, Artificial Sequence
  Description of Artificial Sequence: Synthetic oligonucleotide
guuaugcacagaagcuaaa

SEQ ID NO: 1245691 - RNA, 19 nt, Artificial Sequence
  Description of Artificial Sequence: Synthetic oligonucleotide
guaccucaggcaagccuug

SEQ ID NO: 1245692 - RNA, 19 nt, Artificial Sequence
  Description of Artificial Sequence: Synthetic oligonucleotide
cacugaguggccacaauuu

SEQ ID NO: 1245693 - RNA, 19 nt, Artificial Sequence
  Description of Artificial Sequence: Synthetic oligonucleotide
uaacuacaucgagauccau

SEQ ID NO: 1245694 - RNA, 19 nt, Artificial Sequence
  Description of Artificial Sequence: Synthetic oligonucleotide
ccaguacccaauaauagau

SEQ ID NO: 1245695 - RNA, 19 nt, Artificial Sequence
  Description of Artificial Sequence: Synthetic oligonucleotide
cuacaaacugguguacccu

SEQ ID NO: 1245696 - RNA, 19 nt, Artificial Sequence
  Description of Artificial Sequence: Synthetic oligonucleotide
gccucaguucagcuucuug

SEQ ID NO: 1245697 - RNA, 19 nt, Artificial Sequence
  Description of Artificial Sequence: Synthetic oligonucleotide
gauggguaguaagcggcgu

SEQ ID NO: 1245698 - RNA, 19 nt, Artificial Sequence
  Description of Artificial Sequence: Synthetic oligonucleotide
cgguagaaacuguuaugag

SEQ ID NO: 1245699 - RNA, 19 nt, Artificial Sequence
  Description of Artificial Sequence: Synthetic oligonucleotide
cauugaccaugcaaaggau

SEQ ID NO: 1245700 - RNA, 19 nt, Artificial Sequence
  Description of Artificial Sequence: Synthetic oligonucleotide
ccaccggcaaucacaaaca

SEQ ID NO: 1245701 - RNA, 19 nt, Artificial Sequence
  Description of Artificial Sequence: Synthetic oligonucleotide
gcucaaguuuaacguguga

SEQ ID NO: 1245702 - RNA, 19 nt, Artificial Sequence
  Description of Artificial Sequence: Synthetic oligonucleotide
cggcguauacuccagccac

SEQ ID NO: 1245703 - RNA, 19 nt, Artificial Sequence
  Description of Artificial Sequence: Synthetic oligonucleotide
agccacguggccacccaug

SEQ ID NO: 1245704 - RNA, 19 nt, Artificial Sequence
  Description of Artificial Sequence: Synthetic oligonucleotide
gccccugaugcucugugga

SEQ ID NO: 1245705 - RNA, 19 nt, Artificial Sequence
  Description of Artificial Sequence: Synthetic oligonucleotide
caugaaccugaagacuucu

SEQ ID NO: 1245706 - RNA, 19 nt, Artificial Sequence
  Description of Artificial Sequence: Synthetic oligonucleotide
gcaagggccucaguucagc

SEQ ID NO: 1245707 - RNA, 19 nt, Artificial Sequence
  Description of Artificial Sequence: Synthetic oligonucleotide
aggguuccaccggcaauca

SEQ ID NO: 1245708 - RNA, 19 nt, Artificial Sequence
  Description of Artificial Sequence: Synthetic oligonucleotide
augaaccugaagacuucua

SEQ ID NO: 1245709 - RNA, 19 nt, Artificial Sequence
  Description of Artificial Sequence: Synthetic oligonucleotide
ccucuauguaaaacuuaga

SEQ ID NO: 1245710 - RNA, 19 nt, Artificial Sequence
  Description of Artificial Sequence: Synthetic oligonucleotide
cucuuaacuugcccaucua

SEQ ID NO: 1245711 - RNA, 19 nt, Artificial Sequence
  Description of Artificial Sequence: Synthetic oligonucleotide
auggagcaugaggauggau

SEQ ID NO: 1245712 - RNA, 19 nt, Artificial Sequence
  Description of Artificial Sequence: Synthetic oligonucleotide
cugccccggaaggaguaac

SEQ ID NO: 1245713 - RNA, 19 nt, Artificial Sequence
  Description of Artificial Sequence: Synthetic oligonucleotide
acgaggccuugaaggaucu

SEQ ID NO: 1245714 - RNA, 19 nt, Artificial Sequence
  Description of Artificial Sequence: Synthetic oligonucleotide
gaggugccuauaaggugaa

SEQ ID NO: 1245715 - RNA, 19 nt, Artificial Sequence
  Description of Artificial Sequence: Synthetic oligonucleotide
gcggcguauacuccagcca

SEQ ID NO: 1245716 - RNA, 19 nt, Artificial Sequence
  Description of Artificial Sequence: Synthetic oligonucleotide
guucugauggagagaguau

SEQ ID NO: 1245717 - RNA, 19 nt, Artificial Sequence
  Description of Artificial Sequence: Synthetic oligonucleotide
guggugugcauagcggacu

SEQ ID NO: 1245718 - RNA, 19 nt, Artificial Sequence
  Description of Artificial Sequence: Synthetic oligonucleotide
uuccggggucgaugggauc

SEQ ID NO: 1245719 - RNA, 19 nt, Artificial Sequence
  Description of Artificial Sequence: Synthetic oligonucleotide
aguccucguggugugcaua

SEQ ID NO: 1245720 - RNA, 19 nt, Artificial Sequence
  Description of Artificial Sequence: Synthetic oligonucleotide
uuccaccggcaaucacaaa

SEQ ID NO: 1245721 - RNA, 19 nt, Artificial Sequence
  Description of Artificial Sequence: Synthetic oligonucleotide
gguuuguguccuggccugc

SEQ ID NO: 1245722 - RNA, 19 nt, Artificial Sequence
  Description of Artificial Sequence: Synthetic oligonucleotide
ccgccaguacccaauaaua

SEQ ID NO: 1245723 - RNA, 19 nt, Artificial Sequence
  Description of Artificial Sequence: Synthetic oligonucleotide
gcggacuugcauacccagc

SEQ ID NO: 1245724 - RNA, 19 nt, Artificial Sequence
  Description of Artificial Sequence: Synthetic oligonucleotide
ugaccacgcugagccacau

SEQ ID NO: 1245725 - RNA, 19 nt, Artificial Sequence
  Description of Artificial Sequence: Synthetic oligonucleotide
cauuuagggcaggauuccu

SEQ ID NO: 1245726 - RNA, 19 nt, Artificial Sequence
  Description of Artificial Sequence: Synthetic oligonucleotide
gagcuuggcugucuuucuu

SEQ ID NO: 1245727 - RNA, 19 nt, Artificial Sequence
  Description of Artificial Sequence: Synthetic oligonucleotide
gggcaccuugaaucggaca

SEQ ID NO: 1245728 - RNA, 19 nt, Artificial Sequence
  Description of Artificial Sequence: Synthetic oligonucleotide
cuacaucgagauccauccu

SEQ ID NO: 1245729 - RNA, 19 nt, Artificial Sequence
  Description of Artificial Sequence: Synthetic oligonucleotide
gcagcggaauccugcagcu

SEQ ID NO: 1245730 - RNA, 19 nt, Artificial Sequence
  Description of Artificial Sequence: Synthetic oligonucleotide
caucgagauccauccugcu

SEQ ID NO: 1245731 - RNA, 19 nt, Artificial Sequence
  Description of Artificial Sequence: Synthetic oligonucleotide
gaucuuggauccgcugcau

SEQ ID NO: 1245732 - RNA, 19 nt, Artificial Sequence
  Description of Artificial Sequence: Synthetic oligonucleotide
caagcaccuggucuuguuu

SEQ ID NO: 1245733 - RNA, 19 nt, Artificial Sequence
  Description of Artificial Sequence: Synthetic oligonucleotide
ccucuuaacuugcccaucu

SEQ ID NO: 1245734 - RNA, 19 nt, Artificial Sequence
  Description of Artificial Sequence: Synthetic oligonucleotide
ggccucuauguaaaacuua

SEQ ID NO: 1245735 - RNA, 19 nt, Artificial Sequence
  Description of Artificial Sequence: Synthetic oligonucleotide
caaacugguguacccucuu

SEQ ID NO: 1245736 - RNA, 19 nt, Artificial Sequence
  Description of Artificial Sequence: Synthetic oligonucleotide
ggacuugcauacccagcgu

SEQ ID NO: 1245737 - RNA, 19 nt, Artificial Sequence
  Description of Artificial Sequence: Synthetic oligonucleotide
ccccggaaggaguaacaga

SEQ ID NO: 1245738 - RNA, 19 nt, Artificial Sequence
  Description of Artificial Sequence: Synthetic oligonucleotide
ccagaagcucuaccuggca

SEQ ID NO: 1245739 - RNA, 19 nt, Artificial Sequence
  Description of Artificial Sequence: Synthetic oligonucleotide
ggagcgggugguaccuuca

SEQ ID NO: 1245740 - RNA, 19 nt, Artificial Sequence
  Description of Artificial Sequence: Synthetic oligonucleotide
gagcgggugguaccuucau

SEQ ID NO: 1245741 - RNA, 19 nt, Artificial Sequence
  Description of Artificial Sequence: Synthetic oligonucleotide
ggcaagccuugaucuugga

SEQ ID NO: 1245742 - RNA, 19 nt, Artificial Sequence
  Description of Artificial Sequence: Synthetic oligonucleotide
ggcuucauggcuagguauu

SEQ ID NO: 1245743 - RNA, 19 nt, Artificial Sequence
  Description of Artificial Sequence: Synthetic oligonucleotide
caccggcaaucacaaacau

SEQ ID NO: 1245744 - RNA, 19 nt, Artificial Sequence
  Description of Artificial Sequence: Synthetic oligonucleotide
aggugccuauaaggugaaa

SEQ ID NO: 1245745 - RNA, 19 nt, Artificial Sequence
  Description of Artificial Sequence: Synthetic oligonucleotide
gcguauacuccagccacgu

SEQ ID NO: 1245746 - RNA, 19 nt, Artificial Sequence
  Description of Artificial Sequence: Synthetic oligonucleotide
ggauuggaauggccagggu

SEQ ID NO: 1245747 - RNA, 19 nt, Artificial Sequence
  Description of Artificial Sequence: Synthetic oligonucleotide
gcucuaccuggcaguuagc

SEQ ID NO: 1245748 - RNA, 19 nt, Artificial Sequence
  Description of Artificial Sequence: Synthetic oligonucleotide
cccucuuaacuugcccauc

SEQ ID NO: 1245749 - RNA, 19 nt, Artificial Sequence
  Description of Artificial Sequence: Synthetic oligonucleotide
gacuucuaguaggcuucau

SEQ ID NO: 1245750 - RNA, 19 nt, Artificial Sequence
  Description of Artificial Sequence: Synthetic oligonucleotide
ggguaguaagcggcguaua

SEQ ID NO: 1245751 - RNA, 19 nt, Artificial Sequence
  Description of Artificial Sequence: Synthetic oligonucleotide
cgaaugccaggauuggaau

SEQ ID NO: 1245752 - RNA, 19 nt, Artificial Sequence
  Description of Artificial Sequence: Synthetic oligonucleotide
cugcuggggcaccuugaau

SEQ ID NO: 1245753 - RNA, 19 nt, Artificial Sequence
  Description of Artificial Sequence: Synthetic oligonucleotide
ccuucaugaccaggcaugu

SEQ ID NO: 1245754 - RNA, 19 nt, Artificial Sequence
  Description of Artificial Sequence: Synthetic oligonucleotide
acgguccaagguggcuguu

SEQ ID NO: 1245755 - RNA, 19 nt, Artificial Sequence
  Description of Artificial Sequence: Synthetic oligonucleotide
cuguagcaagggccucagu

SEQ ID NO: 1245756 - RNA, 19 nt, Artificial Sequence
  Description of Artificial Sequence: Synthetic oligonucleotide
gcccaucuauggacagguc

SEQ ID NO: 1245757 - RNA, 19 nt, Artificial Sequence
  Description of Artificial Sequence: Synthetic oligonucleotide
gccugccccggaaggagua

SEQ ID NO: 1245758 - RNA, 19 nt, Artificial Sequence
  Description of Artificial Sequence: Synthetic oligonucleotide
gccguugcacaaacugauu

SEQ ID NO: 1245759 - RNA, 19 nt, Artificial Sequence
  Description of Artificial Sequence: Synthetic oligonucleotide
cggggucgaugggaucaag

SEQ ID NO: 1245760 - RNA, 19 nt, Artificial Sequence
  Description of Artificial Sequence: Synthetic oligonucleotide
ccugccccggaaggaguaa

SEQ ID NO: 1245761 - RNA, 19 nt, Artificial Sequence
  Description of Artificial Sequence: Synthetic oligonucleotide
gcggaauccugcagcucuu

SEQ ID NO: 1245762 - RNA, 19 nt, Artificial Sequence
  Description of Artificial Sequence: Synthetic oligonucleotide
cggcaaucacaaacauguu

SEQ ID NO: 1245763 - RNA, 19 nt, Artificial Sequence
  Description of Artificial Sequence: Synthetic oligonucleotide
cgcagaccaaaugcagguu

SEQ ID NO: 1245764 - RNA, 19 nt, Artificial Sequence
  Description of Artificial Sequence: Synthetic oligonucleotide
cgguccaagguggcuguuu

SEQ ID NO: 1245765 - RNA, 19 nt, Artificial Sequence
  Description of Artificial Sequence: Synthetic oligonucleotide
aguguaaauacucaaugcc

SEQ ID NO: 1245766 - RNA, 19 nt, Artificial Sequence
  Description of Artificial Sequence: Synthetic oligonucleotide
uaucaaaugguccucauug

SEQ ID NO: 1245767 - RNA, 19 nt, Artificial Sequence
  Description of Artificial Sequence: Synthetic oligonucleotide
aaugugcccaucuucuccc

SEQ ID NO: 1245768 - RNA, 19 nt, Artificial Sequence
  Description of Artificial Sequence: Synthetic oligonucleotide
uucugaggcaucaagaggc

SEQ ID NO: 1245769 - RNA, 19 nt, Artificial Sequence
  Description of Artificial Sequence: Synthetic oligonucleotide
aguuauuccggcuccaucg

SEQ ID NO: 1245770 - RNA, 19 nt, Artificial Sequence
  Description of Artificial Sequence: Synthetic oligonucleotide
uuaaggaugagaguccucg

SEQ ID NO: 1245771 - RNA, 19 nt, Artificial Sequence
  Description of Artificial Sequence: Synthetic oligonucleotide
  modified_base (13)..(13): a, c, u, g, unknown or other
ucgcucauccaunaaaggg

SEQ ID NO: 1245772 - RNA, 19 nt, Artificial Sequence
  Description of Artificial Sequence: Synthetic oligonucleotide
acuuucaucgcguaguaag

SEQ ID NO: 1245773 - RNA, 19 nt, Artificial Sequence
  Description of Artificial Sequence: Synthetic oligonucleotide
uucguuguaggccagcuug

SEQ ID NO: 1245774 - RNA, 19 nt, Artificial Sequence
  Description of Artificial Sequence: Synthetic oligonucleotide
aagucggcuaucuuaaugu

SEQ ID NO: 1245775 - RNA, 19 nt, Artificial Sequence
  Description of Artificial Sequence: Synthetic oligonucleotide
ucggcuaucuuaaugugcc

SEQ ID NO: 1245776 - RNA, 19 nt, Artificial Sequence
  Description of Artificial Sequence: Synthetic oligonucleotide
aagcaguacagugucacac

SEQ ID NO: 1245777 - RNA, 19 nt, Artificial Sequence
  Description of Artificial Sequence: Synthetic oligonucleotide
aaaugguccucauuggggu

SEQ ID NO: 1245778 - RNA, 19 nt, Artificial Sequence
  Description of Artificial Sequence: Synthetic oligonucleotide
uaguguaaauacucaaugc

SEQ ID NO: 1245779 - RNA, 19 nt, Artificial Sequence
  Description of Artificial Sequence: Synthetic oligonucleotide
uugacccaaauucaaacac

SEQ ID NO: 1245780 - RNA, 19 nt, Artificial Sequence
  Description of Artificial Sequence: Synthetic oligonucleotide
auacucaaugccuuugauc

SEQ ID NO: 1245781 - RNA, 19 nt, Artificial Sequence
  Description of Artificial Sequence: Synthetic oligonucleotide
  modified_base (14)..(14): a, c, u, g, unknown or other
uucgcucauccaunaaagg

SEQ ID NO: 1245782 - RNA, 19 nt, Artificial Sequence
  Description of Artificial Sequence: Synthetic oligonucleotide
ucauuuucguuguaggcca

SEQ ID NO: 1245783 - RNA, 19 nt, Artificial Sequence
  Description of Artificial Sequence: Synthetic oligonucleotide
  modified_base (6)..(6): a, c, u, g, unknown or other
uccaunaaagggcacuggc

SEQ ID NO: 1245784 - RNA, 19 nt, Artificial Sequence
  Description of Artificial Sequence: Synthetic oligonucleotide
aaaccugugauggagacau

SEQ ID NO: 1245785 - RNA, 19 nt, Artificial Sequence
  Description of Artificial Sequence: Synthetic oligonucleotide
aacggguucccaaaagagc

SEQ ID NO: 1245786 - RNA, 19 nt, Artificial Sequence
  Description of Artificial Sequence: Synthetic oligonucleotide
uccugcaaaccugugaugg

SEQ ID NO: 1245787 - RNA, 19 nt, Artificial Sequence
  Description of Artificial Sequence: Synthetic oligonucleotide
gauccuggaaguagaaucg

SEQ ID NO: 1245788 - RNA, 19 nt, Artificial Sequence
  Description of Artificial Sequence: Synthetic oligonucleotide
uguaaauacucaaugccuu

SEQ ID NO: 1245789 - RNA, 19 nt, Artificial Sequence
  Description of Artificial Sequence: Synthetic oligonucleotide
aaacauccaaggccuuccc

SEQ ID NO: 1245790 - RNA, 19 nt, Artificial Sequence
  Description of Artificial Sequence: Synthetic oligonucleotide
cacgcaaacacaugauucg

SEQ ID NO: 1245791 - RNA, 19 nt, Artificial Sequence
  Description of Artificial Sequence: Synthetic oligonucleotide
acuagaaucacagucgcca

SEQ ID NO: 1245792 - RNA, 19 nt, Artificial Sequence
  Description of Artificial Sequence: Synthetic oligonucleotide
gauucagcugcacacaguc

SEQ ID NO: 1245793 - RNA, 19 nt, Artificial Sequence
  Description of Artificial Sequence: Synthetic oligonucleotide
ucacgcaaacacaugauuc

SEQ ID NO: 1245794 - RNA, 19 nt, Artificial Sequence
  Description of Artificial Sequence: Synthetic oligonucleotide
ucacuagaaucacagucgc

SEQ ID NO: 1245795 - RNA, 19 nt, Artificial Sequence
  Description of Artificial Sequence: Synthetic oligonucleotide
gacucaggugccaugaagg

SEQ ID NO: 1245796 - RNA, 19 nt, Artificial Sequence
  Description of Artificial Sequence: Synthetic oligonucleotide
aucaaaugguccucauugg

SEQ ID NO: 1245797 - RNA, 19 nt, Artificial Sequence
  Description of Artificial Sequence: Synthetic oligonucleotide
  modified_base (16)..(16): a, c, u, g, unknown or other
gauucgcucauccaunaaa

SEQ ID NO: 1245798 - RNA, 19 nt, Artificial Sequence
  Description of Artificial Sequence: Synthetic oligonucleotide
  modified_base (4)..(4): a, c, u, g, unknown or other
caunaaagggcacuggcca

SEQ ID NO: 1245799 - RNA, 19 nt, Artificial Sequence
  Description of Artificial Sequence: Synthetic oligonucleotide
ucauaagcagguucccggg

SEQ ID NO: 1245800 - RNA, 19 nt, Artificial Sequence
  Description of Artificial Sequence: Synthetic oligonucleotide
gacaaagcaguacaguguc

SEQ ID NO: 1245801 - RNA, 19 nt, Artificial Sequence
  Description of Artificial Sequence: Synthetic oligonucleotide
gacguggaaaaccagccug

SEQ ID NO: 1245802 - RNA, 19 nt, Artificial Sequence
  Description of Artificial Sequence: Synthetic oligonucleotide
auaaccagagaugaccauc

SEQ ID NO: 1245803 - RNA, 19 nt, Artificial Sequence
  Description of Artificial Sequence: Synthetic oligonucleotide
cuugcgaccagaaaguaga

SEQ ID NO: 1245804 - RNA, 19 nt, Artificial Sequence
  Description of Artificial Sequence: Synthetic oligonucleotide
ugacaaggaacguuccucc

SEQ ID NO: 1245805 - RNA, 19 nt, Artificial Sequence
  Description of Artificial Sequence: Synthetic oligonucleotide
uucagauaguggcuucagg

SEQ ID NO: 1245806 - RNA, 19 nt, Artificial Sequence
  Description of Artificial Sequence: Synthetic oligonucleotide
ucucccaccaggagguugg

SEQ ID NO: 1245807 - RNA, 19 nt, Artificial Sequence
  Description of Artificial Sequence: Synthetic oligonucleotide
acaaggaacguuccucccg

SEQ ID NO: 1245808 - RNA, 19 nt, Artificial Sequence
  Description of Artificial Sequence: Synthetic oligonucleotide
gaaucauggucuucacuag

SEQ ID NO: 1245809 - RNA, 19 nt, Artificial Sequence
  Description of Artificial Sequence: Synthetic oligonucleotide
ucagcguauacugauucag

SEQ ID NO: 1245810 - RNA, 19 nt, Artificial Sequence
  Description of Artificial Sequence: Synthetic oligonucleotide
aaacggguucccaaaagag

SEQ ID NO: 1245811 - RNA, 19 nt, Artificial Sequence
  Description of Artificial Sequence: Synthetic oligonucleotide
cuggaaguagaaucgggcc

SEQ ID NO: 1245812 - RNA, 19 nt, Artificial Sequence
  Description of Artificial Sequence: Synthetic oligonucleotide
agauaguggcuucagggug

SEQ ID NO: 1245813 - RNA, 19 nt, Artificial Sequence
  Description of Artificial Sequence: Synthetic oligonucleotide
uaaguguugucauuuucgu

SEQ ID NO: 1245814 - RNA, 19 nt, Artificial Sequence
  Description of Artificial Sequence: Synthetic oligonucleotide
uauggaaacgcagggcagg

SEQ ID NO: 1245815 - RNA, 19 nt, Artificial Sequence
  Description of Artificial Sequence: Synthetic oligonucleotide
gagcguuuccgaaucaugg

SEQ ID NO: 1245816 - RNA, 19 nt, Artificial Sequence
  Description of Artificial Sequence: Synthetic oligonucleotide
ucccaaaagagcguuuccg

SEQ ID NO: 1245817 - RNA, 19 nt, Artificial Sequence
  Description of Artificial Sequence: Synthetic oligonucleotide
ugccuuguuucauaagcag

SEQ ID NO: 1245818 - RNA, 19 nt, Artificial Sequence
  Description of Artificial Sequence: Synthetic oligonucleotide
gauuccaugcccaagugga

SEQ ID NO: 1245819 - RNA, 19 nt, Artificial Sequence
  Description of Artificial Sequence: Synthetic oligonucleotide
acggguucccaaaagagcg

SEQ ID NO: 1245820 - RNA, 19 nt, Artificial Sequence
  Description of Artificial Sequence: Synthetic oligonucleotide
agcguauacugauucagcu

SEQ ID NO: 1245821 - RNA, 19 nt, Artificial Sequence
  Description of Artificial Sequence: Synthetic oligonucleotide
gaucuugcgggucucugag

SEQ ID NO: 1245822 - RNA, 19 nt, Artificial Sequence
  Description of Artificial Sequence: Synthetic oligonucleotide
gcgaccagaaaguagaggc

SEQ ID NO: 1245823 - RNA, 19 nt, Artificial Sequence
  Description of Artificial Sequence: Synthetic oligonucleotide
ugcgacuccacugugggcc

SEQ ID NO: 1245824 - RNA, 19 nt, Artificial Sequence
  Description of Artificial Sequence: Synthetic oligonucleotide
acaugauucgcucauccau

SEQ ID NO: 1245825 - RNA, 19 nt, Artificial Sequence
  Description of Artificial Sequence: Synthetic oligonucleotide
ucugagagcgacucaggug

SEQ ID NO: 1245826 - RNA, 19 nt, Artificial Sequence
  Description of Artificial Sequence: Synthetic oligonucleotide
ugcccacaguguuagagag

SEQ ID NO: 1245827 - RNA, 19 nt, Artificial Sequence
  Description of Artificial Sequence: Synthetic oligonucleotide
auggcccaaacauccaagg

SEQ ID NO: 1245828 - RNA, 19 nt, Artificial Sequence
  Description of Artificial Sequence: Synthetic oligonucleotide
agccugucggaucagcuuc

SEQ ID NO: 1245829 - RNA, 19 nt, Artificial Sequence
  Description of Artificial Sequence: Synthetic oligonucleotide
cacaguguuagagagcaag

SEQ ID NO: 1245830 - RNA, 19 nt, Artificial Sequence
  Description of Artificial Sequence: Synthetic oligonucleotide
  modified_base (9)..(9): a, c, u, g, unknown or other
ucauccaunaaagggcacu

SEQ ID NO: 1245831 - RNA, 19 nt, Artificial Sequence
  Description of Artificial Sequence: Synthetic oligonucleotide
aguccugcaaaccugugau

SEQ ID NO: 1245832 - RNA, 19 nt, Artificial Sequence
  Description of Artificial Sequence: Synthetic oligonucleotide
uucucgaccuccucuucgg

SEQ ID NO: 1245833 - RNA, 19 nt, Artificial Sequence
  Description of Artificial Sequence: Synthetic oligonucleotide
accccagauaaccagagau

SEQ ID NO: 1245834 - RNA, 19 nt, Artificial Sequence
  Description of Artificial Sequence: Synthetic oligonucleotide
gauggcgaguaggacaggg

SEQ ID NO: 1245835 - RNA, 19 nt, Artificial Sequence
  Description of Artificial Sequence: Synthetic oligonucleotide
uccaugcccaaguggaugc

SEQ ID NO: 1245836 - RNA, 19 nt, Artificial Sequence
  Description of Artificial Sequence: Synthetic oligonucleotide
uucggucacgcaaacacau

SEQ ID NO: 1245837 - RNA, 19 nt, Artificial Sequence
  Description of Artificial Sequence: Synthetic oligonucleotide
uggccugacucacacucgg

SEQ ID NO: 1245838 - RNA, 19 nt, Artificial Sequence
  Description of Artificial Sequence: Synthetic oligonucleotide
aggcaguuauuccggcucc

SEQ ID NO: 1245839 - RNA, 19 nt, Artificial Sequence
  Description of Artificial Sequence: Synthetic oligonucleotide
uucaucgcguaguaagugu

SEQ ID NO: 1245840 - RNA, 19 nt, Artificial Sequence
  Description of Artificial Sequence: Synthetic oligonucleotide
aaggaacguuccucccgcc

SEQ ID NO: 1245841 - RNA, 19 nt, Artificial Sequence
  Description of Artificial Sequence: Synthetic oligonucleotide
ugaucuucugguaguguaa

SEQ ID NO: 1245842 - RNA, 19 nt, Artificial Sequence
  Description of Artificial Sequence: Synthetic oligonucleotide
acgcaaacacaugauucgc

SEQ ID NO: 1245843 - RNA, 19 nt, Artificial Sequence
  Description of Artificial Sequence: Synthetic oligonucleotide
cagagaugaccaucaaggc

SEQ ID NO: 1245844 - RNA, 19 nt, Artificial Sequence
  Description of Artificial Sequence: Synthetic oligonucleotide
  modified_base (15)..(15): a, c, u, g, unknown or other
auucgcucauccaunaaag

SEQ ID NO: 1245845 - RNA, 19 nt, Artificial Sequence
  Description of Artificial Sequence: Synthetic oligonucleotide
ugguaguguaaauacucaa

SEQ ID NO: 1245846 - RNA, 19 nt, Artificial Sequence
  Description of Artificial Sequence: Synthetic oligonucleotide
aaaaccccagauaaccaga

SEQ ID NO: 1245847 - RNA, 19 nt, Artificial Sequence
  Description of Artificial Sequence: Synthetic oligonucleotide
ccuugguugacccaaauuc

SEQ ID NO: 1245848 - RNA, 19 nt, Artificial Sequence
  Description of Artificial Sequence: Synthetic oligonucleotide
uauuccggcuccaucgccu

SEQ ID NO: 1245849 - RNA, 19 nt, Artificial Sequence
  Description of Artificial Sequence: Synthetic oligonucleotide
uuucaucgcguaguaagug

SEQ ID NO: 1245850 - RNA, 19 nt, Artificial Sequence
  Description of Artificial Sequence: Synthetic oligonucleotide
uaggacaugcugcuaugga

SEQ ID NO: 1245851 - RNA, 19 nt, Artificial Sequence
  Description of Artificial Sequence: Synthetic oligonucleotide
gauggagacauggugcgac

SEQ ID NO: 1245852 - RNA, 19 nt, Artificial Sequence
  Description of Artificial Sequence: Synthetic oligonucleotide
cuucagcguauacugauuc

SEQ ID NO: 1245853 - RNA, 19 nt, Artificial Sequence
  Description of Artificial Sequence: Synthetic oligonucleotide
aaaccccagauaaccagag

SEQ ID NO: 1245854 - RNA, 19 nt, Artificial Sequence
  Description of Artificial Sequence: Synthetic oligonucleotide
augaccaucaaggcuccac

SEQ ID NO: 1245855 - RNA, 19 nt, Artificial Sequence
  Description of Artificial Sequence: Synthetic oligonucleotide
auggcaauuuccugguaca

SEQ ID NO: 1245856 - RNA, 19 nt, Artificial Sequence
  Description of Artificial Sequence: Synthetic oligonucleotide
  modified_base (7)..(7): a, c, u, g, unknown or other
auccaunaaagggcacugg

SEQ ID NO: 1245857 - RNA, 19 nt, Artificial Sequence
  Description of Artificial Sequence: Synthetic oligonucleotide
ggcccaaacauccaaggcc

SEQ ID NO: 1245858 - RNA, 19 nt, Artificial Sequence
  Description of Artificial Sequence: Synthetic oligonucleotide
cuauggaaacgcagggcag

SEQ ID NO: 1245859 - RNA, 19 nt, Artificial Sequence
  Description of Artificial Sequence: Synthetic oligonucleotide
cguauacugauucagcugc

SEQ ID NO: 1245860 - RNA, 19 nt, Artificial Sequence
  Description of Artificial Sequence: Synthetic oligonucleotide
auacugauucagcugcaca

SEQ ID NO: 1245861 - RNA, 19 nt, Artificial Sequence
  Description of Artificial Sequence: Synthetic oligonucleotide
uucccaaaagagcguuucc

SEQ ID NO: 1245862 - RNA, 19 nt, Artificial Sequence
  Description of Artificial Sequence: Synthetic oligonucleotide
agcacuuucaucgcguagu

SEQ ID NO: 1245863 - RNA, 19 nt, Artificial Sequence
  Description of Artificial Sequence: Synthetic oligonucleotide
gacccaaauucaaacacca

SEQ ID NO: 1245864 - RNA, 19 nt, Artificial Sequence
  Description of Artificial Sequence: Synthetic oligonucleotide
aacacaugauucgcucauc

SEQ ID NO: 1245865 - RNA, 19 nt, Artificial Sequence
  Description of Artificial Sequence: Synthetic oligonucleotide
acauggugcgacuccacug

SEQ ID NO: 1245866 - RNA, 19 nt, Artificial Sequence
  Description of Artificial Sequence: Synthetic oligonucleotide
uucagcguauacugauuca

SEQ ID NO: 1245867 - RNA, 19 nt, Artificial Sequence
  Description of Artificial Sequence: Synthetic oligonucleotide
uccuucagcguauacugau

SEQ ID NO: 1245868 - RNA, 19 nt, Artificial Sequence
  Description of Artificial Sequence: Synthetic oligonucleotide
aaagagcguuuccgaauca

SEQ ID NO: 1245869 - RNA, 19 nt, Artificial Sequence
  Description of Artificial Sequence: Synthetic oligonucleotide
auuuucguuguaggccagc

SEQ ID NO: 1245870 - RNA, 19 nt, Artificial Sequence
  Description of Artificial Sequence: Synthetic oligonucleotide
gcugcuauggaaacgcagg

SEQ ID NO: 1245871 - RNA, 19 nt, Artificial Sequence
  Description of Artificial Sequence: Synthetic oligonucleotide
aggaacguuccucccgccg

SEQ ID NO: 1245872 - RNA, 19 nt, Artificial Sequence
  Description of Artificial Sequence: Synthetic oligonucleotide
ugcgaccagaaaguagagg

SEQ ID NO: 1245873 - RNA, 19 nt, Artificial Sequence
  Description of Artificial Sequence: Synthetic oligonucleotide
aguaggacagggaugggca

SEQ ID NO: 1245874 - RNA, 19 nt, Artificial Sequence
  Description of Artificial Sequence: Synthetic oligonucleotide
caguguuagagagcaaggc

SEQ ID NO: 1245875 - RNA, 19 nt, Artificial Sequence
  Description of Artificial Sequence: Synthetic oligonucleotide
accauaucaaaugguccuc

SEQ ID NO: 1245876 - RNA, 19 nt, Artificial Sequence
  Description of Artificial Sequence: Synthetic oligonucleotide
agauucugaggcaucaaga

SEQ ID NO: 1245877 - RNA, 19 nt, Artificial Sequence
  Description of Artificial Sequence: Synthetic oligonucleotide
guuauuccggcuccaucgc

SEQ ID NO: 1245878 - RNA, 19 nt, Artificial Sequence
  Description of Artificial Sequence: Synthetic oligonucleotide
cugggaucgcuccugcagg

SEQ ID NO: 1245879 - RNA, 19 nt, Artificial Sequence
  Description of Artificial Sequence: Synthetic oligonucleotide
  modified_base (3)..(3): a, c, u, g, unknown or other
aunaaagggcacuggccaa

SEQ ID NO: 1245880 - RNA, 19 nt, Artificial Sequence
  Description of Artificial Sequence: Synthetic oligonucleotide
uggcgaguaggacagggau

SEQ ID NO: 1245881 - RNA, 19 nt, Artificial Sequence
  Description of Artificial Sequence: Synthetic oligonucleotide
cacucggugaccacaauga

SEQ ID NO: 1245882 - RNA, 19 nt, Artificial Sequence
  Description of Artificial Sequence: Synthetic oligonucleotide
cagcguauacugauucagc

SEQ ID NO: 1245883 - RNA, 19 nt, Artificial Sequence
  Description of Artificial Sequence: Synthetic oligonucleotide
gaguaggacagggaugggc

SEQ ID NO: 1245884 - RNA, 19 nt, Artificial Sequence
  Description of Artificial Sequence: Synthetic oligonucleotide
gcgaguaggacagggaugg

SEQ ID NO: 1245885 - RNA, 19 nt, Artificial Sequence
  Description of Artificial Sequence: Synthetic oligonucleotide
agucggcuaucuuaaugug

SEQ ID NO: 1245886 - RNA, 19 nt, Artificial Sequence
  Description of Artificial Sequence: Synthetic oligonucleotide
ugguugacccaaauucaaa

SEQ ID NO: 1245887 - RNA, 19 nt, Artificial Sequence
  Description of Artificial Sequence: Synthetic oligonucleotide
guuguaggccagcuugacc

SEQ ID NO: 1245888 - RNA, 19 nt, Artificial Sequence
  Description of Artificial Sequence: Synthetic oligonucleotide
  modified_base (5)..(5): a, c, u, g, unknown or other
ccaunaaagggcacuggcc

SEQ ID NO: 1245889 - RNA, 19 nt, Artificial Sequence
  Description of Artificial Sequence: Synthetic oligonucleotide
ggauuccaugcccaagugg

SEQ ID NO: 1245890 - RNA, 19 nt, Artificial Sequence
  Description of Artificial Sequence: Synthetic oligonucleotide
guguuugacugaguucucg

SEQ ID NO: 1245891 - RNA, 19 nt, Artificial Sequence
  Description of Artificial Sequence: Synthetic oligonucleotide
gaauguguuugacugaguu

SEQ ID NO: 1245892 - RNA, 19 nt, Artificial Sequence
  Description of Artificial Sequence: Synthetic oligonucleotide
acucauugcucacaccaaa

SEQ ID NO: 1245893 - RNA, 19 nt, Artificial Sequence
  Description of Artificial Sequence: Synthetic oligonucleotide
uauacugauucagcugcac

SEQ ID NO: 1245894 - RNA, 19 nt, Artificial Sequence
  Description of Artificial Sequence: Synthetic oligonucleotide
gaugggcagacgcagcguc

SEQ ID NO: 1245895 - RNA, 19 nt, Artificial Sequence
  Description of Artificial Sequence: Synthetic oligonucleotide
ggaaacgcagggcagggug

SEQ ID NO: 1245896 - RNA, 19 nt, Artificial Sequence
  Description of Artificial Sequence: Synthetic oligonucleotide
ucaucgcguaguaaguguu

SEQ ID NO: 1245897 - RNA, 19 nt, Artificial Sequence
  Description of Artificial Sequence: Synthetic oligonucleotide
guaggacaugcugcuaugg

SEQ ID NO: 1245898 - RNA, 19 nt, Artificial Sequence
  Description of Artificial Sequence: Synthetic oligonucleotide
agcguuuccgaaucauggu

SEQ ID NO: 1245899 - RNA, 19 nt, Artificial Sequence
  Description of Artificial Sequence: Synthetic oligonucleotide
ccuggaaguagaaucgggc

SEQ ID NO: 1245900 - RNA, 19 nt, Artificial Sequence
  Description of Artificial Sequence: Synthetic oligonucleotide
cugacucacacucggugac

SEQ ID NO: 1245901 - RNA, 19 nt, Artificial Sequence
  Description of Artificial Sequence: Synthetic oligonucleotide
uuccaugcccaaguggaug

SEQ ID NO: 1245902 - RNA, 19 nt, Artificial Sequence
  Description of Artificial Sequence: Synthetic oligonucleotide
uugcgaccagaaaguagag

SEQ ID NO: 1245903 - RNA, 19 nt, Artificial Sequence
  Description of Artificial Sequence: Synthetic oligonucleotide
  modified_base (10)..(10): a, c, u, g, unknown or other
cucauccaunaaagggcac

SEQ ID NO: 1245904 - RNA, 19 nt, Artificial Sequence
  Description of Artificial Sequence: Synthetic oligonucleotide
caaacggguucccaaaaga

SEQ ID NO: 1245905 - RNA, 19 nt, Artificial Sequence
  Description of Artificial Sequence: Synthetic oligonucleotide
aguucucgaccuccucuuc

SEQ ID NO: 1245906 - RNA, 19 nt, Artificial Sequence
  Description of Artificial Sequence: Synthetic oligonucleotide
  modified_base (18)..(18): a, c, u, g, unknown or other
augauucgcucauccauna

SEQ ID NO: 1245907 - RNA, 19 nt, Artificial Sequence
  Description of Artificial Sequence: Synthetic oligonucleotide
ggaacguuccucccgccgg

SEQ ID NO: 1245908 - RNA, 19 nt, Artificial Sequence
  Description of Artificial Sequence: Synthetic oligonucleotide
aaguagaggcugugccuca

SEQ ID NO: 1245909 - RNA, 19 nt, Artificial Sequence
  Description of Artificial Sequence: Synthetic oligonucleotide
gaugcuuaaggaugagagu

SEQ ID NO: 1245910 - RNA, 19 nt, Artificial Sequence
  Description of Artificial Sequence: Synthetic oligonucleotide
cugguaguguaaauacuca

SEQ ID NO: 1245911 - RNA, 19 nt, Artificial Sequence
  Description of Artificial Sequence: Synthetic oligonucleotide
agaucuugcgggucucuga

SEQ ID NO: 1245912 - RNA, 19 nt, Artificial Sequence
  Description of Artificial Sequence: Synthetic oligonucleotide
agaugaccaucaaggcucc

SEQ ID NO: 1245913 - RNA, 19 nt, Artificial Sequence
  Description of Artificial Sequence: Synthetic oligonucleotide
acaugcugcuauggaaacg

SEQ ID NO: 1245914 - RNA, 19 nt, Artificial Sequence
  Description of Artificial Sequence: Synthetic oligonucleotide
ugguuuccguaggacaugc

SEQ ID NO: 1245915 - RNA, 19 nt, Artificial Sequence
  Description of Artificial Sequence: Synthetic oligonucleotide
  modified_base (2)..(2): a, c, u, g, unknown or other
unaaagggcacuggccaaa

SEQ ID NO: 1245916 - RNA, 19 nt, Artificial Sequence
  Description of Artificial Sequence: Synthetic oligonucleotide
  modified_base (8)..(8): a, c, u, g, unknown or other
cauccaunaaagggcacug

SEQ ID NO: 1245917 - RNA, 19 nt, Artificial Sequence
  Description of Artificial Sequence: Synthetic oligonucleotide
ggaagguuugaugucccgg

SEQ ID NO: 1245918 - RNA, 19 nt, Artificial Sequence
  Description of Artificial Sequence: Synthetic oligonucleotide
aggcaugcgaggucgggug

SEQ ID NO: 1245919 - RNA, 19 nt, Artificial Sequence
  Description of Artificial Sequence: Synthetic oligonucleotide
gaaacgcagggcagggugc

SEQ ID NO: 1245920 - RNA, 19 nt, Artificial Sequence
  Description of Artificial Sequence: Synthetic oligonucleotide
auccuggaaguagaaucgg

SEQ ID NO: 1245921 - RNA, 19 nt, Artificial Sequence
  Description of Artificial Sequence: Synthetic oligonucleotide
  modified_base (12)..(12): a, c, u, g, unknown or other
cgcucauccaunaaagggc

SEQ ID NO: 1245922 - RNA, 19 nt, Artificial Sequence
  Description of Artificial Sequence: Synthetic oligonucleotide
augagugguggggagccgg

SEQ ID NO: 1245923 - RNA, 19 nt, Artificial Sequence
  Description of Artificial Sequence: Synthetic oligonucleotide
caccacauugggguggucc

SEQ ID NO: 1245924 - RNA, 19 nt, Artificial Sequence
  Description of Artificial Sequence: Synthetic oligonucleotide
caucgcguaguaaguguug

SEQ ID NO: 1245925 - RNA, 19 nt, Artificial Sequence
  Description of Artificial Sequence: Synthetic oligonucleotide
uggaugcuuaaggaugaga

SEQ ID NO: 1245926 - RNA, 19 nt, Artificial Sequence
  Description of Artificial Sequence: Synthetic oligonucleotide
acacacgugcuugguuucc

SEQ ID NO: 1245927 - RNA, 19 nt, Artificial Sequence
  Description of Artificial Sequence: Synthetic oligonucleotide
guguaaauacucaaugccu

SEQ ID NO: 1245928 - RNA, 19 nt, Artificial Sequence
  Description of Artificial Sequence: Synthetic oligonucleotide
ucggucacgcaaacacaug

SEQ ID NO: 1245929 - RNA, 19 nt, Artificial Sequence
  Description of Artificial Sequence: Synthetic oligonucleotide
aagagcguuuccgaaucau

SEQ ID NO: 1245930 - RNA, 19 nt, Artificial Sequence
  Description of Artificial Sequence: Synthetic oligonucleotide
gcaguacagugucacaccc

SEQ ID NO: 1245931 - RNA, 19 nt, Artificial Sequence
  Description of Artificial Sequence: Synthetic oligonucleotide
  modified_base (19)..(19): a, c, u, g, unknown or other
caugauucgcucauccaun

SEQ ID NO: 1245932 - RNA, 19 nt, Artificial Sequence
  Description of Artificial Sequence: Synthetic oligonucleotide
gaacguuccucccgccggc

SEQ ID NO: 1245933 - RNA, 19 nt, Artificial Sequence
  Description of Artificial Sequence: Synthetic oligonucleotide
ggaggcaugaguggugggg

SEQ ID NO: 1245934 - RNA, 19 nt, Artificial Sequence
  Description of Artificial Sequence: Synthetic oligonucleotide
cucgauggggccccugggc

SEQ ID NO: 1245935 - RNA, 19 nt, Artificial Sequence
  Description of Artificial Sequence: Synthetic oligonucleotide
ugagagcgacucaggugcc

SEQ ID NO: 1245936 - RNA, 19 nt, Artificial Sequence
  Description of Artificial Sequence: Synthetic oligonucleotide
caucaagaggcaguuccug

SEQ ID NO: 1245937 - RNA, 19 nt, Artificial Sequence
  Description of Artificial Sequence: Synthetic oligonucleotide
ugccuuugaucagauccug

SEQ ID NO: 1245938 - RNA, 19 nt, Artificial Sequence
  Description of Artificial Sequence: Synthetic oligonucleotide
acucacacucggugaccac

SEQ ID NO: 1245939 - RNA, 19 nt, Artificial Sequence
  Description of Artificial Sequence: Synthetic oligonucleotide
cacugugggccgccgaggg

SEQ ID NO: 1245940 - RNA, 19 nt, Artificial Sequence
  Description of Artificial Sequence: Synthetic oligonucleotide
aucgcugcccuugaacuca

SEQ ID NO: 1245941 - RNA, 19 nt, Artificial Sequence
  Description of Artificial Sequence: Synthetic oligonucleotide
uugguuuccguaggacaug

SEQ ID NO: 1245942 - RNA, 19 nt, Artificial Sequence
  Description of Artificial Sequence: Synthetic oligonucleotide
ggagacauggugcgacucc

SEQ ID NO: 1245943 - RNA, 19 nt, Artificial Sequence
  Description of Artificial Sequence: Synthetic oligonucleotide
cauuuucguuguaggccag

SEQ ID NO: 1245944 - RNA, 19 nt, Artificial Sequence
  Description of Artificial Sequence: Synthetic oligonucleotide
  modified_base (17)..(17): a, c, u, g, unknown or other
ugauucgcucauccaunaa

SEQ ID NO: 1245945 - RNA, 19 nt, Artificial Sequence
  Description of Artificial Sequence: Synthetic oligonucleotide
cuuugaucagauccuggaa

SEQ ID NO: 1245946 - RNA, 19 nt, Artificial Sequence
  Description of Artificial Sequence: Synthetic oligonucleotide
agagcguuuccgaaucaug

SEQ ID NO: 1245947 - RNA, 19 nt, Artificial Sequence
  Description of Artificial Sequence: Synthetic oligonucleotide
uucgcugccuuguuucaua

SEQ ID NO: 1245948 - RNA, 19 nt, Artificial Sequence
  Description of Artificial Sequence: Synthetic oligonucleotide
gcguauacugauucagcug

SEQ ID NO: 1245949 - RNA, 19 nt, Artificial Sequence
  Description of Artificial Sequence: Synthetic oligonucleotide
acaccaaagucggcuaucu

SEQ ID NO: 1245950 - RNA, 19 nt, Artificial Sequence
  Description of Artificial Sequence: Synthetic oligonucleotide
aucgcguaguaaguguugu

SEQ ID NO: 1245951 - RNA, 19 nt, Artificial Sequence
  Description of Artificial Sequence: Synthetic oligonucleotide
aacucauugcucacaccaa

SEQ ID NO: 1245952 - RNA, 19 nt, Artificial Sequence
  Description of Artificial Sequence: Synthetic oligonucleotide
ugcgaggucggguggucca

SEQ ID NO: 1245953 - RNA, 19 nt, Artificial Sequence
  Description of Artificial Sequence: Synthetic oligonucleotide
ggacagcacuuucaucgcg

SEQ ID NO: 1245954 - RNA, 19 nt, Artificial Sequence
  Description of Artificial Sequence: Synthetic oligonucleotide
uccgaaucauggucuucac

SEQ ID NO: 1245955 - RNA, 19 nt, Artificial Sequence
  Description of Artificial Sequence: Synthetic oligonucleotide
aaccagagaugaccaucaa

SEQ ID NO: 1245956 - RNA, 19 nt, Artificial Sequence
  Description of Artificial Sequence: Synthetic oligonucleotide
gccggcugcccucaaacgg

SEQ ID NO: 1245957 - RNA, 19 nt, Artificial Sequence
  Description of Artificial Sequence: Synthetic oligonucleotide
uggcaauuuccugguacac

SEQ ID NO: 1245958 - RNA, 19 nt, Artificial Sequence
  Description of Artificial Sequence: Synthetic oligonucleotide
auuucauccuucagcguau

SEQ ID NO: 1245959 - RNA, 19 nt, Artificial Sequence
  Description of Artificial Sequence: Synthetic oligonucleotide
gcuugguuuccguaggaca

SEQ ID NO: 1245960 - RNA, 19 nt, Artificial Sequence
  Description of Artificial Sequence: Synthetic oligonucleotide
agcgacucaggugccauga

SEQ ID NO: 1245961 - RNA, 19 nt, Artificial Sequence
  Description of Artificial Sequence: Synthetic oligonucleotide
cuuuccacgaagggaccac

SEQ ID NO: 1245962 - RNA, 19 nt, Artificial Sequence
  Description of Artificial Sequence: Synthetic oligonucleotide
cucgaccuccucuucgguc

SEQ ID NO: 1245963 - RNA, 19 nt, Artificial Sequence
  Description of Artificial Sequence: Synthetic oligonucleotide
cacaugauucgcucaucca

SEQ ID NO: 1245964 - RNA, 19 nt, Artificial Sequence
  Description of Artificial Sequence: Synthetic oligonucleotide
gaggucgggugguccaggc

SEQ ID NO: 1245965 - RNA, 19 nt, Artificial Sequence
  Description of Artificial Sequence: Synthetic oligonucleotide
caguuauuccggcuccauc

SEQ ID NO: 1245966 - RNA, 19 nt, Artificial Sequence
  Description of Artificial Sequence: Synthetic oligonucleotide
ugucuucgcugccuuguuu

SEQ ID NO: 1245967 - RNA, 19 nt, Artificial Sequence
  Description of Artificial Sequence: Synthetic oligonucleotide
ugaucagauccuggaagua

SEQ ID NO: 1245968 - RNA, 19 nt, Artificial Sequence
  Description of Artificial Sequence: Synthetic oligonucleotide
cuuucaucgcguaguaagu

SEQ ID NO: 1245969 - RNA, 19 nt, Artificial Sequence
  Description of Artificial Sequence: Synthetic oligonucleotide
gaggcaugaguggugggga

SEQ ID NO: 1245970 - RNA, 19 nt, Artificial Sequence
  Description of Artificial Sequence: Synthetic oligonucleotide
agaaucgggccuggucuuc

SEQ ID NO: 1245971 - RNA, 19 nt, Artificial Sequence
  Description of Artificial Sequence: Synthetic oligonucleotide
cacccauggcccaaacauc

SEQ ID NO: 1245972 - RNA, 19 nt, Artificial Sequence
  Description of Artificial Sequence: Synthetic oligonucleotide
agagagcaaggcaucgcug

SEQ ID NO: 1245973 - RNA, 19 nt, Artificial Sequence
  Description of Artificial Sequence: Synthetic oligonucleotide
gugcccacaguguuagaga

SEQ ID NO: 1245974 - RNA, 19 nt, Artificial Sequence
  Description of Artificial Sequence: Synthetic oligonucleotide
augcgaggucggguggucc

SEQ ID NO: 1245975 - RNA, 19 nt, Artificial Sequence
  Description of Artificial Sequence: Synthetic oligonucleotide
aguagaggcugugccucag

SEQ ID NO: 1245976 - RNA, 19 nt, Artificial Sequence
  Description of Artificial Sequence: Synthetic oligonucleotide
guaaauacucaaugccuuu

SEQ ID NO: 1245977 - RNA, 19 nt, Artificial Sequence
  Description of Artificial Sequence: Synthetic oligonucleotide
cagcacuuucaucgcguag

SEQ ID NO: 1245978 - RNA, 19 nt, Artificial Sequence
  Description of Artificial Sequence: Synthetic oligonucleotide
cacacgugcuugguuuccg

SEQ ID NO: 1245979 - RNA, 19 nt, Artificial Sequence
  Description of Artificial Sequence: Synthetic oligonucleotide
acuuccaucacaggcccuu

SEQ ID NO: 1245980 - RNA, 19 nt, Artificial Sequence
  Description of Artificial Sequence: Synthetic oligonucleotide
acgaagggaccaccuuuca

SEQ ID NO: 1245981 - RNA, 19 nt, Artificial Sequence
  Description of Artificial Sequence: Synthetic oligonucleotide
ugggcagacgcagcgucca

SEQ ID NO: 1245982 - RNA, 19 nt, Artificial Sequence
  Description of Artificial Sequence: Synthetic oligonucleotide
ggcgacguggaaaaccagc

SEQ ID NO: 1245983 - RNA, 19 nt, Artificial Sequence
  Description of Artificial Sequence: Synthetic oligonucleotide
ucgcguaguaaguguuguc

SEQ ID NO: 1245984 - RNA, 19 nt, Artificial Sequence
  Description of Artificial Sequence: Synthetic oligonucleotide
caucgccuccucaggcugc

SEQ ID NO: 1245985 - RNA, 19 nt, Artificial Sequence
  Description of Artificial Sequence: Synthetic oligonucleotide
acguggaaaaccagccugu

SEQ ID NO: 1245986 - RNA, 19 nt, Artificial Sequence
  Description of Artificial Sequence: Synthetic oligonucleotide
ucccgggugcugacaagga

SEQ ID NO: 1245987 - RNA, 19 nt, Artificial Sequence
  Description of Artificial Sequence: Synthetic oligonucleotide
aaggcuccacacacgugcu

SEQ ID NO: 1245988 - RNA, 19 nt, Artificial Sequence
  Description of Artificial Sequence: Synthetic oligonucleotide
auggugcgacuccacugug

SEQ ID NO: 1245989 - RNA, 19 nt, Artificial Sequence
  Description of Artificial Sequence: Synthetic oligonucleotide
gacauggugcgacuccacu

SEQ ID NO: 1245990 - RNA, 19 nt, Artificial Sequence
  Description of Artificial Sequence: Synthetic oligonucleotide
accagaaaguagaggcugu

SEQ ID NO: 1245991 - RNA, 19 nt, Artificial Sequence
  Description of Artificial Sequence: Synthetic oligonucleotide
gcgacguggaaaaccagcc

SEQ ID NO: 1245992 - RNA, 19 nt, Artificial Sequence
  Description of Artificial Sequence: Synthetic oligonucleotide
acacgugcuugguuuccgu

SEQ ID NO: 1245993 - RNA, 19 nt, Artificial Sequence
  Description of Artificial Sequence: Synthetic oligonucleotide
gcguuuccgaaucaugguc

SEQ ID NO: 1245994 - RNA, 19 nt, Artificial Sequence
  Description of Artificial Sequence: Synthetic oligonucleotide
cuggcccacccugggaucg

SEQ ID NO: 1245995 - RNA, 19 nt, Artificial Sequence
  Description of Artificial Sequence: Synthetic oligonucleotide
uuuccgaaucauggucuuc

SEQ ID NO: 1245996 - RNA, 19 nt, Artificial Sequence
  Description of Artificial Sequence: Synthetic oligonucleotide
ccgggugcugacaaggaac

SEQ ID NO: 1245997 - RNA, 19 nt, Artificial Sequence
  Description of Artificial Sequence: Synthetic oligonucleotide
uggagacauggugcgacuc

SEQ ID NO: 1245998 - RNA, 19 nt, Artificial Sequence
  Description of Artificial Sequence: Synthetic oligonucleotide
ccccagauaaccagagaug

SEQ ID NO: 1245999 - RNA, 19 nt, Artificial Sequence
  Description of Artificial Sequence: Synthetic oligonucleotide
ccuuguuucauaagcaggu

SEQ ID NO: 1246000 - RNA, 19 nt, Artificial Sequence
  Description of Artificial Sequence: Synthetic oligonucleotide
ugggcgagucccucuuggu

SEQ ID NO: 1246001 - RNA, 19 nt, Artificial Sequence
  Description of Artificial Sequence: Synthetic oligonucleotide
acgcagcguccauucaugu

SEQ ID NO: 1246002 - RNA, 19 nt, Artificial Sequence
  Description of Artificial Sequence: Synthetic oligonucleotide
gagcgacucaggugccaug

SEQ ID NO: 1246003 - RNA, 19 nt, Artificial Sequence
  Description of Artificial Sequence: Synthetic oligonucleotide
cgggugcugacaaggaacg

SEQ ID NO: 1246004 - RNA, 19 nt, Artificial Sequence
  Description of Artificial Sequence: Synthetic oligonucleotide
ggaucgcuccugcagggac

SEQ ID NO: 1246005 - RNA, 19 nt, Artificial Sequence
  Description of Artificial Sequence: Synthetic oligonucleotide
ggcaugcgaggucgggugg

SEQ ID NO: 1246006 - RNA, 19 nt, Artificial Sequence
  Description of Artificial Sequence: Synthetic oligonucleotide
cacaccaaagucggcuauc

SEQ ID NO: 1246007 - RNA, 19 nt, Artificial Sequence
  Description of Artificial Sequence: Synthetic oligonucleotide
ggaaaaccagccugucgga

SEQ ID NO: 1246008 - RNA, 19 nt, Artificial Sequence
  Description of Artificial Sequence: Synthetic oligonucleotide
cagcugcacacaguccugc

SEQ ID NO: 1246009 - RNA, 19 nt, Artificial Sequence
  Description of Artificial Sequence: Synthetic oligonucleotide
agucgccaggcugggaaug

SEQ ID NO: 1246010 - RNA, 19 nt, Artificial Sequence
  Description of Artificial Sequence: Synthetic oligonucleotide
cucacaccaaagucggcua

SEQ ID NO: 1246011 - RNA, 19 nt, Artificial Sequence
  Description of Artificial Sequence: Synthetic oligonucleotide
cugaguucucgaccuccuc

SEQ ID NO: 1246012 - RNA, 19 nt, Artificial Sequence
  Description of Artificial Sequence: Synthetic oligonucleotide
gcgagucccucuugguggg

SEQ ID NO: 1246013 - RNA, 19 nt, Artificial Sequence
  Description of Artificial Sequence: Synthetic oligonucleotide
  modified_base (11)..(11): a, c, u, g, unknown or other
gcucauccaunaaagggca

SEQ ID NO: 1246014 - RNA, 19 nt, Artificial Sequence
  Description of Artificial Sequence: Synthetic oligonucleotide
gcguccauucauguccagg

SEQ ID NO: 1246015 - RNA, 19 nt, Artificial Sequence
  Description of Artificial Sequence: Synthetic oligonucleotide
gggcgagucccucuuggug

SEQ ID NO: 1246016 - RNA, 19 nt, Artificial Sequence
  Description of Artificial Sequence: Synthetic oligonucleotide
gucacgcaaacacaugauu

SEQ ID NO: 1246017 - RNA, 19 nt, Artificial Sequence
  Description of Artificial Sequence: Synthetic oligonucleotide
guggaugcuuaaggaugag

SEQ ID NO: 1246018 - RNA, 19 nt, Artificial Sequence
  Description of Artificial Sequence: Synthetic oligonucleotide
agagcgacucaggugccau

SEQ ID NO: 1246019 - RNA, 19 nt, Artificial Sequence
  Description of Artificial Sequence: Synthetic oligonucleotide
gaguucucgaccuccucuu

SEQ ID NO: 1246020 - RNA, 19 nt, Artificial Sequence
  Description of Artificial Sequence: Synthetic oligonucleotide
aacguuccucccgccggcu

SEQ ID NO: 1246021 - RNA, 19 nt, Artificial Sequence
  Description of Artificial Sequence: Synthetic oligonucleotide
cugugggccgccgagggca

SEQ ID NO: 1246022 - RNA, 19 nt, Artificial Sequence
  Description of Artificial Sequence: Synthetic oligonucleotide
gcaucgcugcccuugaacu

SEQ ID NO: 1246023 - RNA, 19 nt, Artificial Sequence
  Description of Artificial Sequence: Synthetic oligonucleotide
guagaggcugugccucaga

SEQ ID NO: 1246024 - RNA, 19 nt, Artificial Sequence
  Description of Artificial Sequence: Synthetic oligonucleotide
aggucgggugguccaggca

SEQ ID NO: 1246025 - RNA, 19 nt, Artificial Sequence
  Description of Artificial Sequence: Synthetic oligonucleotide
cagagaagaucuugcgggu

SEQ ID NO: 1246026 - RNA, 19 nt, Artificial Sequence
  Description of Artificial Sequence: Synthetic oligonucleotide
auggcgaguaggacaggga

SEQ ID NO: 1246027 - RNA, 19 nt, Artificial Sequence
  Description of Artificial Sequence: Synthetic oligonucleotide
cagcguccauucaugucca

SEQ ID NO: 1246028 - RNA, 19 nt, Artificial Sequence
  Description of Artificial Sequence: Synthetic oligonucleotide
aucgcuccugcagggacau

SEQ ID NO: 1246029 - RNA, 19 nt, Artificial Sequence
  Description of Artificial Sequence: Synthetic oligonucleotide
gcgacuccacugugggccg

SEQ ID NO: 1246030 - RNA, 19 nt, Artificial Sequence
  Description of Artificial Sequence: Synthetic oligonucleotide
aaccugugauggagacaug

SEQ ID NO: 1246031 - RNA, 19 nt, Artificial Sequence
  Description of Artificial Sequence: Synthetic oligonucleotide
accaggagguuggaagguu

SEQ ID NO: 1246032 - RNA, 19 nt, Artificial Sequence
  Description of Artificial Sequence: Synthetic oligonucleotide
gagagcgacucaggugcca

SEQ ID NO: 1246033 - RNA, 19 nt, Artificial Sequence
  Description of Artificial Sequence: Synthetic oligonucleotide
cauaagcagguucccgggu

SEQ ID NO: 1246034 - RNA, 19 nt, Artificial Sequence
  Description of Artificial Sequence: Synthetic oligonucleotide
cgacucaggugccaugaag

SEQ ID NO: 1246035 - RNA, 19 nt, Artificial Sequence
  Description of Artificial Sequence: Synthetic oligonucleotide
guuuccgaaucauggucuu

SEQ ID NO: 1246036 - RNA, 19 nt, Artificial Sequence
  Description of Artificial Sequence: Synthetic oligonucleotide
ccaaacauccaaggccuuc

SEQ ID NO: 1246037 - RNA, 19 nt, Artificial Sequence
  Description of Artificial Sequence: Synthetic oligonucleotide
uccguaggacaugcugcua

SEQ ID NO: 1246038 - RNA, 19 nt, Artificial Sequence
  Description of Artificial Sequence: Synthetic oligonucleotide
cguaggacaugcugcuaug

SEQ ID NO: 1246039 - RNA, 19 nt, Artificial Sequence
  Description of Artificial Sequence: Synthetic oligonucleotide
caugcgaggucgggugguc

SEQ ID NO: 1246040 - RNA, 19 nt, Artificial Sequence
  Description of Artificial Sequence: Synthetic oligonucleotide
cacgugcuugguuuccgua

SEQ ID NO: 1246041 - RNA, 19 nt, Artificial Sequence
  Description of Artificial Sequence: Synthetic oligonucleotide
augcugcuauggaaacgca

SEQ ID NO: 1246042 - RNA, 19 nt, Artificial Sequence
  Description of Artificial Sequence: Synthetic oligonucleotide
ccauaucaaaugguccuca

SEQ ID NO: 1246043 - RNA, 19 nt, Artificial Sequence
  Description of Artificial Sequence: Synthetic oligonucleotide
cgcguaguaaguguuguca

SEQ ID NO: 1246044 - RNA, 19 nt, Artificial Sequence
  Description of Artificial Sequence: Synthetic oligonucleotide
ccgugcagggccacacagc

SEQ ID NO: 1246045 - RNA, 19 nt, Artificial Sequence
  Description of Artificial Sequence: Synthetic oligonucleotide
cgaagggaccaccuuucac

SEQ ID NO: 1246046 - RNA, 19 nt, Artificial Sequence
  Description of Artificial Sequence: Synthetic oligonucleotide
cggucacgcaaacacauga

SEQ ID NO: 1246047 - RNA, 19 nt, Artificial Sequence
  Description of Artificial Sequence: Synthetic oligonucleotide
ccggagcuccccaacuuuc

SEQ ID NO: 1246048 - RNA, 19 nt, Artificial Sequence
  Description of Artificial Sequence: Synthetic oligonucleotide
cucuucggucacgcaaaca

SEQ ID NO: 1246049 - RNA, 19 nt, Artificial Sequence
  Description of Artificial Sequence: Synthetic oligonucleotide
aggcuccacacacgugcuu

SEQ ID NO: 1246050 - RNA, 19 nt, Artificial Sequence
  Description of Artificial Sequence: Synthetic oligonucleotide
gcacuuucaucgcguagua

SEQ ID NO: 1246051 - RNA, 19 nt, Artificial Sequence
  Description of Artificial Sequence: Synthetic oligonucleotide
gcguaguaaguguugucau

SEQ ID NO: 1246052 - RNA, 19 nt, Artificial Sequence
  Description of Artificial Sequence: Synthetic oligonucleotide
cagacgcagcguccauuca

SEQ ID NO: 1246053 - RNA, 19 nt, Artificial Sequence
  Description of Artificial Sequence: Synthetic oligonucleotide
cguuuccgaaucauggucu

SEQ ID NO: 1246054 - RNA, 19 nt, Artificial Sequence
  Description of Artificial Sequence: Synthetic oligonucleotide
ucgggugguccaggcaguu

SEQ ID NO: 1246055 - RNA, 19 nt, Artificial Sequence
  Description of Artificial Sequence: Synthetic oligonucleotide
agguucccgggugcugaca

SEQ ID NO: 1246056 - RNA, 19 nt, Artificial Sequence
  Description of Artificial Sequence: Synthetic oligonucleotide
ccucuucggucacgcaaac

SEQ ID NO: 1246057 - RNA, 19 nt, Artificial Sequence
  Description of Artificial Sequence: Synthetic oligonucleotide
gucacacccauggcccaaa

SEQ ID NO: 1246058 - RNA, 19 nt, Artificial Sequence
  Description of Artificial Sequence: Synthetic oligonucleotide
ggcaguuauuccggcucca

SEQ ID NO: 1246059 - RNA, 19 nt, Artificial Sequence
  Description of Artificial Sequence: Synthetic oligonucleotide
cggcuaucuuaaugugccc

SEQ ID NO: 1246060 - RNA, 19 nt, Artificial Sequence
  Description of Artificial Sequence: Synthetic oligonucleotide
ggggccggagcuccccaac

SEQ ID NO: 1246061 - RNA, 19 nt, Artificial Sequence
  Description of Artificial Sequence: Synthetic oligonucleotide
ccgccgagggcacccgggg

SEQ ID NO: 1246062 - RNA, 19 nt, Artificial Sequence
  Description of Artificial Sequence: Synthetic oligonucleotide
cgcagcguccauucauguc

SEQ ID NO: 1246063 - RNA, 19 nt, Artificial Sequence
  Description of Artificial Sequence: Synthetic oligonucleotide
cagccugucggaucagcuu

SEQ ID NO: 1246064 - RNA, 19 nt, Artificial Sequence
  Description of Artificial Sequence: Synthetic oligonucleotide
cguuguaggccagcuugac

SEQ ID NO: 1246065 - RNA, 19 nt, Artificial Sequence
  Description of Artificial Sequence: Synthetic oligonucleotide
ggucacgcaaacacaugau

SEQ ID NO: 1246066 - RNA, 19 nt, Artificial Sequence
  Description of Artificial Sequence: Synthetic oligonucleotide
gcgaggucgggugguccag

SEQ ID NO: 1246067 - RNA, 19 nt, Artificial Sequence
  Description of Artificial Sequence: Synthetic oligonucleotide
cgccggcugcccucaaacg

SEQ ID NO: 1246068 - RNA, 19 nt, Artificial Sequence
  Description of Artificial Sequence: Synthetic oligonucleotide
caggcaugcgaggucgggu

SEQ ID NO: 1246069 - RNA, 19 nt, Artificial Sequence
  Description of Artificial Sequence: Synthetic oligonucleotide
gucgccaggcugggaaugu

SEQ ID NO: 1246070 - RNA, 19 nt, Artificial Sequence
  Description of Artificial Sequence: Synthetic oligonucleotide
ggcacuggccaaagacaaa

SEQ ID NO: 1246071 - RNA, 19 nt, Artificial Sequence
  Description of Artificial Sequence: Synthetic oligonucleotide
gggaucgcuccugcaggga

SEQ ID NO: 1246072 - RNA, 19 nt, Artificial Sequence
  Description of Artificial Sequence: Synthetic oligonucleotide
cuucgcugccuuguuucau

SEQ ID NO: 1246073 - RNA, 19 nt, Artificial Sequence
  Description of Artificial Sequence: Synthetic oligonucleotide
ccgaaucauggucuucacu

SEQ ID NO: 1246074 - RNA, 19 nt, Artificial Sequence
  Description of Artificial Sequence: Synthetic oligonucleotide
ggguucccaaaagagcguu

SEQ ID NO: 1246075 - RNA, 19 nt, Artificial Sequence
  Description of Artificial Sequence: Synthetic oligonucleotide
cagucgccaggcugggaau

SEQ ID NO: 1246076 - RNA, 19 nt, Artificial Sequence
  Description of Artificial Sequence: Synthetic oligonucleotide
cugucggaucagcuucuuu

SEQ ID NO: 1246077 - RNA, 19 nt, Artificial Sequence
  Description of Artificial Sequence: Synthetic oligonucleotide
cguaguaaguguugucauu

SEQ ID NO: 1246078 - RNA, 19 nt, Artificial Sequence
  Description of Artificial Sequence: Synthetic oligonucleotide
cccuggagcugggcgaguc

SEQ ID NO: 1246079 - RNA, 19 nt, Artificial Sequence
  Description of Artificial Sequence: Synthetic oligonucleotide
cgaggucgggugguccagg

SEQ ID NO: 1246080 - RNA, 19 nt, Artificial Sequence
  Description of Artificial Sequence: Synthetic oligonucleotide
ccuucagcguauacugauu

SEQ ID NO: 1246081 - RNA, 19 nt, Artificial Sequence
  Description of Artificial Sequence: Synthetic oligonucleotide
cccgggugcugacaaggaa

SEQ ID NO: 1246082 - RNA, 19 nt, Artificial Sequence
  Description of Artificial Sequence: Synthetic oligonucleotide
gggccggagcuccccaacu

SEQ ID NO: 1246083 - RNA, 19 nt, Artificial Sequence
  Description of Artificial Sequence: Synthetic oligonucleotide
gccggagcuccccaacuuu

SEQ ID NO: 1246084 - RNA, 19 nt, Artificial Sequence
  Description of Artificial Sequence: Synthetic oligonucleotide
cacacucggugaccacaau

SEQ ID NO: 1246085 - RNA, 19 nt, Artificial Sequence
  Description of Artificial Sequence: Synthetic oligonucleotide
gguucccaaaagagcguuu

SEQ ID NO: 1246086 - RNA, 19 nt, Artificial Sequence
  Description of Artificial Sequence: Synthetic oligonucleotide
ucccgccggcugcccucaa

SEQ ID NO: 1246087 - RNA, 19 nt, Artificial Sequence
  Description of Artificial Sequence: Synthetic oligonucleotide
cagccccgugcagggccac

SEQ ID NO: 1246088 - RNA, 19 nt, Artificial Sequence
  Description of Artificial Sequence: Synthetic oligonucleotide
gccugucggaucagcuucu

SEQ ID NO: 1246089 - RNA, 19 nt, Artificial Sequence
  Description of Artificial Sequence: Synthetic oligonucleotide
ggcagacgcagcguccauu

SEQ ID NO: 1246090 - RNA, 19 nt, Artificial Sequence
  Description of Artificial Sequence: Synthetic oligonucleotide
ggccugacucacacucggu

SEQ ID NO: 1246091 - RNA, 19 nt, Artificial Sequence
  Description of Artificial Sequence: Synthetic oligonucleotide
cggguucccaaaagagcgu

SEQ ID NO: 1246092 - RNA, 19 nt, Artificial Sequence
  Description of Artificial Sequence: Synthetic oligonucleotide
ccccgugcagggccacaca

SEQ ID NO: 1246093 - RNA, 19 nt, Artificial Sequence
  Description of Artificial Sequence: Synthetic oligonucleotide
cccaaacauccaaggccuu

SEQ ID NO: 1246094 - RNA, 19 nt, Artificial Sequence
  Description of Artificial Sequence: Synthetic oligonucleotide
gggcagacgcagcguccau

SEQ ID NO: 1246095 - RNA, 19 nt, Artificial Sequence
  Description of Artificial Sequence: Synthetic oligonucleotide
ccugucggaucagcuucuu

SEQ ID NO: 1246096 - RNA, 19 nt, Artificial Sequence
  Description of Artificial Sequence: Synthetic oligonucleotide
aacucuguaaguucaaggc

SEQ ID NO: 1246097 - RNA, 19 nt, Artificial Sequence
  Description of Artificial Sequence: Synthetic oligonucleotide
augggaagagguuaaauac

SEQ ID NO: 1246098 - RNA, 19 nt, Artificial Sequence
  Description of Artificial Sequence: Synthetic oligonucleotide
auuuuaccagcauugaguc

SEQ ID NO: 1246099 - RNA, 19 nt, Artificial Sequence
  Description of Artificial Sequence: Synthetic oligonucleotide
guuaaauacuucuucagac

SEQ ID NO: 1246100 - RNA, 19 nt, Artificial Sequence
  Description of Artificial Sequence: Synthetic oligonucleotide
agagguuaaauacuucuuc

SEQ ID NO: 1246101 - RNA, 19 nt, Artificial Sequence
  Description of Artificial Sequence: Synthetic oligonucleotide
uguagaugacaccaguucc

SEQ ID NO: 1246102 - RNA, 19 nt, Artificial Sequence
  Description of Artificial Sequence: Synthetic oligonucleotide
aacaccugcugugaggucc

SEQ ID NO: 1246103 - RNA, 19 nt, Artificial Sequence
  Description of Artificial Sequence: Synthetic oligonucleotide
uuuaccagcauugagucca

SEQ ID NO: 1246104 - RNA, 19 nt, Artificial Sequence
  Description of Artificial Sequence: Synthetic oligonucleotide
uuugggaaaagcugacugg

SEQ ID NO: 1246105 - RNA, 19 nt, Artificial Sequence
  Description of Artificial Sequence: Synthetic oligonucleotide
uuuaaaagacugaugggaa

SEQ ID NO: 1246106 - RNA, 19 nt, Artificial Sequence
  Description of Artificial Sequence: Synthetic oligonucleotide
auacuauuucuuuggcucc

SEQ ID NO: 1246107 - RNA, 19 nt, Artificial Sequence
  Description of Artificial Sequence: Synthetic oligonucleotide
uuaaauacuucuucagacu

SEQ ID NO: 1246108 - RNA, 19 nt, Artificial Sequence
  Description of Artificial Sequence: Synthetic oligonucleotide
agccggacgaaguaguucc

SEQ ID NO: 1246109 - RNA, 19 nt, Artificial Sequence
  Description of Artificial Sequence: Synthetic oligonucleotide
auuugucccacucgggagc

SEQ ID NO: 1246110 - RNA, 19 nt, Artificial Sequence
  Description of Artificial Sequence: Synthetic oligonucleotide
aguguucugggccacguac

SEQ ID NO: 1246111 - RNA, 19 nt, Artificial Sequence
  Description of Artificial Sequence: Synthetic oligonucleotide
ugauuuuaccagcauugag

SEQ ID NO: 1246112 - RNA, 19 nt, Artificial Sequence
  Description of Artificial Sequence: Synthetic oligonucleotide
ugcgcagccguucugacag

SEQ ID NO: 1246113 - RNA, 19 nt, Artificial Sequence
  Description of Artificial Sequence: Synthetic oligonucleotide
ugaauguucauaggcgugg

SEQ ID NO: 1246114 - RNA, 19 nt, Artificial Sequence
  Description of Artificial Sequence: Synthetic oligonucleotide
ugauuccaggagcaaaggg

SEQ ID NO: 1246115 - RNA, 19 nt, Artificial Sequence
  Description of Artificial Sequence: Synthetic oligonucleotide
aaguaguuccuuucuuguc

SEQ ID NO: 1246116 - RNA, 19 nt, Artificial Sequence
  Description of Artificial Sequence: Synthetic oligonucleotide
cagugaauguucauaggcg

SEQ ID NO: 1246117 - RNA, 19 nt, Artificial Sequence
  Description of Artificial Sequence: Synthetic oligonucleotide
uucugguuccagcugagcc

SEQ ID NO: 1246118 - RNA, 19 nt, Artificial Sequence
  Description of Artificial Sequence: Synthetic oligonucleotide
uucaccgauuccaucaggc

SEQ ID NO: 1246119 - RNA, 19 nt, Artificial Sequence
  Description of Artificial Sequence: Synthetic oligonucleotide
agugaauguucauaggcgu

SEQ ID NO: 1246120 - RNA, 19 nt, Artificial Sequence
  Description of Artificial Sequence: Synthetic oligonucleotide
acaagaugggcugugcccc

SEQ ID NO: 1246121 - RNA, 19 nt, Artificial Sequence
  Description of Artificial Sequence: Synthetic oligonucleotide
ugucuuuaaaagacugaug

SEQ ID NO: 1246122 - RNA, 19 nt, Artificial Sequence
  Description of Artificial Sequence: Synthetic oligonucleotide
cuuuaaaagacugauggga

SEQ ID NO: 1246123 - RNA, 19 nt, Artificial Sequence
  Description of Artificial Sequence: Synthetic oligonucleotide
aagacugaugggaagaggu

SEQ ID NO: 1246124 - RNA, 19 nt, Artificial Sequence
  Description of Artificial Sequence: Synthetic oligonucleotide
gaagguggccugaagaucc

SEQ ID NO: 1246125 - RNA, 19 nt, Artificial Sequence
  Description of Artificial Sequence: Synthetic oligonucleotide
agggguuucucagugauuc

SEQ ID NO: 1246126 - RNA, 19 nt, Artificial Sequence
  Description of Artificial Sequence: Synthetic oligonucleotide
aucaccauuugucccacuc

SEQ ID NO: 1246127 - RNA, 19 nt, Artificial Sequence
  Description of Artificial Sequence: Synthetic oligonucleotide
gacaagaugggcugugccc

SEQ ID NO: 1246128 - RNA, 19 nt, Artificial Sequence
  Description of Artificial Sequence: Synthetic oligonucleotide
uaugcugcgcucaccaucu

SEQ ID NO: 1246129 - RNA, 19 nt, Artificial Sequence
  Description of Artificial Sequence: Synthetic oligonucleotide
uuagugucugcuagaaccu

SEQ ID NO: 1246130 - RNA, 19 nt, Artificial Sequence
  Description of Artificial Sequence: Synthetic oligonucleotide
uguucauaggcgugguugc

SEQ ID NO: 1246131 - RNA, 19 nt, Artificial Sequence
  Description of Artificial Sequence: Synthetic oligonucleotide
guuccuuagugucugcuag

SEQ ID NO: 1246132 - RNA, 19 nt, Artificial Sequence
  Description of Artificial Sequence: Synthetic oligonucleotide
ggauguggcaaucagggcc

SEQ ID NO: 1246133 - RNA, 19 nt, Artificial Sequence
  Description of Artificial Sequence: Synthetic oligonucleotide
gaugggaagagguuaaaua

SEQ ID NO: 1246134 - RNA, 19 nt, Artificial Sequence
  Description of Artificial Sequence: Synthetic oligonucleotide
uccucaaccuggcugcggg

SEQ ID NO: 1246135 - RNA, 19 nt, Artificial Sequence
  Description of Artificial Sequence: Synthetic oligonucleotide
uauuucuuuggcuccagau

SEQ ID NO: 1246136 - RNA, 19 nt, Artificial Sequence
  Description of Artificial Sequence: Synthetic oligonucleotide
uucuucagacucaggguag

SEQ ID NO: 1246137 - RNA, 19 nt, Artificial Sequence
  Description of Artificial Sequence: Synthetic oligonucleotide
aggaauggaugccagagaa

SEQ ID NO: 1246138 - RNA, 19 nt, Artificial Sequence
  Description of Artificial Sequence: Synthetic oligonucleotide
acacgugcuuugcagcugc

SEQ ID NO: 1246139 - RNA, 19 nt, Artificial Sequence
  Description of Artificial Sequence: Synthetic oligonucleotide
gauuuuaccagcauugagu

SEQ ID NO: 1246140 - RNA, 19 nt, Artificial Sequence
  Description of Artificial Sequence: Synthetic oligonucleotide
uggauacuauuucuuuggc

SEQ ID NO: 1246141 - RNA, 19 nt, Artificial Sequence
  Description of Artificial Sequence: Synthetic oligonucleotide
gacuggaguguucugggcc

SEQ ID NO: 1246142 - RNA, 19 nt, Artificial Sequence
  Description of Artificial Sequence: Synthetic oligonucleotide
uggggauguggcaaucagg

SEQ ID NO: 1246143 - RNA, 19 nt, Artificial Sequence
  Description of Artificial Sequence: Synthetic oligonucleotide
aaaagcugacuggagccag

SEQ ID NO: 1246144 - RNA, 19 nt, Artificial Sequence
  Description of Artificial Sequence: Synthetic oligonucleotide
cacaguguggucgagggcc

SEQ ID NO: 1246145 - RNA, 19 nt, Artificial Sequence
  Description of Artificial Sequence: Synthetic oligonucleotide
caccaaucaccauuugucc

SEQ ID NO: 1246146 - RNA, 19 nt, Artificial Sequence
  Description of Artificial Sequence: Synthetic oligonucleotide
caccauuugucccacucgg

SEQ ID NO: 1246147 - RNA, 19 nt, Artificial Sequence
  Description of Artificial Sequence: Synthetic oligonucleotide
ugcgcguacucgcuggccg

SEQ ID NO: 1246148 - RNA, 19 nt, Artificial Sequence
  Description of Artificial Sequence: Synthetic oligonucleotide
ugggcauucugccuagcgc

SEQ ID NO: 1246149 - RNA, 19 nt, Artificial Sequence
  Description of Artificial Sequence: Synthetic oligonucleotide
accaucucacacguggagc

SEQ ID NO: 1246150 - RNA, 19 nt, Artificial Sequence
  Description of Artificial Sequence: Synthetic oligonucleotide
cauugcuagacaugguuuc

SEQ ID NO: 1246151 - RNA, 19 nt, Artificial Sequence
  Description of Artificial Sequence: Synthetic oligonucleotide
gcuagaaccuucucagucg

SEQ ID NO: 1246152 - RNA, 19 nt, Artificial Sequence
  Description of Artificial Sequence: Synthetic oligonucleotide
agucacauccacugccccg

SEQ ID NO: 1246153 - RNA, 19 nt, Artificial Sequence
  Description of Artificial Sequence: Synthetic oligonucleotide
uugggaaaagcugacugga

SEQ ID NO: 1246154 - RNA, 19 nt, Artificial Sequence
  Description of Artificial Sequence: Synthetic oligonucleotide
accgacuggacaccgcugg

SEQ ID NO: 1246155 - RNA, 19 nt, Artificial Sequence
  Description of Artificial Sequence: Synthetic oligonucleotide
cuguagaugacaccaguuc

SEQ ID NO: 1246156 - RNA, 19 nt, Artificial Sequence
  Description of Artificial Sequence: Synthetic oligonucleotide
aguccacuccaccaaucac

SEQ ID NO: 1246157 - RNA, 19 nt, Artificial Sequence
  Description of Artificial Sequence: Synthetic oligonucleotide
ugacagcgagcccagccgg

SEQ ID NO: 1246158 - RNA, 19 nt, Artificial Sequence
  Description of Artificial Sequence: Synthetic oligonucleotide
gcagugagggucuugacgc

SEQ ID NO: 1246159 - RNA, 19 nt, Artificial Sequence
  Description of Artificial Sequence: Synthetic oligonucleotide
cauuugucccacucgggag

SEQ ID NO: 1246160 - RNA, 19 nt, Artificial Sequence
  Description of Artificial Sequence: Synthetic oligonucleotide
ugcugacuuugucaugucc

SEQ ID NO: 1246161 - RNA, 19 nt, Artificial Sequence
  Description of Artificial Sequence: Synthetic oligonucleotide
ugucccauugcuagacaug

SEQ ID NO: 1246162 - RNA, 19 nt, Artificial Sequence
  Description of Artificial Sequence: Synthetic oligonucleotide
ccagugaauguucauaggc

SEQ ID NO: 1246163 - RNA, 19 nt, Artificial Sequence
  Description of Artificial Sequence: Synthetic oligonucleotide
uuuuaccagcauugagucc

SEQ ID NO: 1246164 - RNA, 19 nt, Artificial Sequence
  Description of Artificial Sequence: Synthetic oligonucleotide
ugguuucagcagcaggugc

SEQ ID NO: 1246165 - RNA, 19 nt, Artificial Sequence
  Description of Artificial Sequence: Synthetic oligonucleotide
accgcagccgcagugaggg

SEQ ID NO: 1246166 - RNA, 19 nt, Artificial Sequence
  Description of Artificial Sequence: Synthetic oligonucleotide
uggaggaugggcaggcucu

SEQ ID NO: 1246167 - RNA, 19 nt, Artificial Sequence
  Description of Artificial Sequence: Synthetic oligonucleotide
ggugaugucccucaacaug

SEQ ID NO: 1246168 - RNA, 19 nt, Artificial Sequence
  Description of Artificial Sequence: Synthetic oligonucleotide
auaggcgugguugcgcagc

SEQ ID NO: 1246169 - RNA, 19 nt, Artificial Sequence
  Description of Artificial Sequence: Synthetic oligonucleotide
aggccucugauuuuaccag

SEQ ID NO: 1246170 - RNA, 19 nt, Artificial Sequence
  Description of Artificial Sequence: Synthetic oligonucleotide
gucuugacgccuuucucag

SEQ ID NO: 1246171 - RNA, 19 nt, Artificial Sequence
  Description of Artificial Sequence: Synthetic oligonucleotide
gagugcaugcgugagcugc

SEQ ID NO: 1246172 - RNA, 19 nt, Artificial Sequence
  Description of Artificial Sequence: Synthetic oligonucleotide
ucucagucggcuguuggag

SEQ ID NO: 1246173 - RNA, 19 nt, Artificial Sequence
  Description of Artificial Sequence: Synthetic oligonucleotide
ugggccacguacuccacag

SEQ ID NO: 1246174 - RNA, 19 nt, Artificial Sequence
  Description of Artificial Sequence: Synthetic oligonucleotide
guacuccacaguguggucg

SEQ ID NO: 1246175 - RNA, 19 nt, Artificial Sequence
  Description of Artificial Sequence: Synthetic oligonucleotide
uuggugugcaacaggacuu

SEQ ID NO: 1246176 - RNA, 19 nt, Artificial Sequence
  Description of Artificial Sequence: Synthetic oligonucleotide
ugcuagacaugguuucagc

SEQ ID NO: 1246177 - RNA, 19 nt, Artificial Sequence
  Description of Artificial Sequence: Synthetic oligonucleotide
augagaggcaggcuggcca

SEQ ID NO: 1246178 - RNA, 19 nt, Artificial Sequence
  Description of Artificial Sequence: Synthetic oligonucleotide
agaguccucagguugucga

SEQ ID NO: 1246179 - RNA, 19 nt, Artificial Sequence
  Description of Artificial Sequence: Synthetic oligonucleotide
agaacaccugcugugaggu

SEQ ID NO: 1246180 - RNA, 19 nt, Artificial Sequence
  Description of Artificial Sequence: Synthetic oligonucleotide
ucagucggcuguuggagga

SEQ ID NO: 1246181 - RNA, 19 nt, Artificial Sequence
  Description of Artificial Sequence: Synthetic oligonucleotide
cucaacaugcugagugccc

SEQ ID NO: 1246182 - RNA, 19 nt, Artificial Sequence
  Description of Artificial Sequence: Synthetic oligonucleotide
gaaguaguuccuuucuugu

SEQ ID NO: 1246183 - RNA, 19 nt, Artificial Sequence
  Description of Artificial Sequence: Synthetic oligonucleotide
ggcugugccccacugaccg

SEQ ID NO: 1246184 - RNA, 19 nt, Artificial Sequence
  Description of Artificial Sequence: Synthetic oligonucleotide
cacacacgugcuuugcagc

SEQ ID NO: 1246185 - RNA, 19 nt, Artificial Sequence
  Description of Artificial Sequence: Synthetic oligonucleotide
guuucaccgauuccaucag

SEQ ID NO: 1246186 - RNA, 19 nt, Artificial Sequence
  Description of Artificial Sequence: Synthetic oligonucleotide
guaggugaggacuuggugu

SEQ ID NO: 1246187 - RNA, 19 nt, Artificial Sequence
  Description of Artificial Sequence: Synthetic oligonucleotide
ugcgcucaccaucucacac

SEQ ID NO: 1246188 - RNA, 19 nt, Artificial Sequence
  Description of Artificial Sequence: Synthetic oligonucleotide
ucaggcugagugcaugcgu

SEQ ID NO: 1246189 - RNA, 19 nt, Artificial Sequence
  Description of Artificial Sequence: Synthetic oligonucleotide
acaugcugagugcccgggc

SEQ ID NO: 1246190 - RNA, 19 nt, Artificial Sequence
  Description of Artificial Sequence: Synthetic oligonucleotide
uaucgguccuugguggagg

SEQ ID NO: 1246191 - RNA, 19 nt, Artificial Sequence
  Description of Artificial Sequence: Synthetic oligonucleotide
uucucagucggcuguugga

SEQ ID NO: 1246192 - RNA, 19 nt, Artificial Sequence
  Description of Artificial Sequence: Synthetic oligonucleotide
uaugcgcucucgagucugg

SEQ ID NO: 1246193 - RNA, 19 nt, Artificial Sequence
  Description of Artificial Sequence: Synthetic oligonucleotide
guccacuccaccaaucacc

SEQ ID NO: 1246194 - RNA, 19 nt, Artificial Sequence
  Description of Artificial Sequence: Synthetic oligonucleotide
cuggcuaugcgcucucgag

SEQ ID NO: 1246195 - RNA, 19 nt, Artificial Sequence
  Description of Artificial Sequence: Synthetic oligonucleotide
cauugaguccacuccacca

SEQ ID NO: 1246196 - RNA, 19 nt, Artificial Sequence
  Description of Artificial Sequence: Synthetic oligonucleotide
gaggacuuggugugcaaca

SEQ ID NO: 1246197 - RNA, 19 nt, Artificial Sequence
  Description of Artificial Sequence: Synthetic oligonucleotide
agguugucgaggcagggaa

SEQ ID NO: 1246198 - RNA, 19 nt, Artificial Sequence
  Description of Artificial Sequence: Synthetic oligonucleotide
aagagguuaaauacuucuu

SEQ ID NO: 1246199 - RNA, 19 nt, Artificial Sequence
  Description of Artificial Sequence: Synthetic oligonucleotide
gaaccuucucagucggcug

SEQ ID NO: 1246200 - RNA, 19 nt, Artificial Sequence
  Description of Artificial Sequence: Synthetic oligonucleotide
uccagauacuguagaugac

SEQ ID NO: 1246201 - RNA, 19 nt, Artificial Sequence
  Description of Artificial Sequence: Synthetic oligonucleotide
cucagguugucgaggcagg

SEQ ID NO: 1246202 - RNA, 19 nt, Artificial Sequence
  Description of Artificial Sequence: Synthetic oligonucleotide
cucagucggcuguuggagg

SEQ ID NO: 1246203 - RNA, 19 nt, Artificial Sequence
  Description of Artificial Sequence: Synthetic oligonucleotide
uucauaggcgugguugcgc

SEQ ID NO: 1246204 - RNA, 19 nt, Artificial Sequence
  Description of Artificial Sequence: Synthetic oligonucleotide
acacacgugcuuugcagcu

SEQ ID NO: 1246205 - RNA, 19 nt, Artificial Sequence
  Description of Artificial Sequence: Synthetic oligonucleotide
caucaggcugagugcaugc

SEQ ID NO: 1246206 - RNA, 19 nt, Artificial Sequence
  Description of Artificial Sequence: Synthetic oligonucleotide
ccaccaaucaccauuuguc

SEQ ID NO: 1246207 - RNA, 19 nt, Artificial Sequence
  Description of Artificial Sequence: Synthetic oligonucleotide
agguguaugcugcgcucac

SEQ ID NO: 1246208 - RNA, 19 nt, Artificial Sequence
  Description of Artificial Sequence: Synthetic oligonucleotide
uacuccacaguguggucga

SEQ ID NO: 1246209 - RNA, 19 nt, Artificial Sequence
  Description of Artificial Sequence: Synthetic oligonucleotide
cacacgguccucacauggg

SEQ ID NO: 1246210 - RNA, 19 nt, Artificial Sequence
  Description of Artificial Sequence: Synthetic oligonucleotide
ucugccuagcgcugcgcag

SEQ ID NO: 1246211 - RNA, 19 nt, Artificial Sequence
  Description of Artificial Sequence: Synthetic oligonucleotide
ggguaucgguccuuggugg

SEQ ID NO: 1246212 - RNA, 19 nt, Artificial Sequence
  Description of Artificial Sequence: Synthetic oligonucleotide
gaguccacuccaccaauca

SEQ ID NO: 1246213 - RNA, 19 nt, Artificial Sequence
  Description of Artificial Sequence: Synthetic oligonucleotide
caaucuguccagcccucgg

SEQ ID NO: 1246214 - RNA, 19 nt, Artificial Sequence
  Description of Artificial Sequence: Synthetic oligonucleotide
caggcugagugcaugcgug

SEQ ID NO: 1246215 - RNA, 19 nt, Artificial Sequence
  Description of Artificial Sequence: Synthetic oligonucleotide
caggccucugauuuuacca

SEQ ID NO: 1246216 - RNA, 19 nt, Artificial Sequence
  Description of Artificial Sequence: Synthetic oligonucleotide
auccgucaggggcaggcgg

SEQ ID NO: 1246217 - RNA, 19 nt, Artificial Sequence
  Description of Artificial Sequence: Synthetic oligonucleotide
uuccuuagugucugcuaga

SEQ ID NO: 1246218 - RNA, 19 nt, Artificial Sequence
  Description of Artificial Sequence: Synthetic oligonucleotide
aguguggucgagggccucc

SEQ ID NO: 1246219 - RNA, 19 nt, Artificial Sequence
  Description of Artificial Sequence: Synthetic oligonucleotide
acguacuccacaguguggu

SEQ ID NO: 1246220 - RNA, 19 nt, Artificial Sequence
  Description of Artificial Sequence: Synthetic oligonucleotide
gcccagugaauguucauag

SEQ ID NO: 1246221 - RNA, 19 nt, Artificial Sequence
  Description of Artificial Sequence: Synthetic oligonucleotide
ugacgccuuucucagccac

SEQ ID NO: 1246222 - RNA, 19 nt, Artificial Sequence
  Description of Artificial Sequence: Synthetic oligonucleotide
acauccacugccccgguua

SEQ ID NO: 1246223 - RNA, 19 nt, Artificial Sequence
  Description of Artificial Sequence: Synthetic oligonucleotide
accgauuccaucaggcuga

SEQ ID NO: 1246224 - RNA, 19 nt, Artificial Sequence
  Description of Artificial Sequence: Synthetic oligonucleotide
ccagcauugaguccacucc

SEQ ID NO: 1246225 - RNA, 19 nt, Artificial Sequence
  Description of Artificial Sequence: Synthetic oligonucleotide
auugcuagacaugguuuca

SEQ ID NO: 1246226 - RNA, 19 nt, Artificial Sequence
  Description of Artificial Sequence: Synthetic oligonucleotide
gugaauguucauaggcgug

SEQ ID NO: 1246227 - RNA, 19 nt, Artificial Sequence
  Description of Artificial Sequence: Synthetic oligonucleotide
cagccguucugacagcgag

SEQ ID NO: 1246228 - RNA, 19 nt, Artificial Sequence
  Description of Artificial Sequence: Synthetic oligonucleotide
cagacucaggguaggugag

SEQ ID NO: 1246229 - RNA, 19 nt, Artificial Sequence
  Description of Artificial Sequence: Synthetic oligonucleotide
gguaggugaggacuuggug

SEQ ID NO: 1246230 - RNA, 19 nt, Artificial Sequence
  Description of Artificial Sequence: Synthetic oligonucleotide
aguuccuuagugucugcua

SEQ ID NO: 1246231 - RNA, 19 nt, Artificial Sequence
  Description of Artificial Sequence: Synthetic oligonucleotide
gacgaaguaguuccuuucu

SEQ ID NO: 1246232 - RNA, 19 nt, Artificial Sequence
  Description of Artificial Sequence: Synthetic oligonucleotide
aagaugggcugugccccac

SEQ ID NO: 1246233 - RNA, 19 nt, Artificial Sequence
  Description of Artificial Sequence: Synthetic oligonucleotide
ugcucccugauguggccag

SEQ ID NO: 1246234 - RNA, 19 nt, Artificial Sequence
  Description of Artificial Sequence: Synthetic oligonucleotide
augcgguccaccacgcugg

SEQ ID NO: 1246235 - RNA, 19 nt, Artificial Sequence
  Description of Artificial Sequence: Synthetic oligonucleotide
ugaggacuuggugugcaac

SEQ ID NO: 1246236 - RNA, 19 nt, Artificial Sequence
  Description of Artificial Sequence: Synthetic oligonucleotide
guucauaggcgugguugcg

SEQ ID NO: 1246237 - RNA, 19 nt, Artificial Sequence
  Description of Artificial Sequence: Synthetic oligonucleotide
ugcagugccucaugggcau

SEQ ID NO: 1246238 - RNA, 19 nt, Artificial Sequence
  Description of Artificial Sequence: Synthetic oligonucleotide
cucgagucugggcaagaac

SEQ ID NO: 1246239 - RNA, 19 nt, Artificial Sequence
  Description of Artificial Sequence: Synthetic oligonucleotide
uuggacaagaugggcugug

SEQ ID NO: 1246240 - RNA, 19 nt, Artificial Sequence
  Description of Artificial Sequence: Synthetic oligonucleotide
aucaggcugagugcaugcg

SEQ ID NO: 1246241 - RNA, 19 nt, Artificial Sequence
  Description of Artificial Sequence: Synthetic oligonucleotide
uguggucgagggccucccg

SEQ ID NO: 1246242 - RNA, 19 nt, Artificial Sequence
  Description of Artificial Sequence: Synthetic oligonucleotide
gagaagguggccugaagau

SEQ ID NO: 1246243 - RNA, 19 nt, Artificial Sequence
  Description of Artificial Sequence: Synthetic oligonucleotide
ugcgcucucgagucugggc

SEQ ID NO: 1246244 - RNA, 19 nt, Artificial Sequence
  Description of Artificial Sequence: Synthetic oligonucleotide
ucaaccuggcugcgggccu

SEQ ID NO: 1246245 - RNA, 19 nt, Artificial Sequence
  Description of Artificial Sequence: Synthetic oligonucleotide
cacugccccgguuacccgg

SEQ ID NO: 1246246 - RNA, 19 nt, Artificial Sequence
  Description of Artificial Sequence: Synthetic oligonucleotide
ugagaggcaggcuggccau

SEQ ID NO: 1246247 - RNA, 19 nt, Artificial Sequence
  Description of Artificial Sequence: Synthetic oligonucleotide
cucaaccuggcugcgggcc

SEQ ID NO: 1246248 - RNA, 19 nt, Artificial Sequence
  Description of Artificial Sequence: Synthetic oligonucleotide
uaggcgugguugcgcagcc

SEQ ID NO: 1246249 - RNA, 19 nt, Artificial Sequence
  Description of Artificial Sequence: Synthetic oligonucleotide
ggccacguacuccacagug

SEQ ID NO: 1246250 - RNA, 19 nt, Artificial Sequence
  Description of Artificial Sequence: Synthetic oligonucleotide
gaugagaggcaggcuggcc

SEQ ID NO: 1246251 - RNA, 19 nt, Artificial Sequence
  Description of Artificial Sequence: Synthetic oligonucleotide
acgaaguaguuccuuucuu

SEQ ID NO: 1246252 - RNA, 19 nt, Artificial Sequence
  Description of Artificial Sequence: Synthetic oligonucleotide
gggguaucgguccuuggug

SEQ ID NO: 1246253 - RNA, 19 nt, Artificial Sequence
  Description of Artificial Sequence: Synthetic oligonucleotide
uccgucaggggcaggcggu

SEQ ID NO: 1246254 - RNA, 19 nt, Artificial Sequence
  Description of Artificial Sequence: Synthetic oligonucleotide
gcagcuugcccagugaaug

SEQ ID NO: 1246255 - RNA, 19 nt, Artificial Sequence
  Description of Artificial Sequence: Synthetic oligonucleotide
augacaccaguuccuuagu

SEQ ID NO: 1246256 - RNA, 19 nt, Artificial Sequence
  Description of Artificial Sequence: Synthetic oligonucleotide
gagcccucuggggaugugg

SEQ ID NO: 1246257 - RNA, 19 nt, Artificial Sequence
  Description of Artificial Sequence: Synthetic oligonucleotide
ggacaagaugggcugugcc

SEQ ID NO: 1246258 - RNA, 19 nt, Artificial Sequence
  Description of Artificial Sequence: Synthetic oligonucleotide
gacucaggguaggugagga

SEQ ID NO: 1246259 - RNA, 19 nt, Artificial Sequence
  Description of Artificial Sequence: Synthetic oligonucleotide
ugcccagugaauguucaua

SEQ ID NO: 1246260 - RNA, 19 nt, Artificial Sequence
  Description of Artificial Sequence: Synthetic oligonucleotide
ucggcuguuggaggauggg

SEQ ID NO: 1246261 - RNA, 19 nt, Artificial Sequence
  Description of Artificial Sequence: Synthetic oligonucleotide
aaucaccauuugucccacu

SEQ ID NO: 1246262 - RNA, 19 nt, Artificial Sequence
  Description of Artificial Sequence: Synthetic oligonucleotide
uuaccagcauugaguccac

SEQ ID NO: 1246263 - RNA, 19 nt, Artificial Sequence
  Description of Artificial Sequence: Synthetic oligonucleotide
agugcccgggccuccaccu

SEQ ID NO: 1246264 - RNA, 19 nt, Artificial Sequence
  Description of Artificial Sequence: Synthetic oligonucleotide
acugaugggaagagguuaa

SEQ ID NO: 1246265 - RNA, 19 nt, Artificial Sequence
  Description of Artificial Sequence: Synthetic oligonucleotide
ugcgcagcuugcccaguga

SEQ ID NO: 1246266 - RNA, 19 nt, Artificial Sequence
  Description of Artificial Sequence: Synthetic oligonucleotide
ggcuaugcgcucucgaguc

SEQ ID NO: 1246267 - RNA, 19 nt, Artificial Sequence
  Description of Artificial Sequence: Synthetic oligonucleotide
cucaugggcauucugccua

SEQ ID NO: 1246268 - RNA, 19 nt, Artificial Sequence
  Description of Artificial Sequence: Synthetic oligonucleotide
aggugaggacuuggugugc

SEQ ID NO: 1246269 - RNA, 19 nt, Artificial Sequence
  Description of Artificial Sequence: Synthetic oligonucleotide
gcgcucaccaucucacacg

SEQ ID NO: 1246270 - RNA, 19 nt, Artificial Sequence
  Description of Artificial Sequence: Synthetic oligonucleotide
accccuaucccugcuucuc

SEQ ID NO: 1246271 - RNA, 19 nt, Artificial Sequence
  Description of Artificial Sequence: Synthetic oligonucleotide
agccguucugacagcgagc

SEQ ID NO: 1246272 - RNA, 19 nt, Artificial Sequence
  Description of Artificial Sequence: Synthetic oligonucleotide
ucccugauguggccaggca

SEQ ID NO: 1246273 - RNA, 19 nt, Artificial Sequence
  Description of Artificial Sequence: Synthetic oligonucleotide
cuaugcgcucucgagucug

SEQ ID NO: 1246274 - RNA, 19 nt, Artificial Sequence
  Description of Artificial Sequence: Synthetic oligonucleotide
gauccucaaccuggcugcg

SEQ ID NO: 1246275 - RNA, 19 nt, Artificial Sequence
  Description of Artificial Sequence: Synthetic oligonucleotide
acuguagaugacaccaguu

SEQ ID NO: 1246276 - RNA, 19 nt, Artificial Sequence
  Description of Artificial Sequence: Synthetic oligonucleotide
guaucgguccuugguggag

SEQ ID NO: 1246277 - RNA, 19 nt, Artificial Sequence
  Description of Artificial Sequence: Synthetic oligonucleotide
uugucgaggcagggaaacc

SEQ ID NO: 1246278 - RNA, 19 nt, Artificial Sequence
  Description of Artificial Sequence: Synthetic oligonucleotide
gcugacuuugucaugucca

SEQ ID NO: 1246279 - RNA, 19 nt, Artificial Sequence
  Description of Artificial Sequence: Synthetic oligonucleotide
uugcgcagccguucugaca

SEQ ID NO: 1246280 - RNA, 19 nt, Artificial Sequence
  Description of Artificial Sequence: Synthetic oligonucleotide
cugauuuuaccagcauuga

SEQ ID NO: 1246281 - RNA, 19 nt, Artificial Sequence
  Description of Artificial Sequence: Synthetic oligonucleotide
ccgagucacauccacugcc

SEQ ID NO: 1246282 - RNA, 19 nt, Artificial Sequence
  Description of Artificial Sequence: Synthetic oligonucleotide
ugucugcuagaaccuucuc

SEQ ID NO: 1246283 - RNA, 19 nt, Artificial Sequence
  Description of Artificial Sequence: Synthetic oligonucleotide
agugagggucuugacgccu

SEQ ID NO: 1246284 - RNA, 19 nt, Artificial Sequence
  Description of Artificial Sequence: Synthetic oligonucleotide
ucggugcgcguacucgcug

SEQ ID NO: 1246285 - RNA, 19 nt, Artificial Sequence
  Description of Artificial Sequence: Synthetic oligonucleotide
cagugagggucuugacgcc

SEQ ID NO: 1246286 - RNA, 19 nt, Artificial Sequence
  Description of Artificial Sequence: Synthetic oligonucleotide
cccaggaccgacuggacac

SEQ ID NO: 1246287 - RNA, 19 nt, Artificial Sequence
  Description of Artificial Sequence: Synthetic oligonucleotide
guagaugacaccaguuccu

SEQ ID NO: 1246288 - RNA, 19 nt, Artificial Sequence
  Description of Artificial Sequence: Synthetic oligonucleotide
uggaguguucugggccacg

SEQ ID NO: 1246289 - RNA, 19 nt, Artificial Sequence
  Description of Artificial Sequence: Synthetic oligonucleotide
uacucgcuggccgaagcaa

SEQ ID NO: 1246290 - RNA, 19 nt, Artificial Sequence
  Description of Artificial Sequence: Synthetic oligonucleotide
cuggaaggaauggaugcca

SEQ ID NO: 1246291 - RNA, 19 nt, Artificial Sequence
  Description of Artificial Sequence: Synthetic oligonucleotide
gagguguaugcugcgcuca

SEQ ID NO: 1246292 - RNA, 19 nt, Artificial Sequence
  Description of Artificial Sequence: Synthetic oligonucleotide
ugagugcaugcgugagcug

SEQ ID NO: 1246293 - RNA, 19 nt, Artificial Sequence
  Description of Artificial Sequence: Synthetic oligonucleotide
ccaaucaccauuuguccca

SEQ ID NO: 1246294 - RNA, 19 nt, Artificial Sequence
  Description of Artificial Sequence: Synthetic oligonucleotide
gcauugaguccacuccacc

SEQ ID NO: 1246295 - RNA, 19 nt, Artificial Sequence
  Description of Artificial Sequence: Synthetic oligonucleotide
ggaauggaugccagagaag

SEQ ID NO: 1246296 - RNA, 19 nt, Artificial Sequence
  Description of Artificial Sequence: Synthetic oligonucleotide
uggacaccgcuggucacug

SEQ ID NO: 1246297 - RNA, 19 nt, Artificial Sequence
  Description of Artificial Sequence: Synthetic oligonucleotide
cucgcuggccgaagcaauc

SEQ ID NO: 1246298 - RNA, 19 nt, Artificial Sequence
  Description of Artificial Sequence: Synthetic oligonucleotide
gccguucugacagcgagcc

SEQ ID NO: 1246299 - RNA, 19 nt, Artificial Sequence
  Description of Artificial Sequence: Synthetic oligonucleotide
gucggcuguuggaggaugg

SEQ ID NO: 1246300 - RNA, 19 nt, Artificial Sequence
  Description of Artificial Sequence: Synthetic oligonucleotide
cccagugaauguucauagg

SEQ ID NO: 1246301 - RNA, 19 nt, Artificial Sequence
  Description of Artificial Sequence: Synthetic oligonucleotide
aggcugagugcaugcguga

SEQ ID NO: 1246302 - RNA, 19 nt, Artificial Sequence
  Description of Artificial Sequence: Synthetic oligonucleotide
cugggugaugucccucaac

SEQ ID NO: 1246303 - RNA, 19 nt, Artificial Sequence
  Description of Artificial Sequence: Synthetic oligonucleotide
ggauacuauuucuuuggcu

SEQ ID NO: 1246304 - RNA, 19 nt, Artificial Sequence
  Description of Artificial Sequence: Synthetic oligonucleotide
ggagcugaugagaggcagg

SEQ ID NO: 1246305 - RNA, 19 nt, Artificial Sequence
  Description of Artificial Sequence: Synthetic oligonucleotide
cagaguccucagguugucg

SEQ ID NO: 1246306 - RNA, 19 nt, Artificial Sequence
  Description of Artificial Sequence: Synthetic oligonucleotide
gagugcccgggccuccacc

SEQ ID NO: 1246307 - RNA, 19 nt, Artificial Sequence
  Description of Artificial Sequence: Synthetic oligonucleotide
aucgguccuugguggaggu

SEQ ID NO: 1246308 - RNA, 19 nt, Artificial Sequence
  Description of Artificial Sequence: Synthetic oligonucleotide
auacuucuucagacucagg

SEQ ID NO: 1246309 - RNA, 19 nt, Artificial Sequence
  Description of Artificial Sequence: Synthetic oligonucleotide
ucucgagucugggcaagaa

SEQ ID NO: 1246310 - RNA, 19 nt, Artificial Sequence
  Description of Artificial Sequence: Synthetic oligonucleotide
ugccuagcgcugcgcagcu

SEQ ID NO: 1246311 - RNA, 19 nt, Artificial Sequence
  Description of Artificial Sequence: Synthetic oligonucleotide
uguccgcccaggccucuga

SEQ ID NO: 1246312 - RNA, 19 nt, Artificial Sequence
  Description of Artificial Sequence: Synthetic oligonucleotide
guugcgcagccguucugac

SEQ ID NO: 1246313 - RNA, 19 nt, Artificial Sequence
  Description of Artificial Sequence: Synthetic oligonucleotide
ucgcuggccgaagcaaucu

SEQ ID NO: 1246314 - RNA, 19 nt, Artificial Sequence
  Description of Artificial Sequence: Synthetic oligonucleotide
gcugagugcaugcgugagc

SEQ ID NO: 1246315 - RNA, 19 nt, Artificial Sequence
  Description of Artificial Sequence: Synthetic oligonucleotide
ccccgagucacauccacug

SEQ ID NO: 1246316 - RNA, 19 nt, Artificial Sequence
  Description of Artificial Sequence: Synthetic oligonucleotide
guacucgcuggccgaagca

SEQ ID NO: 1246317 - RNA, 19 nt, Artificial Sequence
  Description of Artificial Sequence: Synthetic oligonucleotide
cccucaacaugcugagugc

SEQ ID NO: 1246318 - RNA, 19 nt, Artificial Sequence
  Description of Artificial Sequence: Synthetic oligonucleotide
ugguugcgcagccguucug

SEQ ID NO: 1246319 - RNA, 19 nt, Artificial Sequence
  Description of Artificial Sequence: Synthetic oligonucleotide
gccccgguuacccgggugg

SEQ ID NO: 1246320 - RNA, 19 nt, Artificial Sequence
  Description of Artificial Sequence: Synthetic oligonucleotide
caugugacuggaguguucu

SEQ ID NO: 1246321 - RNA, 19 nt, Artificial Sequence
  Description of Artificial Sequence: Synthetic oligonucleotide
ccuagcgcugcgcagcuug

SEQ ID NO: 1246322 - RNA, 19 nt, Artificial Sequence
  Description of Artificial Sequence: Synthetic oligonucleotide
acaggacuuuugggaaaag

SEQ ID NO: 1246323 - RNA, 19 nt, Artificial Sequence
  Description of Artificial Sequence: Synthetic oligonucleotide
ggaaggaauggaugccaga

SEQ ID NO: 1246324 - RNA, 19 nt, Artificial Sequence
  Description of Artificial Sequence: Synthetic oligonucleotide
cacugcugacuuugucaug

SEQ ID NO: 1246325 - RNA, 19 nt, Artificial Sequence
  Description of Artificial Sequence: Synthetic oligonucleotide
ucccacucgggagcccagg

SEQ ID NO: 1246326 - RNA, 19 nt, Artificial Sequence
  Description of Artificial Sequence: Synthetic oligonucleotide
cacacacgguccucacaug

SEQ ID NO: 1246327 - RNA, 19 nt, Artificial Sequence
  Description of Artificial Sequence: Synthetic oligonucleotide
cauccgucaggggcaggcg

SEQ ID NO: 1246328 - RNA, 19 nt, Artificial Sequence
  Description of Artificial Sequence: Synthetic oligonucleotide
cugcaaucuguccagcccu

SEQ ID NO: 1246329 - RNA, 19 nt, Artificial Sequence
  Description of Artificial Sequence: Synthetic oligonucleotide
ugccccgguuacccgggug

SEQ ID NO: 1246330 - RNA, 19 nt, Artificial Sequence
  Description of Artificial Sequence: Synthetic oligonucleotide
uguccagcccucggugcgc

SEQ ID NO: 1246331 - RNA, 19 nt, Artificial Sequence
  Description of Artificial Sequence: Synthetic oligonucleotide
cuggucacugagcuggaua

SEQ ID NO: 1246332 - RNA, 19 nt, Artificial Sequence
  Description of Artificial Sequence: Synthetic oligonucleotide
uggugugcaacaggacuuu

SEQ ID NO: 1246333 - RNA, 19 nt, Artificial Sequence
  Description of Artificial Sequence: Synthetic oligonucleotide
cacuccaccaaucaccauu

SEQ ID NO: 1246334 - RNA, 19 nt, Artificial Sequence
  Description of Artificial Sequence: Synthetic oligonucleotide
ccucaacaugcugagugcc

SEQ ID NO: 1246335 - RNA, 19 nt, Artificial Sequence
  Description of Artificial Sequence: Synthetic oligonucleotide
ggagguguaugcugcgcuc

SEQ ID NO: 1246336 - RNA, 19 nt, Artificial Sequence
  Description of Artificial Sequence: Synthetic oligonucleotide
agugcaugcgugagcugcu

SEQ ID NO: 1246337 - RNA, 19 nt, Artificial Sequence
  Description of Artificial Sequence: Synthetic oligonucleotide
aggcucuccugcaaucugu

SEQ ID NO: 1246338 - RNA, 19 nt, Artificial Sequence
  Description of Artificial Sequence: Synthetic oligonucleotide
uuacccggguggccacugu

SEQ ID NO: 1246339 - RNA, 19 nt, Artificial Sequence
  Description of Artificial Sequence: Synthetic oligonucleotide
gguaucgguccuuggugga

SEQ ID NO: 1246340 - RNA, 19 nt, Artificial Sequence
  Description of Artificial Sequence: Synthetic oligonucleotide
gcgcucucgagucugggca

SEQ ID NO: 1246341 - RNA, 19 nt, Artificial Sequence
  Description of Artificial Sequence: Synthetic oligonucleotide
acgugcuuugcagcugcug

SEQ ID NO: 1246342 - RNA, 19 nt, Artificial Sequence
  Description of Artificial Sequence: Synthetic oligonucleotide
ugagggucuugacgccuuu

SEQ ID NO: 1246343 - RNA, 19 nt, Artificial Sequence
  Description of Artificial Sequence: Synthetic oligonucleotide
agacugaugggaagagguu

SEQ ID NO: 1246344 - RNA, 19 nt, Artificial Sequence
  Description of Artificial Sequence: Synthetic oligonucleotide
uagugucugcuagaaccuu

SEQ ID NO: 1246345 - RNA, 19 nt, Artificial Sequence
  Description of Artificial Sequence: Synthetic oligonucleotide
gaccgacuggacaccgcug

SEQ ID NO: 1246346 - RNA, 19 nt, Artificial Sequence
  Description of Artificial Sequence: Synthetic oligonucleotide
ccaggccucugauuuuacc

SEQ ID NO: 1246347 - RNA, 19 nt, Artificial Sequence
  Description of Artificial Sequence: Synthetic oligonucleotide
augcgcucucgagucuggg

SEQ ID NO: 1246348 - RNA, 19 nt, Artificial Sequence
  Description of Artificial Sequence: Synthetic oligonucleotide
caggcgguuguccgcccag

SEQ ID NO: 1246349 - RNA, 19 nt, Artificial Sequence
  Description of Artificial Sequence: Synthetic oligonucleotide
guuacccggguggccacug

SEQ ID NO: 1246350 - RNA, 19 nt, Artificial Sequence
  Description of Artificial Sequence: Synthetic oligonucleotide
ccgggcucuggcuaugcgc

SEQ ID NO: 1246351 - RNA, 19 nt, Artificial Sequence
  Description of Artificial Sequence: Synthetic oligonucleotide
agcccagccggacgaagua

SEQ ID NO: 1246352 - RNA, 19 nt, Artificial Sequence
  Description of Artificial Sequence: Synthetic oligonucleotide
cugcgcagcuugcccagug

SEQ ID NO: 1246353 - RNA, 19 nt, Artificial Sequence
  Description of Artificial Sequence: Synthetic oligonucleotide
cugcugacuuugucauguc

SEQ ID NO: 1246354 - RNA, 19 nt, Artificial Sequence
  Description of Artificial Sequence: Synthetic oligonucleotide
gcaaucuguccagcccucg

SEQ ID NO: 1246355 - RNA, 19 nt, Artificial Sequence
  Description of Artificial Sequence: Synthetic oligonucleotide
cagccggacgaaguaguuc

SEQ ID NO: 1246356 - RNA, 19 nt, Artificial Sequence
  Description of Artificial Sequence: Synthetic oligonucleotide
cucuggcuaugcgcucucg

SEQ ID NO: 1246357 - RNA, 19 nt, Artificial Sequence
  Description of Artificial Sequence: Synthetic oligonucleotide
ggcugagugcaugcgugag

SEQ ID NO: 1246358 - RNA, 19 nt, Artificial Sequence
  Description of Artificial Sequence: Synthetic oligonucleotide
gggagcccaggaccgacug

SEQ ID NO: 1246359 - RNA, 19 nt, Artificial Sequence
  Description of Artificial Sequence: Synthetic oligonucleotide
ucgggagcccaggaccgac

SEQ ID NO: 1246360 - RNA, 19 nt, Artificial Sequence
  Description of Artificial Sequence: Synthetic oligonucleotide
acaguguggucgagggccu

SEQ ID NO: 1246361 - RNA, 19 nt, Artificial Sequence
  Description of Artificial Sequence: Synthetic oligonucleotide
gguguaugcugcgcucacc

SEQ ID NO: 1246362 - RNA, 19 nt, Artificial Sequence
  Description of Artificial Sequence: Synthetic oligonucleotide
aggcgguuguccgcccagg

SEQ ID NO: 1246363 - RNA, 19 nt, Artificial Sequence
  Description of Artificial Sequence: Synthetic oligonucleotide
ggugaggacuuggugugca

SEQ ID NO: 1246364 - RNA, 19 nt, Artificial Sequence
  Description of Artificial Sequence: Synthetic oligonucleotide
caccgcuggucacugcuga

SEQ ID NO: 1246365 - RNA, 19 nt, Artificial Sequence
  Description of Artificial Sequence: Synthetic oligonucleotide
ccuuagugucugcuagaac

SEQ ID NO: 1246366 - RNA, 19 nt, Artificial Sequence
  Description of Artificial Sequence: Synthetic oligonucleotide
gguugcgcagccguucuga

SEQ ID NO: 1246367 - RNA, 19 nt, Artificial Sequence
  Description of Artificial Sequence: Synthetic oligonucleotide
cugugccccacugaccgca

SEQ ID NO: 1246368 - RNA, 19 nt, Artificial Sequence
  Description of Artificial Sequence: Synthetic oligonucleotide
agcccaggaccgacuggac

SEQ ID NO: 1246369 - RNA, 19 nt, Artificial Sequence
  Description of Artificial Sequence: Synthetic oligonucleotide
ggcgguuguccgcccaggc

SEQ ID NO: 1246370 - RNA, 19 nt, Artificial Sequence
  Description of Artificial Sequence: Synthetic oligonucleotide
acucgcuggccgaagcaau

SEQ ID NO: 1246371 - RNA, 19 nt, Artificial Sequence
  Description of Artificial Sequence: Synthetic oligonucleotide
guccagcccucggugcgcg

SEQ ID NO: 1246372 - RNA, 19 nt, Artificial Sequence
  Description of Artificial Sequence: Synthetic oligonucleotide
uccgcccaggccucugauu

SEQ ID NO: 1246373 - RNA, 19 nt, Artificial Sequence
  Description of Artificial Sequence: Synthetic oligonucleotide
cugaccgcagccgcaguga

SEQ ID NO: 1246374 - RNA, 19 nt, Artificial Sequence
  Description of Artificial Sequence: Synthetic oligonucleotide
ggugcgcguacucgcuggc

SEQ ID NO: 1246375 - RNA, 19 nt, Artificial Sequence
  Description of Artificial Sequence: Synthetic oligonucleotide
gugaggacuuggugugcaa

SEQ ID NO: 1246376 - RNA, 19 nt, Artificial Sequence
  Description of Artificial Sequence: Synthetic oligonucleotide
gccucugauuuuaccagca

SEQ ID NO: 1246377 - RNA, 19 nt, Artificial Sequence
  Description of Artificial Sequence: Synthetic oligonucleotide
cgggcccugaccccuaucc

SEQ ID NO: 1246378 - RNA, 19 nt, Artificial Sequence
  Description of Artificial Sequence: Synthetic oligonucleotide
cccgagucacauccacugc

SEQ ID NO: 1246379 - RNA, 19 nt, Artificial Sequence
  Description of Artificial Sequence: Synthetic oligonucleotide
gugcaugcgugagcugcug

SEQ ID NO: 1246380 - RNA, 19 nt, Artificial Sequence
  Description of Artificial Sequence: Synthetic oligonucleotide
ccccuaucccugcuucucc

SEQ ID NO: 1246381 - RNA, 19 nt, Artificial Sequence
  Description of Artificial Sequence: Synthetic oligonucleotide
cugcauccgucaggggcag

SEQ ID NO: 1246382 - RNA, 19 nt, Artificial Sequence
  Description of Artificial Sequence: Synthetic oligonucleotide
ggggcaggcgguuguccgc

SEQ ID NO: 1246383 - RNA, 19 nt, Artificial Sequence
  Description of Artificial Sequence: Synthetic oligonucleotide
cguacucgcuggccgaagc

SEQ ID NO: 1246384 - RNA, 19 nt, Artificial Sequence
  Description of Artificial Sequence: Synthetic oligonucleotide
gggcccugaccccuauccc

SEQ ID NO: 1246385 - RNA, 19 nt, Artificial Sequence
  Description of Artificial Sequence: Synthetic oligonucleotide
acccggguggccacugugu

SEQ ID NO: 1246386 - RNA, 19 nt, Artificial Sequence
  Description of Artificial Sequence: Synthetic oligonucleotide
cugagccacauguggugua

SEQ ID NO: 1246387 - RNA, 19 nt, Artificial Sequence
  Description of Artificial Sequence: Synthetic oligonucleotide
cugggccacguacuccaca

SEQ ID NO: 1246388 - RNA, 19 nt, Artificial Sequence
  Description of Artificial Sequence: Synthetic oligonucleotide
cagcccucggugcgcguac

SEQ ID NO: 1246389 - RNA, 19 nt, Artificial Sequence
  Description of Artificial Sequence: Synthetic oligonucleotide
uaccagcauugaguccacu

SEQ ID NO: 1246390 - RNA, 19 nt, Artificial Sequence
  Description of Artificial Sequence: Synthetic oligonucleotide
gaccccuaucccugcuucu

SEQ ID NO: 1246391 - RNA, 19 nt, Artificial Sequence
  Description of Artificial Sequence: Synthetic oligonucleotide
uuguccgcccaggccucug

SEQ ID NO: 1246392 - RNA, 19 nt, Artificial Sequence
  Description of Artificial Sequence: Synthetic oligonucleotide
ccaugugacuggaguguuc

SEQ ID NO: 1246393 - RNA, 19 nt, Artificial Sequence
  Description of Artificial Sequence: Synthetic oligonucleotide
ggaccgacuggacaccgcu

SEQ ID NO: 1246394 - RNA, 19 nt, Artificial Sequence
  Description of Artificial Sequence: Synthetic oligonucleotide
caugcccuguuucaccgau

SEQ ID NO: 1246395 - RNA, 19 nt, Artificial Sequence
  Description of Artificial Sequence: Synthetic oligonucleotide
gugcgcguacucgcuggcc

SEQ ID NO: 1246396 - RNA, 19 nt, Artificial Sequence
  Description of Artificial Sequence: Synthetic oligonucleotide
gguuuagcugcauccuuuu

SEQ ID NO: 1246397 - RNA, 19 nt, Artificial Sequence
  Description of Artificial Sequence: Synthetic oligonucleotide
gccgcagugagggucuuga

SEQ ID NO: 1246398 - RNA, 19 nt, Artificial Sequence
  Description of Artificial Sequence: Synthetic oligonucleotide
cagcuugcccagugaaugu

SEQ ID NO: 1246399 - RNA, 19 nt, Artificial Sequence
  Description of Artificial Sequence: Synthetic oligonucleotide
gugccccacugaccgcagc

SEQ ID NO: 1246400 - RNA, 19 nt, Artificial Sequence
  Description of Artificial Sequence: Synthetic oligonucleotide
cccucggugcgcguacucg

SEQ ID NO: 1246401 - RNA, 19 nt, Artificial Sequence
  Description of Artificial Sequence: Synthetic oligonucleotide
cugaugggaagagguuaaa

SEQ ID NO: 1246402 - RNA, 19 nt, Artificial Sequence
  Description of Artificial Sequence: Synthetic oligonucleotide
ggcccugaccccuaucccu

SEQ ID NO: 1246403 - RNA, 19 nt, Artificial Sequence
  Description of Artificial Sequence: Synthetic oligonucleotide
gcccaggaccgacuggaca

SEQ ID NO: 1246404 - RNA, 19 nt, Artificial Sequence
  Description of Artificial Sequence: Synthetic oligonucleotide
ccucaaccuggcugcgggc

SEQ ID NO: 1246405 - RNA, 19 nt, Artificial Sequence
  Description of Artificial Sequence: Synthetic oligonucleotide
ccccacugaccgcagccgc

SEQ ID NO: 1246406 - RNA, 19 nt, Artificial Sequence
  Description of Artificial Sequence: Synthetic oligonucleotide
cuuggacaagaugggcugu

SEQ ID NO: 1246407 - RNA, 19 nt, Artificial Sequence
  Description of Artificial Sequence: Synthetic oligonucleotide
ggcuccagauacuguagau

SEQ ID NO: 1246408 - RNA, 19 nt, Artificial Sequence
  Description of Artificial Sequence: Synthetic oligonucleotide
ggcgugguugcgcagccgu

SEQ ID NO: 1246409 - RNA, 19 nt, Artificial Sequence
  Description of Artificial Sequence: Synthetic oligonucleotide
ggcucuccugcaaucuguc

SEQ ID NO: 1246410 - RNA, 19 nt, Artificial Sequence
  Description of Artificial Sequence: Synthetic oligonucleotide
gucgagggccucccgggcu

SEQ ID NO: 1246411 - RNA, 19 nt, Artificial Sequence
  Description of Artificial Sequence: Synthetic oligonucleotide
gcccagccggacgaaguag

SEQ ID NO: 1246412 - RNA, 19 nt, Artificial Sequence
  Description of Artificial Sequence: Synthetic oligonucleotide
accuucucagucggcuguu

SEQ ID NO: 1246413 - RNA, 19 nt, Artificial Sequence
  Description of Artificial Sequence: Synthetic oligonucleotide
ugcgggcccugaccccuau

SEQ ID NO: 1246414 - RNA, 19 nt, Artificial Sequence
  Description of Artificial Sequence: Synthetic oligonucleotide
cggugcgcguacucgcugg

SEQ ID NO: 1246415 - RNA, 19 nt, Artificial Sequence
  Description of Artificial Sequence: Synthetic oligonucleotide
aggggcccaccagccaugu

SEQ ID NO: 1246416 - RNA, 19 nt, Artificial Sequence
  Description of Artificial Sequence: Synthetic oligonucleotide
gugcccgggccuccaccug

SEQ ID NO: 1246417 - RNA, 19 nt, Artificial Sequence
  Description of Artificial Sequence: Synthetic oligonucleotide
gcugugccccacugaccgc

SEQ ID NO: 1246418 - RNA, 19 nt, Artificial Sequence
  Description of Artificial Sequence: Synthetic oligonucleotide
ccaggaccgacuggacacc

SEQ ID NO: 1246419 - RNA, 19 nt, Artificial Sequence
  Description of Artificial Sequence: Synthetic oligonucleotide
ccauugcuagacaugguuu

SEQ ID NO: 1246420 - RNA, 19 nt, Artificial Sequence
  Description of Artificial Sequence: Synthetic oligonucleotide
cucggugcgcguacucgcu

SEQ ID NO: 1246421 - RNA, 19 nt, Artificial Sequence
  Description of Artificial Sequence: Synthetic oligonucleotide
uccagcccucggugcgcgu

SEQ ID NO: 1246422 - RNA, 19 nt, Artificial Sequence
  Description of Artificial Sequence: Synthetic oligonucleotide
cccauugcuagacaugguu

SEQ ID NO: 1246423 - RNA, 19 nt, Artificial Sequence
  Description of Artificial Sequence: Synthetic oligonucleotide
gcgcagcuugcccagugaa

SEQ ID NO: 1246424 - RNA, 19 nt, Artificial Sequence
  Description of Artificial Sequence: Synthetic oligonucleotide
cgcagccguucugacagcg

SEQ ID NO: 1246425 - RNA, 19 nt, Artificial Sequence
  Description of Artificial Sequence: Synthetic oligonucleotide
agccgcagugagggucuug

SEQ ID NO: 1246426 - RNA, 19 nt, Artificial Sequence
  Description of Artificial Sequence: Synthetic oligonucleotide
ggacaccgcuggucacugc

SEQ ID NO: 1246427 - RNA, 19 nt, Artificial Sequence
  Description of Artificial Sequence: Synthetic oligonucleotide
gccaugcgguccaccacgc

SEQ ID NO: 1246428 - RNA, 19 nt, Artificial Sequence
  Description of Artificial Sequence: Synthetic oligonucleotide
cccugaccccuaucccugc

SEQ ID NO: 1246429 - RNA, 19 nt, Artificial Sequence
  Description of Artificial Sequence: Synthetic oligonucleotide
ccuguuucaccgauuccau

SEQ ID NO: 1246430 - RNA, 19 nt, Artificial Sequence
  Description of Artificial Sequence: Synthetic oligonucleotide
cccgggcucuggcuaugcg

SEQ ID NO: 1246431 - RNA, 19 nt, Artificial Sequence
  Description of Artificial Sequence: Synthetic oligonucleotide
caguguggucgagggccuc

SEQ ID NO: 1246432 - RNA, 19 nt, Artificial Sequence
  Description of Artificial Sequence: Synthetic oligonucleotide
cccaggccucugauuuuac

SEQ ID NO: 1246433 - RNA, 19 nt, Artificial Sequence
  Description of Artificial Sequence: Synthetic oligonucleotide
cuguguccuuugcacuggu

SEQ ID NO: 1246434 - RNA, 19 nt, Artificial Sequence
  Description of Artificial Sequence: Synthetic oligonucleotide
ggcaggcgguuguccgccc

SEQ ID NO: 1246435 - RNA, 19 nt, Artificial Sequence
  Description of Artificial Sequence: Synthetic oligonucleotide
cgugguugcgcagccguuc

SEQ ID NO: 1246436 - RNA, 19 nt, Artificial Sequence
  Description of Artificial Sequence: Synthetic oligonucleotide
gcgcguacucgcuggccga

SEQ ID NO: 1246437 - RNA, 19 nt, Artificial Sequence
  Description of Artificial Sequence: Synthetic oligonucleotide
agcccucggugcgcguacu

SEQ ID NO: 1246438 - RNA, 19 nt, Artificial Sequence
  Description of Artificial Sequence: Synthetic oligonucleotide
ccgguuacccggguggcca

SEQ ID NO: 1246439 - RNA, 19 nt, Artificial Sequence
  Description of Artificial Sequence: Synthetic oligonucleotide
gcugggugaugucccucaa

SEQ ID NO: 1246440 - RNA, 19 nt, Artificial Sequence
  Description of Artificial Sequence: Synthetic oligonucleotide
cccacugaccgcagccgca

SEQ ID NO: 1246441 - RNA, 19 nt, Artificial Sequence
  Description of Artificial Sequence: Synthetic oligonucleotide
gcuaugcgcucucgagucu

SEQ ID NO: 1246442 - RNA, 19 nt, Artificial Sequence
  Description of Artificial Sequence: Synthetic oligonucleotide
gcguacucgcuggccgaag

SEQ ID NO: 1246443 - RNA, 19 nt, Artificial Sequence
  Description of Artificial Sequence: Synthetic oligonucleotide
cucugguccaugcccuguu

SEQ ID NO: 1246444 - RNA, 19 nt, Artificial Sequence
  Description of Artificial Sequence: Synthetic oligonucleotide
ccgcagugagggucuugac

SEQ ID NO: 1246445 - RNA, 19 nt, Artificial Sequence
  Description of Artificial Sequence: Synthetic oligonucleotide
cucgggagcccaggaccga

SEQ ID NO: 1246446 - RNA, 19 nt, Artificial Sequence
  Description of Artificial Sequence: Synthetic oligonucleotide
ccgauuccaucaggcugag

SEQ ID NO: 1246447 - RNA, 19 nt, Artificial Sequence
  Description of Artificial Sequence: Synthetic oligonucleotide
cccgguuacccggguggcc

SEQ ID NO: 1246448 - RNA, 19 nt, Artificial Sequence
  Description of Artificial Sequence: Synthetic oligonucleotide
gcagccguucugacagcga

SEQ ID NO: 1246449 - RNA, 19 nt, Artificial Sequence
  Description of Artificial Sequence: Synthetic oligonucleotide
gccucccgggcucuggcua

SEQ ID NO: 1246450 - RNA, 19 nt, Artificial Sequence
  Description of Artificial Sequence: Synthetic oligonucleotide
cgacuggacaccgcugguc

SEQ ID NO: 1246451 - RNA, 19 nt, Artificial Sequence
  Description of Artificial Sequence: Synthetic oligonucleotide
cugaccccuaucccugcuu

SEQ ID NO: 1246452 - RNA, 19 nt, Artificial Sequence
  Description of Artificial Sequence: Synthetic oligonucleotide
gcucaccaucucacacgug

SEQ ID NO: 1246453 - RNA, 19 nt, Artificial Sequence
  Description of Artificial Sequence: Synthetic oligonucleotide
cccagccggacgaaguagu

SEQ ID NO: 1246454 - RNA, 19 nt, Artificial Sequence
  Description of Artificial Sequence: Synthetic oligonucleotide
gcgcagccguucugacagc

SEQ ID NO: 1246455 - RNA, 19 nt, Artificial Sequence
  Description of Artificial Sequence: Synthetic oligonucleotide
ccgaagcaaucuggggcuc

SEQ ID NO: 1246456 - RNA, 19 nt, Artificial Sequence
  Description of Artificial Sequence: Synthetic oligonucleotide
cgcucaccaucucacacgu

SEQ ID NO: 1246457 - RNA, 19 nt, Artificial Sequence
  Description of Artificial Sequence: Synthetic oligonucleotide
gcccucggugcgcguacuc

SEQ ID NO: 1246458 - RNA, 19 nt, Artificial Sequence
  Description of Artificial Sequence: Synthetic oligonucleotide
ccgcccaggccucugauuu

SEQ ID NO: 1246459 - RNA, 19 nt, Artificial Sequence
  Description of Artificial Sequence: Synthetic oligonucleotide
guccgcccaggccucugau

SEQ ID NO: 1246460 - RNA, 19 nt, Artificial Sequence
  Description of Artificial Sequence: Synthetic oligonucleotide
gcugcgggcccugaccccu

SEQ ID NO: 1246461 - RNA, 19 nt, Artificial Sequence
  Description of Artificial Sequence: Synthetic oligonucleotide
guuguccgcccaggccucu

SEQ ID NO: 1246462 - RNA, 19 nt, Artificial Sequence
  Description of Artificial Sequence: Synthetic oligonucleotide
cacugaccgcagccgcagu

SEQ ID NO: 1246463 - RNA, 19 nt, Artificial Sequence
  Description of Artificial Sequence: Synthetic oligonucleotide
gggccacguacuccacagu

SEQ ID NO: 1246464 - RNA, 19 nt, Artificial Sequence
  Description of Artificial Sequence: Synthetic oligonucleotide
ggugugcaacaggacuuuu

SEQ ID NO: 1246465 - RNA, 19 nt, Artificial Sequence
  Description of Artificial Sequence: Synthetic oligonucleotide
cggacgaaguaguuccuuu

SEQ ID NO: 1246466 - RNA, 19 nt, Artificial Sequence
  Description of Artificial Sequence: Synthetic oligonucleotide
cagucggcuguuggaggau

SEQ ID NO: 1246467 - RNA, 19 nt, Artificial Sequence
  Description of Artificial Sequence: Synthetic oligonucleotide
cugcgggcccugaccccua

SEQ ID NO: 1246468 - RNA, 19 nt, Artificial Sequence
  Description of Artificial Sequence: Synthetic oligonucleotide
gcgggcccugaccccuauc

SEQ ID NO: 1246469 - RNA, 19 nt, Artificial Sequence
  Description of Artificial Sequence: Synthetic oligonucleotide
ccgcuggucacugcugacu

SEQ ID NO: 1246470 - RNA, 19 nt, Artificial Sequence
  Description of Artificial Sequence: Synthetic oligonucleotide
ccugaccccuaucccugcu

SEQ ID NO: 1246471 - RNA, 19 nt, Artificial Sequence
  Description of Artificial Sequence: Synthetic oligonucleotide
gccggacgaaguaguuccu

SEQ ID NO: 1246472 - RNA, 19 nt, Artificial Sequence
  Description of Artificial Sequence: Synthetic oligonucleotide
ccagccggacgaaguaguu

SEQ ID NO: 1246473 - RNA, 19 nt, Artificial Sequence
  Description of Artificial Sequence: Synthetic oligonucleotide
gcccaccagccaugugacu

SEQ ID NO: 1246474 - RNA, 19 nt, Artificial Sequence
  Description of Artificial Sequence: Synthetic oligonucleotide
ccgacuggacaccgcuggu

SEQ ID NO: 1246475 - RNA, 19 nt, Artificial Sequence
  Description of Artificial Sequence: Synthetic oligonucleotide
cgcagcuugcccagugaau

SEQ ID NO: 1246476 - RNA, 19 nt, Artificial Sequence
  Description of Artificial Sequence: Synthetic oligonucleotide
ccagcccucggugcgcgua

SEQ ID NO: 1246477 - RNA, 19 nt, Artificial Sequence
  Description of Artificial Sequence: Synthetic oligonucleotide
ccucugguccaugcccugu

SEQ ID NO: 1246478 - RNA, 19 nt, Artificial Sequence
  Description of Artificial Sequence: Synthetic oligonucleotide
ccucccgggcucuggcuau

SEQ ID NO: 1246479 - RNA, 19 nt, Artificial Sequence
  Description of Artificial Sequence: Synthetic oligonucleotide
gcgagcccagccggacgaa

SEQ ID NO: 1246480 - RNA, 19 nt, Artificial Sequence
  Description of Artificial Sequence: Synthetic oligonucleotide
gcugcgcagcuugcccagu

SEQ ID NO: 1246481 - RNA, 19 nt, Artificial Sequence
  Description of Artificial Sequence: Synthetic oligonucleotide
ccggacgaaguaguuccuu

SEQ ID NO: 1246482 - RNA, 19 nt, Artificial Sequence
  Description of Artificial Sequence: Synthetic oligonucleotide
gcgugguugcgcagccguu

SEQ ID NO: 1246483 - RNA, 19 nt, Artificial Sequence
  Description of Artificial Sequence: Synthetic oligonucleotide
ccgcagccgcagugagggu

SEQ ID NO: 1246484 - RNA, 19 nt, Artificial Sequence
  Description of Artificial Sequence: Synthetic oligonucleotide
gccuagcgcugcgcagcuu

SEQ ID NO: 1246485 - RNA, 19 nt, Artificial Sequence
  Description of Artificial Sequence: Synthetic oligonucleotide
uuuaguuagcuaaauaugg

SEQ ID NO: 1246486 - RNA, 19 nt, Artificial Sequence
  Description of Artificial Sequence: Synthetic oligonucleotide
uuuuaguuagcuaaauaug

SEQ ID NO: 1246487 - RNA, 19 nt, Artificial Sequence
  Description of Artificial Sequence: Synthetic oligonucleotide
agcaguauaaauuacagua

SEQ ID NO: 1246488 - RNA, 19 nt, Artificial Sequence
  Description of Artificial Sequence: Synthetic oligonucleotide
uugaugaacugccagauga

SEQ ID NO: 1246489 - RNA, 19 nt, Artificial Sequence
  Description of Artificial Sequence: Synthetic oligonucleotide
uuggugcucaaguagagcg

SEQ ID NO: 1246490 - RNA, 19 nt, Artificial Sequence
  Description of Artificial Sequence: Synthetic oligonucleotide
aaugacgggugacuguccc

SEQ ID NO: 1246491 - RNA, 19 nt, Artificial Sequence
  Description of Artificial Sequence: Synthetic oligonucleotide
gaugcgagucaucucaucg

SEQ ID NO: 1246492 - RNA, 19 nt, Artificial Sequence
  Description of Artificial Sequence: Synthetic oligonucleotide
uagaguacuggaaacagcu

SEQ ID NO: 1246493 - RNA, 19 nt, Artificial Sequence
  Description of Artificial Sequence: Synthetic oligonucleotide
aguauaaauuacaguaugc

SEQ ID NO: 1246494 - RNA, 19 nt, Artificial Sequence
  Description of Artificial Sequence: Synthetic oligonucleotide
acuggaaacagcugugcgc

SEQ ID NO: 1246495 - RNA, 19 nt, Artificial Sequence
  Description of Artificial Sequence: Synthetic oligonucleotide
aagucagucuuauagugcu

SEQ ID NO: 1246496 - RNA, 19 nt, Artificial Sequence
  Description of Artificial Sequence: Synthetic oligonucleotide
agcuucacauugcugaggc

SEQ ID NO: 1246497 - RNA, 19 nt, Artificial Sequence
  Description of Artificial Sequence: Synthetic oligonucleotide
ugaaacgcccgucauaggc

SEQ ID NO: 1246498 - RNA, 19 nt, Artificial Sequence
  Description of Artificial Sequence: Synthetic oligonucleotide
aaaauacuugagcuggaca

SEQ ID NO: 1246499 - RNA, 19 nt, Artificial Sequence
  Description of Artificial Sequence: Synthetic oligonucleotide
ugaacugccagaugaugcg

SEQ ID NO: 1246500 - RNA, 19 nt, Artificial Sequence
  Description of Artificial Sequence: Synthetic oligonucleotide
gaugaugcgagucaucuca

SEQ ID NO: 1246501 - RNA, 19 nt, Artificial Sequence
  Description of Artificial Sequence: Synthetic oligonucleotide
agguaacgaacacugcucc

SEQ ID NO: 1246502 - RNA, 19 nt, Artificial Sequence
  Description of Artificial Sequence: Synthetic oligonucleotide
aauugucuucccaucaggg

SEQ ID NO: 1246503 - RNA, 19 nt, Artificial Sequence
  Description of Artificial Sequence: Synthetic oligonucleotide
agcucgaucuaccacaaag

SEQ ID NO: 1246504 - RNA, 19 nt, Artificial Sequence
  Description of Artificial Sequence: Synthetic oligonucleotide
ucaggaaguguucauucag

SEQ ID NO: 1246505 - RNA, 19 nt, Artificial Sequence
  Description of Artificial Sequence: Synthetic oligonucleotide
gaggucaaaauacuugagc

SEQ ID NO: 1246506 - RNA, 19 nt, Artificial Sequence
  Description of Artificial Sequence: Synthetic oligonucleotide
uauagugcuugucaaagau

SEQ ID NO: 1246507 - RNA, 19 nt, Artificial Sequence
  Description of Artificial Sequence: Synthetic oligonucleotide
gacgucaucaggccaaggg

SEQ ID NO: 1246508 - RNA, 19 nt, Artificial Sequence
  Description of Artificial Sequence: Synthetic oligonucleotide
ugcgcaaagcccgaaaugg

SEQ ID NO: 1246509 - RNA, 19 nt, Artificial Sequence
  Description of Artificial Sequence: Synthetic oligonucleotide
aguuagcuaaauauggcac

SEQ ID NO: 1246510 - RNA, 19 nt, Artificial Sequence
  Description of Artificial Sequence: Synthetic oligonucleotide
aguuguacaccucccacuc

SEQ ID NO: 1246511 - RNA, 19 nt, Artificial Sequence
  Description of Artificial Sequence: Synthetic oligonucleotide
cuggucacgauuuggaagc

SEQ ID NO: 1246512 - RNA, 19 nt, Artificial Sequence
  Description of Artificial Sequence: Synthetic oligonucleotide
uucagagcaguauaaauua

SEQ ID NO: 1246513 - RNA, 19 nt, Artificial Sequence
  Description of Artificial Sequence: Synthetic oligonucleotide
cuaaauauggcaccaugug

SEQ ID NO: 1246514 - RNA, 19 nt, Artificial Sequence
  Description of Artificial Sequence: Synthetic oligonucleotide
aguucuugcaggcccacac

SEQ ID NO: 1246515 - RNA, 19 nt, Artificial Sequence
  Description of Artificial Sequence: Synthetic oligonucleotide
cuuauagugcuugucaaag

SEQ ID NO: 1246516 - RNA, 19 nt, Artificial Sequence
  Description of Artificial Sequence: Synthetic oligonucleotide
agcuugaacucuuccacac

SEQ ID NO: 1246517 - RNA, 19 nt, Artificial Sequence
  Description of Artificial Sequence: Synthetic oligonucleotide
guuagcuaaauauggcacc

SEQ ID NO: 1246518 - RNA, 19 nt, Artificial Sequence
  Description of Artificial Sequence: Synthetic oligonucleotide
aagcccgaggucaaaauac

SEQ ID NO: 1246519 - RNA, 19 nt, Artificial Sequence
  Description of Artificial Sequence: Synthetic oligonucleotide
uccuuuggggugaagacca

SEQ ID NO: 1246520 - RNA, 19 nt, Artificial Sequence
  Description of Artificial Sequence: Synthetic oligonucleotide
cuugaaacgcccgucauag

SEQ ID NO: 1246521 - RNA, 19 nt, Artificial Sequence
  Description of Artificial Sequence: Synthetic oligonucleotide
ugugauucagagcaguaua

SEQ ID NO: 1246522 - RNA, 19 nt, Artificial Sequence
  Description of Artificial Sequence: Synthetic oligonucleotide
gaagacuugagcaccuggg

SEQ ID NO: 1246523 - RNA, 19 nt, Artificial Sequence
  Description of Artificial Sequence: Synthetic oligonucleotide
uccauuagggcucuuccac

SEQ ID NO: 1246524 - RNA, 19 nt, Artificial Sequence
  Description of Artificial Sequence: Synthetic oligonucleotide
cacacgagccucaucaggg

SEQ ID NO: 1246525 - RNA, 19 nt, Artificial Sequence
  Description of Artificial Sequence: Synthetic oligonucleotide
uacaucuccgucauaguuc

SEQ ID NO: 1246526 - RNA, 19 nt, Artificial Sequence
  Description of Artificial Sequence: Synthetic oligonucleotide
augcgagucaucucaucgc

SEQ ID NO: 1246527 - RNA, 19 nt, Artificial Sequence
  Description of Artificial Sequence: Synthetic oligonucleotide
agagcaguauaaauuacag

SEQ ID NO: 1246528 - RNA, 19 nt, Artificial Sequence
  Description of Artificial Sequence: Synthetic oligonucleotide
ucgucgguguuguacaucc

SEQ ID NO: 1246529 - RNA, 19 nt, Artificial Sequence
  Description of Artificial Sequence: Synthetic oligonucleotide
uuagcuaaauauggcacca

SEQ ID NO: 1246530 - RNA, 19 nt, Artificial Sequence
  Description of Artificial Sequence: Synthetic oligonucleotide
ugcgagucaucucaucgcc

SEQ ID NO: 1246531 - RNA, 19 nt, Artificial Sequence
  Description of Artificial Sequence: Synthetic oligonucleotide
uuguacaccucccacuccu

SEQ ID NO: 1246532 - RNA, 19 nt, Artificial Sequence
  Description of Artificial Sequence: Synthetic oligonucleotide
auagaguacuggaaacagc

SEQ ID NO: 1246533 - RNA, 19 nt, Artificial Sequence
  Description of Artificial Sequence: Synthetic oligonucleotide
agcuaaauauggcaccaug

SEQ ID NO: 1246534 - RNA, 19 nt, Artificial Sequence
  Description of Artificial Sequence: Synthetic oligonucleotide
guacuggucgccaugggcg

SEQ ID NO: 1246535 - RNA, 19 nt, Artificial Sequence
  Description of Artificial Sequence: Synthetic oligonucleotide
caauugucuucccaucagg

SEQ ID NO: 1246536 - RNA, 19 nt, Artificial Sequence
  Description of Artificial Sequence: Synthetic oligonucleotide
uuauagugcuugucaaaga

SEQ ID NO: 1246537 - RNA, 19 nt, Artificial Sequence
  Description of Artificial Sequence: Synthetic oligonucleotide
acgauuuggaagcccgagg

SEQ ID NO: 1246538 - RNA, 19 nt, Artificial Sequence
  Description of Artificial Sequence: Synthetic oligonucleotide
ucuaccauguauggagugc

SEQ ID NO: 1246539 - RNA, 19 nt, Artificial Sequence
  Description of Artificial Sequence: Synthetic oligonucleotide
uaacgaacacugcuccugc

SEQ ID NO: 1246540 - RNA, 19 nt, Artificial Sequence
  Description of Artificial Sequence: Synthetic oligonucleotide
auuuggaagcccgagguca

SEQ ID NO: 1246541 - RNA, 19 nt, Artificial Sequence
  Description of Artificial Sequence: Synthetic oligonucleotide
gcaaaauacacugacuggc

SEQ ID NO: 1246542 - RNA, 19 nt, Artificial Sequence
  Description of Artificial Sequence: Synthetic oligonucleotide
gaugguuccauuagggcuc

SEQ ID NO: 1246543 - RNA, 19 nt, Artificial Sequence
  Description of Artificial Sequence: Synthetic oligonucleotide
cucuacacacaccuucucc

SEQ ID NO: 1246544 - RNA, 19 nt, Artificial Sequence
  Description of Artificial Sequence: Synthetic oligonucleotide
auuucuggguggccagagc

SEQ ID NO: 1246545 - RNA, 19 nt, Artificial Sequence
  Description of Artificial Sequence: Synthetic oligonucleotide
aauaggguugguacuggug

SEQ ID NO: 1246546 - RNA, 19 nt, Artificial Sequence
  Description of Artificial Sequence: Synthetic oligonucleotide
gucacgauuuggaagcccg

SEQ ID NO: 1246547 - RNA, 19 nt, Artificial Sequence
  Description of Artificial Sequence: Synthetic oligonucleotide
auaguggcgccguggcugc

SEQ ID NO: 1246548 - RNA, 19 nt, Artificial Sequence
  Description of Artificial Sequence: Synthetic oligonucleotide
auagcuccacucuccacag

SEQ ID NO: 1246549 - RNA, 19 nt, Artificial Sequence
  Description of Artificial Sequence: Synthetic oligonucleotide
gaugggcucucugaagacg

SEQ ID NO: 1246550 - RNA, 19 nt, Artificial Sequence
  Description of Artificial Sequence: Synthetic oligonucleotide
aaacgcccgucauaggccu

SEQ ID NO: 1246551 - RNA, 19 nt, Artificial Sequence
  Description of Artificial Sequence: Synthetic oligonucleotide
gaacgugccagcucgaucu

SEQ ID NO: 1246552 - RNA, 19 nt, Artificial Sequence
  Description of Artificial Sequence: Synthetic oligonucleotide
cgaucuaccacaaagucug

SEQ ID NO: 1246553 - RNA, 19 nt, Artificial Sequence
  Description of Artificial Sequence: Synthetic oligonucleotide
cucgaucuaccacaaaguc

SEQ ID NO: 1246554 - RNA, 19 nt, Artificial Sequence
  Description of Artificial Sequence: Synthetic oligonucleotide
ugagccgaugcucguacca

SEQ ID NO: 1246555 - RNA, 19 nt, Artificial Sequence
  Description of Artificial Sequence: Synthetic oligonucleotide
uucuugcaggcccacacaa

SEQ ID NO: 1246556 - RNA, 19 nt, Artificial Sequence
  Description of Artificial Sequence: Synthetic oligonucleotide
ugaggcucacccucuacca

SEQ ID NO: 1246557 - RNA, 19 nt, Artificial Sequence
  Description of Artificial Sequence: Synthetic oligonucleotide
ggucaaaauacuugagcug

SEQ ID NO: 1246558 - RNA, 19 nt, Artificial Sequence
  Description of Artificial Sequence: Synthetic oligonucleotide
ucguaccagaucuuauucu

SEQ ID NO: 1246559 - RNA, 19 nt, Artificial Sequence
  Description of Artificial Sequence: Synthetic oligonucleotide
ugggcgugccucccaaugg

SEQ ID NO: 1246560 - RNA, 19 nt, Artificial Sequence
  Description of Artificial Sequence: Synthetic oligonucleotide
ugccagaugaugcgaguca

SEQ ID NO: 1246561 - RNA, 19 nt, Artificial Sequence
  Description of Artificial Sequence: Synthetic oligonucleotide
ugugcgcaaagcccgaaau

SEQ ID NO: 1246562 - RNA, 19 nt, Artificial Sequence
  Description of Artificial Sequence: Synthetic oligonucleotide
guaacgaacacugcuccug

SEQ ID NO: 1246563 - RNA, 19 nt, Artificial Sequence
  Description of Artificial Sequence: Synthetic oligonucleotide
gucgguguuguacaucccc

SEQ ID NO: 1246564 - RNA, 19 nt, Artificial Sequence
  Description of Artificial Sequence: Synthetic oligonucleotide
cuaccauguauggagugcc

SEQ ID NO: 1246565 - RNA, 19 nt, Artificial Sequence
  Description of Artificial Sequence: Synthetic oligonucleotide
aaagcccgaaauggacucg

SEQ ID NO: 1246566 - RNA, 19 nt, Artificial Sequence
  Description of Artificial Sequence: Synthetic oligonucleotide
ucgguguuguacaucccca

SEQ ID NO: 1246567 - RNA, 19 nt, Artificial Sequence
  Description of Artificial Sequence: Synthetic oligonucleotide
caaagcccgaaauggacuc

SEQ ID NO: 1246568 - RNA, 19 nt, Artificial Sequence
  Description of Artificial Sequence: Synthetic oligonucleotide
gaaacgcccgucauaggcc

SEQ ID NO: 1246569 - RNA, 19 nt, Artificial Sequence
  Description of Artificial Sequence: Synthetic oligonucleotide
aggagcuuugcagagcgag

SEQ ID NO: 1246570 - RNA, 19 nt, Artificial Sequence
  Description of Artificial Sequence: Synthetic oligonucleotide
ugccucccaauggugaugg

SEQ ID NO: 1246571 - RNA, 19 nt, Artificial Sequence
  Description of Artificial Sequence: Synthetic oligonucleotide
uccgugguguucaggaagu

SEQ ID NO: 1246572 - RNA, 19 nt, Artificial Sequence
  Description of Artificial Sequence: Synthetic oligonucleotide
cucguaccagaucuuauuc

SEQ ID NO: 1246573 - RNA, 19 nt, Artificial Sequence
  Description of Artificial Sequence: Synthetic oligonucleotide
cagagcaguauaaauuaca

SEQ ID NO: 1246574 - RNA, 19 nt, Artificial Sequence
  Description of Artificial Sequence: Synthetic oligonucleotide
gauucagagcaguauaaau

SEQ ID NO: 1246575 - RNA, 19 nt, Artificial Sequence
  Description of Artificial Sequence: Synthetic oligonucleotide
cuucccucgaugcucuagc

SEQ ID NO: 1246576 - RNA, 19 nt, Artificial Sequence
  Description of Artificial Sequence: Synthetic oligonucleotide
cauaguggcgccguggcug

SEQ ID NO: 1246577 - RNA, 19 nt, Artificial Sequence
  Description of Artificial Sequence: Synthetic oligonucleotide
ugaugaacugccagaugau

SEQ ID NO: 1246578 - RNA, 19 nt, Artificial Sequence
  Description of Artificial Sequence: Synthetic oligonucleotide
agucagggcggccggugcc

SEQ ID NO: 1246579 - RNA, 19 nt, Artificial Sequence
  Description of Artificial Sequence: Synthetic oligonucleotide
agaugaugggcucucugaa

SEQ ID NO: 1246580 - RNA, 19 nt, Artificial Sequence
  Description of Artificial Sequence: Synthetic oligonucleotide
guccgugguguucaggaag

SEQ ID NO: 1246581 - RNA, 19 nt, Artificial Sequence
  Description of Artificial Sequence: Synthetic oligonucleotide
gaugucggacuguacaucu

SEQ ID NO: 1246582 - RNA, 19 nt, Artificial Sequence
  Description of Artificial Sequence: Synthetic oligonucleotide
aauggacucgucgguguug

SEQ ID NO: 1246583 - RNA, 19 nt, Artificial Sequence
  Description of Artificial Sequence: Synthetic oligonucleotide
gagguaacgaacacugcuc

SEQ ID NO: 1246584 - RNA, 19 nt, Artificial Sequence
  Description of Artificial Sequence: Synthetic oligonucleotide
uccugccuaguguccaccg

SEQ ID NO: 1246585 - RNA, 19 nt, Artificial Sequence
  Description of Artificial Sequence: Synthetic oligonucleotide
gacucgucgguguuguaca

SEQ ID NO: 1246586 - RNA, 19 nt, Artificial Sequence
  Description of Artificial Sequence: Synthetic oligonucleotide
ugauucagagcaguauaaa

SEQ ID NO: 1246587 - RNA, 19 nt, Artificial Sequence
  Description of Artificial Sequence: Synthetic oligonucleotide
augggcucucugaagacgg

SEQ ID NO: 1246588 - RNA, 19 nt, Artificial Sequence
  Description of Artificial Sequence: Synthetic oligonucleotide
ucccucgaugcucuagccc

SEQ ID NO: 1246589 - RNA, 19 nt, Artificial Sequence
  Description of Artificial Sequence: Synthetic oligonucleotide
cuggauagaguacuggaaa

SEQ ID NO: 1246590 - RNA, 19 nt, Artificial Sequence
  Description of Artificial Sequence: Synthetic oligonucleotide
caccugaagacuugagcac

SEQ ID NO: 1246591 - RNA, 19 nt, Artificial Sequence
  Description of Artificial Sequence: Synthetic oligonucleotide
agaccaucuugaacgugcc

SEQ ID NO: 1246592 - RNA, 19 nt, Artificial Sequence
  Description of Artificial Sequence: Synthetic oligonucleotide
guauggagugcccacugca

SEQ ID NO: 1246593 - RNA, 19 nt, Artificial Sequence
  Description of Artificial Sequence: Synthetic oligonucleotide
cccgaaauggacucgucgg

SEQ ID NO: 1246594 - RNA, 19 nt, Artificial Sequence
  Description of Artificial Sequence: Synthetic oligonucleotide
uggcaauaggguugguacu

SEQ ID NO: 1246595 - RNA, 19 nt, Artificial Sequence
  Description of Artificial Sequence: Synthetic oligonucleotide
ugaacgugccagcucgauc

SEQ ID NO: 1246596 - RNA, 19 nt, Artificial Sequence
  Description of Artificial Sequence: Synthetic oligonucleotide
uaccauguauggagugccc

SEQ ID NO: 1246597 - RNA, 19 nt, Artificial Sequence
  Description of Artificial Sequence: Synthetic oligonucleotide
aggaugucggacuguacau

SEQ ID NO: 1246598 - RNA, 19 nt, Artificial Sequence
  Description of Artificial Sequence: Synthetic oligonucleotide
caggaugucggacuguaca

SEQ ID NO: 1246599 - RNA, 19 nt, Artificial Sequence
  Description of Artificial Sequence: Synthetic oligonucleotide
uugaaacgcccgucauagg

SEQ ID NO: 1246600 - RNA, 19 nt, Artificial Sequence
  Description of Artificial Sequence: Synthetic oligonucleotide
aaauggacucgucgguguu

SEQ ID NO: 1246601 - RNA, 19 nt, Artificial Sequence
  Description of Artificial Sequence: Synthetic oligonucleotide
ugccuaguguccaccguga

SEQ ID NO: 1246602 - RNA, 19 nt, Artificial Sequence
  Description of Artificial Sequence: Synthetic oligonucleotide
ugcucaaguagagcggcca

SEQ ID NO: 1246603 - RNA, 19 nt, Artificial Sequence
  Description of Artificial Sequence: Synthetic oligonucleotide
aaaccccuguccccuagaa

SEQ ID NO: 1246604 - RNA, 19 nt, Artificial Sequence
  Description of Artificial Sequence: Synthetic oligonucleotide
cuugaugaacugccagaug

SEQ ID NO: 1246605 - RNA, 19 nt, Artificial Sequence
  Description of Artificial Sequence: Synthetic oligonucleotide
cucgcgccgagccaggagc

SEQ ID NO: 1246606 - RNA, 19 nt, Artificial Sequence
  Description of Artificial Sequence: Synthetic oligonucleotide
cucuaccauguauggagug

SEQ ID NO: 1246607 - RNA, 19 nt, Artificial Sequence
  Description of Artificial Sequence: Synthetic oligonucleotide
augacgggugacugucccg

SEQ ID NO: 1246608 - RNA, 19 nt, Artificial Sequence
  Description of Artificial Sequence: Synthetic oligonucleotide
auguccuugaaacgcccgu

SEQ ID NO: 1246609 - RNA, 19 nt, Artificial Sequence
  Description of Artificial Sequence: Synthetic oligonucleotide
uguucaggaaguguucauu

SEQ ID NO: 1246610 - RNA, 19 nt, Artificial Sequence
  Description of Artificial Sequence: Synthetic oligonucleotide
ucacgauuuggaagcccga

SEQ ID NO: 1246611 - RNA, 19 nt, Artificial Sequence
  Description of Artificial Sequence: Synthetic oligonucleotide
gccacucuguauuucuggg

SEQ ID NO: 1246612 - RNA, 19 nt, Artificial Sequence
  Description of Artificial Sequence: Synthetic oligonucleotide
cagaugaugggcucucuga

SEQ ID NO: 1246613 - RNA, 19 nt, Artificial Sequence
  Description of Artificial Sequence: Synthetic oligonucleotide
ucucuacacacaccuucuc

SEQ ID NO: 1246614 - RNA, 19 nt, Artificial Sequence
  Description of Artificial Sequence: Synthetic oligonucleotide
gaaauggacucgucggugu

SEQ ID NO: 1246615 - RNA, 19 nt, Artificial Sequence
  Description of Artificial Sequence: Synthetic oligonucleotide
augggcgugccucccaaug

SEQ ID NO: 1246616 - RNA, 19 nt, Artificial Sequence
  Description of Artificial Sequence: Synthetic oligonucleotide
aaguguucauucagcuuca

SEQ ID NO: 1246617 - RNA, 19 nt, Artificial Sequence
  Description of Artificial Sequence: Synthetic oligonucleotide
cugccuaguguccaccgug

SEQ ID NO: 1246618 - RNA, 19 nt, Artificial Sequence
  Description of Artificial Sequence: Synthetic oligonucleotide
ucaaguagagcggccacuu

SEQ ID NO: 1246619 - RNA, 19 nt, Artificial Sequence
  Description of Artificial Sequence: Synthetic oligonucleotide
guacuggaaacagcugugc

SEQ ID NO: 1246620 - RNA, 19 nt, Artificial Sequence
  Description of Artificial Sequence: Synthetic oligonucleotide
ucugcauaguggcgccgug

SEQ ID NO: 1246621 - RNA, 19 nt, Artificial Sequence
  Description of Artificial Sequence: Synthetic oligonucleotide
gaagcccgaggucaaaaua

SEQ ID NO: 1246622 - RNA, 19 nt, Artificial Sequence
  Description of Artificial Sequence: Synthetic oligonucleotide
ccgucauaguucuugcagg

SEQ ID NO: 1246623 - RNA, 19 nt, Artificial Sequence
  Description of Artificial Sequence: Synthetic oligonucleotide
auaguucuugcaggcccac

SEQ ID NO: 1246624 - RNA, 19 nt, Artificial Sequence
  Description of Artificial Sequence: Synthetic oligonucleotide
uucccucgaugcucuagcc

SEQ ID NO: 1246625 - RNA, 19 nt, Artificial Sequence
  Description of Artificial Sequence: Synthetic oligonucleotide
cugacuggcugagguaacg

SEQ ID NO: 1246626 - RNA, 19 nt, Artificial Sequence
  Description of Artificial Sequence: Synthetic oligonucleotide
cccucgaugcucuagcccc

SEQ ID NO: 1246627 - RNA, 19 nt, Artificial Sequence
  Description of Artificial Sequence: Synthetic oligonucleotide
ugacgggugacugucccgu

SEQ ID NO: 1246628 - RNA, 19 nt, Artificial Sequence
  Description of Artificial Sequence: Synthetic oligonucleotide
guaccagaucuuauucuug

SEQ ID NO: 1246629 - RNA, 19 nt, Artificial Sequence
  Description of Artificial Sequence: Synthetic oligonucleotide
gagcaguauaaauuacagu

SEQ ID NO: 1246630 - RNA, 19 nt, Artificial Sequence
  Description of Artificial Sequence: Synthetic oligonucleotide
cacgauuuggaagcccgag

SEQ ID NO: 1246631 - RNA, 19 nt, Artificial Sequence
  Description of Artificial Sequence: Synthetic oligonucleotide
gugcgcaaagcccgaaaug

SEQ ID NO: 1246632 - RNA, 19 nt, Artificial Sequence
  Description of Artificial Sequence: Synthetic oligonucleotide
ccaccugaagacuugagca

SEQ ID NO: 1246633 - RNA, 19 nt, Artificial Sequence
  Description of Artificial Sequence: Synthetic oligonucleotide
cauccagcuucccucgaug

SEQ ID NO: 1246634 - RNA, 19 nt, Artificial Sequence
  Description of Artificial Sequence: Synthetic oligonucleotide
augugauucagagcaguau

SEQ ID NO: 1246635 - RNA, 19 nt, Artificial Sequence
  Description of Artificial Sequence: Synthetic oligonucleotide
aagcccgaaauggacucgu

SEQ ID NO: 1246636 - RNA, 19 nt, Artificial Sequence
  Description of Artificial Sequence: Synthetic oligonucleotide
uccuugaaacgcccgucau

SEQ ID NO: 1246637 - RNA, 19 nt, Artificial Sequence
  Description of Artificial Sequence: Synthetic oligonucleotide
ggcaauaggguugguacug

SEQ ID NO: 1246638 - RNA, 19 nt, Artificial Sequence
  Description of Artificial Sequence: Synthetic oligonucleotide
gccaccugaagacuugagc

SEQ ID NO: 1246639 - RNA, 19 nt, Artificial Sequence
  Description of Artificial Sequence: Synthetic oligonucleotide
cccgaggucaaaauacuug

SEQ ID NO: 1246640 - RNA, 19 nt, Artificial Sequence
  Description of Artificial Sequence: Synthetic oligonucleotide
uguccccuagaaaggccac

SEQ ID NO: 1246641 - RNA, 19 nt, Artificial Sequence
  Description of Artificial Sequence: Synthetic oligonucleotide
gcccgaaauggacucgucg

SEQ ID NO: 1246642 - RNA, 19 nt, Artificial Sequence
  Description of Artificial Sequence: Synthetic oligonucleotide
guacaccucccacuccuug

SEQ ID NO: 1246643 - RNA, 19 nt, Artificial Sequence
  Description of Artificial Sequence: Synthetic oligonucleotide
ugacuggcugagguaacga

SEQ ID NO: 1246644 - RNA, 19 nt, Artificial Sequence
  Description of Artificial Sequence: Synthetic oligonucleotide
agccucaauugucuuccca

SEQ ID NO: 1246645 - RNA, 19 nt, Artificial Sequence
  Description of Artificial Sequence: Synthetic oligonucleotide
gagccgaugcucguaccag

SEQ ID NO: 1246646 - RNA, 19 nt, Artificial Sequence
  Description of Artificial Sequence: Synthetic oligonucleotide
uacuggucgccaugggcgu

SEQ ID NO: 1246647 - RNA, 19 nt, Artificial Sequence
  Description of Artificial Sequence: Synthetic oligonucleotide
cacauugcugaggccgugg

SEQ ID NO: 1246648 - RNA, 19 nt, Artificial Sequence
  Description of Artificial Sequence: Synthetic oligonucleotide
uguccuugaaacgcccguc

SEQ ID NO: 1246649 - RNA, 19 nt, Artificial Sequence
  Description of Artificial Sequence: Synthetic oligonucleotide
acagacgucaucaggccaa

SEQ ID NO: 1246650 - RNA, 19 nt, Artificial Sequence
  Description of Artificial Sequence: Synthetic oligonucleotide
agaguacuggaaacagcug

SEQ ID NO: 1246651 - RNA, 19 nt, Artificial Sequence
  Description of Artificial Sequence: Synthetic oligonucleotide
gugauucagagcaguauaa

SEQ ID NO: 1246652 - RNA, 19 nt, Artificial Sequence
  Description of Artificial Sequence: Synthetic oligonucleotide
guccuugaaacgcccguca

SEQ ID NO: 1246653 - RNA, 19 nt, Artificial Sequence
  Description of Artificial Sequence: Synthetic oligonucleotide
cugcauaguggcgccgugg

SEQ ID NO: 1246654 - RNA, 19 nt, Artificial Sequence
  Description of Artificial Sequence: Synthetic oligonucleotide
caguguccaccccuacugc

SEQ ID NO: 1246655 - RNA, 19 nt, Artificial Sequence
  Description of Artificial Sequence: Synthetic oligonucleotide
cucgguaaugacgggugac

SEQ ID NO: 1246656 - RNA, 19 nt, Artificial Sequence
  Description of Artificial Sequence: Synthetic oligonucleotide
ccuaguguccaccgugagg

SEQ ID NO: 1246657 - RNA, 19 nt, Artificial Sequence
  Description of Artificial Sequence: Synthetic oligonucleotide
uucuggugcucucgguaau

SEQ ID NO: 1246658 - RNA, 19 nt, Artificial Sequence
  Description of Artificial Sequence: Synthetic oligonucleotide
cuucuggugcucucgguaa

SEQ ID NO: 1246659 - RNA, 19 nt, Artificial Sequence
  Description of Artificial Sequence: Synthetic oligonucleotide
cagcuucacauugcugagg

SEQ ID NO: 1246660 - RNA, 19 nt, Artificial Sequence
  Description of Artificial Sequence: Synthetic oligonucleotide
ugggucggcccuucuggug

SEQ ID NO: 1246661 - RNA, 19 nt, Artificial Sequence
  Description of Artificial Sequence: Synthetic oligonucleotide
ccaucuugaacgugccagc

SEQ ID NO: 1246662 - RNA, 19 nt, Artificial Sequence
  Description of Artificial Sequence: Synthetic oligonucleotide
cacgugaggcaggaugagc

SEQ ID NO: 1246663 - RNA, 19 nt, Artificial Sequence
  Description of Artificial Sequence: Synthetic oligonucleotide
ccgaggucaaaauacuuga

SEQ ID NO: 1246664 - RNA, 19 nt, Artificial Sequence
  Description of Artificial Sequence: Synthetic oligonucleotide
guacaucuccgucauaguu

SEQ ID NO: 1246665 - RNA, 19 nt, Artificial Sequence
  Description of Artificial Sequence: Synthetic oligonucleotide
acacugcuccugccuagug

SEQ ID NO: 1246666 - RNA, 19 nt, Artificial Sequence
  Description of Artificial Sequence: Synthetic oligonucleotide
acaaagucuguggccuugu

SEQ ID NO: 1246667 - RNA, 19 nt, Artificial Sequence
  Description of Artificial Sequence: Synthetic oligonucleotide
ucccaauggugauggguuu

SEQ ID NO: 1246668 - RNA, 19 nt, Artificial Sequence
  Description of Artificial Sequence: Synthetic oligonucleotide
ugcuccggccagcgugggg

SEQ ID NO: 1246669 - RNA, 19 nt, Artificial Sequence
  Description of Artificial Sequence: Synthetic oligonucleotide
acgagccucaucaggggug

SEQ ID NO: 1246670 - RNA, 19 nt, Artificial Sequence
  Description of Artificial Sequence: Synthetic oligonucleotide
cugccagaugaugcgaguc

SEQ ID NO: 1246671 - RNA, 19 nt, Artificial Sequence
  Description of Artificial Sequence: Synthetic oligonucleotide
uggucacgauuuggaagcc

SEQ ID NO: 1246672 - RNA, 19 nt, Artificial Sequence
  Description of Artificial Sequence: Synthetic oligonucleotide
gguguucaggaaguguuca

SEQ ID NO: 1246673 - RNA, 19 nt, Artificial Sequence
  Description of Artificial Sequence: Synthetic oligonucleotide
ugguacuggugggucggcc

SEQ ID NO: 1246674 - RNA, 19 nt, Artificial Sequence
  Description of Artificial Sequence: Synthetic oligonucleotide
accaugugauucagagcag

SEQ ID NO: 1246675 - RNA, 19 nt, Artificial Sequence
  Description of Artificial Sequence: Synthetic oligonucleotide
aguguccaccgugagggaa

SEQ ID NO: 1246676 - RNA, 19 nt, Artificial Sequence
  Description of Artificial Sequence: Synthetic oligonucleotide
ccacacgagccucaucagg

SEQ ID NO: 1246677 - RNA, 19 nt, Artificial Sequence
  Description of Artificial Sequence: Synthetic oligonucleotide
ucacauugcugaggccgug

SEQ ID NO: 1246678 - RNA, 19 nt, Artificial Sequence
  Description of Artificial Sequence: Synthetic oligonucleotide
cacugacuggcugagguaa

SEQ ID NO: 1246679 - RNA, 19 nt, Artificial Sequence
  Description of Artificial Sequence: Synthetic oligonucleotide
cacagacgucaucaggcca

SEQ ID NO: 1246680 - RNA, 19 nt, Artificial Sequence
  Description of Artificial Sequence: Synthetic oligonucleotide
uagcuaaauauggcaccau

SEQ ID NO: 1246681 - RNA, 19 nt, Artificial Sequence
  Description of Artificial Sequence: Synthetic oligonucleotide
augucggacuguacaucuc

SEQ ID NO: 1246682 - RNA, 19 nt, Artificial Sequence
  Description of Artificial Sequence: Synthetic oligonucleotide
ccguguccaagcaaagaug

SEQ ID NO: 1246683 - RNA, 19 nt, Artificial Sequence
  Description of Artificial Sequence: Synthetic oligonucleotide
uugaacgugccagcucgau

SEQ ID NO: 1246684 - RNA, 19 nt, Artificial Sequence
  Description of Artificial Sequence: Synthetic oligonucleotide
gcuaaauauggcaccaugu

SEQ ID NO: 1246685 - RNA, 19 nt, Artificial Sequence
  Description of Artificial Sequence: Synthetic oligonucleotide
acgugccagcucgaucuac

SEQ ID NO: 1246686 - RNA, 19 nt, Artificial Sequence
  Description of Artificial Sequence: Synthetic oligonucleotide
gagucugugaaaaccugau

SEQ ID NO: 1246687 - RNA, 19 nt, Artificial Sequence
  Description of Artificial Sequence: Synthetic oligonucleotide
guagagcggccacuucuuc

SEQ ID NO: 1246688 - RNA, 19 nt, Artificial Sequence
  Description of Artificial Sequence: Synthetic oligonucleotide
cugcuugcccagagcucgg

SEQ ID NO: 1246689 - RNA, 19 nt, Artificial Sequence
  Description of Artificial Sequence: Synthetic oligonucleotide
gccuugagccaggaugucg

SEQ ID NO: 1246690 - RNA, 19 nt, Artificial Sequence
  Description of Artificial Sequence: Synthetic oligonucleotide
ggacucgucgguguuguac

SEQ ID NO: 1246691 - RNA, 19 nt, Artificial Sequence
  Description of Artificial Sequence: Synthetic oligonucleotide
agcccgaggucaaaauacu

SEQ ID NO: 1246692 - RNA, 19 nt, Artificial Sequence
  Description of Artificial Sequence: Synthetic oligonucleotide
aacgugccagcucgaucua

SEQ ID NO: 1246693 - RNA, 19 nt, Artificial Sequence
  Description of Artificial Sequence: Synthetic oligonucleotide
ggcagaccagcacagacgu

SEQ ID NO: 1246694 - RNA, 19 nt, Artificial Sequence
  Description of Artificial Sequence: Synthetic oligonucleotide
gcagggaaguuguacaccu

SEQ ID NO: 1246695 - RNA, 19 nt, Artificial Sequence
  Description of Artificial Sequence: Synthetic oligonucleotide
ggcagggaaguuguacacc

SEQ ID NO: 1246696 - RNA, 19 nt, Artificial Sequence
  Description of Artificial Sequence: Synthetic oligonucleotide
aguagagcggccacuucuu

SEQ ID NO: 1246697 - RNA, 19 nt, Artificial Sequence
  Description of Artificial Sequence: Synthetic oligonucleotide
acgcccgucauaggccuuc

SEQ ID NO: 1246698 - RNA, 19 nt, Artificial Sequence
  Description of Artificial Sequence: Synthetic oligonucleotide
uaguguccaccgugaggga

SEQ ID NO: 1246699 - RNA, 19 nt, Artificial Sequence
  Description of Artificial Sequence: Synthetic oligonucleotide
ccgucauaggccuucagaa

SEQ ID NO: 1246700 - RNA, 19 nt, Artificial Sequence
  Description of Artificial Sequence: Synthetic oligonucleotide
uaguucuugcaggcccaca

SEQ ID NO: 1246701 - RNA, 19 nt, Artificial Sequence
  Description of Artificial Sequence: Synthetic oligonucleotide
gacgggugacugucccgug

SEQ ID NO: 1246702 - RNA, 19 nt, Artificial Sequence
  Description of Artificial Sequence: Synthetic oligonucleotide
agacgucaucaggccaagg

SEQ ID NO: 1246703 - RNA, 19 nt, Artificial Sequence
  Description of Artificial Sequence: Synthetic oligonucleotide
cuggucgccaugggcgugc

SEQ ID NO: 1246704 - RNA, 19 nt, Artificial Sequence
  Description of Artificial Sequence: Synthetic oligonucleotide
cauuagggcucuuccacau

SEQ ID NO: 1246705 - RNA, 19 nt, Artificial Sequence
  Description of Artificial Sequence: Synthetic oligonucleotide
gguugcucuuaaugguguc

SEQ ID NO: 1246706 - RNA, 19 nt, Artificial Sequence
  Description of Artificial Sequence: Synthetic oligonucleotide
gguaaugacgggugacugu

SEQ ID NO: 1246707 - RNA, 19 nt, Artificial Sequence
  Description of Artificial Sequence: Synthetic oligonucleotide
uguccaccgugagggaaaa

SEQ ID NO: 1246708 - RNA, 19 nt, Artificial Sequence
  Description of Artificial Sequence: Synthetic oligonucleotide
cuugaacgugccagcucga

SEQ ID NO: 1246709 - RNA, 19 nt, Artificial Sequence
  Description of Artificial Sequence: Synthetic oligonucleotide
auccucuugucugcauagu

SEQ ID NO: 1246710 - RNA, 19 nt, Artificial Sequence
  Description of Artificial Sequence: Synthetic oligonucleotide
cuugagccaggaugucgga

SEQ ID NO: 1246711 - RNA, 19 nt, Artificial Sequence
  Description of Artificial Sequence: Synthetic oligonucleotide
cuccgucauaguucuugca

SEQ ID NO: 1246712 - RNA, 19 nt, Artificial Sequence
  Description of Artificial Sequence: Synthetic oligonucleotide
cugaggccguggaugcauc

SEQ ID NO: 1246713 - RNA, 19 nt, Artificial Sequence
  Description of Artificial Sequence: Synthetic oligonucleotide
acccucuaccauguaugga

SEQ ID NO: 1246714 - RNA, 19 nt, Artificial Sequence
  Description of Artificial Sequence: Synthetic oligonucleotide
cagacgucaucaggccaag

SEQ ID NO: 1246715 - RNA, 19 nt, Artificial Sequence
  Description of Artificial Sequence: Synthetic oligonucleotide
caaagccaccugaagacuu

SEQ ID NO: 1246716 - RNA, 19 nt, Artificial Sequence
  Description of Artificial Sequence: Synthetic oligonucleotide
gcgagucaucucaucgccg

SEQ ID NO: 1246717 - RNA, 19 nt, Artificial Sequence
  Description of Artificial Sequence: Synthetic oligonucleotide
ggaugucggacuguacauc

SEQ ID NO: 1246718 - RNA, 19 nt, Artificial Sequence
  Description of Artificial Sequence: Synthetic oligonucleotide
gugcucaaguagagcggcc

SEQ ID NO: 1246719 - RNA, 19 nt, Artificial Sequence
  Description of Artificial Sequence: Synthetic oligonucleotide
augaugcgagucaucucau

SEQ ID NO: 1246720 - RNA, 19 nt, Artificial Sequence
  Description of Artificial Sequence: Synthetic oligonucleotide
augcauccagccagguccu

SEQ ID NO: 1246721 - RNA, 19 nt, Artificial Sequence
  Description of Artificial Sequence: Synthetic oligonucleotide
cccuagaaaggccaccaga

SEQ ID NO: 1246722 - RNA, 19 nt, Artificial Sequence
  Description of Artificial Sequence: Synthetic oligonucleotide
ugguccagccagggacaag

SEQ ID NO: 1246723 - RNA, 19 nt, Artificial Sequence
  Description of Artificial Sequence: Synthetic oligonucleotide
cccacacaaagccaccuga

SEQ ID NO: 1246724 - RNA, 19 nt, Artificial Sequence
  Description of Artificial Sequence: Synthetic oligonucleotide
ggcccuucuggugcucucg

SEQ ID NO: 1246725 - RNA, 19 nt, Artificial Sequence
  Description of Artificial Sequence: Synthetic oligonucleotide
gucagggcggccggugccc

SEQ ID NO: 1246726 - RNA, 19 nt, Artificial Sequence
  Description of Artificial Sequence: Synthetic oligonucleotide
gccuaguguccaccgugag

SEQ ID NO: 1246727 - RNA, 19 nt, Artificial Sequence
  Description of Artificial Sequence: Synthetic oligonucleotide
gguaacgaacacugcuccu

SEQ ID NO: 1246728 - RNA, 19 nt, Artificial Sequence
  Description of Artificial Sequence: Synthetic oligonucleotide
acuggucgccaugggcgug

SEQ ID NO: 1246729 - RNA, 19 nt, Artificial Sequence
  Description of Artificial Sequence: Synthetic oligonucleotide
gcuucccucgaugcucuag

SEQ ID NO: 1246730 - RNA, 19 nt, Artificial Sequence
  Description of Artificial Sequence: Synthetic oligonucleotide
cccgucauaggccuucaga

SEQ ID NO: 1246731 - RNA, 19 nt, Artificial Sequence
  Description of Artificial Sequence: Synthetic oligonucleotide
gaggcucacccucuaccau

SEQ ID NO: 1246732 - RNA, 19 nt, Artificial Sequence
  Description of Artificial Sequence: Synthetic oligonucleotide
cggacuguacaucuccguc

SEQ ID NO: 1246733 - RNA, 19 nt, Artificial Sequence
  Description of Artificial Sequence: Synthetic oligonucleotide
caucuugaacgugccagcu

SEQ ID NO: 1246734 - RNA, 19 nt, Artificial Sequence
  Description of Artificial Sequence: Synthetic oligonucleotide
gcaaagcccgaaauggacu

SEQ ID NO: 1246735 - RNA, 19 nt, Artificial Sequence
  Description of Artificial Sequence: Synthetic oligonucleotide
cgaugcucguaccagaucu

SEQ ID NO: 1246736 - RNA, 19 nt, Artificial Sequence
  Description of Artificial Sequence: Synthetic oligonucleotide
cugugcgcaaagcccgaaa

SEQ ID NO: 1246737 - RNA, 19 nt, Artificial Sequence
  Description of Artificial Sequence: Synthetic oligonucleotide
cccaauggugauggguuug

SEQ ID NO: 1246738 - RNA, 19 nt, Artificial Sequence
  Description of Artificial Sequence: Synthetic oligonucleotide
uggcgccguggcugcuccg

SEQ ID NO: 1246739 - RNA, 19 nt, Artificial Sequence
  Description of Artificial Sequence: Synthetic oligonucleotide
cuguggccuuguacugguc

SEQ ID NO: 1246740 - RNA, 19 nt, Artificial Sequence
  Description of Artificial Sequence: Synthetic oligonucleotide
caaagucuguggccuugua

SEQ ID NO: 1246741 - RNA, 19 nt, Artificial Sequence
  Description of Artificial Sequence: Synthetic oligonucleotide
ggguugguacugguggguc

SEQ ID NO: 1246742 - RNA, 19 nt, Artificial Sequence
  Description of Artificial Sequence: Synthetic oligonucleotide
gccgccggcagggaaguug

SEQ ID NO: 1246743 - RNA, 19 nt, Artificial Sequence
  Description of Artificial Sequence: Synthetic oligonucleotide
cgauuuggaagcccgaggu

SEQ ID NO: 1246744 - RNA, 19 nt, Artificial Sequence
  Description of Artificial Sequence: Synthetic oligonucleotide
cacgagccucaucaggggu

SEQ ID NO: 1246745 - RNA, 19 nt, Artificial Sequence
  Description of Artificial Sequence: Synthetic oligonucleotide
ccaggaugucggacuguac

SEQ ID NO: 1246746 - RNA, 19 nt, Artificial Sequence
  Description of Artificial Sequence: Synthetic oligonucleotide
caucgccguccaucuccac

SEQ ID NO: 1246747 - RNA, 19 nt, Artificial Sequence
  Description of Artificial Sequence: Synthetic oligonucleotide
ggccguggaugcauccagc

SEQ ID NO: 1246748 - RNA, 19 nt, Artificial Sequence
  Description of Artificial Sequence: Synthetic oligonucleotide
ggcgugccucccaauggug

SEQ ID NO: 1246749 - RNA, 19 nt, Artificial Sequence
  Description of Artificial Sequence: Synthetic oligonucleotide
cgggugacugucccgugag

SEQ ID NO: 1246750 - RNA, 19 nt, Artificial Sequence
  Description of Artificial Sequence: Synthetic oligonucleotide
cgguaaugacgggugacug

SEQ ID NO: 1246751 - RNA, 19 nt, Artificial Sequence
  Description of Artificial Sequence: Synthetic oligonucleotide
uggacucgucgguguugua

SEQ ID NO: 1246752 - RNA, 19 nt, Artificial Sequence
  Description of Artificial Sequence: Synthetic oligonucleotide
gcgcaaagcccgaaaugga

SEQ ID NO: 1246753 - RNA, 19 nt, Artificial Sequence
  Description of Artificial Sequence: Synthetic oligonucleotide
cccguguccaagcaaagau

SEQ ID NO: 1246754 - RNA, 19 nt, Artificial Sequence
  Description of Artificial Sequence: Synthetic oligonucleotide
caugcccacgccgccggca

SEQ ID NO: 1246755 - RNA, 19 nt, Artificial Sequence
  Description of Artificial Sequence: Synthetic oligonucleotide
ccuugaaacgcccgucaua

SEQ ID NO: 1246756 - RNA, 19 nt, Artificial Sequence
  Description of Artificial Sequence: Synthetic oligonucleotide
gugggucggcccuucuggu

SEQ ID NO: 1246757 - RNA, 19 nt, Artificial Sequence
  Description of Artificial Sequence: Synthetic oligonucleotide
cauugcugaggccguggau

SEQ ID NO: 1246758 - RNA, 19 nt, Artificial Sequence
  Description of Artificial Sequence: Synthetic oligonucleotide
gcgugccucccaaugguga

SEQ ID NO: 1246759 - RNA, 19 nt, Artificial Sequence
  Description of Artificial Sequence: Synthetic oligonucleotide
acgccgccggcagggaagu

SEQ ID NO: 1246760 - RNA, 19 nt, Artificial Sequence
  Description of Artificial Sequence: Synthetic oligonucleotide
gccucccaauggugauggg

SEQ ID NO: 1246761 - RNA, 19 nt, Artificial Sequence
  Description of Artificial Sequence: Synthetic oligonucleotide
aacgcccgucauaggccuu

SEQ ID NO: 1246762 - RNA, 19 nt, Artificial Sequence
  Description of Artificial Sequence: Synthetic oligonucleotide
aggcucgcgccgagccagg

SEQ ID NO: 1246763 - RNA, 19 nt, Artificial Sequence
  Description of Artificial Sequence: Synthetic oligonucleotide
gguucccauccagcuuccc

SEQ ID NO: 1246764 - RNA, 19 nt, Artificial Sequence
  Description of Artificial Sequence: Synthetic oligonucleotide
gggcgugccucccaauggu

SEQ ID NO: 1246765 - RNA, 19 nt, Artificial Sequence
  Description of Artificial Sequence: Synthetic oligonucleotide
cugugaggcucacccucua

SEQ ID NO: 1246766 - RNA, 19 nt, Artificial Sequence
  Description of Artificial Sequence: Synthetic oligonucleotide
ccucuaccauguauggagu

SEQ ID NO: 1246767 - RNA, 19 nt, Artificial Sequence
  Description of Artificial Sequence: Synthetic oligonucleotide
ccgaaauggacucgucggu

SEQ ID NO: 1246768 - RNA, 19 nt, Artificial Sequence
  Description of Artificial Sequence: Synthetic oligonucleotide
gcccgucauaggccuucag

SEQ ID NO: 1246769 - RNA, 19 nt, Artificial Sequence
  Description of Artificial Sequence: Synthetic oligonucleotide
gcguggggacagucagggc

SEQ ID NO: 1246770 - RNA, 19 nt, Artificial Sequence
  Description of Artificial Sequence: Synthetic oligonucleotide
cgucgguguuguacauccc

SEQ ID NO: 1246771 - RNA, 19 nt, Artificial Sequence
  Description of Artificial Sequence: Synthetic oligonucleotide
agcuucccucgaugcucua

SEQ ID NO: 1246772 - RNA, 19 nt, Artificial Sequence
  Description of Artificial Sequence: Synthetic oligonucleotide
ccaugugauucagagcagu

SEQ ID NO: 1246773 - RNA, 19 nt, Artificial Sequence
  Description of Artificial Sequence: Synthetic oligonucleotide
gugcccaggcucgcgccga

SEQ ID NO: 1246774 - RNA, 19 nt, Artificial Sequence
  Description of Artificial Sequence: Synthetic oligonucleotide
caaggauguuccggauggu

SEQ ID NO: 1246775 - RNA, 19 nt, Artificial Sequence
  Description of Artificial Sequence: Synthetic oligonucleotide
ccucccaauggugaugggu

SEQ ID NO: 1246776 - RNA, 19 nt, Artificial Sequence
  Description of Artificial Sequence: Synthetic oligonucleotide
gcauaguggcgccguggcu

SEQ ID NO: 1246777 - RNA, 19 nt, Artificial Sequence
  Description of Artificial Sequence: Synthetic oligonucleotide
ccgugguguucaggaagug

SEQ ID NO: 1246778 - RNA, 19 nt, Artificial Sequence
  Description of Artificial Sequence: Synthetic oligonucleotide
cgucauaggccuucagaau

SEQ ID NO: 1246779 - RNA, 19 nt, Artificial Sequence
  Description of Artificial Sequence: Synthetic oligonucleotide
ccccguguccaagcaaaga

SEQ ID NO: 1246780 - RNA, 19 nt, Artificial Sequence
  Description of Artificial Sequence: Synthetic oligonucleotide
gcagaccagcacagacguc

SEQ ID NO: 1246781 - RNA, 19 nt, Artificial Sequence
  Description of Artificial Sequence: Synthetic oligonucleotide
gucggcccuucuggugcuc

SEQ ID NO: 1246782 - RNA, 19 nt, Artificial Sequence
  Description of Artificial Sequence: Synthetic oligonucleotide
ggucggcccuucuggugcu

SEQ ID NO: 1246783 - RNA, 19 nt, Artificial Sequence
  Description of Artificial Sequence: Synthetic oligonucleotide
ugguuccauuagggcucuu

SEQ ID NO: 1246784 - RNA, 19 nt, Artificial Sequence
  Description of Artificial Sequence: Synthetic oligonucleotide
ccgccggcagggaaguugu

SEQ ID NO: 1246785 - RNA, 19 nt, Artificial Sequence
  Description of Artificial Sequence: Synthetic oligonucleotide
ccugccuaguguccaccgu

SEQ ID NO: 1246786 - RNA, 19 nt, Artificial Sequence
  Description of Artificial Sequence: Synthetic oligonucleotide
ggcucgcgccgagccagga

SEQ ID NO: 1246787 - RNA, 19 nt, Artificial Sequence
  Description of Artificial Sequence: Synthetic oligonucleotide
cgugccucccaauggugau

SEQ ID NO: 1246788 - RNA, 19 nt, Artificial Sequence
  Description of Artificial Sequence: Synthetic oligonucleotide
cgguguuguacauccccau

SEQ ID NO: 1246789 - RNA, 19 nt, Artificial Sequence
  Description of Artificial Sequence: Synthetic oligonucleotide
cauccacgugaggcaggau

SEQ ID NO: 1246790 - RNA, 19 nt, Artificial Sequence
  Description of Artificial Sequence: Synthetic oligonucleotide
gcgccgagccaggagcuuu

SEQ ID NO: 1246791 - RNA, 19 nt, Artificial Sequence
  Description of Artificial Sequence: Synthetic oligonucleotide
cgcccgucauaggccuuca

SEQ ID NO: 1246792 - RNA, 19 nt, Artificial Sequence
  Description of Artificial Sequence: Synthetic oligonucleotide
gaaugcaauaaauagaggc

SEQ ID NO: 1246793 - RNA, 19 nt, Artificial Sequence
  Description of Artificial Sequence: Synthetic oligonucleotide
aaaauaggucuucacuugc

SEQ ID NO: 1246794 - RNA, 19 nt, Artificial Sequence
  Description of Artificial Sequence: Synthetic oligonucleotide
aucucuaccgaucaguccc

SEQ ID NO: 1246795 - RNA, 19 nt, Artificial Sequence
  Description of Artificial Sequence: Synthetic oligonucleotide
aaauacucuauucagugcu

SEQ ID NO: 1246796 - RNA, 19 nt, Artificial Sequence
  Description of Artificial Sequence: Synthetic oligonucleotide
auagacaucagacauggag

SEQ ID NO: 1246797 - RNA, 19 nt, Artificial Sequence
  Description of Artificial Sequence: Synthetic oligonucleotide
aaaguucaauuaaacaugc

SEQ ID NO: 1246798 - RNA, 19 nt, Artificial Sequence
  Description of Artificial Sequence: Synthetic oligonucleotide
aaagccauugguuucccgg

SEQ ID NO: 1246799 - RNA, 19 nt, Artificial Sequence
  Description of Artificial Sequence: Synthetic oligonucleotide
cagaaugcaauaaauagag

SEQ ID NO: 1246800 - RNA, 19 nt, Artificial Sequence
  Description of Artificial Sequence: Synthetic oligonucleotide
aauuguucgauuuggauuu

SEQ ID NO: 1246801 - RNA, 19 nt, Artificial Sequence
  Description of Artificial Sequence: Synthetic oligonucleotide
uggaauucaagaaggagag

SEQ ID NO: 1246802 - RNA, 19 nt, Artificial Sequence
  Description of Artificial Sequence: Synthetic oligonucleotide
acagucuccauucaaguuc

SEQ ID NO: 1246803 - RNA, 19 nt, Artificial Sequence
  Description of Artificial Sequence: Synthetic oligonucleotide
agguacuguggucagaacc

SEQ ID NO: 1246804 - RNA, 19 nt, Artificial Sequence
  Description of Artificial Sequence: Synthetic oligonucleotide
cacagaaucgcuucaaggg

SEQ ID NO: 1246805 - RNA, 19 nt, Artificial Sequence
  Description of Artificial Sequence: Synthetic oligonucleotide
aaguggaagguucuggcag

SEQ ID NO: 1246806 - RNA, 19 nt, Artificial Sequence
  Description of Artificial Sequence: Synthetic oligonucleotide
auaaauagaggcaggggcc

SEQ ID NO: 1246807 - RNA, 19 nt, Artificial Sequence
  Description of Artificial Sequence: Synthetic oligonucleotide
aaugcaauaaauagaggca

SEQ ID NO: 1246808 - RNA, 19 nt, Artificial Sequence
  Description of Artificial Sequence: Synthetic oligonucleotide
aaaaccggaagcugcaugu

SEQ ID NO: 1246809 - RNA, 19 nt, Artificial Sequence
  Description of Artificial Sequence: Synthetic oligonucleotide
uucaaguucaaguaauccu

SEQ ID NO: 1246810 - RNA, 19 nt, Artificial Sequence
  Description of Artificial Sequence: Synthetic oligonucleotide
ucuccauucaaguucaagu

SEQ ID NO: 1246811 - RNA, 19 nt, Artificial Sequence
  Description of Artificial Sequence: Synthetic oligonucleotide
gauaucacgcgccucacgc

SEQ ID NO: 1246812 - RNA, 19 nt, Artificial Sequence
  Description of Artificial Sequence: Synthetic oligonucleotide
agugaaaaccggaagcugc

SEQ ID NO: 1246813 - RNA, 19 nt, Artificial Sequence
  Description of Artificial Sequence: Synthetic oligonucleotide
cacacaaaggcucuggacc

SEQ ID NO: 1246814 - RNA, 19 nt, Artificial Sequence
  Description of Artificial Sequence: Synthetic oligonucleotide
gcagauuucaaagaaaagg

SEQ ID NO: 1246815 - RNA, 19 nt, Artificial Sequence
  Description of Artificial Sequence: Synthetic oligonucleotide
aagaugaugcgacgacccc

SEQ ID NO: 1246816 - RNA, 19 nt, Artificial Sequence
  Description of Artificial Sequence: Synthetic oligonucleotide
ugaguugauagacaucaga

SEQ ID NO: 1246817 - RNA, 19 nt, Artificial Sequence
  Description of Artificial Sequence: Synthetic oligonucleotide
agccuucuagcccagaggg

SEQ ID NO: 1246818 - RNA, 19 nt, Artificial Sequence
  Description of Artificial Sequence: Synthetic oligonucleotide
uguuccucugcucaagagc

SEQ ID NO: 1246819 - RNA, 19 nt, Artificial Sequence
  Description of Artificial Sequence: Synthetic oligonucleotide
aauccuaggcacucuucuc

SEQ ID NO: 1246820 - RNA, 19 nt, Artificial Sequence
  Description of Artificial Sequence: Synthetic oligonucleotide
aagccauugguuucccggg

SEQ ID NO: 1246821 - RNA, 19 nt, Artificial Sequence
  Description of Artificial Sequence: Synthetic oligonucleotide
ugaggcaucagagggaaag

SEQ ID NO: 1246822 - RNA, 19 nt, Artificial Sequence
  Description of Artificial Sequence: Synthetic oligonucleotide
gaaaggaugugaguguucc

SEQ ID NO: 1246823 - RNA, 19 nt, Artificial Sequence
  Description of Artificial Sequence: Synthetic oligonucleotide
cuugaguugauagacauca

SEQ ID NO: 1246824 - RNA, 19 nt, Artificial Sequence
  Description of Artificial Sequence: Synthetic oligonucleotide
aaagggaacuuucuagaaa

SEQ ID NO: 1246825 - RNA, 19 nt, Artificial Sequence
  Description of Artificial Sequence: Synthetic oligonucleotide
gaguugauagacaucagac

SEQ ID NO: 1246826 - RNA, 19 nt, Artificial Sequence
  Description of Artificial Sequence: Synthetic oligonucleotide
aguccaugacuguacaguc

SEQ ID NO: 1246827 - RNA, 19 nt, Artificial Sequence
  Description of Artificial Sequence: Synthetic oligonucleotide
ugcagauuucaaagaaaag

SEQ ID NO: 1246828 - RNA, 19 nt, Artificial Sequence
  Description of Artificial Sequence: Synthetic oligonucleotide
uguggcuaaguccaugacu

SEQ ID NO: 1246829 - RNA, 19 nt, Artificial Sequence
  Description of Artificial Sequence: Synthetic oligonucleotide
aguugauagacaucagaca

SEQ ID NO: 1246830 - RNA, 19 nt, Artificial Sequence
  Description of Artificial Sequence: Synthetic oligonucleotide
augcaauaaauagaggcag

SEQ ID NO: 1246831 - RNA, 19 nt, Artificial Sequence
  Description of Artificial Sequence: Synthetic oligonucleotide
ucaaguaauccuaggcacu

SEQ ID NO: 1246832 - RNA, 19 nt, Artificial Sequence
  Description of Artificial Sequence: Synthetic oligonucleotide
uuccgcacuuucucgaugg

SEQ ID NO: 1246833 - RNA, 19 nt, Artificial Sequence
  Description of Artificial Sequence: Synthetic oligonucleotide
aaguccaugacuguacagu

SEQ ID NO: 1246834 - RNA, 19 nt, Artificial Sequence
  Description of Artificial Sequence: Synthetic oligonucleotide
aagacgcgggauaucacgc

SEQ ID NO: 1246835 - RNA, 19 nt, Artificial Sequence
  Description of Artificial Sequence: Synthetic oligonucleotide
aggaagaugaugcgacgac

SEQ ID NO: 1246836 - RNA, 19 nt, Artificial Sequence
  Description of Artificial Sequence: Synthetic oligonucleotide
caagacgcgggauaucacg

SEQ ID NO: 1246837 - RNA, 19 nt, Artificial Sequence
  Description of Artificial Sequence: Synthetic oligonucleotide
gaagcugcaugugugugcg

SEQ ID NO: 1246838 - RNA, 19 nt, Artificial Sequence
  Description of Artificial Sequence: Synthetic oligonucleotide
gaagaugaugcgacgaccc

SEQ ID NO: 1246839 - RNA, 19 nt, Artificial Sequence
  Description of Artificial Sequence: Synthetic oligonucleotide
cuaucugucacaggcaccc

SEQ ID NO: 1246840 - RNA, 19 nt, Artificial Sequence
  Description of Artificial Sequence: Synthetic oligonucleotide
ugaauuguucgauuuggau

SEQ ID NO: 1246841 - RNA, 19 nt, Artificial Sequence
  Description of Artificial Sequence: Synthetic oligonucleotide
uggucugcggcacuucagg

SEQ ID NO: 1246842 - RNA, 19 nt, Artificial Sequence
  Description of Artificial Sequence: Synthetic oligonucleotide
gaugcgacgaccccacgcc

SEQ ID NO: 1246843 - RNA, 19 nt, Artificial Sequence
  Description of Artificial Sequence: Synthetic oligonucleotide
ugaauauccucagggaugu

SEQ ID NO: 1246844 - RNA, 19 nt, Artificial Sequence
  Description of Artificial Sequence: Synthetic oligonucleotide
aacggcccgacauggcggc

SEQ ID NO: 1246845 - RNA, 19 nt, Artificial Sequence
  Description of Artificial Sequence: Synthetic oligonucleotide
uggucagaaccuccaaucc

SEQ ID NO: 1246846 - RNA, 19 nt, Artificial Sequence
  Description of Artificial Sequence: Synthetic oligonucleotide
acagaaucgcuucaagggu

SEQ ID NO: 1246847 - RNA, 19 nt, Artificial Sequence
  Description of Artificial Sequence: Synthetic oligonucleotide
aguggaagguucuggcagg

SEQ ID NO: 1246848 - RNA, 19 nt, Artificial Sequence
  Description of Artificial Sequence: Synthetic oligonucleotide
ugcuaucugucacaggcac

SEQ ID NO: 1246849 - RNA, 19 nt, Artificial Sequence
  Description of Artificial Sequence: Synthetic oligonucleotide
gguugguccacacagaauc

SEQ ID NO: 1246850 - RNA, 19 nt, Artificial Sequence
  Description of Artificial Sequence: Synthetic oligonucleotide
gaaggagagaggaauuggc

SEQ ID NO: 1246851 - RNA, 19 nt, Artificial Sequence
  Description of Artificial Sequence: Synthetic oligonucleotide
uagcuuuccaacguggucu

SEQ ID NO: 1246852 - RNA, 19 nt, Artificial Sequence
  Description of Artificial Sequence: Synthetic oligonucleotide
uggugcuagcuuuccaacg

SEQ ID NO: 1246853 - RNA, 19 nt, Artificial Sequence
  Description of Artificial Sequence: Synthetic oligonucleotide
ucuagggugccuuccacac

SEQ ID NO: 1246854 - RNA, 19 nt, Artificial Sequence
  Description of Artificial Sequence: Synthetic oligonucleotide
gaaaaccggaagcugcaug

SEQ ID NO: 1246855 - RNA, 19 nt, Artificial Sequence
  Description of Artificial Sequence: Synthetic oligonucleotide
uuuccaacguggucugcgg

SEQ ID NO: 1246856 - RNA, 19 nt, Artificial Sequence
  Description of Artificial Sequence: Synthetic oligonucleotide
ugcugaauuguucgauuug

SEQ ID NO: 1246857 - RNA, 19 nt, Artificial Sequence
  Description of Artificial Sequence: Synthetic oligonucleotide
uggacagugaaaaccggaa

SEQ ID NO: 1246858 - RNA, 19 nt, Artificial Sequence
  Description of Artificial Sequence: Synthetic oligonucleotide
acuuucuagaaagucugag

SEQ ID NO: 1246859 - RNA, 19 nt, Artificial Sequence
  Description of Artificial Sequence: Synthetic oligonucleotide
uggggugcagaaaggaugu

SEQ ID NO: 1246860 - RNA, 19 nt, Artificial Sequence
  Description of Artificial Sequence: Synthetic oligonucleotide
ugaugcgacgaccccacgc

SEQ ID NO: 1246861 - RNA, 19 nt, Artificial Sequence
  Description of Artificial Sequence: Synthetic oligonucleotide
uccaccuugaguugauaga

SEQ ID NO: 1246862 - RNA, 19 nt, Artificial Sequence
  Description of Artificial Sequence: Synthetic oligonucleotide
aucagagcucggcuaggcc

SEQ ID NO: 1246863 - RNA, 19 nt, Artificial Sequence
  Description of Artificial Sequence: Synthetic oligonucleotide
agugcggaagucugaagug

SEQ ID NO: 1246864 - RNA, 19 nt, Artificial Sequence
  Description of Artificial Sequence: Synthetic oligonucleotide
acaggaagaugaugcgacg

SEQ ID NO: 1246865 - RNA, 19 nt, Artificial Sequence
  Description of Artificial Sequence: Synthetic oligonucleotide
caacuucagaugcaggcag

SEQ ID NO: 1246866 - RNA, 19 nt, Artificial Sequence
  Description of Artificial Sequence: Synthetic oligonucleotide
auaggucuucacuugcugu

SEQ ID NO: 1246867 - RNA, 19 nt, Artificial Sequence
  Description of Artificial Sequence: Synthetic oligonucleotide
gaauuguucgauuuggauu

SEQ ID NO: 1246868 - RNA, 19 nt, Artificial Sequence
  Description of Artificial Sequence: Synthetic oligonucleotide
acaucagacauggagcucu

SEQ ID NO: 1246869 - RNA, 19 nt, Artificial Sequence
  Description of Artificial Sequence: Synthetic oligonucleotide
uaggccagaaugcaauaaa

SEQ ID NO: 1246870 - RNA, 19 nt, Artificial Sequence
  Description of Artificial Sequence: Synthetic oligonucleotide
gacccuagugcuugccugg

SEQ ID NO: 1246871 - RNA, 19 nt, Artificial Sequence
  Description of Artificial Sequence: Synthetic oligonucleotide
cuaggcacucuucucuagg

SEQ ID NO: 1246872 - RNA, 19 nt, Artificial Sequence
  Description of Artificial Sequence: Synthetic oligonucleotide
gcuggaaugcaauggacag

SEQ ID NO: 1246873 - RNA, 19 nt, Artificial Sequence
  Description of Artificial Sequence: Synthetic oligonucleotide
accuugaguugauagacau

SEQ ID NO: 1246874 - RNA, 19 nt, Artificial Sequence
  Description of Artificial Sequence: Synthetic oligonucleotide
cuggaccccagcaucagag

SEQ ID NO: 1246875 - RNA, 19 nt, Artificial Sequence
  Description of Artificial Sequence: Synthetic oligonucleotide
agcaacuggggcaucuacc

SEQ ID NO: 1246876 - RNA, 19 nt, Artificial Sequence
  Description of Artificial Sequence: Synthetic oligonucleotide
cuuuccaacguggucugcg

SEQ ID NO: 1246877 - RNA, 19 nt, Artificial Sequence
  Description of Artificial Sequence: Synthetic oligonucleotide
cagaaucgcuucaagggug

SEQ ID NO: 1246878 - RNA, 19 nt, Artificial Sequence
  Description of Artificial Sequence: Synthetic oligonucleotide
ugcggaagucugaagugug

SEQ ID NO: 1246879 - RNA, 19 nt, Artificial Sequence
  Description of Artificial Sequence: Synthetic oligonucleotide
cagugauggcuccucaagg

SEQ ID NO: 1246880 - RNA, 19 nt, Artificial Sequence
  Description of Artificial Sequence: Synthetic oligonucleotide
uucuccucguggcagcgcc

SEQ ID NO: 1246881 - RNA, 19 nt, Artificial Sequence
  Description of Artificial Sequence: Synthetic oligonucleotide
uugaguugauagacaucag

SEQ ID NO: 1246882 - RNA, 19 nt, Artificial Sequence
  Description of Artificial Sequence: Synthetic oligonucleotide
auaucacgcgccucacgcg

SEQ ID NO: 1246883 - RNA, 19 nt, Artificial Sequence
  Description of Artificial Sequence: Synthetic oligonucleotide
guccaccuugaguugauag

SEQ ID NO: 1246884 - RNA, 19 nt, Artificial Sequence
  Description of Artificial Sequence: Synthetic oligonucleotide
uaucacgcgccucacgcgu

SEQ ID NO: 1246885 - RNA, 19 nt, Artificial Sequence
  Description of Artificial Sequence: Synthetic oligonucleotide
cuaaaauaggucuucacuu

SEQ ID NO: 1246886 - RNA, 19 nt, Artificial Sequence
  Description of Artificial Sequence: Synthetic oligonucleotide
auauccucagggauguguc

SEQ ID NO: 1246887 - RNA, 19 nt, Artificial Sequence
  Description of Artificial Sequence: Synthetic oligonucleotide
ugauggcuccucaaggauc

SEQ ID NO: 1246888 - RNA, 19 nt, Artificial Sequence
  Description of Artificial Sequence: Synthetic oligonucleotide
cucggcuaggccagaaugc

SEQ ID NO: 1246889 - RNA, 19 nt, Artificial Sequence
  Description of Artificial Sequence: Synthetic oligonucleotide
uccuucgugagggugggag

SEQ ID NO: 1246890 - RNA, 19 nt, Artificial Sequence
  Description of Artificial Sequence: Synthetic oligonucleotide
aaaggaugugaguguuccu

SEQ ID NO: 1246891 - RNA, 19 nt, Artificial Sequence
  Description of Artificial Sequence: Synthetic oligonucleotide
uugcuguugcccauuucca

SEQ ID NO: 1246892 - RNA, 19 nt, Artificial Sequence
  Description of Artificial Sequence: Synthetic oligonucleotide
gaaagccauugguuucccg

SEQ ID NO: 1246893 - RNA, 19 nt, Artificial Sequence
  Description of Artificial Sequence: Synthetic oligonucleotide
gucagaaccuccaauccug

SEQ ID NO: 1246894 - RNA, 19 nt, Artificial Sequence
  Description of Artificial Sequence: Synthetic oligonucleotide
agagacucgcucugcuggg

SEQ ID NO: 1246895 - RNA, 19 nt, Artificial Sequence
  Description of Artificial Sequence: Synthetic oligonucleotide
augcagauuucaaagaaaa

SEQ ID NO: 1246896 - RNA, 19 nt, Artificial Sequence
  Description of Artificial Sequence: Synthetic oligonucleotide
uccuggaauucaagaagga

SEQ ID NO: 1246897 - RNA, 19 nt, Artificial Sequence
  Description of Artificial Sequence: Synthetic oligonucleotide
ucucggcccggaccgaacg

SEQ ID NO: 1246898 - RNA, 19 nt, Artificial Sequence
  Description of Artificial Sequence: Synthetic oligonucleotide
cugggguuucugcaguugg

SEQ ID NO: 1246899 - RNA, 19 nt, Artificial Sequence
  Description of Artificial Sequence: Synthetic oligonucleotide
gugaguguuccucugcuca

SEQ ID NO: 1246900 - RNA, 19 nt, Artificial Sequence
  Description of Artificial Sequence: Synthetic oligonucleotide
uccaacguggucugcggca

SEQ ID NO: 1246901 - RNA, 19 nt, Artificial Sequence
  Description of Artificial Sequence: Synthetic oligonucleotide
aucuaccagaggcaggccu

SEQ ID NO: 1246902 - RNA, 19 nt, Artificial Sequence
  Description of Artificial Sequence: Synthetic oligonucleotide
ucucuagugggaccggcuc

SEQ ID NO: 1246903 - RNA, 19 nt, Artificial Sequence
  Description of Artificial Sequence: Synthetic oligonucleotide
caucucuaccgaucagucc

SEQ ID NO: 1246904 - RNA, 19 nt, Artificial Sequence
  Description of Artificial Sequence: Synthetic oligonucleotide
agaaucgcuucaagggugg

SEQ ID NO: 1246905 - RNA, 19 nt, Artificial Sequence
  Description of Artificial Sequence: Synthetic oligonucleotide
uugcuaucugucacaggca

SEQ ID NO: 1246906 - RNA, 19 nt, Artificial Sequence
  Description of Artificial Sequence: Synthetic oligonucleotide
acagguacagacagccuuc

SEQ ID NO: 1246907 - RNA, 19 nt, Artificial Sequence
  Description of Artificial Sequence: Synthetic oligonucleotide
cacccauuugaauauccuc

SEQ ID NO: 1246908 - RNA, 19 nt, Artificial Sequence
  Description of Artificial Sequence: Synthetic oligonucleotide
agacgcgggauaucacgcg

SEQ ID NO: 1246909 - RNA, 19 nt, Artificial Sequence
  Description of Artificial Sequence: Synthetic oligonucleotide
ucagguugguccacacaga

SEQ ID NO: 1246910 - RNA, 19 nt, Artificial Sequence
  Description of Artificial Sequence: Synthetic oligonucleotide
ugugugcguggugaguggg

SEQ ID NO: 1246911 - RNA, 19 nt, Artificial Sequence
  Description of Artificial Sequence: Synthetic oligonucleotide
uugcugaauuguucgauuu

SEQ ID NO: 1246912 - RNA, 19 nt, Artificial Sequence
  Description of Artificial Sequence: Synthetic oligonucleotide
ggaugcuggaaugcaaugg

SEQ ID NO: 1246913 - RNA, 19 nt, Artificial Sequence
  Description of Artificial Sequence: Synthetic oligonucleotide
gaugaugcgacgaccccac

SEQ ID NO: 1246914 - RNA, 19 nt, Artificial Sequence
  Description of Artificial Sequence: Synthetic oligonucleotide
aguaauccuaggcacucuu

SEQ ID NO: 1246915 - RNA, 19 nt, Artificial Sequence
  Description of Artificial Sequence: Synthetic oligonucleotide
gacgcgggauaucacgcgc

SEQ ID NO: 1246916 - RNA, 19 nt, Artificial Sequence
  Description of Artificial Sequence: Synthetic oligonucleotide
ggacacugcucccaagacg

SEQ ID NO: 1246917 - RNA, 19 nt, Artificial Sequence
  Description of Artificial Sequence: Synthetic oligonucleotide
uaggucuucacuugcuguu

SEQ ID NO: 1246918 - RNA, 19 nt, Artificial Sequence
  Description of Artificial Sequence: Synthetic oligonucleotide
gagggcucccacacaaagg

SEQ ID NO: 1246919 - RNA, 19 nt, Artificial Sequence
  Description of Artificial Sequence: Synthetic oligonucleotide
guggcuuggggccaggaca

SEQ ID NO: 1246920 - RNA, 19 nt, Artificial Sequence
  Description of Artificial Sequence: Synthetic oligonucleotide
cuucgugagggugggaggc

SEQ ID NO: 1246921 - RNA, 19 nt, Artificial Sequence
  Description of Artificial Sequence: Synthetic oligonucleotide
caaguaauccuaggcacuc

SEQ ID NO: 1246922 - RNA, 19 nt, Artificial Sequence
  Description of Artificial Sequence: Synthetic oligonucleotide
ggagagaggaauuggcuga

SEQ ID NO: 1246923 - RNA, 19 nt, Artificial Sequence
  Description of Artificial Sequence: Synthetic oligonucleotide
uuccaacguggucugcggc

SEQ ID NO: 1246924 - RNA, 19 nt, Artificial Sequence
  Description of Artificial Sequence: Synthetic oligonucleotide
agugggaccggcucuuccu

SEQ ID NO: 1246925 - RNA, 19 nt, Artificial Sequence
  Description of Artificial Sequence: Synthetic oligonucleotide
ggacagugaaaaccggaag

SEQ ID NO: 1246926 - RNA, 19 nt, Artificial Sequence
  Description of Artificial Sequence: Synthetic oligonucleotide
ucagugcggaagucugaag

SEQ ID NO: 1246927 - RNA, 19 nt, Artificial Sequence
  Description of Artificial Sequence: Synthetic oligonucleotide
cuccauucaaguucaagua

SEQ ID NO: 1246928 - RNA, 19 nt, Artificial Sequence
  Description of Artificial Sequence: Synthetic oligonucleotide
guggucugugucucuagug

SEQ ID NO: 1246929 - RNA, 19 nt, Artificial Sequence
  Description of Artificial Sequence: Synthetic oligonucleotide
augcgacgaccccacgccc

SEQ ID NO: 1246930 - RNA, 19 nt, Artificial Sequence
  Description of Artificial Sequence: Synthetic oligonucleotide
aacuuucuagaaagucuga

SEQ ID NO: 1246931 - RNA, 19 nt, Artificial Sequence
  Description of Artificial Sequence: Synthetic oligonucleotide
ucacgcgccucacgcgucg

SEQ ID NO: 1246932 - RNA, 19 nt, Artificial Sequence
  Description of Artificial Sequence: Synthetic oligonucleotide
cuucacuugcuguugccca

SEQ ID NO: 1246933 - RNA, 19 nt, Artificial Sequence
  Description of Artificial Sequence: Synthetic oligonucleotide
cagccuucuagcccagagg

SEQ ID NO: 1246934 - RNA, 19 nt, Artificial Sequence
  Description of Artificial Sequence: Synthetic oligonucleotide
ggaagguucuggcaggcac

SEQ ID NO: 1246935 - RNA, 19 nt, Artificial Sequence
  Description of Artificial Sequence: Synthetic oligonucleotide
ucucuagggugccuuccac

SEQ ID NO: 1246936 - RNA, 19 nt, Artificial Sequence
  Description of Artificial Sequence: Synthetic oligonucleotide
accgaacggcccgacaugg

SEQ ID NO: 1246937 - RNA, 19 nt, Artificial Sequence
  Description of Artificial Sequence: Synthetic oligonucleotide
ucggcuaggccagaaugca

SEQ ID NO: 1246938 - RNA, 19 nt, Artificial Sequence
  Description of Artificial Sequence: Synthetic oligonucleotide
cagagcucggcuaggccag

SEQ ID NO: 1246939 - RNA, 19 nt, Artificial Sequence
  Description of Artificial Sequence: Synthetic oligonucleotide
aaaccggaagcugcaugug

SEQ ID NO: 1246940 - RNA, 19 nt, Artificial Sequence
  Description of Artificial Sequence: Synthetic oligonucleotide
uacucuauucagugcuaaa

SEQ ID NO: 1246941 - RNA, 19 nt, Artificial Sequence
  Description of Artificial Sequence: Synthetic oligonucleotide
guggccugcccacagguac

SEQ ID NO: 1246942 - RNA, 19 nt, Artificial Sequence
  Description of Artificial Sequence: Synthetic oligonucleotide
agaugaugcgacgacccca

SEQ ID NO: 1246943 - RNA, 19 nt, Artificial Sequence
  Description of Artificial Sequence: Synthetic oligonucleotide
guguuccucugcucaagag

SEQ ID NO: 1246944 - RNA, 19 nt, Artificial Sequence
  Description of Artificial Sequence: Synthetic oligonucleotide
cuccacaucucuaccgauc

SEQ ID NO: 1246945 - RNA, 19 nt, Artificial Sequence
  Description of Artificial Sequence: Synthetic oligonucleotide
aauacucuauucagugcua

SEQ ID NO: 1246946 - RNA, 19 nt, Artificial Sequence
  Description of Artificial Sequence: Synthetic oligonucleotide
acuucagaugcaggcagug

SEQ ID NO: 1246947 - RNA, 19 nt, Artificial Sequence
  Description of Artificial Sequence: Synthetic oligonucleotide
agacagccuucccuccugg

SEQ ID NO: 1246948 - RNA, 19 nt, Artificial Sequence
  Description of Artificial Sequence: Synthetic oligonucleotide
gaccccacgcccuccauca

SEQ ID NO: 1246949 - RNA, 19 nt, Artificial Sequence
  Description of Artificial Sequence: Synthetic oligonucleotide
ucucuaccgaucagucccu

SEQ ID NO: 1246950 - RNA, 19 nt, Artificial Sequence
  Description of Artificial Sequence: Synthetic oligonucleotide
gaaggcagguacugugguc

SEQ ID NO: 1246951 - RNA, 19 nt, Artificial Sequence
  Description of Artificial Sequence: Synthetic oligonucleotide
aaguaauccuaggcacucu

SEQ ID NO: 1246952 - RNA, 19 nt, Artificial Sequence
  Description of Artificial Sequence: Synthetic oligonucleotide
uagugggaccggcucuucc

SEQ ID NO: 1246953 - RNA, 19 nt, Artificial Sequence
  Description of Artificial Sequence: Synthetic oligonucleotide
ucuaccgaucagucccucu

SEQ ID NO: 1246954 - RNA, 19 nt, Artificial Sequence
  Description of Artificial Sequence: Synthetic oligonucleotide
gcaucuaccagaggcaggc

SEQ ID NO: 1246955 - RNA, 19 nt, Artificial Sequence
  Description of Artificial Sequence: Synthetic oligonucleotide
aagagcaagcaggcacaag

SEQ ID NO: 1246956 - RNA, 19 nt, Artificial Sequence
  Description of Artificial Sequence: Synthetic oligonucleotide
augaaccuugaugcucugg

SEQ ID NO: 1246957 - RNA, 19 nt, Artificial Sequence
  Description of Artificial Sequence: Synthetic oligonucleotide
cugaauuguucgauuugga

SEQ ID NO: 1246958 - RNA, 19 nt, Artificial Sequence
  Description of Artificial Sequence: Synthetic oligonucleotide
gagcaacuggggcaucuac

SEQ ID NO: 1246959 - RNA, 19 nt, Artificial Sequence
  Description of Artificial Sequence: Synthetic oligonucleotide
ccuagugcuugccuggacc

SEQ ID NO: 1246960 - RNA, 19 nt, Artificial Sequence
  Description of Artificial Sequence: Synthetic oligonucleotide
accggcucuuccuucguga

SEQ ID NO: 1246961 - RNA, 19 nt, Artificial Sequence
  Description of Artificial Sequence: Synthetic oligonucleotide
ugcagggcucagagacucg

SEQ ID NO: 1246962 - RNA, 19 nt, Artificial Sequence
  Description of Artificial Sequence: Synthetic oligonucleotide
uggaccccagcaucagagc

SEQ ID NO: 1246963 - RNA, 19 nt, Artificial Sequence
  Description of Artificial Sequence: Synthetic oligonucleotide
auggacagugaaaaccgga

SEQ ID NO: 1246964 - RNA, 19 nt, Artificial Sequence
  Description of Artificial Sequence: Synthetic oligonucleotide
cauugguuucccggguugc

SEQ ID NO: 1246965 - RNA, 19 nt, Artificial Sequence
  Description of Artificial Sequence: Synthetic oligonucleotide
ucacgcgucgccguccacc

SEQ ID NO: 1246966 - RNA, 19 nt, Artificial Sequence
  Description of Artificial Sequence: Synthetic oligonucleotide
uaccgaucagucccucuuc

SEQ ID NO: 1246967 - RNA, 19 nt, Artificial Sequence
  Description of Artificial Sequence: Synthetic oligonucleotide
caaggguggggcaccggag

SEQ ID NO: 1246968 - RNA, 19 nt, Artificial Sequence
  Description of Artificial Sequence: Synthetic oligonucleotide
uggggcaccggaguccucc

SEQ ID NO: 1246969 - RNA, 19 nt, Artificial Sequence
  Description of Artificial Sequence: Synthetic oligonucleotide
gauggcuccucaaggaucu

SEQ ID NO: 1246970 - RNA, 19 nt, Artificial Sequence
  Description of Artificial Sequence: Synthetic oligonucleotide
ugcgacgaccccacgcccu

SEQ ID NO: 1246971 - RNA, 19 nt, Artificial Sequence
  Description of Artificial Sequence: Synthetic oligonucleotide
gaccgaacggcccgacaug

SEQ ID NO: 1246972 - RNA, 19 nt, Artificial Sequence
  Description of Artificial Sequence: Synthetic oligonucleotide
uucuagcccagagggcucc

SEQ ID NO: 1246973 - RNA, 19 nt, Artificial Sequence
  Description of Artificial Sequence: Synthetic oligonucleotide
cuagggugccuuccacacc

SEQ ID NO: 1246974 - RNA, 19 nt, Artificial Sequence
  Description of Artificial Sequence: Synthetic oligonucleotide
aggcacucuucucuagggu

SEQ ID NO: 1246975 - RNA, 19 nt, Artificial Sequence
  Description of Artificial Sequence: Synthetic oligonucleotide
ugucucuagugggaccggc

SEQ ID NO: 1246976 - RNA, 19 nt, Artificial Sequence
  Description of Artificial Sequence: Synthetic oligonucleotide
caucagagcucggcuaggc

SEQ ID NO: 1246977 - RNA, 19 nt, Artificial Sequence
  Description of Artificial Sequence: Synthetic oligonucleotide
gcucggcuaggccagaaug

SEQ ID NO: 1246978 - RNA, 19 nt, Artificial Sequence
  Description of Artificial Sequence: Synthetic oligonucleotide
cacugcucccaagacgcgg

SEQ ID NO: 1246979 - RNA, 19 nt, Artificial Sequence
  Description of Artificial Sequence: Synthetic oligonucleotide
gugcuagcuuuccaacgug

SEQ ID NO: 1246980 - RNA, 19 nt, Artificial Sequence
  Description of Artificial Sequence: Synthetic oligonucleotide
ggauaucacgcgccucacg

SEQ ID NO: 1246981 - RNA, 19 nt, Artificial Sequence
  Description of Artificial Sequence: Synthetic oligonucleotide
gagacucgcucugcugggg

SEQ ID NO: 1246982 - RNA, 19 nt, Artificial Sequence
  Description of Artificial Sequence: Synthetic oligonucleotide
gguacagacagccuucccu

SEQ ID NO: 1246983 - RNA, 19 nt, Artificial Sequence
  Description of Artificial Sequence: Synthetic oligonucleotide
cacgcgucgccguccaccc

SEQ ID NO: 1246984 - RNA, 19 nt, Artificial Sequence
  Description of Artificial Sequence: Synthetic oligonucleotide
ucuccacaucucuaccgau

SEQ ID NO: 1246985 - RNA, 19 nt, Artificial Sequence
  Description of Artificial Sequence: Synthetic oligonucleotide
cucuccacaucucuaccga

SEQ ID NO: 1246986 - RNA, 19 nt, Artificial Sequence
  Description of Artificial Sequence: Synthetic oligonucleotide
ucgccguccacccgccgcc

SEQ ID NO: 1246987 - RNA, 19 nt, Artificial Sequence
  Description of Artificial Sequence: Synthetic oligonucleotide
acgcgggauaucacgcgcc

SEQ ID NO: 1246988 - RNA, 19 nt, Artificial Sequence
  Description of Artificial Sequence: Synthetic oligonucleotide
gcuaaguccaugacuguac

SEQ ID NO: 1246989 - RNA, 19 nt, Artificial Sequence
  Description of Artificial Sequence: Synthetic oligonucleotide
caacuggggcaucuaccag

SEQ ID NO: 1246990 - RNA, 19 nt, Artificial Sequence
  Description of Artificial Sequence: Synthetic oligonucleotide
ucuggccuacuuggggugc

SEQ ID NO: 1246991 - RNA, 19 nt, Artificial Sequence
  Description of Artificial Sequence: Synthetic oligonucleotide
aucagugcggaagucugaa

SEQ ID NO: 1246992 - RNA, 19 nt, Artificial Sequence
  Description of Artificial Sequence: Synthetic oligonucleotide
ggacccuagugcuugccug

SEQ ID NO: 1246993 - RNA, 19 nt, Artificial Sequence
  Description of Artificial Sequence: Synthetic oligonucleotide
caaaggcucuggacccuag

SEQ ID NO: 1246994 - RNA, 19 nt, Artificial Sequence
  Description of Artificial Sequence: Synthetic oligonucleotide
cagggacaggaugcaaucc

SEQ ID NO: 1246995 - RNA, 19 nt, Artificial Sequence
  Description of Artificial Sequence: Synthetic oligonucleotide
ccaccuugaguugauagac

SEQ ID NO: 1246996 - RNA, 19 nt, Artificial Sequence
  Description of Artificial Sequence: Synthetic oligonucleotide
agugcuugccuggacccca

SEQ ID NO: 1246997 - RNA, 19 nt, Artificial Sequence
  Description of Artificial Sequence: Synthetic oligonucleotide
ugaaaaccggaagcugcau

SEQ ID NO: 1246998 - RNA, 19 nt, Artificial Sequence
  Description of Artificial Sequence: Synthetic oligonucleotide
ucaguggucugugucucua

SEQ ID NO: 1246999 - RNA, 19 nt, Artificial Sequence
  Description of Artificial Sequence: Synthetic oligonucleotide
cuucuagcccagagggcuc

SEQ ID NO: 1247000 - RNA, 19 nt, Artificial Sequence
  Description of Artificial Sequence: Synthetic oligonucleotide
uccaauccuggcugggguu

SEQ ID NO: 1247001 - RNA, 19 nt, Artificial Sequence
  Description of Artificial Sequence: Synthetic oligonucleotide
aggcagguacuguggucag

SEQ ID NO: 1247002 - RNA, 19 nt, Artificial Sequence
  Description of Artificial Sequence: Synthetic oligonucleotide
gggaccggcucuuccuucg

SEQ ID NO: 1247003 - RNA, 19 nt, Artificial Sequence
  Description of Artificial Sequence: Synthetic oligonucleotide
caguggucugugucucuag

SEQ ID NO: 1247004 - RNA, 19 nt, Artificial Sequence
  Description of Artificial Sequence: Synthetic oligonucleotide
cucuagggugccuuccaca

SEQ ID NO: 1247005 - RNA, 19 nt, Artificial Sequence
  Description of Artificial Sequence: Synthetic oligonucleotide
caucagacauggagcucug

SEQ ID NO: 1247006 - RNA, 19 nt, Artificial Sequence
  Description of Artificial Sequence: Synthetic oligonucleotide
cagguacagacagccuucc

SEQ ID NO: 1247007 - RNA, 19 nt, Artificial Sequence
  Description of Artificial Sequence: Synthetic oligonucleotide
guaauccuaggcacucuuc

SEQ ID NO: 1247008 - RNA, 19 nt, Artificial Sequence
  Description of Artificial Sequence: Synthetic oligonucleotide
cuguggcuaaguccaugac

SEQ ID NO: 1247009 - RNA, 19 nt, Artificial Sequence
  Description of Artificial Sequence: Synthetic oligonucleotide
ucuagugggaccggcucuu

SEQ ID NO: 1247010 - RNA, 19 nt, Artificial Sequence
  Description of Artificial Sequence: Synthetic oligonucleotide
cagguugguccacacagaa

SEQ ID NO: 1247011 - RNA, 19 nt, Artificial Sequence
  Description of Artificial Sequence: Synthetic oligonucleotide
cagugcggaagucugaagu

SEQ ID NO: 1247012 - RNA, 19 nt, Artificial Sequence
  Description of Artificial Sequence: Synthetic oligonucleotide
augaugcgacgaccccacg

SEQ ID NO: 1247013 - RNA, 19 nt, Artificial Sequence
  Description of Artificial Sequence: Synthetic oligonucleotide
uugaugcucuggccuacuu

SEQ ID NO: 1247014 - RNA, 19 nt, Artificial Sequence
  Description of Artificial Sequence: Synthetic oligonucleotide
uucaaggguggggcaccgg

SEQ ID NO: 1247015 - RNA, 19 nt, Artificial Sequence
  Description of Artificial Sequence: Synthetic oligonucleotide
gaggcagggaugcuggaau

SEQ ID NO: 1247016 - RNA, 19 nt, Artificial Sequence
  Description of Artificial Sequence: Synthetic oligonucleotide
cuaccagaggcaggccugc

SEQ ID NO: 1247017 - RNA, 19 nt, Artificial Sequence
  Description of Artificial Sequence: Synthetic oligonucleotide
cacucuucucuagggugcc

SEQ ID NO: 1247018 - RNA, 19 nt, Artificial Sequence
  Description of Artificial Sequence: Synthetic oligonucleotide
caccuugaguugauagaca

SEQ ID NO: 1247019 - RNA, 19 nt, Artificial Sequence
  Description of Artificial Sequence: Synthetic oligonucleotide
ggcucagagacucgcucug

SEQ ID NO: 1247020 - RNA, 19 nt, Artificial Sequence
  Description of Artificial Sequence: Synthetic oligonucleotide
ggagguggcaaaugaaccu

SEQ ID NO: 1247021 - RNA, 19 nt, Artificial Sequence
  Description of Artificial Sequence: Synthetic oligonucleotide
ggggccaggauggugcuag

SEQ ID NO: 1247022 - RNA, 19 nt, Artificial Sequence
  Description of Artificial Sequence: Synthetic oligonucleotide
ggcacccauuugaauaucc

SEQ ID NO: 1247023 - RNA, 19 nt, Artificial Sequence
  Description of Artificial Sequence: Synthetic oligonucleotide
acgcgccucacgcgucgcc

SEQ ID NO: 1247024 - RNA, 19 nt, Artificial Sequence
  Description of Artificial Sequence: Synthetic oligonucleotide
ggugcuagcuuuccaacgu

SEQ ID NO: 1247025 - RNA, 19 nt, Artificial Sequence
  Description of Artificial Sequence: Synthetic oligonucleotide
ccaucagccuucuagccca

SEQ ID NO: 1247026 - RNA, 19 nt, Artificial Sequence
  Description of Artificial Sequence: Synthetic oligonucleotide
cucggcccggaccgaacgg

SEQ ID NO: 1247027 - RNA, 19 nt, Artificial Sequence
  Description of Artificial Sequence: Synthetic oligonucleotide
ccacacaaaggcucuggac

SEQ ID NO: 1247028 - RNA, 19 nt, Artificial Sequence
  Description of Artificial Sequence: Synthetic oligonucleotide
guugcugaauuguucgauu

SEQ ID NO: 1247029 - RNA, 19 nt, Artificial Sequence
  Description of Artificial Sequence: Synthetic oligonucleotide
ucggcccggaccgaacggc

SEQ ID NO: 1247030 - RNA, 19 nt, Artificial Sequence
  Description of Artificial Sequence: Synthetic oligonucleotide
cucguggcagcgccagcag

SEQ ID NO: 1247031 - RNA, 19 nt, Artificial Sequence
  Description of Artificial Sequence: Synthetic oligonucleotide
gcggggaguggcuuggggc

SEQ ID NO: 1247032 - RNA, 19 nt, Artificial Sequence
  Description of Artificial Sequence: Synthetic oligonucleotide
ccuucgugagggugggagg

SEQ ID NO: 1247033 - RNA, 19 nt, Artificial Sequence
  Description of Artificial Sequence: Synthetic oligonucleotide
caucagugcggaagucuga

SEQ ID NO: 1247034 - RNA, 19 nt, Artificial Sequence
  Description of Artificial Sequence: Synthetic oligonucleotide
uggaagguucuggcaggca

SEQ ID NO: 1247035 - RNA, 19 nt, Artificial Sequence
  Description of Artificial Sequence: Synthetic oligonucleotide
cgaucagucccucuuccag

SEQ ID NO: 1247036 - RNA, 19 nt, Artificial Sequence
  Description of Artificial Sequence: Synthetic oligonucleotide
cuaggccagaaugcaauaa

SEQ ID NO: 1247037 - RNA, 19 nt, Artificial Sequence
  Description of Artificial Sequence: Synthetic oligonucleotide
cacagguacagacagccuu

SEQ ID NO: 1247038 - RNA, 19 nt, Artificial Sequence
  Description of Artificial Sequence: Synthetic oligonucleotide
cagguacuguggucagaac

SEQ ID NO: 1247039 - RNA, 19 nt, Artificial Sequence
  Description of Artificial Sequence: Synthetic oligonucleotide
uccgugcagugguucugga

SEQ ID NO: 1247040 - RNA, 19 nt, Artificial Sequence
  Description of Artificial Sequence: Synthetic oligonucleotide
ggcaucagagggaaagcca

SEQ ID NO: 1247041 - RNA, 19 nt, Artificial Sequence
  Description of Artificial Sequence: Synthetic oligonucleotide
uaucugucacaggcaccca

SEQ ID NO: 1247042 - RNA, 19 nt, Artificial Sequence
  Description of Artificial Sequence: Synthetic oligonucleotide
cagccuucccuccugggaa

SEQ ID NO: 1247043 - RNA, 19 nt, Artificial Sequence
  Description of Artificial Sequence: Synthetic oligonucleotide
cuucagaugcaggcaguga

SEQ ID NO: 1247044 - RNA, 19 nt, Artificial Sequence
  Description of Artificial Sequence: Synthetic oligonucleotide
caucagccuucuagcccag

SEQ ID NO: 1247045 - RNA, 19 nt, Artificial Sequence
  Description of Artificial Sequence: Synthetic oligonucleotide
caagaaggagagaggaauu

SEQ ID NO: 1247046 - RNA, 19 nt, Artificial Sequence
  Description of Artificial Sequence: Synthetic oligonucleotide
caggcccuguggcuaaguc

SEQ ID NO: 1247047 - RNA, 19 nt, Artificial Sequence
  Description of Artificial Sequence: Synthetic oligonucleotide
caucuaccagaggcaggcc

SEQ ID NO: 1247048 - RNA, 19 nt, Artificial Sequence
  Description of Artificial Sequence: Synthetic oligonucleotide
ccauugguuucccggguug

SEQ ID NO: 1247049 - RNA, 19 nt, Artificial Sequence
  Description of Artificial Sequence: Synthetic oligonucleotide
gugucucuagugggaccgg

SEQ ID NO: 1247050 - RNA, 19 nt, Artificial Sequence
  Description of Artificial Sequence: Synthetic oligonucleotide
cagggaugcuggaaugcaa

SEQ ID NO: 1247051 - RNA, 19 nt, Artificial Sequence
  Description of Artificial Sequence: Synthetic oligonucleotide
uccucguggcagcgccagc

SEQ ID NO: 1247052 - RNA, 19 nt, Artificial Sequence
  Description of Artificial Sequence: Synthetic oligonucleotide
gacgaccccacgcccucca

SEQ ID NO: 1247053 - RNA, 19 nt, Artificial Sequence
  Description of Artificial Sequence: Synthetic oligonucleotide
cuggacccuagugcuugcc

SEQ ID NO: 1247054 - RNA, 19 nt, Artificial Sequence
  Description of Artificial Sequence: Synthetic oligonucleotide
agcucggcuaggccagaau

SEQ ID NO: 1247055 - RNA, 19 nt, Artificial Sequence
  Description of Artificial Sequence: Synthetic oligonucleotide
gugauggcuccucaaggau

SEQ ID NO: 1247056 - RNA, 19 nt, Artificial Sequence
  Description of Artificial Sequence: Synthetic oligonucleotide
ucuagcccagagggcuccc

SEQ ID NO: 1247057 - RNA, 19 nt, Artificial Sequence
  Description of Artificial Sequence: Synthetic oligonucleotide
acacugcucccaagacgcg

SEQ ID NO: 1247058 - RNA, 19 nt, Artificial Sequence
  Description of Artificial Sequence: Synthetic oligonucleotide
aucacgcgccucacgcguc

SEQ ID NO: 1247059 - RNA, 19 nt, Artificial Sequence
  Description of Artificial Sequence: Synthetic oligonucleotide
gcagguacuguggucagaa

SEQ ID NO: 1247060 - RNA, 19 nt, Artificial Sequence
  Description of Artificial Sequence: Synthetic oligonucleotide
caggcacccauuugaauau

SEQ ID NO: 1247061 - RNA, 19 nt, Artificial Sequence
  Description of Artificial Sequence: Synthetic oligonucleotide
gagguggcaaaugaaccuu

SEQ ID NO: 1247062 - RNA, 19 nt, Artificial Sequence
  Description of Artificial Sequence: Synthetic oligonucleotide
cucagggaugugucaccca

SEQ ID NO: 1247063 - RNA, 19 nt, Artificial Sequence
  Description of Artificial Sequence: Synthetic oligonucleotide
uaccagaggcaggccugcc

SEQ ID NO: 1247064 - RNA, 19 nt, Artificial Sequence
  Description of Artificial Sequence: Synthetic oligonucleotide
ccauucaaguucaaguaau

SEQ ID NO: 1247065 - RNA, 19 nt, Artificial Sequence
  Description of Artificial Sequence: Synthetic oligonucleotide
acaaaggcucuggacccua

SEQ ID NO: 1247066 - RNA, 19 nt, Artificial Sequence
  Description of Artificial Sequence: Synthetic oligonucleotide
cggggaguggcuuggggcc

SEQ ID NO: 1247067 - RNA, 19 nt, Artificial Sequence
  Description of Artificial Sequence: Synthetic oligonucleotide
cagacauggagcucugguu

SEQ ID NO: 1247068 - RNA, 19 nt, Artificial Sequence
  Description of Artificial Sequence: Synthetic oligonucleotide
ggauggugcuagcuuucca

SEQ ID NO: 1247069 - RNA, 19 nt, Artificial Sequence
  Description of Artificial Sequence: Synthetic oligonucleotide
auuguucgauuuggauuuu

SEQ ID NO: 1247070 - RNA, 19 nt, Artificial Sequence
  Description of Artificial Sequence: Synthetic oligonucleotide
cuaccgaucagucccucuu

SEQ ID NO: 1247071 - RNA, 19 nt, Artificial Sequence
  Description of Artificial Sequence: Synthetic oligonucleotide
ugcggcacuucagguuggu

SEQ ID NO: 1247072 - RNA, 19 nt, Artificial Sequence
  Description of Artificial Sequence: Synthetic oligonucleotide
gcccggaccgaacggcccg

SEQ ID NO: 1247073 - RNA, 19 nt, Artificial Sequence
  Description of Artificial Sequence: Synthetic oligonucleotide
ugcucccaagacgcgggau

SEQ ID NO: 1247074 - RNA, 19 nt, Artificial Sequence
  Description of Artificial Sequence: Synthetic oligonucleotide
gugcggaagucugaagugu

SEQ ID NO: 1247075 - RNA, 19 nt, Artificial Sequence
  Description of Artificial Sequence: Synthetic oligonucleotide
cccaagacgcgggauauca

SEQ ID NO: 1247076 - RNA, 19 nt, Artificial Sequence
  Description of Artificial Sequence: Synthetic oligonucleotide
gccuacuuggggugcagaa

SEQ ID NO: 1247077 - RNA, 19 nt, Artificial Sequence
  Description of Artificial Sequence: Synthetic oligonucleotide
ccaagacgcgggauaucac

SEQ ID NO: 1247078 - RNA, 19 nt, Artificial Sequence
  Description of Artificial Sequence: Synthetic oligonucleotide
ccgugcagugguucuggag

SEQ ID NO: 1247079 - RNA, 19 nt, Artificial Sequence
  Description of Artificial Sequence: Synthetic oligonucleotide
cucuagugggaccggcucu

SEQ ID NO: 1247080 - RNA, 19 nt, Artificial Sequence
  Description of Artificial Sequence: Synthetic oligonucleotide
accccacgcccuccaucag

SEQ ID NO: 1247081 - RNA, 19 nt, Artificial Sequence
  Description of Artificial Sequence: Synthetic oligonucleotide
ggaccgaacggcccgacau

SEQ ID NO: 1247082 - RNA, 19 nt, Artificial Sequence
  Description of Artificial Sequence: Synthetic oligonucleotide
acccuagugcuugccugga

SEQ ID NO: 1247083 - RNA, 19 nt, Artificial Sequence
  Description of Artificial Sequence: Synthetic oligonucleotide
ccagagggcucccacacaa

SEQ ID NO: 1247084 - RNA, 19 nt, Artificial Sequence
  Description of Artificial Sequence: Synthetic oligonucleotide
caccggaguccuccucuuc

SEQ ID NO: 1247085 - RNA, 19 nt, Artificial Sequence
  Description of Artificial Sequence: Synthetic oligonucleotide
gcucuggccuacuuggggu

SEQ ID NO: 1247086 - RNA, 19 nt, Artificial Sequence
  Description of Artificial Sequence: Synthetic oligonucleotide
ucccaagacgcgggauauc

SEQ ID NO: 1247087 - RNA, 19 nt, Artificial Sequence
  Description of Artificial Sequence: Synthetic oligonucleotide
cccaguguggguggcuggg

SEQ ID NO: 1247088 - RNA, 19 nt, Artificial Sequence
  Description of Artificial Sequence: Synthetic oligonucleotide
gcucccaagacgcgggaua

SEQ ID NO: 1247089 - RNA, 19 nt, Artificial Sequence
  Description of Artificial Sequence: Synthetic oligonucleotide
gucugcggcacuucagguu

SEQ ID NO: 1247090 - RNA, 19 nt, Artificial Sequence
  Description of Artificial Sequence: Synthetic oligonucleotide
gugcuugccuggaccccag

SEQ ID NO: 1247091 - RNA, 19 nt, Artificial Sequence
  Description of Artificial Sequence: Synthetic oligonucleotide
cuagugggaccggcucuuc

SEQ ID NO: 1247092 - RNA, 19 nt, Artificial Sequence
  Description of Artificial Sequence: Synthetic oligonucleotide
gcuaggccagaaugcaaua

SEQ ID NO: 1247093 - RNA, 19 nt, Artificial Sequence
  Description of Artificial Sequence: Synthetic oligonucleotide
ccaacguggucugcggcac

SEQ ID NO: 1247094 - RNA, 19 nt, Artificial Sequence
  Description of Artificial Sequence: Synthetic oligonucleotide
ccuucuagcccagagggcu

SEQ ID NO: 1247095 - RNA, 19 nt, Artificial Sequence
  Description of Artificial Sequence: Synthetic oligonucleotide
cucuaccgaucagucccuc

SEQ ID NO: 1247096 - RNA, 19 nt, Artificial Sequence
  Description of Artificial Sequence: Synthetic oligonucleotide
cgggauaucacgcgccuca

SEQ ID NO: 1247097 - RNA, 19 nt, Artificial Sequence
  Description of Artificial Sequence: Synthetic oligonucleotide
cagcuccgugcagugguuc

SEQ ID NO: 1247098 - RNA, 19 nt, Artificial Sequence
  Description of Artificial Sequence: Synthetic oligonucleotide
gggauaucacgcgccucac

SEQ ID NO: 1247099 - RNA, 19 nt, Artificial Sequence
  Description of Artificial Sequence: Synthetic oligonucleotide
ggcuaggccagaaugcaau

SEQ ID NO: 1247100 - RNA, 19 nt, Artificial Sequence
  Description of Artificial Sequence: Synthetic oligonucleotide
gccuucuagcccagagggc

SEQ ID NO: 1247101 - RNA, 19 nt, Artificial Sequence
  Description of Artificial Sequence: Synthetic oligonucleotide
gucucuagugggaccggcu

SEQ ID NO: 1247102 - RNA, 19 nt, Artificial Sequence
  Description of Artificial Sequence: Synthetic oligonucleotide
uuccuucgugaggguggga

SEQ ID NO: 1247103 - RNA, 19 nt, Artificial Sequence
  Description of Artificial Sequence: Synthetic oligonucleotide
ggcggcggggaguggcuug

SEQ ID NO: 1247104 - RNA, 19 nt, Artificial Sequence
  Description of Artificial Sequence: Synthetic oligonucleotide
cacaggcacccauuugaau

SEQ ID NO: 1247105 - RNA, 19 nt, Artificial Sequence
  Description of Artificial Sequence: Synthetic oligonucleotide
cgcgucgccguccacccgc

SEQ ID NO: 1247106 - RNA, 19 nt, Artificial Sequence
  Description of Artificial Sequence: Synthetic oligonucleotide
gcuagcuuuccaacguggu

SEQ ID NO: 1247107 - RNA, 19 nt, Artificial Sequence
  Description of Artificial Sequence: Synthetic oligonucleotide
cugucacaggcacccauuu

SEQ ID NO: 1247108 - RNA, 19 nt, Artificial Sequence
  Description of Artificial Sequence: Synthetic oligonucleotide
ggucugcggcacuucaggu

SEQ ID NO: 1247109 - RNA, 19 nt, Artificial Sequence
  Description of Artificial Sequence: Synthetic oligonucleotide
gguuucccggguugcugaa

SEQ ID NO: 1247110 - RNA, 19 nt, Artificial Sequence
  Description of Artificial Sequence: Synthetic oligonucleotide
ccgaacggcccgacauggc

SEQ ID NO: 1247111 - RNA, 19 nt, Artificial Sequence
  Description of Artificial Sequence: Synthetic oligonucleotide
gcggcggggaguggcuugg

SEQ ID NO: 1247112 - RNA, 19 nt, Artificial Sequence
  Description of Artificial Sequence: Synthetic oligonucleotide
cuagcccagagggcuccca

SEQ ID NO: 1247113 - RNA, 19 nt, Artificial Sequence
  Description of Artificial Sequence: Synthetic oligonucleotide
gcacccauuugaauauccu

SEQ ID NO: 1247114 - RNA, 19 nt, Artificial Sequence
  Description of Artificial Sequence: Synthetic oligonucleotide
cugaggcaucagagggaaa

SEQ ID NO: 1247115 - RNA, 19 nt, Artificial Sequence
  Description of Artificial Sequence: Synthetic oligonucleotide
cucacgcgucgccguccac

SEQ ID NO: 1247116 - RNA, 19 nt, Artificial Sequence
  Description of Artificial Sequence: Synthetic oligonucleotide
cacgcgccucacgcgucgc

SEQ ID NO: 1247117 - RNA, 19 nt, Artificial Sequence
  Description of Artificial Sequence: Synthetic oligonucleotide
gagcucggcuaggccagaa

SEQ ID NO: 1247118 - RNA, 19 nt, Artificial Sequence
  Description of Artificial Sequence: Synthetic oligonucleotide
gcuuuccaacguggucugc

SEQ ID NO: 1247119 - RNA, 19 nt, Artificial Sequence
  Description of Artificial Sequence: Synthetic oligonucleotide
ccuucccuccugggaaagc

SEQ ID NO: 1247120 - RNA, 19 nt, Artificial Sequence
  Description of Artificial Sequence: Synthetic oligonucleotide
ggcaggggccaggaggcga

SEQ ID NO: 1247121 - RNA, 19 nt, Artificial Sequence
  Description of Artificial Sequence: Synthetic oligonucleotide
gcgacgaccccacgcccuc

SEQ ID NO: 1247122 - RNA, 19 nt, Artificial Sequence
  Description of Artificial Sequence: Synthetic oligonucleotide
cuguccaccuugaguugau

SEQ ID NO: 1247123 - RNA, 19 nt, Artificial Sequence
  Description of Artificial Sequence: Synthetic oligonucleotide
ugggagcaacuggggcauc

SEQ ID NO: 1247124 - RNA, 19 nt, Artificial Sequence
  Description of Artificial Sequence: Synthetic oligonucleotide
ggcccggaccgaacggccc

SEQ ID NO: 1247125 - RNA, 19 nt, Artificial Sequence
  Description of Artificial Sequence: Synthetic oligonucleotide
cccuagugcuugccuggac

SEQ ID NO: 1247126 - RNA, 19 nt, Artificial Sequence
  Description of Artificial Sequence: Synthetic oligonucleotide
agucuccauucaaguucaa

SEQ ID NO: 1247127 - RNA, 19 nt, Artificial Sequence
  Description of Artificial Sequence: Synthetic oligonucleotide
cacgcccuccaucagccuu

SEQ ID NO: 1247128 - RNA, 19 nt, Artificial Sequence
  Description of Artificial Sequence: Synthetic oligonucleotide
gugggaccggcucuuccuu

SEQ ID NO: 1247129 - RNA, 19 nt, Artificial Sequence
  Description of Artificial Sequence: Synthetic oligonucleotide
ccacaccuuucuccucgug

SEQ ID NO: 1247130 - RNA, 19 nt, Artificial Sequence
  Description of Artificial Sequence: Synthetic oligonucleotide
cuacgggucucggcccgga

SEQ ID NO: 1247131 - RNA, 19 nt, Artificial Sequence
  Description of Artificial Sequence: Synthetic oligonucleotide
gugugcguggugagugggu

SEQ ID NO: 1247132 - RNA, 19 nt, Artificial Sequence
  Description of Artificial Sequence: Synthetic oligonucleotide
gccucacgcgucgccgucc

SEQ ID NO: 1247133 - RNA, 19 nt, Artificial Sequence
  Description of Artificial Sequence: Synthetic oligonucleotide
ggagcaacuggggcaucua

SEQ ID NO: 1247134 - RNA, 19 nt, Artificial Sequence
  Description of Artificial Sequence: Synthetic oligonucleotide
cgcgccucacgcgucgccg

SEQ ID NO: 1247135 - RNA, 19 nt, Artificial Sequence
  Description of Artificial Sequence: Synthetic oligonucleotide
gggcaccggaguccuccuc

SEQ ID NO: 1247136 - RNA, 19 nt, Artificial Sequence
  Description of Artificial Sequence: Synthetic oligonucleotide
gcgggauaucacgcgccuc

SEQ ID NO: 1247137 - RNA, 19 nt, Artificial Sequence
  Description of Artificial Sequence: Synthetic oligonucleotide
aggggccaggauggugcua

SEQ ID NO: 1247138 - RNA, 19 nt, Artificial Sequence
  Description of Artificial Sequence: Synthetic oligonucleotide
ggccaggauggugcuagcu

SEQ ID NO: 1247139 - RNA, 19 nt, Artificial Sequence
  Description of Artificial Sequence: Synthetic oligonucleotide
ccucacgcgucgccgucca

SEQ ID NO: 1247140 - RNA, 19 nt, Artificial Sequence
  Description of Artificial Sequence: Synthetic oligonucleotide
gguggccugcccacaggua

SEQ ID NO: 1247141 - RNA, 19 nt, Artificial Sequence
  Description of Artificial Sequence: Synthetic oligonucleotide
cgaccccacgcccuccauc

SEQ ID NO: 1247142 - RNA, 19 nt, Artificial Sequence
  Description of Artificial Sequence: Synthetic oligonucleotide
gcggcacuucagguugguc

SEQ ID NO: 1247143 - RNA, 19 nt, Artificial Sequence
  Description of Artificial Sequence: Synthetic oligonucleotide
cguccacccgccgccgccg

SEQ ID NO: 1247144 - RNA, 19 nt, Artificial Sequence
  Description of Artificial Sequence: Synthetic oligonucleotide
ggaggcgaggggccaggau

SEQ ID NO: 1247145 - RNA, 19 nt, Artificial Sequence
  Description of Artificial Sequence: Synthetic oligonucleotide
ggaccggcucuuccuucgu

SEQ ID NO: 1247146 - RNA, 19 nt, Artificial Sequence
  Description of Artificial Sequence: Synthetic oligonucleotide
ccacagguacagacagccu

SEQ ID NO: 1247147 - RNA, 19 nt, Artificial Sequence
  Description of Artificial Sequence: Synthetic oligonucleotide
gcgucgccguccacccgcc

SEQ ID NO: 1247148 - RNA, 19 nt, Artificial Sequence
  Description of Artificial Sequence: Synthetic oligonucleotide
ccccagcaucagagcucgg

SEQ ID NO: 1247149 - RNA, 19 nt, Artificial Sequence
  Description of Artificial Sequence: Synthetic oligonucleotide
ggggcaccggaguccuccu

SEQ ID NO: 1247150 - RNA, 19 nt, Artificial Sequence
  Description of Artificial Sequence: Synthetic oligonucleotide
cccggguugcugaauuguu

SEQ ID NO: 1247151 - RNA, 19 nt, Artificial Sequence
  Description of Artificial Sequence: Synthetic oligonucleotide
ccaauccuggcugggguuu

SEQ ID NO: 1247152 - RNA, 19 nt, Artificial Sequence
  Description of Artificial Sequence: Synthetic oligonucleotide
gcaccggaguccuccucuu

SEQ ID NO: 1247153 - RNA, 19 nt, Artificial Sequence
  Description of Artificial Sequence: Synthetic oligonucleotide
gcgccucacgcgucgccgu

SEQ ID NO: 1247154 - RNA, 19 nt, Artificial Sequence
  Description of Artificial Sequence: Synthetic oligonucleotide
cgucgccguccacccgccg

SEQ ID NO: 1247155 - RNA, 19 nt, Artificial Sequence
  Description of Artificial Sequence: Synthetic oligonucleotide
ccggaccgaacggcccgac

SEQ ID NO: 1247156 - RNA, 19 nt, Artificial Sequence
  Description of Artificial Sequence: Synthetic oligonucleotide
cgacgaccccacgcccucc

SEQ ID NO: 1247157 - RNA, 19 nt, Artificial Sequence
  Description of Artificial Sequence: Synthetic oligonucleotide
cgccucacgcgucgccguc

SEQ ID NO: 1247158 - RNA, 19 nt, Artificial Sequence
  Description of Artificial Sequence: Synthetic oligonucleotide
cgcgggauaucacgcgccu

SEQ ID NO: 1247159 - RNA, 19 nt, Artificial Sequence
  Description of Artificial Sequence: Synthetic oligonucleotide
cggaccgaacggcccgaca

SEQ ID NO: 1247160 - RNA, 19 nt, Artificial Sequence
  Description of Artificial Sequence: Synthetic oligonucleotide
cgccguccacccgccgccg

SEQ ID NO: 1247161 - RNA, 19 nt, Artificial Sequence
  Description of Artificial Sequence: Synthetic oligonucleotide
cccggaccgaacggcccga

SEQ ID NO: 1247162 - RNA, 19 nt, Artificial Sequence
  Description of Artificial Sequence: Synthetic oligonucleotide
ggcgaggggccaggauggu

SEQ ID NO: 1247163 - RNA, 19 nt, Artificial Sequence
  Description of Artificial Sequence: Synthetic oligonucleotide
gcguggugagugggugagu

SEQ ID NO: 1247164 - RNA, 19 nt, Artificial Sequence
  Description of Artificial Sequence: Synthetic oligonucleotide
cggcggggaguggcuuggg

SEQ ID NO: 1247165 - RNA, 19 nt, Artificial Sequence
  Description of Artificial Sequence: Synthetic oligonucleotide
aaucauauaaaucacagac

SEQ ID NO: 1247166 - RNA, 19 nt, Artificial Sequence
  Description of Artificial Sequence: Synthetic oligonucleotide
auauauaauauauauauac

SEQ ID NO: 1247167 - RNA, 19 nt, Artificial Sequence
  Description of Artificial Sequence: Synthetic oligonucleotide
aauagaaauacugauaggc

SEQ ID NO: 1247168 - RNA, 19 nt, Artificial Sequence
  Description of Artificial Sequence: Synthetic oligonucleotide
auaaauauggcauugaguc

SEQ ID NO: 1247169 - RNA, 19 nt, Artificial Sequence
  Description of Artificial Sequence: Synthetic oligonucleotide
aauauucauagauuauucc

SEQ ID NO: 1247170 - RNA, 19 nt, Artificial Sequence
  Description of Artificial Sequence: Synthetic oligonucleotide
uauauauauacauauauac

SEQ ID NO: 1247171 - RNA, 19 nt, Artificial Sequence
  Description of Artificial Sequence: Synthetic oligonucleotide
aauauauauauacauauau

SEQ ID NO: 1247172 - RNA, 19 nt, Artificial Sequence
  Description of Artificial Sequence: Synthetic oligonucleotide
aauaugcgaacuaagacac

SEQ ID NO: 1247173 - RNA, 19 nt, Artificial Sequence
  Description of Artificial Sequence: Synthetic oligonucleotide
uauauaauauauauauaca

SEQ ID NO: 1247174 - RNA, 19 nt, Artificial Sequence
  Description of Artificial Sequence: Synthetic oligonucleotide
uguuaaaucuuacuaaaac

SEQ ID NO: 1247175 - RNA, 19 nt, Artificial Sequence
  Description of Artificial Sequence: Synthetic oligonucleotide
gagucuuagacccacaaag

SEQ ID NO: 1247176 - RNA, 19 nt, Artificial Sequence
  Description of Artificial Sequence: Synthetic oligonucleotide
auggcauugagucuguggc

SEQ ID NO: 1247177 - RNA, 19 nt, Artificial Sequence
  Description of Artificial Sequence: Synthetic oligonucleotide
auauaauauauauauacau

SEQ ID NO: 1247178 - RNA, 19 nt, Artificial Sequence
  Description of Artificial Sequence: Synthetic oligonucleotide
ugauuaaaguguaacaaac

SEQ ID NO: 1247179 - RNA, 19 nt, Artificial Sequence
  Description of Artificial Sequence: Synthetic oligonucleotide
gaaagagccuuauugacag

SEQ ID NO: 1247180 - RNA, 19 nt, Artificial Sequence
  Description of Artificial Sequence: Synthetic oligonucleotide
ucucaauagaaagacaggg

SEQ ID NO: 1247181 - RNA, 19 nt, Artificial Sequence
  Description of Artificial Sequence: Synthetic oligonucleotide
uuaacagauggcaaggagc

SEQ ID NO: 1247182 - RNA, 19 nt, Artificial Sequence
  Description of Artificial Sequence: Synthetic oligonucleotide
uaauaaauauggcauugag

SEQ ID NO: 1247183 - RNA, 19 nt, Artificial Sequence
  Description of Artificial Sequence: Synthetic oligonucleotide
uauaauauauauauacaua

SEQ ID NO: 1247184 - RNA, 19 nt, Artificial Sequence
  Description of Artificial Sequence: Synthetic oligonucleotide
augaguuagacuuuggcug

SEQ ID NO: 1247185 - RNA, 19 nt, Artificial Sequence
  Description of Artificial Sequence: Synthetic oligonucleotide
aauccuaaacaugaguuag

SEQ ID NO: 1247186 - RNA, 19 nt, Artificial Sequence
  Description of Artificial Sequence: Synthetic oligonucleotide
uauauguuugaauaugcga

SEQ ID NO: 1247187 - RNA, 19 nt, Artificial Sequence
  Description of Artificial Sequence: Synthetic oligonucleotide
aaucuuacuaaaacuguac

SEQ ID NO: 1247188 - RNA, 19 nt, Artificial Sequence
  Description of Artificial Sequence: Synthetic oligonucleotide
ucauuuaacagauggcaag

SEQ ID NO: 1247189 - RNA, 19 nt, Artificial Sequence
  Description of Artificial Sequence: Synthetic oligonucleotide
aaguauagauuauaucuca

SEQ ID NO: 1247190 - RNA, 19 nt, Artificial Sequence
  Description of Artificial Sequence: Synthetic oligonucleotide
auuagugguaaacagagaa

SEQ ID NO: 1247191 - RNA, 19 nt, Artificial Sequence
  Description of Artificial Sequence: Synthetic oligonucleotide
gaauaugcgaacuaagaca

SEQ ID NO: 1247192 - RNA, 19 nt, Artificial Sequence
  Description of Artificial Sequence: Synthetic oligonucleotide
ugaauaugcgaacuaagac

SEQ ID NO: 1247193 - RNA, 19 nt, Artificial Sequence
  Description of Artificial Sequence: Synthetic oligonucleotide
aaauauaacaagaugcuaa

SEQ ID NO: 1247194 - RNA, 19 nt, Artificial Sequence
  Description of Artificial Sequence: Synthetic oligonucleotide
uuuccuauauguuugaaua

SEQ ID NO: 1247195 - RNA, 19 nt, Artificial Sequence
  Description of Artificial Sequence: Synthetic oligonucleotide
uauagauuauaucucaaua

SEQ ID NO: 1247196 - RNA, 19 nt, Artificial Sequence
  Description of Artificial Sequence: Synthetic oligonucleotide
aaccugucaacuuuuaagu

SEQ ID NO: 1247197 - RNA, 19 nt, Artificial Sequence
  Description of Artificial Sequence: Synthetic oligonucleotide
aguaagacagcgcacgccg

SEQ ID NO: 1247198 - RNA, 19 nt, Artificial Sequence
  Description of Artificial Sequence: Synthetic oligonucleotide
uguaaacuacgguagauac

SEQ ID NO: 1247199 - RNA, 19 nt, Artificial Sequence
  Description of Artificial Sequence: Synthetic oligonucleotide
auggcaguuacccagcaac

SEQ ID NO: 1247200 - RNA, 19 nt, Artificial Sequence
  Description of Artificial Sequence: Synthetic oligonucleotide
acaugaguuagacuuuggc

SEQ ID NO: 1247201 - RNA, 19 nt, Artificial Sequence
  Description of Artificial Sequence: Synthetic oligonucleotide
aaagccauauauaauauau

SEQ ID NO: 1247202 - RNA, 19 nt, Artificial Sequence
  Description of Artificial Sequence: Synthetic oligonucleotide
uauggaagagucuuagacc

SEQ ID NO: 1247203 - RNA, 19 nt, Artificial Sequence
  Description of Artificial Sequence: Synthetic oligonucleotide
cuuagacccacaaaggaag

SEQ ID NO: 1247204 - RNA, 19 nt, Artificial Sequence
  Description of Artificial Sequence: Synthetic oligonucleotide
acaggguucgucuuugagc

SEQ ID NO: 1247205 - RNA, 19 nt, Artificial Sequence
  Description of Artificial Sequence: Synthetic oligonucleotide
aguuccauccauuuuagca

SEQ ID NO: 1247206 - RNA, 19 nt, Artificial Sequence
  Description of Artificial Sequence: Synthetic oligonucleotide
aaccucaauauucauagau

SEQ ID NO: 1247207 - RNA, 19 nt, Artificial Sequence
  Description of Artificial Sequence: Synthetic oligonucleotide
auagaaauacugauaggcc

SEQ ID NO: 1247208 - RNA, 19 nt, Artificial Sequence
  Description of Artificial Sequence: Synthetic oligonucleotide
uaaguauagauuauaucuc

SEQ ID NO: 1247209 - RNA, 19 nt, Artificial Sequence
  Description of Artificial Sequence: Synthetic oligonucleotide
uauaaaucacagaccaggc

SEQ ID NO: 1247210 - RNA, 19 nt, Artificial Sequence
  Description of Artificial Sequence: Synthetic oligonucleotide
aagguguuaaaucuuacua

SEQ ID NO: 1247211 - RNA, 19 nt, Artificial Sequence
  Description of Artificial Sequence: Synthetic oligonucleotide
uaaacuacgguagauacaa

SEQ ID NO: 1247212 - RNA, 19 nt, Artificial Sequence
  Description of Artificial Sequence: Synthetic oligonucleotide
aguaguguguacuugacau

SEQ ID NO: 1247213 - RNA, 19 nt, Artificial Sequence
  Description of Artificial Sequence: Synthetic oligonucleotide
aaagguguuaaaucuuacu

SEQ ID NO: 1247214 - RNA, 19 nt, Artificial Sequence
  Description of Artificial Sequence: Synthetic oligonucleotide
uuaaugaacuugcagggaa

SEQ ID NO: 1247215 - RNA, 19 nt, Artificial Sequence
  Description of Artificial Sequence: Synthetic oligonucleotide
uaaaugagcagacucccca

SEQ ID NO: 1247216 - RNA, 19 nt, Artificial Sequence
  Description of Artificial Sequence: Synthetic oligonucleotide
uuaguauacacuugauaug

SEQ ID NO: 1247217 - RNA, 19 nt, Artificial Sequence
  Description of Artificial Sequence: Synthetic oligonucleotide
aggguaauauggcaguuac

SEQ ID NO: 1247218 - RNA, 19 nt, Artificial Sequence
  Description of Artificial Sequence: Synthetic oligonucleotide
ucagcacuugauuaaagug

SEQ ID NO: 1247219 - RNA, 19 nt, Artificial Sequence
  Description of Artificial Sequence: Synthetic oligonucleotide
uagauuauuccugauuuag

SEQ ID NO: 1247220 - RNA, 19 nt, Artificial Sequence
  Description of Artificial Sequence: Synthetic oligonucleotide
aucacuuaaauuaaguuga

SEQ ID NO: 1247221 - RNA, 19 nt, Artificial Sequence
  Description of Artificial Sequence: Synthetic oligonucleotide
guacuugacauuaaugccg

SEQ ID NO: 1247222 - RNA, 19 nt, Artificial Sequence
  Description of Artificial Sequence: Synthetic oligonucleotide
auugugacggcugcgacgc

SEQ ID NO: 1247223 - RNA, 19 nt, Artificial Sequence
  Description of Artificial Sequence: Synthetic oligonucleotide
aaauagagguuuacaauag

SEQ ID NO: 1247224 - RNA, 19 nt, Artificial Sequence
  Description of Artificial Sequence: Synthetic oligonucleotide
agccauauauaauauauau

SEQ ID NO: 1247225 - RNA, 19 nt, Artificial Sequence
  Description of Artificial Sequence: Synthetic oligonucleotide
guauggaagagucuuagac

SEQ ID NO: 1247226 - RNA, 19 nt, Artificial Sequence
  Description of Artificial Sequence: Synthetic oligonucleotide
uugauauguggccaaaagu

SEQ ID NO: 1247227 - RNA, 19 nt, Artificial Sequence
  Description of Artificial Sequence: Synthetic oligonucleotide
ucuuacuaagcauuuauuu

SEQ ID NO: 1247228 - RNA, 19 nt, Artificial Sequence
  Description of Artificial Sequence: Synthetic oligonucleotide
ugcaagauaguggaaauca

SEQ ID NO: 1247229 - RNA, 19 nt, Artificial Sequence
  Description of Artificial Sequence: Synthetic oligonucleotide
ugaauucucccucaguagu

SEQ ID NO: 1247230 - RNA, 19 nt, Artificial Sequence
  Description of Artificial Sequence: Synthetic oligonucleotide
uguuagguuuauuauuuga

SEQ ID NO: 1247231 - RNA, 19 nt, Artificial Sequence
  Description of Artificial Sequence: Synthetic oligonucleotide
uugauuaaaguguaacaaa

SEQ ID NO: 1247232 - RNA, 19 nt, Artificial Sequence
  Description of Artificial Sequence: Synthetic oligonucleotide
acauaacagacuguuuucc

SEQ ID NO: 1247233 - RNA, 19 nt, Artificial Sequence
  Description of Artificial Sequence: Synthetic oligonucleotide
uacugauugauaauguuuu

SEQ ID NO: 1247234 - RNA, 19 nt, Artificial Sequence
  Description of Artificial Sequence: Synthetic oligonucleotide
aaccaauacuguaaacuac

SEQ ID NO: 1247235 - RNA, 19 nt, Artificial Sequence
  Description of Artificial Sequence: Synthetic oligonucleotide
aauagagguuuacaauaga

SEQ ID NO: 1247236 - RNA, 19 nt, Artificial Sequence
  Description of Artificial Sequence: Synthetic oligonucleotide
uaauauauauauacauaua

SEQ ID NO: 1247237 - RNA, 19 nt, Artificial Sequence
  Description of Artificial Sequence: Synthetic oligonucleotide
uauuccugauuuagaaaag

SEQ ID NO: 1247238 - RNA, 19 nt, Artificial Sequence
  Description of Artificial Sequence: Synthetic oligonucleotide
cuuaguauacacuugauau

SEQ ID NO: 1247239 - RNA, 19 nt, Artificial Sequence
  Description of Artificial Sequence: Synthetic oligonucleotide
augcuaacugaagaaauac

SEQ ID NO: 1247240 - RNA, 19 nt, Artificial Sequence
  Description of Artificial Sequence: Synthetic oligonucleotide
agucauuuaacagauggca

SEQ ID NO: 1247241 - RNA, 19 nt, Artificial Sequence
  Description of Artificial Sequence: Synthetic oligonucleotide
cuagcuacuaaaugagcag

SEQ ID NO: 1247242 - RNA, 19 nt, Artificial Sequence
  Description of Artificial Sequence: Synthetic oligonucleotide
aauagaaagacaggguaau

SEQ ID NO: 1247243 - RNA, 19 nt, Artificial Sequence
  Description of Artificial Sequence: Synthetic oligonucleotide
uuuauuugcuguagcccag

SEQ ID NO: 1247244 - RNA, 19 nt, Artificial Sequence
  Description of Artificial Sequence: Synthetic oligonucleotide
cuugauauguggccaaaag

SEQ ID NO: 1247245 - RNA, 19 nt, Artificial Sequence
  Description of Artificial Sequence: Synthetic oligonucleotide
uuaucauauccaaaccagu

SEQ ID NO: 1247246 - RNA, 19 nt, Artificial Sequence
  Description of Artificial Sequence: Synthetic oligonucleotide
uaacaaacaggguucgucu

SEQ ID NO: 1247247 - RNA, 19 nt, Artificial Sequence
  Description of Artificial Sequence: Synthetic oligonucleotide
auauauauacauauauaca

SEQ ID NO: 1247248 - RNA, 19 nt, Artificial Sequence
  Description of Artificial Sequence: Synthetic oligonucleotide
aaguauggaagagucuuag

SEQ ID NO: 1247249 - RNA, 19 nt, Artificial Sequence
  Description of Artificial Sequence: Synthetic oligonucleotide
accuaaaacugacagacau

SEQ ID NO: 1247250 - RNA, 19 nt, Artificial Sequence
  Description of Artificial Sequence: Synthetic oligonucleotide
accugcuagacaaagaaag

SEQ ID NO: 1247251 - RNA, 19 nt, Artificial Sequence
  Description of Artificial Sequence: Synthetic oligonucleotide
cauuuaacagauggcaagg

SEQ ID NO: 1247252 - RNA, 19 nt, Artificial Sequence
  Description of Artificial Sequence: Synthetic oligonucleotide
ucuaggguuacagggacag

SEQ ID NO: 1247253 - RNA, 19 nt, Artificial Sequence
  Description of Artificial Sequence: Synthetic oligonucleotide
uaggcccucauuuauuugc

SEQ ID NO: 1247254 - RNA, 19 nt, Artificial Sequence
  Description of Artificial Sequence: Synthetic oligonucleotide
auauguuugaauaugcgaa

SEQ ID NO: 1247255 - RNA, 19 nt, Artificial Sequence
  Description of Artificial Sequence: Synthetic oligonucleotide
auuaaugccgaugauaauu

SEQ ID NO: 1247256 - RNA, 19 nt, Artificial Sequence
  Description of Artificial Sequence: Synthetic oligonucleotide
uuuauugcuuggguguagg

SEQ ID NO: 1247257 - RNA, 19 nt, Artificial Sequence
  Description of Artificial Sequence: Synthetic oligonucleotide
aaagucuuauauaaauuaa

SEQ ID NO: 1247258 - RNA, 19 nt, Artificial Sequence
  Description of Artificial Sequence: Synthetic oligonucleotide
uaugcgaacuaagacaccu

SEQ ID NO: 1247259 - RNA, 19 nt, Artificial Sequence
  Description of Artificial Sequence: Synthetic oligonucleotide
ucaaagguguuaaaucuua

SEQ ID NO: 1247260 - RNA, 19 nt, Artificial Sequence
  Description of Artificial Sequence: Synthetic oligonucleotide
uccuauauguuugaauaug

SEQ ID NO: 1247261 - RNA, 19 nt, Artificial Sequence
  Description of Artificial Sequence: Synthetic oligonucleotide
aacuguacauugcucuaug

SEQ ID NO: 1247262 - RNA, 19 nt, Artificial Sequence
  Description of Artificial Sequence: Synthetic oligonucleotide
cauuuauuugcuguagccc

SEQ ID NO: 1247263 - RNA, 19 nt, Artificial Sequence
  Description of Artificial Sequence: Synthetic oligonucleotide
ugcuaacugaagaaauaca

SEQ ID NO: 1247264 - RNA, 19 nt, Artificial Sequence
  Description of Artificial Sequence: Synthetic oligonucleotide
aauucaccugacuuacaga

SEQ ID NO: 1247265 - RNA, 19 nt, Artificial Sequence
  Description of Artificial Sequence: Synthetic oligonucleotide
agcaguaagacagcgcacg

SEQ ID NO: 1247266 - RNA, 19 nt, Artificial Sequence
  Description of Artificial Sequence: Synthetic oligonucleotide
caauagaaauacugauagg

SEQ ID NO: 1247267 - RNA, 19 nt, Artificial Sequence
  Description of Artificial Sequence: Synthetic oligonucleotide
gucuacaccaccuaaaacu

SEQ ID NO: 1247268 - RNA, 19 nt, Artificial Sequence
  Description of Artificial Sequence: Synthetic oligonucleotide
caccuuacacaaaaguaag

SEQ ID NO: 1247269 - RNA, 19 nt, Artificial Sequence
  Description of Artificial Sequence: Synthetic oligonucleotide
uuguaaagcaucaggcguc

SEQ ID NO: 1247270 - RNA, 19 nt, Artificial Sequence
  Description of Artificial Sequence: Synthetic oligonucleotide
aaacaugcggugaacauaa

SEQ ID NO: 1247271 - RNA, 19 nt, Artificial Sequence
  Description of Artificial Sequence: Synthetic oligonucleotide
uuagucuacaccaccuaaa

SEQ ID NO: 1247272 - RNA, 19 nt, Artificial Sequence
  Description of Artificial Sequence: Synthetic oligonucleotide
acauaauuagugguaaaca

SEQ ID NO: 1247273 - RNA, 19 nt, Artificial Sequence
  Description of Artificial Sequence: Synthetic oligonucleotide
auaaaucacagaccaggca

SEQ ID NO: 1247274 - RNA, 19 nt, Artificial Sequence
  Description of Artificial Sequence: Synthetic oligonucleotide
acucacacauuucugauuu

SEQ ID NO: 1247275 - RNA, 19 nt, Artificial Sequence
  Description of Artificial Sequence: Synthetic oligonucleotide
ugauuucacucacacauuu

SEQ ID NO: 1247276 - RNA, 19 nt, Artificial Sequence
  Description of Artificial Sequence: Synthetic oligonucleotide
uucuguaacccuguaauaa

SEQ ID NO: 1247277 - RNA, 19 nt, Artificial Sequence
  Description of Artificial Sequence: Synthetic oligonucleotide
ugcgaacuaagacaccugu

SEQ ID NO: 1247278 - RNA, 19 nt, Artificial Sequence
  Description of Artificial Sequence: Synthetic oligonucleotide
ugaguuagacuuuggcugu

SEQ ID NO: 1247279 - RNA, 19 nt, Artificial Sequence
  Description of Artificial Sequence: Synthetic oligonucleotide
uacauaacagacuguuuuc

SEQ ID NO: 1247280 - RNA, 19 nt, Artificial Sequence
  Description of Artificial Sequence: Synthetic oligonucleotide
uacucuaagggcacacuga

SEQ ID NO: 1247281 - RNA, 19 nt, Artificial Sequence
  Description of Artificial Sequence: Synthetic oligonucleotide
cauauaaaucacagaccag

SEQ ID NO: 1247282 - RNA, 19 nt, Artificial Sequence
  Description of Artificial Sequence: Synthetic oligonucleotide
ugcucuaugcaauuuuauc

SEQ ID NO: 1247283 - RNA, 19 nt, Artificial Sequence
  Description of Artificial Sequence: Synthetic oligonucleotide
ucuaugcaauuuuaucacu

SEQ ID NO: 1247284 - RNA, 19 nt, Artificial Sequence
  Description of Artificial Sequence: Synthetic oligonucleotide
gacgcugagacagucuccg

SEQ ID NO: 1247285 - RNA, 19 nt, Artificial Sequence
  Description of Artificial Sequence: Synthetic oligonucleotide
uuauugcuuggguguaggg

SEQ ID NO: 1247286 - RNA, 19 nt, Artificial Sequence
  Description of Artificial Sequence: Synthetic oligonucleotide
agaaugaauucucccucag

SEQ ID NO: 1247287 - RNA, 19 nt, Artificial Sequence
  Description of Artificial Sequence: Synthetic oligonucleotide
uuggccacuuaguauacac

SEQ ID NO: 1247288 - RNA, 19 nt, Artificial Sequence
  Description of Artificial Sequence: Synthetic oligonucleotide
uacacuugauauguggcca

SEQ ID NO: 1247289 - RNA, 19 nt, Artificial Sequence
  Description of Artificial Sequence: Synthetic oligonucleotide
uguaacccuguaauaaaua

SEQ ID NO: 1247290 - RNA, 19 nt, Artificial Sequence
  Description of Artificial Sequence: Synthetic oligonucleotide
aagaugugccaaugaauau

SEQ ID NO: 1247291 - RNA, 19 nt, Artificial Sequence
  Description of Artificial Sequence: Synthetic oligonucleotide
caugcggugaacauaauua

SEQ ID NO: 1247292 - RNA, 19 nt, Artificial Sequence
  Description of Artificial Sequence: Synthetic oligonucleotide
uguuugaauaugcgaacua

SEQ ID NO: 1247293 - RNA, 19 nt, Artificial Sequence
  Description of Artificial Sequence: Synthetic oligonucleotide
uccuaaacaugaguuagac

SEQ ID NO: 1247294 - RNA, 19 nt, Artificial Sequence
  Description of Artificial Sequence: Synthetic oligonucleotide
cauugugacggcugcgacg

SEQ ID NO: 1247295 - RNA, 19 nt, Artificial Sequence
  Description of Artificial Sequence: Synthetic oligonucleotide
guuggguacugauugauaa

SEQ ID NO: 1247296 - RNA, 19 nt, Artificial Sequence
  Description of Artificial Sequence: Synthetic oligonucleotide
acuuaguauacacuugaua

SEQ ID NO: 1247297 - RNA, 19 nt, Artificial Sequence
  Description of Artificial Sequence: Synthetic oligonucleotide
uaugcaauuuuaucacuua

SEQ ID NO: 1247298 - RNA, 19 nt, Artificial Sequence
  Description of Artificial Sequence: Synthetic oligonucleotide
auuagucuacaccaccuaa

SEQ ID NO: 1247299 - RNA, 19 nt, Artificial Sequence
  Description of Artificial Sequence: Synthetic oligonucleotide
agcaaccaauacuguaaac

SEQ ID NO: 1247300 - RNA, 19 nt, Artificial Sequence
  Description of Artificial Sequence: Synthetic oligonucleotide
ccuauauguuugaauaugc

SEQ ID NO: 1247301 - RNA, 19 nt, Artificial Sequence
  Description of Artificial Sequence: Synthetic oligonucleotide
gguauuagucuacaccacc

SEQ ID NO: 1247302 - RNA, 19 nt, Artificial Sequence
  Description of Artificial Sequence: Synthetic oligonucleotide
auauauauauacauauaua

SEQ ID NO: 1247303 - RNA, 19 nt, Artificial Sequence
  Description of Artificial Sequence: Synthetic oligonucleotide
cuaaaugagcagacucccc

SEQ ID NO: 1247304 - RNA, 19 nt, Artificial Sequence
  Description of Artificial Sequence: Synthetic oligonucleotide
cugacaccccugaaaauag

SEQ ID NO: 1247305 - RNA, 19 nt, Artificial Sequence
  Description of Artificial Sequence: Synthetic oligonucleotide
acacugacaccccugaaaa

SEQ ID NO: 1247306 - RNA, 19 nt, Artificial Sequence
  Description of Artificial Sequence: Synthetic oligonucleotide
ccauauauaauauauauau

SEQ ID NO: 1247307 - RNA, 19 nt, Artificial Sequence
  Description of Artificial Sequence: Synthetic oligonucleotide
ugcggugaacauaauuagu

SEQ ID NO: 1247308 - RNA, 19 nt, Artificial Sequence
  Description of Artificial Sequence: Synthetic oligonucleotide
uguggccaaaaguuuacaa

SEQ ID NO: 1247309 - RNA, 19 nt, Artificial Sequence
  Description of Artificial Sequence: Synthetic oligonucleotide
uuagacccacaaaggaaga

SEQ ID NO: 1247310 - RNA, 19 nt, Artificial Sequence
  Description of Artificial Sequence: Synthetic oligonucleotide
guuguaaagcaucaggcgu

SEQ ID NO: 1247311 - RNA, 19 nt, Artificial Sequence
  Description of Artificial Sequence: Synthetic oligonucleotide
aucucaauagaaagacagg

SEQ ID NO: 1247312 - RNA, 19 nt, Artificial Sequence
  Description of Artificial Sequence: Synthetic oligonucleotide
agcuacuaaaugagcagac

SEQ ID NO: 1247313 - RNA, 19 nt, Artificial Sequence
  Description of Artificial Sequence: Synthetic oligonucleotide
agaaacaugcggugaacau

SEQ ID NO: 1247314 - RNA, 19 nt, Artificial Sequence
  Description of Artificial Sequence: Synthetic oligonucleotide
augagcagacuccccaaag

SEQ ID NO: 1247315 - RNA, 19 nt, Artificial Sequence
  Description of Artificial Sequence: Synthetic oligonucleotide
uauuagucuacaccaccua

SEQ ID NO: 1247316 - RNA, 19 nt, Artificial Sequence
  Description of Artificial Sequence: Synthetic oligonucleotide
aauucucccucaguagugu

SEQ ID NO: 1247317 - RNA, 19 nt, Artificial Sequence
  Description of Artificial Sequence: Synthetic oligonucleotide
ggagcaguaagacagcgca

SEQ ID NO: 1247318 - RNA, 19 nt, Artificial Sequence
  Description of Artificial Sequence: Synthetic oligonucleotide
uaguguguacuugacauua

SEQ ID NO: 1247319 - RNA, 19 nt, Artificial Sequence
  Description of Artificial Sequence: Synthetic oligonucleotide
uuccuauauguuugaauau

SEQ ID NO: 1247320 - RNA, 19 nt, Artificial Sequence
  Description of Artificial Sequence: Synthetic oligonucleotide
agcccagcauacucuaagg

SEQ ID NO: 1247321 - RNA, 19 nt, Artificial Sequence
  Description of Artificial Sequence: Synthetic oligonucleotide
uagcuacuaaaugagcaga

SEQ ID NO: 1247322 - RNA, 19 nt, Artificial Sequence
  Description of Artificial Sequence: Synthetic oligonucleotide
agaaagagccuuauugaca

SEQ ID NO: 1247323 - RNA, 19 nt, Artificial Sequence
  Description of Artificial Sequence: Synthetic oligonucleotide
cauauauaauauauauaua

SEQ ID NO: 1247324 - RNA, 19 nt, Artificial Sequence
  Description of Artificial Sequence: Synthetic oligonucleotide
gugaguuccauccauuuua

SEQ ID NO: 1247325 - RNA, 19 nt, Artificial Sequence
  Description of Artificial Sequence: Synthetic oligonucleotide
uggcaguuacccagcaacc

SEQ ID NO: 1247326 - RNA, 19 nt, Artificial Sequence
  Description of Artificial Sequence: Synthetic oligonucleotide
acuacgguagauacaaagu

SEQ ID NO: 1247327 - RNA, 19 nt, Artificial Sequence
  Description of Artificial Sequence: Synthetic oligonucleotide
caaagguguuaaaucuuac

SEQ ID NO: 1247328 - RNA, 19 nt, Artificial Sequence
  Description of Artificial Sequence: Synthetic oligonucleotide
agcacucggccacaguauc

SEQ ID NO: 1247329 - RNA, 19 nt, Artificial Sequence
  Description of Artificial Sequence: Synthetic oligonucleotide
gaauucucccucaguagug

SEQ ID NO: 1247330 - RNA, 19 nt, Artificial Sequence
  Description of Artificial Sequence: Synthetic oligonucleotide
uuucugugaguuccaucca

SEQ ID NO: 1247331 - RNA, 19 nt, Artificial Sequence
  Description of Artificial Sequence: Synthetic oligonucleotide
ugccgaugauaauucaccu

SEQ ID NO: 1247332 - RNA, 19 nt, Artificial Sequence
  Description of Artificial Sequence: Synthetic oligonucleotide
uaagacagcgcacgccgac

SEQ ID NO: 1247333 - RNA, 19 nt, Artificial Sequence
  Description of Artificial Sequence: Synthetic oligonucleotide
uguaaagcaucaggcguca

SEQ ID NO: 1247334 - RNA, 19 nt, Artificial Sequence
  Description of Artificial Sequence: Synthetic oligonucleotide
uucugugaguuccauccau

SEQ ID NO: 1247335 - RNA, 19 nt, Artificial Sequence
  Description of Artificial Sequence: Synthetic oligonucleotide
uugccuagcaaauguccac

SEQ ID NO: 1247336 - RNA, 19 nt, Artificial Sequence
  Description of Artificial Sequence: Synthetic oligonucleotide
caaccaauacuguaaacua

SEQ ID NO: 1247337 - RNA, 19 nt, Artificial Sequence
  Description of Artificial Sequence: Synthetic oligonucleotide
gguuacagggacaggaugc

SEQ ID NO: 1247338 - RNA, 19 nt, Artificial Sequence
  Description of Artificial Sequence: Synthetic oligonucleotide
cugauuuagaaaaggucaa

SEQ ID NO: 1247339 - RNA, 19 nt, Artificial Sequence
  Description of Artificial Sequence: Synthetic oligonucleotide
aguauggaagagucuuaga

SEQ ID NO: 1247340 - RNA, 19 nt, Artificial Sequence
  Description of Artificial Sequence: Synthetic oligonucleotide
aaugggucacuuccauaaa

SEQ ID NO: 1247341 - RNA, 19 nt, Artificial Sequence
  Description of Artificial Sequence: Synthetic oligonucleotide
caugaguuagacuuuggcu

SEQ ID NO: 1247342 - RNA, 19 nt, Artificial Sequence
  Description of Artificial Sequence: Synthetic oligonucleotide
uagggagcaguuuucuauc

SEQ ID NO: 1247343 - RNA, 19 nt, Artificial Sequence
  Description of Artificial Sequence: Synthetic oligonucleotide
aagcccauugcuggcgcac

SEQ ID NO: 1247344 - RNA, 19 nt, Artificial Sequence
  Description of Artificial Sequence: Synthetic oligonucleotide
cuugccuagcaaaugucca

SEQ ID NO: 1247345 - RNA, 19 nt, Artificial Sequence
  Description of Artificial Sequence: Synthetic oligonucleotide
uggcuguuagguuuauuau

SEQ ID NO: 1247346 - RNA, 19 nt, Artificial Sequence
  Description of Artificial Sequence: Synthetic oligonucleotide
agguauuagucuacaccac

SEQ ID NO: 1247347 - RNA, 19 nt, Artificial Sequence
  Description of Artificial Sequence: Synthetic oligonucleotide
acgccgaccugcuagacaa

SEQ ID NO: 1247348 - RNA, 19 nt, Artificial Sequence
  Description of Artificial Sequence: Synthetic oligonucleotide
cuguuagguuuauuauuug

SEQ ID NO: 1247349 - RNA, 19 nt, Artificial Sequence
  Description of Artificial Sequence: Synthetic oligonucleotide
agauaguggaaaucauaua

SEQ ID NO: 1247350 - RNA, 19 nt, Artificial Sequence
  Description of Artificial Sequence: Synthetic oligonucleotide
ugauaggccucuagcuacu

SEQ ID NO: 1247351 - RNA, 19 nt, Artificial Sequence
  Description of Artificial Sequence: Synthetic oligonucleotide
caagauaguggaaaucaua

SEQ ID NO: 1247352 - RNA, 19 nt, Artificial Sequence
  Description of Artificial Sequence: Synthetic oligonucleotide
agaugugccaaugaauauu

SEQ ID NO: 1247353 - RNA, 19 nt, Artificial Sequence
  Description of Artificial Sequence: Synthetic oligonucleotide
uguuggguacugauugaua

SEQ ID NO: 1247354 - RNA, 19 nt, Artificial Sequence
  Description of Artificial Sequence: Synthetic oligonucleotide
gcggugaacauaauuagug

SEQ ID NO: 1247355 - RNA, 19 nt, Artificial Sequence
  Description of Artificial Sequence: Synthetic oligonucleotide
uggccacuuaguauacacu

SEQ ID NO: 1247356 - RNA, 19 nt, Artificial Sequence
  Description of Artificial Sequence: Synthetic oligonucleotide
gaugcuaacugaagaaaua

SEQ ID NO: 1247357 - RNA, 19 nt, Artificial Sequence
  Description of Artificial Sequence: Synthetic oligonucleotide
acuugcagggaaagcaaag

SEQ ID NO: 1247358 - RNA, 19 nt, Artificial Sequence
  Description of Artificial Sequence: Synthetic oligonucleotide
gaagaaacaugcggugaac

SEQ ID NO: 1247359 - RNA, 19 nt, Artificial Sequence
  Description of Artificial Sequence: Synthetic oligonucleotide
guaacccuguaauaaauau

SEQ ID NO: 1247360 - RNA, 19 nt, Artificial Sequence
  Description of Artificial Sequence: Synthetic oligonucleotide
gaacauaauuagugguaaa

SEQ ID NO: 1247361 - RNA, 19 nt, Artificial Sequence
  Description of Artificial Sequence: Synthetic oligonucleotide
caacgggaagucauuuaac

SEQ ID NO: 1247362 - RNA, 19 nt, Artificial Sequence
  Description of Artificial Sequence: Synthetic oligonucleotide
agagucuuagacccacaaa

SEQ ID NO: 1247363 - RNA, 19 nt, Artificial Sequence
  Description of Artificial Sequence: Synthetic oligonucleotide
acaugcggugaacauaauu

SEQ ID NO: 1247364 - RNA, 19 nt, Artificial Sequence
  Description of Artificial Sequence: Synthetic oligonucleotide
uuggguacugauugauaau

SEQ ID NO: 1247365 - RNA, 19 nt, Artificial Sequence
  Description of Artificial Sequence: Synthetic oligonucleotide
auaugcgaacuaagacacc

SEQ ID NO: 1247366 - RNA, 19 nt, Artificial Sequence
  Description of Artificial Sequence: Synthetic oligonucleotide
uggcauugagucuguggca

SEQ ID NO: 1247367 - RNA, 19 nt, Artificial Sequence
  Description of Artificial Sequence: Synthetic oligonucleotide
guuacccagcaaccaauac

SEQ ID NO: 1247368 - RNA, 19 nt, Artificial Sequence
  Description of Artificial Sequence: Synthetic oligonucleotide
caagacacacagccccucc

SEQ ID NO: 1247369 - RNA, 19 nt, Artificial Sequence
  Description of Artificial Sequence: Synthetic oligonucleotide
auugacaguuguaaagcau

SEQ ID NO: 1247370 - RNA, 19 nt, Artificial Sequence
  Description of Artificial Sequence: Synthetic oligonucleotide
ugacaccccugaaaauaga

SEQ ID NO: 1247371 - RNA, 19 nt, Artificial Sequence
  Description of Artificial Sequence: Synthetic oligonucleotide
cuaagacaccuguggcacc

SEQ ID NO: 1247372 - RNA, 19 nt, Artificial Sequence
  Description of Artificial Sequence: Synthetic oligonucleotide
cauaguuuucuguaacccu

SEQ ID NO: 1247373 - RNA, 19 nt, Artificial Sequence
  Description of Artificial Sequence: Synthetic oligonucleotide
ggugaacauaauuaguggu

SEQ ID NO: 1247374 - RNA, 19 nt, Artificial Sequence
  Description of Artificial Sequence: Synthetic oligonucleotide
ggcauugagucuguggcag

SEQ ID NO: 1247375 - RNA, 19 nt, Artificial Sequence
  Description of Artificial Sequence: Synthetic oligonucleotide
cccuguaauaaauauggca

SEQ ID NO: 1247376 - RNA, 19 nt, Artificial Sequence
  Description of Artificial Sequence: Synthetic oligonucleotide
uguagggagcaguuuucua

SEQ ID NO: 1247377 - RNA, 19 nt, Artificial Sequence
  Description of Artificial Sequence: Synthetic oligonucleotide
guaaacuacgguagauaca

SEQ ID NO: 1247378 - RNA, 19 nt, Artificial Sequence
  Description of Artificial Sequence: Synthetic oligonucleotide
guagggagcaguuuucuau

SEQ ID NO: 1247379 - RNA, 19 nt, Artificial Sequence
  Description of Artificial Sequence: Synthetic oligonucleotide
accugucaacuuuuaagua

SEQ ID NO: 1247380 - RNA, 19 nt, Artificial Sequence
  Description of Artificial Sequence: Synthetic oligonucleotide
uuguuggguacugauugau

SEQ ID NO: 1247381 - RNA, 19 nt, Artificial Sequence
  Description of Artificial Sequence: Synthetic oligonucleotide
cuuugagcuuuaucauauc

SEQ ID NO: 1247382 - RNA, 19 nt, Artificial Sequence
  Description of Artificial Sequence: Synthetic oligonucleotide
gucauuuaacagauggcaa

SEQ ID NO: 1247383 - RNA, 19 nt, Artificial Sequence
  Description of Artificial Sequence: Synthetic oligonucleotide
aguauacacuugauaugug

SEQ ID NO: 1247384 - RNA, 19 nt, Artificial Sequence
  Description of Artificial Sequence: Synthetic oligonucleotide
uugcaagauaguggaaauc

SEQ ID NO: 1247385 - RNA, 19 nt, Artificial Sequence
  Description of Artificial Sequence: Synthetic oligonucleotide
agcacuugauuaaagugua

SEQ ID NO: 1247386 - RNA, 19 nt, Artificial Sequence
  Description of Artificial Sequence: Synthetic oligonucleotide
acacuugauauguggccaa

SEQ ID NO: 1247387 - RNA, 19 nt, Artificial Sequence
  Description of Artificial Sequence: Synthetic oligonucleotide
caguaagacagcgcacgcc

SEQ ID NO: 1247388 - RNA, 19 nt, Artificial Sequence
  Description of Artificial Sequence: Synthetic oligonucleotide
caaugaauauuucauccau

SEQ ID NO: 1247389 - RNA, 19 nt, Artificial Sequence
  Description of Artificial Sequence: Synthetic oligonucleotide
cauccaugaaccucaauau

SEQ ID NO: 1247390 - RNA, 19 nt, Artificial Sequence
  Description of Artificial Sequence: Synthetic oligonucleotide
cuaggcccucauuuauuug

SEQ ID NO: 1247391 - RNA, 19 nt, Artificial Sequence
  Description of Artificial Sequence: Synthetic oligonucleotide
gaaugaauucucccucagu

SEQ ID NO: 1247392 - RNA, 19 nt, Artificial Sequence
  Description of Artificial Sequence: Synthetic oligonucleotide
ggaagaaacaugcggugaa

SEQ ID NO: 1247393 - RNA, 19 nt, Artificial Sequence
  Description of Artificial Sequence: Synthetic oligonucleotide
uuucuaucauuuggccacu

SEQ ID NO: 1247394 - RNA, 19 nt, Artificial Sequence
  Description of Artificial Sequence: Synthetic oligonucleotide
agagccuuauugacaguug

SEQ ID NO: 1247395 - RNA, 19 nt, Artificial Sequence
  Description of Artificial Sequence: Synthetic oligonucleotide
gcagcuagguauuagucua

SEQ ID NO: 1247396 - RNA, 19 nt, Artificial Sequence
  Description of Artificial Sequence: Synthetic oligonucleotide
cuagacaaagaaagagccu

SEQ ID NO: 1247397 - RNA, 19 nt, Artificial Sequence
  Description of Artificial Sequence: Synthetic oligonucleotide
gaugugccaaugaauauuu

SEQ ID NO: 1247398 - RNA, 19 nt, Artificial Sequence
  Description of Artificial Sequence: Synthetic oligonucleotide
cagcuagguauuagucuac

SEQ ID NO: 1247399 - RNA, 19 nt, Artificial Sequence
  Description of Artificial Sequence: Synthetic oligonucleotide
guauuagucuacaccaccu

SEQ ID NO: 1247400 - RNA, 19 nt, Artificial Sequence
  Description of Artificial Sequence: Synthetic oligonucleotide
acagcaaauucuaggguua

SEQ ID NO: 1247401 - RNA, 19 nt, Artificial Sequence
  Description of Artificial Sequence: Synthetic oligonucleotide
gagucuaggcccucauuua

SEQ ID NO: 1247402 - RNA, 19 nt, Artificial Sequence
  Description of Artificial Sequence: Synthetic oligonucleotide
gccgaugauaauucaccug

SEQ ID NO: 1247403 - RNA, 19 nt, Artificial Sequence
  Description of Artificial Sequence: Synthetic oligonucleotide
ggguuacagggacaggaug

SEQ ID NO: 1247404 - RNA, 19 nt, Artificial Sequence
  Description of Artificial Sequence: Synthetic oligonucleotide
gcaaggagcacucggccac

SEQ ID NO: 1247405 - RNA, 19 nt, Artificial Sequence
  Description of Artificial Sequence: Synthetic oligonucleotide
ggaagagucuuagacccac

SEQ ID NO: 1247406 - RNA, 19 nt, Artificial Sequence
  Description of Artificial Sequence: Synthetic oligonucleotide
auccuaaacaugaguuaga

SEQ ID NO: 1247407 - RNA, 19 nt, Artificial Sequence
  Description of Artificial Sequence: Synthetic oligonucleotide
cuacaccaccuaaaacuga

SEQ ID NO: 1247408 - RNA, 19 nt, Artificial Sequence
  Description of Artificial Sequence: Synthetic oligonucleotide
agcaaauucuaggguuaca

SEQ ID NO: 1247409 - RNA, 19 nt, Artificial Sequence
  Description of Artificial Sequence: Synthetic oligonucleotide
acuugauauguggccaaaa

SEQ ID NO: 1247410 - RNA, 19 nt, Artificial Sequence
  Description of Artificial Sequence: Synthetic oligonucleotide
gcuagguauuagucuacac

SEQ ID NO: 1247411 - RNA, 19 nt, Artificial Sequence
  Description of Artificial Sequence: Synthetic oligonucleotide
cagcaaauucuaggguuac

SEQ ID NO: 1247412 - RNA, 19 nt, Artificial Sequence
  Description of Artificial Sequence: Synthetic oligonucleotide
acgcugagacagucuccgg

SEQ ID NO: 1247413 - RNA, 19 nt, Artificial Sequence
  Description of Artificial Sequence: Synthetic oligonucleotide
auaauucaccugacuuaca

SEQ ID NO: 1247414 - RNA, 19 nt, Artificial Sequence
  Description of Artificial Sequence: Synthetic oligonucleotide
cuaggguuacagggacagg

SEQ ID NO: 1247415 - RNA, 19 nt, Artificial Sequence
  Description of Artificial Sequence: Synthetic oligonucleotide
guggcagcuagguauuagu

SEQ ID NO: 1247416 - RNA, 19 nt, Artificial Sequence
  Description of Artificial Sequence: Synthetic oligonucleotide
gguagauacaaagucuuau

SEQ ID NO: 1247417 - RNA, 19 nt, Artificial Sequence
  Description of Artificial Sequence: Synthetic oligonucleotide
agacaacgggaagucauuu

SEQ ID NO: 1247418 - RNA, 19 nt, Artificial Sequence
  Description of Artificial Sequence: Synthetic oligonucleotide
gaccugcuagacaaagaaa

SEQ ID NO: 1247419 - RNA, 19 nt, Artificial Sequence
  Description of Artificial Sequence: Synthetic oligonucleotide
auguggccaaaaguuuaca

SEQ ID NO: 1247420 - RNA, 19 nt, Artificial Sequence
  Description of Artificial Sequence: Synthetic oligonucleotide
cuguaacccuguaauaaau

SEQ ID NO: 1247421 - RNA, 19 nt, Artificial Sequence
  Description of Artificial Sequence: Synthetic oligonucleotide
cagcaaccaauacuguaaa

SEQ ID NO: 1247422 - RNA, 19 nt, Artificial Sequence
  Description of Artificial Sequence: Synthetic oligonucleotide
augcgaacuaagacaccug

SEQ ID NO: 1247423 - RNA, 19 nt, Artificial Sequence
  Description of Artificial Sequence: Synthetic oligonucleotide
caucaggcgucagacagaa

SEQ ID NO: 1247424 - RNA, 19 nt, Artificial Sequence
  Description of Artificial Sequence: Synthetic oligonucleotide
gccauauauaauauauaua

SEQ ID NO: 1247425 - RNA, 19 nt, Artificial Sequence
  Description of Artificial Sequence: Synthetic oligonucleotide
gacagcgcacgccgaccug

SEQ ID NO: 1247426 - RNA, 19 nt, Artificial Sequence
  Description of Artificial Sequence: Synthetic oligonucleotide
gcaguuacccagcaaccaa

SEQ ID NO: 1247427 - RNA, 19 nt, Artificial Sequence
  Description of Artificial Sequence: Synthetic oligonucleotide
gcgacgcugagacagucuc

SEQ ID NO: 1247428 - RNA, 19 nt, Artificial Sequence
  Description of Artificial Sequence: Synthetic oligonucleotide
ccuagcaaauguccacaug

SEQ ID NO: 1247429 - RNA, 19 nt, Artificial Sequence
  Description of Artificial Sequence: Synthetic oligonucleotide
aggaugccaagaggagcag

SEQ ID NO: 1247430 - RNA, 19 nt, Artificial Sequence
  Description of Artificial Sequence: Synthetic oligonucleotide
gcgcacgccgaccugcuag

SEQ ID NO: 1247431 - RNA, 19 nt, Artificial Sequence
  Description of Artificial Sequence: Synthetic oligonucleotide
ccuuauugacaguuguaaa

SEQ ID NO: 1247432 - RNA, 19 nt, Artificial Sequence
  Description of Artificial Sequence: Synthetic oligonucleotide
acuuuggcuguuagguuua

SEQ ID NO: 1247433 - RNA, 19 nt, Artificial Sequence
  Description of Artificial Sequence: Synthetic oligonucleotide
gcuguuagguuuauuauuu

SEQ ID NO: 1247434 - RNA, 19 nt, Artificial Sequence
  Description of Artificial Sequence: Synthetic oligonucleotide
aggguuacagggacaggau

SEQ ID NO: 1247435 - RNA, 19 nt, Artificial Sequence
  Description of Artificial Sequence: Synthetic oligonucleotide
aguuagacuuuggcuguua

SEQ ID NO: 1247436 - RNA, 19 nt, Artificial Sequence
  Description of Artificial Sequence: Synthetic oligonucleotide
gguguagggagcaguuuuc

SEQ ID NO: 1247437 - RNA, 19 nt, Artificial Sequence
  Description of Artificial Sequence: Synthetic oligonucleotide
ggucacuuccauaaauaua

SEQ ID NO: 1247438 - RNA, 19 nt, Artificial Sequence
  Description of Artificial Sequence: Synthetic oligonucleotide
ggcaguuacccagcaacca

SEQ ID NO: 1247439 - RNA, 19 nt, Artificial Sequence
  Description of Artificial Sequence: Synthetic oligonucleotide
ggcuguuagguuuauuauu

SEQ ID NO: 1247440 - RNA, 19 nt, Artificial Sequence
  Description of Artificial Sequence: Synthetic oligonucleotide
gcgaacuaagacaccugug

SEQ ID NO: 1247441 - RNA, 19 nt, Artificial Sequence
  Description of Artificial Sequence: Synthetic oligonucleotide
ccauugcuggcgcacauga

SEQ ID NO: 1247442 - RNA, 19 nt, Artificial Sequence
  Description of Artificial Sequence: Synthetic oligonucleotide
guaguguguacuugacauu

SEQ ID NO: 1247443 - RNA, 19 nt, Artificial Sequence
  Description of Artificial Sequence: Synthetic oligonucleotide
agcuguuguuggguacuga

SEQ ID NO: 1247444 - RNA, 19 nt, Artificial Sequence
  Description of Artificial Sequence: Synthetic oligonucleotide
caugaaccucaauauucau

SEQ ID NO: 1247445 - RNA, 19 nt, Artificial Sequence
  Description of Artificial Sequence: Synthetic oligonucleotide
guaagacagcgcacgccga

SEQ ID NO: 1247446 - RNA, 19 nt, Artificial Sequence
  Description of Artificial Sequence: Synthetic oligonucleotide
ggcccucauuuauuugcug

SEQ ID NO: 1247447 - RNA, 19 nt, Artificial Sequence
  Description of Artificial Sequence: Synthetic oligonucleotide
caguuacccagcaaccaau

SEQ ID NO: 1247448 - RNA, 19 nt, Artificial Sequence
  Description of Artificial Sequence: Synthetic oligonucleotide
cgaugauaauucaccugac

SEQ ID NO: 1247449 - RNA, 19 nt, Artificial Sequence
  Description of Artificial Sequence: Synthetic oligonucleotide
cauugagucuguggcagcu

SEQ ID NO: 1247450 - RNA, 19 nt, Artificial Sequence
  Description of Artificial Sequence: Synthetic oligonucleotide
aacaugcggugaacauaau

SEQ ID NO: 1247451 - RNA, 19 nt, Artificial Sequence
  Description of Artificial Sequence: Synthetic oligonucleotide
cauugcuggcgcacaugaa

SEQ ID NO: 1247452 - RNA, 19 nt, Artificial Sequence
  Description of Artificial Sequence: Synthetic oligonucleotide
cacgccgaccugcuagaca

SEQ ID NO: 1247453 - RNA, 19 nt, Artificial Sequence
  Description of Artificial Sequence: Synthetic oligonucleotide
cagacuccccaaagccaca

SEQ ID NO: 1247454 - RNA, 19 nt, Artificial Sequence
  Description of Artificial Sequence: Synthetic oligonucleotide
gcuacuaaaugagcagacu

SEQ ID NO: 1247455 - RNA, 19 nt, Artificial Sequence
  Description of Artificial Sequence: Synthetic oligonucleotide
cugcgacgcugagacaguc

SEQ ID NO: 1247456 - RNA, 19 nt, Artificial Sequence
  Description of Artificial Sequence: Synthetic oligonucleotide
uugugacggcugcgacgcu

SEQ ID NO: 1247457 - RNA, 19 nt, Artificial Sequence
  Description of Artificial Sequence: Synthetic oligonucleotide
ccuaaacaugaguuagacu

SEQ ID NO: 1247458 - RNA, 19 nt, Artificial Sequence
  Description of Artificial Sequence: Synthetic oligonucleotide
cagacaacgggaagucauu

SEQ ID NO: 1247459 - RNA, 19 nt, Artificial Sequence
  Description of Artificial Sequence: Synthetic oligonucleotide
cacuugauauguggccaaa

SEQ ID NO: 1247460 - RNA, 19 nt, Artificial Sequence
  Description of Artificial Sequence: Synthetic oligonucleotide
agacagucuccgggcugug

SEQ ID NO: 1247461 - RNA, 19 nt, Artificial Sequence
  Description of Artificial Sequence: Synthetic oligonucleotide
gcaagauaguggaaaucau

SEQ ID NO: 1247462 - RNA, 19 nt, Artificial Sequence
  Description of Artificial Sequence: Synthetic oligonucleotide
ccacaugaaccugucaacu

SEQ ID NO: 1247463 - RNA, 19 nt, Artificial Sequence
  Description of Artificial Sequence: Synthetic oligonucleotide
ccgaccugcuagacaaaga

SEQ ID NO: 1247464 - RNA, 19 nt, Artificial Sequence
  Description of Artificial Sequence: Synthetic oligonucleotide
ggguucgucuuugagcuuu

SEQ ID NO: 1247465 - RNA, 19 nt, Artificial Sequence
  Description of Artificial Sequence: Synthetic oligonucleotide
ggaugccaagaggagcagu

SEQ ID NO: 1247466 - RNA, 19 nt, Artificial Sequence
  Description of Artificial Sequence: Synthetic oligonucleotide
cgguagauacaaagucuua

SEQ ID NO: 1247467 - RNA, 19 nt, Artificial Sequence
  Description of Artificial Sequence: Synthetic oligonucleotide
gguucgucuuugagcuuua

SEQ ID NO: 1247468 - RNA, 19 nt, Artificial Sequence
  Description of Artificial Sequence: Synthetic oligonucleotide
aucaggcgucagacagaaa

SEQ ID NO: 1247469 - RNA, 19 nt, Artificial Sequence
  Description of Artificial Sequence: Synthetic oligonucleotide
gcacucggccacaguaucu

SEQ ID NO: 1247470 - RNA, 19 nt, Artificial Sequence
  Description of Artificial Sequence: Synthetic oligonucleotide
gcacgccgaccugcuagac

SEQ ID NO: 1247471 - RNA, 19 nt, Artificial Sequence
  Description of Artificial Sequence: Synthetic oligonucleotide
cgcacgccgaccugcuaga

SEQ ID NO: 1247472 - RNA, 19 nt, Artificial Sequence
  Description of Artificial Sequence: Synthetic oligonucleotide
gcugcgacgcugagacagu

SEQ ID NO: 1247473 - RNA, 19 nt, Artificial Sequence
  Description of Artificial Sequence: Synthetic oligonucleotide
cgccgaccugcuagacaaa

SEQ ID NO: 1247474 - RNA, 19 nt, Artificial Sequence
  Description of Artificial Sequence: Synthetic oligonucleotide
  modified_base (16)..(16): a, c, u, g, unknown or other
ugaauauauacacagnacc

SEQ ID NO: 1247475 - RNA, 19 nt, Artificial Sequence
  Description of Artificial Sequence: Synthetic oligonucleotide
gauaagauagcccugcugg

SEQ ID NO: 1247476 - RNA, 19 nt, Artificial Sequence
  Description of Artificial Sequence: Synthetic oligonucleotide
gaaaguauggcaucgaacc

SEQ ID NO: 1247477 - RNA, 19 nt, Artificial Sequence
  Description of Artificial Sequence: Synthetic oligonucleotide
aaugugauugugaaggugc

SEQ ID NO: 1247478 - RNA, 19 nt, Artificial Sequence
  Description of Artificial Sequence: Synthetic oligonucleotide
uagaauuugacuaaaguuc

SEQ ID NO: 1247479 - RNA, 19 nt, Artificial Sequence
  Description of Artificial Sequence: Synthetic oligonucleotide
uuacccgucgauaagauag

SEQ ID NO: 1247480 - RNA, 19 nt, Artificial Sequence
  Description of Artificial Sequence: Synthetic oligonucleotide
gaaaaguugaaaugcuucg

SEQ ID NO: 1247481 - RNA, 19 nt, Artificial Sequence
  Description of Artificial Sequence: Synthetic oligonucleotide
aaguuauucacacgauagc

SEQ ID NO: 1247482 - RNA, 19 nt, Artificial Sequence
  Description of Artificial Sequence: Synthetic oligonucleotide
cagaaguuaacccugacgg

SEQ ID NO: 1247483 - RNA, 19 nt, Artificial Sequence
  Description of Artificial Sequence: Synthetic oligonucleotide
agaaguuaaagcugaugcc

SEQ ID NO: 1247484 - RNA, 19 nt, Artificial Sequence
  Description of Artificial Sequence: Synthetic oligonucleotide
  modified_base (2)..(2): a, c, u, g, unknown or other
gnuccaugaauauauacac

SEQ ID NO: 1247485 - RNA, 19 nt, Artificial Sequence
  Description of Artificial Sequence: Synthetic oligonucleotide
aacauuucuuuguaccgac

SEQ ID NO: 1247486 - RNA, 19 nt, Artificial Sequence
  Description of Artificial Sequence: Synthetic oligonucleotide
agaauuugacuaaaguucc

SEQ ID NO: 1247487 - RNA, 19 nt, Artificial Sequence
  Description of Artificial Sequence: Synthetic oligonucleotide
uuugacuaaaguuccguag

SEQ ID NO: 1247488 - RNA, 19 nt, Artificial Sequence
  Description of Artificial Sequence: Synthetic oligonucleotide
ugauugaugcuacagcugc

SEQ ID NO: 1247489 - RNA, 19 nt, Artificial Sequence
  Description of Artificial Sequence: Synthetic oligonucleotide
ugcucuucgaaccuucucg

SEQ ID NO: 1247490 - RNA, 19 nt, Artificial Sequence
  Description of Artificial Sequence: Synthetic oligonucleotide
caaguuauucacacgauag

SEQ ID NO: 1247491 - RNA, 19 nt, Artificial Sequence
  Description of Artificial Sequence: Synthetic oligonucleotide
auucacacgauagcgaugc

SEQ ID NO: 1247492 - RNA, 19 nt, Artificial Sequence
  Description of Artificial Sequence: Synthetic oligonucleotide
acgauagcgaugcucagcc

SEQ ID NO: 1247493 - RNA, 19 nt, Artificial Sequence
  Description of Artificial Sequence: Synthetic oligonucleotide
ucaauucauaggcagaaac

SEQ ID NO: 1247494 - RNA, 19 nt, Artificial Sequence
  Description of Artificial Sequence: Synthetic oligonucleotide
uuauuguucucacugcuug

SEQ ID NO: 1247495 - RNA, 19 nt, Artificial Sequence
  Description of Artificial Sequence: Synthetic oligonucleotide
aguuauucacacgauagcg

SEQ ID NO: 1247496 - RNA, 19 nt, Artificial Sequence
  Description of Artificial Sequence: Synthetic oligonucleotide
aaggcagucuuguugguuc

SEQ ID NO: 1247497 - RNA, 19 nt, Artificial Sequence
  Description of Artificial Sequence: Synthetic oligonucleotide
ugaaaaguugaaaugcuuc

SEQ ID NO: 1247498 - RNA, 19 nt, Artificial Sequence
  Description of Artificial Sequence: Synthetic oligonucleotide
gaaguuaaagcugaugccc

SEQ ID NO: 1247499 - RNA, 19 nt, Artificial Sequence
  Description of Artificial Sequence: Synthetic oligonucleotide
uugacuaaaguuccguagc

SEQ ID NO: 1247500 - RNA, 19 nt, Artificial Sequence
  Description of Artificial Sequence: Synthetic oligonucleotide
uauguaggagagcagauuc

SEQ ID NO: 1247501 - RNA, 19 nt, Artificial Sequence
  Description of Artificial Sequence: Synthetic oligonucleotide
ugcauuggcucucauaagc

SEQ ID NO: 1247502 - RNA, 19 nt, Artificial Sequence
  Description of Artificial Sequence: Synthetic oligonucleotide
auucacgucaccuagcacu

SEQ ID NO: 1247503 - RNA, 19 nt, Artificial Sequence
  Description of Artificial Sequence: Synthetic oligonucleotide
acucaaguuauucacacga

SEQ ID NO: 1247504 - RNA, 19 nt, Artificial Sequence
  Description of Artificial Sequence: Synthetic oligonucleotide
cauguauggauucucgccg

SEQ ID NO: 1247505 - RNA, 19 nt, Artificial Sequence
  Description of Artificial Sequence: Synthetic oligonucleotide
uaagcaaccuaucucccag

SEQ ID NO: 1247506 - RNA, 19 nt, Artificial Sequence
  Description of Artificial Sequence: Synthetic oligonucleotide
  modified_base (4)..(4): a, c, u, g, unknown or other
aggnuccaugaauauauac

SEQ ID NO: 1247507 - RNA, 19 nt, Artificial Sequence
  Description of Artificial Sequence: Synthetic oligonucleotide
caaccuaucucccaggaag

SEQ ID NO: 1247508 - RNA, 19 nt, Artificial Sequence
  Description of Artificial Sequence: Synthetic oligonucleotide
agucacgccauucaauagg

SEQ ID NO: 1247509 - RNA, 19 nt, Artificial Sequence
  Description of Artificial Sequence: Synthetic oligonucleotide
agaaguuaacccugacggc

SEQ ID NO: 1247510 - RNA, 19 nt, Artificial Sequence
  Description of Artificial Sequence: Synthetic oligonucleotide
ucuaccugagcucucagaa

SEQ ID NO: 1247511 - RNA, 19 nt, Artificial Sequence
  Description of Artificial Sequence: Synthetic oligonucleotide
gaaguuaacccugacggcc

SEQ ID NO: 1247512 - RNA, 19 nt, Artificial Sequence
  Description of Artificial Sequence: Synthetic oligonucleotide
  modified_base (9)..(9): a, c, u, g, unknown or other
auacacagnaccccuguuc

SEQ ID NO: 1247513 - RNA, 19 nt, Artificial Sequence
  Description of Artificial Sequence: Synthetic oligonucleotide
uuuguaccgacguuugaag

SEQ ID NO: 1247514 - RNA, 19 nt, Artificial Sequence
  Description of Artificial Sequence: Synthetic oligonucleotide
acuaaaguuccguagcugu

SEQ ID NO: 1247515 - RNA, 19 nt, Artificial Sequence
  Description of Artificial Sequence: Synthetic oligonucleotide
  modified_base (17)..(17): a, c, u, g, unknown or other
augaauauauacacagnac

SEQ ID NO: 1247516 - RNA, 19 nt, Artificial Sequence
  Description of Artificial Sequence: Synthetic oligonucleotide
  modified_base (3)..(3): a, c, u, g, unknown or other
agnaccccuguucucgucc

SEQ ID NO: 1247517 - RNA, 19 nt, Artificial Sequence
  Description of Artificial Sequence: Synthetic oligonucleotide
cuaguccugagccugagag

SEQ ID NO: 1247518 - RNA, 19 nt, Artificial Sequence
  Description of Artificial Sequence: Synthetic oligonucleotide
  modified_base (14)..(14): a, c, u, g, unknown or other
aaggauggcccugnucccc

SEQ ID NO: 1247519 - RNA, 19 nt, Artificial Sequence
  Description of Artificial Sequence: Synthetic oligonucleotide
auacucccagcucagaaag

SEQ ID NO: 1247520 - RNA, 19 nt, Artificial Sequence
  Description of Artificial Sequence: Synthetic oligonucleotide
  modified_base (8)..(8): a, c, u, g, unknown or other
uacacagnaccccuguucu

SEQ ID NO: 1247521 - RNA, 19 nt, Artificial Sequence
  Description of Artificial Sequence: Synthetic oligonucleotide
agagcagauuccuaggaug

SEQ ID NO: 1247522 - RNA, 19 nt, Artificial Sequence
  Description of Artificial Sequence: Synthetic oligonucleotide
aaaguauggcaucgaaccu

SEQ ID NO: 1247523 - RNA, 19 nt, Artificial Sequence
  Description of Artificial Sequence: Synthetic oligonucleotide
caugccagucaauucauag

SEQ ID NO: 1247524 - RNA, 19 nt, Artificial Sequence
  Description of Artificial Sequence: Synthetic oligonucleotide
aaauacucccagcucagaa

SEQ ID NO: 1247525 - RNA, 19 nt, Artificial Sequence
  Description of Artificial Sequence: Synthetic oligonucleotide
  modified_base (10)..(10): a, c, u, g, unknown or other
auggcccugnuccccaugc

SEQ ID NO: 1247526 - RNA, 19 nt, Artificial Sequence
  Description of Artificial Sequence: Synthetic oligonucleotide
  modified_base (16)..(16): a, c, u, g, unknown or other
ccaaggauggcccugnucc

SEQ ID NO: 1247527 - RNA, 19 nt, Artificial Sequence
  Description of Artificial Sequence: Synthetic oligonucleotide
aauacucccagcucagaaa

SEQ ID NO: 1247528 - RNA, 19 nt, Artificial Sequence
  Description of Artificial Sequence: Synthetic oligonucleotide
uuauucacacgauagcgau

SEQ ID NO: 1247529 - RNA, 19 nt, Artificial Sequence
  Description of Artificial Sequence: Synthetic oligonucleotide
aguggccucacacugccac

SEQ ID NO: 1247530 - RNA, 19 nt, Artificial Sequence
  Description of Artificial Sequence: Synthetic oligonucleotide
  modified_base (12)..(12): a, c, u, g, unknown or other
uauauacacagnaccccug

SEQ ID NO: 1247531 - RNA, 19 nt, Artificial Sequence
  Description of Artificial Sequence: Synthetic oligonucleotide
ucccaugccagucaauuca

SEQ ID NO: 1247532 - RNA, 19 nt, Artificial Sequence
  Description of Artificial Sequence: Synthetic oligonucleotide
ugaggaucacuguauacac

SEQ ID NO: 1247533 - RNA, 19 nt, Artificial Sequence
  Description of Artificial Sequence: Synthetic oligonucleotide
agaaaugccuccugucccg

SEQ ID NO: 1247534 - RNA, 19 nt, Artificial Sequence
  Description of Artificial Sequence: Synthetic oligonucleotide
auaagauagcccugcuggg

SEQ ID NO: 1247535 - RNA, 19 nt, Artificial Sequence
  Description of Artificial Sequence: Synthetic oligonucleotide
auguauggauucucgccgc

SEQ ID NO: 1247536 - RNA, 19 nt, Artificial Sequence
  Description of Artificial Sequence: Synthetic oligonucleotide
aaaaguugaaaugcuucgu

SEQ ID NO: 1247537 - RNA, 19 nt, Artificial Sequence
  Description of Artificial Sequence: Synthetic oligonucleotide
auauauguaggagagcaga

SEQ ID NO: 1247538 - RNA, 19 nt, Artificial Sequence
  Description of Artificial Sequence: Synthetic oligonucleotide
guggauauauguaggagag

SEQ ID NO: 1247539 - RNA, 19 nt, Artificial Sequence
  Description of Artificial Sequence: Synthetic oligonucleotide
augccagucaauucauagg

SEQ ID NO: 1247540 - RNA, 19 nt, Artificial Sequence
  Description of Artificial Sequence: Synthetic oligonucleotide
aaguauggcaucgaaccug

SEQ ID NO: 1247541 - RNA, 19 nt, Artificial Sequence
  Description of Artificial Sequence: Synthetic oligonucleotide
agaaaguauggcaucgaac

SEQ ID NO: 1247542 - RNA, 19 nt, Artificial Sequence
  Description of Artificial Sequence: Synthetic oligonucleotide
ucauaggcagaaacaagac

SEQ ID NO: 1247543 - RNA, 19 nt, Artificial Sequence
  Description of Artificial Sequence: Synthetic oligonucleotide
aauuccuccugguggauau

SEQ ID NO: 1247544 - RNA, 19 nt, Artificial Sequence
  Description of Artificial Sequence: Synthetic oligonucleotide
uaguagaauuugacuaaag

SEQ ID NO: 1247545 - RNA, 19 nt, Artificial Sequence
  Description of Artificial Sequence: Synthetic oligonucleotide
uaaaguuccguagcugucc

SEQ ID NO: 1247546 - RNA, 19 nt, Artificial Sequence
  Description of Artificial Sequence: Synthetic oligonucleotide
ucucccacugggcaugggg

SEQ ID NO: 1247547 - RNA, 19 nt, Artificial Sequence
  Description of Artificial Sequence: Synthetic oligonucleotide
gacucaaguuauucacacg

SEQ ID NO: 1247548 - RNA, 19 nt, Artificial Sequence
  Description of Artificial Sequence: Synthetic oligonucleotide
ugacuaaaguuccguagcu

SEQ ID NO: 1247549 - RNA, 19 nt, Artificial Sequence
  Description of Artificial Sequence: Synthetic oligonucleotide
uauauguaggagagcagau

SEQ ID NO: 1247550 - RNA, 19 nt, Artificial Sequence
  Description of Artificial Sequence: Synthetic oligonucleotide
cagaaacaagaccaauucc

SEQ ID NO: 1247551 - RNA, 19 nt, Artificial Sequence
  Description of Artificial Sequence: Synthetic oligonucleotide
aaugcuucguggauuccuc

SEQ ID NO: 1247552 - RNA, 19 nt, Artificial Sequence
  Description of Artificial Sequence: Synthetic oligonucleotide
cacgccauucaauaggaug

SEQ ID NO: 1247553 - RNA, 19 nt, Artificial Sequence
  Description of Artificial Sequence: Synthetic oligonucleotide
  modified_base (11)..(11): a, c, u, g, unknown or other
auauacacagnaccccugu

SEQ ID NO: 1247554 - RNA, 19 nt, Artificial Sequence
  Description of Artificial Sequence: Synthetic oligonucleotide
auggcaucgaaccuggaaa

SEQ ID NO: 1247555 - RNA, 19 nt, Artificial Sequence
  Description of Artificial Sequence: Synthetic oligonucleotide
aagcauguauggauucucg

SEQ ID NO: 1247556 - RNA, 19 nt, Artificial Sequence
  Description of Artificial Sequence: Synthetic oligonucleotide
uucacgucaccuagcacug

SEQ ID NO: 1247557 - RNA, 19 nt, Artificial Sequence
  Description of Artificial Sequence: Synthetic oligonucleotide
agagacaucaaaugugauu

SEQ ID NO: 1247558 - RNA, 19 nt, Artificial Sequence
  Description of Artificial Sequence: Synthetic oligonucleotide
  modified_base (4)..(4): a, c, u, g, unknown or other
cugnuccccaugcagagug

SEQ ID NO: 1247559 - RNA, 19 nt, Artificial Sequence
  Description of Artificial Sequence: Synthetic oligonucleotide
aaaguuccguagcuguccu

SEQ ID NO: 1247560 - RNA, 19 nt, Artificial Sequence
  Description of Artificial Sequence: Synthetic oligonucleotide
cuucgaaccuucucggaag

SEQ ID NO: 1247561 - RNA, 19 nt, Artificial Sequence
  Description of Artificial Sequence: Synthetic oligonucleotide
ugagaaguuaaagcugaug

SEQ ID NO: 1247562 - RNA, 19 nt, Artificial Sequence
  Description of Artificial Sequence: Synthetic oligonucleotide
uauuguucucacugcuugc

SEQ ID NO: 1247563 - RNA, 19 nt, Artificial Sequence
  Description of Artificial Sequence: Synthetic oligonucleotide
aguguauuucacugggagu

SEQ ID NO: 1247564 - RNA, 19 nt, Artificial Sequence
  Description of Artificial Sequence: Synthetic oligonucleotide
aagcaaccuaucucccagg

SEQ ID NO: 1247565 - RNA, 19 nt, Artificial Sequence
  Description of Artificial Sequence: Synthetic oligonucleotide
ucuucuagcacuguuucua

SEQ ID NO: 1247566 - RNA, 19 nt, Artificial Sequence
  Description of Artificial Sequence: Synthetic oligonucleotide
uggcaucgaaccuggaaag

SEQ ID NO: 1247567 - RNA, 19 nt, Artificial Sequence
  Description of Artificial Sequence: Synthetic oligonucleotide
gauauauguaggagagcag

SEQ ID NO: 1247568 - RNA, 19 nt, Artificial Sequence
  Description of Artificial Sequence: Synthetic oligonucleotide
cuugucaguggguucggcc

SEQ ID NO: 1247569 - RNA, 19 nt, Artificial Sequence
  Description of Artificial Sequence: Synthetic oligonucleotide
aagcguaguggguguuggc

SEQ ID NO: 1247570 - RNA, 19 nt, Artificial Sequence
  Description of Artificial Sequence: Synthetic oligonucleotide
caauucauaggcagaaaca

SEQ ID NO: 1247571 - RNA, 19 nt, Artificial Sequence
  Description of Artificial Sequence: Synthetic oligonucleotide
ucgcccucauuccacacag

SEQ ID NO: 1247572 - RNA, 19 nt, Artificial Sequence
  Description of Artificial Sequence: Synthetic oligonucleotide
cagaaaugccuccuguccc

SEQ ID NO: 1247573 - RNA, 19 nt, Artificial Sequence
  Description of Artificial Sequence: Synthetic oligonucleotide
ucuugcuuacagcucuucu

SEQ ID NO: 1247574 - RNA, 19 nt, Artificial Sequence
  Description of Artificial Sequence: Synthetic oligonucleotide
uugucaguggguucggccu

SEQ ID NO: 1247575 - RNA, 19 nt, Artificial Sequence
  Description of Artificial Sequence: Synthetic oligonucleotide
  modified_base (6)..(6): a, c, u, g, unknown or other
cacagnaccccuguucucg

SEQ ID NO: 1247576 - RNA, 19 nt, Artificial Sequence
  Description of Artificial Sequence: Synthetic oligonucleotide
uguauacacaguguauuuc

SEQ ID NO: 1247577 - RNA, 19 nt, Artificial Sequence
  Description of Artificial Sequence: Synthetic oligonucleotide
uguucucguccucuccagg

SEQ ID NO: 1247578 - RNA, 19 nt, Artificial Sequence
  Description of Artificial Sequence: Synthetic oligonucleotide
uguaggagagcagauuccu

SEQ ID NO: 1247579 - RNA, 19 nt, Artificial Sequence
  Description of Artificial Sequence: Synthetic oligonucleotide
aguggguucggccucacau

SEQ ID NO: 1247580 - RNA, 19 nt, Artificial Sequence
  Description of Artificial Sequence: Synthetic oligonucleotide
cacacgauagcgaugcuca

SEQ ID NO: 1247581 - RNA, 19 nt, Artificial Sequence
  Description of Artificial Sequence: Synthetic oligonucleotide
caucgaaccuggaaaguug

SEQ ID NO: 1247582 - RNA, 19 nt, Artificial Sequence
  Description of Artificial Sequence: Synthetic oligonucleotide
gauggaagcauguauggau

SEQ ID NO: 1247583 - RNA, 19 nt, Artificial Sequence
  Description of Artificial Sequence: Synthetic oligonucleotide
aguauggcaucgaaccugg

SEQ ID NO: 1247584 - RNA, 19 nt, Artificial Sequence
  Description of Artificial Sequence: Synthetic oligonucleotide
aaguuaaagcugaugccca

SEQ ID NO: 1247585 - RNA, 19 nt, Artificial Sequence
  Description of Artificial Sequence: Synthetic oligonucleotide
uuucuuuguaccgacguuu

SEQ ID NO: 1247586 - RNA, 19 nt, Artificial Sequence
  Description of Artificial Sequence: Synthetic oligonucleotide
uuguaccgacguuugaaga

SEQ ID NO: 1247587 - RNA, 19 nt, Artificial Sequence
  Description of Artificial Sequence: Synthetic oligonucleotide
auucucgccgcugaaacug

SEQ ID NO: 1247588 - RNA, 19 nt, Artificial Sequence
  Description of Artificial Sequence: Synthetic oligonucleotide
uccguagcuguccucgccc

SEQ ID NO: 1247589 - RNA, 19 nt, Artificial Sequence
  Description of Artificial Sequence: Synthetic oligonucleotide
auguaggagagcagauucc

SEQ ID NO: 1247590 - RNA, 19 nt, Artificial Sequence
  Description of Artificial Sequence: Synthetic oligonucleotide
cauccguccacaccugucc

SEQ ID NO: 1247591 - RNA, 19 nt, Artificial Sequence
  Description of Artificial Sequence: Synthetic oligonucleotide
accaauagccacauccguc

SEQ ID NO: 1247592 - RNA, 19 nt, Artificial Sequence
  Description of Artificial Sequence: Synthetic oligonucleotide
augcuucguggauuccucc

SEQ ID NO: 1247593 - RNA, 19 nt, Artificial Sequence
  Description of Artificial Sequence: Synthetic oligonucleotide
ucggaagauggggugauug

SEQ ID NO: 1247594 - RNA, 19 nt, Artificial Sequence
  Description of Artificial Sequence: Synthetic oligonucleotide
acacugauaccugcccucc

SEQ ID NO: 1247595 - RNA, 19 nt, Artificial Sequence
  Description of Artificial Sequence: Synthetic oligonucleotide
uccguuacccgucgauaag

SEQ ID NO: 1247596 - RNA, 19 nt, Artificial Sequence
  Description of Artificial Sequence: Synthetic oligonucleotide
  modified_base (10)..(10): a, c, u, g, unknown or other
uauacacagnaccccuguu

SEQ ID NO: 1247597 - RNA, 19 nt, Artificial Sequence
  Description of Artificial Sequence: Synthetic oligonucleotide
uuccacugacucaaguuau

SEQ ID NO: 1247598 - RNA, 19 nt, Artificial Sequence
  Description of Artificial Sequence: Synthetic oligonucleotide
gcauguauggauucucgcc

SEQ ID NO: 1247599 - RNA, 19 nt, Artificial Sequence
  Description of Artificial Sequence: Synthetic oligonucleotide
guauuuccguuacccgucg

SEQ ID NO: 1247600 - RNA, 19 nt, Artificial Sequence
  Description of Artificial Sequence: Synthetic oligonucleotide
  modified_base (7)..(7): a, c, u, g, unknown or other
acacagnaccccuguucuc

SEQ ID NO: 1247601 - RNA, 19 nt, Artificial Sequence
  Description of Artificial Sequence: Synthetic oligonucleotide
ucuccucgucuccccaucg

SEQ ID NO: 1247602 - RNA, 19 nt, Artificial Sequence
  Description of Artificial Sequence: Synthetic oligonucleotide
auuugacuaaaguuccgua

SEQ ID NO: 1247603 - RNA, 19 nt, Artificial Sequence
  Description of Artificial Sequence: Synthetic oligonucleotide
gugaaggugcucuucgaac

SEQ ID NO: 1247604 - RNA, 19 nt, Artificial Sequence
  Description of Artificial Sequence: Synthetic oligonucleotide
  modified_base (3)..(3): a, c, u, g, unknown or other
ggnuccaugaauauauaca

SEQ ID NO: 1247605 - RNA, 19 nt, Artificial Sequence
  Description of Artificial Sequence: Synthetic oligonucleotide
uuccuaggauggaagcaug

SEQ ID NO: 1247606 - RNA, 19 nt, Artificial Sequence
  Description of Artificial Sequence: Synthetic oligonucleotide
cuaaaguuccguagcuguc

SEQ ID NO: 1247607 - RNA, 19 nt, Artificial Sequence
  Description of Artificial Sequence: Synthetic oligonucleotide
uuccguuacccgucgauaa

SEQ ID NO: 1247608 - RNA, 19 nt, Artificial Sequence
  Description of Artificial Sequence: Synthetic oligonucleotide
agccgcaggcuugucaucc

SEQ ID NO: 1247609 - RNA, 19 nt, Artificial Sequence
  Description of Artificial Sequence: Synthetic oligonucleotide
ucuccccaucggaagauga

SEQ ID NO: 1247610 - RNA, 19 nt, Artificial Sequence
  Description of Artificial Sequence: Synthetic oligonucleotide
  modified_base (3)..(3): a, c, u, g, unknown or other
ugnuccccaugcagagugg

SEQ ID NO: 1247611 - RNA, 19 nt, Artificial Sequence
  Description of Artificial Sequence: Synthetic oligonucleotide
ggguaguagaauuugacua

SEQ ID NO: 1247612 - RNA, 19 nt, Artificial Sequence
  Description of Artificial Sequence: Synthetic oligonucleotide
uuaacccugacggccagcu

SEQ ID NO: 1247613 - RNA, 19 nt, Artificial Sequence
  Description of Artificial Sequence: Synthetic oligonucleotide
ucuuuguaccgacguuuga

SEQ ID NO: 1247614 - RNA, 19 nt, Artificial Sequence
  Description of Artificial Sequence: Synthetic oligonucleotide
ugcuggguaguagaauuug

SEQ ID NO: 1247615 - RNA, 19 nt, Artificial Sequence
  Description of Artificial Sequence: Synthetic oligonucleotide
gauuccuaggauggaagca

SEQ ID NO: 1247616 - RNA, 19 nt, Artificial Sequence
  Description of Artificial Sequence: Synthetic oligonucleotide
uaggcagaaacaagaccaa

SEQ ID NO: 1247617 - RNA, 19 nt, Artificial Sequence
  Description of Artificial Sequence: Synthetic oligonucleotide
uaccgacguuugaagaagc

SEQ ID NO: 1247618 - RNA, 19 nt, Artificial Sequence
  Description of Artificial Sequence: Synthetic oligonucleotide
cugaggaucacuguauaca

SEQ ID NO: 1247619 - RNA, 19 nt, Artificial Sequence
  Description of Artificial Sequence: Synthetic oligonucleotide
cuucguggauuccuccugc

SEQ ID NO: 1247620 - RNA, 19 nt, Artificial Sequence
  Description of Artificial Sequence: Synthetic oligonucleotide
auuccuaggauggaagcau

SEQ ID NO: 1247621 - RNA, 19 nt, Artificial Sequence
  Description of Artificial Sequence: Synthetic oligonucleotide
cuucucggaagauggggug

SEQ ID NO: 1247622 - RNA, 19 nt, Artificial Sequence
  Description of Artificial Sequence: Synthetic oligonucleotide
uacccgucgauaagauagc

SEQ ID NO: 1247623 - RNA, 19 nt, Artificial Sequence
  Description of Artificial Sequence: Synthetic oligonucleotide
guaccgacguuugaagaag

SEQ ID NO: 1247624 - RNA, 19 nt, Artificial Sequence
  Description of Artificial Sequence: Synthetic oligonucleotide
gaagcauguauggauucuc

SEQ ID NO: 1247625 - RNA, 19 nt, Artificial Sequence
  Description of Artificial Sequence: Synthetic oligonucleotide
aaguuccguagcuguccuc

SEQ ID NO: 1247626 - RNA, 19 nt, Artificial Sequence
  Description of Artificial Sequence: Synthetic oligonucleotide
aaguuaacccugacggcca

SEQ ID NO: 1247627 - RNA, 19 nt, Artificial Sequence
  Description of Artificial Sequence: Synthetic oligonucleotide
ucgaaccuggaaaguugcc

SEQ ID NO: 1247628 - RNA, 19 nt, Artificial Sequence
  Description of Artificial Sequence: Synthetic oligonucleotide
cucccacugggcauggggc

SEQ ID NO: 1247629 - RNA, 19 nt, Artificial Sequence
  Description of Artificial Sequence: Synthetic oligonucleotide
cuugucauccaacauuucu

SEQ ID NO: 1247630 - RNA, 19 nt, Artificial Sequence
  Description of Artificial Sequence: Synthetic oligonucleotide
auuucuuuguaccgacguu

SEQ ID NO: 1247631 - RNA, 19 nt, Artificial Sequence
  Description of Artificial Sequence: Synthetic oligonucleotide
ucacugcuugcauuggcuc

SEQ ID NO: 1247632 - RNA, 19 nt, Artificial Sequence
  Description of Artificial Sequence: Synthetic oligonucleotide
ggugauugaugcuacagcu

SEQ ID NO: 1247633 - RNA, 19 nt, Artificial Sequence
  Description of Artificial Sequence: Synthetic oligonucleotide
ucgccgcugaaacuggccu

SEQ ID NO: 1247634 - RNA, 19 nt, Artificial Sequence
  Description of Artificial Sequence: Synthetic oligonucleotide
  modified_base (14)..(14): a, c, u, g, unknown or other
ucuucucaaaaggnuccau

SEQ ID NO: 1247635 - RNA, 19 nt, Artificial Sequence
  Description of Artificial Sequence: Synthetic oligonucleotide
uuccguagcuguccucgcc

SEQ ID NO: 1247636 - RNA, 19 nt, Artificial Sequence
  Description of Artificial Sequence: Synthetic oligonucleotide
uggauauauguaggagagc

SEQ ID NO: 1247637 - RNA, 19 nt, Artificial Sequence
  Description of Artificial Sequence: Synthetic oligonucleotide
ugccugaggaucacuguau

SEQ ID NO: 1247638 - RNA, 19 nt, Artificial Sequence
  Description of Artificial Sequence: Synthetic oligonucleotide
cacacugauaccugcccuc

SEQ ID NO: 1247639 - RNA, 19 nt, Artificial Sequence
  Description of Artificial Sequence: Synthetic oligonucleotide
  modified_base (15)..(15): a, c, u, g, unknown or other
caaggauggcccugnuccc

SEQ ID NO: 1247640 - RNA, 19 nt, Artificial Sequence
  Description of Artificial Sequence: Synthetic oligonucleotide
cagucuuguugguuccagg

SEQ ID NO: 1247641 - RNA, 19 nt, Artificial Sequence
  Description of Artificial Sequence: Synthetic oligonucleotide
acccgucgauaagauagcc

SEQ ID NO: 1247642 - RNA, 19 nt, Artificial Sequence
  Description of Artificial Sequence: Synthetic oligonucleotide
ggauucucgccgcugaaac

SEQ ID NO: 1247643 - RNA, 19 nt, Artificial Sequence
  Description of Artificial Sequence: Synthetic oligonucleotide
gggugauugaugcuacagc

SEQ ID NO: 1247644 - RNA, 19 nt, Artificial Sequence
  Description of Artificial Sequence: Synthetic oligonucleotide
gcucuucgaaccuucucgg

SEQ ID NO: 1247645 - RNA, 19 nt, Artificial Sequence
  Description of Artificial Sequence: Synthetic oligonucleotide
augccaagcguagugggug

SEQ ID NO: 1247646 - RNA, 19 nt, Artificial Sequence
  Description of Artificial Sequence: Synthetic oligonucleotide
gugauugaugcuacagcug

SEQ ID NO: 1247647 - RNA, 19 nt, Artificial Sequence
  Description of Artificial Sequence: Synthetic oligonucleotide
ucacacgauagcgaugcuc

SEQ ID NO: 1247648 - RNA, 19 nt, Artificial Sequence
  Description of Artificial Sequence: Synthetic oligonucleotide
aguuaacccugacggccag

SEQ ID NO: 1247649 - RNA, 19 nt, Artificial Sequence
  Description of Artificial Sequence: Synthetic oligonucleotide
uucguggauuccuccugcc

SEQ ID NO: 1247650 - RNA, 19 nt, Artificial Sequence
  Description of Artificial Sequence: Synthetic oligonucleotide
uaguccugagccugagaga

SEQ ID NO: 1247651 - RNA, 19 nt, Artificial Sequence
  Description of Artificial Sequence: Synthetic oligonucleotide
ucguggauuccuccugccu

SEQ ID NO: 1247652 - RNA, 19 nt, Artificial Sequence
  Description of Artificial Sequence: Synthetic oligonucleotide
aaccuucucggaagauggg

SEQ ID NO: 1247653 - RNA, 19 nt, Artificial Sequence
  Description of Artificial Sequence: Synthetic oligonucleotide
  modified_base (2)..(2): a, c, u, g, unknown or other
gnuccccaugcagaguggc

SEQ ID NO: 1247654 - RNA, 19 nt, Artificial Sequence
  Description of Artificial Sequence: Synthetic oligonucleotide
uucucggaagaugggguga

SEQ ID NO: 1247655 - RNA, 19 nt, Artificial Sequence
  Description of Artificial Sequence: Synthetic oligonucleotide
ugcaggccugagaaguuaa

SEQ ID NO: 1247656 - RNA, 19 nt, Artificial Sequence
  Description of Artificial Sequence: Synthetic oligonucleotide
uuguucccaugccagucaa

SEQ ID NO: 1247657 - RNA, 19 nt, Artificial Sequence
  Description of Artificial Sequence: Synthetic oligonucleotide
cacgauagcgaugcucagc

SEQ ID NO: 1247658 - RNA, 19 nt, Artificial Sequence
  Description of Artificial Sequence: Synthetic oligonucleotide
uuugcaggccugagaaguu

SEQ ID NO: 1247659 - RNA, 19 nt, Artificial Sequence
  Description of Artificial Sequence: Synthetic oligonucleotide
cugguggauauauguagga

SEQ ID NO: 1247660 - RNA, 19 nt, Artificial Sequence
  Description of Artificial Sequence: Synthetic oligonucleotide
guggguucggccucacaug

SEQ ID NO: 1247661 - RNA, 19 nt, Artificial Sequence
  Description of Artificial Sequence: Synthetic oligonucleotide
gugauugugaaggugcucu

SEQ ID NO: 1247662 - RNA, 19 nt, Artificial Sequence
  Description of Artificial Sequence: Synthetic oligonucleotide
agcccugcuggguaguaga

SEQ ID NO: 1247663 - RNA, 19 nt, Artificial Sequence
  Description of Artificial Sequence: Synthetic oligonucleotide
cuguauuuccguuacccgu

SEQ ID NO: 1247664 - RNA, 19 nt, Artificial Sequence
  Description of Artificial Sequence: Synthetic oligonucleotide
ugucaguggguucggccuc

SEQ ID NO: 1247665 - RNA, 19 nt, Artificial Sequence
  Description of Artificial Sequence: Synthetic oligonucleotide
auauguaggagagcagauu

SEQ ID NO: 1247666 - RNA, 19 nt, Artificial Sequence
  Description of Artificial Sequence: Synthetic oligonucleotide
uauuuccguuacccgucga

SEQ ID NO: 1247667 - RNA, 19 nt, Artificial Sequence
  Description of Artificial Sequence: Synthetic oligonucleotide
uuuccguuacccgucgaua

SEQ ID NO: 1247668 - RNA, 19 nt, Artificial Sequence
  Description of Artificial Sequence: Synthetic oligonucleotide
ucccacugggcauggggca

SEQ ID NO: 1247669 - RNA, 19 nt, Artificial Sequence
  Description of Artificial Sequence: Synthetic oligonucleotide
caggcuaguccugagccug

SEQ ID NO: 1247670 - RNA, 19 nt, Artificial Sequence
  Description of Artificial Sequence: Synthetic oligonucleotide
acacgauagcgaugcucag

SEQ ID NO: 1247671 - RNA, 19 nt, Artificial Sequence
  Description of Artificial Sequence: Synthetic oligonucleotide
  modified_base (5)..(5): a, c, u, g, unknown or other
acagnaccccuguucucgu

SEQ ID NO: 1247672 - RNA, 19 nt, Artificial Sequence
  Description of Artificial Sequence: Synthetic oligonucleotide
uguuucuaccugagcucuc

SEQ ID NO: 1247673 - RNA, 19 nt, Artificial Sequence
  Description of Artificial Sequence: Synthetic oligonucleotide
ugugauugugaaggugcuc

SEQ ID NO: 1247674 - RNA, 19 nt, Artificial Sequence
  Description of Artificial Sequence: Synthetic oligonucleotide
guaguagaauuugacuaaa

SEQ ID NO: 1247675 - RNA, 19 nt, Artificial Sequence
  Description of Artificial Sequence: Synthetic oligonucleotide
auagcgaugcucagccucu

SEQ ID NO: 1247676 - RNA, 19 nt, Artificial Sequence
  Description of Artificial Sequence: Synthetic oligonucleotide
uuggcgagguugcuguauu

SEQ ID NO: 1247677 - RNA, 19 nt, Artificial Sequence
  Description of Artificial Sequence: Synthetic oligonucleotide
uccccaucggaagaugaaa

SEQ ID NO: 1247678 - RNA, 19 nt, Artificial Sequence
  Description of Artificial Sequence: Synthetic oligonucleotide
cacgucaccuagcacuguc

SEQ ID NO: 1247679 - RNA, 19 nt, Artificial Sequence
  Description of Artificial Sequence: Synthetic oligonucleotide
agauggggugauugaugcu

SEQ ID NO: 1247680 - RNA, 19 nt, Artificial Sequence
  Description of Artificial Sequence: Synthetic oligonucleotide
ugucagggccgccccaaaa

SEQ ID NO: 1247681 - RNA, 19 nt, Artificial Sequence
  Description of Artificial Sequence: Synthetic oligonucleotide
guggauuccuccugccuga

SEQ ID NO: 1247682 - RNA, 19 nt, Artificial Sequence
  Description of Artificial Sequence: Synthetic oligonucleotide
cauuggcucucauaagcaa

SEQ ID NO: 1247683 - RNA, 19 nt, Artificial Sequence
  Description of Artificial Sequence: Synthetic oligonucleotide
ucggccucacaugccaagc

SEQ ID NO: 1247684 - RNA, 19 nt, Artificial Sequence
  Description of Artificial Sequence: Synthetic oligonucleotide
cauucacgucaccuagcac

SEQ ID NO: 1247685 - RNA, 19 nt, Artificial Sequence
  Description of Artificial Sequence: Synthetic oligonucleotide
agggccgccccaaaagcgg

SEQ ID NO: 1247686 - RNA, 19 nt, Artificial Sequence
  Description of Artificial Sequence: Synthetic oligonucleotide
acucccagcucagaaagua

SEQ ID NO: 1247687 - RNA, 19 nt, Artificial Sequence
  Description of Artificial Sequence: Synthetic oligonucleotide
acauccguccacaccuguc

SEQ ID NO: 1247688 - RNA, 19 nt, Artificial Sequence
  Description of Artificial Sequence: Synthetic oligonucleotide
ugauugugaaggugcucuu

SEQ ID NO: 1247689 - RNA, 19 nt, Artificial Sequence
  Description of Artificial Sequence: Synthetic oligonucleotide
ggggugauugaugcuacag

SEQ ID NO: 1247690 - RNA, 19 nt, Artificial Sequence
  Description of Artificial Sequence: Synthetic oligonucleotide
cuaggauggaagcauguau

SEQ ID NO: 1247691 - RNA, 19 nt, Artificial Sequence
  Description of Artificial Sequence: Synthetic oligonucleotide
ugccaagcguagugggugu

SEQ ID NO: 1247692 - RNA, 19 nt, Artificial Sequence
  Description of Artificial Sequence: Synthetic oligonucleotide
cccaucggaagaugaaaag

SEQ ID NO: 1247693 - RNA, 19 nt, Artificial Sequence
  Description of Artificial Sequence: Synthetic oligonucleotide
  modified_base (11)..(11): a, c, u, g, unknown or other
gauggcccugnuccccaug

SEQ ID NO: 1247694 - RNA, 19 nt, Artificial Sequence
  Description of Artificial Sequence: Synthetic oligonucleotide
gaggaucacuguauacaca

SEQ ID NO: 1247695 - RNA, 19 nt, Artificial Sequence
  Description of Artificial Sequence: Synthetic oligonucleotide
uuacugucacagugagcuc

SEQ ID NO: 1247696 - RNA, 19 nt, Artificial Sequence
  Description of Artificial Sequence: Synthetic oligonucleotide
cuccucgucuccccaucgg

SEQ ID NO: 1247697 - RNA, 19 nt, Artificial Sequence
  Description of Artificial Sequence: Synthetic oligonucleotide
uggauucucgccgcugaaa

SEQ ID NO: 1247698 - RNA, 19 nt, Artificial Sequence
  Description of Artificial Sequence: Synthetic oligonucleotide
augugauugugaaggugcu

SEQ ID NO: 1247699 - RNA, 19 nt, Artificial Sequence
  Description of Artificial Sequence: Synthetic oligonucleotide
aggugcucuucgaaccuuc

SEQ ID NO: 1247700 - RNA, 19 nt, Artificial Sequence
  Description of Artificial Sequence: Synthetic oligonucleotide
uggggugauugaugcuaca

SEQ ID NO: 1247701 - RNA, 19 nt, Artificial Sequence
  Description of Artificial Sequence: Synthetic oligonucleotide
uucccaccaccaagauuug

SEQ ID NO: 1247702 - RNA, 19 nt, Artificial Sequence
  Description of Artificial Sequence: Synthetic oligonucleotide
  modified_base (5)..(5): a, c, u, g, unknown or other
aaggnuccaugaauauaua

SEQ ID NO: 1247703 - RNA, 19 nt, Artificial Sequence
  Description of Artificial Sequence: Synthetic oligonucleotide
gguucggccucacaugcca

SEQ ID NO: 1247704 - RNA, 19 nt, Artificial Sequence
  Description of Artificial Sequence: Synthetic oligonucleotide
  modified_base (8)..(8): a, c, u, g, unknown or other
ggcccugnuccccaugcag

SEQ ID NO: 1247705 - RNA, 19 nt, Artificial Sequence
  Description of Artificial Sequence: Synthetic oligonucleotide
gauucucgccgcugaaacu

SEQ ID NO: 1247706 - RNA, 19 nt, Artificial Sequence
  Description of Artificial Sequence: Synthetic oligonucleotide
ccaagcuuguacagagcag

SEQ ID NO: 1247707 - RNA, 19 nt, Artificial Sequence
  Description of Artificial Sequence: Synthetic oligonucleotide
ccucacaugccaagcguag

SEQ ID NO: 1247708 - RNA, 19 nt, Artificial Sequence
  Description of Artificial Sequence: Synthetic oligonucleotide
gcuucguggauuccuccug

SEQ ID NO: 1247709 - RNA, 19 nt, Artificial Sequence
  Description of Artificial Sequence: Synthetic oligonucleotide
ucacgccauucaauaggau

SEQ ID NO: 1247710 - RNA, 19 nt, Artificial Sequence
  Description of Artificial Sequence: Synthetic oligonucleotide
ccugaggaucacuguauac

SEQ ID NO: 1247711 - RNA, 19 nt, Artificial Sequence
  Description of Artificial Sequence: Synthetic oligonucleotide
uguucccaugccagucaau

SEQ ID NO: 1247712 - RNA, 19 nt, Artificial Sequence
  Description of Artificial Sequence: Synthetic oligonucleotide
cccgucgauaagauagccc

SEQ ID NO: 1247713 - RNA, 19 nt, Artificial Sequence
  Description of Artificial Sequence: Synthetic oligonucleotide
uucacacgauagcgaugcu

SEQ ID NO: 1247714 - RNA, 19 nt, Artificial Sequence
  Description of Artificial Sequence: Synthetic oligonucleotide
  modified_base (9)..(9): a, c, u, g, unknown or other
uggcccugnuccccaugca

SEQ ID NO: 1247715 - RNA, 19 nt, Artificial Sequence
  Description of Artificial Sequence: Synthetic oligonucleotide
  modified_base (19)..(19): a, c, u, g, unknown or other
ccaugaauauauacacagn

SEQ ID NO: 1247716 - RNA, 19 nt, Artificial Sequence
  Description of Artificial Sequence: Synthetic oligonucleotide
caaaugugauugugaaggu

SEQ ID NO: 1247717 - RNA, 19 nt, Artificial Sequence
  Description of Artificial Sequence: Synthetic oligonucleotide
ucccaccaccaagauuugc

SEQ ID NO: 1247718 - RNA, 19 nt, Artificial Sequence
  Description of Artificial Sequence: Synthetic oligonucleotide
guagcuguccucgcccuca

SEQ ID NO: 1247719 - RNA, 19 nt, Artificial Sequence
  Description of Artificial Sequence: Synthetic oligonucleotide
agguugcuguauuuccguu

SEQ ID NO: 1247720 - RNA, 19 nt, Artificial Sequence
  Description of Artificial Sequence: Synthetic oligonucleotide
agcagauuccuaggaugga

SEQ ID NO: 1247721 - RNA, 19 nt, Artificial Sequence
  Description of Artificial Sequence: Synthetic oligonucleotide
gcuuauuguucucacugcu

SEQ ID NO: 1247722 - RNA, 19 nt, Artificial Sequence
  Description of Artificial Sequence: Synthetic oligonucleotide
gccauucaauaggaugggg

SEQ ID NO: 1247723 - RNA, 19 nt, Artificial Sequence
  Description of Artificial Sequence: Synthetic oligonucleotide
ccccauucacgucaccuag

SEQ ID NO: 1247724 - RNA, 19 nt, Artificial Sequence
  Description of Artificial Sequence: Synthetic oligonucleotide
cucuucgaaccuucucgga

SEQ ID NO: 1247725 - RNA, 19 nt, Artificial Sequence
  Description of Artificial Sequence: Synthetic oligonucleotide
cugcccacuaugagggaga

SEQ ID NO: 1247726 - RNA, 19 nt, Artificial Sequence
  Description of Artificial Sequence: Synthetic oligonucleotide
  modified_base (6)..(6): a, c, u, g, unknown or other
cccugnuccccaugcagag

SEQ ID NO: 1247727 - RNA, 19 nt, Artificial Sequence
  Description of Artificial Sequence: Synthetic oligonucleotide
guuacccgucgauaagaua

SEQ ID NO: 1247728 - RNA, 19 nt, Artificial Sequence
  Description of Artificial Sequence: Synthetic oligonucleotide
ccgucgauaagauagcccu

SEQ ID NO: 1247729 - RNA, 19 nt, Artificial Sequence
  Description of Artificial Sequence: Synthetic oligonucleotide
aggcagaaacaagaccaau

SEQ ID NO: 1247730 - RNA, 19 nt, Artificial Sequence
  Description of Artificial Sequence: Synthetic oligonucleotide
cguggauuccuccugccug

SEQ ID NO: 1247731 - RNA, 19 nt, Artificial Sequence
  Description of Artificial Sequence: Synthetic oligonucleotide
ggauuccuccugccugagg

SEQ ID NO: 1247732 - RNA, 19 nt, Artificial Sequence
  Description of Artificial Sequence: Synthetic oligonucleotide
  modified_base (4)..(4): a, c, u, g, unknown or other
cagnaccccuguucucguc

SEQ ID NO: 1247733 - RNA, 19 nt, Artificial Sequence
  Description of Artificial Sequence: Synthetic oligonucleotide
cucuccucgucuccccauc

SEQ ID NO: 1247734 - RNA, 19 nt, Artificial Sequence
  Description of Artificial Sequence: Synthetic oligonucleotide
guuaacccugacggccagc

SEQ ID NO: 1247735 - RNA, 19 nt, Artificial Sequence
  Description of Artificial Sequence: Synthetic oligonucleotide
caauagccacauccgucca

SEQ ID NO: 1247736 - RNA, 19 nt, Artificial Sequence
  Description of Artificial Sequence: Synthetic oligonucleotide
gauugaugcuacagcugcu

SEQ ID NO: 1247737 - RNA, 19 nt, Artificial Sequence
  Description of Artificial Sequence: Synthetic oligonucleotide
gcauuggcucucauaagca

SEQ ID NO: 1247738 - RNA, 19 nt, Artificial Sequence
  Description of Artificial Sequence: Synthetic oligonucleotide
cucgcccucauuccacaca

SEQ ID NO: 1247739 - RNA, 19 nt, Artificial Sequence
  Description of Artificial Sequence: Synthetic oligonucleotide
gcucucauaagcaaccuau

SEQ ID NO: 1247740 - RNA, 19 nt, Artificial Sequence
  Description of Artificial Sequence: Synthetic oligonucleotide
  modified_base (2)..(2): a, c, u, g, unknown or other
gnaccccuguucucguccu

SEQ ID NO: 1247741 - RNA, 19 nt, Artificial Sequence
  Description of Artificial Sequence: Synthetic oligonucleotide
ccauucacgucaccuagca

SEQ ID NO: 1247742 - RNA, 19 nt, Artificial Sequence
  Description of Artificial Sequence: Synthetic oligonucleotide
cgauaagauagcccugcug

SEQ ID NO: 1247743 - RNA, 19 nt, Artificial Sequence
  Description of Artificial Sequence: Synthetic oligonucleotide
cgacguuugaagaagccaa

SEQ ID NO: 1247744 - RNA, 19 nt, Artificial Sequence
  Description of Artificial Sequence: Synthetic oligonucleotide
caugccaagcguagugggu

SEQ ID NO: 1247745 - RNA, 19 nt, Artificial Sequence
  Description of Artificial Sequence: Synthetic oligonucleotide
acgucaccuagcacuguca

SEQ ID NO: 1247746 - RNA, 19 nt, Artificial Sequence
  Description of Artificial Sequence: Synthetic oligonucleotide
ucgaaccuucucggaagau

SEQ ID NO: 1247747 - RNA, 19 nt, Artificial Sequence
  Description of Artificial Sequence: Synthetic oligonucleotide
cuccccaucggaagaugaa

SEQ ID NO: 1247748 - RNA, 19 nt, Artificial Sequence
  Description of Artificial Sequence: Synthetic oligonucleotide
uucucccacugggcauggg

SEQ ID NO: 1247749 - RNA, 19 nt, Artificial Sequence
  Description of Artificial Sequence: Synthetic oligonucleotide
gcgaugcucagccucucuc

SEQ ID NO: 1247750 - RNA, 19 nt, Artificial Sequence
  Description of Artificial Sequence: Synthetic oligonucleotide
caccaauagccacauccgu

SEQ ID NO: 1247751 - RNA, 19 nt, Artificial Sequence
  Description of Artificial Sequence: Synthetic oligonucleotide
gcuggguaguagaauuuga

SEQ ID NO: 1247752 - RNA, 19 nt, Artificial Sequence
  Description of Artificial Sequence: Synthetic oligonucleotide
ugcuugcauuggcucucau

SEQ ID NO: 1247753 - RNA, 19 nt, Artificial Sequence
  Description of Artificial Sequence: Synthetic oligonucleotide
cagcuuccacugacucaag

SEQ ID NO: 1247754 - RNA, 19 nt, Artificial Sequence
  Description of Artificial Sequence: Synthetic oligonucleotide
ucacgucaccuagcacugu

SEQ ID NO: 1247755 - RNA, 19 nt, Artificial Sequence
  Description of Artificial Sequence: Synthetic oligonucleotide
ccuccugguggauauaugu

SEQ ID NO: 1247756 - RNA, 19 nt, Artificial Sequence
  Description of Artificial Sequence: Synthetic oligonucleotide
agggagcuucccaccacca

SEQ ID NO: 1247757 - RNA, 19 nt, Artificial Sequence
  Description of Artificial Sequence: Synthetic oligonucleotide
  modified_base (7)..(7): a, c, u, g, unknown or other
gcccugnuccccaugcaga

SEQ ID NO: 1247758 - RNA, 19 nt, Artificial Sequence
  Description of Artificial Sequence: Synthetic oligonucleotide
guaggagagcagauuccua

SEQ ID NO: 1247759 - RNA, 19 nt, Artificial Sequence
  Description of Artificial Sequence: Synthetic oligonucleotide
ggaagcauguauggauucu

SEQ ID NO: 1247760 - RNA, 19 nt, Artificial Sequence
  Description of Artificial Sequence: Synthetic oligonucleotide
gcaaccuaucucccaggaa

SEQ ID NO: 1247761 - RNA, 19 nt, Artificial Sequence
  Description of Artificial Sequence: Synthetic oligonucleotide
ccccaucggaagaugaaaa

SEQ ID NO: 1247762 - RNA, 19 nt, Artificial Sequence
  Description of Artificial Sequence: Synthetic oligonucleotide
gucaguggguucggccuca

SEQ ID NO: 1247763 - RNA, 19 nt, Artificial Sequence
  Description of Artificial Sequence: Synthetic oligonucleotide
uagcgaugcucagccucuc

SEQ ID NO: 1247764 - RNA, 19 nt, Artificial Sequence
  Description of Artificial Sequence: Synthetic oligonucleotide
ccaucggaagaugaaaagu

SEQ ID NO: 1247765 - RNA, 19 nt, Artificial Sequence
  Description of Artificial Sequence: Synthetic oligonucleotide
cugagaaguuaaagcugau

SEQ ID NO: 1247766 - RNA, 19 nt, Artificial Sequence
  Description of Artificial Sequence: Synthetic oligonucleotide
gccgcugaaacuggccuca

SEQ ID NO: 1247767 - RNA, 19 nt, Artificial Sequence
  Description of Artificial Sequence: Synthetic oligonucleotide
ccuucucggaagauggggu

SEQ ID NO: 1247768 - RNA, 19 nt, Artificial Sequence
  Description of Artificial Sequence: Synthetic oligonucleotide
cggccucacaugccaagcg

SEQ ID NO: 1247769 - RNA, 19 nt, Artificial Sequence
  Description of Artificial Sequence: Synthetic oligonucleotide
auagcccugcuggguagua

SEQ ID NO: 1247770 - RNA, 19 nt, Artificial Sequence
  Description of Artificial Sequence: Synthetic oligonucleotide
ccaagcguaguggguguug

SEQ ID NO: 1247771 - RNA, 19 nt, Artificial Sequence
  Description of Artificial Sequence: Synthetic oligonucleotide
ggccucacaugccaagcgu

SEQ ID NO: 1247772 - RNA, 19 nt, Artificial Sequence
  Description of Artificial Sequence: Synthetic oligonucleotide
  modified_base (17)..(17): a, c, u, g, unknown or other
cccaaggauggcccugnuc

SEQ ID NO: 1247773 - RNA, 19 nt, Artificial Sequence
  Description of Artificial Sequence: Synthetic oligonucleotide
gcccucauuccacacaguu

SEQ ID NO: 1247774 - RNA, 19 nt, Artificial Sequence
  Description of Artificial Sequence: Synthetic oligonucleotide
cugcuggguaguagaauuu

SEQ ID NO: 1247775 - RNA, 19 nt, Artificial Sequence
  Description of Artificial Sequence: Synthetic oligonucleotide
ccguuacccgucgauaaga

SEQ ID NO: 1247776 - RNA, 19 nt, Artificial Sequence
  Description of Artificial Sequence: Synthetic oligonucleotide
auuccuccugguggauaua

SEQ ID NO: 1247777 - RNA, 19 nt, Artificial Sequence
  Description of Artificial Sequence: Synthetic oligonucleotide
guucggccucacaugccaa

SEQ ID NO: 1247778 - RNA, 19 nt, Artificial Sequence
  Description of Artificial Sequence: Synthetic oligonucleotide
ggguucggccucacaugcc

SEQ ID NO: 1247779 - RNA, 19 nt, Artificial Sequence
  Description of Artificial Sequence: Synthetic oligonucleotide
ggugcaccaauagccacau

SEQ ID NO: 1247780 - RNA, 19 nt, Artificial Sequence
  Description of Artificial Sequence: Synthetic oligonucleotide
gccgccccaaaagcggccc

SEQ ID NO: 1247781 - RNA, 19 nt, Artificial Sequence
  Description of Artificial Sequence: Synthetic oligonucleotide
ccuugucaguggguucggc

SEQ ID NO: 1247782 - RNA, 19 nt, Artificial Sequence
  Description of Artificial Sequence: Synthetic oligonucleotide
ccucgucuccccaucggaa

SEQ ID NO: 1247783 - RNA, 19 nt, Artificial Sequence
  Description of Artificial Sequence: Synthetic oligonucleotide
gccucacaugccaagcgua

SEQ ID NO: 1247784 - RNA, 19 nt, Artificial Sequence
  Description of Artificial Sequence: Synthetic oligonucleotide
cugucccggcagcugggaa

SEQ ID NO: 1247785 - RNA, 19 nt, Artificial Sequence
  Description of Artificial Sequence: Synthetic oligonucleotide
ccuaggauggaagcaugua

SEQ ID NO: 1247786 - RNA, 19 nt, Artificial Sequence
  Description of Artificial Sequence: Synthetic oligonucleotide
ggcaucgaaccuggaaagu

SEQ ID NO: 1247787 - RNA, 19 nt, Artificial Sequence
  Description of Artificial Sequence: Synthetic oligonucleotide
cacugauaccugcccuccu

SEQ ID NO: 1247788 - RNA, 19 nt, Artificial Sequence
  Description of Artificial Sequence: Synthetic oligonucleotide
gccgcaggcuugucaucca

SEQ ID NO: 1247789 - RNA, 19 nt, Artificial Sequence
  Description of Artificial Sequence: Synthetic oligonucleotide
ggugcucuucgaaccuucu

SEQ ID NO: 1247790 - RNA, 19 nt, Artificial Sequence
  Description of Artificial Sequence: Synthetic oligonucleotide
cgccgcugaaacuggccuc

SEQ ID NO: 1247791 - RNA, 19 nt, Artificial Sequence
  Description of Artificial Sequence: Synthetic oligonucleotide
gccuuguaagagacaucaa

SEQ ID NO: 1247792 - RNA, 19 nt, Artificial Sequence
  Description of Artificial Sequence: Synthetic oligonucleotide
ccgccccaaaagcggcccc

SEQ ID NO: 1247793 - RNA, 19 nt, Artificial Sequence
  Description of Artificial Sequence: Synthetic oligonucleotide
ccucacacugccaccugau

SEQ ID NO: 1247794 - RNA, 19 nt, Artificial Sequence
  Description of Artificial Sequence: Synthetic oligonucleotide
cguuacccgucgauaagau

SEQ ID NO: 1247795 - RNA, 19 nt, Artificial Sequence
  Description of Artificial Sequence: Synthetic oligonucleotide
ccgcaggcuugucauccaa

SEQ ID NO: 1247796 - RNA, 19 nt, Artificial Sequence
  Description of Artificial Sequence: Synthetic oligonucleotide
ccgcugaaacuggccucac

SEQ ID NO: 1247797 - RNA, 19 nt, Artificial Sequence
  Description of Artificial Sequence: Synthetic oligonucleotide
  modified_base (5)..(5): a, c, u, g, unknown or other
ccugnuccccaugcagagu

SEQ ID NO: 1247798 - RNA, 19 nt, Artificial Sequence
  Description of Artificial Sequence: Synthetic oligonucleotide
cucggaagauggggugauu

SEQ ID NO: 1247799 - RNA, 19 nt, Artificial Sequence
  Description of Artificial Sequence: Synthetic oligonucleotide
gccaagcguaguggguguu

SEQ ID NO: 1247800 - RNA, 19 nt, Artificial Sequence
  Description of Artificial Sequence: Synthetic oligonucleotide
cccugacggccagcuucca

SEQ ID NO: 1247801 - RNA, 19 nt, Artificial Sequence
  Description of Artificial Sequence: Synthetic oligonucleotide
uucugguuaacccucaggg

SEQ ID NO: 1247802 - RNA, 19 nt, Artificial Sequence
  Description of Artificial Sequence: Synthetic oligonucleotide
aguguuuauauugaaagac

SEQ ID NO: 1247803 - RNA, 19 nt, Artificial Sequence
  Description of Artificial Sequence: Synthetic oligonucleotide
caaguguuuauauugaaag

SEQ ID NO: 1247804 - RNA, 19 nt, Artificial Sequence
  Description of Artificial Sequence: Synthetic oligonucleotide
aagguagaaaugaagacac

SEQ ID NO: 1247805 - RNA, 19 nt, Artificial Sequence
  Description of Artificial Sequence: Synthetic oligonucleotide
gacacuaguguccagauug

SEQ ID NO: 1247806 - RNA, 19 nt, Artificial Sequence
  Description of Artificial Sequence: Synthetic oligonucleotide
auugaaagacaacacuggc

SEQ ID NO: 1247807 - RNA, 19 nt, Artificial Sequence
  Description of Artificial Sequence: Synthetic oligonucleotide
gacgagaaaagaaaggugg

SEQ ID NO: 1247808 - RNA, 19 nt, Artificial Sequence
  Description of Artificial Sequence: Synthetic oligonucleotide
aauaaugcuggaauagugg

SEQ ID NO: 1247809 - RNA, 19 nt, Artificial Sequence
  Description of Artificial Sequence: Synthetic oligonucleotide
uguccuguaauaaagucug

SEQ ID NO: 1247810 - RNA, 19 nt, Artificial Sequence
  Description of Artificial Sequence: Synthetic oligonucleotide
aaagaaagguggguguucc

SEQ ID NO: 1247811 - RNA, 19 nt, Artificial Sequence
  Description of Artificial Sequence: Synthetic oligonucleotide
aauaguggugcccacucag

SEQ ID NO: 1247812 - RNA, 19 nt, Artificial Sequence
  Description of Artificial Sequence: Synthetic oligonucleotide
aucgcaaggacauugagga

SEQ ID NO: 1247813 - RNA, 19 nt, Artificial Sequence
  Description of Artificial Sequence: Synthetic oligonucleotide
augaguugcccacacaugg

SEQ ID NO: 1247814 - RNA, 19 nt, Artificial Sequence
  Description of Artificial Sequence: Synthetic oligonucleotide
uauaguuugugucccuggg

SEQ ID NO: 1247815 - RNA, 19 nt, Artificial Sequence
  Description of Artificial Sequence: Synthetic oligonucleotide
aguacagcgcuucaccagc

SEQ ID NO: 1247816 - RNA, 19 nt, Artificial Sequence
  Description of Artificial Sequence: Synthetic oligonucleotide
aaaguagagggugucauug

SEQ ID NO: 1247817 - RNA, 19 nt, Artificial Sequence
  Description of Artificial Sequence: Synthetic oligonucleotide
uacuuguguggcaagauca

SEQ ID NO: 1247818 - RNA, 19 nt, Artificial Sequence
  Description of Artificial Sequence: Synthetic oligonucleotide
uggaaagcggguaagggug

SEQ ID NO: 1247819 - RNA, 19 nt, Artificial Sequence
  Description of Artificial Sequence: Synthetic oligonucleotide
uauauuuccugaagccagg

SEQ ID NO: 1247820 - RNA, 19 nt, Artificial Sequence
  Description of Artificial Sequence: Synthetic oligonucleotide
aucacuuaugaucgcaagg

SEQ ID NO: 1247821 - RNA, 19 nt, Artificial Sequence
  Description of Artificial Sequence: Synthetic oligonucleotide
aauguggucuuguuggggu

SEQ ID NO: 1247822 - RNA, 19 nt, Artificial Sequence
  Description of Artificial Sequence: Synthetic oligonucleotide
cuuccgaccauaaaucacc

SEQ ID NO: 1247823 - RNA, 19 nt, Artificial Sequence
  Description of Artificial Sequence: Synthetic oligonucleotide
uguagaagcgagauauccc

SEQ ID NO: 1247824 - RNA, 19 nt, Artificial Sequence
  Description of Artificial Sequence: Synthetic oligonucleotide
cuacuaaggccccauaucc

SEQ ID NO: 1247825 - RNA, 19 nt, Artificial Sequence
  Description of Artificial Sequence: Synthetic oligonucleotide
acuacuaaggccccauauc

SEQ ID NO: 1247826 - RNA, 19 nt, Artificial Sequence
  Description of Artificial Sequence: Synthetic oligonucleotide
caggauaaauacauggcag

SEQ ID NO: 1247827 - RNA, 19 nt, Artificial Sequence
  Description of Artificial Sequence: Synthetic oligonucleotide
uguauauaguuuguguccc

SEQ ID NO: 1247828 - RNA, 19 nt, Artificial Sequence
  Description of Artificial Sequence: Synthetic oligonucleotide
auaguuugugucccugggc

SEQ ID NO: 1247829 - RNA, 19 nt, Artificial Sequence
  Description of Artificial Sequence: Synthetic oligonucleotide
gagaauaaugcuggaauag

SEQ ID NO: 1247830 - RNA, 19 nt, Artificial Sequence
  Description of Artificial Sequence: Synthetic oligonucleotide
acuguccuguaauaaaguc

SEQ ID NO: 1247831 - RNA, 19 nt, Artificial Sequence
  Description of Artificial Sequence: Synthetic oligonucleotide
guagacgaaacggaggugg

SEQ ID NO: 1247832 - RNA, 19 nt, Artificial Sequence
  Description of Artificial Sequence: Synthetic oligonucleotide
ugaugcauucaucucugag

SEQ ID NO: 1247833 - RNA, 19 nt, Artificial Sequence
  Description of Artificial Sequence: Synthetic oligonucleotide
agaaaagaaaggugggugu

SEQ ID NO: 1247834 - RNA, 19 nt, Artificial Sequence
  Description of Artificial Sequence: Synthetic oligonucleotide
ucacuuaugaucgcaagga

SEQ ID NO: 1247835 - RNA, 19 nt, Artificial Sequence
  Description of Artificial Sequence: Synthetic oligonucleotide
uaugaucgcaaggacauug

SEQ ID NO: 1247836 - RNA, 19 nt, Artificial Sequence
  Description of Artificial Sequence: Synthetic oligonucleotide
ugagucaccuagcacaagu

SEQ ID NO: 1247837 - RNA, 19 nt, Artificial Sequence
  Description of Artificial Sequence: Synthetic oligonucleotide
aaguacagcgcuucaccag

SEQ ID NO: 1247838 - RNA, 19 nt, Artificial Sequence
  Description of Artificial Sequence: Synthetic oligonucleotide
ucuacaggauaaauacaug

SEQ ID NO: 1247839 - RNA, 19 nt, Artificial Sequence
  Description of Artificial Sequence: Synthetic oligonucleotide
aaagacaacacuggcacau

SEQ ID NO: 1247840 - RNA, 19 nt, Artificial Sequence
  Description of Artificial Sequence: Synthetic oligonucleotide
guauauuuccugaagccag

SEQ ID NO: 1247841 - RNA, 19 nt, Artificial Sequence
  Description of Artificial Sequence: Synthetic oligonucleotide
gccaauguggucuuguugg

SEQ ID NO: 1247842 - RNA, 19 nt, Artificial Sequence
  Description of Artificial Sequence: Synthetic oligonucleotide
agauaugaguugcccacac

SEQ ID NO: 1247843 - RNA, 19 nt, Artificial Sequence
  Description of Artificial Sequence: Synthetic oligonucleotide
acuacauuggcaugugcug

SEQ ID NO: 1247844 - RNA, 19 nt, Artificial Sequence
  Description of Artificial Sequence: Synthetic oligonucleotide
guagaaaugaagacacuag

SEQ ID NO: 1247845 - RNA, 19 nt, Artificial Sequence
  Description of Artificial Sequence: Synthetic oligonucleotide
uuaacccucagggaacugg

SEQ ID NO: 1247846 - RNA, 19 nt, Artificial Sequence
  Description of Artificial Sequence: Synthetic oligonucleotide
uggacgagaaaagaaaggu

SEQ ID NO: 1247847 - RNA, 19 nt, Artificial Sequence
  Description of Artificial Sequence: Synthetic oligonucleotide
ugggguggaacucuggugu

SEQ ID NO: 1247848 - RNA, 19 nt, Artificial Sequence
  Description of Artificial Sequence: Synthetic oligonucleotide
gaucgcaaggacauugagg

SEQ ID NO: 1247849 - RNA, 19 nt, Artificial Sequence
  Description of Artificial Sequence: Synthetic oligonucleotide
uggguagaggacuacuaag

SEQ ID NO: 1247850 - RNA, 19 nt, Artificial Sequence
  Description of Artificial Sequence: Synthetic oligonucleotide
aucacugacuagcuucugg

SEQ ID NO: 1247851 - RNA, 19 nt, Artificial Sequence
  Description of Artificial Sequence: Synthetic oligonucleotide
aggauaaauacauggcaga

SEQ ID NO: 1247852 - RNA, 19 nt, Artificial Sequence
  Description of Artificial Sequence: Synthetic oligonucleotide
uaucacuuaugaucgcaag

SEQ ID NO: 1247853 - RNA, 19 nt, Artificial Sequence
  Description of Artificial Sequence: Synthetic oligonucleotide
gaugcuucccguuccagac

SEQ ID NO: 1247854 - RNA, 19 nt, Artificial Sequence
  Description of Artificial Sequence: Synthetic oligonucleotide
ucuucucucagguggacga

SEQ ID NO: 1247855 - RNA, 19 nt, Artificial Sequence
  Description of Artificial Sequence: Synthetic oligonucleotide
ugcccacucaguaaaguug

SEQ ID NO: 1247856 - RNA, 19 nt, Artificial Sequence
  Description of Artificial Sequence: Synthetic oligonucleotide
agcuccugcaauuccaaag

SEQ ID NO: 1247857 - RNA, 19 nt, Artificial Sequence
  Description of Artificial Sequence: Synthetic oligonucleotide
uucuccauugugcuguaga

SEQ ID NO: 1247858 - RNA, 19 nt, Artificial Sequence
  Description of Artificial Sequence: Synthetic oligonucleotide
uuuuguguguggcauggaa

SEQ ID NO: 1247859 - RNA, 19 nt, Artificial Sequence
  Description of Artificial Sequence: Synthetic oligonucleotide
uguguggaggagauaugag

SEQ ID NO: 1247860 - RNA, 19 nt, Artificial Sequence
  Description of Artificial Sequence: Synthetic oligonucleotide
ucccugacuacuugugugg

SEQ ID NO: 1247861 - RNA, 19 nt, Artificial Sequence
  Description of Artificial Sequence: Synthetic oligonucleotide
accauaaaucaccucugag

SEQ ID NO: 1247862 - RNA, 19 nt, Artificial Sequence
  Description of Artificial Sequence: Synthetic oligonucleotide
auggguauauuuccugaag

SEQ ID NO: 1247863 - RNA, 19 nt, Artificial Sequence
  Description of Artificial Sequence: Synthetic oligonucleotide
agacaacacuggcacaugg

SEQ ID NO: 1247864 - RNA, 19 nt, Artificial Sequence
  Description of Artificial Sequence: Synthetic oligonucleotide
uaugaguugcccacacaug

SEQ ID NO: 1247865 - RNA, 19 nt, Artificial Sequence
  Description of Artificial Sequence: Synthetic oligonucleotide
ggaugguacauuccaaggg

SEQ ID NO: 1247866 - RNA, 19 nt, Artificial Sequence
  Description of Artificial Sequence: Synthetic oligonucleotide
uguguggcauggaaagugc

SEQ ID NO: 1247867 - RNA, 19 nt, Artificial Sequence
  Description of Artificial Sequence: Synthetic oligonucleotide
acuaaggccccauauccug

SEQ ID NO: 1247868 - RNA, 19 nt, Artificial Sequence
  Description of Artificial Sequence: Synthetic oligonucleotide
augguggaucuguuggccc

SEQ ID NO: 1247869 - RNA, 19 nt, Artificial Sequence
  Description of Artificial Sequence: Synthetic oligonucleotide
uguggcaugccaccaccgg

SEQ ID NO: 1247870 - RNA, 19 nt, Artificial Sequence
  Description of Artificial Sequence: Synthetic oligonucleotide
guucccaguagacgaaacg

SEQ ID NO: 1247871 - RNA, 19 nt, Artificial Sequence
  Description of Artificial Sequence: Synthetic oligonucleotide
cuguagaagcgagauaucc

SEQ ID NO: 1247872 - RNA, 19 nt, Artificial Sequence
  Description of Artificial Sequence: Synthetic oligonucleotide
agcgcuuccgaccauaaau

SEQ ID NO: 1247873 - RNA, 19 nt, Artificial Sequence
  Description of Artificial Sequence: Synthetic oligonucleotide
auacauggcagacauggau

SEQ ID NO: 1247874 - RNA, 19 nt, Artificial Sequence
  Description of Artificial Sequence: Synthetic oligonucleotide
uccugcaauuccaaagcug

SEQ ID NO: 1247875 - RNA, 19 nt, Artificial Sequence
  Description of Artificial Sequence: Synthetic oligonucleotide
gaggguagaggaaccagcg

SEQ ID NO: 1247876 - RNA, 19 nt, Artificial Sequence
  Description of Artificial Sequence: Synthetic oligonucleotide
uauuuccugaagccaggcc

SEQ ID NO: 1247877 - RNA, 19 nt, Artificial Sequence
  Description of Artificial Sequence: Synthetic oligonucleotide
auacucaggcgguugaaca

SEQ ID NO: 1247878 - RNA, 19 nt, Artificial Sequence
  Description of Artificial Sequence: Synthetic oligonucleotide
ugaucgcaaggacauugag

SEQ ID NO: 1247879 - RNA, 19 nt, Artificial Sequence
  Description of Artificial Sequence: Synthetic oligonucleotide
uccuguaauaaagucugug

SEQ ID NO: 1247880 - RNA, 19 nt, Artificial Sequence
  Description of Artificial Sequence: Synthetic oligonucleotide
auauuuccugaagccaggc

SEQ ID NO: 1247881 - RNA, 19 nt, Artificial Sequence
  Description of Artificial Sequence: Synthetic oligonucleotide
uccagauugaguguggcau

SEQ ID NO: 1247882 - RNA, 19 nt, Artificial Sequence
  Description of Artificial Sequence: Synthetic oligonucleotide
aaggggcagguccacuuuc

SEQ ID NO: 1247883 - RNA, 19 nt, Artificial Sequence
  Description of Artificial Sequence: Synthetic oligonucleotide
auugaguguggcaugccac

SEQ ID NO: 1247884 - RNA, 19 nt, Artificial Sequence
  Description of Artificial Sequence: Synthetic oligonucleotide
gucagcggaaccacgaggg

SEQ ID NO: 1247885 - RNA, 19 nt, Artificial Sequence
  Description of Artificial Sequence: Synthetic oligonucleotide
ugugcuguagaagcgagau

SEQ ID NO: 1247886 - RNA, 19 nt, Artificial Sequence
  Description of Artificial Sequence: Synthetic oligonucleotide
aggguagaggaaccagcgc

SEQ ID NO: 1247887 - RNA, 19 nt, Artificial Sequence
  Description of Artificial Sequence: Synthetic oligonucleotide
ucccguuccagacauuuuc

SEQ ID NO: 1247888 - RNA, 19 nt, Artificial Sequence
  Description of Artificial Sequence: Synthetic oligonucleotide
uaugguggaucuguuggcc

SEQ ID NO: 1247889 - RNA, 19 nt, Artificial Sequence
  Description of Artificial Sequence: Synthetic oligonucleotide
agaagcgagauaucccuga

SEQ ID NO: 1247890 - RNA, 19 nt, Artificial Sequence
  Description of Artificial Sequence: Synthetic oligonucleotide
ugugagcacuacauuggca

SEQ ID NO: 1247891 - RNA, 19 nt, Artificial Sequence
  Description of Artificial Sequence: Synthetic oligonucleotide
cacuuugaccccgugaccc

SEQ ID NO: 1247892 - RNA, 19 nt, Artificial Sequence
  Description of Artificial Sequence: Synthetic oligonucleotide
ugaguugcccacacauggc

SEQ ID NO: 1247893 - RNA, 19 nt, Artificial Sequence
  Description of Artificial Sequence: Synthetic oligonucleotide
uguuggcccaugcaugaca

SEQ ID NO: 1247894 - RNA, 19 nt, Artificial Sequence
  Description of Artificial Sequence: Synthetic oligonucleotide
aucccugacuacuugugug

SEQ ID NO: 1247895 - RNA, 19 nt, Artificial Sequence
  Description of Artificial Sequence: Synthetic oligonucleotide
gacaacacuggcacauggg

SEQ ID NO: 1247896 - RNA, 19 nt, Artificial Sequence
  Description of Artificial Sequence: Synthetic oligonucleotide
aggagauaugaguugccca

SEQ ID NO: 1247897 - RNA, 19 nt, Artificial Sequence
  Description of Artificial Sequence: Synthetic oligonucleotide
cauugccuagggauguggg

SEQ ID NO: 1247898 - RNA, 19 nt, Artificial Sequence
  Description of Artificial Sequence: Synthetic oligonucleotide
auuccaagggccgagcuga

SEQ ID NO: 1247899 - RNA, 19 nt, Artificial Sequence
  Description of Artificial Sequence: Synthetic oligonucleotide
agucaccuagcacaagugu

SEQ ID NO: 1247900 - RNA, 19 nt, Artificial Sequence
  Description of Artificial Sequence: Synthetic oligonucleotide
aaagcggguaagggugggc

SEQ ID NO: 1247901 - RNA, 19 nt, Artificial Sequence
  Description of Artificial Sequence: Synthetic oligonucleotide
aggugugugugucugugug

SEQ ID NO: 1247902 - RNA, 19 nt, Artificial Sequence
  Description of Artificial Sequence: Synthetic oligonucleotide
cuaugguggaucuguuggc

SEQ ID NO: 1247903 - RNA, 19 nt, Artificial Sequence
  Description of Artificial Sequence: Synthetic oligonucleotide
ucaccuagcacaaguguuu

SEQ ID NO: 1247904 - RNA, 19 nt, Artificial Sequence
  Description of Artificial Sequence: Synthetic oligonucleotide
acuuaugaucgcaaggaca

SEQ ID NO: 1247905 - RNA, 19 nt, Artificial Sequence
  Description of Artificial Sequence: Synthetic oligonucleotide
acgagaaaagaaagguggg

SEQ ID NO: 1247906 - RNA, 19 nt, Artificial Sequence
  Description of Artificial Sequence: Synthetic oligonucleotide
uaucccugacuacuugugu

SEQ ID NO: 1247907 - RNA, 19 nt, Artificial Sequence
  Description of Artificial Sequence: Synthetic oligonucleotide
gguagaggacuacuaaggc

SEQ ID NO: 1247908 - RNA, 19 nt, Artificial Sequence
  Description of Artificial Sequence: Synthetic oligonucleotide
cuuaugaucgcaaggacau

SEQ ID NO: 1247909 - RNA, 19 nt, Artificial Sequence
  Description of Artificial Sequence: Synthetic oligonucleotide
gaagacacuaguguccaga

SEQ ID NO: 1247910 - RNA, 19 nt, Artificial Sequence
  Description of Artificial Sequence: Synthetic oligonucleotide
uggcccaugcaugacauga

SEQ ID NO: 1247911 - RNA, 19 nt, Artificial Sequence
  Description of Artificial Sequence: Synthetic oligonucleotide
agauaucccugacuacuug

SEQ ID NO: 1247912 - RNA, 19 nt, Artificial Sequence
  Description of Artificial Sequence: Synthetic oligonucleotide
aagcgagauaucccugacu

SEQ ID NO: 1247913 - RNA, 19 nt, Artificial Sequence
  Description of Artificial Sequence: Synthetic oligonucleotide
uagaagcgagauaucccug

SEQ ID NO: 1247914 - RNA, 19 nt, Artificial Sequence
  Description of Artificial Sequence: Synthetic oligonucleotide
uguaagcaggggugguucc

SEQ ID NO: 1247915 - RNA, 19 nt, Artificial Sequence
  Description of Artificial Sequence: Synthetic oligonucleotide
augugggucauugugugug

SEQ ID NO: 1247916 - RNA, 19 nt, Artificial Sequence
  Description of Artificial Sequence: Synthetic oligonucleotide
agagugucagcggaaccac

SEQ ID NO: 1247917 - RNA, 19 nt, Artificial Sequence
  Description of Artificial Sequence: Synthetic oligonucleotide
acuuugaccccgugacccg

SEQ ID NO: 1247918 - RNA, 19 nt, Artificial Sequence
  Description of Artificial Sequence: Synthetic oligonucleotide
ggguagaggacuacuaagg

SEQ ID NO: 1247919 - RNA, 19 nt, Artificial Sequence
  Description of Artificial Sequence: Synthetic oligonucleotide
ccuguauauaguuuguguc

SEQ ID NO: 1247920 - RNA, 19 nt, Artificial Sequence
  Description of Artificial Sequence: Synthetic oligonucleotide
ucaacucuacaggauaaau

SEQ ID NO: 1247921 - RNA, 19 nt, Artificial Sequence
  Description of Artificial Sequence: Synthetic oligonucleotide
guuguugcagcgugugggc

SEQ ID NO: 1247922 - RNA, 19 nt, Artificial Sequence
  Description of Artificial Sequence: Synthetic oligonucleotide
ugagcacuacauuggcaug

SEQ ID NO: 1247923 - RNA, 19 nt, Artificial Sequence
  Description of Artificial Sequence: Synthetic oligonucleotide
ucucggcaucccuugcugg

SEQ ID NO: 1247924 - RNA, 19 nt, Artificial Sequence
  Description of Artificial Sequence: Synthetic oligonucleotide
guggguguuccuugaagcc

SEQ ID NO: 1247925 - RNA, 19 nt, Artificial Sequence
  Description of Artificial Sequence: Synthetic oligonucleotide
uggguguuccuugaagccc

SEQ ID NO: 1247926 - RNA, 19 nt, Artificial Sequence
  Description of Artificial Sequence: Synthetic oligonucleotide
uguugcagcgugugggcca

SEQ ID NO: 1247927 - RNA, 19 nt, Artificial Sequence
  Description of Artificial Sequence: Synthetic oligonucleotide
gauggguauauuuccugaa

SEQ ID NO: 1247928 - RNA, 19 nt, Artificial Sequence
  Description of Artificial Sequence: Synthetic oligonucleotide
ucuguguggaggagauaug

SEQ ID NO: 1247929 - RNA, 19 nt, Artificial Sequence
  Description of Artificial Sequence: Synthetic oligonucleotide
gaugcgggagcccugcauc

SEQ ID NO: 1247930 - RNA, 19 nt, Artificial Sequence
  Description of Artificial Sequence: Synthetic oligonucleotide
caugccaguggaaggguac

SEQ ID NO: 1247931 - RNA, 19 nt, Artificial Sequence
  Description of Artificial Sequence: Synthetic oligonucleotide
gaaacggagguggagaaua

SEQ ID NO: 1247932 - RNA, 19 nt, Artificial Sequence
  Description of Artificial Sequence: Synthetic oligonucleotide
gugagggugccccuagucc

SEQ ID NO: 1247933 - RNA, 19 nt, Artificial Sequence
  Description of Artificial Sequence: Synthetic oligonucleotide
guggaggagauaugaguug

SEQ ID NO: 1247934 - RNA, 19 nt, Artificial Sequence
  Description of Artificial Sequence: Synthetic oligonucleotide
cucaggaggguagaggaac

SEQ ID NO: 1247935 - RNA, 19 nt, Artificial Sequence
  Description of Artificial Sequence: Synthetic oligonucleotide
cucuacaggauaaauacau

SEQ ID NO: 1247936 - RNA, 19 nt, Artificial Sequence
  Description of Artificial Sequence: Synthetic oligonucleotide
gguggacgagaaaagaaag

SEQ ID NO: 1247937 - RNA, 19 nt, Artificial Sequence
  Description of Artificial Sequence: Synthetic oligonucleotide
uagcuucugguuaacccuc

SEQ ID NO: 1247938 - RNA, 19 nt, Artificial Sequence
  Description of Artificial Sequence: Synthetic oligonucleotide
gaaccagcgcuuccgacca

SEQ ID NO: 1247939 - RNA, 19 nt, Artificial Sequence
  Description of Artificial Sequence: Synthetic oligonucleotide
cucggcaucccuugcuggg

SEQ ID NO: 1247940 - RNA, 19 nt, Artificial Sequence
  Description of Artificial Sequence: Synthetic oligonucleotide
aagugccccagccuauggu

SEQ ID NO: 1247941 - RNA, 19 nt, Artificial Sequence
  Description of Artificial Sequence: Synthetic oligonucleotide
ugaggccaagcacgugagg

SEQ ID NO: 1247942 - RNA, 19 nt, Artificial Sequence
  Description of Artificial Sequence: Synthetic oligonucleotide
gaagcgagauaucccugac

SEQ ID NO: 1247943 - RNA, 19 nt, Artificial Sequence
  Description of Artificial Sequence: Synthetic oligonucleotide
aggaaccagcgcuuccgac

SEQ ID NO: 1247944 - RNA, 19 nt, Artificial Sequence
  Description of Artificial Sequence: Synthetic oligonucleotide
gaccauaaaucaccucuga

SEQ ID NO: 1247945 - RNA, 19 nt, Artificial Sequence
  Description of Artificial Sequence: Synthetic oligonucleotide
uagacgaaacggaggugga

SEQ ID NO: 1247946 - RNA, 19 nt, Artificial Sequence
  Description of Artificial Sequence: Synthetic oligonucleotide
gacgaaacggagguggaga

SEQ ID NO: 1247947 - RNA, 19 nt, Artificial Sequence
  Description of Artificial Sequence: Synthetic oligonucleotide
ucucucagguggacgagaa

SEQ ID NO: 1247948 - RNA, 19 nt, Artificial Sequence
  Description of Artificial Sequence: Synthetic oligonucleotide
auaaaucaccucugagaaa

SEQ ID NO: 1247949 - RNA, 19 nt, Artificial Sequence
  Description of Artificial Sequence: Synthetic oligonucleotide
ugcaugacaugagugcccu

SEQ ID NO: 1247950 - RNA, 19 nt, Artificial Sequence
  Description of Artificial Sequence: Synthetic oligonucleotide
acggagguggagaauaaug

SEQ ID NO: 1247951 - RNA, 19 nt, Artificial Sequence
  Description of Artificial Sequence: Synthetic oligonucleotide
aagggccgagcugaugggg

SEQ ID NO: 1247952 - RNA, 19 nt, Artificial Sequence
  Description of Artificial Sequence: Synthetic oligonucleotide
cacuuaugaucgcaaggac

SEQ ID NO: 1247953 - RNA, 19 nt, Artificial Sequence
  Description of Artificial Sequence: Synthetic oligonucleotide
aauacauggcagacaugga

SEQ ID NO: 1247954 - RNA, 19 nt, Artificial Sequence
  Description of Artificial Sequence: Synthetic oligonucleotide
gauaucccugacuacuugu

SEQ ID NO: 1247955 - RNA, 19 nt, Artificial Sequence
  Description of Artificial Sequence: Synthetic oligonucleotide
agauugaguguggcaugcc

SEQ ID NO: 1247956 - RNA, 19 nt, Artificial Sequence
  Description of Artificial Sequence: Synthetic oligonucleotide
gauaugaguugcccacaca

SEQ ID NO: 1247957 - RNA, 19 nt, Artificial Sequence
  Description of Artificial Sequence: Synthetic oligonucleotide
auugugcuguagaagcgag

SEQ ID NO: 1247958 - RNA, 19 nt, Artificial Sequence
  Description of Artificial Sequence: Synthetic oligonucleotide
gaagcccgugggcaggugc

SEQ ID NO: 1247959 - RNA, 19 nt, Artificial Sequence
  Description of Artificial Sequence: Synthetic oligonucleotide
cagauugaguguggcaugc

SEQ ID NO: 1247960 - RNA, 19 nt, Artificial Sequence
  Description of Artificial Sequence: Synthetic oligonucleotide
cauuggcaugugcuggugc

SEQ ID NO: 1247961 - RNA, 19 nt, Artificial Sequence
  Description of Artificial Sequence: Synthetic oligonucleotide
caauguggucuuguugggg

SEQ ID NO: 1247962 - RNA, 19 nt, Artificial Sequence
  Description of Artificial Sequence: Synthetic oligonucleotide
ggauaaauacauggcagac

SEQ ID NO: 1247963 - RNA, 19 nt, Artificial Sequence
  Description of Artificial Sequence: Synthetic oligonucleotide
uggcaugccaccaccgguc

SEQ ID NO: 1247964 - RNA, 19 nt, Artificial Sequence
  Description of Artificial Sequence: Synthetic oligonucleotide
gguauauuuccugaagcca

SEQ ID NO: 1247965 - RNA, 19 nt, Artificial Sequence
  Description of Artificial Sequence: Synthetic oligonucleotide
ccaguagacgaaacggagg

SEQ ID NO: 1247966 - RNA, 19 nt, Artificial Sequence
  Description of Artificial Sequence: Synthetic oligonucleotide
aagcggguaagggugggcu

SEQ ID NO: 1247967 - RNA, 19 nt, Artificial Sequence
  Description of Artificial Sequence: Synthetic oligonucleotide
gccacuuugaccccgugac

SEQ ID NO: 1247968 - RNA, 19 nt, Artificial Sequence
  Description of Artificial Sequence: Synthetic oligonucleotide
acauaaggugugugugucu

SEQ ID NO: 1247969 - RNA, 19 nt, Artificial Sequence
  Description of Artificial Sequence: Synthetic oligonucleotide
ugacuacuuguguggcaag

SEQ ID NO: 1247970 - RNA, 19 nt, Artificial Sequence
  Description of Artificial Sequence: Synthetic oligonucleotide
uggaagagugucagcggaa

SEQ ID NO: 1247971 - RNA, 19 nt, Artificial Sequence
  Description of Artificial Sequence: Synthetic oligonucleotide
ggugugugugucugugugg

SEQ ID NO: 1247972 - RNA, 19 nt, Artificial Sequence
  Description of Artificial Sequence: Synthetic oligonucleotide
aguugcccacacauggcac

SEQ ID NO: 1247973 - RNA, 19 nt, Artificial Sequence
  Description of Artificial Sequence: Synthetic oligonucleotide
agcucauccccaacuuggc

SEQ ID NO: 1247974 - RNA, 19 nt, Artificial Sequence
  Description of Artificial Sequence: Synthetic oligonucleotide
agaggacuacuaaggcccc

SEQ ID NO: 1247975 - RNA, 19 nt, Artificial Sequence
  Description of Artificial Sequence: Synthetic oligonucleotide
cuagcuucugguuaacccu

SEQ ID NO: 1247976 - RNA, 19 nt, Artificial Sequence
  Description of Artificial Sequence: Synthetic oligonucleotide
ucccuguauauaguuugug

SEQ ID NO: 1247977 - RNA, 19 nt, Artificial Sequence
  Description of Artificial Sequence: Synthetic oligonucleotide
acauuccaagggccgagcu

SEQ ID NO: 1247978 - RNA, 19 nt, Artificial Sequence
  Description of Artificial Sequence: Synthetic oligonucleotide
gaauaguggugcccacuca

SEQ ID NO: 1247979 - RNA, 19 nt, Artificial Sequence
  Description of Artificial Sequence: Synthetic oligonucleotide
gguagaaaugaagacacua

SEQ ID NO: 1247980 - RNA, 19 nt, Artificial Sequence
  Description of Artificial Sequence: Synthetic oligonucleotide
aucaguccuugcugauggg

SEQ ID NO: 1247981 - RNA, 19 nt, Artificial Sequence
  Description of Artificial Sequence: Synthetic oligonucleotide
agugucagcggaaccacga

SEQ ID NO: 1247982 - RNA, 19 nt, Artificial Sequence
  Description of Artificial Sequence: Synthetic oligonucleotide
cuguccuguaauaaagucu

SEQ ID NO: 1247983 - RNA, 19 nt, Artificial Sequence
  Description of Artificial Sequence: Synthetic oligonucleotide
acgaaacggagguggagaa

SEQ ID NO: 1247984 - RNA, 19 nt, Artificial Sequence
  Description of Artificial Sequence: Synthetic oligonucleotide
cugacuagcuucugguuaa

SEQ ID NO: 1247985 - RNA, 19 nt, Artificial Sequence
  Description of Artificial Sequence: Synthetic oligonucleotide
cccuaguggacauaaggug

SEQ ID NO: 1247986 - RNA, 19 nt, Artificial Sequence
  Description of Artificial Sequence: Synthetic oligonucleotide
cgguugaacacucugacuc

SEQ ID NO: 1247987 - RNA, 19 nt, Artificial Sequence
  Description of Artificial Sequence: Synthetic oligonucleotide
ucgcaaggacauugaggag

SEQ ID NO: 1247988 - RNA, 19 nt, Artificial Sequence
  Description of Artificial Sequence: Synthetic oligonucleotide
ugccaguugccuguuuggc

SEQ ID NO: 1247989 - RNA, 19 nt, Artificial Sequence
  Description of Artificial Sequence: Synthetic oligonucleotide
cucuucucucagguggacg

SEQ ID NO: 1247990 - RNA, 19 nt, Artificial Sequence
  Description of Artificial Sequence: Synthetic oligonucleotide
cggucagggaaguacagcg

SEQ ID NO: 1247991 - RNA, 19 nt, Artificial Sequence
  Description of Artificial Sequence: Synthetic oligonucleotide
ggacgagaaaagaaaggug

SEQ ID NO: 1247992 - RNA, 19 nt, Artificial Sequence
  Description of Artificial Sequence: Synthetic oligonucleotide
cccaguagacgaaacggag

SEQ ID NO: 1247993 - RNA, 19 nt, Artificial Sequence
  Description of Artificial Sequence: Synthetic oligonucleotide
gagggucuggaaacagaag

SEQ ID NO: 1247994 - RNA, 19 nt, Artificial Sequence
  Description of Artificial Sequence: Synthetic oligonucleotide
caggcgguugaacacucug

SEQ ID NO: 1247995 - RNA, 19 nt, Artificial Sequence
  Description of Artificial Sequence: Synthetic oligonucleotide
guacauuccaagggccgag

SEQ ID NO: 1247996 - RNA, 19 nt, Artificial Sequence
  Description of Artificial Sequence: Synthetic oligonucleotide
uugaugcauucaucucuga

SEQ ID NO: 1247997 - RNA, 19 nt, Artificial Sequence
  Description of Artificial Sequence: Synthetic oligonucleotide
agugcccuaguggacauaa

SEQ ID NO: 1247998 - RNA, 19 nt, Artificial Sequence
  Description of Artificial Sequence: Synthetic oligonucleotide
uuugaccccgugacccgga

SEQ ID NO: 1247999 - RNA, 19 nt, Artificial Sequence
  Description of Artificial Sequence: Synthetic oligonucleotide
acucuacaggauaaauaca

SEQ ID NO: 1248000 - RNA, 19 nt, Artificial Sequence
  Description of Artificial Sequence: Synthetic oligonucleotide
agcggaaccacgaggguga

SEQ ID NO: 1248001 - RNA, 19 nt, Artificial Sequence
  Description of Artificial Sequence: Synthetic oligonucleotide
gccccuaguccacaugugg

SEQ ID NO: 1248002 - RNA, 19 nt, Artificial Sequence
  Description of Artificial Sequence: Synthetic oligonucleotide
ucagcggaaccacgagggu

SEQ ID NO: 1248003 - RNA, 19 nt, Artificial Sequence
  Description of Artificial Sequence: Synthetic oligonucleotide
ggcgguugaacacucugac

SEQ ID NO: 1248004 - RNA, 19 nt, Artificial Sequence
  Description of Artificial Sequence: Synthetic oligonucleotide
uucucucagguggacgaga

SEQ ID NO: 1248005 - RNA, 19 nt, Artificial Sequence
  Description of Artificial Sequence: Synthetic oligonucleotide
ugaugcgggagcccugcau

SEQ ID NO: 1248006 - RNA, 19 nt, Artificial Sequence
  Description of Artificial Sequence: Synthetic oligonucleotide
ccauugugcuguagaagcg

SEQ ID NO: 1248007 - RNA, 19 nt, Artificial Sequence
  Description of Artificial Sequence: Synthetic oligonucleotide
agacgaaacggagguggag

SEQ ID NO: 1248008 - RNA, 19 nt, Artificial Sequence
  Description of Artificial Sequence: Synthetic oligonucleotide
gugucagcggaaccacgag

SEQ ID NO: 1248009 - RNA, 19 nt, Artificial Sequence
  Description of Artificial Sequence: Synthetic oligonucleotide
gagugucagcggaaccacg

SEQ ID NO: 1248010 - RNA, 19 nt, Artificial Sequence
  Description of Artificial Sequence: Synthetic oligonucleotide
cuuugaccccgugacccgg

SEQ ID NO: 1248011 - RNA, 19 nt, Artificial Sequence
  Description of Artificial Sequence: Synthetic oligonucleotide
aggccaagcacgugagggu

SEQ ID NO: 1248012 - RNA, 19 nt, Artificial Sequence
  Description of Artificial Sequence: Synthetic oligonucleotide
caguagacgaaacggaggu

SEQ ID NO: 1248013 - RNA, 19 nt, Artificial Sequence
  Description of Artificial Sequence: Synthetic oligonucleotide
cacaaguguuuauauugaa

SEQ ID NO: 1248014 - RNA, 19 nt, Artificial Sequence
  Description of Artificial Sequence: Synthetic oligonucleotide
gacuacuaaggccccauau

SEQ ID NO: 1248015 - RNA, 19 nt, Artificial Sequence
  Description of Artificial Sequence: Synthetic oligonucleotide
aguagacgaaacggaggug

SEQ ID NO: 1248016 - RNA, 19 nt, Artificial Sequence
  Description of Artificial Sequence: Synthetic oligonucleotide
caucacacccagugguauc

SEQ ID NO: 1248017 - RNA, 19 nt, Artificial Sequence
  Description of Artificial Sequence: Synthetic oligonucleotide
agugggcuugccaguugcc

SEQ ID NO: 1248018 - RNA, 19 nt, Artificial Sequence
  Description of Artificial Sequence: Synthetic oligonucleotide
gguaucacuuaugaucgca

SEQ ID NO: 1248019 - RNA, 19 nt, Artificial Sequence
  Description of Artificial Sequence: Synthetic oligonucleotide
uggggcuagggauggguau

SEQ ID NO: 1248020 - RNA, 19 nt, Artificial Sequence
  Description of Artificial Sequence: Synthetic oligonucleotide
guggacauaaggugugugu

SEQ ID NO: 1248021 - RNA, 19 nt, Artificial Sequence
  Description of Artificial Sequence: Synthetic oligonucleotide
agccuggaugguacauucc

SEQ ID NO: 1248022 - RNA, 19 nt, Artificial Sequence
  Description of Artificial Sequence: Synthetic oligonucleotide
aacggagguggagaauaau

SEQ ID NO: 1248023 - RNA, 19 nt, Artificial Sequence
  Description of Artificial Sequence: Synthetic oligonucleotide
uugaccccgugacccggag

SEQ ID NO: 1248024 - RNA, 19 nt, Artificial Sequence
  Description of Artificial Sequence: Synthetic oligonucleotide
gugugugugucugugugga

SEQ ID NO: 1248025 - RNA, 19 nt, Artificial Sequence
  Description of Artificial Sequence: Synthetic oligonucleotide
acucaacucuacaggauaa

SEQ ID NO: 1248026 - RNA, 19 nt, Artificial Sequence
  Description of Artificial Sequence: Synthetic oligonucleotide
cauggcacucaacucuaca

SEQ ID NO: 1248027 - RNA, 19 nt, Artificial Sequence
  Description of Artificial Sequence: Synthetic oligonucleotide
ccccuaguccacauguggg

SEQ ID NO: 1248028 - RNA, 19 nt, Artificial Sequence
  Description of Artificial Sequence: Synthetic oligonucleotide
cugacuacuuguguggcaa

SEQ ID NO: 1248029 - RNA, 19 nt, Artificial Sequence
  Description of Artificial Sequence: Synthetic oligonucleotide
agcggguaagggugggcug

SEQ ID NO: 1248030 - RNA, 19 nt, Artificial Sequence
  Description of Artificial Sequence: Synthetic oligonucleotide
cacuaguguccagauugag

SEQ ID NO: 1248031 - RNA, 19 nt, Artificial Sequence
  Description of Artificial Sequence: Synthetic oligonucleotide
uccccuucucggcaucccu

SEQ ID NO: 1248032 - RNA, 19 nt, Artificial Sequence
  Description of Artificial Sequence: Synthetic oligonucleotide
guaucacuuaugaucgcaa

SEQ ID NO: 1248033 - RNA, 19 nt, Artificial Sequence
  Description of Artificial Sequence: Synthetic oligonucleotide
ggccaauguggucuuguug

SEQ ID NO: 1248034 - RNA, 19 nt, Artificial Sequence
  Description of Artificial Sequence: Synthetic oligonucleotide
cuggguagaggacuacuaa

SEQ ID NO: 1248035 - RNA, 19 nt, Artificial Sequence
  Description of Artificial Sequence: Synthetic oligonucleotide
gucuguguggaggagauau

SEQ ID NO: 1248036 - RNA, 19 nt, Artificial Sequence
  Description of Artificial Sequence: Synthetic oligonucleotide
auaaagucugugagcacua

SEQ ID NO: 1248037 - RNA, 19 nt, Artificial Sequence
  Description of Artificial Sequence: Synthetic oligonucleotide
ggaaagcggguaagggugg

SEQ ID NO: 1248038 - RNA, 19 nt, Artificial Sequence
  Description of Artificial Sequence: Synthetic oligonucleotide
acugagucaccuagcacaa

SEQ ID NO: 1248039 - RNA, 19 nt, Artificial Sequence
  Description of Artificial Sequence: Synthetic oligonucleotide
aaacggagguggagaauaa

SEQ ID NO: 1248040 - RNA, 19 nt, Artificial Sequence
  Description of Artificial Sequence: Synthetic oligonucleotide
ugauacucaggcgguugaa

SEQ ID NO: 1248041 - RNA, 19 nt, Artificial Sequence
  Description of Artificial Sequence: Synthetic oligonucleotide
ggguagaggaaccagcgcu

SEQ ID NO: 1248042 - RNA, 19 nt, Artificial Sequence
  Description of Artificial Sequence: Synthetic oligonucleotide
augaucgcaaggacauuga

SEQ ID NO: 1248043 - RNA, 19 nt, Artificial Sequence
  Description of Artificial Sequence: Synthetic oligonucleotide
uggcuagccaaggaaggua

SEQ ID NO: 1248044 - RNA, 19 nt, Artificial Sequence
  Description of Artificial Sequence: Synthetic oligonucleotide
gaaccacgagggugaugag

SEQ ID NO: 1248045 - RNA, 19 nt, Artificial Sequence
  Description of Artificial Sequence: Synthetic oligonucleotide
ccagugguaucacuuauga

SEQ ID NO: 1248046 - RNA, 19 nt, Artificial Sequence
  Description of Artificial Sequence: Synthetic oligonucleotide
cagcggaaccacgagggug

SEQ ID NO: 1248047 - RNA, 19 nt, Artificial Sequence
  Description of Artificial Sequence: Synthetic oligonucleotide
ggaagagugucagcggaac

SEQ ID NO: 1248048 - RNA, 19 nt, Artificial Sequence
  Description of Artificial Sequence: Synthetic oligonucleotide
auaguggugcccacucagu

SEQ ID NO: 1248049 - RNA, 19 nt, Artificial Sequence
  Description of Artificial Sequence: Synthetic oligonucleotide
gagcacuacauuggcaugu

SEQ ID NO: 1248050 - RNA, 19 nt, Artificial Sequence
  Description of Artificial Sequence: Synthetic oligonucleotide
ucugagaaaccaggcccau

SEQ ID NO: 1248051 - RNA, 19 nt, Artificial Sequence
  Description of Artificial Sequence: Synthetic oligonucleotide
cacgugagggugccccuag

SEQ ID NO: 1248052 - RNA, 19 nt, Artificial Sequence
  Description of Artificial Sequence: Synthetic oligonucleotide
guguggcaugccaccaccg

SEQ ID NO: 1248053 - RNA, 19 nt, Artificial Sequence
  Description of Artificial Sequence: Synthetic oligonucleotide
ccugcaauuccaaagcugu

SEQ ID NO: 1248054 - RNA, 19 nt, Artificial Sequence
  Description of Artificial Sequence: Synthetic oligonucleotide
cuucucucagguggacgag

SEQ ID NO: 1248055 - RNA, 19 nt, Artificial Sequence
  Description of Artificial Sequence: Synthetic oligonucleotide
guggagaauaaugcuggaa

SEQ ID NO: 1248056 - RNA, 19 nt, Artificial Sequence
  Description of Artificial Sequence: Synthetic oligonucleotide
uuggcccaugcaugacaug

SEQ ID NO: 1248057 - RNA, 19 nt, Artificial Sequence
  Description of Artificial Sequence: Synthetic oligonucleotide
acacuaguguccagauuga

SEQ ID NO: 1248058 - RNA, 19 nt, Artificial Sequence
  Description of Artificial Sequence: Synthetic oligonucleotide
ccagauugaguguggcaug

SEQ ID NO: 1248059 - RNA, 19 nt, Artificial Sequence
  Description of Artificial Sequence: Synthetic oligonucleotide
guauauaguuugugucccu

SEQ ID NO: 1248060 - RNA, 19 nt, Artificial Sequence
  Description of Artificial Sequence: Synthetic oligonucleotide
aggacuacuaaggccccau

SEQ ID NO: 1248061 - RNA, 19 nt, Artificial Sequence
  Description of Artificial Sequence: Synthetic oligonucleotide
guagaggaaccagcgcuuc

SEQ ID NO: 1248062 - RNA, 19 nt, Artificial Sequence
  Description of Artificial Sequence: Synthetic oligonucleotide
caccggucagggaaguaca

SEQ ID NO: 1248063 - RNA, 19 nt, Artificial Sequence
  Description of Artificial Sequence: Synthetic oligonucleotide
ccuguuuggcuagccaagg

SEQ ID NO: 1248064 - RNA, 19 nt, Artificial Sequence
  Description of Artificial Sequence: Synthetic oligonucleotide
gguaagggugggcugaggu

SEQ ID NO: 1248065 - RNA, 19 nt, Artificial Sequence
  Description of Artificial Sequence: Synthetic oligonucleotide
ggucuuguugggguggaac

SEQ ID NO: 1248066 - RNA, 19 nt, Artificial Sequence
  Description of Artificial Sequence: Synthetic oligonucleotide
accuagcacaaguguuuau

SEQ ID NO: 1248067 - RNA, 19 nt, Artificial Sequence
  Description of Artificial Sequence: Synthetic oligonucleotide
uucccguuccagacauuuu

SEQ ID NO: 1248068 - RNA, 19 nt, Artificial Sequence
  Description of Artificial Sequence: Synthetic oligonucleotide
ugccuggcacucuggccca

SEQ ID NO: 1248069 - RNA, 19 nt, Artificial Sequence
  Description of Artificial Sequence: Synthetic oligonucleotide
aggcgguugaacacucuga

SEQ ID NO: 1248070 - RNA, 19 nt, Artificial Sequence
  Description of Artificial Sequence: Synthetic oligonucleotide
auccccaacuuggccauga

SEQ ID NO: 1248071 - RNA, 19 nt, Artificial Sequence
  Description of Artificial Sequence: Synthetic oligonucleotide
ggagggucuggaaacagaa

SEQ ID NO: 1248072 - RNA, 19 nt, Artificial Sequence
  Description of Artificial Sequence: Synthetic oligonucleotide
ugacuagcuucugguuaac

SEQ ID NO: 1248073 - RNA, 19 nt, Artificial Sequence
  Description of Artificial Sequence: Synthetic oligonucleotide
gcuuccgaccauaaaucac

SEQ ID NO: 1248074 - RNA, 19 nt, Artificial Sequence
  Description of Artificial Sequence: Synthetic oligonucleotide
ggucagggaaguacagcgc

SEQ ID NO: 1248075 - RNA, 19 nt, Artificial Sequence
  Description of Artificial Sequence: Synthetic oligonucleotide
agcacgugagggugccccu

SEQ ID NO: 1248076 - RNA, 19 nt, Artificial Sequence
  Description of Artificial Sequence: Synthetic oligonucleotide
cugagaaaccaggcccaug

SEQ ID NO: 1248077 - RNA, 19 nt, Artificial Sequence
  Description of Artificial Sequence: Synthetic oligonucleotide
uuaugaucgcaaggacauu

SEQ ID NO: 1248078 - RNA, 19 nt, Artificial Sequence
  Description of Artificial Sequence: Synthetic oligonucleotide
gguacauuccaagggccga

SEQ ID NO: 1248079 - RNA, 19 nt, Artificial Sequence
  Description of Artificial Sequence: Synthetic oligonucleotide
ccacucaguaaaguuguug

SEQ ID NO: 1248080 - RNA, 19 nt, Artificial Sequence
  Description of Artificial Sequence: Synthetic oligonucleotide
cacuguccuguaauaaagu

SEQ ID NO: 1248081 - RNA, 19 nt, Artificial Sequence
  Description of Artificial Sequence: Synthetic oligonucleotide
ugcagugggcuugccaguu

SEQ ID NO: 1248082 - RNA, 19 nt, Artificial Sequence
  Description of Artificial Sequence: Synthetic oligonucleotide
ccaugagccuccccugucc

SEQ ID NO: 1248083 - RNA, 19 nt, Artificial Sequence
  Description of Artificial Sequence: Synthetic oligonucleotide
ugcugccacuguccuguaa

SEQ ID NO: 1248084 - RNA, 19 nt, Artificial Sequence
  Description of Artificial Sequence: Synthetic oligonucleotide
guugcagcgugugggccac

SEQ ID NO: 1248085 - RNA, 19 nt, Artificial Sequence
  Description of Artificial Sequence: Synthetic oligonucleotide
gguggagaauaaugcugga

SEQ ID NO: 1248086 - RNA, 19 nt, Artificial Sequence
  Description of Artificial Sequence: Synthetic oligonucleotide
aggccaauguggucuuguu

SEQ ID NO: 1248087 - RNA, 19 nt, Artificial Sequence
  Description of Artificial Sequence: Synthetic oligonucleotide
guuaacccucagggaacug

SEQ ID NO: 1248088 - RNA, 19 nt, Artificial Sequence
  Description of Artificial Sequence: Synthetic oligonucleotide
cgaccauaaaucaccucug

SEQ ID NO: 1248089 - RNA, 19 nt, Artificial Sequence
  Description of Artificial Sequence: Synthetic oligonucleotide
gguugaacacucugacucu

SEQ ID NO: 1248090 - RNA, 19 nt, Artificial Sequence
  Description of Artificial Sequence: Synthetic oligonucleotide
cauugaggccaagcacgug

SEQ ID NO: 1248091 - RNA, 19 nt, Artificial Sequence
  Description of Artificial Sequence: Synthetic oligonucleotide
gcacuacauuggcaugugc

SEQ ID NO: 1248092 - RNA, 19 nt, Artificial Sequence
  Description of Artificial Sequence: Synthetic oligonucleotide
cuuggccaugaaggaaguc

SEQ ID NO: 1248093 - RNA, 19 nt, Artificial Sequence
  Description of Artificial Sequence: Synthetic oligonucleotide
cucaacucuacaggauaaa

SEQ ID NO: 1248094 - RNA, 19 nt, Artificial Sequence
  Description of Artificial Sequence: Synthetic oligonucleotide
ggguucugaacugcucccc

SEQ ID NO: 1248095 - RNA, 19 nt, Artificial Sequence
  Description of Artificial Sequence: Synthetic oligonucleotide
cuagggaugugggguccug

SEQ ID NO: 1248096 - RNA, 19 nt, Artificial Sequence
  Description of Artificial Sequence: Synthetic oligonucleotide
ccugauacucaggcgguug

SEQ ID NO: 1248097 - RNA, 19 nt, Artificial Sequence
  Description of Artificial Sequence: Synthetic oligonucleotide
gaggagcaccugauacuca

SEQ ID NO: 1248098 - RNA, 19 nt, Artificial Sequence
  Description of Artificial Sequence: Synthetic oligonucleotide
gucaccuagcacaaguguu

SEQ ID NO: 1248099 - RNA, 19 nt, Artificial Sequence
  Description of Artificial Sequence: Synthetic oligonucleotide
guggcaugccaccaccggu

SEQ ID NO: 1248100 - RNA, 19 nt, Artificial Sequence
  Description of Artificial Sequence: Synthetic oligonucleotide
gagauaucccugacuacuu

SEQ ID NO: 1248101 - RNA, 19 nt, Artificial Sequence
  Description of Artificial Sequence: Synthetic oligonucleotide
gcgcuuccgaccauaaauc

SEQ ID NO: 1248102 - RNA, 19 nt, Artificial Sequence
  Description of Artificial Sequence: Synthetic oligonucleotide
accccgugacccggagccc

SEQ ID NO: 1248103 - RNA, 19 nt, Artificial Sequence
  Description of Artificial Sequence: Synthetic oligonucleotide
gcugaugcgggagcccugc

SEQ ID NO: 1248104 - RNA, 19 nt, Artificial Sequence
  Description of Artificial Sequence: Synthetic oligonucleotide
ccacuuugaccccgugacc

SEQ ID NO: 1248105 - RNA, 19 nt, Artificial Sequence
  Description of Artificial Sequence: Synthetic oligonucleotide
gccaguggaaggguacccc

SEQ ID NO: 1248106 - RNA, 19 nt, Artificial Sequence
  Description of Artificial Sequence: Synthetic oligonucleotide
cugcaauuccaaagcugua

SEQ ID NO: 1248107 - RNA, 19 nt, Artificial Sequence
  Description of Artificial Sequence: Synthetic oligonucleotide
ugcuccccuucucggcauc

SEQ ID NO: 1248108 - RNA, 19 nt, Artificial Sequence
  Description of Artificial Sequence: Synthetic oligonucleotide
acgugagggugccccuagu

SEQ ID NO: 1248109 - RNA, 19 nt, Artificial Sequence
  Description of Artificial Sequence: Synthetic oligonucleotide
ccguuccagacauuuucuc

SEQ ID NO: 1248110 - RNA, 19 nt, Artificial Sequence
  Description of Artificial Sequence: Synthetic oligonucleotide
ccuaguccacauguggguc

SEQ ID NO: 1248111 - RNA, 19 nt, Artificial Sequence
  Description of Artificial Sequence: Synthetic oligonucleotide
cuguuggcccaugcaugac

SEQ ID NO: 1248112 - RNA, 19 nt, Artificial Sequence
  Description of Artificial Sequence: Synthetic oligonucleotide
ggccacuuugaccccguga

SEQ ID NO: 1248113 - RNA, 19 nt, Artificial Sequence
  Description of Artificial Sequence: Synthetic oligonucleotide
ggcccaugcaugacaugag

SEQ ID NO: 1248114 - RNA, 19 nt, Artificial Sequence
  Description of Artificial Sequence: Synthetic oligonucleotide
cccuguauauaguuugugu

SEQ ID NO: 1248115 - RNA, 19 nt, Artificial Sequence
  Description of Artificial Sequence: Synthetic oligonucleotide
cuccccuucucggcauccc

SEQ ID NO: 1248116 - RNA, 19 nt, Artificial Sequence
  Description of Artificial Sequence: Synthetic oligonucleotide
ccuagcacaaguguuuaua

SEQ ID NO: 1248117 - RNA, 19 nt, Artificial Sequence
  Description of Artificial Sequence: Synthetic oligonucleotide
ccaagcacgugagggugcc

SEQ ID NO: 1248118 - RNA, 19 nt, Artificial Sequence
  Description of Artificial Sequence: Synthetic oligonucleotide
aaccagcgcuuccgaccau

SEQ ID NO: 1248119 - RNA, 19 nt, Artificial Sequence
  Description of Artificial Sequence: Synthetic oligonucleotide
caccugauacucaggcggu

SEQ ID NO: 1248120 - RNA, 19 nt, Artificial Sequence
  Description of Artificial Sequence: Synthetic oligonucleotide
gcccuaguggacauaaggu

SEQ ID NO: 1248121 - RNA, 19 nt, Artificial Sequence
  Description of Artificial Sequence: Synthetic oligonucleotide
gugguucccaguagacgaa

SEQ ID NO: 1248122 - RNA, 19 nt, Artificial Sequence
  Description of Artificial Sequence: Synthetic oligonucleotide
gugcccuaguggacauaag

SEQ ID NO: 1248123 - RNA, 19 nt, Artificial Sequence
  Description of Artificial Sequence: Synthetic oligonucleotide
cccugacuacuuguguggc

SEQ ID NO: 1248124 - RNA, 19 nt, Artificial Sequence
  Description of Artificial Sequence: Synthetic oligonucleotide
gggguggaacucugguguc

SEQ ID NO: 1248125 - RNA, 19 nt, Artificial Sequence
  Description of Artificial Sequence: Synthetic oligonucleotide
auggggcuagggaugggua

SEQ ID NO: 1248126 - RNA, 19 nt, Artificial Sequence
  Description of Artificial Sequence: Synthetic oligonucleotide
accagcgcuuccgaccaua

SEQ ID NO: 1248127 - RNA, 19 nt, Artificial Sequence
  Description of Artificial Sequence: Synthetic oligonucleotide
caucccuugcugggccaug

SEQ ID NO: 1248128 - RNA, 19 nt, Artificial Sequence
  Description of Artificial Sequence: Synthetic oligonucleotide
caccuagcacaaguguuua

SEQ ID NO: 1248129 - RNA, 19 nt, Artificial Sequence
  Description of Artificial Sequence: Synthetic oligonucleotide
gcuguagaagcgagauauc

SEQ ID NO: 1248130 - RNA, 19 nt, Artificial Sequence
  Description of Artificial Sequence: Synthetic oligonucleotide
cagugguaucacuuaugau

SEQ ID NO: 1248131 - RNA, 19 nt, Artificial Sequence
  Description of Artificial Sequence: Synthetic oligonucleotide
ccugacuacuuguguggca

SEQ ID NO: 1248132 - RNA, 19 nt, Artificial Sequence
  Description of Artificial Sequence: Synthetic oligonucleotide
accugauacucaggcgguu

SEQ ID NO: 1248133 - RNA, 19 nt, Artificial Sequence
  Description of Artificial Sequence: Synthetic oligonucleotide
gccaagcacgugagggugc

SEQ ID NO: 1248134 - RNA, 19 nt, Artificial Sequence
  Description of Artificial Sequence: Synthetic oligonucleotide
gggugucauugccuaggga

SEQ ID NO: 1248135 - RNA, 19 nt, Artificial Sequence
  Description of Artificial Sequence: Synthetic oligonucleotide
gcccacucaguaaaguugu

SEQ ID NO: 1248136 - RNA, 19 nt, Artificial Sequence
  Description of Artificial Sequence: Synthetic oligonucleotide
gcuggugcagugggcuugc

SEQ ID NO: 1248137 - RNA, 19 nt, Artificial Sequence
  Description of Artificial Sequence: Synthetic oligonucleotide
cgagauaucccugacuacu

SEQ ID NO: 1248138 - RNA, 19 nt, Artificial Sequence
  Description of Artificial Sequence: Synthetic oligonucleotide
cagucccuguauauaguuu

SEQ ID NO: 1248139 - RNA, 19 nt, Artificial Sequence
  Description of Artificial Sequence: Synthetic oligonucleotide
cgugagggugccccuaguc

SEQ ID NO: 1248140 - RNA, 19 nt, Artificial Sequence
  Description of Artificial Sequence: Synthetic oligonucleotide
gcggguaagggugggcuga

SEQ ID NO: 1248141 - RNA, 19 nt, Artificial Sequence
  Description of Artificial Sequence: Synthetic oligonucleotide
gccgagcugauggggcuag

SEQ ID NO: 1248142 - RNA, 19 nt, Artificial Sequence
  Description of Artificial Sequence: Synthetic oligonucleotide
gcgguugaacacucugacu

SEQ ID NO: 1248143 - RNA, 19 nt, Artificial Sequence
  Description of Artificial Sequence: Synthetic oligonucleotide
ggugcccacucaguaaagu

SEQ ID NO: 1248144 - RNA, 19 nt, Artificial Sequence
  Description of Artificial Sequence: Synthetic oligonucleotide
ggaccaucacugacuagcu

SEQ ID NO: 1248145 - RNA, 19 nt, Artificial Sequence
  Description of Artificial Sequence: Synthetic oligonucleotide
gcuagccaaggaagguaga

SEQ ID NO: 1248146 - RNA, 19 nt, Artificial Sequence
  Description of Artificial Sequence: Synthetic oligonucleotide
caggccaauguggucuugu

SEQ ID NO: 1248147 - RNA, 19 nt, Artificial Sequence
  Description of Artificial Sequence: Synthetic oligonucleotide
gguagaggaaccagcgcuu

SEQ ID NO: 1248148 - RNA, 19 nt, Artificial Sequence
  Description of Artificial Sequence: Synthetic oligonucleotide
ggacuacuaaggccccaua

SEQ ID NO: 1248149 - RNA, 19 nt, Artificial Sequence
  Description of Artificial Sequence: Synthetic oligonucleotide
ccccauauccugccuggca

SEQ ID NO: 1248150 - RNA, 19 nt, Artificial Sequence
  Description of Artificial Sequence: Synthetic oligonucleotide
cuggugcagugggcuugcc

SEQ ID NO: 1248151 - RNA, 19 nt, Artificial Sequence
  Description of Artificial Sequence: Synthetic oligonucleotide
gcuccccuucucggcaucc

SEQ ID NO: 1248152 - RNA, 19 nt, Artificial Sequence
  Description of Artificial Sequence: Synthetic oligonucleotide
gcauugaggccaagcacgu

SEQ ID NO: 1248153 - RNA, 19 nt, Artificial Sequence
  Description of Artificial Sequence: Synthetic oligonucleotide
ggggcuagggauggguaua

SEQ ID NO: 1248154 - RNA, 19 nt, Artificial Sequence
  Description of Artificial Sequence: Synthetic oligonucleotide
cagcgcuuccgaccauaaa

SEQ ID NO: 1248155 - RNA, 19 nt, Artificial Sequence
  Description of Artificial Sequence: Synthetic oligonucleotide
ccagccuaugguggaucug

SEQ ID NO: 1248156 - RNA, 19 nt, Artificial Sequence
  Description of Artificial Sequence: Synthetic oligonucleotide
gcaucacacccagugguau

SEQ ID NO: 1248157 - RNA, 19 nt, Artificial Sequence
  Description of Artificial Sequence: Synthetic oligonucleotide
gggccacuuugaccccgug

SEQ ID NO: 1248158 - RNA, 19 nt, Artificial Sequence
  Description of Artificial Sequence: Synthetic oligonucleotide
gagugcccuaguggacaua

SEQ ID NO: 1248159 - RNA, 19 nt, Artificial Sequence
  Description of Artificial Sequence: Synthetic oligonucleotide
ccaugccaguggaagggua

SEQ ID NO: 1248160 - RNA, 19 nt, Artificial Sequence
  Description of Artificial Sequence: Synthetic oligonucleotide
uugcagcgugugggccacu

SEQ ID NO: 1248161 - RNA, 19 nt, Artificial Sequence
  Description of Artificial Sequence: Synthetic oligonucleotide
gcaugacaugagugcccua

SEQ ID NO: 1248162 - RNA, 19 nt, Artificial Sequence
  Description of Artificial Sequence: Synthetic oligonucleotide
cccgugacccggagcccuc

SEQ ID NO: 1248163 - RNA, 19 nt, Artificial Sequence
  Description of Artificial Sequence: Synthetic oligonucleotide
gggcuagggauggguauau

SEQ ID NO: 1248164 - RNA, 19 nt, Artificial Sequence
  Description of Artificial Sequence: Synthetic oligonucleotide
gcacgugagggugccccua

SEQ ID NO: 1248165 - RNA, 19 nt, Artificial Sequence
  Description of Artificial Sequence: Synthetic oligonucleotide
caccaccggucagggaagu

SEQ ID NO: 1248166 - RNA, 19 nt, Artificial Sequence
  Description of Artificial Sequence: Synthetic oligonucleotide
ggccgagcugauggggcua

SEQ ID NO: 1248167 - RNA, 19 nt, Artificial Sequence
  Description of Artificial Sequence: Synthetic oligonucleotide
cggagcccucugacccagg

SEQ ID NO: 1248168 - RNA, 19 nt, Artificial Sequence
  Description of Artificial Sequence: Synthetic oligonucleotide
gggugccccuaguccacau

SEQ ID NO: 1248169 - RNA, 19 nt, Artificial Sequence
  Description of Artificial Sequence: Synthetic oligonucleotide
gcagcgugugggccacuuu

SEQ ID NO: 1248170 - RNA, 19 nt, Artificial Sequence
  Description of Artificial Sequence: Synthetic oligonucleotide
gggaagggcucuggucuuu

SEQ ID NO: 1248171 - RNA, 19 nt, Artificial Sequence
  Description of Artificial Sequence: Synthetic oligonucleotide
ccccuucucggcaucccuu

SEQ ID NO: 1248172 - RNA, 19 nt, Artificial Sequence
  Description of Artificial Sequence: Synthetic oligonucleotide
ccuagggaugugggguccu

SEQ ID NO: 1248173 - RNA, 19 nt, Artificial Sequence
  Description of Artificial Sequence: Synthetic oligonucleotide
ggcuagggauggguauauu

SEQ ID NO: 1248174 - RNA, 19 nt, Artificial Sequence
  Description of Artificial Sequence: Synthetic oligonucleotide
ccacgagggugaugaggau

SEQ ID NO: 1248175 - RNA, 19 nt, Artificial Sequence
  Description of Artificial Sequence: Synthetic oligonucleotide
ccccgugacccggagcccu

SEQ ID NO: 1248176 - RNA, 19 nt, Artificial Sequence
  Description of Artificial Sequence: Synthetic oligonucleotide
cgaaacggagguggagaau

SEQ ID NO: 1248177 - RNA, 19 nt, Artificial Sequence
  Description of Artificial Sequence: Synthetic oligonucleotide
ggcuugccaguugccuguu

SEQ ID NO: 1248178 - RNA, 19 nt, Artificial Sequence
  Description of Artificial Sequence: Synthetic oligonucleotide
gcggaaccacgagggugau

SEQ ID NO: 1248179 - RNA, 19 nt, Artificial Sequence
  Description of Artificial Sequence: Synthetic oligonucleotide
gcccugcaucacacccagu

SEQ ID NO: 1248180 - RNA, 19 nt, Artificial Sequence
  Description of Artificial Sequence: Synthetic oligonucleotide
ccgugacccggagcccucu

SEQ ID NO: 1248181 - RNA, 19 nt, Artificial Sequence
  Description of Artificial Sequence: Synthetic oligonucleotide
agaauuaggauguauggcc

SEQ ID NO: 1248182 - RNA, 19 nt, Artificial Sequence
  Description of Artificial Sequence: Synthetic oligonucleotide
uuuauaagagucaccaggg

SEQ ID NO: 1248183 - RNA, 19 nt, Artificial Sequence
  Description of Artificial Sequence: Synthetic oligonucleotide
aucagcaccgaccugagcc

SEQ ID NO: 1248184 - RNA, 19 nt, Artificial Sequence
  Description of Artificial Sequence: Synthetic oligonucleotide
agauguagaacucuggauc

SEQ ID NO: 1248185 - RNA, 19 nt, Artificial Sequence
  Description of Artificial Sequence: Synthetic oligonucleotide
gaacuuuggacuuuuaagc

SEQ ID NO: 1248186 - RNA, 19 nt, Artificial Sequence
  Description of Artificial Sequence: Synthetic oligonucleotide
ugaacuuuggacuuuuaag

SEQ ID NO: 1248187 - RNA, 19 nt, Artificial Sequence
  Description of Artificial Sequence: Synthetic oligonucleotide
auggcuauaaaccuauggg

SEQ ID NO: 1248188 - RNA, 19 nt, Artificial Sequence
  Description of Artificial Sequence: Synthetic oligonucleotide
aaccacugcguccacaggc

SEQ ID NO: 1248189 - RNA, 19 nt, Artificial Sequence
  Description of Artificial Sequence: Synthetic oligonucleotide
aagcccuaauuccuaaugc

SEQ ID NO: 1248190 - RNA, 19 nt, Artificial Sequence
  Description of Artificial Sequence: Synthetic oligonucleotide
gaaacucuccaguagagcc

SEQ ID NO: 1248191 - RNA, 19 nt, Artificial Sequence
  Description of Artificial Sequence: Synthetic oligonucleotide
uggacuaaaugcauuuugg

SEQ ID NO: 1248192 - RNA, 19 nt, Artificial Sequence
  Description of Artificial Sequence: Synthetic oligonucleotide
uuuaugccaaugauauucg

SEQ ID NO: 1248193 - RNA, 19 nt, Artificial Sequence
  Description of Artificial Sequence: Synthetic oligonucleotide
uggcuauaaaccuaugggg

SEQ ID NO: 1248194 - RNA, 19 nt, Artificial Sequence
  Description of Artificial Sequence: Synthetic oligonucleotide
aacaauagaacagugacua

SEQ ID NO: 1248195 - RNA, 19 nt, Artificial Sequence
  Description of Artificial Sequence: Synthetic oligonucleotide
uccuuuaugccaaugauau

SEQ ID NO: 1248196 - RNA, 19 nt, Artificial Sequence
  Description of Artificial Sequence: Synthetic oligonucleotide
aacugacccagccaacacc

SEQ ID NO: 1248197 - RNA, 19 nt, Artificial Sequence
  Description of Artificial Sequence: Synthetic oligonucleotide
agaacagugacuaagacaa

SEQ ID NO: 1248198 - RNA, 19 nt, Artificial Sequence
  Description of Artificial Sequence: Synthetic oligonucleotide
gauaguaacaaggagucac

SEQ ID NO: 1248199 - RNA, 19 nt, Artificial Sequence
  Description of Artificial Sequence: Synthetic oligonucleotide
acuaaaugcauuuuggauu

SEQ ID NO: 1248200 - RNA, 19 nt, Artificial Sequence
  Description of Artificial Sequence: Synthetic oligonucleotide
ggcuccuacauuuaaaugg

SEQ ID NO: 1248201 - RNA, 19 nt, Artificial Sequence
  Description of Artificial Sequence: Synthetic oligonucleotide
uuaagcagucuugagauug

SEQ ID NO: 1248202 - RNA, 19 nt, Artificial Sequence
  Description of Artificial Sequence: Synthetic oligonucleotide
cuucacaacaauagaacag

SEQ ID NO: 1248203 - RNA, 19 nt, Artificial Sequence
  Description of Artificial Sequence: Synthetic oligonucleotide
agaucagcgaccuuggugu

SEQ ID NO: 1248204 - RNA, 19 nt, Artificial Sequence
  Description of Artificial Sequence: Synthetic oligonucleotide
guugcugaaauccaagcgc

SEQ ID NO: 1248205 - RNA, 19 nt, Artificial Sequence
  Description of Artificial Sequence: Synthetic oligonucleotide
acuauuugaaagaauuagg

SEQ ID NO: 1248206 - RNA, 19 nt, Artificial Sequence
  Description of Artificial Sequence: Synthetic oligonucleotide
uggacucgcagccagagcc

SEQ ID NO: 1248207 - RNA, 19 nt, Artificial Sequence
  Description of Artificial Sequence: Synthetic oligonucleotide
ucuucacaacaauagaaca

SEQ ID NO: 1248208 - RNA, 19 nt, Artificial Sequence
  Description of Artificial Sequence: Synthetic oligonucleotide
uuggauuauaauauggcua

SEQ ID NO: 1248209 - RNA, 19 nt, Artificial Sequence
  Description of Artificial Sequence: Synthetic oligonucleotide
auuuuggauuauaauaugg

SEQ ID NO: 1248210 - RNA, 19 nt, Artificial Sequence
  Description of Artificial Sequence: Synthetic oligonucleotide
uuggagaaagaucagcgac

SEQ ID NO: 1248211 - RNA, 19 nt, Artificial Sequence
  Description of Artificial Sequence: Synthetic oligonucleotide
agcccuaauuccuaaugcc

SEQ ID NO: 1248212 - RNA, 19 nt, Artificial Sequence
  Description of Artificial Sequence: Synthetic oligonucleotide
uggauuauaauauggcuau

SEQ ID NO: 1248213 - RNA, 19 nt, Artificial Sequence
  Description of Artificial Sequence: Synthetic oligonucleotide
ugagacaacguaaccacug

SEQ ID NO: 1248214 - RNA, 19 nt, Artificial Sequence
  Description of Artificial Sequence: Synthetic oligonucleotide
ugucacaucgccaccacug

SEQ ID NO: 1248215 - RNA, 19 nt, Artificial Sequence
  Description of Artificial Sequence: Synthetic oligonucleotide
gauugugauggacuauggg

SEQ ID NO: 1248216 - RNA, 19 nt, Artificial Sequence
  Description of Artificial Sequence: Synthetic oligonucleotide
aucacgaagccucggaagg

SEQ ID NO: 1248217 - RNA, 19 nt, Artificial Sequence
  Description of Artificial Sequence: Synthetic oligonucleotide
agagccggcuaucaggagc

SEQ ID NO: 1248218 - RNA, 19 nt, Artificial Sequence
  Description of Artificial Sequence: Synthetic oligonucleotide
uagaacagugacuaagaca

SEQ ID NO: 1248219 - RNA, 19 nt, Artificial Sequence
  Description of Artificial Sequence: Synthetic oligonucleotide
uccaugguuuucuucagcc

SEQ ID NO: 1248220 - RNA, 19 nt, Artificial Sequence
  Description of Artificial Sequence: Synthetic oligonucleotide
aaugauauucgggugcuga

SEQ ID NO: 1248221 - RNA, 19 nt, Artificial Sequence
  Description of Artificial Sequence: Synthetic oligonucleotide
ucuugugaaccauuagccc

SEQ ID NO: 1248222 - RNA, 19 nt, Artificial Sequence
  Description of Artificial Sequence: Synthetic oligonucleotide
cuugcuagucuugugaacc

SEQ ID NO: 1248223 - RNA, 19 nt, Artificial Sequence
  Description of Artificial Sequence: Synthetic oligonucleotide
acgauaguaacaaggaguc

SEQ ID NO: 1248224 - RNA, 19 nt, Artificial Sequence
  Description of Artificial Sequence: Synthetic oligonucleotide
acaacguaaccacugcguc

SEQ ID NO: 1248225 - RNA, 19 nt, Artificial Sequence
  Description of Artificial Sequence: Synthetic oligonucleotide
guuauggguggguagauac

SEQ ID NO: 1248226 - RNA, 19 nt, Artificial Sequence
  Description of Artificial Sequence: Synthetic oligonucleotide
gaaacuguaagcccgccuc

SEQ ID NO: 1248227 - RNA, 19 nt, Artificial Sequence
  Description of Artificial Sequence: Synthetic oligonucleotide
augccaaugauauucgggu

SEQ ID NO: 1248228 - RNA, 19 nt, Artificial Sequence
  Description of Artificial Sequence: Synthetic oligonucleotide
uuuaaaugguuagggaaug

SEQ ID NO: 1248229 - RNA, 19 nt, Artificial Sequence
  Description of Artificial Sequence: Synthetic oligonucleotide
ggagucaccaccaugacag

SEQ ID NO: 1248230 - RNA, 19 nt, Artificial Sequence
  Description of Artificial Sequence: Synthetic oligonucleotide
acagugacuaagacaagcc

SEQ ID NO: 1248231 - RNA, 19 nt, Artificial Sequence
  Description of Artificial Sequence: Synthetic oligonucleotide
auuguacaacaccacuggg

SEQ ID NO: 1248232 - RNA, 19 nt, Artificial Sequence
  Description of Artificial Sequence: Synthetic oligonucleotide
cuugaguggacucgcagcc

SEQ ID NO: 1248233 - RNA, 19 nt, Artificial Sequence
  Description of Artificial Sequence: Synthetic oligonucleotide
uuucccguagucuaccucu

SEQ ID NO: 1248234 - RNA, 19 nt, Artificial Sequence
  Description of Artificial Sequence: Synthetic oligonucleotide
aggauguauggccuuauug

SEQ ID NO: 1248235 - RNA, 19 nt, Artificial Sequence
  Description of Artificial Sequence: Synthetic oligonucleotide
acuaugggaacuuuugaaa

SEQ ID NO: 1248236 - RNA, 19 nt, Artificial Sequence
  Description of Artificial Sequence: Synthetic oligonucleotide
aaggcgcugaguuuauuca

SEQ ID NO: 1248237 - RNA, 19 nt, Artificial Sequence
  Description of Artificial Sequence: Synthetic oligonucleotide
uaaaugguuagggaauggc

SEQ ID NO: 1248238 - RNA, 19 nt, Artificial Sequence
  Description of Artificial Sequence: Synthetic oligonucleotide
uuaaaugguuagggaaugg

SEQ ID NO: 1248239 - RNA, 19 nt, Artificial Sequence
  Description of Artificial Sequence: Synthetic oligonucleotide
cuugaguaagaauggcccc

SEQ ID NO: 1248240 - RNA, 19 nt, Artificial Sequence
  Description of Artificial Sequence: Synthetic oligonucleotide
ugucuauggccacagggga

SEQ ID NO: 1248241 - RNA, 19 nt, Artificial Sequence
  Description of Artificial Sequence: Synthetic oligonucleotide
uagucuaccucugcggugg

SEQ ID NO: 1248242 - RNA, 19 nt, Artificial Sequence
  Description of Artificial Sequence: Synthetic oligonucleotide
aacguaaccacugcgucca

SEQ ID NO: 1248243 - RNA, 19 nt, Artificial Sequence
  Description of Artificial Sequence: Synthetic oligonucleotide
aaauccugcuugcuagucu

SEQ ID NO: 1248244 - RNA, 19 nt, Artificial Sequence
  Description of Artificial Sequence: Synthetic oligonucleotide
gaagagauuuugaacuuug

SEQ ID NO: 1248245 - RNA, 19 nt, Artificial Sequence
  Description of Artificial Sequence: Synthetic oligonucleotide
auuagcccaauccuuguca

SEQ ID NO: 1248246 - RNA, 19 nt, Artificial Sequence
  Description of Artificial Sequence: Synthetic oligonucleotide
cugacggucaucucuacug

SEQ ID NO: 1248247 - RNA, 19 nt, Artificial Sequence
  Description of Artificial Sequence: Synthetic oligonucleotide
uggaaacucuccaguagag

SEQ ID NO: 1248248 - RNA, 19 nt, Artificial Sequence
  Description of Artificial Sequence: Synthetic oligonucleotide
uuaugccaaugauauucgg

SEQ ID NO: 1248249 - RNA, 19 nt, Artificial Sequence
  Description of Artificial Sequence: Synthetic oligonucleotide
accggcaaugucuaucuuc

SEQ ID NO: 1248250 - RNA, 19 nt, Artificial Sequence
  Description of Artificial Sequence: Synthetic oligonucleotide
aaaugguuagggaauggca

SEQ ID NO: 1248251 - RNA, 19 nt, Artificial Sequence
  Description of Artificial Sequence: Synthetic oligonucleotide
cuugugaaccauuagccca

SEQ ID NO: 1248252 - RNA, 19 nt, Artificial Sequence
  Description of Artificial Sequence: Synthetic oligonucleotide
gucuugugaaccauuagcc

SEQ ID NO: 1248253 - RNA, 19 nt, Artificial Sequence
  Description of Artificial Sequence: Synthetic oligonucleotide
uauaaaccuauggggagcc

SEQ ID NO: 1248254 - RNA, 19 nt, Artificial Sequence
  Description of Artificial Sequence: Synthetic oligonucleotide
aaggagucaccaccaugac

SEQ ID NO: 1248255 - RNA, 19 nt, Artificial Sequence
  Description of Artificial Sequence: Synthetic oligonucleotide
uguggaucuagauguagaa

SEQ ID NO: 1248256 - RNA, 19 nt, Artificial Sequence
  Description of Artificial Sequence: Synthetic oligonucleotide
aagagauuuugaacuuugg

SEQ ID NO: 1248257 - RNA, 19 nt, Artificial Sequence
  Description of Artificial Sequence: Synthetic oligonucleotide
cuugguguaguggugaaug

SEQ ID NO: 1248258 - RNA, 19 nt, Artificial Sequence
  Description of Artificial Sequence: Synthetic oligonucleotide
caaggagucaccaccauga

SEQ ID NO: 1248259 - RNA, 19 nt, Artificial Sequence
  Description of Artificial Sequence: Synthetic oligonucleotide
ucuagcccuguguuggccg

SEQ ID NO: 1248260 - RNA, 19 nt, Artificial Sequence
  Description of Artificial Sequence: Synthetic oligonucleotide
ucuaccucugcgguggcgg

SEQ ID NO: 1248261 - RNA, 19 nt, Artificial Sequence
  Description of Artificial Sequence: Synthetic oligonucleotide
ugagccaugcugacgguca

SEQ ID NO: 1248262 - RNA, 19 nt, Artificial Sequence
  Description of Artificial Sequence: Synthetic oligonucleotide
uaaaccuauggggagccag

SEQ ID NO: 1248263 - RNA, 19 nt, Artificial Sequence
  Description of Artificial Sequence: Synthetic oligonucleotide
uuggccgggacauuguaca

SEQ ID NO: 1248264 - RNA, 19 nt, Artificial Sequence
  Description of Artificial Sequence: Synthetic oligonucleotide
uuuugaaauuggacuaaau

SEQ ID NO: 1248265 - RNA, 19 nt, Artificial Sequence
  Description of Artificial Sequence: Synthetic oligonucleotide
uguggcuugaguggacucg

SEQ ID NO: 1248266 - RNA, 19 nt, Artificial Sequence
  Description of Artificial Sequence: Synthetic oligonucleotide
gauguauggccuuauugaa

SEQ ID NO: 1248267 - RNA, 19 nt, Artificial Sequence
  Description of Artificial Sequence: Synthetic oligonucleotide
ugugggaacagaaguccca

SEQ ID NO: 1248268 - RNA, 19 nt, Artificial Sequence
  Description of Artificial Sequence: Synthetic oligonucleotide
acgacaggggccuccauag

SEQ ID NO: 1248269 - RNA, 19 nt, Artificial Sequence
  Description of Artificial Sequence: Synthetic oligonucleotide
uuagggaauggcacuauuu

SEQ ID NO: 1248270 - RNA, 19 nt, Artificial Sequence
  Description of Artificial Sequence: Synthetic oligonucleotide
ggauguauggccuuauuga

SEQ ID NO: 1248271 - RNA, 19 nt, Artificial Sequence
  Description of Artificial Sequence: Synthetic oligonucleotide
gagacaacguaaccacugc

SEQ ID NO: 1248272 - RNA, 19 nt, Artificial Sequence
  Description of Artificial Sequence: Synthetic oligonucleotide
cuauaaaccuauggggagc

SEQ ID NO: 1248273 - RNA, 19 nt, Artificial Sequence
  Description of Artificial Sequence: Synthetic oligonucleotide
agagcccuggaucacgaag

SEQ ID NO: 1248274 - RNA, 19 nt, Artificial Sequence
  Description of Artificial Sequence: Synthetic oligonucleotide
uauucgggugcugagacaa

SEQ ID NO: 1248275 - RNA, 19 nt, Artificial Sequence
  Description of Artificial Sequence: Synthetic oligonucleotide
agugacuaagacaagcccu

SEQ ID NO: 1248276 - RNA, 19 nt, Artificial Sequence
  Description of Artificial Sequence: Synthetic oligonucleotide
gacuaugggaacuuuugaa

SEQ ID NO: 1248277 - RNA, 19 nt, Artificial Sequence
  Description of Artificial Sequence: Synthetic oligonucleotide
uaggcuccuacauuuaaau

SEQ ID NO: 1248278 - RNA, 19 nt, Artificial Sequence
  Description of Artificial Sequence: Synthetic oligonucleotide
uguagaacucuggauccag

SEQ ID NO: 1248279 - RNA, 19 nt, Artificial Sequence
  Description of Artificial Sequence: Synthetic oligonucleotide
augauauucgggugcugag

SEQ ID NO: 1248280 - RNA, 19 nt, Artificial Sequence
  Description of Artificial Sequence: Synthetic oligonucleotide
auaccggcaaugucuaucu

SEQ ID NO: 1248281 - RNA, 19 nt, Artificial Sequence
  Description of Artificial Sequence: Synthetic oligonucleotide
ucuauggccacaggggagc

SEQ ID NO: 1248282 - RNA, 19 nt, Artificial Sequence
  Description of Artificial Sequence: Synthetic oligonucleotide
gcuauaaaccuauggggag

SEQ ID NO: 1248283 - RNA, 19 nt, Artificial Sequence
  Description of Artificial Sequence: Synthetic oligonucleotide
cagugacuaagacaagccc

SEQ ID NO: 1248284 - RNA, 19 nt, Artificial Sequence
  Description of Artificial Sequence: Synthetic oligonucleotide
uucgggugcugagacaacg

SEQ ID NO: 1248285 - RNA, 19 nt, Artificial Sequence
  Description of Artificial Sequence: Synthetic oligonucleotide
agucccaauggcuuucucu

SEQ ID NO: 1248286 - RNA, 19 nt, Artificial Sequence
  Description of Artificial Sequence: Synthetic oligonucleotide
caacguaaccacugcgucc

SEQ ID NO: 1248287 - RNA, 19 nt, Artificial Sequence
  Description of Artificial Sequence: Synthetic oligonucleotide
caagcccuaauuccuaaug

SEQ ID NO: 1248288 - RNA, 19 nt, Artificial Sequence
  Description of Artificial Sequence: Synthetic oligonucleotide
ugaaagaauuaggauguau

SEQ ID NO: 1248289 - RNA, 19 nt, Artificial Sequence
  Description of Artificial Sequence: Synthetic oligonucleotide
ucgcauuccuagacaagcc

SEQ ID NO: 1248290 - RNA, 19 nt, Artificial Sequence
  Description of Artificial Sequence: Synthetic oligonucleotide
uguaagcccgccucaauua

SEQ ID NO: 1248291 - RNA, 19 nt, Artificial Sequence
  Description of Artificial Sequence: Synthetic oligonucleotide
agggucauggugucucuuc

SEQ ID NO: 1248292 - RNA, 19 nt, Artificial Sequence
  Description of Artificial Sequence: Synthetic oligonucleotide
gacuaaaugcauuuuggau

SEQ ID NO: 1248293 - RNA, 19 nt, Artificial Sequence
  Description of Artificial Sequence: Synthetic oligonucleotide
gccucaauuaaauacuuuc

SEQ ID NO: 1248294 - RNA, 19 nt, Artificial Sequence
  Description of Artificial Sequence: Synthetic oligonucleotide
cacgauaguaacaaggagu

SEQ ID NO: 1248295 - RNA, 19 nt, Artificial Sequence
  Description of Artificial Sequence: Synthetic oligonucleotide
augguuagggaauggcacu

SEQ ID NO: 1248296 - RNA, 19 nt, Artificial Sequence
  Description of Artificial Sequence: Synthetic oligonucleotide
cuagacaagccccugcuca

SEQ ID NO: 1248297 - RNA, 19 nt, Artificial Sequence
  Description of Artificial Sequence: Synthetic oligonucleotide
aaagcgccgggucaccgca

SEQ ID NO: 1248298 - RNA, 19 nt, Artificial Sequence
  Description of Artificial Sequence: Synthetic oligonucleotide
gaaccauuagcccaauccu

SEQ ID NO: 1248299 - RNA, 19 nt, Artificial Sequence
  Description of Artificial Sequence: Synthetic oligonucleotide
ugguguaguggugaaugag

SEQ ID NO: 1248300 - RNA, 19 nt, Artificial Sequence
  Description of Artificial Sequence: Synthetic oligonucleotide
uggaucacgaagccucgga

SEQ ID NO: 1248301 - RNA, 19 nt, Artificial Sequence
  Description of Artificial Sequence: Synthetic oligonucleotide
guagauaccggcaaugucu

SEQ ID NO: 1248302 - RNA, 19 nt, Artificial Sequence
  Description of Artificial Sequence: Synthetic oligonucleotide
ucuacaggcugugggaaca

SEQ ID NO: 1248303 - RNA, 19 nt, Artificial Sequence
  Description of Artificial Sequence: Synthetic oligonucleotide
ugcguccacaggcaggucu

SEQ ID NO: 1248304 - RNA, 19 nt, Artificial Sequence
  Description of Artificial Sequence: Synthetic oligonucleotide
cacaacaauagaacaguga

SEQ ID NO: 1248305 - RNA, 19 nt, Artificial Sequence
  Description of Artificial Sequence: Synthetic oligonucleotide
gauaccggcaaugucuauc

SEQ ID NO: 1248306 - RNA, 19 nt, Artificial Sequence
  Description of Artificial Sequence: Synthetic oligonucleotide
caaaagcccaagccagucc

SEQ ID NO: 1248307 - RNA, 19 nt, Artificial Sequence
  Description of Artificial Sequence: Synthetic oligonucleotide
uagauaccggcaaugucua

SEQ ID NO: 1248308 - RNA, 19 nt, Artificial Sequence
  Description of Artificial Sequence: Synthetic oligonucleotide
ugggcagcuucccacugcc

SEQ ID NO: 1248309 - RNA, 19 nt, Artificial Sequence
  Description of Artificial Sequence: Synthetic oligonucleotide
aaagaucagcgaccuuggu

SEQ ID NO: 1248310 - RNA, 19 nt, Artificial Sequence
  Description of Artificial Sequence: Synthetic oligonucleotide
ugacggucaucucuacugu

SEQ ID NO: 1248311 - RNA, 19 nt, Artificial Sequence
  Description of Artificial Sequence: Synthetic oligonucleotide
aauccuugucacaucgcca

SEQ ID NO: 1248312 - RNA, 19 nt, Artificial Sequence
  Description of Artificial Sequence: Synthetic oligonucleotide
uuuggacuuuuaagcaguc

SEQ ID NO: 1248313 - RNA, 19 nt, Artificial Sequence
  Description of Artificial Sequence: Synthetic oligonucleotide
agccauuguugcugaaauc

SEQ ID NO: 1248314 - RNA, 19 nt, Artificial Sequence
  Description of Artificial Sequence: Synthetic oligonucleotide
cugcacgccaccaugcuuc

SEQ ID NO: 1248315 - RNA, 19 nt, Artificial Sequence
  Description of Artificial Sequence: Synthetic oligonucleotide
accgaccugagccaugcug

SEQ ID NO: 1248316 - RNA, 19 nt, Artificial Sequence
  Description of Artificial Sequence: Synthetic oligonucleotide
acggucaucucuacugugg

SEQ ID NO: 1248317 - RNA, 19 nt, Artificial Sequence
  Description of Artificial Sequence: Synthetic oligonucleotide
gagcccuggaucacgaagc

SEQ ID NO: 1248318 - RNA, 19 nt, Artificial Sequence
  Description of Artificial Sequence: Synthetic oligonucleotide
agccaaaccaguccauggu

SEQ ID NO: 1248319 - RNA, 19 nt, Artificial Sequence
  Description of Artificial Sequence: Synthetic oligonucleotide
accauuagcccaauccuug

SEQ ID NO: 1248320 - RNA, 19 nt, Artificial Sequence
  Description of Artificial Sequence: Synthetic oligonucleotide
agauugugauggacuaugg

SEQ ID NO: 1248321 - RNA, 19 nt, Artificial Sequence
  Description of Artificial Sequence: Synthetic oligonucleotide
uugcuagucuugugaacca

SEQ ID NO: 1248322 - RNA, 19 nt, Artificial Sequence
  Description of Artificial Sequence: Synthetic oligonucleotide
uugguguaguggugaauga

SEQ ID NO: 1248323 - RNA, 19 nt, Artificial Sequence
  Description of Artificial Sequence: Synthetic oligonucleotide
aggcuccuacauuuaaaug

SEQ ID NO: 1248324 - RNA, 19 nt, Artificial Sequence
  Description of Artificial Sequence: Synthetic oligonucleotide
agccaacugacccagccaa

SEQ ID NO: 1248325 - RNA, 19 nt, Artificial Sequence
  Description of Artificial Sequence: Synthetic oligonucleotide
ccuauggggagccagggag

SEQ ID NO: 1248326 - RNA, 19 nt, Artificial Sequence
  Description of Artificial Sequence: Synthetic oligonucleotide
agguuuucaaaagcccaag

SEQ ID NO: 1248327 - RNA, 19 nt, Artificial Sequence
  Description of Artificial Sequence: Synthetic oligonucleotide
aaggcucagacgagguguc

SEQ ID NO: 1248328 - RNA, 19 nt, Artificial Sequence
  Description of Artificial Sequence: Synthetic oligonucleotide
aacaaggagucaccaccau

SEQ ID NO: 1248329 - RNA, 19 nt, Artificial Sequence
  Description of Artificial Sequence: Synthetic oligonucleotide
aagccucggaaggggaagg

SEQ ID NO: 1248330 - RNA, 19 nt, Artificial Sequence
  Description of Artificial Sequence: Synthetic oligonucleotide
aggaagugugucauuggag

SEQ ID NO: 1248331 - RNA, 19 nt, Artificial Sequence
  Description of Artificial Sequence: Synthetic oligonucleotide
aggagucaccaccaugaca

SEQ ID NO: 1248332 - RNA, 19 nt, Artificial Sequence
  Description of Artificial Sequence: Synthetic oligonucleotide
gacggucaucucuacugug

SEQ ID NO: 1248333 - RNA, 19 nt, Artificial Sequence
  Description of Artificial Sequence: Synthetic oligonucleotide
gggacauuguacaacacca

SEQ ID NO: 1248334 - RNA, 19 nt, Artificial Sequence
  Description of Artificial Sequence: Synthetic oligonucleotide
gccccuaagacauuggcca

SEQ ID NO: 1248335 - RNA, 19 nt, Artificial Sequence
  Description of Artificial Sequence: Synthetic oligonucleotide
aagugugucauuggaggua

SEQ ID NO: 1248336 - RNA, 19 nt, Artificial Sequence
  Description of Artificial Sequence: Synthetic oligonucleotide
guagucuaccucugcggug

SEQ ID NO: 1248337 - RNA, 19 nt, Artificial Sequence
  Description of Artificial Sequence: Synthetic oligonucleotide
ggacuaaaugcauuuugga

SEQ ID NO: 1248338 - RNA, 19 nt, Artificial Sequence
  Description of Artificial Sequence: Synthetic oligonucleotide
ggcuauaaaccuaugggga

SEQ ID NO: 1248339 - RNA, 19 nt, Artificial Sequence
  Description of Artificial Sequence: Synthetic oligonucleotide
aggcgcucgaugcugguca

SEQ ID NO: 1248340 - RNA, 19 nt, Artificial Sequence
  Description of Artificial Sequence: Synthetic oligonucleotide
ggauuggagaaagaucagc

SEQ ID NO: 1248341 - RNA, 19 nt, Artificial Sequence
  Description of Artificial Sequence: Synthetic oligonucleotide
ugauggcuugaguaagaau

SEQ ID NO: 1248342 - RNA, 19 nt, Artificial Sequence
  Description of Artificial Sequence: Synthetic oligonucleotide
augcggccacgauaguaac

SEQ ID NO: 1248343 - RNA, 19 nt, Artificial Sequence
  Description of Artificial Sequence: Synthetic oligonucleotide
gcucaugcggccacgauag

SEQ ID NO: 1248344 - RNA, 19 nt, Artificial Sequence
  Description of Artificial Sequence: Synthetic oligonucleotide
aaccauuagcccaauccuu

SEQ ID NO: 1248345 - RNA, 19 nt, Artificial Sequence
  Description of Artificial Sequence: Synthetic oligonucleotide
caugcggccacgauaguaa

SEQ ID NO: 1248346 - RNA, 19 nt, Artificial Sequence
  Description of Artificial Sequence: Synthetic oligonucleotide
uagacaagccccugcucaa

SEQ ID NO: 1248347 - RNA, 19 nt, Artificial Sequence
  Description of Artificial Sequence: Synthetic oligonucleotide
gaauuaggauguauggccu

SEQ ID NO: 1248348 - RNA, 19 nt, Artificial Sequence
  Description of Artificial Sequence: Synthetic oligonucleotide
caccacuguccuuuaugcc

SEQ ID NO: 1248349 - RNA, 19 nt, Artificial Sequence
  Description of Artificial Sequence: Synthetic oligonucleotide
uugggcucgaugaggcggu

SEQ ID NO: 1248350 - RNA, 19 nt, Artificial Sequence
  Description of Artificial Sequence: Synthetic oligonucleotide
acaauagaacagugacuaa

SEQ ID NO: 1248351 - RNA, 19 nt, Artificial Sequence
  Description of Artificial Sequence: Synthetic oligonucleotide
ucagcgaccuugguguagu

SEQ ID NO: 1248352 - RNA, 19 nt, Artificial Sequence
  Description of Artificial Sequence: Synthetic oligonucleotide
guagccaaaccaguccaug

SEQ ID NO: 1248353 - RNA, 19 nt, Artificial Sequence
  Description of Artificial Sequence: Synthetic oligonucleotide
acugcguccacaggcaggu

SEQ ID NO: 1248354 - RNA, 19 nt, Artificial Sequence
  Description of Artificial Sequence: Synthetic oligonucleotide
caugguuuucuucagcccu

SEQ ID NO: 1248355 - RNA, 19 nt, Artificial Sequence
  Description of Artificial Sequence: Synthetic oligonucleotide
uaagcccgccucaauuaaa

SEQ ID NO: 1248356 - RNA, 19 nt, Artificial Sequence
  Description of Artificial Sequence: Synthetic oligonucleotide
ugggccccuaagacauugg

SEQ ID NO: 1248357 - RNA, 19 nt, Artificial Sequence
  Description of Artificial Sequence: Synthetic oligonucleotide
ugcggccacgauaguaaca

SEQ ID NO: 1248358 - RNA, 19 nt, Artificial Sequence
  Description of Artificial Sequence: Synthetic oligonucleotide
gaaauccugcuugcuaguc

SEQ ID NO: 1248359 - RNA, 19 nt, Artificial Sequence
  Description of Artificial Sequence: Synthetic oligonucleotide
uucccguagucuaccucug

SEQ ID NO: 1248360 - RNA, 19 nt, Artificial Sequence
  Description of Artificial Sequence: Synthetic oligonucleotide
caaccccugccucauggag

SEQ ID NO: 1248361 - RNA, 19 nt, Artificial Sequence
  Description of Artificial Sequence: Synthetic oligonucleotide
ucgggugcugagacaacgu

SEQ ID NO: 1248362 - RNA, 19 nt, Artificial Sequence
  Description of Artificial Sequence: Synthetic oligonucleotide
cuaugggaacuuuugaaau

SEQ ID NO: 1248363 - RNA, 19 nt, Artificial Sequence
  Description of Artificial Sequence: Synthetic oligonucleotide
agcgaccuugguguagugg

SEQ ID NO: 1248364 - RNA, 19 nt, Artificial Sequence
  Description of Artificial Sequence: Synthetic oligonucleotide
gcuaucaggagcuuguccu

SEQ ID NO: 1248365 - RNA, 19 nt, Artificial Sequence
  Description of Artificial Sequence: Synthetic oligonucleotide
auauucgggugcugagaca

SEQ ID NO: 1248366 - RNA, 19 nt, Artificial Sequence
  Description of Artificial Sequence: Synthetic oligonucleotide
cauuagcccaauccuuguc

SEQ ID NO: 1248367 - RNA, 19 nt, Artificial Sequence
  Description of Artificial Sequence: Synthetic oligonucleotide
agcccaauccuugucacau

SEQ ID NO: 1248368 - RNA, 19 nt, Artificial Sequence
  Description of Artificial Sequence: Synthetic oligonucleotide
ucacaucgccaccacuguc

SEQ ID NO: 1248369 - RNA, 19 nt, Artificial Sequence
  Description of Artificial Sequence: Synthetic oligonucleotide
cuugucacaucgccaccac

SEQ ID NO: 1248370 - RNA, 19 nt, Artificial Sequence
  Description of Artificial Sequence: Synthetic oligonucleotide
gacaacguaaccacugcgu

SEQ ID NO: 1248371 - RNA, 19 nt, Artificial Sequence
  Description of Artificial Sequence: Synthetic oligonucleotide
cccuaauuccuaaugccug

SEQ ID NO: 1248372 - RNA, 19 nt, Artificial Sequence
  Description of Artificial Sequence: Synthetic oligonucleotide
aguuucccguagucuaccu

SEQ ID NO: 1248373 - RNA, 19 nt, Artificial Sequence
  Description of Artificial Sequence: Synthetic oligonucleotide
caacugacccagccaacac

SEQ ID NO: 1248374 - RNA, 19 nt, Artificial Sequence
  Description of Artificial Sequence: Synthetic oligonucleotide
cucuacaggcugugggaac

SEQ ID NO: 1248375 - RNA, 19 nt, Artificial Sequence
  Description of Artificial Sequence: Synthetic oligonucleotide
gacaagcccuaauuccuaa

SEQ ID NO: 1248376 - RNA, 19 nt, Artificial Sequence
  Description of Artificial Sequence: Synthetic oligonucleotide
aagcccgccucaauuaaau

SEQ ID NO: 1248377 - RNA, 19 nt, Artificial Sequence
  Description of Artificial Sequence: Synthetic oligonucleotide
agacaagccccugcucaac

SEQ ID NO: 1248378 - RNA, 19 nt, Artificial Sequence
  Description of Artificial Sequence: Synthetic oligonucleotide
agucuaccucugcgguggc

SEQ ID NO: 1248379 - RNA, 19 nt, Artificial Sequence
  Description of Artificial Sequence: Synthetic oligonucleotide
caaagcgccgggucaccgc

SEQ ID NO: 1248380 - RNA, 19 nt, Artificial Sequence
  Description of Artificial Sequence: Synthetic oligonucleotide
gacucgcagccagagccgg

SEQ ID NO: 1248381 - RNA, 19 nt, Artificial Sequence
  Description of Artificial Sequence: Synthetic oligonucleotide
gggaacagaagucccaaaa

SEQ ID NO: 1248382 - RNA, 19 nt, Artificial Sequence
  Description of Artificial Sequence: Synthetic oligonucleotide
gugcugagacaacguaacc

SEQ ID NO: 1248383 - RNA, 19 nt, Artificial Sequence
  Description of Artificial Sequence: Synthetic oligonucleotide
ucaugcggccacgauagua

SEQ ID NO: 1248384 - RNA, 19 nt, Artificial Sequence
  Description of Artificial Sequence: Synthetic oligonucleotide
ccaaaaggcucagacgagg

SEQ ID NO: 1248385 - RNA, 19 nt, Artificial Sequence
  Description of Artificial Sequence: Synthetic oligonucleotide
uguuggccgggacauugua

SEQ ID NO: 1248386 - RNA, 19 nt, Artificial Sequence
  Description of Artificial Sequence: Synthetic oligonucleotide
gguagauaccggcaauguc

SEQ ID NO: 1248387 - RNA, 19 nt, Artificial Sequence
  Description of Artificial Sequence: Synthetic oligonucleotide
gucuauggccacaggggag

SEQ ID NO: 1248388 - RNA, 19 nt, Artificial Sequence
  Description of Artificial Sequence: Synthetic oligonucleotide
uggcgugcgcggcucacca

SEQ ID NO: 1248389 - RNA, 19 nt, Artificial Sequence
  Description of Artificial Sequence: Synthetic oligonucleotide
ggcuaucaggagcuugucc

SEQ ID NO: 1248390 - RNA, 19 nt, Artificial Sequence
  Description of Artificial Sequence: Synthetic oligonucleotide
auuggacuaaaugcauuuu

SEQ ID NO: 1248391 - RNA, 19 nt, Artificial Sequence
  Description of Artificial Sequence: Synthetic oligonucleotide
uuaggauguauggccuuau

SEQ ID NO: 1248392 - RNA, 19 nt, Artificial Sequence
  Description of Artificial Sequence: Synthetic oligonucleotide
gcccugggauuccaaagcg

SEQ ID NO: 1248393 - RNA, 19 nt, Artificial Sequence
  Description of Artificial Sequence: Synthetic oligonucleotide
augguuuucuucagcccug

SEQ ID NO: 1248394 - RNA, 19 nt, Artificial Sequence
  Description of Artificial Sequence: Synthetic oligonucleotide
ugauggacuaugggaacuu

SEQ ID NO: 1248395 - RNA, 19 nt, Artificial Sequence
  Description of Artificial Sequence: Synthetic oligonucleotide
ugguuagggaauggcacua

SEQ ID NO: 1248396 - RNA, 19 nt, Artificial Sequence
  Description of Artificial Sequence: Synthetic oligonucleotide
uuccuaaugccuggcuccu

SEQ ID NO: 1248397 - RNA, 19 nt, Artificial Sequence
  Description of Artificial Sequence: Synthetic oligonucleotide
uaggauguauggccuuauu

SEQ ID NO: 1248398 - RNA, 19 nt, Artificial Sequence
  Description of Artificial Sequence: Synthetic oligonucleotide
cauaggcuccuacauuuaa

SEQ ID NO: 1248399 - RNA, 19 nt, Artificial Sequence
  Description of Artificial Sequence: Synthetic oligonucleotide
ggacuaugggaacuuuuga

SEQ ID NO: 1248400 - RNA, 19 nt, Artificial Sequence
  Description of Artificial Sequence: Synthetic oligonucleotide
guuucccguagucuaccuc

SEQ ID NO: 1248401 - RNA, 19 nt, Artificial Sequence
  Description of Artificial Sequence: Synthetic oligonucleotide
ccguagucuaccucugcgg

SEQ ID NO: 1248402 - RNA, 19 nt, Artificial Sequence
  Description of Artificial Sequence: Synthetic oligonucleotide
guaagcccgccucaauuaa

SEQ ID NO: 1248403 - RNA, 19 nt, Artificial Sequence
  Description of Artificial Sequence: Synthetic oligonucleotide
guauggccuggcgugcgcg

SEQ ID NO: 1248404 - RNA, 19 nt, Artificial Sequence
  Description of Artificial Sequence: Synthetic oligonucleotide
ccacgauaguaacaaggag

SEQ ID NO: 1248405 - RNA, 19 nt, Artificial Sequence
  Description of Artificial Sequence: Synthetic oligonucleotide
ugcacgccaccaugcuucc

SEQ ID NO: 1248406 - RNA, 19 nt, Artificial Sequence
  Description of Artificial Sequence: Synthetic oligonucleotide
gugacuaagacaagcccua

SEQ ID NO: 1248407 - RNA, 19 nt, Artificial Sequence
  Description of Artificial Sequence: Synthetic oligonucleotide
uugaguggacucgcagcca

SEQ ID NO: 1248408 - RNA, 19 nt, Artificial Sequence
  Description of Artificial Sequence: Synthetic oligonucleotide
cugcuugccaucagagcca

SEQ ID NO: 1248409 - RNA, 19 nt, Artificial Sequence
  Description of Artificial Sequence: Synthetic oligonucleotide
aucagcgaccuugguguag

SEQ ID NO: 1248410 - RNA, 19 nt, Artificial Sequence
  Description of Artificial Sequence: Synthetic oligonucleotide
cccguagucuaccucugcg

SEQ ID NO: 1248411 - RNA, 19 nt, Artificial Sequence
  Description of Artificial Sequence: Synthetic oligonucleotide
acauuggccaggccgcaua

SEQ ID NO: 1248412 - RNA, 19 nt, Artificial Sequence
  Description of Artificial Sequence: Synthetic oligonucleotide
guccuuuaugccaaugaua

SEQ ID NO: 1248413 - RNA, 19 nt, Artificial Sequence
  Description of Artificial Sequence: Synthetic oligonucleotide
gccacgauaguaacaagga

SEQ ID NO: 1248414 - RNA, 19 nt, Artificial Sequence
  Description of Artificial Sequence: Synthetic oligonucleotide
cagcacugcucaugcggcc

SEQ ID NO: 1248415 - RNA, 19 nt, Artificial Sequence
  Description of Artificial Sequence: Synthetic oligonucleotide
uggguauggccuggcgugc

SEQ ID NO: 1248416 - RNA, 19 nt, Artificial Sequence
  Description of Artificial Sequence: Synthetic oligonucleotide
gaaugagggcagcacugcu

SEQ ID NO: 1248417 - RNA, 19 nt, Artificial Sequence
  Description of Artificial Sequence: Synthetic oligonucleotide
gccgggacauuguacaaca

SEQ ID NO: 1248418 - RNA, 19 nt, Artificial Sequence
  Description of Artificial Sequence: Synthetic oligonucleotide
guuggccgggacauuguac

SEQ ID NO: 1248419 - RNA, 19 nt, Artificial Sequence
  Description of Artificial Sequence: Synthetic oligonucleotide
ggugaaugagggcagcacu

SEQ ID NO: 1248420 - RNA, 19 nt, Artificial Sequence
  Description of Artificial Sequence: Synthetic oligonucleotide
uggcuugaguggacucgca

SEQ ID NO: 1248421 - RNA, 19 nt, Artificial Sequence
  Description of Artificial Sequence: Synthetic oligonucleotide
cauuccuagacaagccccu

SEQ ID NO: 1248422 - RNA, 19 nt, Artificial Sequence
  Description of Artificial Sequence: Synthetic oligonucleotide
cuggaucacgaagccucgg

SEQ ID NO: 1248423 - RNA, 19 nt, Artificial Sequence
  Description of Artificial Sequence: Synthetic oligonucleotide
cuuggguauggccuggcgu

SEQ ID NO: 1248424 - RNA, 19 nt, Artificial Sequence
  Description of Artificial Sequence: Synthetic oligonucleotide
cugggccccuaagacauug

SEQ ID NO: 1248425 - RNA, 19 nt, Artificial Sequence
  Description of Artificial Sequence: Synthetic oligonucleotide
ccuggaucacgaagccucg

SEQ ID NO: 1248426 - RNA, 19 nt, Artificial Sequence
  Description of Artificial Sequence: Synthetic oligonucleotide
ggacauuguacaacaccac

SEQ ID NO: 1248427 - RNA, 19 nt, Artificial Sequence
  Description of Artificial Sequence: Synthetic oligonucleotide
auauggcuauaaaccuaug

SEQ ID NO: 1248428 - RNA, 19 nt, Artificial Sequence
  Description of Artificial Sequence: Synthetic oligonucleotide
gcuugcuagucuugugaac

SEQ ID NO: 1248429 - RNA, 19 nt, Artificial Sequence
  Description of Artificial Sequence: Synthetic oligonucleotide
acguaaccacugcguccac

SEQ ID NO: 1248430 - RNA, 19 nt, Artificial Sequence
  Description of Artificial Sequence: Synthetic oligonucleotide
guggacucgcagccagagc

SEQ ID NO: 1248431 - RNA, 19 nt, Artificial Sequence
  Description of Artificial Sequence: Synthetic oligonucleotide
cuacaggcugugggaacag

SEQ ID NO: 1248432 - RNA, 19 nt, Artificial Sequence
  Description of Artificial Sequence: Synthetic oligonucleotide
ugcugacggucaucucuac

SEQ ID NO: 1248433 - RNA, 19 nt, Artificial Sequence
  Description of Artificial Sequence: Synthetic oligonucleotide
uccaaagcgccgggucacc

SEQ ID NO: 1248434 - RNA, 19 nt, Artificial Sequence
  Description of Artificial Sequence: Synthetic oligonucleotide
auucgggugcugagacaac

SEQ ID NO: 1248435 - RNA, 19 nt, Artificial Sequence
  Description of Artificial Sequence: Synthetic oligonucleotide
auggacuaugggaacuuuu

SEQ ID NO: 1248436 - RNA, 19 nt, Artificial Sequence
  Description of Artificial Sequence: Synthetic oligonucleotide
gggauuggagaaagaucag

SEQ ID NO: 1248437 - RNA, 19 nt, Artificial Sequence
  Description of Artificial Sequence: Synthetic oligonucleotide
uggccgggacauuguacaa

SEQ ID NO: 1248438 - RNA, 19 nt, Artificial Sequence
  Description of Artificial Sequence: Synthetic oligonucleotide
ccaauccuugucacaucgc

SEQ ID NO: 1248439 - RNA, 19 nt, Artificial Sequence
  Description of Artificial Sequence: Synthetic oligonucleotide
ugccucauggaggcccaca

SEQ ID NO: 1248440 - RNA, 19 nt, Artificial Sequence
  Description of Artificial Sequence: Synthetic oligonucleotide
caaugauauucgggugcug

SEQ ID NO: 1248441 - RNA, 19 nt, Artificial Sequence
  Description of Artificial Sequence: Synthetic oligonucleotide
cugcgguggcggugaacgg

SEQ ID NO: 1248442 - RNA, 19 nt, Artificial Sequence
  Description of Artificial Sequence: Synthetic oligonucleotide
auaaaccuauggggagcca

SEQ ID NO: 1248443 - RNA, 19 nt, Artificial Sequence
  Description of Artificial Sequence: Synthetic oligonucleotide
ggaucacgaagccucggaa

SEQ ID NO: 1248444 - RNA, 19 nt, Artificial Sequence
  Description of Artificial Sequence: Synthetic oligonucleotide
agauaccggcaaugucuau

SEQ ID NO: 1248445 - RNA, 19 nt, Artificial Sequence
  Description of Artificial Sequence: Synthetic oligonucleotide
ggacucgcagccagagccg

SEQ ID NO: 1248446 - RNA, 19 nt, Artificial Sequence
  Description of Artificial Sequence: Synthetic oligonucleotide
gcgaccuugguguaguggu

SEQ ID NO: 1248447 - RNA, 19 nt, Artificial Sequence
  Description of Artificial Sequence: Synthetic oligonucleotide
cagagccggcuaucaggag

SEQ ID NO: 1248448 - RNA, 19 nt, Artificial Sequence
  Description of Artificial Sequence: Synthetic oligonucleotide
ugugaaccauuagcccaau

SEQ ID NO: 1248449 - RNA, 19 nt, Artificial Sequence
  Description of Artificial Sequence: Synthetic oligonucleotide
gucacaucgccaccacugu

SEQ ID NO: 1248450 - RNA, 19 nt, Artificial Sequence
  Description of Artificial Sequence: Synthetic oligonucleotide
gcgugcgcggcucaccacc

SEQ ID NO: 1248451 - RNA, 19 nt, Artificial Sequence
  Description of Artificial Sequence: Synthetic oligonucleotide
ccgaccugagccaugcuga

SEQ ID NO: 1248452 - RNA, 19 nt, Artificial Sequence
  Description of Artificial Sequence: Synthetic oligonucleotide
augcugacggucaucucua

SEQ ID NO: 1248453 - RNA, 19 nt, Artificial Sequence
  Description of Artificial Sequence: Synthetic oligonucleotide
ccuucgcauuccuagacaa

SEQ ID NO: 1248454 - RNA, 19 nt, Artificial Sequence
  Description of Artificial Sequence: Synthetic oligonucleotide
cugagacaacguaaccacu

SEQ ID NO: 1248455 - RNA, 19 nt, Artificial Sequence
  Description of Artificial Sequence: Synthetic oligonucleotide
gguauggccuggcgugcgc

SEQ ID NO: 1248456 - RNA, 19 nt, Artificial Sequence
  Description of Artificial Sequence: Synthetic oligonucleotide
agcgccgggucaccgcagu

SEQ ID NO: 1248457 - RNA, 19 nt, Artificial Sequence
  Description of Artificial Sequence: Synthetic oligonucleotide
ggucaccgcaguguugggc

SEQ ID NO: 1248458 - RNA, 19 nt, Artificial Sequence
  Description of Artificial Sequence: Synthetic oligonucleotide
cgggucaccgcaguguugg

SEQ ID NO: 1248459 - RNA, 19 nt, Artificial Sequence
  Description of Artificial Sequence: Synthetic oligonucleotide
cuauggggagccagggagu

SEQ ID NO: 1248460 - RNA, 19 nt, Artificial Sequence
  Description of Artificial Sequence: Synthetic oligonucleotide
guuagggaauggcacuauu

SEQ ID NO: 1248461 - RNA, 19 nt, Artificial Sequence
  Description of Artificial Sequence: Synthetic oligonucleotide
gcgguggcggugaacgggg

SEQ ID NO: 1248462 - RNA, 19 nt, Artificial Sequence
  Description of Artificial Sequence: Synthetic oligonucleotide
caaaccaguccaugguuuu

SEQ ID NO: 1248463 - RNA, 19 nt, Artificial Sequence
  Description of Artificial Sequence: Synthetic oligonucleotide
agcccaagccagucccaau

SEQ ID NO: 1248464 - RNA, 19 nt, Artificial Sequence
  Description of Artificial Sequence: Synthetic oligonucleotide
ggugucuccugcuugccau

SEQ ID NO: 1248465 - RNA, 19 nt, Artificial Sequence
  Description of Artificial Sequence: Synthetic oligonucleotide
gcaccgaccugagccaugc

SEQ ID NO: 1248466 - RNA, 19 nt, Artificial Sequence
  Description of Artificial Sequence: Synthetic oligonucleotide
uaccggcaaugucuaucuu

SEQ ID NO: 1248467 - RNA, 19 nt, Artificial Sequence
  Description of Artificial Sequence: Synthetic oligonucleotide
ggaaauccugcuugcuagu

SEQ ID NO: 1248468 - RNA, 19 nt, Artificial Sequence
  Description of Artificial Sequence: Synthetic oligonucleotide
gacgaggugucuccugcuu

SEQ ID NO: 1248469 - RNA, 19 nt, Artificial Sequence
  Description of Artificial Sequence: Synthetic oligonucleotide
ggguauggccuggcgugcg

SEQ ID NO: 1248470 - RNA, 19 nt, Artificial Sequence
  Description of Artificial Sequence: Synthetic oligonucleotide
cccgccucaauuaaauacu

SEQ ID NO: 1248471 - RNA, 19 nt, Artificial Sequence
  Description of Artificial Sequence: Synthetic oligonucleotide
ggugucucuucacaacaau

SEQ ID NO: 1248472 - RNA, 19 nt, Artificial Sequence
  Description of Artificial Sequence: Synthetic oligonucleotide
ccccuucgcauuccuagac

SEQ ID NO: 1248473 - RNA, 19 nt, Artificial Sequence
  Description of Artificial Sequence: Synthetic oligonucleotide
aagcgccgggucaccgcag

SEQ ID NO: 1248474 - RNA, 19 nt, Artificial Sequence
  Description of Artificial Sequence: Synthetic oligonucleotide
ccuagacaagccccugcuc

SEQ ID NO: 1248475 - RNA, 19 nt, Artificial Sequence
  Description of Artificial Sequence: Synthetic oligonucleotide
ggcgcucgaugcuggucag

SEQ ID NO: 1248476 - RNA, 19 nt, Artificial Sequence
  Description of Artificial Sequence: Synthetic oligonucleotide
cauuggagguaggcuuuga

SEQ ID NO: 1248477 - RNA, 19 nt, Artificial Sequence
  Description of Artificial Sequence: Synthetic oligonucleotide
cuggcgugcgcggcucacc

SEQ ID NO: 1248478 - RNA, 19 nt, Artificial Sequence
  Description of Artificial Sequence: Synthetic oligonucleotide
ccaacugacccagccaaca

SEQ ID NO: 1248479 - RNA, 19 nt, Artificial Sequence
  Description of Artificial Sequence: Synthetic oligonucleotide
gauggacuaugggaacuuu

SEQ ID NO: 1248480 - RNA, 19 nt, Artificial Sequence
  Description of Artificial Sequence: Synthetic oligonucleotide
cagucccaauggcuuucuc

SEQ ID NO: 1248481 - RNA, 19 nt, Artificial Sequence
  Description of Artificial Sequence: Synthetic oligonucleotide
cccauaggcuccuacauuu

SEQ ID NO: 1248482 - RNA, 19 nt, Artificial Sequence
  Description of Artificial Sequence: Synthetic oligonucleotide
cagcgaccuugguguagug

SEQ ID NO: 1248483 - RNA, 19 nt, Artificial Sequence
  Description of Artificial Sequence: Synthetic oligonucleotide
cgcaguguugggcucgaug

SEQ ID NO: 1248484 - RNA, 19 nt, Artificial Sequence
  Description of Artificial Sequence: Synthetic oligonucleotide
agcaccgaccugagccaug

SEQ ID NO: 1248485 - RNA, 19 nt, Artificial Sequence
  Description of Artificial Sequence: Synthetic oligonucleotide
ggguggguagauaccggca

SEQ ID NO: 1248486 - RNA, 19 nt, Artificial Sequence
  Description of Artificial Sequence: Synthetic oligonucleotide
gggucaccgcaguguuggg

SEQ ID NO: 1248487 - RNA, 19 nt, Artificial Sequence
  Description of Artificial Sequence: Synthetic oligonucleotide
agcccuguguuggccggga

SEQ ID NO: 1248488 - RNA, 19 nt, Artificial Sequence
  Description of Artificial Sequence: Synthetic oligonucleotide
ggauuauaauauggcuaua

SEQ ID NO: 1248489 - RNA, 19 nt, Artificial Sequence
  Description of Artificial Sequence: Synthetic oligonucleotide
guacaacaccacugggauu

SEQ ID NO: 1248490 - RNA, 19 nt, Artificial Sequence
  Description of Artificial Sequence: Synthetic oligonucleotide
gcgcugaguuuauucaggu

SEQ ID NO: 1248491 - RNA, 19 nt, Artificial Sequence
  Description of Artificial Sequence: Synthetic oligonucleotide
gccggcuaucaggagcuug

SEQ ID NO: 1248492 - RNA, 19 nt, Artificial Sequence
  Description of Artificial Sequence: Synthetic oligonucleotide
ggguagauaccggcaaugu

SEQ ID NO: 1248493 - RNA, 19 nt, Artificial Sequence
  Description of Artificial Sequence: Synthetic oligonucleotide
ccuaaugccuggcuccucu

SEQ ID NO: 1248494 - RNA, 19 nt, Artificial Sequence
  Description of Artificial Sequence: Synthetic oligonucleotide
accgcaguguugggcucga

SEQ ID NO: 1248495 - RNA, 19 nt, Artificial Sequence
  Description of Artificial Sequence: Synthetic oligonucleotide
cucugcgguggcggugaac

SEQ ID NO: 1248496 - RNA, 19 nt, Artificial Sequence
  Description of Artificial Sequence: Synthetic oligonucleotide
cccuucgcauuccuagaca

SEQ ID NO: 1248497 - RNA, 19 nt, Artificial Sequence
  Description of Artificial Sequence: Synthetic oligonucleotide
gagccaugcugacggucau

SEQ ID NO: 1248498 - RNA, 19 nt, Artificial Sequence
  Description of Artificial Sequence: Synthetic oligonucleotide
cauuggccaggccgcauau

SEQ ID NO: 1248499 - RNA, 19 nt, Artificial Sequence
  Description of Artificial Sequence: Synthetic oligonucleotide
ccgugaggcacagucucuc

SEQ ID NO: 1248500 - RNA, 19 nt, Artificial Sequence
  Description of Artificial Sequence: Synthetic oligonucleotide
ccggcuaucaggagcuugu

SEQ ID NO: 1248501 - RNA, 19 nt, Artificial Sequence
  Description of Artificial Sequence: Synthetic oligonucleotide
ccaaaccaguccaugguuu

SEQ ID NO: 1248502 - RNA, 19 nt, Artificial Sequence
  Description of Artificial Sequence: Synthetic oligonucleotide
agguaggcuuugagguuuu

SEQ ID NO: 1248503 - RNA, 19 nt, Artificial Sequence
  Description of Artificial Sequence: Synthetic oligonucleotide
cccuguguuggccgggaca

SEQ ID NO: 1248504 - RNA, 19 nt, Artificial Sequence
  Description of Artificial Sequence: Synthetic oligonucleotide
gccaacugacccagccaac

SEQ ID NO: 1248505 - RNA, 19 nt, Artificial Sequence
  Description of Artificial Sequence: Synthetic oligonucleotide
cguagucuaccucugcggu

SEQ ID NO: 1248506 - RNA, 19 nt, Artificial Sequence
  Description of Artificial Sequence: Synthetic oligonucleotide
gacauuggccaggccgcau

SEQ ID NO: 1248507 - RNA, 19 nt, Artificial Sequence
  Description of Artificial Sequence: Synthetic oligonucleotide
cucagacgaggugucuccu

SEQ ID NO: 1248508 - RNA, 19 nt, Artificial Sequence
  Description of Artificial Sequence: Synthetic oligonucleotide
gggugguuaugggugggua

SEQ ID NO: 1248509 - RNA, 19 nt, Artificial Sequence
  Description of Artificial Sequence: Synthetic oligonucleotide
gccucauggaggcccacau

SEQ ID NO: 1248510 - RNA, 19 nt, Artificial Sequence
  Description of Artificial Sequence: Synthetic oligonucleotide
gugcgcggcucaccaccuc

SEQ ID NO: 1248511 - RNA, 19 nt, Artificial Sequence
  Description of Artificial Sequence: Synthetic oligonucleotide
gcgcucgaugcuggucagg

SEQ ID NO: 1248512 - RNA, 19 nt, Artificial Sequence
  Description of Artificial Sequence: Synthetic oligonucleotide
guguuggccgggacauugu

SEQ ID NO: 1248513 - RNA, 19 nt, Artificial Sequence
  Description of Artificial Sequence: Synthetic oligonucleotide
cugccucauggaggcccac

SEQ ID NO: 1248514 - RNA, 19 nt, Artificial Sequence
  Description of Artificial Sequence: Synthetic oligonucleotide
ccgggucaccgcaguguug

SEQ ID NO: 1248515 - RNA, 19 nt, Artificial Sequence
  Description of Artificial Sequence: Synthetic oligonucleotide
ggcgugcgcggcucaccac

SEQ ID NO: 1248516 - RNA, 19 nt, Artificial Sequence
  Description of Artificial Sequence: Synthetic oligonucleotide
gguuagggaauggcacuau

SEQ ID NO: 1248517 - RNA, 19 nt, Artificial Sequence
  Description of Artificial Sequence: Synthetic oligonucleotide
cuauggccacaggggagcu

SEQ ID NO: 1248518 - RNA, 19 nt, Artificial Sequence
  Description of Artificial Sequence: Synthetic oligonucleotide
cgauaguaacaaggaguca

SEQ ID NO: 1248519 - RNA, 19 nt, Artificial Sequence
  Description of Artificial Sequence: Synthetic oligonucleotide
cggccacgauaguaacaag

SEQ ID NO: 1248520 - RNA, 19 nt, Artificial Sequence
  Description of Artificial Sequence: Synthetic oligonucleotide
gcgccgggucaccgcagug

SEQ ID NO: 1248521 - RNA, 19 nt, Artificial Sequence
  Description of Artificial Sequence: Synthetic oligonucleotide
cugcguccacaggcagguc

SEQ ID NO: 1248522 - RNA, 19 nt, Artificial Sequence
  Description of Artificial Sequence: Synthetic oligonucleotide
gccugcacgccaccaugcu

SEQ ID NO: 1248523 - RNA, 19 nt, Artificial Sequence
  Description of Artificial Sequence: Synthetic oligonucleotide
cucaugcggccacgauagu

SEQ ID NO: 1248524 - RNA, 19 nt, Artificial Sequence
  Description of Artificial Sequence: Synthetic oligonucleotide
cguaaccacugcguccaca

SEQ ID NO: 1248525 - RNA, 19 nt, Artificial Sequence
  Description of Artificial Sequence: Synthetic oligonucleotide
ccgccucaauuaaauacuu

SEQ ID NO: 1248526 - RNA, 19 nt, Artificial Sequence
  Description of Artificial Sequence: Synthetic oligonucleotide
gccgggucaccgcaguguu

SEQ ID NO: 1248527 - RNA, 19 nt, Artificial Sequence
  Description of Artificial Sequence: Synthetic oligonucleotide
ggggugguuaugggugggu

SEQ ID NO: 1248528 - RNA, 19 nt, Artificial Sequence
  Description of Artificial Sequence: Synthetic oligonucleotide
ccuggcgugcgcggcucac

SEQ ID NO: 1248529 - RNA, 19 nt, Artificial Sequence
  Description of Artificial Sequence: Synthetic oligonucleotide
cgggugcugagacaacgua

SEQ ID NO: 1248530 - RNA, 19 nt, Artificial Sequence
  Description of Artificial Sequence: Synthetic oligonucleotide
cccgugaggcacagucucu

SEQ ID NO: 1248531 - RNA, 19 nt, Artificial Sequence
  Description of Artificial Sequence: Synthetic oligonucleotide
ccccauaggcuccuacauu

SEQ ID NO: 1248532 - RNA, 19 nt, Artificial Sequence
  Description of Artificial Sequence: Synthetic oligonucleotide
gccuggcgugcgcggcuca

SEQ ID NO: 1248533 - RNA, 19 nt, Artificial Sequence
  Description of Artificial Sequence: Synthetic oligonucleotide
ccugcacgccaccaugcuu

SEQ ID NO: 1248534 - RNA, 19 nt, Artificial Sequence
  Description of Artificial Sequence: Synthetic oligonucleotide
gggaaggcgcugaguuuau

SEQ ID NO: 1248535 - RNA, 19 nt, Artificial Sequence
  Description of Artificial Sequence: Synthetic oligonucleotide
caccgaccugagccaugcu

SEQ ID NO: 1248536 - RNA, 19 nt, Artificial Sequence
  Description of Artificial Sequence: Synthetic oligonucleotide
ccuugguguaguggugaau

SEQ ID NO: 1248537 - RNA, 19 nt, Artificial Sequence
  Description of Artificial Sequence: Synthetic oligonucleotide
ccaggcgcucgaugcuggu

SEQ ID NO: 1248538 - RNA, 19 nt, Artificial Sequence
  Description of Artificial Sequence: Synthetic oligonucleotide
cgugcgcggcucaccaccu

SEQ ID NO: 1248539 - RNA, 19 nt, Artificial Sequence
  Description of Artificial Sequence: Synthetic oligonucleotide
cgccgggucaccgcagugu

SEQ ID NO: 1248540 - RNA, 19 nt, Artificial Sequence
  Description of Artificial Sequence: Synthetic oligonucleotide
ggcggugaacggggugguu

SEQ ID NO: 1248541 - RNA, 19 nt, Artificial Sequence
  Description of Artificial Sequence: Synthetic oligonucleotide
ccgcaguguugggcucgau

SEQ ID NO: 1248542 - RNA, 19 nt, Artificial Sequence
  Description of Artificial Sequence: Synthetic oligonucleotide
gauuaguucuuccugaagc

SEQ ID NO: 1248543 - RNA, 19 nt, Artificial Sequence
  Description of Artificial Sequence: Synthetic oligonucleotide
auuaguucuuccugaagcc

SEQ ID NO: 1248544 - RNA, 19 nt, Artificial Sequence
  Description of Artificial Sequence: Synthetic oligonucleotide
aaugucgauuaguucuucc

SEQ ID NO: 1248545 - RNA, 19 nt, Artificial Sequence
  Description of Artificial Sequence: Synthetic oligonucleotide
gauaaugucgauuaguucu

SEQ ID NO: 1248546 - RNA, 19 nt, Artificial Sequence
  Description of Artificial Sequence: Synthetic oligonucleotide
auaauuuagaaugugcuug

SEQ ID NO: 1248547 - RNA, 19 nt, Artificial Sequence
  Description of Artificial Sequence: Synthetic oligonucleotide
uuuucuaccaaggauguug

SEQ ID NO: 1248548 - RNA, 19 nt, Artificial Sequence
  Description of Artificial Sequence: Synthetic oligonucleotide
aagucugccuuucccaagc

SEQ ID NO: 1248549 - RNA, 19 nt, Artificial Sequence
  Description of Artificial Sequence: Synthetic oligonucleotide
guaguaguggagcugaggg

SEQ ID NO: 1248550 - RNA, 19 nt, Artificial Sequence
  Description of Artificial Sequence: Synthetic oligonucleotide
gaucugagacaacaggugg

SEQ ID NO: 1248551 - RNA, 19 nt, Artificial Sequence
  Description of Artificial Sequence: Synthetic oligonucleotide
acuaaacccagugucaggc

SEQ ID NO: 1248552 - RNA, 19 nt, Artificial Sequence
  Description of Artificial Sequence: Synthetic oligonucleotide
acaggaacccuuuaaugac

SEQ ID NO: 1248553 - RNA, 19 nt, Artificial Sequence
  Description of Artificial Sequence: Synthetic oligonucleotide
uuguucgagucucaggccg

SEQ ID NO: 1248554 - RNA, 19 nt, Artificial Sequence
  Description of Artificial Sequence: Synthetic oligonucleotide
ugggcaucagauaauuuag

SEQ ID NO: 1248555 - RNA, 19 nt, Artificial Sequence
  Description of Artificial Sequence: Synthetic oligonucleotide
cagauaauuuagaaugugc

SEQ ID NO: 1248556 - RNA, 19 nt, Artificial Sequence
  Description of Artificial Sequence: Synthetic oligonucleotide
aacugucgaagauccuucc

SEQ ID NO: 1248557 - RNA, 19 nt, Artificial Sequence
  Description of Artificial Sequence: Synthetic oligonucleotide
uugcgauccaagaugagga

SEQ ID NO: 1248558 - RNA, 19 nt, Artificial Sequence
  Description of Artificial Sequence: Synthetic oligonucleotide
ucuuugaaaguagaggcug

SEQ ID NO: 1248559 - RNA, 19 nt, Artificial Sequence
  Description of Artificial Sequence: Synthetic oligonucleotide
aaaagacaagcugccaagg

SEQ ID NO: 1248560 - RNA, 19 nt, Artificial Sequence
  Description of Artificial Sequence: Synthetic oligonucleotide
gauguugccagccucucgc

SEQ ID NO: 1248561 - RNA, 19 nt, Artificial Sequence
  Description of Artificial Sequence: Synthetic oligonucleotide
ugaggugauggguagauaa

SEQ ID NO: 1248562 - RNA, 19 nt, Artificial Sequence
  Description of Artificial Sequence: Synthetic oligonucleotide
uauaaccgcacaacgugcc

SEQ ID NO: 1248563 - RNA, 19 nt, Artificial Sequence
  Description of Artificial Sequence: Synthetic oligonucleotide
gucguauaaccgcacaacg

SEQ ID NO: 1248564 - RNA, 19 nt, Artificial Sequence
  Description of Artificial Sequence: Synthetic oligonucleotide
aagucugacaggacgugcc

SEQ ID NO: 1248565 - RNA, 19 nt, Artificial Sequence
  Description of Artificial Sequence: Synthetic oligonucleotide
ucuagugccuuucugggaa

SEQ ID NO: 1248566 - RNA, 19 nt, Artificial Sequence
  Description of Artificial Sequence: Synthetic oligonucleotide
uuucuaccaaggauguugc

SEQ ID NO: 1248567 - RNA, 19 nt, Artificial Sequence
  Description of Artificial Sequence: Synthetic oligonucleotide
ugcuuugucuaggagaugc

SEQ ID NO: 1248568 - RNA, 19 nt, Artificial Sequence
  Description of Artificial Sequence: Synthetic oligonucleotide
auagggcagguccugaggg

SEQ ID NO: 1248569 - RNA, 19 nt, Artificial Sequence
  Description of Artificial Sequence: Synthetic oligonucleotide
cauaucuggccucugcugg

SEQ ID NO: 1248570 - RNA, 19 nt, Artificial Sequence
  Description of Artificial Sequence: Synthetic oligonucleotide
aaguccccgaaaccgcugc

SEQ ID NO: 1248571 - RNA, 19 nt, Artificial Sequence
  Description of Artificial Sequence: Synthetic oligonucleotide
ugucgauuaguucuuccug

SEQ ID NO: 1248572 - RNA, 19 nt, Artificial Sequence
  Description of Artificial Sequence: Synthetic oligonucleotide
agauaauuuagaaugugcu

SEQ ID NO: 1248573 - RNA, 19 nt, Artificial Sequence
  Description of Artificial Sequence: Synthetic oligonucleotide
aacaaagaggucuccugcu

SEQ ID NO: 1248574 - RNA, 19 nt, Artificial Sequence
  Description of Artificial Sequence: Synthetic oligonucleotide
guaaaugggcaugaguggg

SEQ ID NO: 1248575 - RNA, 19 nt, Artificial Sequence
  Description of Artificial Sequence: Synthetic oligonucleotide
cuaccaaggauguugccag

SEQ ID NO: 1248576 - RNA, 19 nt, Artificial Sequence
  Description of Artificial Sequence: Synthetic oligonucleotide
ugauaagccagcugagggc

SEQ ID NO: 1248577 - RNA, 19 nt, Artificial Sequence
  Description of Artificial Sequence: Synthetic oligonucleotide
ucagauaauuuagaaugug

SEQ ID NO: 1248578 - RNA, 19 nt, Artificial Sequence
  Description of Artificial Sequence: Synthetic oligonucleotide
aaaucccugaggugauggg

SEQ ID NO: 1248579 - RNA, 19 nt, Artificial Sequence
  Description of Artificial Sequence: Synthetic oligonucleotide
ucuucuaggcagugaauug

SEQ ID NO: 1248580 - RNA, 19 nt, Artificial Sequence
  Description of Artificial Sequence: Synthetic oligonucleotide
ucuaccaaggauguugcca

SEQ ID NO: 1248581 - RNA, 19 nt, Artificial Sequence
  Description of Artificial Sequence: Synthetic oligonucleotide
uaauccuugcucaacuguc

SEQ ID NO: 1248582 - RNA, 19 nt, Artificial Sequence
  Description of Artificial Sequence: Synthetic oligonucleotide
aaagucugccuuucccaag

SEQ ID NO: 1248583 - RNA, 19 nt, Artificial Sequence
  Description of Artificial Sequence: Synthetic oligonucleotide
guugcgauccaagaugagg

SEQ ID NO: 1248584 - RNA, 19 nt, Artificial Sequence
  Description of Artificial Sequence: Synthetic oligonucleotide
agucguauaaccgcacaac

SEQ ID NO: 1248585 - RNA, 19 nt, Artificial Sequence
  Description of Artificial Sequence: Synthetic oligonucleotide
caugaaaucccugagguga

SEQ ID NO: 1248586 - RNA, 19 nt, Artificial Sequence
  Description of Artificial Sequence: Synthetic oligonucleotide
ugaauuggguagccagggg

SEQ ID NO: 1248587 - RNA, 19 nt, Artificial Sequence
  Description of Artificial Sequence: Synthetic oligonucleotide
cugccaguuucacaaagcg

SEQ ID NO: 1248588 - RNA, 19 nt, Artificial Sequence
  Description of Artificial Sequence: Synthetic oligonucleotide
ucguauaaccgcacaacgu

SEQ ID NO: 1248589 - RNA, 19 nt, Artificial Sequence
  Description of Artificial Sequence: Synthetic oligonucleotide
ugucgaagauccuuccuug

SEQ ID NO: 1248590 - RNA, 19 nt, Artificial Sequence
  Description of Artificial Sequence: Synthetic oligonucleotide
gacaacaggugguggacag

SEQ ID NO: 1248591 - RNA, 19 nt, Artificial Sequence
  Description of Artificial Sequence: Synthetic oligonucleotide
ucacugaucgccauucguc

SEQ ID NO: 1248592 - RNA, 19 nt, Artificial Sequence
  Description of Artificial Sequence: Synthetic oligonucleotide
gguguugacauugaggagc

SEQ ID NO: 1248593 - RNA, 19 nt, Artificial Sequence
  Description of Artificial Sequence: Synthetic oligonucleotide
aggguggcagaacagaaca

SEQ ID NO: 1248594 - RNA, 19 nt, Artificial Sequence
  Description of Artificial Sequence: Synthetic oligonucleotide
cacugaucgccauucgucg

SEQ ID NO: 1248595 - RNA, 19 nt, Artificial Sequence
  Description of Artificial Sequence: Synthetic oligonucleotide
aucgccauucgucgaaggg

SEQ ID NO: 1248596 - RNA, 19 nt, Artificial Sequence
  Description of Artificial Sequence: Synthetic oligonucleotide
aagaagucguauaaccgca

SEQ ID NO: 1248597 - RNA, 19 nt, Artificial Sequence
  Description of Artificial Sequence: Synthetic oligonucleotide
uuuguucgagucucaggcc

SEQ ID NO: 1248598 - RNA, 19 nt, Artificial Sequence
  Description of Artificial Sequence: Synthetic oligonucleotide
aagucguauaaccgcacaa

SEQ ID NO: 1248599 - RNA, 19 nt, Artificial Sequence
  Description of Artificial Sequence: Synthetic oligonucleotide
cacuuggucaaugaugggc

SEQ ID NO: 1248600 - RNA, 19 nt, Artificial Sequence
  Description of Artificial Sequence: Synthetic oligonucleotide
agcuuggugcacuggguac

SEQ ID NO: 1248601 - RNA, 19 nt, Artificial Sequence
  Description of Artificial Sequence: Synthetic oligonucleotide
gaacuuaggggcccacucc

SEQ ID NO: 1248602 - RNA, 19 nt, Artificial Sequence
  Description of Artificial Sequence: Synthetic oligonucleotide
agccaaaagacaagcugcc

SEQ ID NO: 1248603 - RNA, 19 nt, Artificial Sequence
  Description of Artificial Sequence: Synthetic oligonucleotide
augucgauuaguucuuccu

SEQ ID NO: 1248604 - RNA, 19 nt, Artificial Sequence
  Description of Artificial Sequence: Synthetic oligonucleotide
agggaagcgccgaagagac

SEQ ID NO: 1248605 - RNA, 19 nt, Artificial Sequence
  Description of Artificial Sequence: Synthetic oligonucleotide
gacaggacgugcccaaacc

SEQ ID NO: 1248606 - RNA, 19 nt, Artificial Sequence
  Description of Artificial Sequence: Synthetic oligonucleotide
ggaagcgccgaagagaccg

SEQ ID NO: 1248607 - RNA, 19 nt, Artificial Sequence
  Description of Artificial Sequence: Synthetic oligonucleotide
ucccgguacagcacaauca

SEQ ID NO: 1248608 - RNA, 19 nt, Artificial Sequence
  Description of Artificial Sequence: Synthetic oligonucleotide
gggaucacuguucagggcc

SEQ ID NO: 1248609 - RNA, 19 nt, Artificial Sequence
  Description of Artificial Sequence: Synthetic oligonucleotide
aauuggguagccaggggca

SEQ ID NO: 1248610 - RNA, 19 nt, Artificial Sequence
  Description of Artificial Sequence: Synthetic oligonucleotide
agugaauuggguagccagg

SEQ ID NO: 1248611 - RNA, 19 nt, Artificial Sequence
  Description of Artificial Sequence: Synthetic oligonucleotide
aaagcgguugguccuuggu

SEQ ID NO: 1248612 - RNA, 19 nt, Artificial Sequence
  Description of Artificial Sequence: Synthetic oligonucleotide
auaucuggccucugcuggg

SEQ ID NO: 1248613 - RNA, 19 nt, Artificial Sequence
  Description of Artificial Sequence: Synthetic oligonucleotide
auuguccauugugggaucc

SEQ ID NO: 1248614 - RNA, 19 nt, Artificial Sequence
  Description of Artificial Sequence: Synthetic oligonucleotide
aaaugggcaugagugggug

SEQ ID NO: 1248615 - RNA, 19 nt, Artificial Sequence
  Description of Artificial Sequence: Synthetic oligonucleotide
ugcaugaagucauggaguu

SEQ ID NO: 1248616 - RNA, 19 nt, Artificial Sequence
  Description of Artificial Sequence: Synthetic oligonucleotide
agcaaucccacccucuagu

SEQ ID NO: 1248617 - RNA, 19 nt, Artificial Sequence
  Description of Artificial Sequence: Synthetic oligonucleotide
cacgaugucaugguagccc

SEQ ID NO: 1248618 - RNA, 19 nt, Artificial Sequence
  Description of Artificial Sequence: Synthetic oligonucleotide
uuagaaugugcuugguauu

SEQ ID NO: 1248619 - RNA, 19 nt, Artificial Sequence
  Description of Artificial Sequence: Synthetic oligonucleotide
gguaaggagggcaucuucg

SEQ ID NO: 1248620 - RNA, 19 nt, Artificial Sequence
  Description of Artificial Sequence: Synthetic oligonucleotide
gucuaggagaugcaggaca

SEQ ID NO: 1248621 - RNA, 19 nt, Artificial Sequence
  Description of Artificial Sequence: Synthetic oligonucleotide
guguauuuccgccaccuuc

SEQ ID NO: 1248622 - RNA, 19 nt, Artificial Sequence
  Description of Artificial Sequence: Synthetic oligonucleotide
ugcgauccaagaugaggag

SEQ ID NO: 1248623 - RNA, 19 nt, Artificial Sequence
  Description of Artificial Sequence: Synthetic oligonucleotide
uucuucuaggcagugaauu

SEQ ID NO: 1248624 - RNA, 19 nt, Artificial Sequence
  Description of Artificial Sequence: Synthetic oligonucleotide
augacagcaaucccacccu

SEQ ID NO: 1248625 - RNA, 19 nt, Artificial Sequence
  Description of Artificial Sequence: Synthetic oligonucleotide
cauuaaagucugccuuucc

SEQ ID NO: 1248626 - RNA, 19 nt, Artificial Sequence
  Description of Artificial Sequence: Synthetic oligonucleotide
gagaccgccugacauccag

SEQ ID NO: 1248627 - RNA, 19 nt, Artificial Sequence
  Description of Artificial Sequence: Synthetic oligonucleotide
accauaucuggccucugcu

SEQ ID NO: 1248628 - RNA, 19 nt, Artificial Sequence
  Description of Artificial Sequence: Synthetic oligonucleotide
uguucgagucucaggccgc

SEQ ID NO: 1248629 - RNA, 19 nt, Artificial Sequence
  Description of Artificial Sequence: Synthetic oligonucleotide
caaagucuuugaaaguaga

SEQ ID NO: 1248630 - RNA, 19 nt, Artificial Sequence
  Description of Artificial Sequence: Synthetic oligonucleotide
ucgccauucgucgaagggc

SEQ ID NO: 1248631 - RNA, 19 nt, Artificial Sequence
  Description of Artificial Sequence: Synthetic oligonucleotide
auguugccagccucucgcc

SEQ ID NO: 1248632 - RNA, 19 nt, Artificial Sequence
  Description of Artificial Sequence: Synthetic oligonucleotide
guauaaccgcacaacgugc

SEQ ID NO: 1248633 - RNA, 19 nt, Artificial Sequence
  Description of Artificial Sequence: Synthetic oligonucleotide
aucagauaauuuagaaugu

SEQ ID NO: 1248634 - RNA, 19 nt, Artificial Sequence
  Description of Artificial Sequence: Synthetic oligonucleotide
gaagucguauaaccgcaca

SEQ ID NO: 1248635 - RNA, 19 nt, Artificial Sequence
  Description of Artificial Sequence: Synthetic oligonucleotide
gaucgccauucgucgaagg

SEQ ID NO: 1248636 - RNA, 19 nt, Artificial Sequence
  Description of Artificial Sequence: Synthetic oligonucleotide
caugccaggagggaagcgc

SEQ ID NO: 1248637 - RNA, 19 nt, Artificial Sequence
  Description of Artificial Sequence: Synthetic oligonucleotide
caggacgugcccaaaccag

SEQ ID NO: 1248638 - RNA, 19 nt, Artificial Sequence
  Description of Artificial Sequence: Synthetic oligonucleotide
acaggacgugcccaaacca

SEQ ID NO: 1248639 - RNA, 19 nt, Artificial Sequence
  Description of Artificial Sequence: Synthetic oligonucleotide
gagcugaggguugcgaucc

SEQ ID NO: 1248640 - RNA, 19 nt, Artificial Sequence
  Description of Artificial Sequence: Synthetic oligonucleotide
ucgauuaguucuuccugaa

SEQ ID NO: 1248641 - RNA, 19 nt, Artificial Sequence
  Description of Artificial Sequence: Synthetic oligonucleotide
cacuaaacccagugucagg

SEQ ID NO: 1248642 - RNA, 19 nt, Artificial Sequence
  Description of Artificial Sequence: Synthetic oligonucleotide
aggauaaugucgauuaguu

SEQ ID NO: 1248643 - RNA, 19 nt, Artificial Sequence
  Description of Artificial Sequence: Synthetic oligonucleotide
accguuagccccaucacug

SEQ ID NO: 1248644 - RNA, 19 nt, Artificial Sequence
  Description of Artificial Sequence: Synthetic oligonucleotide
acgugcccaaaccagguga

SEQ ID NO: 1248645 - RNA, 19 nt, Artificial Sequence
  Description of Artificial Sequence: Synthetic oligonucleotide
ucaucagucaggagcccuc

SEQ ID NO: 1248646 - RNA, 19 nt, Artificial Sequence
  Description of Artificial Sequence: Synthetic oligonucleotide
agcacaaucacagcugcaa

SEQ ID NO: 1248647 - RNA, 19 nt, Artificial Sequence
  Description of Artificial Sequence: Synthetic oligonucleotide
ggagccgucgcccugugag

SEQ ID NO: 1248648 - RNA, 19 nt, Artificial Sequence
  Description of Artificial Sequence: Synthetic oligonucleotide
acguggugcgguaaggagg

SEQ ID NO: 1248649 - RNA, 19 nt, Artificial Sequence
  Description of Artificial Sequence: Synthetic oligonucleotide
cauucgucgaagggcagcc

SEQ ID NO: 1248650 - RNA, 19 nt, Artificial Sequence
  Description of Artificial Sequence: Synthetic oligonucleotide
cacuggguacggaaguggc

SEQ ID NO: 1248651 - RNA, 19 nt, Artificial Sequence
  Description of Artificial Sequence: Synthetic oligonucleotide
aagcgguugguccuugguu

SEQ ID NO: 1248652 - RNA, 19 nt, Artificial Sequence
  Description of Artificial Sequence: Synthetic oligonucleotide
uccugagggaucugagaca

SEQ ID NO: 1248653 - RNA, 19 nt, Artificial Sequence
  Description of Artificial Sequence: Synthetic oligonucleotide
acucugcaugaagucaugg

SEQ ID NO: 1248654 - RNA, 19 nt, Artificial Sequence
  Description of Artificial Sequence: Synthetic oligonucleotide
agaagucguauaaccgcac

SEQ ID NO: 1248655 - RNA, 19 nt, Artificial Sequence
  Description of Artificial Sequence: Synthetic oligonucleotide
aagcgccgaagagaccgcc

SEQ ID NO: 1248656 - RNA, 19 nt, Artificial Sequence
  Description of Artificial Sequence: Synthetic oligonucleotide
ugguguauuuccgccaccu

SEQ ID NO: 1248657 - RNA, 19 nt, Artificial Sequence
  Description of Artificial Sequence: Synthetic oligonucleotide
gaacaccccugacaggaac

SEQ ID NO: 1248658 - RNA, 19 nt, Artificial Sequence
  Description of Artificial Sequence: Synthetic oligonucleotide
agcgguugguccuugguuu

SEQ ID NO: 1248659 - RNA, 19 nt, Artificial Sequence
  Description of Artificial Sequence: Synthetic oligonucleotide
agacgcggcuuccaccgcg

SEQ ID NO: 1248660 - RNA, 19 nt, Artificial Sequence
  Description of Artificial Sequence: Synthetic oligonucleotide
cugaguucaggggaacagc

SEQ ID NO: 1248661 - RNA, 19 nt, Artificial Sequence
  Description of Artificial Sequence: Synthetic oligonucleotide
aacgugccugaagucugac

SEQ ID NO: 1248662 - RNA, 19 nt, Artificial Sequence
  Description of Artificial Sequence: Synthetic oligonucleotide
cacguggugcgguaaggag

SEQ ID NO: 1248663 - RNA, 19 nt, Artificial Sequence
  Description of Artificial Sequence: Synthetic oligonucleotide
aggaacccuuuaaugacag

SEQ ID NO: 1248664 - RNA, 19 nt, Artificial Sequence
  Description of Artificial Sequence: Synthetic oligonucleotide
aggacaucuuuuguucgag

SEQ ID NO: 1248665 - RNA, 19 nt, Artificial Sequence
  Description of Artificial Sequence: Synthetic oligonucleotide
gagggaucugagacaacag

SEQ ID NO: 1248666 - RNA, 19 nt, Artificial Sequence
  Description of Artificial Sequence: Synthetic oligonucleotide
cucccuugcaaguucagaa

SEQ ID NO: 1248667 - RNA, 19 nt, Artificial Sequence
  Description of Artificial Sequence: Synthetic oligonucleotide
uaaccgcacaacgugccug

SEQ ID NO: 1248668 - RNA, 19 nt, Artificial Sequence
  Description of Artificial Sequence: Synthetic oligonucleotide
cuccaagugccaccguuag

SEQ ID NO: 1248669 - RNA, 19 nt, Artificial Sequence
  Description of Artificial Sequence: Synthetic oligonucleotide
uccccgaaaccgcugccgc

SEQ ID NO: 1248670 - RNA, 19 nt, Artificial Sequence
  Description of Artificial Sequence: Synthetic oligonucleotide
gacacguggugcgguaagg

SEQ ID NO: 1248671 - RNA, 19 nt, Artificial Sequence
  Description of Artificial Sequence: Synthetic oligonucleotide
cguauaaccgcacaacgug

SEQ ID NO: 1248672 - RNA, 19 nt, Artificial Sequence
  Description of Artificial Sequence: Synthetic oligonucleotide
aggucuccugcucugcuga

SEQ ID NO: 1248673 - RNA, 19 nt, Artificial Sequence
  Description of Artificial Sequence: Synthetic oligonucleotide
auaaccgcacaacgugccu

SEQ ID NO: 1248674 - RNA, 19 nt, Artificial Sequence
  Description of Artificial Sequence: Synthetic oligonucleotide
cgguacagcacaaucacag

SEQ ID NO: 1248675 - RNA, 19 nt, Artificial Sequence
  Description of Artificial Sequence: Synthetic oligonucleotide
ugguuuggucaggacaucu

SEQ ID NO: 1248676 - RNA, 19 nt, Artificial Sequence
  Description of Artificial Sequence: Synthetic oligonucleotide
ugaugggcaucagauaauu

SEQ ID NO: 1248677 - RNA, 19 nt, Artificial Sequence
  Description of Artificial Sequence: Synthetic oligonucleotide
cuggguacggaaguggcuc

SEQ ID NO: 1248678 - RNA, 19 nt, Artificial Sequence
  Description of Artificial Sequence: Synthetic oligonucleotide
ggcaucagauaauuuagaa

SEQ ID NO: 1248679 - RNA, 19 nt, Artificial Sequence
  Description of Artificial Sequence: Synthetic oligonucleotide
aggacgugcccaaaccagg

SEQ ID NO: 1248680 - RNA, 19 nt, Artificial Sequence
  Description of Artificial Sequence: Synthetic oligonucleotide
uucuaccaaggauguugcc

SEQ ID NO: 1248681 - RNA, 19 nt, Artificial Sequence
  Description of Artificial Sequence: Synthetic oligonucleotide
ucgagacgcggcuuccacc

SEQ ID NO: 1248682 - RNA, 19 nt, Artificial Sequence
  Description of Artificial Sequence: Synthetic oligonucleotide
uggugcacuggguacggaa

SEQ ID NO: 1248683 - RNA, 19 nt, Artificial Sequence
  Description of Artificial Sequence: Synthetic oligonucleotide
acaacgugccugaagucug

SEQ ID NO: 1248684 - RNA, 19 nt, Artificial Sequence
  Description of Artificial Sequence: Synthetic oligonucleotide
ggauaaugucgauuaguuc

SEQ ID NO: 1248685 - RNA, 19 nt, Artificial Sequence
  Description of Artificial Sequence: Synthetic oligonucleotide
auccuugcucaacugucga

SEQ ID NO: 1248686 - RNA, 19 nt, Artificial Sequence
  Description of Artificial Sequence: Synthetic oligonucleotide
acugaucgccauucgucga

SEQ ID NO: 1248687 - RNA, 19 nt, Artificial Sequence
  Description of Artificial Sequence: Synthetic oligonucleotide
gccgcagcaccauaucugg

SEQ ID NO: 1248688 - RNA, 19 nt, Artificial Sequence
  Description of Artificial Sequence: Synthetic oligonucleotide
gguacagcacaaucacagc

SEQ ID NO: 1248689 - RNA, 19 nt, Artificial Sequence
  Description of Artificial Sequence: Synthetic oligonucleotide
cuugcucaacugucgaaga

SEQ ID NO: 1248690 - RNA, 19 nt, Artificial Sequence
  Description of Artificial Sequence: Synthetic oligonucleotide
guaauccuugcucaacugu

SEQ ID NO: 1248691 - RNA, 19 nt, Artificial Sequence
  Description of Artificial Sequence: Synthetic oligonucleotide
uucccaagccacaguucca

SEQ ID NO: 1248692 - RNA, 19 nt, Artificial Sequence
  Description of Artificial Sequence: Synthetic oligonucleotide
gguaguaguggagcugagg

SEQ ID NO: 1248693 - RNA, 19 nt, Artificial Sequence
  Description of Artificial Sequence: Synthetic oligonucleotide
ccaugucacagucacaguc

SEQ ID NO: 1248694 - RNA, 19 nt, Artificial Sequence
  Description of Artificial Sequence: Synthetic oligonucleotide
acagcaaucccacccucua

SEQ ID NO: 1248695 - RNA, 19 nt, Artificial Sequence
  Description of Artificial Sequence: Synthetic oligonucleotide
gaccgccugacauccagca

SEQ ID NO: 1248696 - RNA, 19 nt, Artificial Sequence
  Description of Artificial Sequence: Synthetic oligonucleotide
ugguaguaguggagcugag

SEQ ID NO: 1248697 - RNA, 19 nt, Artificial Sequence
  Description of Artificial Sequence: Synthetic oligonucleotide
ucaggagcccucccucacu

SEQ ID NO: 1248698 - RNA, 19 nt, Artificial Sequence
  Description of Artificial Sequence: Synthetic oligonucleotide
gacgugcccaaaccaggug

SEQ ID NO: 1248699 - RNA, 19 nt, Artificial Sequence
  Description of Artificial Sequence: Synthetic oligonucleotide
cucaggccgcagaaguccc

SEQ ID NO: 1248700 - RNA, 19 nt, Artificial Sequence
  Description of Artificial Sequence: Synthetic oligonucleotide
gagcgucucauagggcagg

SEQ ID NO: 1248701 - RNA, 19 nt, Artificial Sequence
  Description of Artificial Sequence: Synthetic oligonucleotide
ugaucgccauucgucgaag

SEQ ID NO: 1248702 - RNA, 19 nt, Artificial Sequence
  Description of Artificial Sequence: Synthetic oligonucleotide
gagccgucgcccugugagg

SEQ ID NO: 1248703 - RNA, 19 nt, Artificial Sequence
  Description of Artificial Sequence: Synthetic oligonucleotide
ggaggauaaugucgauuag

SEQ ID NO: 1248704 - RNA, 19 nt, Artificial Sequence
  Description of Artificial Sequence: Synthetic oligonucleotide
ugacagcaaucccacccuc

SEQ ID NO: 1248705 - RNA, 19 nt, Artificial Sequence
  Description of Artificial Sequence: Synthetic oligonucleotide
ggaacuuaggggcccacuc

SEQ ID NO: 1248706 - RNA, 19 nt, Artificial Sequence
  Description of Artificial Sequence: Synthetic oligonucleotide
uggugcgguaaggagggca

SEQ ID NO: 1248707 - RNA, 19 nt, Artificial Sequence
  Description of Artificial Sequence: Synthetic oligonucleotide
guauuguccauugugggau

SEQ ID NO: 1248708 - RNA, 19 nt, Artificial Sequence
  Description of Artificial Sequence: Synthetic oligonucleotide
ugaaaucccugaggugaug

SEQ ID NO: 1248709 - RNA, 19 nt, Artificial Sequence
  Description of Artificial Sequence: Synthetic oligonucleotide
uggguucacuuggucaaug

SEQ ID NO: 1248710 - RNA, 19 nt, Artificial Sequence
  Description of Artificial Sequence: Synthetic oligonucleotide
caggaacccuuuaaugaca

SEQ ID NO: 1248711 - RNA, 19 nt, Artificial Sequence
  Description of Artificial Sequence: Synthetic oligonucleotide
cugguaauccuugcucaac

SEQ ID NO: 1248712 - RNA, 19 nt, Artificial Sequence
  Description of Artificial Sequence: Synthetic oligonucleotide
uaccaaggauguugccagc

SEQ ID NO: 1248713 - RNA, 19 nt, Artificial Sequence
  Description of Artificial Sequence: Synthetic oligonucleotide
uccuugcucaacugucgaa

SEQ ID NO: 1248714 - RNA, 19 nt, Artificial Sequence
  Description of Artificial Sequence: Synthetic oligonucleotide
caccugaucucaucaguca

SEQ ID NO: 1248715 - RNA, 19 nt, Artificial Sequence
  Description of Artificial Sequence: Synthetic oligonucleotide
ugucuaggagaugcaggac

SEQ ID NO: 1248716 - RNA, 19 nt, Artificial Sequence
  Description of Artificial Sequence: Synthetic oligonucleotide
cacgucggugggaucacug

SEQ ID NO: 1248717 - RNA, 19 nt, Artificial Sequence
  Description of Artificial Sequence: Synthetic oligonucleotide
ugaccacgaugucauggua

SEQ ID NO: 1248718 - RNA, 19 nt, Artificial Sequence
  Description of Artificial Sequence: Synthetic oligonucleotide
ugguagcccugguaguagu

SEQ ID NO: 1248719 - RNA, 19 nt, Artificial Sequence
  Description of Artificial Sequence: Synthetic oligonucleotide
gaaaccgcugccgcagcac

SEQ ID NO: 1248720 - RNA, 19 nt, Artificial Sequence
  Description of Artificial Sequence: Synthetic oligonucleotide
agccacgucggugggauca

SEQ ID NO: 1248721 - RNA, 19 nt, Artificial Sequence
  Description of Artificial Sequence: Synthetic oligonucleotide
uccugccugcuuugucuag

SEQ ID NO: 1248722 - RNA, 19 nt, Artificial Sequence
  Description of Artificial Sequence: Synthetic oligonucleotide
cagcaaucccacccucuag

SEQ ID NO: 1248723 - RNA, 19 nt, Artificial Sequence
  Description of Artificial Sequence: Synthetic oligonucleotide
cugaagucugacaggacgu

SEQ ID NO: 1248724 - RNA, 19 nt, Artificial Sequence
  Description of Artificial Sequence: Synthetic oligonucleotide
agaccgccugacauccagc

SEQ ID NO: 1248725 - RNA, 19 nt, Artificial Sequence
  Description of Artificial Sequence: Synthetic oligonucleotide
agaaguccccgaaaccgcu

SEQ ID NO: 1248726 - RNA, 19 nt, Artificial Sequence
  Description of Artificial Sequence: Synthetic oligonucleotide
cuaaacccagugucaggca

SEQ ID NO: 1248727 - RNA, 19 nt, Artificial Sequence
  Description of Artificial Sequence: Synthetic oligonucleotide
gagcuuggugcacugggua

SEQ ID NO: 1248728 - RNA, 19 nt, Artificial Sequence
  Description of Artificial Sequence: Synthetic oligonucleotide
cacucugcaugaagucaug

SEQ ID NO: 1248729 - RNA, 19 nt, Artificial Sequence
  Description of Artificial Sequence: Synthetic oligonucleotide
agacaacaggugguggaca

SEQ ID NO: 1248730 - RNA, 19 nt, Artificial Sequence
  Description of Artificial Sequence: Synthetic oligonucleotide
gaaguccccgaaaccgcug

SEQ ID NO: 1248731 - RNA, 19 nt, Artificial Sequence
  Description of Artificial Sequence: Synthetic oligonucleotide
guccccgaaaccgcugccg

SEQ ID NO: 1248732 - RNA, 19 nt, Artificial Sequence
  Description of Artificial Sequence: Synthetic oligonucleotide
cccgguacagcacaaucac

SEQ ID NO: 1248733 - RNA, 19 nt, Artificial Sequence
  Description of Artificial Sequence: Synthetic oligonucleotide
agggccggagggccauccc

SEQ ID NO: 1248734 - RNA, 19 nt, Artificial Sequence
  Description of Artificial Sequence: Synthetic oligonucleotide
ccuugguuuggucaggaca

SEQ ID NO: 1248735 - RNA, 19 nt, Artificial Sequence
  Description of Artificial Sequence: Synthetic oligonucleotide
gaggguugcgauccaagau

SEQ ID NO: 1248736 - RNA, 19 nt, Artificial Sequence
  Description of Artificial Sequence: Synthetic oligonucleotide
uggaacuuaggggcccacu

SEQ ID NO: 1248737 - RNA, 19 nt, Artificial Sequence
  Description of Artificial Sequence: Synthetic oligonucleotide
gccaccguuagccccauca

SEQ ID NO: 1248738 - RNA, 19 nt, Artificial Sequence
  Description of Artificial Sequence: Synthetic oligonucleotide
guucuggguucacuugguc

SEQ ID NO: 1248739 - RNA, 19 nt, Artificial Sequence
  Description of Artificial Sequence: Synthetic oligonucleotide
acgugccugaagucugaca

SEQ ID NO: 1248740 - RNA, 19 nt, Artificial Sequence
  Description of Artificial Sequence: Synthetic oligonucleotide
ggccugguguauuuccgcc

SEQ ID NO: 1248741 - RNA, 19 nt, Artificial Sequence
  Description of Artificial Sequence: Synthetic oligonucleotide
caggccgcagaaguccccg

SEQ ID NO: 1248742 - RNA, 19 nt, Artificial Sequence
  Description of Artificial Sequence: Synthetic oligonucleotide
gucggugggaucacuguuc

SEQ ID NO: 1248743 - RNA, 19 nt, Artificial Sequence
  Description of Artificial Sequence: Synthetic oligonucleotide
acacguggugcgguaagga

SEQ ID NO: 1248744 - RNA, 19 nt, Artificial Sequence
  Description of Artificial Sequence: Synthetic oligonucleotide
gacgcggcuuccaccgcgg

SEQ ID NO: 1248745 - RNA, 19 nt, Artificial Sequence
  Description of Artificial Sequence: Synthetic oligonucleotide
gcccaaaccaggugauaag

SEQ ID NO: 1248746 - RNA, 19 nt, Artificial Sequence
  Description of Artificial Sequence: Synthetic oligonucleotide
acucuucaccacugcuagu

SEQ ID NO: 1248747 - RNA, 19 nt, Artificial Sequence
  Description of Artificial Sequence: Synthetic oligonucleotide
guugaggagcacagagcac

SEQ ID NO: 1248748 - RNA, 19 nt, Artificial Sequence
  Description of Artificial Sequence: Synthetic oligonucleotide
gcacuggguacggaagugg

SEQ ID NO: 1248749 - RNA, 19 nt, Artificial Sequence
  Description of Artificial Sequence: Synthetic oligonucleotide
cugacaggaacccuuuaau

SEQ ID NO: 1248750 - RNA, 19 nt, Artificial Sequence
  Description of Artificial Sequence: Synthetic oligonucleotide
ccaugaaaucccugaggug

SEQ ID NO: 1248751 - RNA, 19 nt, Artificial Sequence
  Description of Artificial Sequence: Synthetic oligonucleotide
gccacuugcagcaguugag

SEQ ID NO: 1248752 - RNA, 19 nt, Artificial Sequence
  Description of Artificial Sequence: Synthetic oligonucleotide
gaagcgccgaagagaccgc

SEQ ID NO: 1248753 - RNA, 19 nt, Artificial Sequence
  Description of Artificial Sequence: Synthetic oligonucleotide
uucgagucucaggccgcag

SEQ ID NO: 1248754 - RNA, 19 nt, Artificial Sequence
  Description of Artificial Sequence: Synthetic oligonucleotide
gcaugaguggguggcaggc

SEQ ID NO: 1248755 - RNA, 19 nt, Artificial Sequence
  Description of Artificial Sequence: Synthetic oligonucleotide
aguagaggcugccguucuu

SEQ ID NO: 1248756 - RNA, 19 nt, Artificial Sequence
  Description of Artificial Sequence: Synthetic oligonucleotide
cacaacgugccugaagucu

SEQ ID NO: 1248757 - RNA, 19 nt, Artificial Sequence
  Description of Artificial Sequence: Synthetic oligonucleotide
cugaucgccauucgucgaa

SEQ ID NO: 1248758 - RNA, 19 nt, Artificial Sequence
  Description of Artificial Sequence: Synthetic oligonucleotide
cacaggcgguggcucacag

SEQ ID NO: 1248759 - RNA, 19 nt, Artificial Sequence
  Description of Artificial Sequence: Synthetic oligonucleotide
gagggcaucuucgggccca

SEQ ID NO: 1248760 - RNA, 19 nt, Artificial Sequence
  Description of Artificial Sequence: Synthetic oligonucleotide
gggccugguguauuuccgc

SEQ ID NO: 1248761 - RNA, 19 nt, Artificial Sequence
  Description of Artificial Sequence: Synthetic oligonucleotide
cucacugaucgccauucgu

SEQ ID NO: 1248762 - RNA, 19 nt, Artificial Sequence
  Description of Artificial Sequence: Synthetic oligonucleotide
ggguugcgauccaagauga

SEQ ID NO: 1248763 - RNA, 19 nt, Artificial Sequence
  Description of Artificial Sequence: Synthetic oligonucleotide
aaccgcugccgcagcacca

SEQ ID NO: 1248764 - RNA, 19 nt, Artificial Sequence
  Description of Artificial Sequence: Synthetic oligonucleotide
cagcaccauaucuggccuc

SEQ ID NO: 1248765 - RNA, 19 nt, Artificial Sequence
  Description of Artificial Sequence: Synthetic oligonucleotide
ccgcagaaguccccgaaac

SEQ ID NO: 1248766 - RNA, 19 nt, Artificial Sequence
  Description of Artificial Sequence: Synthetic oligonucleotide
cugucgaagauccuuccuu

SEQ ID NO: 1248767 - RNA, 19 nt, Artificial Sequence
  Description of Artificial Sequence: Synthetic oligonucleotide
gcaccugaucucaucaguc

SEQ ID NO: 1248768 - RNA, 19 nt, Artificial Sequence
  Description of Artificial Sequence: Synthetic oligonucleotide
cccaacuuucuucuaggca

SEQ ID NO: 1248769 - RNA, 19 nt, Artificial Sequence
  Description of Artificial Sequence: Synthetic oligonucleotide
cgauuaguucuuccugaag

SEQ ID NO: 1248770 - RNA, 19 nt, Artificial Sequence
  Description of Artificial Sequence: Synthetic oligonucleotide
gacagcaaucccacccucu

SEQ ID NO: 1248771 - RNA, 19 nt, Artificial Sequence
  Description of Artificial Sequence: Synthetic oligonucleotide
gaggaggauaaugucgauu

SEQ ID NO: 1248772 - RNA, 19 nt, Artificial Sequence
  Description of Artificial Sequence: Synthetic oligonucleotide
gcgguugguccuugguuug

SEQ ID NO: 1248773 - RNA, 19 nt, Artificial Sequence
  Description of Artificial Sequence: Synthetic oligonucleotide
cccucccucacugaucgcc

SEQ ID NO: 1248774 - RNA, 19 nt, Artificial Sequence
  Description of Artificial Sequence: Synthetic oligonucleotide
ccguuagccccaucacugc

SEQ ID NO: 1248775 - RNA, 19 nt, Artificial Sequence
  Description of Artificial Sequence: Synthetic oligonucleotide
agcgucucauagggcaggu

SEQ ID NO: 1248776 - RNA, 19 nt, Artificial Sequence
  Description of Artificial Sequence: Synthetic oligonucleotide
ccauucgucgaagggcagc

SEQ ID NO: 1248777 - RNA, 19 nt, Artificial Sequence
  Description of Artificial Sequence: Synthetic oligonucleotide
gggcaucagauaauuuaga

SEQ ID NO: 1248778 - RNA, 19 nt, Artificial Sequence
  Description of Artificial Sequence: Synthetic oligonucleotide
ggcaucuucgggcccaacu

SEQ ID NO: 1248779 - RNA, 19 nt, Artificial Sequence
  Description of Artificial Sequence: Synthetic oligonucleotide
cucauagggcagguccuga

SEQ ID NO: 1248780 - RNA, 19 nt, Artificial Sequence
  Description of Artificial Sequence: Synthetic oligonucleotide
ccuugacacaggcgguggc

SEQ ID NO: 1248781 - RNA, 19 nt, Artificial Sequence
  Description of Artificial Sequence: Synthetic oligonucleotide
cguuagccccaucacugcc

SEQ ID NO: 1248782 - RNA, 19 nt, Artificial Sequence
  Description of Artificial Sequence: Synthetic oligonucleotide
caccguuagccccaucacu

SEQ ID NO: 1248783 - RNA, 19 nt, Artificial Sequence
  Description of Artificial Sequence: Synthetic oligonucleotide
gguugcgauccaagaugag

SEQ ID NO: 1248784 - RNA, 19 nt, Artificial Sequence
  Description of Artificial Sequence: Synthetic oligonucleotide
guucgagucucaggccgca

SEQ ID NO: 1248785 - RNA, 19 nt, Artificial Sequence
  Description of Artificial Sequence: Synthetic oligonucleotide
gagaugcaggacacguggu

SEQ ID NO: 1248786 - RNA, 19 nt, Artificial Sequence
  Description of Artificial Sequence: Synthetic oligonucleotide
gguacggaaguggcuccug

SEQ ID NO: 1248787 - RNA, 19 nt, Artificial Sequence
  Description of Artificial Sequence: Synthetic oligonucleotide
ccaccguuagccccaucac

SEQ ID NO: 1248788 - RNA, 19 nt, Artificial Sequence
  Description of Artificial Sequence: Synthetic oligonucleotide
ggugauggguagauaauuu

SEQ ID NO: 1248789 - RNA, 19 nt, Artificial Sequence
  Description of Artificial Sequence: Synthetic oligonucleotide
aggacacguggugcgguaa

SEQ ID NO: 1248790 - RNA, 19 nt, Artificial Sequence
  Description of Artificial Sequence: Synthetic oligonucleotide
agaacaccccugacaggaa

SEQ ID NO: 1248791 - RNA, 19 nt, Artificial Sequence
  Description of Artificial Sequence: Synthetic oligonucleotide
cuggaacuuaggggcccac

SEQ ID NO: 1248792 - RNA, 19 nt, Artificial Sequence
  Description of Artificial Sequence: Synthetic oligonucleotide
gucgaagggcagccacguc

SEQ ID NO: 1248793 - RNA, 19 nt, Artificial Sequence
  Description of Artificial Sequence: Synthetic oligonucleotide
cuuggucaaugaugggcau

SEQ ID NO: 1248794 - RNA, 19 nt, Artificial Sequence
  Description of Artificial Sequence: Synthetic oligonucleotide
gcugccgcagcaccauauc

SEQ ID NO: 1248795 - RNA, 19 nt, Artificial Sequence
  Description of Artificial Sequence: Synthetic oligonucleotide
gccgaagagaccgccugac

SEQ ID NO: 1248796 - RNA, 19 nt, Artificial Sequence
  Description of Artificial Sequence: Synthetic oligonucleotide
agcgccgaagagaccgccu

SEQ ID NO: 1248797 - RNA, 19 nt, Artificial Sequence
  Description of Artificial Sequence: Synthetic oligonucleotide
cucugcugaugagcgucuc

SEQ ID NO: 1248798 - RNA, 19 nt, Artificial Sequence
  Description of Artificial Sequence: Synthetic oligonucleotide
gucgcccugugagggccgg

SEQ ID NO: 1248799 - RNA, 19 nt, Artificial Sequence
  Description of Artificial Sequence: Synthetic oligonucleotide
caguuccagcggcccgcgg

SEQ ID NO: 1248800 - RNA, 19 nt, Artificial Sequence
  Description of Artificial Sequence: Synthetic oligonucleotide
ggacaucuuuuguucgagu

SEQ ID NO: 1248801 - RNA, 19 nt, Artificial Sequence
  Description of Artificial Sequence: Synthetic oligonucleotide
gcacucuucaccacugcua

SEQ ID NO: 1248802 - RNA, 19 nt, Artificial Sequence
  Description of Artificial Sequence: Synthetic oligonucleotide
gcaugccaggagggaagcg

SEQ ID NO: 1248803 - RNA, 19 nt, Artificial Sequence
  Description of Artificial Sequence: Synthetic oligonucleotide
cgcacaacgugccugaagu

SEQ ID NO: 1248804 - RNA, 19 nt, Artificial Sequence
  Description of Artificial Sequence: Synthetic oligonucleotide
cggagggccauccccgggg

SEQ ID NO: 1248805 - RNA, 19 nt, Artificial Sequence
  Description of Artificial Sequence: Synthetic oligonucleotide
cugcugaugagcgucucau

SEQ ID NO: 1248806 - RNA, 19 nt, Artificial Sequence
  Description of Artificial Sequence: Synthetic oligonucleotide
cgccauucgucgaagggca

SEQ ID NO: 1248807 - RNA, 19 nt, Artificial Sequence
  Description of Artificial Sequence: Synthetic oligonucleotide
ggagccucgagacgcggcu

SEQ ID NO: 1248808 - RNA, 19 nt, Artificial Sequence
  Description of Artificial Sequence: Synthetic oligonucleotide
guagaggcugccguucuuu

SEQ ID NO: 1248809 - RNA, 19 nt, Artificial Sequence
  Description of Artificial Sequence: Synthetic oligonucleotide
caucuucgggcccaacuuu

SEQ ID NO: 1248810 - RNA, 19 nt, Artificial Sequence
  Description of Artificial Sequence: Synthetic oligonucleotide
ccgcacaacgugccugaag

SEQ ID NO: 1248811 - RNA, 19 nt, Artificial Sequence
  Description of Artificial Sequence: Synthetic oligonucleotide
caggacacguggugcggua

SEQ ID NO: 1248812 - RNA, 19 nt, Artificial Sequence
  Description of Artificial Sequence: Synthetic oligonucleotide
ccgcagcaccauaucuggc

SEQ ID NO: 1248813 - RNA, 19 nt, Artificial Sequence
  Description of Artificial Sequence: Synthetic oligonucleotide
ggcggagccucgagacgcg

SEQ ID NO: 1248814 - RNA, 19 nt, Artificial Sequence
  Description of Artificial Sequence: Synthetic oligonucleotide
gcugccguucuuucagccu

SEQ ID NO: 1248815 - RNA, 19 nt, Artificial Sequence
  Description of Artificial Sequence: Synthetic oligonucleotide
ccgccugacauccagcagu

SEQ ID NO: 1248816 - RNA, 19 nt, Artificial Sequence
  Description of Artificial Sequence: Synthetic oligonucleotide
ccgguacagcacaaucaca

SEQ ID NO: 1248817 - RNA, 19 nt, Artificial Sequence
  Description of Artificial Sequence: Synthetic oligonucleotide
cccagugucaggcaguguu

SEQ ID NO: 1248818 - RNA, 19 nt, Artificial Sequence
  Description of Artificial Sequence: Synthetic oligonucleotide
gugcgguaaggagggcauc

SEQ ID NO: 1248819 - RNA, 19 nt, Artificial Sequence
  Description of Artificial Sequence: Synthetic oligonucleotide
cggcggagccucgagacgc

SEQ ID NO: 1248820 - RNA, 19 nt, Artificial Sequence
  Description of Artificial Sequence: Synthetic oligonucleotide
cuagugccuuucugggaau

SEQ ID NO: 1248821 - RNA, 19 nt, Artificial Sequence
  Description of Artificial Sequence: Synthetic oligonucleotide
agagaccgccugacaucca

SEQ ID NO: 1248822 - RNA, 19 nt, Artificial Sequence
  Description of Artificial Sequence: Synthetic oligonucleotide
ccucccucacugaucgcca

SEQ ID NO: 1248823 - RNA, 19 nt, Artificial Sequence
  Description of Artificial Sequence: Synthetic oligonucleotide
gccauucgucgaagggcag

SEQ ID NO: 1248824 - RNA, 19 nt, Artificial Sequence
  Description of Artificial Sequence: Synthetic oligonucleotide
guauuuccgccaccuucuu

SEQ ID NO: 1248825 - RNA, 19 nt, Artificial Sequence
  Description of Artificial Sequence: Synthetic oligonucleotide
cgaagagaccgccugacau

SEQ ID NO: 1248826 - RNA, 19 nt, Artificial Sequence
  Description of Artificial Sequence: Synthetic oligonucleotide
ccgucgcccugugagggcc

SEQ ID NO: 1248827 - RNA, 19 nt, Artificial Sequence
  Description of Artificial Sequence: Synthetic oligonucleotide
ggugcgguaaggagggcau

SEQ ID NO: 1248828 - RNA, 19 nt, Artificial Sequence
  Description of Artificial Sequence: Synthetic oligonucleotide
gccgucgcccugugagggc

SEQ ID NO: 1248829 - RNA, 19 nt, Artificial Sequence
  Description of Artificial Sequence: Synthetic oligonucleotide
ggacgugcccaaaccaggu

SEQ ID NO: 1248830 - RNA, 19 nt, Artificial Sequence
  Description of Artificial Sequence: Synthetic oligonucleotide
gccucucgcccaccaccag

SEQ ID NO: 1248831 - RNA, 19 nt, Artificial Sequence
  Description of Artificial Sequence: Synthetic oligonucleotide
ggacuuccugcucccggua

SEQ ID NO: 1248832 - RNA, 19 nt, Artificial Sequence
  Description of Artificial Sequence: Synthetic oligonucleotide
guggugcgguaaggagggc

SEQ ID NO: 1248833 - RNA, 19 nt, Artificial Sequence
  Description of Artificial Sequence: Synthetic oligonucleotide
ccggagggccauccccggg

SEQ ID NO: 1248834 - RNA, 19 nt, Artificial Sequence
  Description of Artificial Sequence: Synthetic oligonucleotide
gcggagccucgagacgcgg

SEQ ID NO: 1248835 - RNA, 19 nt, Artificial Sequence
  Description of Artificial Sequence: Synthetic oligonucleotide
gccaggagggaagcgccga

SEQ ID NO: 1248836 - RNA, 19 nt, Artificial Sequence
  Description of Artificial Sequence: Synthetic oligonucleotide
cggagccucgagacgcggc

SEQ ID NO: 1248837 - RNA, 19 nt, Artificial Sequence
  Description of Artificial Sequence: Synthetic oligonucleotide
cacccucuagugccuuucu

SEQ ID NO: 1248838 - RNA, 19 nt, Artificial Sequence
  Description of Artificial Sequence: Synthetic oligonucleotide
ccgaagagaccgccugaca

SEQ ID NO: 1248839 - RNA, 19 nt, Artificial Sequence
  Description of Artificial Sequence: Synthetic oligonucleotide
gguguauuuccgccaccuu

SEQ ID NO: 1248840 - RNA, 19 nt, Artificial Sequence
  Description of Artificial Sequence: Synthetic oligonucleotide
cagccacgucggugggauc

SEQ ID NO: 1248841 - RNA, 19 nt, Artificial Sequence
  Description of Artificial Sequence: Synthetic oligonucleotide
gccucgagacgcggcuucc

SEQ ID NO: 1248842 - RNA, 19 nt, Artificial Sequence
  Description of Artificial Sequence: Synthetic oligonucleotide
ucgcccugugagggccgga

SEQ ID NO: 1248843 - RNA, 19 nt, Artificial Sequence
  Description of Artificial Sequence: Synthetic oligonucleotide
accuggcaccugaucucau

SEQ ID NO: 1248844 - RNA, 19 nt, Artificial Sequence
  Description of Artificial Sequence: Synthetic oligonucleotide
gccacgucggugggaucac

SEQ ID NO: 1248845 - RNA, 19 nt, Artificial Sequence
  Description of Artificial Sequence: Synthetic oligonucleotide
cgucgcccugugagggccg

SEQ ID NO: 1248846 - RNA, 19 nt, Artificial Sequence
  Description of Artificial Sequence: Synthetic oligonucleotide
ccccgaaaccgcugccgca

SEQ ID NO: 1248847 - RNA, 19 nt, Artificial Sequence
  Description of Artificial Sequence: Synthetic oligonucleotide
ggguacggaaguggcuccu

SEQ ID NO: 1248848 - RNA, 19 nt, Artificial Sequence
  Description of Artificial Sequence: Synthetic oligonucleotide
gagccucgagacgcggcuu

SEQ ID NO: 1248849 - RNA, 19 nt, Artificial Sequence
  Description of Artificial Sequence: Synthetic oligonucleotide
cgccugacauccagcagua

SEQ ID NO: 1248850 - RNA, 19 nt, Artificial Sequence
  Description of Artificial Sequence: Synthetic oligonucleotide
ggucuccugcucugcugau

SEQ ID NO: 1248851 - RNA, 19 nt, Artificial Sequence
  Description of Artificial Sequence: Synthetic oligonucleotide
gcuggcggcggagccucga

SEQ ID NO: 1248852 - RNA, 19 nt, Artificial Sequence
  Description of Artificial Sequence: Synthetic oligonucleotide
cccugaggugauggguaga

SEQ ID NO: 1248853 - RNA, 19 nt, Artificial Sequence
  Description of Artificial Sequence: Synthetic oligonucleotide
ggcuggcggcggagccucg

SEQ ID NO: 1248854 - RNA, 19 nt, Artificial Sequence
  Description of Artificial Sequence: Synthetic oligonucleotide
cgccgaagagaccgccuga

SEQ ID NO: 1248855 - RNA, 19 nt, Artificial Sequence
  Description of Artificial Sequence: Synthetic oligonucleotide
ccucgagacgcggcuucca

SEQ ID NO: 1248856 - RNA, 19 nt, Artificial Sequence
  Description of Artificial Sequence: Synthetic oligonucleotide
gccccggcuggcggcggag

SEQ ID NO: 1248857 - RNA, 19 nt, Artificial Sequence
  Description of Artificial Sequence: Synthetic oligonucleotide
cgucgaagggcagccacgu

SEQ ID NO: 1248858 - RNA, 19 nt, Artificial Sequence
  Description of Artificial Sequence: Synthetic oligonucleotide
ccgcggagccgucgcccug

SEQ ID NO: 1248859 - RNA, 19 nt, Artificial Sequence
  Description of Artificial Sequence: Synthetic oligonucleotide
gcgguaaggagggcaucuu

SEQ ID NO: 1248860 - RNA, 19 nt, Artificial Sequence
  Description of Artificial Sequence: Synthetic oligonucleotide
cgucggugggaucacuguu

SEQ ID NO: 1248861 - RNA, 19 nt, Artificial Sequence
  Description of Artificial Sequence: Synthetic oligonucleotide
cccacuccagggcacucuu

SEQ ID NO: 1248862 - RNA, 19 nt, Artificial Sequence
  Description of Artificial Sequence: Synthetic oligonucleotide
cggagccgucgcccuguga

SEQ ID NO: 1248863 - RNA, 19 nt, Artificial Sequence
  Description of Artificial Sequence: Synthetic oligonucleotide
ccacgucggugggaucacu

SEQ ID NO: 1248864 - RNA, 19 nt, Artificial Sequence
  Description of Artificial Sequence: Synthetic oligonucleotide
aauacaaagcuuuuaaagg

SEQ ID NO: 1248865 - RNA, 19 nt, Artificial Sequence
  Description of Artificial Sequence: Synthetic oligonucleotide
uauaauguaggcaucacag

SEQ ID NO: 1248866 - RNA, 19 nt, Artificial Sequence
  Description of Artificial Sequence: Synthetic oligonucleotide
uuugccaauauaauguagg

SEQ ID NO: 1248867 - RNA, 19 nt, Artificial Sequence
  Description of Artificial Sequence: Synthetic oligonucleotide
aauuaaacugccuugaaua

SEQ ID NO: 1248868 - RNA, 19 nt, Artificial Sequence
  Description of Artificial Sequence: Synthetic oligonucleotide
cuaagucugacuuugaggc

SEQ ID NO: 1248869 - RNA, 19 nt, Artificial Sequence
  Description of Artificial Sequence: Synthetic oligonucleotide
aguuagguaaacuggaggg

SEQ ID NO: 1248870 - RNA, 19 nt, Artificial Sequence
  Description of Artificial Sequence: Synthetic oligonucleotide
aacuaauaccacgaaaggc

SEQ ID NO: 1248871 - RNA, 19 nt, Artificial Sequence
  Description of Artificial Sequence: Synthetic oligonucleotide
aaugauuuuauagucacca

SEQ ID NO: 1248872 - RNA, 19 nt, Artificial Sequence
  Description of Artificial Sequence: Synthetic oligonucleotide
uaauguaggcaucacagag

SEQ ID NO: 1248873 - RNA, 19 nt, Artificial Sequence
  Description of Artificial Sequence: Synthetic oligonucleotide
uucuauauucuccuguggg

SEQ ID NO: 1248874 - RNA, 19 nt, Artificial Sequence
  Description of Artificial Sequence: Synthetic oligonucleotide
uguaugugcagauagugag

SEQ ID NO: 1248875 - RNA, 19 nt, Artificial Sequence
  Description of Artificial Sequence: Synthetic oligonucleotide
agugggaacaacuacaucu

SEQ ID NO: 1248876 - RNA, 19 nt, Artificial Sequence
  Description of Artificial Sequence: Synthetic oligonucleotide
uaguguauugcacaucugg

SEQ ID NO: 1248877 - RNA, 19 nt, Artificial Sequence
  Description of Artificial Sequence: Synthetic oligonucleotide
aauucaauuaaacugccuu

SEQ ID NO: 1248878 - RNA, 19 nt, Artificial Sequence
  Description of Artificial Sequence: Synthetic oligonucleotide
uaaucuguagccaaggcac

SEQ ID NO: 1248879 - RNA, 19 nt, Artificial Sequence
  Description of Artificial Sequence: Synthetic oligonucleotide
ugaucaauaucacuaagac

SEQ ID NO: 1248880 - RNA, 19 nt, Artificial Sequence
  Description of Artificial Sequence: Synthetic oligonucleotide
uuuaaaggauucauagucc

SEQ ID NO: 1248881 - RNA, 19 nt, Artificial Sequence
  Description of Artificial Sequence: Synthetic oligonucleotide
uggauuauugucaaauuca

SEQ ID NO: 1248882 - RNA, 19 nt, Artificial Sequence
  Description of Artificial Sequence: Synthetic oligonucleotide
aucaauaucacuaagacuu

SEQ ID NO: 1248883 - RNA, 19 nt, Artificial Sequence
  Description of Artificial Sequence: Synthetic oligonucleotide
aauaauggcccaaguaacc

SEQ ID NO: 1248884 - RNA, 19 nt, Artificial Sequence
  Description of Artificial Sequence: Synthetic oligonucleotide
aucacuaagacuucguuug

SEQ ID NO: 1248885 - RNA, 19 nt, Artificial Sequence
  Description of Artificial Sequence: Synthetic oligonucleotide
ugaagaugaucuuuuauca

SEQ ID NO: 1248886 - RNA, 19 nt, Artificial Sequence
  Description of Artificial Sequence: Synthetic oligonucleotide
uucaauuucucuugcaacc

SEQ ID NO: 1248887 - RNA, 19 nt, Artificial Sequence
  Description of Artificial Sequence: Synthetic oligonucleotide
aaccuuaauuuccauagug

SEQ ID NO: 1248888 - RNA, 19 nt, Artificial Sequence
  Description of Artificial Sequence: Synthetic oligonucleotide
acugccuugaauaauggcc

SEQ ID NO: 1248889 - RNA, 19 nt, Artificial Sequence
  Description of Artificial Sequence: Synthetic oligonucleotide
aauggaaccaugaaggugu

SEQ ID NO: 1248890 - RNA, 19 nt, Artificial Sequence
  Description of Artificial Sequence: Synthetic oligonucleotide
aaggcaacuuccauaaggc

SEQ ID NO: 1248891 - RNA, 19 nt, Artificial Sequence
  Description of Artificial Sequence: Synthetic oligonucleotide
uauguucagaacuaauacc

SEQ ID NO: 1248892 - RNA, 19 nt, Artificial Sequence
  Description of Artificial Sequence: Synthetic oligonucleotide
ugauuuuauagucaccaga

SEQ ID NO: 1248893 - RNA, 19 nt, Artificial Sequence
  Description of Artificial Sequence: Synthetic oligonucleotide
acugaaaucauuuggccug

SEQ ID NO: 1248894 - RNA, 19 nt, Artificial Sequence
  Description of Artificial Sequence: Synthetic oligonucleotide
aacaccgcuucucugagag

SEQ ID NO: 1248895 - RNA, 19 nt, Artificial Sequence
  Description of Artificial Sequence: Synthetic oligonucleotide
gacacguucagcuacuuug

SEQ ID NO: 1248896 - RNA, 19 nt, Artificial Sequence
  Description of Artificial Sequence: Synthetic oligonucleotide
ucuuuuggucaacugaaag

SEQ ID NO: 1248897 - RNA, 19 nt, Artificial Sequence
  Description of Artificial Sequence: Synthetic oligonucleotide
aucacaguuagguaaacug

SEQ ID NO: 1248898 - RNA, 19 nt, Artificial Sequence
  Description of Artificial Sequence: Synthetic oligonucleotide
uucagaacuaauaccacga

SEQ ID NO: 1248899 - RNA, 19 nt, Artificial Sequence
  Description of Artificial Sequence: Synthetic oligonucleotide
ugauuggcugauuuguugg

SEQ ID NO: 1248900 - RNA, 19 nt, Artificial Sequence
  Description of Artificial Sequence: Synthetic oligonucleotide
caucguaacacauauggug

SEQ ID NO: 1248901 - RNA, 19 nt, Artificial Sequence
  Description of Artificial Sequence: Synthetic oligonucleotide
aauuuaaaccuccugccaa

SEQ ID NO: 1248902 - RNA, 19 nt, Artificial Sequence
  Description of Artificial Sequence: Synthetic oligonucleotide
ggcaucguaacacauaugg

SEQ ID NO: 1248903 - RNA, 19 nt, Artificial Sequence
  Description of Artificial Sequence: Synthetic oligonucleotide
aacaacuacaucuucuaaa

SEQ ID NO: 1248904 - RNA, 19 nt, Artificial Sequence
  Description of Artificial Sequence: Synthetic oligonucleotide
gaacuaauaccacgaaagg

SEQ ID NO: 1248905 - RNA, 19 nt, Artificial Sequence
  Description of Artificial Sequence: Synthetic oligonucleotide
ucuagguuugauuucuugc

SEQ ID NO: 1248906 - RNA, 19 nt, Artificial Sequence
  Description of Artificial Sequence: Synthetic oligonucleotide
aguaucaauaguaauggag

SEQ ID NO: 1248907 - RNA, 19 nt, Artificial Sequence
  Description of Artificial Sequence: Synthetic oligonucleotide
aguaguguauugcacaucu

SEQ ID NO: 1248908 - RNA, 19 nt, Artificial Sequence
  Description of Artificial Sequence: Synthetic oligonucleotide
uuugguaaauuuaaaccuc

SEQ ID NO: 1248909 - RNA, 19 nt, Artificial Sequence
  Description of Artificial Sequence: Synthetic oligonucleotide
aauauaauguaggcaucac

SEQ ID NO: 1248910 - RNA, 19 nt, Artificial Sequence
  Description of Artificial Sequence: Synthetic oligonucleotide
gacuuugaggcuuucuagg

SEQ ID NO: 1248911 - RNA, 19 nt, Artificial Sequence
  Description of Artificial Sequence: Synthetic oligonucleotide
auauugauaccuuuucucu

SEQ ID NO: 1248912 - RNA, 19 nt, Artificial Sequence
  Description of Artificial Sequence: Synthetic oligonucleotide
uuuuaauccacaguuucgc

SEQ ID NO: 1248913 - RNA, 19 nt, Artificial Sequence
  Description of Artificial Sequence: Synthetic oligonucleotide
uugguaaauuuaaaccucc

SEQ ID NO: 1248914 - RNA, 19 nt, Artificial Sequence
  Description of Artificial Sequence: Synthetic oligonucleotide
uuauugucaaauucaauua

SEQ ID NO: 1248915 - RNA, 19 nt, Artificial Sequence
  Description of Artificial Sequence: Synthetic oligonucleotide
uagccaaggcacaagauca

SEQ ID NO: 1248916 - RNA, 19 nt, Artificial Sequence
  Description of Artificial Sequence: Synthetic oligonucleotide
acuaauaccacgaaaggca

SEQ ID NO: 1248917 - RNA, 19 nt, Artificial Sequence
  Description of Artificial Sequence: Synthetic oligonucleotide
uuucuauauucuccugugg

SEQ ID NO: 1248918 - RNA, 19 nt, Artificial Sequence
  Description of Artificial Sequence: Synthetic oligonucleotide
guauguucagaacuaauac

SEQ ID NO: 1248919 - RNA, 19 nt, Artificial Sequence
  Description of Artificial Sequence: Synthetic oligonucleotide
uguauugcacaucuggaaa

SEQ ID NO: 1248920 - RNA, 19 nt, Artificial Sequence
  Description of Artificial Sequence: Synthetic oligonucleotide
caaaaggaccucuacaaug

SEQ ID NO: 1248921 - RNA, 19 nt, Artificial Sequence
  Description of Artificial Sequence: Synthetic oligonucleotide
accaucuuacaucucuccc

SEQ ID NO: 1248922 - RNA, 19 nt, Artificial Sequence
  Description of Artificial Sequence: Synthetic oligonucleotide
uauucaccaauagggaugg

SEQ ID NO: 1248923 - RNA, 19 nt, Artificial Sequence
  Description of Artificial Sequence: Synthetic oligonucleotide
uguaucuuuuaugagcacc

SEQ ID NO: 1248924 - RNA, 19 nt, Artificial Sequence
  Description of Artificial Sequence: Synthetic oligonucleotide
agaucaaaaucauucugug

SEQ ID NO: 1248925 - RNA, 19 nt, Artificial Sequence
  Description of Artificial Sequence: Synthetic oligonucleotide
ugcaaccgcaucaagacac

SEQ ID NO: 1248926 - RNA, 19 nt, Artificial Sequence
  Description of Artificial Sequence: Synthetic oligonucleotide
uuguugacaagauauucac

SEQ ID NO: 1248927 - RNA, 19 nt, Artificial Sequence
  Description of Artificial Sequence: Synthetic oligonucleotide
uucucuugcaaccgcauca

SEQ ID NO: 1248928 - RNA, 19 nt, Artificial Sequence
  Description of Artificial Sequence: Synthetic oligonucleotide
cuugcaaccgcaucaagac

SEQ ID NO: 1248929 - RNA, 19 nt, Artificial Sequence
  Description of Artificial Sequence: Synthetic oligonucleotide
aaggcaucguaacacauau

SEQ ID NO: 1248930 - RNA, 19 nt, Artificial Sequence
  Description of Artificial Sequence: Synthetic oligonucleotide
uggagggauacuuugauau

SEQ ID NO: 1248931 - RNA, 19 nt, Artificial Sequence
  Description of Artificial Sequence: Synthetic oligonucleotide
ucugaucaauaucacuaag

SEQ ID NO: 1248932 - RNA, 19 nt, Artificial Sequence
  Description of Artificial Sequence: Synthetic oligonucleotide
accgcaucaagacacguuc

SEQ ID NO: 1248933 - RNA, 19 nt, Artificial Sequence
  Description of Artificial Sequence: Synthetic oligonucleotide
accacgaaaggcaauagac

SEQ ID NO: 1248934 - RNA, 19 nt, Artificial Sequence
  Description of Artificial Sequence: Synthetic oligonucleotide
uugcaugacagcaucuugc

SEQ ID NO: 1248935 - RNA, 19 nt, Artificial Sequence
  Description of Artificial Sequence: Synthetic oligonucleotide
ucuugcaaccgcaucaaga

SEQ ID NO: 1248936 - RNA, 19 nt, Artificial Sequence
  Description of Artificial Sequence: Synthetic oligonucleotide
acugaaaggcacugaaauc

SEQ ID NO: 1248937 - RNA, 19 nt, Artificial Sequence
  Description of Artificial Sequence: Synthetic oligonucleotide
uauugauaccuuuucucug

SEQ ID NO: 1248938 - RNA, 19 nt, Artificial Sequence
  Description of Artificial Sequence: Synthetic oligonucleotide
ugauuucuugccuugacau

SEQ ID NO: 1248939 - RNA, 19 nt, Artificial Sequence
  Description of Artificial Sequence: Synthetic oligonucleotide
uuaaaccuccugccaagcg

SEQ ID NO: 1248940 - RNA, 19 nt, Artificial Sequence
  Description of Artificial Sequence: Synthetic oligonucleotide
uuaauuggguuguaaucug

SEQ ID NO: 1248941 - RNA, 19 nt, Artificial Sequence
  Description of Artificial Sequence: Synthetic oligonucleotide
ugaaacucugaucaauauc

SEQ ID NO: 1248942 - RNA, 19 nt, Artificial Sequence
  Description of Artificial Sequence: Synthetic oligonucleotide
auugauaccuuuucucuga

SEQ ID NO: 1248943 - RNA, 19 nt, Artificial Sequence
  Description of Artificial Sequence: Synthetic oligonucleotide
auuuaaaccuccugccaag

SEQ ID NO: 1248944 - RNA, 19 nt, Artificial Sequence
  Description of Artificial Sequence: Synthetic oligonucleotide
uggaaaaccuguugcauga

SEQ ID NO: 1248945 - RNA, 19 nt, Artificial Sequence
  Description of Artificial Sequence: Synthetic oligonucleotide
aggcacugaaaucauuugg

SEQ ID NO: 1248946 - RNA, 19 nt, Artificial Sequence
  Description of Artificial Sequence: Synthetic oligonucleotide
ugcaguaguguauugcaca

SEQ ID NO: 1248947 - RNA, 19 nt, Artificial Sequence
  Description of Artificial Sequence: Synthetic oligonucleotide
uaaaccuccugccaagcga

SEQ ID NO: 1248948 - RNA, 19 nt, Artificial Sequence
  Description of Artificial Sequence: Synthetic oligonucleotide
uguaaucuguagccaaggc

SEQ ID NO: 1248949 - RNA, 19 nt, Artificial Sequence
  Description of Artificial Sequence: Synthetic oligonucleotide
uuggucaacugaaaggcac

SEQ ID NO: 1248950 - RNA, 19 nt, Artificial Sequence
  Description of Artificial Sequence: Synthetic oligonucleotide
cugccuugaauaauggccc

SEQ ID NO: 1248951 - RNA, 19 nt, Artificial Sequence
  Description of Artificial Sequence: Synthetic oligonucleotide
auacaaaaggaccucuaca

SEQ ID NO: 1248952 - RNA, 19 nt, Artificial Sequence
  Description of Artificial Sequence: Synthetic oligonucleotide
uugauauuaauuggguugu

SEQ ID NO: 1248953 - RNA, 19 nt, Artificial Sequence
  Description of Artificial Sequence: Synthetic oligonucleotide
guaucaauaguaauggaga

SEQ ID NO: 1248954 - RNA, 19 nt, Artificial Sequence
  Description of Artificial Sequence: Synthetic oligonucleotide
ugaguuuccucuuucuagu

SEQ ID NO: 1248955 - RNA, 19 nt, Artificial Sequence
  Description of Artificial Sequence: Synthetic oligonucleotide
acacauauggugugcguuc

SEQ ID NO: 1248956 - RNA, 19 nt, Artificial Sequence
  Description of Artificial Sequence: Synthetic oligonucleotide
auauaauguaggcaucaca

SEQ ID NO: 1248957 - RNA, 19 nt, Artificial Sequence
  Description of Artificial Sequence: Synthetic oligonucleotide
uugauuucuugccuugaca

SEQ ID NO: 1248958 - RNA, 19 nt, Artificial Sequence
  Description of Artificial Sequence: Synthetic oligonucleotide
uuguaugugcagauaguga

SEQ ID NO: 1248959 - RNA, 19 nt, Artificial Sequence
  Description of Artificial Sequence: Synthetic oligonucleotide
auagugaguuuccucuuuc

SEQ ID NO: 1248960 - RNA, 19 nt, Artificial Sequence
  Description of Artificial Sequence: Synthetic oligonucleotide
uguugggauauugauaccu

SEQ ID NO: 1248961 - RNA, 19 nt, Artificial Sequence
  Description of Artificial Sequence: Synthetic oligonucleotide
gauuggcugauuuguuggg

SEQ ID NO: 1248962 - RNA, 19 nt, Artificial Sequence
  Description of Artificial Sequence: Synthetic oligonucleotide
aguaaccaaaguuuucagu

SEQ ID NO: 1248963 - RNA, 19 nt, Artificial Sequence
  Description of Artificial Sequence: Synthetic oligonucleotide
ucuauauuuucuacuucaa

SEQ ID NO: 1248964 - RNA, 19 nt, Artificial Sequence
  Description of Artificial Sequence: Synthetic oligonucleotide
caguuagguaaacuggagg

SEQ ID NO: 1248965 - RNA, 19 nt, Artificial Sequence
  Description of Artificial Sequence: Synthetic oligonucleotide
auuaaacugccuugaauaa

SEQ ID NO: 1248966 - RNA, 19 nt, Artificial Sequence
  Description of Artificial Sequence: Synthetic oligonucleotide
aagaucuuugcacuuccau

SEQ ID NO: 1248967 - RNA, 19 nt, Artificial Sequence
  Description of Artificial Sequence: Synthetic oligonucleotide
cacacacacacacacacac

SEQ ID NO: 1248968 - RNA, 19 nt, Artificial Sequence
  Description of Artificial Sequence: Synthetic oligonucleotide
uucuugccuugacauaagg

SEQ ID NO: 1248969 - RNA, 19 nt, Artificial Sequence
  Description of Artificial Sequence: Synthetic oligonucleotide
cauucaagaacaccgcuuc

SEQ ID NO: 1248970 - RNA, 19 nt, Artificial Sequence
  Description of Artificial Sequence: Synthetic oligonucleotide
uucgcuaagucugacuuug

SEQ ID NO: 1248971 - RNA, 19 nt, Artificial Sequence
  Description of Artificial Sequence: Synthetic oligonucleotide
aauaccacgaaaggcaaua

SEQ ID NO: 1248972 - RNA, 19 nt, Artificial Sequence
  Description of Artificial Sequence: Synthetic oligonucleotide
cauagugggaacaacuaca

SEQ ID NO: 1248973 - RNA, 19 nt, Artificial Sequence
  Description of Artificial Sequence: Synthetic oligonucleotide
caaagcuuuuaaaggauuc

SEQ ID NO: 1248974 - RNA, 19 nt, Artificial Sequence
  Description of Artificial Sequence: Synthetic oligonucleotide
uguaaucaguagauucucu

SEQ ID NO: 1248975 - RNA, 19 nt, Artificial Sequence
  Description of Artificial Sequence: Synthetic oligonucleotide
gagaacugcgcauaacuuc

SEQ ID NO: 1248976 - RNA, 19 nt, Artificial Sequence
  Description of Artificial Sequence: Synthetic oligonucleotide
ugggaggcauccaaguuug

SEQ ID NO: 1248977 - RNA, 19 nt, Artificial Sequence
  Description of Artificial Sequence: Synthetic oligonucleotide
cacgaaaggcaauagacca

SEQ ID NO: 1248978 - RNA, 19 nt, Artificial Sequence
  Description of Artificial Sequence: Synthetic oligonucleotide
auauucaccaauagggaug

SEQ ID NO: 1248979 - RNA, 19 nt, Artificial Sequence
  Description of Artificial Sequence: Synthetic oligonucleotide
aguuuguguauguucagaa

SEQ ID NO: 1248980 - RNA, 19 nt, Artificial Sequence
  Description of Artificial Sequence: Synthetic oligonucleotide
gaucuuuuaucacuuccca

SEQ ID NO: 1248981 - RNA, 19 nt, Artificial Sequence
  Description of Artificial Sequence: Synthetic oligonucleotide
uuugcaaggcauacuguaa

SEQ ID NO: 1248982 - RNA, 19 nt, Artificial Sequence
  Description of Artificial Sequence: Synthetic oligonucleotide
cuuguaugugcagauagug

SEQ ID NO: 1248983 - RNA, 19 nt, Artificial Sequence
  Description of Artificial Sequence: Synthetic oligonucleotide
uguucagaacuaauaccac

SEQ ID NO: 1248984 - RNA, 19 nt, Artificial Sequence
  Description of Artificial Sequence: Synthetic oligonucleotide
uucuccgcgacguuguuga

SEQ ID NO: 1248985 - RNA, 19 nt, Artificial Sequence
  Description of Artificial Sequence: Synthetic oligonucleotide
guaaucuguagccaaggca

SEQ ID NO: 1248986 - RNA, 19 nt, Artificial Sequence
  Description of Artificial Sequence: Synthetic oligonucleotide
uccuucaccaucuuacauc

SEQ ID NO: 1248987 - RNA, 19 nt, Artificial Sequence
  Description of Artificial Sequence: Synthetic oligonucleotide
uuaauccacaguuucgcua

SEQ ID NO: 1248988 - RNA, 19 nt, Artificial Sequence
  Description of Artificial Sequence: Synthetic oligonucleotide
auuguugacaagauauuca

SEQ ID NO: 1248989 - RNA, 19 nt, Artificial Sequence
  Description of Artificial Sequence: Synthetic oligonucleotide
aauggagaucugucucauc

SEQ ID NO: 1248990 - RNA, 19 nt, Artificial Sequence
  Description of Artificial Sequence: Synthetic oligonucleotide
aauaucacuaagacuucgu

SEQ ID NO: 1248991 - RNA, 19 nt, Artificial Sequence
  Description of Artificial Sequence: Synthetic oligonucleotide
auaguaauggagacagauc

SEQ ID NO: 1248992 - RNA, 19 nt, Artificial Sequence
  Description of Artificial Sequence: Synthetic oligonucleotide
uuuaauccacaguuucgcu

SEQ ID NO: 1248993 - RNA, 19 nt, Artificial Sequence
  Description of Artificial Sequence: Synthetic oligonucleotide
auaauguaggcaucacaga

SEQ ID NO: 1248994 - RNA, 19 nt, Artificial Sequence
  Description of Artificial Sequence: Synthetic oligonucleotide
agaccaaauuuuaauccac

SEQ ID NO: 1248995 - RNA, 19 nt, Artificial Sequence
  Description of Artificial Sequence: Synthetic oligonucleotide
uaucacuaagacuucguuu

SEQ ID NO: 1248996 - RNA, 19 nt, Artificial Sequence
  Description of Artificial Sequence: Synthetic oligonucleotide
uuuggucaacugaaaggca

SEQ ID NO: 1248997 - RNA, 19 nt, Artificial Sequence
  Description of Artificial Sequence: Synthetic oligonucleotide
auauggugugcguucuccg

SEQ ID NO: 1248998 - RNA, 19 nt, Artificial Sequence
  Description of Artificial Sequence: Synthetic oligonucleotide
uccugugcaccauucaaga

SEQ ID NO: 1248999 - RNA, 19 nt, Artificial Sequence
  Description of Artificial Sequence: Synthetic oligonucleotide
agugccuucuuccacgccu

SEQ ID NO: 1249000 - RNA, 19 nt, Artificial Sequence
  Description of Artificial Sequence: Synthetic oligonucleotide
uucguuugcauuccugauc

SEQ ID NO: 1249001 - RNA, 19 nt, Artificial Sequence
  Description of Artificial Sequence: Synthetic oligonucleotide
uucuagguuugauuucuug

SEQ ID NO: 1249002 - RNA, 19 nt, Artificial Sequence
  Description of Artificial Sequence: Synthetic oligonucleotide
gguaaauuuaaaccuccug

SEQ ID NO: 1249003 - RNA, 19 nt, Artificial Sequence
  Description of Artificial Sequence: Synthetic oligonucleotide
aguggaucauacaaaagga

SEQ ID NO: 1249004 - RNA, 19 nt, Artificial Sequence
  Description of Artificial Sequence: Synthetic oligonucleotide
aauuuccauagugggaaca

SEQ ID NO: 1249005 - RNA, 19 nt, Artificial Sequence
  Description of Artificial Sequence: Synthetic oligonucleotide
guaacacauauggugugcg

SEQ ID NO: 1249006 - RNA, 19 nt, Artificial Sequence
  Description of Artificial Sequence: Synthetic oligonucleotide
ugucuauauuuucuacuuc

SEQ ID NO: 1249007 - RNA, 19 nt, Artificial Sequence
  Description of Artificial Sequence: Synthetic oligonucleotide
guagccaaggcacaagauc

SEQ ID NO: 1249008 - RNA, 19 nt, Artificial Sequence
  Description of Artificial Sequence: Synthetic oligonucleotide
uugccuugacauaaggcaa

SEQ ID NO: 1249009 - RNA, 19 nt, Artificial Sequence
  Description of Artificial Sequence: Synthetic oligonucleotide
uaaucaguagauucucuuu

SEQ ID NO: 1249010 - RNA, 19 nt, Artificial Sequence
  Description of Artificial Sequence: Synthetic oligonucleotide
agcagaguuuccugagaac

SEQ ID NO: 1249011 - RNA, 19 nt, Artificial Sequence
  Description of Artificial Sequence: Synthetic oligonucleotide
aaacugccuugaauaaugg

SEQ ID NO: 1249012 - RNA, 19 nt, Artificial Sequence
  Description of Artificial Sequence: Synthetic oligonucleotide
cagccuacuucuauuuucc

SEQ ID NO: 1249013 - RNA, 19 nt, Artificial Sequence
  Description of Artificial Sequence: Synthetic oligonucleotide
auggugugcguucuccgcg

SEQ ID NO: 1249014 - RNA, 19 nt, Artificial Sequence
  Description of Artificial Sequence: Synthetic oligonucleotide
uuagguaaacuggagggau

SEQ ID NO: 1249015 - RNA, 19 nt, Artificial Sequence
  Description of Artificial Sequence: Synthetic oligonucleotide
caauaucacuaagacuucg

SEQ ID NO: 1249016 - RNA, 19 nt, Artificial Sequence
  Description of Artificial Sequence: Synthetic oligonucleotide
gcugagucuaaauggaacc

SEQ ID NO: 1249017 - RNA, 19 nt, Artificial Sequence
  Description of Artificial Sequence: Synthetic oligonucleotide
uauggugugcguucuccgc

SEQ ID NO: 1249018 - RNA, 19 nt, Artificial Sequence
  Description of Artificial Sequence: Synthetic oligonucleotide
uccgcgacguuguugaggu

SEQ ID NO: 1249019 - RNA, 19 nt, Artificial Sequence
  Description of Artificial Sequence: Synthetic oligonucleotide
ucaauaucacuaagacuuc

SEQ ID NO: 1249020 - RNA, 19 nt, Artificial Sequence
  Description of Artificial Sequence: Synthetic oligonucleotide
cauuguugacaagauauuc

SEQ ID NO: 1249021 - RNA, 19 nt, Artificial Sequence
  Description of Artificial Sequence: Synthetic oligonucleotide
gugauuggcugauuuguug

SEQ ID NO: 1249022 - RNA, 19 nt, Artificial Sequence
  Description of Artificial Sequence: Synthetic oligonucleotide
aagcuuuuaaaggauucau

SEQ ID NO: 1249023 - RNA, 19 nt, Artificial Sequence
  Description of Artificial Sequence: Synthetic oligonucleotide
uauggauuauugucaaauu

SEQ ID NO: 1249024 - RNA, 19 nt, Artificial Sequence
  Description of Artificial Sequence: Synthetic oligonucleotide
uagcagaguuuccugagaa

SEQ ID NO: 1249025 - RNA, 19 nt, Artificial Sequence
  Description of Artificial Sequence: Synthetic oligonucleotide
ugguaaauuuaaaccuccu

SEQ ID NO: 1249026 - RNA, 19 nt, Artificial Sequence
  Description of Artificial Sequence: Synthetic oligonucleotide
gccuguaucuuuuaugagc

SEQ ID NO: 1249027 - RNA, 19 nt, Artificial Sequence
  Description of Artificial Sequence: Synthetic oligonucleotide
aacccacacaaucuauuau

SEQ ID NO: 1249028 - RNA, 19 nt, Artificial Sequence
  Description of Artificial Sequence: Synthetic oligonucleotide
acguucagcuacuuuguug

SEQ ID NO: 1249029 - RNA, 19 nt, Artificial Sequence
  Description of Artificial Sequence: Synthetic oligonucleotide
aaauuuuaauccacaguuu

SEQ ID NO: 1249030 - RNA, 19 nt, Artificial Sequence
  Description of Artificial Sequence: Synthetic oligonucleotide
uugaaacucugaucaauau

SEQ ID NO: 1249031 - RNA, 19 nt, Artificial Sequence
  Description of Artificial Sequence: Synthetic oligonucleotide
uuuuaucacuucccagccu

SEQ ID NO: 1249032 - RNA, 19 nt, Artificial Sequence
  Description of Artificial Sequence: Synthetic oligonucleotide
augguauggauuauuguca

SEQ ID NO: 1249033 - RNA, 19 nt, Artificial Sequence
  Description of Artificial Sequence: Synthetic oligonucleotide
guuuguguauguucagaac

SEQ ID NO: 1249034 - RNA, 19 nt, Artificial Sequence
  Description of Artificial Sequence: Synthetic oligonucleotide
ugcauuccugaucuuccgc

SEQ ID NO: 1249035 - RNA, 19 nt, Artificial Sequence
  Description of Artificial Sequence: Synthetic oligonucleotide
acuaagacuucguuugcau

SEQ ID NO: 1249036 - RNA, 19 nt, Artificial Sequence
  Description of Artificial Sequence: Synthetic oligonucleotide
aaauucaauuaaacugccu

SEQ ID NO: 1249037 - RNA, 19 nt, Artificial Sequence
  Description of Artificial Sequence: Synthetic oligonucleotide
ugcaccauucaagaacacc

SEQ ID NO: 1249038 - RNA, 19 nt, Artificial Sequence
  Description of Artificial Sequence: Synthetic oligonucleotide
gauauucaccaauagggau

SEQ ID NO: 1249039 - RNA, 19 nt, Artificial Sequence
  Description of Artificial Sequence: Synthetic oligonucleotide
ucaucacggcccuugacaa

SEQ ID NO: 1249040 - RNA, 19 nt, Artificial Sequence
  Description of Artificial Sequence: Synthetic oligonucleotide
uaccacgaaaggcaauaga

SEQ ID NO: 1249041 - RNA, 19 nt, Artificial Sequence
  Description of Artificial Sequence: Synthetic oligonucleotide
ugagaacugcgcauaacuu

SEQ ID NO: 1249042 - RNA, 19 nt, Artificial Sequence
  Description of Artificial Sequence: Synthetic oligonucleotide
gaucaauaucacuaagacu

SEQ ID NO: 1249043 - RNA, 19 nt, Artificial Sequence
  Description of Artificial Sequence: Synthetic oligonucleotide
uaaggcaucguaacacaua

SEQ ID NO: 1249044 - RNA, 19 nt, Artificial Sequence
  Description of Artificial Sequence: Synthetic oligonucleotide
ucguaacacauauggugug

SEQ ID NO: 1249045 - RNA, 19 nt, Artificial Sequence
  Description of Artificial Sequence: Synthetic oligonucleotide
uuucucugcaguaguguau

SEQ ID NO: 1249046 - RNA, 19 nt, Artificial Sequence
  Description of Artificial Sequence: Synthetic oligonucleotide
uugacaagcugucuccuuu

SEQ ID NO: 1249047 - RNA, 19 nt, Artificial Sequence
  Description of Artificial Sequence: Synthetic oligonucleotide
agauauucaccaauaggga

SEQ ID NO: 1249048 - RNA, 19 nt, Artificial Sequence
  Description of Artificial Sequence: Synthetic oligonucleotide
aucaauaguaauggagaca

SEQ ID NO: 1249049 - RNA, 19 nt, Artificial Sequence
  Description of Artificial Sequence: Synthetic oligonucleotide
uuuccugagaacugcgcau

SEQ ID NO: 1249050 - RNA, 19 nt, Artificial Sequence
  Description of Artificial Sequence: Synthetic oligonucleotide
agaacaccgcuucucugag

SEQ ID NO: 1249051 - RNA, 19 nt, Artificial Sequence
  Description of Artificial Sequence: Synthetic oligonucleotide
ugguauggauuauugucaa

SEQ ID NO: 1249052 - RNA, 19 nt, Artificial Sequence
  Description of Artificial Sequence: Synthetic oligonucleotide
cacaguuagguaaacugga

SEQ ID NO: 1249053 - RNA, 19 nt, Artificial Sequence
  Description of Artificial Sequence: Synthetic oligonucleotide
uaugugcagauagugaguu

SEQ ID NO: 1249054 - RNA, 19 nt, Artificial Sequence
  Description of Artificial Sequence: Synthetic oligonucleotide
auaauggcccaaguaacca

SEQ ID NO: 1249055 - RNA, 19 nt, Artificial Sequence
  Description of Artificial Sequence: Synthetic oligonucleotide
gagucuaaauggaaccaug

SEQ ID NO: 1249056 - RNA, 19 nt, Artificial Sequence
  Description of Artificial Sequence: Synthetic oligonucleotide
guaauggagacagaucaca

SEQ ID NO: 1249057 - RNA, 19 nt, Artificial Sequence
  Description of Artificial Sequence: Synthetic oligonucleotide
auaucacuaagacuucguu

SEQ ID NO: 1249058 - RNA, 19 nt, Artificial Sequence
  Description of Artificial Sequence: Synthetic oligonucleotide
aacacauauggugugcguu

SEQ ID NO: 1249059 - RNA, 19 nt, Artificial Sequence
  Description of Artificial Sequence: Synthetic oligonucleotide
uuaaacugccuugaauaau

SEQ ID NO: 1249060 - RNA, 19 nt, Artificial Sequence
  Description of Artificial Sequence: Synthetic oligonucleotide
uggucaacugaaaggcacu

SEQ ID NO: 1249061 - RNA, 19 nt, Artificial Sequence
  Description of Artificial Sequence: Synthetic oligonucleotide
caccauucaagaacaccgc

SEQ ID NO: 1249062 - RNA, 19 nt, Artificial Sequence
  Description of Artificial Sequence: Synthetic oligonucleotide
accauucaagaacaccgcu

SEQ ID NO: 1249063 - RNA, 19 nt, Artificial Sequence
  Description of Artificial Sequence: Synthetic oligonucleotide
ugggaucaaccuuaauuuc

SEQ ID NO: 1249064 - RNA, 19 nt, Artificial Sequence
  Description of Artificial Sequence: Synthetic oligonucleotide
aucagaacccacacaaucu

SEQ ID NO: 1249065 - RNA, 19 nt, Artificial Sequence
  Description of Artificial Sequence: Synthetic oligonucleotide
acugcgcauaacuuccaug

SEQ ID NO: 1249066 - RNA, 19 nt, Artificial Sequence
  Description of Artificial Sequence: Synthetic oligonucleotide
ugugcguucuccgcgacgu

SEQ ID NO: 1249067 - RNA, 19 nt, Artificial Sequence
  Description of Artificial Sequence: Synthetic oligonucleotide
caccgcuucucugagagag

SEQ ID NO: 1249068 - RNA, 19 nt, Artificial Sequence
  Description of Artificial Sequence: Synthetic oligonucleotide
aaggucacacccaagcuuu

SEQ ID NO: 1249069 - RNA, 19 nt, Artificial Sequence
  Description of Artificial Sequence: Synthetic oligonucleotide
auauucuccugugggauca

SEQ ID NO: 1249070 - RNA, 19 nt, Artificial Sequence
  Description of Artificial Sequence: Synthetic oligonucleotide
aguuucgcuaagucugacu

SEQ ID NO: 1249071 - RNA, 19 nt, Artificial Sequence
  Description of Artificial Sequence: Synthetic oligonucleotide
acacacacguguugaaggu

SEQ ID NO: 1249072 - RNA, 19 nt, Artificial Sequence
  Description of Artificial Sequence: Synthetic oligonucleotide
aguguauugcacaucugga

SEQ ID NO: 1249073 - RNA, 19 nt, Artificial Sequence
  Description of Artificial Sequence: Synthetic oligonucleotide
uucugugacuucugaagau

SEQ ID NO: 1249074 - RNA, 19 nt, Artificial Sequence
  Description of Artificial Sequence: Synthetic oligonucleotide
cacguguugaaggucacac

SEQ ID NO: 1249075 - RNA, 19 nt, Artificial Sequence
  Description of Artificial Sequence: Synthetic oligonucleotide
auuuuauagucaccagauu

SEQ ID NO: 1249076 - RNA, 19 nt, Artificial Sequence
  Description of Artificial Sequence: Synthetic oligonucleotide
ggcacugaaaucauuuggc

SEQ ID NO: 1249077 - RNA, 19 nt, Artificial Sequence
  Description of Artificial Sequence: Synthetic oligonucleotide
gccaauauaauguaggcau

SEQ ID NO: 1249078 - RNA, 19 nt, Artificial Sequence
  Description of Artificial Sequence: Synthetic oligonucleotide
agcgaaauucuguuuuaaa

SEQ ID NO: 1249079 - RNA, 19 nt, Artificial Sequence
  Description of Artificial Sequence: Synthetic oligonucleotide
uaauggcccaaguaaccaa

SEQ ID NO: 1249080 - RNA, 19 nt, Artificial Sequence
  Description of Artificial Sequence: Synthetic oligonucleotide
ugagucuaaauggaaccau

SEQ ID NO: 1249081 - RNA, 19 nt, Artificial Sequence
  Description of Artificial Sequence: Synthetic oligonucleotide
uguguauguucagaacuaa

SEQ ID NO: 1249082 - RNA, 19 nt, Artificial Sequence
  Description of Artificial Sequence: Synthetic oligonucleotide
uaacacauauggugugcgu

SEQ ID NO: 1249083 - RNA, 19 nt, Artificial Sequence
  Description of Artificial Sequence: Synthetic oligonucleotide
uugcaaccgcaucaagaca

SEQ ID NO: 1249084 - RNA, 19 nt, Artificial Sequence
  Description of Artificial Sequence: Synthetic oligonucleotide
uuccauccugggaaaaguc

SEQ ID NO: 1249085 - RNA, 19 nt, Artificial Sequence
  Description of Artificial Sequence: Synthetic oligonucleotide
cuuccauaaggcaucguaa

SEQ ID NO: 1249086 - RNA, 19 nt, Artificial Sequence
  Description of Artificial Sequence: Synthetic oligonucleotide
acaguuagguaaacuggag

SEQ ID NO: 1249087 - RNA, 19 nt, Artificial Sequence
  Description of Artificial Sequence: Synthetic oligonucleotide
aagcugguacaguaucaau

SEQ ID NO: 1249088 - RNA, 19 nt, Artificial Sequence
  Description of Artificial Sequence: Synthetic oligonucleotide
caauagaccaaauuuuaau

SEQ ID NO: 1249089 - RNA, 19 nt, Artificial Sequence
  Description of Artificial Sequence: Synthetic oligonucleotide
uucaccaauagggaugguu

SEQ ID NO: 1249090 - RNA, 19 nt, Artificial Sequence
  Description of Artificial Sequence: Synthetic oligonucleotide
gcauacuguaaucaguaga

SEQ ID NO: 1249091 - RNA, 19 nt, Artificial Sequence
  Description of Artificial Sequence: Synthetic oligonucleotide
cuaauaccacgaaaggcaa

SEQ ID NO: 1249092 - RNA, 19 nt, Artificial Sequence
  Description of Artificial Sequence: Synthetic oligonucleotide
uccagucaaagaguggauc

SEQ ID NO: 1249093 - RNA, 19 nt, Artificial Sequence
  Description of Artificial Sequence: Synthetic oligonucleotide
uuaugagcaccuucuucau

SEQ ID NO: 1249094 - RNA, 19 nt, Artificial Sequence
  Description of Artificial Sequence: Synthetic oligonucleotide
aauuggguuguaaucugua

SEQ ID NO: 1249095 - RNA, 19 nt, Artificial Sequence
  Description of Artificial Sequence: Synthetic oligonucleotide
ccacgaaaggcaauagacc

SEQ ID NO: 1249096 - RNA, 19 nt, Artificial Sequence
  Description of Artificial Sequence: Synthetic oligonucleotide
gagggauacuuugauauua

SEQ ID NO: 1249097 - RNA, 19 nt, Artificial Sequence
  Description of Artificial Sequence: Synthetic oligonucleotide
auaaggcaacuuccauaag

SEQ ID NO: 1249098 - RNA, 19 nt, Artificial Sequence
  Description of Artificial Sequence: Synthetic oligonucleotide
cucccuucugaugguaugg

SEQ ID NO: 1249099 - RNA, 19 nt, Artificial Sequence
  Description of Artificial Sequence: Synthetic oligonucleotide
gggauauugauaccuuuuc

SEQ ID NO: 1249100 - RNA, 19 nt, Artificial Sequence
  Description of Artificial Sequence: Synthetic oligonucleotide
cuguaaucaguagauucuc

SEQ ID NO: 1249101 - RNA, 19 nt, Artificial Sequence
  Description of Artificial Sequence: Synthetic oligonucleotide
uaauaccacgaaaggcaau

SEQ ID NO: 1249102 - RNA, 19 nt, Artificial Sequence
  Description of Artificial Sequence: Synthetic oligonucleotide
aaaccuccugccaagcgaa

SEQ ID NO: 1249103 - RNA, 19 nt, Artificial Sequence
  Description of Artificial Sequence: Synthetic oligonucleotide
cuguccacccacacugagc

SEQ ID NO: 1249104 - RNA, 19 nt, Artificial Sequence
  Description of Artificial Sequence: Synthetic oligonucleotide
ccuguaucuuuuaugagca

SEQ ID NO: 1249105 - RNA, 19 nt, Artificial Sequence
  Description of Artificial Sequence: Synthetic oligonucleotide
aacugcgcauaacuuccau

SEQ ID NO: 1249106 - RNA, 19 nt, Artificial Sequence
  Description of Artificial Sequence: Synthetic oligonucleotide
uggcccaaguaaccaaagu

SEQ ID NO: 1249107 - RNA, 19 nt, Artificial Sequence
  Description of Artificial Sequence: Synthetic oligonucleotide
agaucacaguuagguaaac

SEQ ID NO: 1249108 - RNA, 19 nt, Artificial Sequence
  Description of Artificial Sequence: Synthetic oligonucleotide
ugcgcauaacuuccauggu

SEQ ID NO: 1249109 - RNA, 19 nt, Artificial Sequence
  Description of Artificial Sequence: Synthetic oligonucleotide
uuguugggauauugauacc

SEQ ID NO: 1249110 - RNA, 19 nt, Artificial Sequence
  Description of Artificial Sequence: Synthetic oligonucleotide
aggcauccaaguuugccaa

SEQ ID NO: 1249111 - RNA, 19 nt, Artificial Sequence
  Description of Artificial Sequence: Synthetic oligonucleotide
ugacaagcugucuccuuuc

SEQ ID NO: 1249112 - RNA, 19 nt, Artificial Sequence
  Description of Artificial Sequence: Synthetic oligonucleotide
aagcgaaauucuguuuuaa

SEQ ID NO: 1249113 - RNA, 19 nt, Artificial Sequence
  Description of Artificial Sequence: Synthetic oligonucleotide
ucugaugguauggauuauu

SEQ ID NO: 1249114 - RNA, 19 nt, Artificial Sequence
  Description of Artificial Sequence: Synthetic oligonucleotide
guuagguaaacuggaggga

SEQ ID NO: 1249115 - RNA, 19 nt, Artificial Sequence
  Description of Artificial Sequence: Synthetic oligonucleotide
aggaccucuacaaugguua

SEQ ID NO: 1249116 - RNA, 19 nt, Artificial Sequence
  Description of Artificial Sequence: Synthetic oligonucleotide
cacacacacacacguguug

SEQ ID NO: 1249117 - RNA, 19 nt, Artificial Sequence
  Description of Artificial Sequence: Synthetic oligonucleotide
auagugggaacaacuacau

SEQ ID NO: 1249118 - RNA, 19 nt, Artificial Sequence
  Description of Artificial Sequence: Synthetic oligonucleotide
acacacacacacguguuga

SEQ ID NO: 1249119 - RNA, 19 nt, Artificial Sequence
  Description of Artificial Sequence: Synthetic oligonucleotide
guuucgcuaagucugacuu

SEQ ID NO: 1249120 - RNA, 19 nt, Artificial Sequence
  Description of Artificial Sequence: Synthetic oligonucleotide
ugccuugaauaauggccca

SEQ ID NO: 1249121 - RNA, 19 nt, Artificial Sequence
  Description of Artificial Sequence: Synthetic oligonucleotide
auaccacgaaaggcaauag

SEQ ID NO: 1249122 - RNA, 19 nt, Artificial Sequence
  Description of Artificial Sequence: Synthetic oligonucleotide
uucucugcaguaguguauu

SEQ ID NO: 1249123 - RNA, 19 nt, Artificial Sequence
  Description of Artificial Sequence: Synthetic oligonucleotide
agcugguacaguaucaaua

SEQ ID NO: 1249124 - RNA, 19 nt, Artificial Sequence
  Description of Artificial Sequence: Synthetic oligonucleotide
ugcguucuccgcgacguug

SEQ ID NO: 1249125 - RNA, 19 nt, Artificial Sequence
  Description of Artificial Sequence: Synthetic oligonucleotide
acacacacacacacacacg

SEQ ID NO: 1249126 - RNA, 19 nt, Artificial Sequence
  Description of Artificial Sequence: Synthetic oligonucleotide
guaucuuuuaugagcaccu

SEQ ID NO: 1249127 - RNA, 19 nt, Artificial Sequence
  Description of Artificial Sequence: Synthetic oligonucleotide
gguuguaaucuguagccaa

SEQ ID NO: 1249128 - RNA, 19 nt, Artificial Sequence
  Description of Artificial Sequence: Synthetic oligonucleotide
ucuugccucaggucaucac

SEQ ID NO: 1249129 - RNA, 19 nt, Artificial Sequence
  Description of Artificial Sequence: Synthetic oligonucleotide
aaccaugaaggugucuaua

SEQ ID NO: 1249130 - RNA, 19 nt, Artificial Sequence
  Description of Artificial Sequence: Synthetic oligonucleotide
cauaguccagucaaagagu

SEQ ID NO: 1249131 - RNA, 19 nt, Artificial Sequence
  Description of Artificial Sequence: Synthetic oligonucleotide
ugaugcccaugccauccac

SEQ ID NO: 1249132 - RNA, 19 nt, Artificial Sequence
  Description of Artificial Sequence: Synthetic oligonucleotide
ggaacaacuacaucuucua

SEQ ID NO: 1249133 - RNA, 19 nt, Artificial Sequence
  Description of Artificial Sequence: Synthetic oligonucleotide
cacacacacacacacacgu

SEQ ID NO: 1249134 - RNA, 19 nt, Artificial Sequence
  Description of Artificial Sequence: Synthetic oligonucleotide
ggcauacuguaaucaguag

SEQ ID NO: 1249135 - RNA, 19 nt, Artificial Sequence
  Description of Artificial Sequence: Synthetic oligonucleotide
acccaagcuuuccauccug

SEQ ID NO: 1249136 - RNA, 19 nt, Artificial Sequence
  Description of Artificial Sequence: Synthetic oligonucleotide
uuucgcuaagucugacuuu

SEQ ID NO: 1249137 - RNA, 19 nt, Artificial Sequence
  Description of Artificial Sequence: Synthetic oligonucleotide
gaaggucacacccaagcuu

SEQ ID NO: 1249138 - RNA, 19 nt, Artificial Sequence
  Description of Artificial Sequence: Synthetic oligonucleotide
aggcauacuguaaucagua

SEQ ID NO: 1249139 - RNA, 19 nt, Artificial Sequence
  Description of Artificial Sequence: Synthetic oligonucleotide
cacugaaaucauuuggccu

SEQ ID NO: 1249140 - RNA, 19 nt, Artificial Sequence
  Description of Artificial Sequence: Synthetic oligonucleotide
ugguuccugugcaccauuc

SEQ ID NO: 1249141 - RNA, 19 nt, Artificial Sequence
  Description of Artificial Sequence: Synthetic oligonucleotide
auccaaguuugccaauaua

SEQ ID NO: 1249142 - RNA, 19 nt, Artificial Sequence
  Description of Artificial Sequence: Synthetic oligonucleotide
acaaagcuuuuaaaggauu

SEQ ID NO: 1249143 - RNA, 19 nt, Artificial Sequence
  Description of Artificial Sequence: Synthetic oligonucleotide
cuguagccaaggcacaaga

SEQ ID NO: 1249144 - RNA, 19 nt, Artificial Sequence
  Description of Artificial Sequence: Synthetic oligonucleotide
aaggaccucuacaaugguu

SEQ ID NO: 1249145 - RNA, 19 nt, Artificial Sequence
  Description of Artificial Sequence: Synthetic oligonucleotide
auaaggcaucguaacacau

SEQ ID NO: 1249146 - RNA, 19 nt, Artificial Sequence
  Description of Artificial Sequence: Synthetic oligonucleotide
ccauagugggaacaacuac

SEQ ID NO: 1249147 - RNA, 19 nt, Artificial Sequence
  Description of Artificial Sequence: Synthetic oligonucleotide
acaaugguuagcagaguuu

SEQ ID NO: 1249148 - RNA, 19 nt, Artificial Sequence
  Description of Artificial Sequence: Synthetic oligonucleotide
ugggaaaagucggcugaga

SEQ ID NO: 1249149 - RNA, 19 nt, Artificial Sequence
  Description of Artificial Sequence: Synthetic oligonucleotide
caauuaaacugccuugaau

SEQ ID NO: 1249150 - RNA, 19 nt, Artificial Sequence
  Description of Artificial Sequence: Synthetic oligonucleotide
cacacacacacacacgugu

SEQ ID NO: 1249151 - RNA, 19 nt, Artificial Sequence
  Description of Artificial Sequence: Synthetic oligonucleotide
uggcugauuuguugggaua

SEQ ID NO: 1249152 - RNA, 19 nt, Artificial Sequence
  Description of Artificial Sequence: Synthetic oligonucleotide
ccagccuacuucuauuuuc

SEQ ID NO: 1249153 - RNA, 19 nt, Artificial Sequence
  Description of Artificial Sequence: Synthetic oligonucleotide
uucccagccuacuucuauu

SEQ ID NO: 1249154 - RNA, 19 nt, Artificial Sequence
  Description of Artificial Sequence: Synthetic oligonucleotide
ccaauauaauguaggcauc

SEQ ID NO: 1249155 - RNA, 19 nt, Artificial Sequence
  Description of Artificial Sequence: Synthetic oligonucleotide
ggaccucuacaaugguuag

SEQ ID NO: 1249156 - RNA, 19 nt, Artificial Sequence
  Description of Artificial Sequence: Synthetic oligonucleotide
cuccgcgacguuguugagg

SEQ ID NO: 1249157 - RNA, 19 nt, Artificial Sequence
  Description of Artificial Sequence: Synthetic oligonucleotide
ucccuucugaugguaugga

SEQ ID NO: 1249158 - RNA, 19 nt, Artificial Sequence
  Description of Artificial Sequence: Synthetic oligonucleotide
ggaaccaugaaggugucua

SEQ ID NO: 1249159 - RNA, 19 nt, Artificial Sequence
  Description of Artificial Sequence: Synthetic oligonucleotide
ucgcuaagucugacuuuga

SEQ ID NO: 1249160 - RNA, 19 nt, Artificial Sequence
  Description of Artificial Sequence: Synthetic oligonucleotide
gauagugaguuuccucuuu

SEQ ID NO: 1249161 - RNA, 19 nt, Artificial Sequence
  Description of Artificial Sequence: Synthetic oligonucleotide
gcauuccugaucuuccgca

SEQ ID NO: 1249162 - RNA, 19 nt, Artificial Sequence
  Description of Artificial Sequence: Synthetic oligonucleotide
aucauuuggccuguaucuu

SEQ ID NO: 1249163 - RNA, 19 nt, Artificial Sequence
  Description of Artificial Sequence: Synthetic oligonucleotide
uaucuuuuaugagcaccuu

SEQ ID NO: 1249164 - RNA, 19 nt, Artificial Sequence
  Description of Artificial Sequence: Synthetic oligonucleotide
ugauauuaauuggguugua

SEQ ID NO: 1249165 - RNA, 19 nt, Artificial Sequence
  Description of Artificial Sequence: Synthetic oligonucleotide
gugugcguucuccgcgacg

SEQ ID NO: 1249166 - RNA, 19 nt, Artificial Sequence
  Description of Artificial Sequence: Synthetic oligonucleotide
acaguuucgcuaagucuga

SEQ ID NO: 1249167 - RNA, 19 nt, Artificial Sequence
  Description of Artificial Sequence: Synthetic oligonucleotide
ccuguugcaugacagcauc

SEQ ID NO: 1249168 - RNA, 19 nt, Artificial Sequence
  Description of Artificial Sequence: Synthetic oligonucleotide
gcuuucuagguuugauuuc

SEQ ID NO: 1249169 - RNA, 19 nt, Artificial Sequence
  Description of Artificial Sequence: Synthetic oligonucleotide
aaccgcaucaagacacguu

SEQ ID NO: 1249170 - RNA, 19 nt, Artificial Sequence
  Description of Artificial Sequence: Synthetic oligonucleotide
guaguguauugcacaucug

SEQ ID NO: 1249171 - RNA, 19 nt, Artificial Sequence
  Description of Artificial Sequence: Synthetic oligonucleotide
ggcuuucuagguuugauuu

SEQ ID NO: 1249172 - RNA, 19 nt, Artificial Sequence
  Description of Artificial Sequence: Synthetic oligonucleotide
agacuucguuugcauuccu

SEQ ID NO: 1249173 - RNA, 19 nt, Artificial Sequence
  Description of Artificial Sequence: Synthetic oligonucleotide
caagcgaaauucuguuuua

SEQ ID NO: 1249174 - RNA, 19 nt, Artificial Sequence
  Description of Artificial Sequence: Synthetic oligonucleotide
aucucucccuucugauggu

SEQ ID NO: 1249175 - RNA, 19 nt, Artificial Sequence
  Description of Artificial Sequence: Synthetic oligonucleotide
ggucaacugaaaggcacug

SEQ ID NO: 1249176 - RNA, 19 nt, Artificial Sequence
  Description of Artificial Sequence: Synthetic oligonucleotide
caguuuguguauguucaga

SEQ ID NO: 1249177 - RNA, 19 nt, Artificial Sequence
  Description of Artificial Sequence: Synthetic oligonucleotide
acacacacacacacacgug

SEQ ID NO: 1249178 - RNA, 19 nt, Artificial Sequence
  Description of Artificial Sequence: Synthetic oligonucleotide
agugauuggcugauuuguu

SEQ ID NO: 1249179 - RNA, 19 nt, Artificial Sequence
  Description of Artificial Sequence: Synthetic oligonucleotide
cacaauaucucugcugagu

SEQ ID NO: 1249180 - RNA, 19 nt, Artificial Sequence
  Description of Artificial Sequence: Synthetic oligonucleotide
acgaaaggcaauagaccaa

SEQ ID NO: 1249181 - RNA, 19 nt, Artificial Sequence
  Description of Artificial Sequence: Synthetic oligonucleotide
caauaguaauggagacaga

SEQ ID NO: 1249182 - RNA, 19 nt, Artificial Sequence
  Description of Artificial Sequence: Synthetic oligonucleotide
ucacggcccuugacaagcu

SEQ ID NO: 1249183 - RNA, 19 nt, Artificial Sequence
  Description of Artificial Sequence: Synthetic oligonucleotide
auggaaccaugaagguguc

SEQ ID NO: 1249184 - RNA, 19 nt, Artificial Sequence
  Description of Artificial Sequence: Synthetic oligonucleotide
cugcugcaaauacaaagcu

SEQ ID NO: 1249185 - RNA, 19 nt, Artificial Sequence
  Description of Artificial Sequence: Synthetic oligonucleotide
cacuaagacuucguuugca

SEQ ID NO: 1249186 - RNA, 19 nt, Artificial Sequence
  Description of Artificial Sequence: Synthetic oligonucleotide
agguagaagcugguacagu

SEQ ID NO: 1249187 - RNA, 19 nt, Artificial Sequence
  Description of Artificial Sequence: Synthetic oligonucleotide
acacacacacacacacaca

SEQ ID NO: 1249188 - RNA, 19 nt, Artificial Sequence
  Description of Artificial Sequence: Synthetic oligonucleotide
cucuuucuagucucagugu

SEQ ID NO: 1249189 - RNA, 19 nt, Artificial Sequence
  Description of Artificial Sequence: Synthetic oligonucleotide
aggucaucacggcccuuga

SEQ ID NO: 1249190 - RNA, 19 nt, Artificial Sequence
  Description of Artificial Sequence: Synthetic oligonucleotide
cugccaagcgaaauucugu

SEQ ID NO: 1249191 - RNA, 19 nt, Artificial Sequence
  Description of Artificial Sequence: Synthetic oligonucleotide
caagcugucuccuuuccuu

SEQ ID NO: 1249192 - RNA, 19 nt, Artificial Sequence
  Description of Artificial Sequence: Synthetic oligonucleotide
guucuccgcgacguuguug

SEQ ID NO: 1249193 - RNA, 19 nt, Artificial Sequence
  Description of Artificial Sequence: Synthetic oligonucleotide
gcaauagaccaaauuuuaa

SEQ ID NO: 1249194 - RNA, 19 nt, Artificial Sequence
  Description of Artificial Sequence: Synthetic oligonucleotide
ucuccgcgacguuguugag

SEQ ID NO: 1249195 - RNA, 19 nt, Artificial Sequence
  Description of Artificial Sequence: Synthetic oligonucleotide
aagacacguucagcuacuu

SEQ ID NO: 1249196 - RNA, 19 nt, Artificial Sequence
  Description of Artificial Sequence: Synthetic oligonucleotide
gcaaccgcaucaagacacg

SEQ ID NO: 1249197 - RNA, 19 nt, Artificial Sequence
  Description of Artificial Sequence: Synthetic oligonucleotide
gaucaaccuuaauuuccau

SEQ ID NO: 1249198 - RNA, 19 nt, Artificial Sequence
  Description of Artificial Sequence: Synthetic oligonucleotide
cguaacacauauggugugc

SEQ ID NO: 1249199 - RNA, 19 nt, Artificial Sequence
  Description of Artificial Sequence: Synthetic oligonucleotide
guaugugcagauagugagu

SEQ ID NO: 1249200 - RNA, 19 nt, Artificial Sequence
  Description of Artificial Sequence: Synthetic oligonucleotide
cuaagacuucguuugcauu

SEQ ID NO: 1249201 - RNA, 19 nt, Artificial Sequence
  Description of Artificial Sequence: Synthetic oligonucleotide
caucuuacaucucucccuu

SEQ ID NO: 1249202 - RNA, 19 nt, Artificial Sequence
  Description of Artificial Sequence: Synthetic oligonucleotide
gguuccugugcaccauuca

SEQ ID NO: 1249203 - RNA, 19 nt, Artificial Sequence
  Description of Artificial Sequence: Synthetic oligonucleotide
ggcccaaguaaccaaaguu

SEQ ID NO: 1249204 - RNA, 19 nt, Artificial Sequence
  Description of Artificial Sequence: Synthetic oligonucleotide
gaauggagaucugucucau

SEQ ID NO: 1249205 - RNA, 19 nt, Artificial Sequence
  Description of Artificial Sequence: Synthetic oligonucleotide
caagacacguucagcuacu

SEQ ID NO: 1249206 - RNA, 19 nt, Artificial Sequence
  Description of Artificial Sequence: Synthetic oligonucleotide
gggaacaacuacaucuucu

SEQ ID NO: 1249207 - RNA, 19 nt, Artificial Sequence
  Description of Artificial Sequence: Synthetic oligonucleotide
acacacacacacacguguu

SEQ ID NO: 1249208 - RNA, 19 nt, Artificial Sequence
  Description of Artificial Sequence: Synthetic oligonucleotide
cuucguuugcauuccugau

SEQ ID NO: 1249209 - RNA, 19 nt, Artificial Sequence
  Description of Artificial Sequence: Synthetic oligonucleotide
ccaaggcacaagaucaaaa

SEQ ID NO: 1249210 - RNA, 19 nt, Artificial Sequence
  Description of Artificial Sequence: Synthetic oligonucleotide
ucucucccuucugauggua

SEQ ID NO: 1249211 - RNA, 19 nt, Artificial Sequence
  Description of Artificial Sequence: Synthetic oligonucleotide
cacugagcacagugccuuc

SEQ ID NO: 1249212 - RNA, 19 nt, Artificial Sequence
  Description of Artificial Sequence: Synthetic oligonucleotide
cgcuaagucugacuuugag

SEQ ID NO: 1249213 - RNA, 19 nt, Artificial Sequence
  Description of Artificial Sequence: Synthetic oligonucleotide
ugaaaucauuuggccugua

SEQ ID NO: 1249214 - RNA, 19 nt, Artificial Sequence
  Description of Artificial Sequence: Synthetic oligonucleotide
accuccugccaagcgaaau

SEQ ID NO: 1249215 - RNA, 19 nt, Artificial Sequence
  Description of Artificial Sequence: Synthetic oligonucleotide
caguuucgcuaagucugac

SEQ ID NO: 1249216 - RNA, 19 nt, Artificial Sequence
  Description of Artificial Sequence: Synthetic oligonucleotide
aggucacacccaagcuuuc

SEQ ID NO: 1249217 - RNA, 19 nt, Artificial Sequence
  Description of Artificial Sequence: Synthetic oligonucleotide
caaccuuaauuuccauagu

SEQ ID NO: 1249218 - RNA, 19 nt, Artificial Sequence
  Description of Artificial Sequence: Synthetic oligonucleotide
cagugccuucuuccacgcc

SEQ ID NO: 1249219 - RNA, 19 nt, Artificial Sequence
  Description of Artificial Sequence: Synthetic oligonucleotide
aggcaucguaacacauaug

SEQ ID NO: 1249220 - RNA, 19 nt, Artificial Sequence
  Description of Artificial Sequence: Synthetic oligonucleotide
ggucaucacggcccuugac

SEQ ID NO: 1249221 - RNA, 19 nt, Artificial Sequence
  Description of Artificial Sequence: Synthetic oligonucleotide
ggguuguaaucuguagcca

SEQ ID NO: 1249222 - RNA, 19 nt, Artificial Sequence
  Description of Artificial Sequence: Synthetic oligonucleotide
ggaaaaccuguugcaugac

SEQ ID NO: 1249223 - RNA, 19 nt, Artificial Sequence
  Description of Artificial Sequence: Synthetic oligonucleotide
cauuccugaucuuccgcau

SEQ ID NO: 1249224 - RNA, 19 nt, Artificial Sequence
  Description of Artificial Sequence: Synthetic oligonucleotide
guugggauauugauaccuu

SEQ ID NO: 1249225 - RNA, 19 nt, Artificial Sequence
  Description of Artificial Sequence: Synthetic oligonucleotide
cuguugcaugacagcaucu

SEQ ID NO: 1249226 - RNA, 19 nt, Artificial Sequence
  Description of Artificial Sequence: Synthetic oligonucleotide
guucaccuguccacccaca

SEQ ID NO: 1249227 - RNA, 19 nt, Artificial Sequence
  Description of Artificial Sequence: Synthetic oligonucleotide
cacauauggugugcguucu

SEQ ID NO: 1249228 - RNA, 19 nt, Artificial Sequence
  Description of Artificial Sequence: Synthetic oligonucleotide
cugaaaucauuuggccugu

SEQ ID NO: 1249229 - RNA, 19 nt, Artificial Sequence
  Description of Artificial Sequence: Synthetic oligonucleotide
ccugagaacugcgcauaac

SEQ ID NO: 1249230 - RNA, 19 nt, Artificial Sequence
  Description of Artificial Sequence: Synthetic oligonucleotide
ggcugauuuguugggauau

SEQ ID NO: 1249231 - RNA, 19 nt, Artificial Sequence
  Description of Artificial Sequence: Synthetic oligonucleotide
ggugugcguucuccgcgac

SEQ ID NO: 1249232 - RNA, 19 nt, Artificial Sequence
  Description of Artificial Sequence: Synthetic oligonucleotide
gcgcauaacuuccaugguu

SEQ ID NO: 1249233 - RNA, 19 nt, Artificial Sequence
  Description of Artificial Sequence: Synthetic oligonucleotide
ggggaaccaccuuguaugu

SEQ ID NO: 1249234 - RNA, 19 nt, Artificial Sequence
  Description of Artificial Sequence: Synthetic oligonucleotide
cgaaaggcaauagaccaaa

SEQ ID NO: 1249235 - RNA, 19 nt, Artificial Sequence
  Description of Artificial Sequence: Synthetic oligonucleotide
gccuacuucuauuuuccuu

SEQ ID NO: 1249236 - RNA, 19 nt, Artificial Sequence
  Description of Artificial Sequence: Synthetic oligonucleotide
cucucccuucugaugguau

SEQ ID NO: 1249237 - RNA, 19 nt, Artificial Sequence
  Description of Artificial Sequence: Synthetic oligonucleotide
ggagggauacuuugauauu

SEQ ID NO: 1249238 - RNA, 19 nt, Artificial Sequence
  Description of Artificial Sequence: Synthetic oligonucleotide
gcaucguaacacauauggu

SEQ ID NO: 1249239 - RNA, 19 nt, Artificial Sequence
  Description of Artificial Sequence: Synthetic oligonucleotide
cuacaaugguuagcagagu

SEQ ID NO: 1249240 - RNA, 19 nt, Artificial Sequence
  Description of Artificial Sequence: Synthetic oligonucleotide
cacccaagcuuuccauccu

SEQ ID NO: 1249241 - RNA, 19 nt, Artificial Sequence
  Description of Artificial Sequence: Synthetic oligonucleotide
caccuuccacaccagugau

SEQ ID NO: 1249242 - RNA, 19 nt, Artificial Sequence
  Description of Artificial Sequence: Synthetic oligonucleotide
ccgcaucaagacacguuca

SEQ ID NO: 1249243 - RNA, 19 nt, Artificial Sequence
  Description of Artificial Sequence: Synthetic oligonucleotide
gcgacguuguugagguaga

SEQ ID NO: 1249244 - RNA, 19 nt, Artificial Sequence
  Description of Artificial Sequence: Synthetic oligonucleotide
gccuugaauaauggcccaa

SEQ ID NO: 1249245 - RNA, 19 nt, Artificial Sequence
  Description of Artificial Sequence: Synthetic oligonucleotide
caaccgcaucaagacacgu

SEQ ID NO: 1249246 - RNA, 19 nt, Artificial Sequence
  Description of Artificial Sequence: Synthetic oligonucleotide
gggaggcauccaaguuugc

SEQ ID NO: 1249247 - RNA, 19 nt, Artificial Sequence
  Description of Artificial Sequence: Synthetic oligonucleotide
ccacacaaucuauuauuuu

SEQ ID NO: 1249248 - RNA, 19 nt, Artificial Sequence
  Description of Artificial Sequence: Synthetic oligonucleotide
gcguucuccgcgacguugu

SEQ ID NO: 1249249 - RNA, 19 nt, Artificial Sequence
  Description of Artificial Sequence: Synthetic oligonucleotide
cugugggaucaaccuuaau

SEQ ID NO: 1249250 - RNA, 19 nt, Artificial Sequence
  Description of Artificial Sequence: Synthetic oligonucleotide
ccugcuggauaagcaaguu

SEQ ID NO: 1249251 - RNA, 19 nt, Artificial Sequence
  Description of Artificial Sequence: Synthetic oligonucleotide
gugcguucuccgcgacguu

SEQ ID NO: 1249252 - RNA, 19 nt, Artificial Sequence
  Description of Artificial Sequence: Synthetic oligonucleotide
ccuugacauaaggcaacuu

SEQ ID NO: 1249253 - RNA, 19 nt, Artificial Sequence
  Description of Artificial Sequence: Synthetic oligonucleotide
cguuugcauuccugaucuu

SEQ ID NO: 1249254 - RNA, 19 nt, Artificial Sequence
  Description of Artificial Sequence: Synthetic oligonucleotide
ccgcgacguuguugaggua

SEQ ID NO: 1249255 - RNA, 19 nt, Artificial Sequence
  Description of Artificial Sequence: Synthetic oligonucleotide
cguucuccgcgacguuguu

SEQ ID NO: 1249256 - RNA, 19 nt, Artificial Sequence
  Description of Artificial Sequence: Synthetic oligonucleotide
aauaaggacaucuguaagc

SEQ ID NO: 1249257 - RNA, 19 nt, Artificial Sequence
  Description of Artificial Sequence: Synthetic oligonucleotide
agaaacauuagauugcucc

SEQ ID NO: 1249258 - RNA, 19 nt, Artificial Sequence
  Description of Artificial Sequence: Synthetic oligonucleotide
aaauuuaaccucuaggucu

SEQ ID NO: 1249259 - RNA, 19 nt, Artificial Sequence
  Description of Artificial Sequence: Synthetic oligonucleotide
auaggacucacuuaaaccc

SEQ ID NO: 1249260 - RNA, 19 nt, Artificial Sequence
  Description of Artificial Sequence: Synthetic oligonucleotide
ucuuauuaaguauagaccu

SEQ ID NO: 1249261 - RNA, 19 nt, Artificial Sequence
  Description of Artificial Sequence: Synthetic oligonucleotide
uuagccuugaaauauaaca

SEQ ID NO: 1249262 - RNA, 19 nt, Artificial Sequence
  Description of Artificial Sequence: Synthetic oligonucleotide
aauuaaggagcuccgugcc

SEQ ID NO: 1249263 - RNA, 19 nt, Artificial Sequence
  Description of Artificial Sequence: Synthetic oligonucleotide
aacaguucuuccuuuacgg

SEQ ID NO: 1249264 - RNA, 19 nt, Artificial Sequence
  Description of Artificial Sequence: Synthetic oligonucleotide
guugcaucaacauaaaacc

SEQ ID NO: 1249265 - RNA, 19 nt, Artificial Sequence
  Description of Artificial Sequence: Synthetic oligonucleotide
aauugguaauuuuauagca

SEQ ID NO: 1249266 - RNA, 19 nt, Artificial Sequence
  Description of Artificial Sequence: Synthetic oligonucleotide
uuaacuagaaacacuauaa

SEQ ID NO: 1249267 - RNA, 19 nt, Artificial Sequence
  Description of Artificial Sequence: Synthetic oligonucleotide
cuucuuauuaaguauagac

SEQ ID NO: 1249268 - RNA, 19 nt, Artificial Sequence
  Description of Artificial Sequence: Synthetic oligonucleotide
uucuauuaggaucuuauca

SEQ ID NO: 1249269 - RNA, 19 nt, Artificial Sequence
  Description of Artificial Sequence: Synthetic oligonucleotide
uauuacaagaaacauuaga

SEQ ID NO: 1249270 - RNA, 19 nt, Artificial Sequence
  Description of Artificial Sequence: Synthetic oligonucleotide
acuuaaacccaguagcccc

SEQ ID NO: 1249271 - RNA, 19 nt, Artificial Sequence
  Description of Artificial Sequence: Synthetic oligonucleotide
uaaaaguuagccauugucu

SEQ ID NO: 1249272 - RNA, 19 nt, Artificial Sequence
  Description of Artificial Sequence: Synthetic oligonucleotide
uucaaaaugacucgggaga

SEQ ID NO: 1249273 - RNA, 19 nt, Artificial Sequence
  Description of Artificial Sequence: Synthetic oligonucleotide
cucagauuggaaaucaugg

SEQ ID NO: 1249274 - RNA, 19 nt, Artificial Sequence
  Description of Artificial Sequence: Synthetic oligonucleotide
uaagguaagacaauaggac

SEQ ID NO: 1249275 - RNA, 19 nt, Artificial Sequence
  Description of Artificial Sequence: Synthetic oligonucleotide
ugccauauuauucauuaag

SEQ ID NO: 1249276 - RNA, 19 nt, Artificial Sequence
  Description of Artificial Sequence: Synthetic oligonucleotide
ucucaaguaguguagauga

SEQ ID NO: 1249277 - RNA, 19 nt, Artificial Sequence
  Description of Artificial Sequence: Synthetic oligonucleotide
gagaauccgaucuucauag

SEQ ID NO: 1249278 - RNA, 19 nt, Artificial Sequence
  Description of Artificial Sequence: Synthetic oligonucleotide
aaacggacccuucuaauuc

SEQ ID NO: 1249279 - RNA, 19 nt, Artificial Sequence
  Description of Artificial Sequence: Synthetic oligonucleotide
uuaaaaguuagccauuguc

SEQ ID NO: 1249280 - RNA, 19 nt, Artificial Sequence
  Description of Artificial Sequence: Synthetic oligonucleotide
aguuauuccucugaggagc

SEQ ID NO: 1249281 - RNA, 19 nt, Artificial Sequence
  Description of Artificial Sequence: Synthetic oligonucleotide
auaguuaucagguuucuca

SEQ ID NO: 1249282 - RNA, 19 nt, Artificial Sequence
  Description of Artificial Sequence: Synthetic oligonucleotide
cucacuuaaacccaguagc

SEQ ID NO: 1249283 - RNA, 19 nt, Artificial Sequence
  Description of Artificial Sequence: Synthetic oligonucleotide
uccuauuuaaaaguuagcc

SEQ ID NO: 1249284 - RNA, 19 nt, Artificial Sequence
  Description of Artificial Sequence: Synthetic oligonucleotide
uauacggaugaucugaaac

SEQ ID NO: 1249285 - RNA, 19 nt, Artificial Sequence
  Description of Artificial Sequence: Synthetic oligonucleotide
aggguuuucuauuaggauc

SEQ ID NO: 1249286 - RNA, 19 nt, Artificial Sequence
  Description of Artificial Sequence: Synthetic oligonucleotide
auacggaugaucugaaacg

SEQ ID NO: 1249287 - RNA, 19 nt, Artificial Sequence
  Description of Artificial Sequence: Synthetic oligonucleotide
uauuaagguaagacaauag

SEQ ID NO: 1249288 - RNA, 19 nt, Artificial Sequence
  Description of Artificial Sequence: Synthetic oligonucleotide
uagccuugaaauauaacag

SEQ ID NO: 1249289 - RNA, 19 nt, Artificial Sequence
  Description of Artificial Sequence: Synthetic oligonucleotide
uucauuaauaaggacaucu

SEQ ID NO: 1249290 - RNA, 19 nt, Artificial Sequence
  Description of Artificial Sequence: Synthetic oligonucleotide
uguuaaaugcucauggguc

SEQ ID NO: 1249291 - RNA, 19 nt, Artificial Sequence
  Description of Artificial Sequence: Synthetic oligonucleotide
aguaguguagaugauagag

SEQ ID NO: 1249292 - RNA, 19 nt, Artificial Sequence
  Description of Artificial Sequence: Synthetic oligonucleotide
ugcuucuugcaauauacgg

SEQ ID NO: 1249293 - RNA, 19 nt, Artificial Sequence
  Description of Artificial Sequence: Synthetic oligonucleotide
augauaguuuccuuggagg

SEQ ID NO: 1249294 - RNA, 19 nt, Artificial Sequence
  Description of Artificial Sequence: Synthetic oligonucleotide
aaguuuacauagauagugc

SEQ ID NO: 1249295 - RNA, 19 nt, Artificial Sequence
  Description of Artificial Sequence: Synthetic oligonucleotide
gaaaucauggaauauucuc

SEQ ID NO: 1249296 - RNA, 19 nt, Artificial Sequence
  Description of Artificial Sequence: Synthetic oligonucleotide
aauccgaucuucauagccc

SEQ ID NO: 1249297 - RNA, 19 nt, Artificial Sequence
  Description of Artificial Sequence: Synthetic oligonucleotide
uuugcuugguucuacaaga

SEQ ID NO: 1249298 - RNA, 19 nt, Artificial Sequence
  Description of Artificial Sequence: Synthetic oligonucleotide
aagguaagacaauaggacu

SEQ ID NO: 1249299 - RNA, 19 nt, Artificial Sequence
  Description of Artificial Sequence: Synthetic oligonucleotide
uuuauuguugugaauuggu

SEQ ID NO: 1249300 - RNA, 19 nt, Artificial Sequence
  Description of Artificial Sequence: Synthetic oligonucleotide
ugauuuauuauaaguuuac

SEQ ID NO: 1249301 - RNA, 19 nt, Artificial Sequence
  Description of Artificial Sequence: Synthetic oligonucleotide
aaaguuagccauugucuag

SEQ ID NO: 1249302 - RNA, 19 nt, Artificial Sequence
  Description of Artificial Sequence: Synthetic oligonucleotide
acauagauagugcaaagca

SEQ ID NO: 1249303 - RNA, 19 nt, Artificial Sequence
  Description of Artificial Sequence: Synthetic oligonucleotide
uuaucaacugcccucucag

SEQ ID NO: 1249304 - RNA, 19 nt, Artificial Sequence
  Description of Artificial Sequence: Synthetic oligonucleotide
uaugcgaguagccauggcc

SEQ ID NO: 1249305 - RNA, 19 nt, Artificial Sequence
  Description of Artificial Sequence: Synthetic oligonucleotide
caaguaguguagaugauag

SEQ ID NO: 1249306 - RNA, 19 nt, Artificial Sequence
  Description of Artificial Sequence: Synthetic oligonucleotide
uaauuaaggagcuccgugc

SEQ ID NO: 1249307 - RNA, 19 nt, Artificial Sequence
  Description of Artificial Sequence: Synthetic oligonucleotide
uguacaaaggucauuguua

SEQ ID NO: 1249308 - RNA, 19 nt, Artificial Sequence
  Description of Artificial Sequence: Synthetic oligonucleotide
gauaucagggcugaacugg

SEQ ID NO: 1249309 - RNA, 19 nt, Artificial Sequence
  Description of Artificial Sequence: Synthetic oligonucleotide
ggauuaacaucucagauug

SEQ ID NO: 1249310 - RNA, 19 nt, Artificial Sequence
  Description of Artificial Sequence: Synthetic oligonucleotide
uaauuuuauagcagucucc

SEQ ID NO: 1249311 - RNA, 19 nt, Artificial Sequence
  Description of Artificial Sequence: Synthetic oligonucleotide
aacuagaaacacuauaauu

SEQ ID NO: 1249312 - RNA, 19 nt, Artificial Sequence
  Description of Artificial Sequence: Synthetic oligonucleotide
ucuccugaugggaauaagg

SEQ ID NO: 1249313 - RNA, 19 nt, Artificial Sequence
  Description of Artificial Sequence: Synthetic oligonucleotide
ucuaauucuuuuguuauca

SEQ ID NO: 1249314 - RNA, 19 nt, Artificial Sequence
  Description of Artificial Sequence: Synthetic oligonucleotide
ucugcuagccacuucagug

SEQ ID NO: 1249315 - RNA, 19 nt, Artificial Sequence
  Description of Artificial Sequence: Synthetic oligonucleotide
aucucuaaauuauuguuug

SEQ ID NO: 1249316 - RNA, 19 nt, Artificial Sequence
  Description of Artificial Sequence: Synthetic oligonucleotide
gaacugguaauuaaggagc

SEQ ID NO: 1249317 - RNA, 19 nt, Artificial Sequence
  Description of Artificial Sequence: Synthetic oligonucleotide
aguguuugcacgucccugc

SEQ ID NO: 1249318 - RNA, 19 nt, Artificial Sequence
  Description of Artificial Sequence: Synthetic oligonucleotide
uaugucaugugccaugaga

SEQ ID NO: 1249319 - RNA, 19 nt, Artificial Sequence
  Description of Artificial Sequence: Synthetic oligonucleotide
aaaaguuagccauugucua

SEQ ID NO: 1249320 - RNA, 19 nt, Artificial Sequence
  Description of Artificial Sequence: Synthetic oligonucleotide
uauuauaaguuuacauaga

SEQ ID NO: 1249321 - RNA, 19 nt, Artificial Sequence
  Description of Artificial Sequence: Synthetic oligonucleotide
uuguuaaaugcucaugggu

SEQ ID NO: 1249322 - RNA, 19 nt, Artificial Sequence
  Description of Artificial Sequence: Synthetic oligonucleotide
uggagaauuucauuaauaa

SEQ ID NO: 1249323 - RNA, 19 nt, Artificial Sequence
  Description of Artificial Sequence: Synthetic oligonucleotide
aacaauguuggugagaaua

SEQ ID NO: 1249324 - RNA, 19 nt, Artificial Sequence
  Description of Artificial Sequence: Synthetic oligonucleotide
aacaucucagauuggaaau

SEQ ID NO: 1249325 - RNA, 19 nt, Artificial Sequence
  Description of Artificial Sequence: Synthetic oligonucleotide
aguaggaucaucaauauua

SEQ ID NO: 1249326 - RNA, 19 nt, Artificial Sequence
  Description of Artificial Sequence: Synthetic oligonucleotide
ugugauaguuaucagguuu

SEQ ID NO: 1249327 - RNA, 19 nt, Artificial Sequence
  Description of Artificial Sequence: Synthetic oligonucleotide
uugguaauuuuauagcagu

SEQ ID NO: 1249328 - RNA, 19 nt, Artificial Sequence
  Description of Artificial Sequence: Synthetic oligonucleotide
uuuacauagauagugcaaa

SEQ ID NO: 1249329 - RNA, 19 nt, Artificial Sequence
  Description of Artificial Sequence: Synthetic oligonucleotide
uauuaggaucuuaucaacu

SEQ ID NO: 1249330 - RNA, 19 nt, Artificial Sequence
  Description of Artificial Sequence: Synthetic oligonucleotide
ucauggaauauucucuaca

SEQ ID NO: 1249331 - RNA, 19 nt, Artificial Sequence
  Description of Artificial Sequence: Synthetic oligonucleotide
uauuguugugaauugguaa

SEQ ID NO: 1249332 - RNA, 19 nt, Artificial Sequence
  Description of Artificial Sequence: Synthetic oligonucleotide
gaauccgaucuucauagcc

SEQ ID NO: 1249333 - RNA, 19 nt, Artificial Sequence
  Description of Artificial Sequence: Synthetic oligonucleotide
ucacuuaaacccaguagcc

SEQ ID NO: 1249334 - RNA, 19 nt, Artificial Sequence
  Description of Artificial Sequence: Synthetic oligonucleotide
aacggugcaacugggcucc

SEQ ID NO: 1249335 - RNA, 19 nt, Artificial Sequence
  Description of Artificial Sequence: Synthetic oligonucleotide
ugggacauaacuguuuuag

SEQ ID NO: 1249336 - RNA, 19 nt, Artificial Sequence
  Description of Artificial Sequence: Synthetic oligonucleotide
uuaucaucaggcauaucga

SEQ ID NO: 1249337 - RNA, 19 nt, Artificial Sequence
  Description of Artificial Sequence: Synthetic oligonucleotide
ucucagauuggaaaucaug

SEQ ID NO: 1249338 - RNA, 19 nt, Artificial Sequence
  Description of Artificial Sequence: Synthetic oligonucleotide
uaaacagucguccuauuua

SEQ ID NO: 1249339 - RNA, 19 nt, Artificial Sequence
  Description of Artificial Sequence: Synthetic oligonucleotide
uuauuaaguauagaccugu

SEQ ID NO: 1249340 - RNA, 19 nt, Artificial Sequence
  Description of Artificial Sequence: Synthetic oligonucleotide
gacauaacuguuuuagaga

SEQ ID NO: 1249341 - RNA, 19 nt, Artificial Sequence
  Description of Artificial Sequence: Synthetic oligonucleotide
ugagaauaugcgaguagcc

SEQ ID NO: 1249342 - RNA, 19 nt, Artificial Sequence
  Description of Artificial Sequence: Synthetic oligonucleotide
uaacaucucagauuggaaa

SEQ ID NO: 1249343 - RNA, 19 nt, Artificial Sequence
  Description of Artificial Sequence: Synthetic oligonucleotide
uguugcaaaagugauuuga

SEQ ID NO: 1249344 - RNA, 19 nt, Artificial Sequence
  Description of Artificial Sequence: Synthetic oligonucleotide
aaugacucgggagauauau

SEQ ID NO: 1249345 - RNA, 19 nt, Artificial Sequence
  Description of Artificial Sequence: Synthetic oligonucleotide
aaucauggaauauucucua

SEQ ID NO: 1249346 - RNA, 19 nt, Artificial Sequence
  Description of Artificial Sequence: Synthetic oligonucleotide
uuggauuaacaucucagau

SEQ ID NO: 1249347 - RNA, 19 nt, Artificial Sequence
  Description of Artificial Sequence: Synthetic oligonucleotide
ggacauaacuguuuuagag

SEQ ID NO: 1249348 - RNA, 19 nt, Artificial Sequence
  Description of Artificial Sequence: Synthetic oligonucleotide
ucucuaaauuauuguuugg

SEQ ID NO: 1249349 - RNA, 19 nt, Artificial Sequence
  Description of Artificial Sequence: Synthetic oligonucleotide
aaaaugacucgggagauau

SEQ ID NO: 1249350 - RNA, 19 nt, Artificial Sequence
  Description of Artificial Sequence: Synthetic oligonucleotide
aaacauuagauugcuccag

SEQ ID NO: 1249351 - RNA, 19 nt, Artificial Sequence
  Description of Artificial Sequence: Synthetic oligonucleotide
auauuauucauuaagcauu

SEQ ID NO: 1249352 - RNA, 19 nt, Artificial Sequence
  Description of Artificial Sequence: Synthetic oligonucleotide
ugguaauuaaggagcuccg

SEQ ID NO: 1249353 - RNA, 19 nt, Artificial Sequence
  Description of Artificial Sequence: Synthetic oligonucleotide
uugcaucaacauaaaaccc

SEQ ID NO: 1249354 - RNA, 19 nt, Artificial Sequence
  Description of Artificial Sequence: Synthetic oligonucleotide
cauagauagugcaaagcac

SEQ ID NO: 1249355 - RNA, 19 nt, Artificial Sequence
  Description of Artificial Sequence: Synthetic oligonucleotide
ucguguguaugucaugugc

SEQ ID NO: 1249356 - RNA, 19 nt, Artificial Sequence
  Description of Artificial Sequence: Synthetic oligonucleotide
cugguaauuaaggagcucc

SEQ ID NO: 1249357 - RNA, 19 nt, Artificial Sequence
  Description of Artificial Sequence: Synthetic oligonucleotide
aaacagucguccuauuuaa

SEQ ID NO: 1249358 - RNA, 19 nt, Artificial Sequence
  Description of Artificial Sequence: Synthetic oligonucleotide
uagugcaaagcacaguuaa

SEQ ID NO: 1249359 - RNA, 19 nt, Artificial Sequence
  Description of Artificial Sequence: Synthetic oligonucleotide
uucccugugauaguuauca

SEQ ID NO: 1249360 - RNA, 19 nt, Artificial Sequence
  Description of Artificial Sequence: Synthetic oligonucleotide
ugagugaguugcaucaaca

SEQ ID NO: 1249361 - RNA, 19 nt, Artificial Sequence
  Description of Artificial Sequence: Synthetic oligonucleotide
cagcaggauaauuaguagg

SEQ ID NO: 1249362 - RNA, 19 nt, Artificial Sequence
  Description of Artificial Sequence: Synthetic oligonucleotide
uugugaauugguaauuuua

SEQ ID NO: 1249363 - RNA, 19 nt, Artificial Sequence
  Description of Artificial Sequence: Synthetic oligonucleotide
cuugauacugguuccauca

SEQ ID NO: 1249364 - RNA, 19 nt, Artificial Sequence
  Description of Artificial Sequence: Synthetic oligonucleotide
uuacaagaaacauuagauu

SEQ ID NO: 1249365 - RNA, 19 nt, Artificial Sequence
  Description of Artificial Sequence: Synthetic oligonucleotide
gaucuuaucaacugcccuc

SEQ ID NO: 1249366 - RNA, 19 nt, Artificial Sequence
  Description of Artificial Sequence: Synthetic oligonucleotide
uacggaugaucugaaacgg

SEQ ID NO: 1249367 - RNA, 19 nt, Artificial Sequence
  Description of Artificial Sequence: Synthetic oligonucleotide
cuuauuaaguauagaccug

SEQ ID NO: 1249368 - RNA, 19 nt, Artificial Sequence
  Description of Artificial Sequence: Synthetic oligonucleotide
aaaugcucaugggucaagg

SEQ ID NO: 1249369 - RNA, 19 nt, Artificial Sequence
  Description of Artificial Sequence: Synthetic oligonucleotide
aauaugcgaguagccaugg

SEQ ID NO: 1249370 - RNA, 19 nt, Artificial Sequence
  Description of Artificial Sequence: Synthetic oligonucleotide
auauaucucuaaauuauug

SEQ ID NO: 1249371 - RNA, 19 nt, Artificial Sequence
  Description of Artificial Sequence: Synthetic oligonucleotide
auuaagcauuaauuaaaga

SEQ ID NO: 1249372 - RNA, 19 nt, Artificial Sequence
  Description of Artificial Sequence: Synthetic oligonucleotide
guauagaccugucaaggug

SEQ ID NO: 1249373 - RNA, 19 nt, Artificial Sequence
  Description of Artificial Sequence: Synthetic oligonucleotide
aguagcagccaaguugugc

SEQ ID NO: 1249374 - RNA, 19 nt, Artificial Sequence
  Description of Artificial Sequence: Synthetic oligonucleotide
gaagugaucagucauuggu

SEQ ID NO: 1249375 - RNA, 19 nt, Artificial Sequence
  Description of Artificial Sequence: Synthetic oligonucleotide
gauucaaaaugacucggga

SEQ ID NO: 1249376 - RNA, 19 nt, Artificial Sequence
  Description of Artificial Sequence: Synthetic oligonucleotide
aaguaccuuucucucacug

SEQ ID NO: 1249377 - RNA, 19 nt, Artificial Sequence
  Description of Artificial Sequence: Synthetic oligonucleotide
acaaaggucauuguuaaau

SEQ ID NO: 1249378 - RNA, 19 nt, Artificial Sequence
  Description of Artificial Sequence: Synthetic oligonucleotide
ucccuuguugcaaaaguga

SEQ ID NO: 1249379 - RNA, 19 nt, Artificial Sequence
  Description of Artificial Sequence: Synthetic oligonucleotide
uaacuagaaacacuauaau

SEQ ID NO: 1249380 - RNA, 19 nt, Artificial Sequence
  Description of Artificial Sequence: Synthetic oligonucleotide
cugggcaugagcuguagcc

SEQ ID NO: 1249381 - RNA, 19 nt, Artificial Sequence
  Description of Artificial Sequence: Synthetic oligonucleotide
cuauuaggaucuuaucaac

SEQ ID NO: 1249382 - RNA, 19 nt, Artificial Sequence
  Description of Artificial Sequence: Synthetic oligonucleotide
cauuagauugcuccagaag

SEQ ID NO: 1249383 - RNA, 19 nt, Artificial Sequence
  Description of Artificial Sequence: Synthetic oligonucleotide
uucccuuguugcaaaagug

SEQ ID NO: 1249384 - RNA, 19 nt, Artificial Sequence
  Description of Artificial Sequence: Synthetic oligonucleotide
aucauggaauauucucuac

SEQ ID NO: 1249385 - RNA, 19 nt, Artificial Sequence
  Description of Artificial Sequence: Synthetic oligonucleotide
cuaaauuauuguuuggaaa

SEQ ID NO: 1249386 - RNA, 19 nt, Artificial Sequence
  Description of Artificial Sequence: Synthetic oligonucleotide
uguguagcuuggauuaaca

SEQ ID NO: 1249387 - RNA, 19 nt, Artificial Sequence
  Description of Artificial Sequence: Synthetic oligonucleotide
agaauaugcgaguagccau

SEQ ID NO: 1249388 - RNA, 19 nt, Artificial Sequence
  Description of Artificial Sequence: Synthetic oligonucleotide
acagcaggauaauuaguag

SEQ ID NO: 1249389 - RNA, 19 nt, Artificial Sequence
  Description of Artificial Sequence: Synthetic oligonucleotide
auugguaauuuuauagcag

SEQ ID NO: 1249390 - RNA, 19 nt, Artificial Sequence
  Description of Artificial Sequence: Synthetic oligonucleotide
uccuuuacggcuucugucu

SEQ ID NO: 1249391 - RNA, 19 nt, Artificial Sequence
  Description of Artificial Sequence: Synthetic oligonucleotide
uacauagauagugcaaagc

SEQ ID NO: 1249392 - RNA, 19 nt, Artificial Sequence
  Description of Artificial Sequence: Synthetic oligonucleotide
aaacacacucuuuuguauu

SEQ ID NO: 1249393 - RNA, 19 nt, Artificial Sequence
  Description of Artificial Sequence: Synthetic oligonucleotide
uaguuucguggcauggagg

SEQ ID NO: 1249394 - RNA, 19 nt, Artificial Sequence
  Description of Artificial Sequence: Synthetic oligonucleotide
ugauuugaaaaugccauau

SEQ ID NO: 1249395 - RNA, 19 nt, Artificial Sequence
  Description of Artificial Sequence: Synthetic oligonucleotide
aaccucuaggucuguguuc

SEQ ID NO: 1249396 - RNA, 19 nt, Artificial Sequence
  Description of Artificial Sequence: Synthetic oligonucleotide
agguaagacaauaggacuc

SEQ ID NO: 1249397 - RNA, 19 nt, Artificial Sequence
  Description of Artificial Sequence: Synthetic oligonucleotide
caaaggucauuguuaaaug

SEQ ID NO: 1249398 - RNA, 19 nt, Artificial Sequence
  Description of Artificial Sequence: Synthetic oligonucleotide
aucgauaucagggcugaac

SEQ ID NO: 1249399 - RNA, 19 nt, Artificial Sequence
  Description of Artificial Sequence: Synthetic oligonucleotide
uuauuguugugaauuggua

SEQ ID NO: 1249400 - RNA, 19 nt, Artificial Sequence
  Description of Artificial Sequence: Synthetic oligonucleotide
uuucguguguaugucaugu

SEQ ID NO: 1249401 - RNA, 19 nt, Artificial Sequence
  Description of Artificial Sequence: Synthetic oligonucleotide
ugagaauccgaucuucaua

SEQ ID NO: 1249402 - RNA, 19 nt, Artificial Sequence
  Description of Artificial Sequence: Synthetic oligonucleotide
cauaucgauaucagggcug

SEQ ID NO: 1249403 - RNA, 19 nt, Artificial Sequence
  Description of Artificial Sequence: Synthetic oligonucleotide
ucagucauugguccugugu

SEQ ID NO: 1249404 - RNA, 19 nt, Artificial Sequence
  Description of Artificial Sequence: Synthetic oligonucleotide
gguaguaaaauuuguacaa

SEQ ID NO: 1249405 - RNA, 19 nt, Artificial Sequence
  Description of Artificial Sequence: Synthetic oligonucleotide
uaguuaucagguuucucac

SEQ ID NO: 1249406 - RNA, 19 nt, Artificial Sequence
  Description of Artificial Sequence: Synthetic oligonucleotide
uguagaugauagagucagg

SEQ ID NO: 1249407 - RNA, 19 nt, Artificial Sequence
  Description of Artificial Sequence: Synthetic oligonucleotide
ugauucaacugaagguucu

SEQ ID NO: 1249408 - RNA, 19 nt, Artificial Sequence
  Description of Artificial Sequence: Synthetic oligonucleotide
uucauaaacagucguccua

SEQ ID NO: 1249409 - RNA, 19 nt, Artificial Sequence
  Description of Artificial Sequence: Synthetic oligonucleotide
uucucaaguaguguagaug

SEQ ID NO: 1249410 - RNA, 19 nt, Artificial Sequence
  Description of Artificial Sequence: Synthetic oligonucleotide
guaguuucguggcauggag

SEQ ID NO: 1249411 - RNA, 19 nt, Artificial Sequence
  Description of Artificial Sequence: Synthetic oligonucleotide
aguauagaccugucaaggu

SEQ ID NO: 1249412 - RNA, 19 nt, Artificial Sequence
  Description of Artificial Sequence: Synthetic oligonucleotide
uguuucguguguaugucau

SEQ ID NO: 1249413 - RNA, 19 nt, Artificial Sequence
  Description of Artificial Sequence: Synthetic oligonucleotide
gaugaucugaaacggugca

SEQ ID NO: 1249414 - RNA, 19 nt, Artificial Sequence
  Description of Artificial Sequence: Synthetic oligonucleotide
ucucuacaaauuuaaccuc

SEQ ID NO: 1249415 - RNA, 19 nt, Artificial Sequence
  Description of Artificial Sequence: Synthetic oligonucleotide
uacaagacccaaaacgguu

SEQ ID NO: 1249416 - RNA, 19 nt, Artificial Sequence
  Description of Artificial Sequence: Synthetic oligonucleotide
uuaucagguuucucacagg

SEQ ID NO: 1249417 - RNA, 19 nt, Artificial Sequence
  Description of Artificial Sequence: Synthetic oligonucleotide
acuugauacugguuccauc

SEQ ID NO: 1249418 - RNA, 19 nt, Artificial Sequence
  Description of Artificial Sequence: Synthetic oligonucleotide
aaugcucaugggucaaggu

SEQ ID NO: 1249419 - RNA, 19 nt, Artificial Sequence
  Description of Artificial Sequence: Synthetic oligonucleotide
ugcuugguucuacaagacc

SEQ ID NO: 1249420 - RNA, 19 nt, Artificial Sequence
  Description of Artificial Sequence: Synthetic oligonucleotide
acucgggagauauaucucu

SEQ ID NO: 1249421 - RNA, 19 nt, Artificial Sequence
  Description of Artificial Sequence: Synthetic oligonucleotide
gauaauuaguaggaucauc

SEQ ID NO: 1249422 - RNA, 19 nt, Artificial Sequence
  Description of Artificial Sequence: Synthetic oligonucleotide
agcuguagccugaaguacc

SEQ ID NO: 1249423 - RNA, 19 nt, Artificial Sequence
  Description of Artificial Sequence: Synthetic oligonucleotide
guagcagccaaguugugca

SEQ ID NO: 1249424 - RNA, 19 nt, Artificial Sequence
  Description of Artificial Sequence: Synthetic oligonucleotide
gugaguugcaucaacauaa

SEQ ID NO: 1249425 - RNA, 19 nt, Artificial Sequence
  Description of Artificial Sequence: Synthetic oligonucleotide
ugaaacggugcaacugggc

SEQ ID NO: 1249426 - RNA, 19 nt, Artificial Sequence
  Description of Artificial Sequence: Synthetic oligonucleotide
acagucguccuauuuaaaa

SEQ ID NO: 1249427 - RNA, 19 nt, Artificial Sequence
  Description of Artificial Sequence: Synthetic oligonucleotide
uuaacuucccuuguugcaa

SEQ ID NO: 1249428 - RNA, 19 nt, Artificial Sequence
  Description of Artificial Sequence: Synthetic oligonucleotide
agaauccgaucuucauagc

SEQ ID NO: 1249429 - RNA, 19 nt, Artificial Sequence
  Description of Artificial Sequence: Synthetic oligonucleotide
aacggacccuucuaauucu

SEQ ID NO: 1249430 - RNA, 19 nt, Artificial Sequence
  Description of Artificial Sequence: Synthetic oligonucleotide
cuaggguuuucuauuagga

SEQ ID NO: 1249431 - RNA, 19 nt, Artificial Sequence
  Description of Artificial Sequence: Synthetic oligonucleotide
ucauaaacagucguccuau

SEQ ID NO: 1249432 - RNA, 19 nt, Artificial Sequence
  Description of Artificial Sequence: Synthetic oligonucleotide
gauuggaaaucauggaaua

SEQ ID NO: 1249433 - RNA, 19 nt, Artificial Sequence
  Description of Artificial Sequence: Synthetic oligonucleotide
agucauugguccuguguag

SEQ ID NO: 1249434 - RNA, 19 nt, Artificial Sequence
  Description of Artificial Sequence: Synthetic oligonucleotide
cuuaacuagaaacacuaua

SEQ ID NO: 1249435 - RNA, 19 nt, Artificial Sequence
  Description of Artificial Sequence: Synthetic oligonucleotide
uuuucucaaguaguguaga

SEQ ID NO: 1249436 - RNA, 19 nt, Artificial Sequence
  Description of Artificial Sequence: Synthetic oligonucleotide
cauauuauucauuaagcau

SEQ ID NO: 1249437 - RNA, 19 nt, Artificial Sequence
  Description of Artificial Sequence: Synthetic oligonucleotide
agcaggauaauuaguagga

SEQ ID NO: 1249438 - RNA, 19 nt, Artificial Sequence
  Description of Artificial Sequence: Synthetic oligonucleotide
uguaugucaugugccauga

SEQ ID NO: 1249439 - RNA, 19 nt, Artificial Sequence
  Description of Artificial Sequence: Synthetic oligonucleotide
uauuaaguauagaccuguc

SEQ ID NO: 1249440 - RNA, 19 nt, Artificial Sequence
  Description of Artificial Sequence: Synthetic oligonucleotide
caauauacggaugaucuga

SEQ ID NO: 1249441 - RNA, 19 nt, Artificial Sequence
  Description of Artificial Sequence: Synthetic oligonucleotide
uuggaaaucauggaauauu

SEQ ID NO: 1249442 - RNA, 19 nt, Artificial Sequence
  Description of Artificial Sequence: Synthetic oligonucleotide
caggcauaucgauaucagg

SEQ ID NO: 1249443 - RNA, 19 nt, Artificial Sequence
  Description of Artificial Sequence: Synthetic oligonucleotide
aguuagccauugucuaggg

SEQ ID NO: 1249444 - RNA, 19 nt, Artificial Sequence
  Description of Artificial Sequence: Synthetic oligonucleotide
uuuguacaaaggucauugu

SEQ ID NO: 1249445 - RNA, 19 nt, Artificial Sequence
  Description of Artificial Sequence: Synthetic oligonucleotide
aaguaguguagaugauaga

SEQ ID NO: 1249446 - RNA, 19 nt, Artificial Sequence
  Description of Artificial Sequence: Synthetic oligonucleotide
cauacuucaucagucggug

SEQ ID NO: 1249447 - RNA, 19 nt, Artificial Sequence
  Description of Artificial Sequence: Synthetic oligonucleotide
gagaauaugcgaguagcca

SEQ ID NO: 1249448 - RNA, 19 nt, Artificial Sequence
  Description of Artificial Sequence: Synthetic oligonucleotide
uugucuaggguuuucuauu

SEQ ID NO: 1249449 - RNA, 19 nt, Artificial Sequence
  Description of Artificial Sequence: Synthetic oligonucleotide
ugcccucucaguuauuccu

SEQ ID NO: 1249450 - RNA, 19 nt, Artificial Sequence
  Description of Artificial Sequence: Synthetic oligonucleotide
ucaaguaguguagaugaua

SEQ ID NO: 1249451 - RNA, 19 nt, Artificial Sequence
  Description of Artificial Sequence: Synthetic oligonucleotide
cauggaauauucucuacaa

SEQ ID NO: 1249452 - RNA, 19 nt, Artificial Sequence
  Description of Artificial Sequence: Synthetic oligonucleotide
gcuugguucuacaagaccc

SEQ ID NO: 1249453 - RNA, 19 nt, Artificial Sequence
  Description of Artificial Sequence: Synthetic oligonucleotide
guacaaaggucauuguuaa

SEQ ID NO: 1249454 - RNA, 19 nt, Artificial Sequence
  Description of Artificial Sequence: Synthetic oligonucleotide
gggcaacuuaacuagaaac

SEQ ID NO: 1249455 - RNA, 19 nt, Artificial Sequence
  Description of Artificial Sequence: Synthetic oligonucleotide
uuggugagaauaugcgagu

SEQ ID NO: 1249456 - RNA, 19 nt, Artificial Sequence
  Description of Artificial Sequence: Synthetic oligonucleotide
uguagccugaaguaccuuu

SEQ ID NO: 1249457 - RNA, 19 nt, Artificial Sequence
  Description of Artificial Sequence: Synthetic oligonucleotide
caaguugugcaaacuccag

SEQ ID NO: 1249458 - RNA, 19 nt, Artificial Sequence
  Description of Artificial Sequence: Synthetic oligonucleotide
ugaucagucauugguccug

SEQ ID NO: 1249459 - RNA, 19 nt, Artificial Sequence
  Description of Artificial Sequence: Synthetic oligonucleotide
uucaucagucgguguuucg

SEQ ID NO: 1249460 - RNA, 19 nt, Artificial Sequence
  Description of Artificial Sequence: Synthetic oligonucleotide
agugaguugcaucaacaua

SEQ ID NO: 1249461 - RNA, 19 nt, Artificial Sequence
  Description of Artificial Sequence: Synthetic oligonucleotide
cugauucaacugaagguuc

SEQ ID NO: 1249462 - RNA, 19 nt, Artificial Sequence
  Description of Artificial Sequence: Synthetic oligonucleotide
gcugaacugguaauuaagg

SEQ ID NO: 1249463 - RNA, 19 nt, Artificial Sequence
  Description of Artificial Sequence: Synthetic oligonucleotide
ggguaguaaaauuuguaca

SEQ ID NO: 1249464 - RNA, 19 nt, Artificial Sequence
  Description of Artificial Sequence: Synthetic oligonucleotide
agcuccuucuuauuaagua

SEQ ID NO: 1249465 - RNA, 19 nt, Artificial Sequence
  Description of Artificial Sequence: Synthetic oligonucleotide
gaugauagagucaggggaa

SEQ ID NO: 1249466 - RNA, 19 nt, Artificial Sequence
  Description of Artificial Sequence: Synthetic oligonucleotide
cugcuucuugcaauauacg

SEQ ID NO: 1249467 - RNA, 19 nt, Artificial Sequence
  Description of Artificial Sequence: Synthetic oligonucleotide
auaugcgaguagccauggc

SEQ ID NO: 1249468 - RNA, 19 nt, Artificial Sequence
  Description of Artificial Sequence: Synthetic oligonucleotide
gccauauuauucauuaagc

SEQ ID NO: 1249469 - RNA, 19 nt, Artificial Sequence
  Description of Artificial Sequence: Synthetic oligonucleotide
ggcauaucgauaucagggc

SEQ ID NO: 1249470 - RNA, 19 nt, Artificial Sequence
  Description of Artificial Sequence: Synthetic oligonucleotide
agagaucauauuccaagua

SEQ ID NO: 1249471 - RNA, 19 nt, Artificial Sequence
  Description of Artificial Sequence: Synthetic oligonucleotide
guuugcacgucccugcuga

SEQ ID NO: 1249472 - RNA, 19 nt, Artificial Sequence
  Description of Artificial Sequence: Synthetic oligonucleotide
uuucucacaggagggaagu

SEQ ID NO: 1249473 - RNA, 19 nt, Artificial Sequence
  Description of Artificial Sequence: Synthetic oligonucleotide
aacugguaauuaaggagcu

SEQ ID NO: 1249474 - RNA, 19 nt, Artificial Sequence
  Description of Artificial Sequence: Synthetic oligonucleotide
aauauacggaugaucugaa

SEQ ID NO: 1249475 - RNA, 19 nt, Artificial Sequence
  Description of Artificial Sequence: Synthetic oligonucleotide
guugugcaaacuccagcag

SEQ ID NO: 1249476 - RNA, 19 nt, Artificial Sequence
  Description of Artificial Sequence: Synthetic oligonucleotide
ucaaaaugacucgggagau

SEQ ID NO: 1249477 - RNA, 19 nt, Artificial Sequence
  Description of Artificial Sequence: Synthetic oligonucleotide
cugacauggcccugguugc

SEQ ID NO: 1249478 - RNA, 19 nt, Artificial Sequence
  Description of Artificial Sequence: Synthetic oligonucleotide
ucaucagucgguguuucgu

SEQ ID NO: 1249479 - RNA, 19 nt, Artificial Sequence
  Description of Artificial Sequence: Synthetic oligonucleotide
ucagucgguguuucgugug

SEQ ID NO: 1249480 - RNA, 19 nt, Artificial Sequence
  Description of Artificial Sequence: Synthetic oligonucleotide
ucaacugcccucucaguua

SEQ ID NO: 1249481 - RNA, 19 nt, Artificial Sequence
  Description of Artificial Sequence: Synthetic oligonucleotide
agcaucuuaggaacaaugu

SEQ ID NO: 1249482 - RNA, 19 nt, Artificial Sequence
  Description of Artificial Sequence: Synthetic oligonucleotide
gauuaacaucucagauugg

SEQ ID NO: 1249483 - RNA, 19 nt, Artificial Sequence
  Description of Artificial Sequence: Synthetic oligonucleotide
gguucuacaagacccaaaa

SEQ ID NO: 1249484 - RNA, 19 nt, Artificial Sequence
  Description of Artificial Sequence: Synthetic oligonucleotide
ugcaacugggcuccuucca

SEQ ID NO: 1249485 - RNA, 19 nt, Artificial Sequence
  Description of Artificial Sequence: Synthetic oligonucleotide
cuccgugccaaagagauca

SEQ ID NO: 1249486 - RNA, 19 nt, Artificial Sequence
  Description of Artificial Sequence: Synthetic oligonucleotide
uccagcuaugauguggacu

SEQ ID NO: 1249487 - RNA, 19 nt, Artificial Sequence
  Description of Artificial Sequence: Synthetic oligonucleotide
guaggaucaucaauauuac

SEQ ID NO: 1249488 - RNA, 19 nt, Artificial Sequence
  Description of Artificial Sequence: Synthetic oligonucleotide
gauacugguuccaucagcu

SEQ ID NO: 1249489 - RNA, 19 nt, Artificial Sequence
  Description of Artificial Sequence: Synthetic oligonucleotide
uugcuugguucuacaagac

SEQ ID NO: 1249490 - RNA, 19 nt, Artificial Sequence
  Description of Artificial Sequence: Synthetic oligonucleotide
ugucuaggguuuucuauua

SEQ ID NO: 1249491 - RNA, 19 nt, Artificial Sequence
  Description of Artificial Sequence: Synthetic oligonucleotide
ucguccuauuuaaaaguua

SEQ ID NO: 1249492 - RNA, 19 nt, Artificial Sequence
  Description of Artificial Sequence: Synthetic oligonucleotide
cguccuauuuaaaaguuag

SEQ ID NO: 1249493 - RNA, 19 nt, Artificial Sequence
  Description of Artificial Sequence: Synthetic oligonucleotide
auuaaggagcuccgugcca

SEQ ID NO: 1249494 - RNA, 19 nt, Artificial Sequence
  Description of Artificial Sequence: Synthetic oligonucleotide
auggaauauucucuacaaa

SEQ ID NO: 1249495 - RNA, 19 nt, Artificial Sequence
  Description of Artificial Sequence: Synthetic oligonucleotide
cucugaggagcaucuuagg

SEQ ID NO: 1249496 - RNA, 19 nt, Artificial Sequence
  Description of Artificial Sequence: Synthetic oligonucleotide
ugucagucaaaggccagga

SEQ ID NO: 1249497 - RNA, 19 nt, Artificial Sequence
  Description of Artificial Sequence: Synthetic oligonucleotide
auauaacaguucuuccuuu

SEQ ID NO: 1249498 - RNA, 19 nt, Artificial Sequence
  Description of Artificial Sequence: Synthetic oligonucleotide
aucuuaucaacugcccucu

SEQ ID NO: 1249499 - RNA, 19 nt, Artificial Sequence
  Description of Artificial Sequence: Synthetic oligonucleotide
ugaugacaggacagccaag

SEQ ID NO: 1249500 - RNA, 19 nt, Artificial Sequence
  Description of Artificial Sequence: Synthetic oligonucleotide
gugauaguuaucagguuuc

SEQ ID NO: 1249501 - RNA, 19 nt, Artificial Sequence
  Description of Artificial Sequence: Synthetic oligonucleotide
auaucgauaucagggcuga

SEQ ID NO: 1249502 - RNA, 19 nt, Artificial Sequence
  Description of Artificial Sequence: Synthetic oligonucleotide
agcagucuccuuuggaaaa

SEQ ID NO: 1249503 - RNA, 19 nt, Artificial Sequence
  Description of Artificial Sequence: Synthetic oligonucleotide
caucagucgguguuucgug

SEQ ID NO: 1249504 - RNA, 19 nt, Artificial Sequence
  Description of Artificial Sequence: Synthetic oligonucleotide
uucguguguaugucaugug

SEQ ID NO: 1249505 - RNA, 19 nt, Artificial Sequence
  Description of Artificial Sequence: Synthetic oligonucleotide
uguuugcacgucccugcug

SEQ ID NO: 1249506 - RNA, 19 nt, Artificial Sequence
  Description of Artificial Sequence: Synthetic oligonucleotide
aggaaacggacccuucuaa

SEQ ID NO: 1249507 - RNA, 19 nt, Artificial Sequence
  Description of Artificial Sequence: Synthetic oligonucleotide
accucuaggucuguguuca

SEQ ID NO: 1249508 - RNA, 19 nt, Artificial Sequence
  Description of Artificial Sequence: Synthetic oligonucleotide
ugauaguuaucagguuucu

SEQ ID NO: 1249509 - RNA, 19 nt, Artificial Sequence
  Description of Artificial Sequence: Synthetic oligonucleotide
ccauauuauucauuaagca

SEQ ID NO: 1249510 - RNA, 19 nt, Artificial Sequence
  Description of Artificial Sequence: Synthetic oligonucleotide
ggcaacuuaacuagaaaca

SEQ ID NO: 1249511 - RNA, 19 nt, Artificial Sequence
  Description of Artificial Sequence: Synthetic oligonucleotide
uuaaaugcucaugggucaa

SEQ ID NO: 1249512 - RNA, 19 nt, Artificial Sequence
  Description of Artificial Sequence: Synthetic oligonucleotide
aucagucgguguuucgugu

SEQ ID NO: 1249513 - RNA, 19 nt, Artificial Sequence
  Description of Artificial Sequence: Synthetic oligonucleotide
guucuacaagacccaaaac

SEQ ID NO: 1249514 - RNA, 19 nt, Artificial Sequence
  Description of Artificial Sequence: Synthetic oligonucleotide
cuucuugcaauauacggau

SEQ ID NO: 1249515 - RNA, 19 nt, Artificial Sequence
  Description of Artificial Sequence: Synthetic oligonucleotide
agguaguuucguggcaugg

SEQ ID NO: 1249516 - RNA, 19 nt, Artificial Sequence
  Description of Artificial Sequence: Synthetic oligonucleotide
ggagcuccgugccaaagag

SEQ ID NO: 1249517 - RNA, 19 nt, Artificial Sequence
  Description of Artificial Sequence: Synthetic oligonucleotide
cuuguugcaaaagugauuu

SEQ ID NO: 1249518 - RNA, 19 nt, Artificial Sequence
  Description of Artificial Sequence: Synthetic oligonucleotide
guuuacauagauagugcaa

SEQ ID NO: 1249519 - RNA, 19 nt, Artificial Sequence
  Description of Artificial Sequence: Synthetic oligonucleotide
guguguaugucaugugcca

SEQ ID NO: 1249520 - RNA, 19 nt, Artificial Sequence
  Description of Artificial Sequence: Synthetic oligonucleotide
caccaaggcuccuccaccc

SEQ ID NO: 1249521 - RNA, 19 nt, Artificial Sequence
  Description of Artificial Sequence: Synthetic oligonucleotide
ucgggagauauaucucuaa

SEQ ID NO: 1249522 - RNA, 19 nt, Artificial Sequence
  Description of Artificial Sequence: Synthetic oligonucleotide
ucaaggugcgucccaguuu

SEQ ID NO: 1249523 - RNA, 19 nt, Artificial Sequence
  Description of Artificial Sequence: Synthetic oligonucleotide
cugucagucaaaggccagg

SEQ ID NO: 1249524 - RNA, 19 nt, Artificial Sequence
  Description of Artificial Sequence: Synthetic oligonucleotide
uaguaggaucaucaauauu

SEQ ID NO: 1249525 - RNA, 19 nt, Artificial Sequence
  Description of Artificial Sequence: Synthetic oligonucleotide
ugcgucccaguuugcuugg

SEQ ID NO: 1249526 - RNA, 19 nt, Artificial Sequence
  Description of Artificial Sequence: Synthetic oligonucleotide
gucauugguccuguguagc

SEQ ID NO: 1249527 - RNA, 19 nt, Artificial Sequence
  Description of Artificial Sequence: Synthetic oligonucleotide
agcuccgugccaaagagau

SEQ ID NO: 1249528 - RNA, 19 nt, Artificial Sequence
  Description of Artificial Sequence: Synthetic oligonucleotide
augacaggacagccaagcu

SEQ ID NO: 1249529 - RNA, 19 nt, Artificial Sequence
  Description of Artificial Sequence: Synthetic oligonucleotide
uguguaugucaugugccau

SEQ ID NO: 1249530 - RNA, 19 nt, Artificial Sequence
  Description of Artificial Sequence: Synthetic oligonucleotide
guccuauuuaaaaguuagc

SEQ ID NO: 1249531 - RNA, 19 nt, Artificial Sequence
  Description of Artificial Sequence: Synthetic oligonucleotide
uuguuaucaucaggcauau

SEQ ID NO: 1249532 - RNA, 19 nt, Artificial Sequence
  Description of Artificial Sequence: Synthetic oligonucleotide
auagaccugucaagguggg

SEQ ID NO: 1249533 - RNA, 19 nt, Artificial Sequence
  Description of Artificial Sequence: Synthetic oligonucleotide
ucgguguuucguguguaug

SEQ ID NO: 1249534 - RNA, 19 nt, Artificial Sequence
  Description of Artificial Sequence: Synthetic oligonucleotide
gucagucaaaggccaggag

SEQ ID NO: 1249535 - RNA, 19 nt, Artificial Sequence
  Description of Artificial Sequence: Synthetic oligonucleotide
guuucguguguaugucaug

SEQ ID NO: 1249536 - RNA, 19 nt, Artificial Sequence
  Description of Artificial Sequence: Synthetic oligonucleotide
uacaaaggucauuguuaaa

SEQ ID NO: 1249537 - RNA, 19 nt, Artificial Sequence
  Description of Artificial Sequence: Synthetic oligonucleotide
gcaauauacggaugaucug

SEQ ID NO: 1249538 - RNA, 19 nt, Artificial Sequence
  Description of Artificial Sequence: Synthetic oligonucleotide
cugaaguaccuuucucuca

SEQ ID NO: 1249539 - RNA, 19 nt, Artificial Sequence
  Description of Artificial Sequence: Synthetic oligonucleotide
guguucauaaacagucguc

SEQ ID NO: 1249540 - RNA, 19 nt, Artificial Sequence
  Description of Artificial Sequence: Synthetic oligonucleotide
auauacggaugaucugaaa

SEQ ID NO: 1249541 - RNA, 19 nt, Artificial Sequence
  Description of Artificial Sequence: Synthetic oligonucleotide
gacucacuuaaacccagua

SEQ ID NO: 1249542 - RNA, 19 nt, Artificial Sequence
  Description of Artificial Sequence: Synthetic oligonucleotide
uuucccugugauaguuauc

SEQ ID NO: 1249543 - RNA, 19 nt, Artificial Sequence
  Description of Artificial Sequence: Synthetic oligonucleotide
ggaugaucugaaacggugc

SEQ ID NO: 1249544 - RNA, 19 nt, Artificial Sequence
  Description of Artificial Sequence: Synthetic oligonucleotide
uuugcacgucccugcugag

SEQ ID NO: 1249545 - RNA, 19 nt, Artificial Sequence
  Description of Artificial Sequence: Synthetic oligonucleotide
gaccugucaaggugggaca

SEQ ID NO: 1249546 - RNA, 19 nt, Artificial Sequence
  Description of Artificial Sequence: Synthetic oligonucleotide
gauaguuuccuuggaggua

SEQ ID NO: 1249547 - RNA, 19 nt, Artificial Sequence
  Description of Artificial Sequence: Synthetic oligonucleotide
gaaacggacccuucuaauu

SEQ ID NO: 1249548 - RNA, 19 nt, Artificial Sequence
  Description of Artificial Sequence: Synthetic oligonucleotide
ccugaaguaccuuucucuc

SEQ ID NO: 1249549 - RNA, 19 nt, Artificial Sequence
  Description of Artificial Sequence: Synthetic oligonucleotide
ugauagagucaggggaaaa

SEQ ID NO: 1249550 - RNA, 19 nt, Artificial Sequence
  Description of Artificial Sequence: Synthetic oligonucleotide
gguaagacaauaggacuca

SEQ ID NO: 1249551 - RNA, 19 nt, Artificial Sequence
  Description of Artificial Sequence: Synthetic oligonucleotide
cagucauugguccugugua

SEQ ID NO: 1249552 - RNA, 19 nt, Artificial Sequence
  Description of Artificial Sequence: Synthetic oligonucleotide
ugucaaggugggacauaac

SEQ ID NO: 1249553 - RNA, 19 nt, Artificial Sequence
  Description of Artificial Sequence: Synthetic oligonucleotide
ugcuagccacuucaguguu

SEQ ID NO: 1249554 - RNA, 19 nt, Artificial Sequence
  Description of Artificial Sequence: Synthetic oligonucleotide
guguuucguguguauguca

SEQ ID NO: 1249555 - RNA, 19 nt, Artificial Sequence
  Description of Artificial Sequence: Synthetic oligonucleotide
cugcccucucaguuauucc

SEQ ID NO: 1249556 - RNA, 19 nt, Artificial Sequence
  Description of Artificial Sequence: Synthetic oligonucleotide
guagccugaaguaccuuuc

SEQ ID NO: 1249557 - RNA, 19 nt, Artificial Sequence
  Description of Artificial Sequence: Synthetic oligonucleotide
augacucgggagauauauc

SEQ ID NO: 1249558 - RNA, 19 nt, Artificial Sequence
  Description of Artificial Sequence: Synthetic oligonucleotide
uggugagaauaugcgagua

SEQ ID NO: 1249559 - RNA, 19 nt, Artificial Sequence
  Description of Artificial Sequence: Synthetic oligonucleotide
cuguguagcuuggauuaac

SEQ ID NO: 1249560 - RNA, 19 nt, Artificial Sequence
  Description of Artificial Sequence: Synthetic oligonucleotide
augccauauuauucauuaa

SEQ ID NO: 1249561 - RNA, 19 nt, Artificial Sequence
  Description of Artificial Sequence: Synthetic oligonucleotide
agucaaaggccaggagcag

SEQ ID NO: 1249562 - RNA, 19 nt, Artificial Sequence
  Description of Artificial Sequence: Synthetic oligonucleotide
guaguguagaugauagagu

SEQ ID NO: 1249563 - RNA, 19 nt, Artificial Sequence
  Description of Artificial Sequence: Synthetic oligonucleotide
guaugucaugugccaugag

SEQ ID NO: 1249564 - RNA, 19 nt, Artificial Sequence
  Description of Artificial Sequence: Synthetic oligonucleotide
ccacuucaguguuugcacg

SEQ ID NO: 1249565 - RNA, 19 nt, Artificial Sequence
  Description of Artificial Sequence: Synthetic oligonucleotide
acaagacccaaaacgguuu

SEQ ID NO: 1249566 - RNA, 19 nt, Artificial Sequence
  Description of Artificial Sequence: Synthetic oligonucleotide
auaucagggcugaacuggu

SEQ ID NO: 1249567 - RNA, 19 nt, Artificial Sequence
  Description of Artificial Sequence: Synthetic oligonucleotide
gacucgggagauauaucuc

SEQ ID NO: 1249568 - RNA, 19 nt, Artificial Sequence
  Description of Artificial Sequence: Synthetic oligonucleotide
cuacaagacccaaaacggu

SEQ ID NO: 1249569 - RNA, 19 nt, Artificial Sequence
  Description of Artificial Sequence: Synthetic oligonucleotide
gucauuguuaaaugcucau

SEQ ID NO: 1249570 - RNA, 19 nt, Artificial Sequence
  Description of Artificial Sequence: Synthetic oligonucleotide
caguguuugcacgucccug

SEQ ID NO: 1249571 - RNA, 19 nt, Artificial Sequence
  Description of Artificial Sequence: Synthetic oligonucleotide
aaggugcgucccaguuugc

SEQ ID NO: 1249572 - RNA, 19 nt, Artificial Sequence
  Description of Artificial Sequence: Synthetic oligonucleotide
ggucauuguuaaaugcuca

SEQ ID NO: 1249573 - RNA, 19 nt, Artificial Sequence
  Description of Artificial Sequence: Synthetic oligonucleotide
aacagucguccuauuuaaa

SEQ ID NO: 1249574 - RNA, 19 nt, Artificial Sequence
  Description of Artificial Sequence: Synthetic oligonucleotide
gagguggguaguaaaauuu

SEQ ID NO: 1249575 - RNA, 19 nt, Artificial Sequence
  Description of Artificial Sequence: Synthetic oligonucleotide
cggaugaucugaaacggug

SEQ ID NO: 1249576 - RNA, 19 nt, Artificial Sequence
  Description of Artificial Sequence: Synthetic oligonucleotide
cuucaucagucgguguuuc

SEQ ID NO: 1249577 - RNA, 19 nt, Artificial Sequence
  Description of Artificial Sequence: Synthetic oligonucleotide
augaucugaaacggugcaa

SEQ ID NO: 1249578 - RNA, 19 nt, Artificial Sequence
  Description of Artificial Sequence: Synthetic oligonucleotide
gggcaugagcuguagccug

SEQ ID NO: 1249579 - RNA, 19 nt, Artificial Sequence
  Description of Artificial Sequence: Synthetic oligonucleotide
caucuguaagcugcuccac

SEQ ID NO: 1249580 - RNA, 19 nt, Artificial Sequence
  Description of Artificial Sequence: Synthetic oligonucleotide
cauugucuaggguuuucua

SEQ ID NO: 1249581 - RNA, 19 nt, Artificial Sequence
  Description of Artificial Sequence: Synthetic oligonucleotide
gcagccaaguugugcaaac

SEQ ID NO: 1249582 - RNA, 19 nt, Artificial Sequence
  Description of Artificial Sequence: Synthetic oligonucleotide
ggaucuuaucaacugcccu

SEQ ID NO: 1249583 - RNA, 19 nt, Artificial Sequence
  Description of Artificial Sequence: Synthetic oligonucleotide
uaaggagcuccgugccaaa

SEQ ID NO: 1249584 - RNA, 19 nt, Artificial Sequence
  Description of Artificial Sequence: Synthetic oligonucleotide
gcuaugauguggacuccag

SEQ ID NO: 1249585 - RNA, 19 nt, Artificial Sequence
  Description of Artificial Sequence: Synthetic oligonucleotide
gguguuucguguguauguc

SEQ ID NO: 1249586 - RNA, 19 nt, Artificial Sequence
  Description of Artificial Sequence: Synthetic oligonucleotide
auagugcaaagcacaguua

SEQ ID NO: 1249587 - RNA, 19 nt, Artificial Sequence
  Description of Artificial Sequence: Synthetic oligonucleotide
acggaugaucugaaacggu

SEQ ID NO: 1249588 - RNA, 19 nt, Artificial Sequence
  Description of Artificial Sequence: Synthetic oligonucleotide
ugacauggcccugguugcu

SEQ ID NO: 1249589 - RNA, 19 nt, Artificial Sequence
  Description of Artificial Sequence: Synthetic oligonucleotide
uagccacuucaguguuugc

SEQ ID NO: 1249590 - RNA, 19 nt, Artificial Sequence
  Description of Artificial Sequence: Synthetic oligonucleotide
caggagcagccaauuucuc

SEQ ID NO: 1249591 - RNA, 19 nt, Artificial Sequence
  Description of Artificial Sequence: Synthetic oligonucleotide
gcucaugggucaaggugcg

SEQ ID NO: 1249592 - RNA, 19 nt, Artificial Sequence
  Description of Artificial Sequence: Synthetic oligonucleotide
aaaugacucgggagauaua

SEQ ID NO: 1249593 - RNA, 19 nt, Artificial Sequence
  Description of Artificial Sequence: Synthetic oligonucleotide
gcauaucgauaucagggcu

SEQ ID NO: 1249594 - RNA, 19 nt, Artificial Sequence
  Description of Artificial Sequence: Synthetic oligonucleotide
ggaggagguggguaguaaa

SEQ ID NO: 1249595 - RNA, 19 nt, Artificial Sequence
  Description of Artificial Sequence: Synthetic oligonucleotide
aggugcgucccaguuugcu

SEQ ID NO: 1249596 - RNA, 19 nt, Artificial Sequence
  Description of Artificial Sequence: Synthetic oligonucleotide
cuaugauguggacuccagu

SEQ ID NO: 1249597 - RNA, 19 nt, Artificial Sequence
  Description of Artificial Sequence: Synthetic oligonucleotide
uccgugccaaagagaucau

SEQ ID NO: 1249598 - RNA, 19 nt, Artificial Sequence
  Description of Artificial Sequence: Synthetic oligonucleotide
caggaaacggacccuucua

SEQ ID NO: 1249599 - RNA, 19 nt, Artificial Sequence
  Description of Artificial Sequence: Synthetic oligonucleotide
cgauaucagggcugaacug

SEQ ID NO: 1249600 - RNA, 19 nt, Artificial Sequence
  Description of Artificial Sequence: Synthetic oligonucleotide
uguuaucaucaggcauauc

SEQ ID NO: 1249601 - RNA, 19 nt, Artificial Sequence
  Description of Artificial Sequence: Synthetic oligonucleotide
accugucaaggugggacau

SEQ ID NO: 1249602 - RNA, 19 nt, Artificial Sequence
  Description of Artificial Sequence: Synthetic oligonucleotide
gaucagucauugguccugu

SEQ ID NO: 1249603 - RNA, 19 nt, Artificial Sequence
  Description of Artificial Sequence: Synthetic oligonucleotide
ccaugagaauccgaucuuc

SEQ ID NO: 1249604 - RNA, 19 nt, Artificial Sequence
  Description of Artificial Sequence: Synthetic oligonucleotide
ggugggacauaacuguuuu

SEQ ID NO: 1249605 - RNA, 19 nt, Artificial Sequence
  Description of Artificial Sequence: Synthetic oligonucleotide
gugccaaagagaucauauu

SEQ ID NO: 1249606 - RNA, 19 nt, Artificial Sequence
  Description of Artificial Sequence: Synthetic oligonucleotide
gucaaggugcgucccaguu

SEQ ID NO: 1249607 - RNA, 19 nt, Artificial Sequence
  Description of Artificial Sequence: Synthetic oligonucleotide
gguaauuaaggagcuccgu

SEQ ID NO: 1249608 - RNA, 19 nt, Artificial Sequence
  Description of Artificial Sequence: Synthetic oligonucleotide
uaucgauaucagggcugaa

SEQ ID NO: 1249609 - RNA, 19 nt, Artificial Sequence
  Description of Artificial Sequence: Synthetic oligonucleotide
gucguccuauuuaaaaguu

SEQ ID NO: 1249610 - RNA, 19 nt, Artificial Sequence
  Description of Artificial Sequence: Synthetic oligonucleotide
ugaguccaguggugguguu

SEQ ID NO: 1249611 - RNA, 19 nt, Artificial Sequence
  Description of Artificial Sequence: Synthetic oligonucleotide
ggaaacggacccuucuaau

SEQ ID NO: 1249612 - RNA, 19 nt, Artificial Sequence
  Description of Artificial Sequence: Synthetic oligonucleotide
caaaaugacucgggagaua

SEQ ID NO: 1249613 - RNA, 19 nt, Artificial Sequence
  Description of Artificial Sequence: Synthetic oligonucleotide
cuugcaauauacggaugau

SEQ ID NO: 1249614 - RNA, 19 nt, Artificial Sequence
  Description of Artificial Sequence: Synthetic oligonucleotide
ccuuuacggcuucugucuc

SEQ ID NO: 1249615 - RNA, 19 nt, Artificial Sequence
  Description of Artificial Sequence: Synthetic oligonucleotide
agucgguguuucgugugua

SEQ ID NO: 1249616 - RNA, 19 nt, Artificial Sequence
  Description of Artificial Sequence: Synthetic oligonucleotide
cucaaguaguguagaugau

SEQ ID NO: 1249617 - RNA, 19 nt, Artificial Sequence
  Description of Artificial Sequence: Synthetic oligonucleotide
cacgucccugcugagucca

SEQ ID NO: 1249618 - RNA, 19 nt, Artificial Sequence
  Description of Artificial Sequence: Synthetic oligonucleotide
cucuaggucuguguucaua

SEQ ID NO: 1249619 - RNA, 19 nt, Artificial Sequence
  Description of Artificial Sequence: Synthetic oligonucleotide
guguuugcacgucccugcu

SEQ ID NO: 1249620 - RNA, 19 nt, Artificial Sequence
  Description of Artificial Sequence: Synthetic oligonucleotide
gcgaguagccauggccucc

SEQ ID NO: 1249621 - RNA, 19 nt, Artificial Sequence
  Description of Artificial Sequence: Synthetic oligonucleotide
cucugcuagccacuucagu

SEQ ID NO: 1249622 - RNA, 19 nt, Artificial Sequence
  Description of Artificial Sequence: Synthetic oligonucleotide
caacugcccucucaguuau

SEQ ID NO: 1249623 - RNA, 19 nt, Artificial Sequence
  Description of Artificial Sequence: Synthetic oligonucleotide
gcacgucccugcugagucc

SEQ ID NO: 1249624 - RNA, 19 nt, Artificial Sequence
  Description of Artificial Sequence: Synthetic oligonucleotide
cgugccaaagagaucauau

SEQ ID NO: 1249625 - RNA, 19 nt, Artificial Sequence
  Description of Artificial Sequence: Synthetic oligonucleotide
gucgguguuucguguguau

SEQ ID NO: 1249626 - RNA, 19 nt, Artificial Sequence
  Description of Artificial Sequence: Synthetic oligonucleotide
cugugauaguuaucagguu

SEQ ID NO: 1249627 - RNA, 19 nt, Artificial Sequence
  Description of Artificial Sequence: Synthetic oligonucleotide
cagucgguguuucgugugu

SEQ ID NO: 1249628 - RNA, 19 nt, Artificial Sequence
  Description of Artificial Sequence: Synthetic oligonucleotide
acggacccuucuaauucuu

SEQ ID NO: 1249629 - RNA, 19 nt, Artificial Sequence
  Description of Artificial Sequence: Synthetic oligonucleotide
cccuuguugcaaaagugau

SEQ ID NO: 1249630 - RNA, 19 nt, Artificial Sequence
  Description of Artificial Sequence: Synthetic oligonucleotide
gccauugucuaggguuuuc

SEQ ID NO: 1249631 - RNA, 19 nt, Artificial Sequence
  Description of Artificial Sequence: Synthetic oligonucleotide
ccaccagagauuucccugu

SEQ ID NO: 1249632 - RNA, 19 nt, Artificial Sequence
  Description of Artificial Sequence: Synthetic oligonucleotide
cgggagauauaucucuaaa

SEQ ID NO: 1249633 - RNA, 19 nt, Artificial Sequence
  Description of Artificial Sequence: Synthetic oligonucleotide
ggugcgucccaguuugcuu

SEQ ID NO: 1249634 - RNA, 19 nt, Artificial Sequence
  Description of Artificial Sequence: Synthetic oligonucleotide
gcaggauaauuaguaggau

SEQ ID NO: 1249635 - RNA, 19 nt, Artificial Sequence
  Description of Artificial Sequence: Synthetic oligonucleotide
aacugcccucucaguuauu

SEQ ID NO: 1249636 - RNA, 19 nt, Artificial Sequence
  Description of Artificial Sequence: Synthetic oligonucleotide
cagccaaguugugcaaacu

SEQ ID NO: 1249637 - RNA, 19 nt, Artificial Sequence
  Description of Artificial Sequence: Synthetic oligonucleotide
ggagcaucuuaggaacaau

SEQ ID NO: 1249638 - RNA, 19 nt, Artificial Sequence
  Description of Artificial Sequence: Synthetic oligonucleotide
ggucaaggugcgucccagu

SEQ ID NO: 1249639 - RNA, 19 nt, Artificial Sequence
  Description of Artificial Sequence: Synthetic oligonucleotide
cauggcccugguugcugcu

SEQ ID NO: 1249640 - RNA, 19 nt, Artificial Sequence
  Description of Artificial Sequence: Synthetic oligonucleotide
gcaugagcuguagccugaa

SEQ ID NO: 1249641 - RNA, 19 nt, Artificial Sequence
  Description of Artificial Sequence: Synthetic oligonucleotide
ggacucacuuaaacccagu

SEQ ID NO: 1249642 - RNA, 19 nt, Artificial Sequence
  Description of Artificial Sequence: Synthetic oligonucleotide
gcuccgugccaaagagauc

SEQ ID NO: 1249643 - RNA, 19 nt, Artificial Sequence
  Description of Artificial Sequence: Synthetic oligonucleotide
ccuguguagcuuggauuaa

SEQ ID NO: 1249644 - RNA, 19 nt, Artificial Sequence
  Description of Artificial Sequence: Synthetic oligonucleotide
acggugcaacugggcuccu

SEQ ID NO: 1249645 - RNA, 19 nt, Artificial Sequence
  Description of Artificial Sequence: Synthetic oligonucleotide
ccccaccagagauuucccu

SEQ ID NO: 1249646 - RNA, 19 nt, Artificial Sequence
  Description of Artificial Sequence: Synthetic oligonucleotide
cuccacccuuagccuugaa

SEQ ID NO: 1249647 - RNA, 19 nt, Artificial Sequence
  Description of Artificial Sequence: Synthetic oligonucleotide
ccugucaaggugggacaua

SEQ ID NO: 1249648 - RNA, 19 nt, Artificial Sequence
  Description of Artificial Sequence: Synthetic oligonucleotide
ccgugccaaagagaucaua

SEQ ID NO: 1249649 - RNA, 19 nt, Artificial Sequence
  Description of Artificial Sequence: Synthetic oligonucleotide
gcuagccacuucaguguuu

SEQ ID NO: 1249650 - RNA, 19 nt, Artificial Sequence
  Description of Artificial Sequence: Synthetic oligonucleotide
cgucccaguuugcuugguu

SEQ ID NO: 1249651 - RNA, 19 nt, Artificial Sequence
  Description of Artificial Sequence: Synthetic oligonucleotide
gcgucccaguuugcuuggu

SEQ ID NO: 1249652 - RNA, 19 nt, Artificial Sequence
  Description of Artificial Sequence: Synthetic oligonucleotide
cgucccugcugaguccagu

SEQ ID NO: 1249653 - RNA, 19 nt, Artificial Sequence
  Description of Artificial Sequence: Synthetic oligonucleotide
aacuuauucaugaaggggc

SEQ ID NO: 1249654 - RNA, 19 nt, Artificial Sequence
  Description of Artificial Sequence: Synthetic oligonucleotide
aacgacgcugcuuaggccc

SEQ ID NO: 1249655 - RNA, 19 nt, Artificial Sequence
  Description of Artificial Sequence: Synthetic oligonucleotide
ucaagcugaugucaaaacg

SEQ ID NO: 1249656 - RNA, 19 nt, Artificial Sequence
  Description of Artificial Sequence: Synthetic oligonucleotide
ucugaucuggcccucaagg

SEQ ID NO: 1249657 - RNA, 19 nt, Artificial Sequence
  Description of Artificial Sequence: Synthetic oligonucleotide
aguugcuggaucuuuaggg

SEQ ID NO: 1249658 - RNA, 19 nt, Artificial Sequence
  Description of Artificial Sequence: Synthetic oligonucleotide
ucauaacugaacaucuccg

SEQ ID NO: 1249659 - RNA, 19 nt, Artificial Sequence
  Description of Artificial Sequence: Synthetic oligonucleotide
agcaaggcaaugaagaucc

SEQ ID NO: 1249660 - RNA, 19 nt, Artificial Sequence
  Description of Artificial Sequence: Synthetic oligonucleotide
aaacuuauucaugaagggg

SEQ ID NO: 1249661 - RNA, 19 nt, Artificial Sequence
  Description of Artificial Sequence: Synthetic oligonucleotide
aagaaauacauggacagca

SEQ ID NO: 1249662 - RNA, 19 nt, Artificial Sequence
  Description of Artificial Sequence: Synthetic oligonucleotide
agcucuaccccauuaaggg

SEQ ID NO: 1249663 - RNA, 19 nt, Artificial Sequence
  Description of Artificial Sequence: Synthetic oligonucleotide
uaauuggugccucaaaaga

SEQ ID NO: 1249664 - RNA, 19 nt, Artificial Sequence
  Description of Artificial Sequence: Synthetic oligonucleotide
uuuaauuggugccucaaaa

SEQ ID NO: 1249665 - RNA, 19 nt, Artificial Sequence
  Description of Artificial Sequence: Synthetic oligonucleotide
aauuggugccucaaaagac

SEQ ID NO: 1249666 - RNA, 19 nt, Artificial Sequence
  Description of Artificial Sequence: Synthetic oligonucleotide
aucuuuaggguuugacucc

SEQ ID NO: 1249667 - RNA, 19 nt, Artificial Sequence
  Description of Artificial Sequence: Synthetic oligonucleotide
aaagaaacaggaagugacg

SEQ ID NO: 1249668 - RNA, 19 nt, Artificial Sequence
  Description of Artificial Sequence: Synthetic oligonucleotide
aauccagugcuuccucagc

SEQ ID NO: 1249669 - RNA, 19 nt, Artificial Sequence
  Description of Artificial Sequence: Synthetic oligonucleotide
gggaacaccaauuuaauug

SEQ ID NO: 1249670 - RNA, 19 nt, Artificial Sequence
  Description of Artificial Sequence: Synthetic oligonucleotide
ugaagaguccgccaagcag

SEQ ID NO: 1249671 - RNA, 19 nt, Artificial Sequence
  Description of Artificial Sequence: Synthetic oligonucleotide
ugugaagagcagcugauac

SEQ ID NO: 1249672 - RNA, 19 nt, Artificial Sequence
  Description of Artificial Sequence: Synthetic oligonucleotide
uuccccuaaagaaacagga

SEQ ID NO: 1249673 - RNA, 19 nt, Artificial Sequence
  Description of Artificial Sequence: Synthetic oligonucleotide
uuugacuccucauaacuga

SEQ ID NO: 1249674 - RNA, 19 nt, Artificial Sequence
  Description of Artificial Sequence: Synthetic oligonucleotide
aggugcaggagcucuaccc

SEQ ID NO: 1249675 - RNA, 19 nt, Artificial Sequence
  Description of Artificial Sequence: Synthetic oligonucleotide
aaagucaguccacaauaca

SEQ ID NO: 1249676 - RNA, 19 nt, Artificial Sequence
  Description of Artificial Sequence: Synthetic oligonucleotide
cauaacugaacaucuccgc

SEQ ID NO: 1249677 - RNA, 19 nt, Artificial Sequence
  Description of Artificial Sequence: Synthetic oligonucleotide
uggguguucuucuucaagc

SEQ ID NO: 1249678 - RNA, 19 nt, Artificial Sequence
  Description of Artificial Sequence: Synthetic oligonucleotide
guaccagacaccaacgacg

SEQ ID NO: 1249679 - RNA, 19 nt, Artificial Sequence
  Description of Artificial Sequence: Synthetic oligonucleotide
gaacaucuccgccacuucg

SEQ ID NO: 1249680 - RNA, 19 nt, Artificial Sequence
  Description of Artificial Sequence: Synthetic oligonucleotide
agcgccaugagcaggaggc

SEQ ID NO: 1249681 - RNA, 19 nt, Artificial Sequence
  Description of Artificial Sequence: Synthetic oligonucleotide
accccauuaagggagaagg

SEQ ID NO: 1249682 - RNA, 19 nt, Artificial Sequence
  Description of Artificial Sequence: Synthetic oligonucleotide
uggauucagucccaguugc

SEQ ID NO: 1249683 - RNA, 19 nt, Artificial Sequence
  Description of Artificial Sequence: Synthetic oligonucleotide
agcgaggauucauuucucc

SEQ ID NO: 1249684 - RNA, 19 nt, Artificial Sequence
  Description of Artificial Sequence: Synthetic oligonucleotide
cucuaccccauuaagggag

SEQ ID NO: 1249685 - RNA, 19 nt, Artificial Sequence
  Description of Artificial Sequence: Synthetic oligonucleotide
ugggcaugcuugaagaugu

SEQ ID NO: 1249686 - RNA, 19 nt, Artificial Sequence
  Description of Artificial Sequence: Synthetic oligonucleotide
cacgaagaaauacauggac

SEQ ID NO: 1249687 - RNA, 19 nt, Artificial Sequence
  Description of Artificial Sequence: Synthetic oligonucleotide
ucaccuacagguaauccuc

SEQ ID NO: 1249688 - RNA, 19 nt, Artificial Sequence
  Description of Artificial Sequence: Synthetic oligonucleotide
auccgaugcaggcagggac

SEQ ID NO: 1249689 - RNA, 19 nt, Artificial Sequence
  Description of Artificial Sequence: Synthetic oligonucleotide
uuagugucaaacucauagu

SEQ ID NO: 1249690 - RNA, 19 nt, Artificial Sequence
  Description of Artificial Sequence: Synthetic oligonucleotide
uagugucaaacucauaguu

SEQ ID NO: 1249691 - RNA, 19 nt, Artificial Sequence
  Description of Artificial Sequence: Synthetic oligonucleotide
auacuggcgauuugggaag

SEQ ID NO: 1249692 - RNA, 19 nt, Artificial Sequence
  Description of Artificial Sequence: Synthetic oligonucleotide
aacaccaauuuaauuggug

SEQ ID NO: 1249693 - RNA, 19 nt, Artificial Sequence
  Description of Artificial Sequence: Synthetic oligonucleotide
auguccgaagagcucuugc

SEQ ID NO: 1249694 - RNA, 19 nt, Artificial Sequence
  Description of Artificial Sequence: Synthetic oligonucleotide
uacccagaagaugucauag

SEQ ID NO: 1249695 - RNA, 19 nt, Artificial Sequence
  Description of Artificial Sequence: Synthetic oligonucleotide
uguccgaagagcucuugcc

SEQ ID NO: 1249696 - RNA, 19 nt, Artificial Sequence
  Description of Artificial Sequence: Synthetic oligonucleotide
gacuccucauaacugaaca

SEQ ID NO: 1249697 - RNA, 19 nt, Artificial Sequence
  Description of Artificial Sequence: Synthetic oligonucleotide
ggaaauccgaugcaggcag

SEQ ID NO: 1249698 - RNA, 19 nt, Artificial Sequence
  Description of Artificial Sequence: Synthetic oligonucleotide
aagucaguccacaauacaa

SEQ ID NO: 1249699 - RNA, 19 nt, Artificial Sequence
  Description of Artificial Sequence: Synthetic oligonucleotide
gugccgaauacccagaaga

SEQ ID NO: 1249700 - RNA, 19 nt, Artificial Sequence
  Description of Artificial Sequence: Synthetic oligonucleotide
cauuaagggagaaggccag

SEQ ID NO: 1249701 - RNA, 19 nt, Artificial Sequence
  Description of Artificial Sequence: Synthetic oligonucleotide
aagagcucuugccgcgggc

SEQ ID NO: 1249702 - RNA, 19 nt, Artificial Sequence
  Description of Artificial Sequence: Synthetic oligonucleotide
gaguccgccaagcaggaug

SEQ ID NO: 1249703 - RNA, 19 nt, Artificial Sequence
  Description of Artificial Sequence: Synthetic oligonucleotide
uuaagugcugagaccuccc

SEQ ID NO: 1249704 - RNA, 19 nt, Artificial Sequence
  Description of Artificial Sequence: Synthetic oligonucleotide
gaagaucccuggaaugacg

SEQ ID NO: 1249705 - RNA, 19 nt, Artificial Sequence
  Description of Artificial Sequence: Synthetic oligonucleotide
gagcucuaccccauuaagg

SEQ ID NO: 1249706 - RNA, 19 nt, Artificial Sequence
  Description of Artificial Sequence: Synthetic oligonucleotide
acauucgguucccaccugg

SEQ ID NO: 1249707 - RNA, 19 nt, Artificial Sequence
  Description of Artificial Sequence: Synthetic oligonucleotide
uccgaagagcucuugccgc

SEQ ID NO: 1249708 - RNA, 19 nt, Artificial Sequence
  Description of Artificial Sequence: Synthetic oligonucleotide
uuaagggagaaggccaggc

SEQ ID NO: 1249709 - RNA, 19 nt, Artificial Sequence
  Description of Artificial Sequence: Synthetic oligonucleotide
caaagucaguccacaauac

SEQ ID NO: 1249710 - RNA, 19 nt, Artificial Sequence
  Description of Artificial Sequence: Synthetic oligonucleotide
agguacugcggggaaagcc

SEQ ID NO: 1249711 - RNA, 19 nt, Artificial Sequence
  Description of Artificial Sequence: Synthetic oligonucleotide
guccgaagagcucuugccg

SEQ ID NO: 1249712 - RNA, 19 nt, Artificial Sequence
  Description of Artificial Sequence: Synthetic oligonucleotide
acguuggugccgaauaccc

SEQ ID NO: 1249713 - RNA, 19 nt, Artificial Sequence
  Description of Artificial Sequence: Synthetic oligonucleotide
gaauccauggcgaggcugc

SEQ ID NO: 1249714 - RNA, 19 nt, Artificial Sequence
  Description of Artificial Sequence: Synthetic oligonucleotide
gaucccuggaaugacgaug

SEQ ID NO: 1249715 - RNA, 19 nt, Artificial Sequence
  Description of Artificial Sequence: Synthetic oligonucleotide
ugugugaagagcagcugau

SEQ ID NO: 1249716 - RNA, 19 nt, Artificial Sequence
  Description of Artificial Sequence: Synthetic oligonucleotide
gagggccgaauccauggcg

SEQ ID NO: 1249717 - RNA, 19 nt, Artificial Sequence
  Description of Artificial Sequence: Synthetic oligonucleotide
uaauccuccgccugucuga

SEQ ID NO: 1249718 - RNA, 19 nt, Artificial Sequence
  Description of Artificial Sequence: Synthetic oligonucleotide
uccuuagugucaaacucau

SEQ ID NO: 1249719 - RNA, 19 nt, Artificial Sequence
  Description of Artificial Sequence: Synthetic oligonucleotide
uucgguucccaccuggcuc

SEQ ID NO: 1249720 - RNA, 19 nt, Artificial Sequence
  Description of Artificial Sequence: Synthetic oligonucleotide
agaugaagaguccgccaag

SEQ ID NO: 1249721 - RNA, 19 nt, Artificial Sequence
  Description of Artificial Sequence: Synthetic oligonucleotide
cauccuggagccaccuucg

SEQ ID NO: 1249722 - RNA, 19 nt, Artificial Sequence
  Description of Artificial Sequence: Synthetic oligonucleotide
uccuuugccugcaggggag

SEQ ID NO: 1249723 - RNA, 19 nt, Artificial Sequence
  Description of Artificial Sequence: Synthetic oligonucleotide
uagagucccaagagagugc

SEQ ID NO: 1249724 - RNA, 19 nt, Artificial Sequence
  Description of Artificial Sequence: Synthetic oligonucleotide
augaagaucccuggaauga

SEQ ID NO: 1249725 - RNA, 19 nt, Artificial Sequence
  Description of Artificial Sequence: Synthetic oligonucleotide
aguccgccaagcaggaugc

SEQ ID NO: 1249726 - RNA, 19 nt, Artificial Sequence
  Description of Artificial Sequence: Synthetic oligonucleotide
acgaacgcagauggcaggc

SEQ ID NO: 1249727 - RNA, 19 nt, Artificial Sequence
  Description of Artificial Sequence: Synthetic oligonucleotide
aggguuugacuccucauaa

SEQ ID NO: 1249728 - RNA, 19 nt, Artificial Sequence
  Description of Artificial Sequence: Synthetic oligonucleotide
agggcgccgaagaagaugg

SEQ ID NO: 1249729 - RNA, 19 nt, Artificial Sequence
  Description of Artificial Sequence: Synthetic oligonucleotide
guagcgaggauucauuucu

SEQ ID NO: 1249730 - RNA, 19 nt, Artificial Sequence
  Description of Artificial Sequence: Synthetic oligonucleotide
ugugucaccuacagguaau

SEQ ID NO: 1249731 - RNA, 19 nt, Artificial Sequence
  Description of Artificial Sequence: Synthetic oligonucleotide
aaagccacguuccccuaaa

SEQ ID NO: 1249732 - RNA, 19 nt, Artificial Sequence
  Description of Artificial Sequence: Synthetic oligonucleotide
auuggugccucaaaagacu

SEQ ID NO: 1249733 - RNA, 19 nt, Artificial Sequence
  Description of Artificial Sequence: Synthetic oligonucleotide
aagaucccuggaaugacga

SEQ ID NO: 1249734 - RNA, 19 nt, Artificial Sequence
  Description of Artificial Sequence: Synthetic oligonucleotide
accuacagguaauccuccg

SEQ ID NO: 1249735 - RNA, 19 nt, Artificial Sequence
  Description of Artificial Sequence: Synthetic oligonucleotide
gcugcuuaggcccaggcac

SEQ ID NO: 1249736 - RNA, 19 nt, Artificial Sequence
  Description of Artificial Sequence: Synthetic oligonucleotide
agcacgaacgcagauggca

SEQ ID NO: 1249737 - RNA, 19 nt, Artificial Sequence
  Description of Artificial Sequence: Synthetic oligonucleotide
gcucacguuguucaggugc

SEQ ID NO: 1249738 - RNA, 19 nt, Artificial Sequence
  Description of Artificial Sequence: Synthetic oligonucleotide
uccuuguuuuccccagagc

SEQ ID NO: 1249739 - RNA, 19 nt, Artificial Sequence
  Description of Artificial Sequence: Synthetic oligonucleotide
gcugccguaggccagcgcg

SEQ ID NO: 1249740 - RNA, 19 nt, Artificial Sequence
  Description of Artificial Sequence: Synthetic oligonucleotide
ucugagggccgaauccaug

SEQ ID NO: 1249741 - RNA, 19 nt, Artificial Sequence
  Description of Artificial Sequence: Synthetic oligonucleotide
caagggucagguagcgagg

SEQ ID NO: 1249742 - RNA, 19 nt, Artificial Sequence
  Description of Artificial Sequence: Synthetic oligonucleotide
cuaggagaacaguggcccg

SEQ ID NO: 1249743 - RNA, 19 nt, Artificial Sequence
  Description of Artificial Sequence: Synthetic oligonucleotide
ccuggaaugacgaugucuc

SEQ ID NO: 1249744 - RNA, 19 nt, Artificial Sequence
  Description of Artificial Sequence: Synthetic oligonucleotide
aucacguuggugccgaaua

SEQ ID NO: 1249745 - RNA, 19 nt, Artificial Sequence
  Description of Artificial Sequence: Synthetic oligonucleotide
ucacguuggugccgaauac

SEQ ID NO: 1249746 - RNA, 19 nt, Artificial Sequence
  Description of Artificial Sequence: Synthetic oligonucleotide
uacagguaauccuccgccu

SEQ ID NO: 1249747 - RNA, 19 nt, Artificial Sequence
  Description of Artificial Sequence: Synthetic oligonucleotide
ugggugcugccguugugcg

SEQ ID NO: 1249748 - RNA, 19 nt, Artificial Sequence
  Description of Artificial Sequence: Synthetic oligonucleotide
ugccgaauacccagaagau

SEQ ID NO: 1249749 - RNA, 19 nt, Artificial Sequence
  Description of Artificial Sequence: Synthetic oligonucleotide
agaugugcaugaugaagau

SEQ ID NO: 1249750 - RNA, 19 nt, Artificial Sequence
  Description of Artificial Sequence: Synthetic oligonucleotide
aagcugaugucaaaacgaa

SEQ ID NO: 1249751 - RNA, 19 nt, Artificial Sequence
  Description of Artificial Sequence: Synthetic oligonucleotide
ucgaugcugacaccucugu

SEQ ID NO: 1249752 - RNA, 19 nt, Artificial Sequence
  Description of Artificial Sequence: Synthetic oligonucleotide
agagagugcagcuggcgau

SEQ ID NO: 1249753 - RNA, 19 nt, Artificial Sequence
  Description of Artificial Sequence: Synthetic oligonucleotide
auuaagggagaaggccagg

SEQ ID NO: 1249754 - RNA, 19 nt, Artificial Sequence
  Description of Artificial Sequence: Synthetic oligonucleotide
augaagaguccgccaagca

SEQ ID NO: 1249755 - RNA, 19 nt, Artificial Sequence
  Description of Artificial Sequence: Synthetic oligonucleotide
cuggcgaugauggggaaac

SEQ ID NO: 1249756 - RNA, 19 nt, Artificial Sequence
  Description of Artificial Sequence: Synthetic oligonucleotide
ggugcugccguugugcggg

SEQ ID NO: 1249757 - RNA, 19 nt, Artificial Sequence
  Description of Artificial Sequence: Synthetic oligonucleotide
agagcucuugccgcgggcg

SEQ ID NO: 1249758 - RNA, 19 nt, Artificial Sequence
  Description of Artificial Sequence: Synthetic oligonucleotide
acuuauucaugaaggggcu

SEQ ID NO: 1249759 - RNA, 19 nt, Artificial Sequence
  Description of Artificial Sequence: Synthetic oligonucleotide
gccacuucgcccuugacca

SEQ ID NO: 1249760 - RNA, 19 nt, Artificial Sequence
  Description of Artificial Sequence: Synthetic oligonucleotide
cacgaacgcagauggcagg

SEQ ID NO: 1249761 - RNA, 19 nt, Artificial Sequence
  Description of Artificial Sequence: Synthetic oligonucleotide
auggcaggcgagguacugc

SEQ ID NO: 1249762 - RNA, 19 nt, Artificial Sequence
  Description of Artificial Sequence: Synthetic oligonucleotide
cuuaggcccaggcacacca

SEQ ID NO: 1249763 - RNA, 19 nt, Artificial Sequence
  Description of Artificial Sequence: Synthetic oligonucleotide
cauucgguucccaccuggc

SEQ ID NO: 1249764 - RNA, 19 nt, Artificial Sequence
  Description of Artificial Sequence: Synthetic oligonucleotide
ucuucgaugcugacaccuc

SEQ ID NO: 1249765 - RNA, 19 nt, Artificial Sequence
  Description of Artificial Sequence: Synthetic oligonucleotide
gguaccagacaccaacgac

SEQ ID NO: 1249766 - RNA, 19 nt, Artificial Sequence
  Description of Artificial Sequence: Synthetic oligonucleotide
gucaguccacaauacaaaa

SEQ ID NO: 1249767 - RNA, 19 nt, Artificial Sequence
  Description of Artificial Sequence: Synthetic oligonucleotide
agccacguuccccuaaaga

SEQ ID NO: 1249768 - RNA, 19 nt, Artificial Sequence
  Description of Artificial Sequence: Synthetic oligonucleotide
gguuguuggcaauccagug

SEQ ID NO: 1249769 - RNA, 19 nt, Artificial Sequence
  Description of Artificial Sequence: Synthetic oligonucleotide
ggagcucuaccccauuaag

SEQ ID NO: 1249770 - RNA, 19 nt, Artificial Sequence
  Description of Artificial Sequence: Synthetic oligonucleotide
aacgcagauggcaggcgag

SEQ ID NO: 1249771 - RNA, 19 nt, Artificial Sequence
  Description of Artificial Sequence: Synthetic oligonucleotide
cccaagagagugcagcugg

SEQ ID NO: 1249772 - RNA, 19 nt, Artificial Sequence
  Description of Artificial Sequence: Synthetic oligonucleotide
ggggaaagaagaagcagag

SEQ ID NO: 1249773 - RNA, 19 nt, Artificial Sequence
  Description of Artificial Sequence: Synthetic oligonucleotide
uuggugccucaaaagacuu

SEQ ID NO: 1249774 - RNA, 19 nt, Artificial Sequence
  Description of Artificial Sequence: Synthetic oligonucleotide
caccuacagguaauccucc

SEQ ID NO: 1249775 - RNA, 19 nt, Artificial Sequence
  Description of Artificial Sequence: Synthetic oligonucleotide
aauccauggcgaggcugcg

SEQ ID NO: 1249776 - RNA, 19 nt, Artificial Sequence
  Description of Artificial Sequence: Synthetic oligonucleotide
gcaaagucaguccacaaua

SEQ ID NO: 1249777 - RNA, 19 nt, Artificial Sequence
  Description of Artificial Sequence: Synthetic oligonucleotide
gaacgcagauggcaggcga

SEQ ID NO: 1249778 - RNA, 19 nt, Artificial Sequence
  Description of Artificial Sequence: Synthetic oligonucleotide
ucagguagcgaggauucau

SEQ ID NO: 1249779 - RNA, 19 nt, Artificial Sequence
  Description of Artificial Sequence: Synthetic oligonucleotide
ggugucuucugucuguguc

SEQ ID NO: 1249780 - RNA, 19 nt, Artificial Sequence
  Description of Artificial Sequence: Synthetic oligonucleotide
aagugcugagaccucccua

SEQ ID NO: 1249781 - RNA, 19 nt, Artificial Sequence
  Description of Artificial Sequence: Synthetic oligonucleotide
guagguguggguguucuuc

SEQ ID NO: 1249782 - RNA, 19 nt, Artificial Sequence
  Description of Artificial Sequence: Synthetic oligonucleotide
auucgguucccaccuggcu

SEQ ID NO: 1249783 - RNA, 19 nt, Artificial Sequence
  Description of Artificial Sequence: Synthetic oligonucleotide
acagguuguuggcaaucca

SEQ ID NO: 1249784 - RNA, 19 nt, Artificial Sequence
  Description of Artificial Sequence: Synthetic oligonucleotide
agucaguccacaauacaaa

SEQ ID NO: 1249785 - RNA, 19 nt, Artificial Sequence
  Description of Artificial Sequence: Synthetic oligonucleotide
accaacgacgcugcuuagg

SEQ ID NO: 1249786 - RNA, 19 nt, Artificial Sequence
  Description of Artificial Sequence: Synthetic oligonucleotide
guugcuggaucuuuagggu

SEQ ID NO: 1249787 - RNA, 19 nt, Artificial Sequence
  Description of Artificial Sequence: Synthetic oligonucleotide
uccgccaagcaggaugcag

SEQ ID NO: 1249788 - RNA, 19 nt, Artificial Sequence
  Description of Artificial Sequence: Synthetic oligonucleotide
uuggugccgaauacccaga

SEQ ID NO: 1249789 - RNA, 19 nt, Artificial Sequence
  Description of Artificial Sequence: Synthetic oligonucleotide
cccauuaagggagaaggcc

SEQ ID NO: 1249790 - RNA, 19 nt, Artificial Sequence
  Description of Artificial Sequence: Synthetic oligonucleotide
gguuugacuccucauaacu

SEQ ID NO: 1249791 - RNA, 19 nt, Artificial Sequence
  Description of Artificial Sequence: Synthetic oligonucleotide
aucccuggaaugacgaugu

SEQ ID NO: 1249792 - RNA, 19 nt, Artificial Sequence
  Description of Artificial Sequence: Synthetic oligonucleotide
ccaacgacgcugcuuaggc

SEQ ID NO: 1249793 - RNA, 19 nt, Artificial Sequence
  Description of Artificial Sequence: Synthetic oligonucleotide
caauuuaauuggugccuca

SEQ ID NO: 1249794 - RNA, 19 nt, Artificial Sequence
  Description of Artificial Sequence: Synthetic oligonucleotide
aauccgaugcaggcaggga

SEQ ID NO: 1249795 - RNA, 19 nt, Artificial Sequence
  Description of Artificial Sequence: Synthetic oligonucleotide
agcaagagguugauguacu

SEQ ID NO: 1249796 - RNA, 19 nt, Artificial Sequence
  Description of Artificial Sequence: Synthetic oligonucleotide
guuggcaauccagugcuuc

SEQ ID NO: 1249797 - RNA, 19 nt, Artificial Sequence
  Description of Artificial Sequence: Synthetic oligonucleotide
caacgacgcugcuuaggcc

SEQ ID NO: 1249798 - RNA, 19 nt, Artificial Sequence
  Description of Artificial Sequence: Synthetic oligonucleotide
ccauuaagggagaaggcca

SEQ ID NO: 1249799 - RNA, 19 nt, Artificial Sequence
  Description of Artificial Sequence: Synthetic oligonucleotide
agaccucccuaggagaaca

SEQ ID NO: 1249800 - RNA, 19 nt, Artificial Sequence
  Description of Artificial Sequence: Synthetic oligonucleotide
gucugaucuggcccucaag

SEQ ID NO: 1249801 - RNA, 19 nt, Artificial Sequence
  Description of Artificial Sequence: Synthetic oligonucleotide
agguagcgaggauucauuu

SEQ ID NO: 1249802 - RNA, 19 nt, Artificial Sequence
  Description of Artificial Sequence: Synthetic oligonucleotide
cacuucgcccuugaccagg

SEQ ID NO: 1249803 - RNA, 19 nt, Artificial Sequence
  Description of Artificial Sequence: Synthetic oligonucleotide
caucuccgccacuucgccc

SEQ ID NO: 1249804 - RNA, 19 nt, Artificial Sequence
  Description of Artificial Sequence: Synthetic oligonucleotide
uagcgaggauucauuucuc

SEQ ID NO: 1249805 - RNA, 19 nt, Artificial Sequence
  Description of Artificial Sequence: Synthetic oligonucleotide
ccucccuaggagaacagug

SEQ ID NO: 1249806 - RNA, 19 nt, Artificial Sequence
  Description of Artificial Sequence: Synthetic oligonucleotide
gguagcgaggauucauuuc

SEQ ID NO: 1249807 - RNA, 19 nt, Artificial Sequence
  Description of Artificial Sequence: Synthetic oligonucleotide
agguaauccuccgccuguc

SEQ ID NO: 1249808 - RNA, 19 nt, Artificial Sequence
  Description of Artificial Sequence: Synthetic oligonucleotide
uggugccgaauacccagaa

SEQ ID NO: 1249809 - RNA, 19 nt, Artificial Sequence
  Description of Artificial Sequence: Synthetic oligonucleotide
ucucuucgaugcugacacc

SEQ ID NO: 1249810 - RNA, 19 nt, Artificial Sequence
  Description of Artificial Sequence: Synthetic oligonucleotide
acugcggggaaagccacgu

SEQ ID NO: 1249811 - RNA, 19 nt, Artificial Sequence
  Description of Artificial Sequence: Synthetic oligonucleotide
caaugaagaucccuggaau

SEQ ID NO: 1249812 - RNA, 19 nt, Artificial Sequence
  Description of Artificial Sequence: Synthetic oligonucleotide
ccuacagguaauccuccgc

SEQ ID NO: 1249813 - RNA, 19 nt, Artificial Sequence
  Description of Artificial Sequence: Synthetic oligonucleotide
gaaagccacguuccccuaa

SEQ ID NO: 1249814 - RNA, 19 nt, Artificial Sequence
  Description of Artificial Sequence: Synthetic oligonucleotide
uggcauguccgaagagcuc

SEQ ID NO: 1249815 - RNA, 19 nt, Artificial Sequence
  Description of Artificial Sequence: Synthetic oligonucleotide
aauccuccgccugucugau

SEQ ID NO: 1249816 - RNA, 19 nt, Artificial Sequence
  Description of Artificial Sequence: Synthetic oligonucleotide
gguacugcggggaaagcca

SEQ ID NO: 1249817 - RNA, 19 nt, Artificial Sequence
  Description of Artificial Sequence: Synthetic oligonucleotide
uuugggaaguuggcuggaa

SEQ ID NO: 1249818 - RNA, 19 nt, Artificial Sequence
  Description of Artificial Sequence: Synthetic oligonucleotide
ggugccgaauacccagaag

SEQ ID NO: 1249819 - RNA, 19 nt, Artificial Sequence
  Description of Artificial Sequence: Synthetic oligonucleotide
gccgaauccauggcgaggc

SEQ ID NO: 1249820 - RNA, 19 nt, Artificial Sequence
  Description of Artificial Sequence: Synthetic oligonucleotide
uccgccacuucgcccuuga

SEQ ID NO: 1249821 - RNA, 19 nt, Artificial Sequence
  Description of Artificial Sequence: Synthetic oligonucleotide
gcgcacugagcgcagggcg

SEQ ID NO: 1249822 - RNA, 19 nt, Artificial Sequence
  Description of Artificial Sequence: Synthetic oligonucleotide
accaucacguuggugccga

SEQ ID NO: 1249823 - RNA, 19 nt, Artificial Sequence
  Description of Artificial Sequence: Synthetic oligonucleotide
guggaggguggccgcgucg

SEQ ID NO: 1249824 - RNA, 19 nt, Artificial Sequence
  Description of Artificial Sequence: Synthetic oligonucleotide
agagggaaacaggcagcag

SEQ ID NO: 1249825 - RNA, 19 nt, Artificial Sequence
  Description of Artificial Sequence: Synthetic oligonucleotide
aguggcccgccagccaugg

SEQ ID NO: 1249826 - RNA, 19 nt, Artificial Sequence
  Description of Artificial Sequence: Synthetic oligonucleotide
agaucccuggaaugacgau

SEQ ID NO: 1249827 - RNA, 19 nt, Artificial Sequence
  Description of Artificial Sequence: Synthetic oligonucleotide
uagucucuucgaugcugac

SEQ ID NO: 1249828 - RNA, 19 nt, Artificial Sequence
  Description of Artificial Sequence: Synthetic oligonucleotide
agggccgaauccauggcga

SEQ ID NO: 1249829 - RNA, 19 nt, Artificial Sequence
  Description of Artificial Sequence: Synthetic oligonucleotide
ccgccaagcaggaugcagc

SEQ ID NO: 1249830 - RNA, 19 nt, Artificial Sequence
  Description of Artificial Sequence: Synthetic oligonucleotide
acgggcggcgucucggcug

SEQ ID NO: 1249831 - RNA, 19 nt, Artificial Sequence
  Description of Artificial Sequence: Synthetic oligonucleotide
caugcuugaagaugugcau

SEQ ID NO: 1249832 - RNA, 19 nt, Artificial Sequence
  Description of Artificial Sequence: Synthetic oligonucleotide
ggcgauuugggaaguuggc

SEQ ID NO: 1249833 - RNA, 19 nt, Artificial Sequence
  Description of Artificial Sequence: Synthetic oligonucleotide
ggucagguagcgaggauuc

SEQ ID NO: 1249834 - RNA, 19 nt, Artificial Sequence
  Description of Artificial Sequence: Synthetic oligonucleotide
ggguuugacuccucauaac

SEQ ID NO: 1249835 - RNA, 19 nt, Artificial Sequence
  Description of Artificial Sequence: Synthetic oligonucleotide
ccgaagagcucuugccgcg

SEQ ID NO: 1249836 - RNA, 19 nt, Artificial Sequence
  Description of Artificial Sequence: Synthetic oligonucleotide
cccucaagggucagguagc

SEQ ID NO: 1249837 - RNA, 19 nt, Artificial Sequence
  Description of Artificial Sequence: Synthetic oligonucleotide
gccgaauacccagaagaug

SEQ ID NO: 1249838 - RNA, 19 nt, Artificial Sequence
  Description of Artificial Sequence: Synthetic oligonucleotide
caggugcaggagcucuacc

SEQ ID NO: 1249839 - RNA, 19 nt, Artificial Sequence
  Description of Artificial Sequence: Synthetic oligonucleotide
cagggcgccgaagaagaug

SEQ ID NO: 1249840 - RNA, 19 nt, Artificial Sequence
  Description of Artificial Sequence: Synthetic oligonucleotide
gcacgaacgcagauggcag

SEQ ID NO: 1249841 - RNA, 19 nt, Artificial Sequence
  Description of Artificial Sequence: Synthetic oligonucleotide
ccccauuaagggagaaggc

SEQ ID NO: 1249842 - RNA, 19 nt, Artificial Sequence
  Description of Artificial Sequence: Synthetic oligonucleotide
cucggcuggugaugguuuc

SEQ ID NO: 1249843 - RNA, 19 nt, Artificial Sequence
  Description of Artificial Sequence: Synthetic oligonucleotide
gugcucacguuguucaggu

SEQ ID NO: 1249844 - RNA, 19 nt, Artificial Sequence
  Description of Artificial Sequence: Synthetic oligonucleotide
cccuaaagaaacaggaagu

SEQ ID NO: 1249845 - RNA, 19 nt, Artificial Sequence
  Description of Artificial Sequence: Synthetic oligonucleotide
ccucauaacugaacaucuc

SEQ ID NO: 1249846 - RNA, 19 nt, Artificial Sequence
  Description of Artificial Sequence: Synthetic oligonucleotide
gaacaccaauuuaauuggu

SEQ ID NO: 1249847 - RNA, 19 nt, Artificial Sequence
  Description of Artificial Sequence: Synthetic oligonucleotide
cagcacgaacgcagauggc

SEQ ID NO: 1249848 - RNA, 19 nt, Artificial Sequence
  Description of Artificial Sequence: Synthetic oligonucleotide
ggcgccgaagaagaugggc

SEQ ID NO: 1249849 - RNA, 19 nt, Artificial Sequence
  Description of Artificial Sequence: Synthetic oligonucleotide
ggggcguggaggguggccg

SEQ ID NO: 1249850 - RNA, 19 nt, Artificial Sequence
  Description of Artificial Sequence: Synthetic oligonucleotide
cauguccgaagagcucuug

SEQ ID NO: 1249851 - RNA, 19 nt, Artificial Sequence
  Description of Artificial Sequence: Synthetic oligonucleotide
agagugcagcuggcgauga

SEQ ID NO: 1249852 - RNA, 19 nt, Artificial Sequence
  Description of Artificial Sequence: Synthetic oligonucleotide
cauggcaaaguuguccgcu

SEQ ID NO: 1249853 - RNA, 19 nt, Artificial Sequence
  Description of Artificial Sequence: Synthetic oligonucleotide
ccuggggaaagaagaagca

SEQ ID NO: 1249854 - RNA, 19 nt, Artificial Sequence
  Description of Artificial Sequence: Synthetic oligonucleotide
cuucgaugcugacaccucu

SEQ ID NO: 1249855 - RNA, 19 nt, Artificial Sequence
  Description of Artificial Sequence: Synthetic oligonucleotide
gcggggaaagccacguucc

SEQ ID NO: 1249856 - RNA, 19 nt, Artificial Sequence
  Description of Artificial Sequence: Synthetic oligonucleotide
uacuggcgauuugggaagu

SEQ ID NO: 1249857 - RNA, 19 nt, Artificial Sequence
  Description of Artificial Sequence: Synthetic oligonucleotide
gcaagagguugauguacuc

SEQ ID NO: 1249858 - RNA, 19 nt, Artificial Sequence
  Description of Artificial Sequence: Synthetic oligonucleotide
accucccuaggagaacagu

SEQ ID NO: 1249859 - RNA, 19 nt, Artificial Sequence
  Description of Artificial Sequence: Synthetic oligonucleotide
agcgcagggcgccgaagaa

SEQ ID NO: 1249860 - RNA, 19 nt, Artificial Sequence
  Description of Artificial Sequence: Synthetic oligonucleotide
ccaccuucgccuccuguag

SEQ ID NO: 1249861 - RNA, 19 nt, Artificial Sequence
  Description of Artificial Sequence: Synthetic oligonucleotide
gugucaccuacagguaauc

SEQ ID NO: 1249862 - RNA, 19 nt, Artificial Sequence
  Description of Artificial Sequence: Synthetic oligonucleotide
gcacgaagaaauacaugga

SEQ ID NO: 1249863 - RNA, 19 nt, Artificial Sequence
  Description of Artificial Sequence: Synthetic oligonucleotide
ggcagcgaagcugguguag

SEQ ID NO: 1249864 - RNA, 19 nt, Artificial Sequence
  Description of Artificial Sequence: Synthetic oligonucleotide
ggccgaauccauggcgagg

SEQ ID NO: 1249865 - RNA, 19 nt, Artificial Sequence
  Description of Artificial Sequence: Synthetic oligonucleotide
cgccacuucgcccuugacc

SEQ ID NO: 1249866 - RNA, 19 nt, Artificial Sequence
  Description of Artificial Sequence: Synthetic oligonucleotide
aggcgagguacugcgggga

SEQ ID NO: 1249867 - RNA, 19 nt, Artificial Sequence
  Description of Artificial Sequence: Synthetic oligonucleotide
ggcauguccgaagagcucu

SEQ ID NO: 1249868 - RNA, 19 nt, Artificial Sequence
  Description of Artificial Sequence: Synthetic oligonucleotide
gggaaacaggcagcagaag

SEQ ID NO: 1249869 - RNA, 19 nt, Artificial Sequence
  Description of Artificial Sequence: Synthetic oligonucleotide
gggccgaauccauggcgag

SEQ ID NO: 1249870 - RNA, 19 nt, Artificial Sequence
  Description of Artificial Sequence: Synthetic oligonucleotide
agccggcugggcaugcuug

SEQ ID NO: 1249871 - RNA, 19 nt, Artificial Sequence
  Description of Artificial Sequence: Synthetic oligonucleotide
gcgccgaagaagaugggca

SEQ ID NO: 1249872 - RNA, 19 nt, Artificial Sequence
  Description of Artificial Sequence: Synthetic oligonucleotide
agggucagguagcgaggau

SEQ ID NO: 1249873 - RNA, 19 nt, Artificial Sequence
  Description of Artificial Sequence: Synthetic oligonucleotide
gccgaagaagaugggcagc

SEQ ID NO: 1249874 - RNA, 19 nt, Artificial Sequence
  Description of Artificial Sequence: Synthetic oligonucleotide
gcgaggauucauuucuccu

SEQ ID NO: 1249875 - RNA, 19 nt, Artificial Sequence
  Description of Artificial Sequence: Synthetic oligonucleotide
cuucgcccuugaccagggc

SEQ ID NO: 1249876 - RNA, 19 nt, Artificial Sequence
  Description of Artificial Sequence: Synthetic oligonucleotide
auggggaaacgggcggcgu

SEQ ID NO: 1249877 - RNA, 19 nt, Artificial Sequence
  Description of Artificial Sequence: Synthetic oligonucleotide
ccgccugucugaucuggcc

SEQ ID NO: 1249878 - RNA, 19 nt, Artificial Sequence
  Description of Artificial Sequence: Synthetic oligonucleotide
cugccguaggccagcgcga

SEQ ID NO: 1249879 - RNA, 19 nt, Artificial Sequence
  Description of Artificial Sequence: Synthetic oligonucleotide
acgaugucuccaaguccca

SEQ ID NO: 1249880 - RNA, 19 nt, Artificial Sequence
  Description of Artificial Sequence: Synthetic oligonucleotide
gcgggcgcagcgcacugag

SEQ ID NO: 1249881 - RNA, 19 nt, Artificial Sequence
  Description of Artificial Sequence: Synthetic oligonucleotide
guccgcuucaaggcccuuc

SEQ ID NO: 1249882 - RNA, 19 nt, Artificial Sequence
  Description of Artificial Sequence: Synthetic oligonucleotide
cacugagcgcagggcgccg

SEQ ID NO: 1249883 - RNA, 19 nt, Artificial Sequence
  Description of Artificial Sequence: Synthetic oligonucleotide
cagguagcgaggauucauu

SEQ ID NO: 1249884 - RNA, 19 nt, Artificial Sequence
  Description of Artificial Sequence: Synthetic oligonucleotide
acgacgcugcuuaggccca

SEQ ID NO: 1249885 - RNA, 19 nt, Artificial Sequence
  Description of Artificial Sequence: Synthetic oligonucleotide
ccccagcacgaagaaauac

SEQ ID NO: 1249886 - RNA, 19 nt, Artificial Sequence
  Description of Artificial Sequence: Synthetic oligonucleotide
agcuggcgaugauggggaa

SEQ ID NO: 1249887 - RNA, 19 nt, Artificial Sequence
  Description of Artificial Sequence: Synthetic oligonucleotide
ucgugccgugggccgggcu

SEQ ID NO: 1249888 - RNA, 19 nt, Artificial Sequence
  Description of Artificial Sequence: Synthetic oligonucleotide
ugccguugugcgggucucu

SEQ ID NO: 1249889 - RNA, 19 nt, Artificial Sequence
  Description of Artificial Sequence: Synthetic oligonucleotide
gcacugagcgcagggcgcc

SEQ ID NO: 1249890 - RNA, 19 nt, Artificial Sequence
  Description of Artificial Sequence: Synthetic oligonucleotide
aggcugccguaggccagcg

SEQ ID NO: 1249891 - RNA, 19 nt, Artificial Sequence
  Description of Artificial Sequence: Synthetic oligonucleotide
gccagugcucacguuguuc

SEQ ID NO: 1249892 - RNA, 19 nt, Artificial Sequence
  Description of Artificial Sequence: Synthetic oligonucleotide
agccagugcucacguuguu

SEQ ID NO: 1249893 - RNA, 19 nt, Artificial Sequence
  Description of Artificial Sequence: Synthetic oligonucleotide
gguuucuggcauguccgaa

SEQ ID NO: 1249894 - RNA, 19 nt, Artificial Sequence
  Description of Artificial Sequence: Synthetic oligonucleotide
ggcaggcgagguacugcgg

SEQ ID NO: 1249895 - RNA, 19 nt, Artificial Sequence
  Description of Artificial Sequence: Synthetic oligonucleotide
gcgcagggcgccgaagaag

SEQ ID NO: 1249896 - RNA, 19 nt, Artificial Sequence
  Description of Artificial Sequence: Synthetic oligonucleotide
gcgauuugggaaguuggcu

SEQ ID NO: 1249897 - RNA, 19 nt, Artificial Sequence
  Description of Artificial Sequence: Synthetic oligonucleotide
acuggcgauuugggaaguu

SEQ ID NO: 1249898 - RNA, 19 nt, Artificial Sequence
  Description of Artificial Sequence: Synthetic oligonucleotide
cgaauccauggcgaggcug

SEQ ID NO: 1249899 - RNA, 19 nt, Artificial Sequence
  Description of Artificial Sequence: Synthetic oligonucleotide
ggcguggaggguggccgcg

SEQ ID NO: 1249900 - RNA, 19 nt, Artificial Sequence
  Description of Artificial Sequence: Synthetic oligonucleotide
cucuagucucuucgaugcu

SEQ ID NO: 1249901 - RNA, 19 nt, Artificial Sequence
  Description of Artificial Sequence: Synthetic oligonucleotide
cgcgucgugccgugggccg

SEQ ID NO: 1249902 - RNA, 19 nt, Artificial Sequence
  Description of Artificial Sequence: Synthetic oligonucleotide
cgaacgcagauggcaggcg

SEQ ID NO: 1249903 - RNA, 19 nt, Artificial Sequence
  Description of Artificial Sequence: Synthetic oligonucleotide
cgugccgugggccgggcug

SEQ ID NO: 1249904 - RNA, 19 nt, Artificial Sequence
  Description of Artificial Sequence: Synthetic oligonucleotide
ccacuucgcccuugaccag

SEQ ID NO: 1249905 - RNA, 19 nt, Artificial Sequence
  Description of Artificial Sequence: Synthetic oligonucleotide
gcggcgucucggcugguga

SEQ ID NO: 1249906 - RNA, 19 nt, Artificial Sequence
  Description of Artificial Sequence: Synthetic oligonucleotide
ggaaagccacguuccccua

SEQ ID NO: 1249907 - RNA, 19 nt, Artificial Sequence
  Description of Artificial Sequence: Synthetic oligonucleotide
gcuuaggcccaggcacacc

SEQ ID NO: 1249908 - RNA, 19 nt, Artificial Sequence
  Description of Artificial Sequence: Synthetic oligonucleotide
ggcgagguacugcggggaa

SEQ ID NO: 1249909 - RNA, 19 nt, Artificial Sequence
  Description of Artificial Sequence: Synthetic oligonucleotide
agaguccgccaagcaggau

SEQ ID NO: 1249910 - RNA, 19 nt, Artificial Sequence
  Description of Artificial Sequence: Synthetic oligonucleotide
gggucagguagcgaggauu

SEQ ID NO: 1249911 - RNA, 19 nt, Artificial Sequence
  Description of Artificial Sequence: Synthetic oligonucleotide
ccagcgcgaugcccugggg

SEQ ID NO: 1249912 - RNA, 19 nt, Artificial Sequence
  Description of Artificial Sequence: Synthetic oligonucleotide
cguuggugccgaauaccca

SEQ ID NO: 1249913 - RNA, 19 nt, Artificial Sequence
  Description of Artificial Sequence: Synthetic oligonucleotide
gagugcagcuggcgaugau

SEQ ID NO: 1249914 - RNA, 19 nt, Artificial Sequence
  Description of Artificial Sequence: Synthetic oligonucleotide
ccuucgccuccuguaggug

SEQ ID NO: 1249915 - RNA, 19 nt, Artificial Sequence
  Description of Artificial Sequence: Synthetic oligonucleotide
ggauucagucccaguugcu

SEQ ID NO: 1249916 - RNA, 19 nt, Artificial Sequence
  Description of Artificial Sequence: Synthetic oligonucleotide
gccguaggccagcgcgaug

SEQ ID NO: 1249917 - RNA, 19 nt, Artificial Sequence
  Description of Artificial Sequence: Synthetic oligonucleotide
gcuggcgaugauggggaaa

SEQ ID NO: 1249918 - RNA, 19 nt, Artificial Sequence
  Description of Artificial Sequence: Synthetic oligonucleotide
caucacguuggugccgaau

SEQ ID NO: 1249919 - RNA, 19 nt, Artificial Sequence
  Description of Artificial Sequence: Synthetic oligonucleotide
ccagccaugggaugaguuu

SEQ ID NO: 1249920 - RNA, 19 nt, Artificial Sequence
  Description of Artificial Sequence: Synthetic oligonucleotide
gggcgccgaagaagauggg

SEQ ID NO: 1249921 - RNA, 19 nt, Artificial Sequence
  Description of Artificial Sequence: Synthetic oligonucleotide
cccgccagccaugggauga

SEQ ID NO: 1249922 - RNA, 19 nt, Artificial Sequence
  Description of Artificial Sequence: Synthetic oligonucleotide
cccuggaaugacgaugucu

SEQ ID NO: 1249923 - RNA, 19 nt, Artificial Sequence
  Description of Artificial Sequence: Synthetic oligonucleotide
ccuuagugucaaacucaua

SEQ ID NO: 1249924 - RNA, 19 nt, Artificial Sequence
  Description of Artificial Sequence: Synthetic oligonucleotide
uguccgcuucaaggcccuu

SEQ ID NO: 1249925 - RNA, 19 nt, Artificial Sequence
  Description of Artificial Sequence: Synthetic oligonucleotide
ccgcgucgugccgugggcc

SEQ ID NO: 1249926 - RNA, 19 nt, Artificial Sequence
  Description of Artificial Sequence: Synthetic oligonucleotide
gucgugccgugggccgggc

SEQ ID NO: 1249927 - RNA, 19 nt, Artificial Sequence
  Description of Artificial Sequence: Synthetic oligonucleotide
gcccgccagccaugggaug

SEQ ID NO: 1249928 - RNA, 19 nt, Artificial Sequence
  Description of Artificial Sequence: Synthetic oligonucleotide
caccuggcuccuggggaaa

SEQ ID NO: 1249929 - RNA, 19 nt, Artificial Sequence
  Description of Artificial Sequence: Synthetic oligonucleotide
cguggaggguggccgcguc

SEQ ID NO: 1249930 - RNA, 19 nt, Artificial Sequence
  Description of Artificial Sequence: Synthetic oligonucleotide
cgucgugccgugggccggg

SEQ ID NO: 1249931 - RNA, 19 nt, Artificial Sequence
  Description of Artificial Sequence: Synthetic oligonucleotide
gccagccaugggaugaguu

SEQ ID NO: 1249932 - RNA, 19 nt, Artificial Sequence
  Description of Artificial Sequence: Synthetic oligonucleotide
ccgccacuucgcccuugac

SEQ ID NO: 1249933 - RNA, 19 nt, Artificial Sequence
  Description of Artificial Sequence: Synthetic oligonucleotide
ggcccgccagccaugggau

SEQ ID NO: 1249934 - RNA, 19 nt, Artificial Sequence
  Description of Artificial Sequence: Synthetic oligonucleotide
ccgcgggcgcagcgcacug

SEQ ID NO: 1249935 - RNA, 19 nt, Artificial Sequence
  Description of Artificial Sequence: Synthetic oligonucleotide
gcgccaugagcaggaggcu

SEQ ID NO: 1249936 - RNA, 19 nt, Artificial Sequence
  Description of Artificial Sequence: Synthetic oligonucleotide
gcauguccgaagagcucuu

SEQ ID NO: 1249937 - RNA, 19 nt, Artificial Sequence
  Description of Artificial Sequence: Synthetic oligonucleotide
ccgaauccauggcgaggcu

SEQ ID NO: 1249938 - RNA, 19 nt, Artificial Sequence
  Description of Artificial Sequence: Synthetic oligonucleotide
gcguggaggguggccgcgu

SEQ ID NO: 1249939 - RNA, 19 nt, Artificial Sequence
  Description of Artificial Sequence: Synthetic oligonucleotide
ggcugcgcucgggcuccga

SEQ ID NO: 1249940 - RNA, 19 nt, Artificial Sequence
  Description of Artificial Sequence: Synthetic oligonucleotide
gcagggcgccgaagaagau

SEQ ID NO: 1249941 - RNA, 19 nt, Artificial Sequence
  Description of Artificial Sequence: Synthetic oligonucleotide
cgucucggcuggugauggu

SEQ ID NO: 1249942 - RNA, 19 nt, Artificial Sequence
  Description of Artificial Sequence: Synthetic oligonucleotide
cgaugcccuggggcgugga

SEQ ID NO: 1249943 - RNA, 19 nt, Artificial Sequence
  Description of Artificial Sequence: Synthetic oligonucleotide
cgcgggcgcagcgcacuga

SEQ ID NO: 1249944 - RNA, 19 nt, Artificial Sequence
  Description of Artificial Sequence: Synthetic oligonucleotide
cgguucccaccuggcuccu

SEQ ID NO: 1249945 - RNA, 19 nt, Artificial Sequence
  Description of Artificial Sequence: Synthetic oligonucleotide
ugugaaauaauccaccagg

SEQ ID NO: 1249946 - RNA, 19 nt, Artificial Sequence
  Description of Artificial Sequence: Synthetic oligonucleotide
  modified_base (7)..(7): a, c, u, g, unknown or other
uuggaanccaucaacagac

SEQ ID NO: 1249947 - RNA, 19 nt, Artificial Sequence
  Description of Artificial Sequence: Synthetic oligonucleotide
aacucuucgaucauggccc

SEQ ID NO: 1249948 - RNA, 19 nt, Artificial Sequence
  Description of Artificial Sequence: Synthetic oligonucleotide
aacagacuuaaucucgagc

SEQ ID NO: 1249949 - RNA, 19 nt, Artificial Sequence
  Description of Artificial Sequence: Synthetic oligonucleotide
aacugugacgccuugcugg

SEQ ID NO: 1249950 - RNA, 19 nt, Artificial Sequence
  Description of Artificial Sequence: Synthetic oligonucleotide
acagacuuaaucucgagcu

SEQ ID NO: 1249951 - RNA, 19 nt, Artificial Sequence
  Description of Artificial Sequence: Synthetic oligonucleotide
cuuaaucucgagcucaggg

SEQ ID NO: 1249952 - RNA, 19 nt, Artificial Sequence
  Description of Artificial Sequence: Synthetic oligonucleotide
ucgaucauggcccuaaagu

SEQ ID NO: 1249953 - RNA, 19 nt, Artificial Sequence
  Description of Artificial Sequence: Synthetic oligonucleotide
aaagguaugguuguugaca

SEQ ID NO: 1249954 - RNA, 19 nt, Artificial Sequence
  Description of Artificial Sequence: Synthetic oligonucleotide
aaauaauccaccagggucu

SEQ ID NO: 1249955 - RNA, 19 nt, Artificial Sequence
  Description of Artificial Sequence: Synthetic oligonucleotide
aaagcuacagguguuguca

SEQ ID NO: 1249956 - RNA, 19 nt, Artificial Sequence
  Description of Artificial Sequence: Synthetic oligonucleotide
augacugccacguggcgcc

SEQ ID NO: 1249957 - RNA, 19 nt, Artificial Sequence
  Description of Artificial Sequence: Synthetic oligonucleotide
acagccguggaucucgggc

SEQ ID NO: 1249958 - RNA, 19 nt, Artificial Sequence
  Description of Artificial Sequence: Synthetic oligonucleotide
aguagcggcgacuacagug

SEQ ID NO: 1249959 - RNA, 19 nt, Artificial Sequence
  Description of Artificial Sequence: Synthetic oligonucleotide
uguuggaccugacaaaggu

SEQ ID NO: 1249960 - RNA, 19 nt, Artificial Sequence
  Description of Artificial Sequence: Synthetic oligonucleotide
aggacguggccucaugucc

SEQ ID NO: 1249961 - RNA, 19 nt, Artificial Sequence
  Description of Artificial Sequence: Synthetic oligonucleotide
ucagccuuaaucacagcug

SEQ ID NO: 1249962 - RNA, 19 nt, Artificial Sequence
  Description of Artificial Sequence: Synthetic oligonucleotide
aucugguggacucgcagcc

SEQ ID NO: 1249963 - RNA, 19 nt, Artificial Sequence
  Description of Artificial Sequence: Synthetic oligonucleotide
uuaaucucgagcucagggu

SEQ ID NO: 1249964 - RNA, 19 nt, Artificial Sequence
  Description of Artificial Sequence: Synthetic oligonucleotide
ugaaauaauccaccagggu

SEQ ID NO: 1249965 - RNA, 19 nt, Artificial Sequence
  Description of Artificial Sequence: Synthetic oligonucleotide
cauagaguacuccuucccg

SEQ ID NO: 1249966 - RNA, 19 nt, Artificial Sequence
  Description of Artificial Sequence: Synthetic oligonucleotide
acacuccucagcuaucugg

SEQ ID NO: 1249967 - RNA, 19 nt, Artificial Sequence
  Description of Artificial Sequence: Synthetic oligonucleotide
gacaguacgggagucacag

SEQ ID NO: 1249968 - RNA, 19 nt, Artificial Sequence
  Description of Artificial Sequence: Synthetic oligonucleotide
aucaacagacuuaaucucg

SEQ ID NO: 1249969 - RNA, 19 nt, Artificial Sequence
  Description of Artificial Sequence: Synthetic oligonucleotide
ucaacagacuuaaucucga

SEQ ID NO: 1249970 - RNA, 19 nt, Artificial Sequence
  Description of Artificial Sequence: Synthetic oligonucleotide
  modified_base (3)..(3): a, c, u, g, unknown or other
aanccaucaacagacuuaa

SEQ ID NO: 1249971 - RNA, 19 nt, Artificial Sequence
  Description of Artificial Sequence: Synthetic oligonucleotide
uuccuguuggaccugacaa

SEQ ID NO: 1249972 - RNA, 19 nt, Artificial Sequence
  Description of Artificial Sequence: Synthetic oligonucleotide
cuguccaugguacauggcc

SEQ ID NO: 1249973 - RNA, 19 nt, Artificial Sequence
  Description of Artificial Sequence: Synthetic oligonucleotide
ugucuauaaguagccaggg

SEQ ID NO: 1249974 - RNA, 19 nt, Artificial Sequence
  Description of Artificial Sequence: Synthetic oligonucleotide
gucgcaaacccacaccugg

SEQ ID NO: 1249975 - RNA, 19 nt, Artificial Sequence
  Description of Artificial Sequence: Synthetic oligonucleotide
ggaaacuccaacugugacg

SEQ ID NO: 1249976 - RNA, 19 nt, Artificial Sequence
  Description of Artificial Sequence: Synthetic oligonucleotide
uuguguggggccauguggc

SEQ ID NO: 1249977 - RNA, 19 nt, Artificial Sequence
  Description of Artificial Sequence: Synthetic oligonucleotide
agugcaugcagaacuggcc

SEQ ID NO: 1249978 - RNA, 19 nt, Artificial Sequence
  Description of Artificial Sequence: Synthetic oligonucleotide
ucagcuaucugguggacuc

SEQ ID NO: 1249979 - RNA, 19 nt, Artificial Sequence
  Description of Artificial Sequence: Synthetic oligonucleotide
  modified_base (13)..(13): a, c, u, g, unknown or other
ucggccuuggaanccauca

SEQ ID NO: 1249980 - RNA, 19 nt, Artificial Sequence
  Description of Artificial Sequence: Synthetic oligonucleotide
aaucucgagcucagggugc

SEQ ID NO: 1249981 - RNA, 19 nt, Artificial Sequence
  Description of Artificial Sequence: Synthetic oligonucleotide
cuuucuguggucgcaaacc

SEQ ID NO: 1249982 - RNA, 19 nt, Artificial Sequence
  Description of Artificial Sequence: Synthetic oligonucleotide
gugucuauaaguagccagg

SEQ ID NO: 1249983 - RNA, 19 nt, Artificial Sequence
  Description of Artificial Sequence: Synthetic oligonucleotide
guguugucagccuuaauca

SEQ ID NO: 1249984 - RNA, 19 nt, Artificial Sequence
  Description of Artificial Sequence: Synthetic oligonucleotide
gguacucaaaggcugugcg

SEQ ID NO: 1249985 - RNA, 19 nt, Artificial Sequence
  Description of Artificial Sequence: Synthetic oligonucleotide
uggucgcaaacccacaccu

SEQ ID NO: 1249986 - RNA, 19 nt, Artificial Sequence
  Description of Artificial Sequence: Synthetic oligonucleotide
agccccuauccccuggucc

SEQ ID NO: 1249987 - RNA, 19 nt, Artificial Sequence
  Description of Artificial Sequence: Synthetic oligonucleotide
auagaguacuccuucccga

SEQ ID NO: 1249988 - RNA, 19 nt, Artificial Sequence
  Description of Artificial Sequence: Synthetic oligonucleotide
gaguggaccugagagacag

SEQ ID NO: 1249989 - RNA, 19 nt, Artificial Sequence
  Description of Artificial Sequence: Synthetic oligonucleotide
uaucugguggacucgcagc

SEQ ID NO: 1249990 - RNA, 19 nt, Artificial Sequence
  Description of Artificial Sequence: Synthetic oligonucleotide
acgggugacagcaacauug

SEQ ID NO: 1249991 - RNA, 19 nt, Artificial Sequence
  Description of Artificial Sequence: Synthetic oligonucleotide
aagcuacagguguugucag

SEQ ID NO: 1249992 - RNA, 19 nt, Artificial Sequence
  Description of Artificial Sequence: Synthetic oligonucleotide
gaguacuccuucccgacug

SEQ ID NO: 1249993 - RNA, 19 nt, Artificial Sequence
  Description of Artificial Sequence: Synthetic oligonucleotide
gucuauaaguagccagggg

SEQ ID NO: 1249994 - RNA, 19 nt, Artificial Sequence
  Description of Artificial Sequence: Synthetic oligonucleotide
uguggggcuacaccgccag

SEQ ID NO: 1249995 - RNA, 19 nt, Artificial Sequence
  Description of Artificial Sequence: Synthetic oligonucleotide
ugugacgccuugcuggcca

SEQ ID NO: 1249996 - RNA, 19 nt, Artificial Sequence
  Description of Artificial Sequence: Synthetic oligonucleotide
gauccaguuguguggggcc

SEQ ID NO: 1249997 - RNA, 19 nt, Artificial Sequence
  Description of Artificial Sequence: Synthetic oligonucleotide
acuacagugcaugcagaac

SEQ ID NO: 1249998 - RNA, 19 nt, Artificial Sequence
  Description of Artificial Sequence: Synthetic oligonucleotide
cucacuguaaugcgccggg

SEQ ID NO: 1249999 - RNA, 19 nt, Artificial Sequence
  Description of Artificial Sequence: Synthetic oligonucleotide
ugucugagcagguccaccu

SEQ ID NO: 1250000 - RNA, 19 nt, Artificial Sequence
  Description of Artificial Sequence: Synthetic oligonucleotide
  modified_base (8)..(8): a, c, u, g, unknown or other
cuuggaanccaucaacaga

SEQ ID NO: 1250001 - RNA, 19 nt, Artificial Sequence
  Description of Artificial Sequence: Synthetic oligonucleotide
uguggucgcaaacccacac

SEQ ID NO: 1250002 - RNA, 19 nt, Artificial Sequence
  Description of Artificial Sequence: Synthetic oligonucleotide
acuguaaugcgccgggccu

SEQ ID NO: 1250003 - RNA, 19 nt, Artificial Sequence
  Description of Artificial Sequence: Synthetic oligonucleotide
cauggguguaguucucagg

SEQ ID NO: 1250004 - RNA, 19 nt, Artificial Sequence
  Description of Artificial Sequence: Synthetic oligonucleotide
  modified_base (4)..(4): a, c, u, g, unknown or other
gaanccaucaacagacuua

SEQ ID NO: 1250005 - RNA, 19 nt, Artificial Sequence
  Description of Artificial Sequence: Synthetic oligonucleotide
gugcaugcagaacuggccc

SEQ ID NO: 1250006 - RNA, 19 nt, Artificial Sequence
  Description of Artificial Sequence: Synthetic oligonucleotide
agacuuaaucucgagcuca

SEQ ID NO: 1250007 - RNA, 19 nt, Artificial Sequence
  Description of Artificial Sequence: Synthetic oligonucleotide
gguacauggccuccgaggc

SEQ ID NO: 1250008 - RNA, 19 nt, Artificial Sequence
  Description of Artificial Sequence: Synthetic oligonucleotide
ucagggacgaugucaucca

SEQ ID NO: 1250009 - RNA, 19 nt, Artificial Sequence
  Description of Artificial Sequence: Synthetic oligonucleotide
gaugacugccacguggcgc

SEQ ID NO: 1250010 - RNA, 19 nt, Artificial Sequence
  Description of Artificial Sequence: Synthetic oligonucleotide
uacaccgccagaaccugca

SEQ ID NO: 1250011 - RNA, 19 nt, Artificial Sequence
  Description of Artificial Sequence: Synthetic oligonucleotide
ucaaaggcugugcguaccu

SEQ ID NO: 1250012 - RNA, 19 nt, Artificial Sequence
  Description of Artificial Sequence: Synthetic oligonucleotide
uggacucgcagccugucgu

SEQ ID NO: 1250013 - RNA, 19 nt, Artificial Sequence
  Description of Artificial Sequence: Synthetic oligonucleotide
uggucugucgcuccaguuc

SEQ ID NO: 1250014 - RNA, 19 nt, Artificial Sequence
  Description of Artificial Sequence: Synthetic oligonucleotide
guacgggagucacagauga

SEQ ID NO: 1250015 - RNA, 19 nt, Artificial Sequence
  Description of Artificial Sequence: Synthetic oligonucleotide
gucacagaugacugccacg

SEQ ID NO: 1250016 - RNA, 19 nt, Artificial Sequence
  Description of Artificial Sequence: Synthetic oligonucleotide
acgugggaaacuccaacug

SEQ ID NO: 1250017 - RNA, 19 nt, Artificial Sequence
  Description of Artificial Sequence: Synthetic oligonucleotide
cuaucugguggacucgcag

SEQ ID NO: 1250018 - RNA, 19 nt, Artificial Sequence
  Description of Artificial Sequence: Synthetic oligonucleotide
uagaguacuccuucccgac

SEQ ID NO: 1250019 - RNA, 19 nt, Artificial Sequence
  Description of Artificial Sequence: Synthetic oligonucleotide
ugaggacguggccucaugu

SEQ ID NO: 1250020 - RNA, 19 nt, Artificial Sequence
  Description of Artificial Sequence: Synthetic oligonucleotide
ucuaucagagccgcuugca

SEQ ID NO: 1250021 - RNA, 19 nt, Artificial Sequence
  Description of Artificial Sequence: Synthetic oligonucleotide
agcuaucugguggacucgc

SEQ ID NO: 1250022 - RNA, 19 nt, Artificial Sequence
  Description of Artificial Sequence: Synthetic oligonucleotide
gauccgccuguccucagcc

SEQ ID NO: 1250023 - RNA, 19 nt, Artificial Sequence
  Description of Artificial Sequence: Synthetic oligonucleotide
cuccucgcagggcagagcc

SEQ ID NO: 1250024 - RNA, 19 nt, Artificial Sequence
  Description of Artificial Sequence: Synthetic oligonucleotide
ucccgacugauccucugcc

SEQ ID NO: 1250025 - RNA, 19 nt, Artificial Sequence
  Description of Artificial Sequence: Synthetic oligonucleotide
cacuguaaugcgccgggcc

SEQ ID NO: 1250026 - RNA, 19 nt, Artificial Sequence
  Description of Artificial Sequence: Synthetic oligonucleotide
ugucgugggagcucaggga

SEQ ID NO: 1250027 - RNA, 19 nt, Artificial Sequence
  Description of Artificial Sequence: Synthetic oligonucleotide
guaguucucagggacgaug

SEQ ID NO: 1250028 - RNA, 19 nt, Artificial Sequence
  Description of Artificial Sequence: Synthetic oligonucleotide
  modified_base (18)..(18): a, c, u, g, unknown or other
uucucucggccuuggaanc

SEQ ID NO: 1250029 - RNA, 19 nt, Artificial Sequence
  Description of Artificial Sequence: Synthetic oligonucleotide
cugguugcgccuuggcagg

SEQ ID NO: 1250030 - RNA, 19 nt, Artificial Sequence
  Description of Artificial Sequence: Synthetic oligonucleotide
uugacaguacgggagucac

SEQ ID NO: 1250031 - RNA, 19 nt, Artificial Sequence
  Description of Artificial Sequence: Synthetic oligonucleotide
uucccgacugauccucugc

SEQ ID NO: 1250032 - RNA, 19 nt, Artificial Sequence
  Description of Artificial Sequence: Synthetic oligonucleotide
gcgacuacagugcaugcag

SEQ ID NO: 1250033 - RNA, 19 nt, Artificial Sequence
  Description of Artificial Sequence: Synthetic oligonucleotide
acgggagucacagaugacu

SEQ ID NO: 1250034 - RNA, 19 nt, Artificial Sequence
  Description of Artificial Sequence: Synthetic oligonucleotide
guagcggcgacuacagugc

SEQ ID NO: 1250035 - RNA, 19 nt, Artificial Sequence
  Description of Artificial Sequence: Synthetic oligonucleotide
ugccacguggcgccgagca

SEQ ID NO: 1250036 - RNA, 19 nt, Artificial Sequence
  Description of Artificial Sequence: Synthetic oligonucleotide
gacuuaaucucgagcucag

SEQ ID NO: 1250037 - RNA, 19 nt, Artificial Sequence
  Description of Artificial Sequence: Synthetic oligonucleotide
  modified_base (19)..(19): a, c, u, g, unknown or other
cuucucucggccuuggaan

SEQ ID NO: 1250038 - RNA, 19 nt, Artificial Sequence
  Description of Artificial Sequence: Synthetic oligonucleotide
agaugacugccacguggcg

SEQ ID NO: 1250039 - RNA, 19 nt, Artificial Sequence
  Description of Artificial Sequence: Synthetic oligonucleotide
uccucacuguaaugcgccg

SEQ ID NO: 1250040 - RNA, 19 nt, Artificial Sequence
  Description of Artificial Sequence: Synthetic oligonucleotide
ucgagccuuuucaccacag

SEQ ID NO: 1250041 - RNA, 19 nt, Artificial Sequence
  Description of Artificial Sequence: Synthetic oligonucleotide
ugcaugcagaacuggccca

SEQ ID NO: 1250042 - RNA, 19 nt, Artificial Sequence
  Description of Artificial Sequence: Synthetic oligonucleotide
aguucuaucagagccgcuu

SEQ ID NO: 1250043 - RNA, 19 nt, Artificial Sequence
  Description of Artificial Sequence: Synthetic oligonucleotide
  modified_base (6)..(6): a, c, u, g, unknown or other
uggaanccaucaacagacu

SEQ ID NO: 1250044 - RNA, 19 nt, Artificial Sequence
  Description of Artificial Sequence: Synthetic oligonucleotide
ugcaugaggacguggccuc

SEQ ID NO: 1250045 - RNA, 19 nt, Artificial Sequence
  Description of Artificial Sequence: Synthetic oligonucleotide
caacagacuuaaucucgag

SEQ ID NO: 1250046 - RNA, 19 nt, Artificial Sequence
  Description of Artificial Sequence: Synthetic oligonucleotide
cuaucagagccgcuugcac

SEQ ID NO: 1250047 - RNA, 19 nt, Artificial Sequence
  Description of Artificial Sequence: Synthetic oligonucleotide
aguucucagggacgauguc

SEQ ID NO: 1250048 - RNA, 19 nt, Artificial Sequence
  Description of Artificial Sequence: Synthetic oligonucleotide
gaccugacaaaggucagga

SEQ ID NO: 1250049 - RNA, 19 nt, Artificial Sequence
  Description of Artificial Sequence: Synthetic oligonucleotide
ccuuaaucacagcugacac

SEQ ID NO: 1250050 - RNA, 19 nt, Artificial Sequence
  Description of Artificial Sequence: Synthetic oligonucleotide
acugauccucugccgggcg

SEQ ID NO: 1250051 - RNA, 19 nt, Artificial Sequence
  Description of Artificial Sequence: Synthetic oligonucleotide
guagggugcgaugacagca

SEQ ID NO: 1250052 - RNA, 19 nt, Artificial Sequence
  Description of Artificial Sequence: Synthetic oligonucleotide
ugacaguggcucaggcuca

SEQ ID NO: 1250053 - RNA, 19 nt, Artificial Sequence
  Description of Artificial Sequence: Synthetic oligonucleotide
acagugcaugcagaacugg

SEQ ID NO: 1250054 - RNA, 19 nt, Artificial Sequence
  Description of Artificial Sequence: Synthetic oligonucleotide
uccuguuggaccugacaaa

SEQ ID NO: 1250055 - RNA, 19 nt, Artificial Sequence
  Description of Artificial Sequence: Synthetic oligonucleotide
cugaagguuguagggugcg

SEQ ID NO: 1250056 - RNA, 19 nt, Artificial Sequence
  Description of Artificial Sequence: Synthetic oligonucleotide
gcugucaugccucagccca

SEQ ID NO: 1250057 - RNA, 19 nt, Artificial Sequence
  Description of Artificial Sequence: Synthetic oligonucleotide
uacagguguugucagccuu

SEQ ID NO: 1250058 - RNA, 19 nt, Artificial Sequence
  Description of Artificial Sequence: Synthetic oligonucleotide
  modified_base (9)..(9): a, c, u, g, unknown or other
ccuuggaanccaucaacag

SEQ ID NO: 1250059 - RNA, 19 nt, Artificial Sequence
  Description of Artificial Sequence: Synthetic oligonucleotide
acucgcagccugucguggg

SEQ ID NO: 1250060 - RNA, 19 nt, Artificial Sequence
  Description of Artificial Sequence: Synthetic oligonucleotide
uagggugcgaugacagcaa

SEQ ID NO: 1250061 - RNA, 19 nt, Artificial Sequence
  Description of Artificial Sequence: Synthetic oligonucleotide
acuuaaucucgagcucagg

SEQ ID NO: 1250062 - RNA, 19 nt, Artificial Sequence
  Description of Artificial Sequence: Synthetic oligonucleotide
aacccacaccugguugcgc

SEQ ID NO: 1250063 - RNA, 19 nt, Artificial Sequence
  Description of Artificial Sequence: Synthetic oligonucleotide
gcauagaguacuccuuccc

SEQ ID NO: 1250064 - RNA, 19 nt, Artificial Sequence
  Description of Artificial Sequence: Synthetic oligonucleotide
gaggacguggccucauguc

SEQ ID NO: 1250065 - RNA, 19 nt, Artificial Sequence
  Description of Artificial Sequence: Synthetic oligonucleotide
cagccuuaaucacagcuga

SEQ ID NO: 1250066 - RNA, 19 nt, Artificial Sequence
  Description of Artificial Sequence: Synthetic oligonucleotide
cgugucuauaaguagccag

SEQ ID NO: 1250067 - RNA, 19 nt, Artificial Sequence
  Description of Artificial Sequence: Synthetic oligonucleotide
cagacuuaaucucgagcuc

SEQ ID NO: 1250068 - RNA, 19 nt, Artificial Sequence
  Description of Artificial Sequence: Synthetic oligonucleotide
agaguacuccuucccgacu

SEQ ID NO: 1250069 - RNA, 19 nt, Artificial Sequence
  Description of Artificial Sequence: Synthetic oligonucleotide
gacgugggaaacuccaacu

SEQ ID NO: 1250070 - RNA, 19 nt, Artificial Sequence
  Description of Artificial Sequence: Synthetic oligonucleotide
gagccgcuugcacuggagc

SEQ ID NO: 1250071 - RNA, 19 nt, Artificial Sequence
  Description of Artificial Sequence: Synthetic oligonucleotide
uguugagcuuucugugguc

SEQ ID NO: 1250072 - RNA, 19 nt, Artificial Sequence
  Description of Artificial Sequence: Synthetic oligonucleotide
ugcugucaugccucagccc

SEQ ID NO: 1250073 - RNA, 19 nt, Artificial Sequence
  Description of Artificial Sequence: Synthetic oligonucleotide
ugacaguacgggagucaca

SEQ ID NO: 1250074 - RNA, 19 nt, Artificial Sequence
  Description of Artificial Sequence: Synthetic oligonucleotide
ggggcuucggcuuccugcg

SEQ ID NO: 1250075 - RNA, 19 nt, Artificial Sequence
  Description of Artificial Sequence: Synthetic oligonucleotide
ucgcaaacccacaccuggu

SEQ ID NO: 1250076 - RNA, 19 nt, Artificial Sequence
  Description of Artificial Sequence: Synthetic oligonucleotide
uggccgagcacuuggcaaa

SEQ ID NO: 1250077 - RNA, 19 nt, Artificial Sequence
  Description of Artificial Sequence: Synthetic oligonucleotide
auugauccgccuguccuca

SEQ ID NO: 1250078 - RNA, 19 nt, Artificial Sequence
  Description of Artificial Sequence: Synthetic oligonucleotide
agcucgcccagccuucuug

SEQ ID NO: 1250079 - RNA, 19 nt, Artificial Sequence
  Description of Artificial Sequence: Synthetic oligonucleotide
gugggcucgagccuuuuca

SEQ ID NO: 1250080 - RNA, 19 nt, Artificial Sequence
  Description of Artificial Sequence: Synthetic oligonucleotide
aauaauccaccagggucuu

SEQ ID NO: 1250081 - RNA, 19 nt, Artificial Sequence
  Description of Artificial Sequence: Synthetic oligonucleotide
agggacgaugucauccagg

SEQ ID NO: 1250082 - RNA, 19 nt, Artificial Sequence
  Description of Artificial Sequence: Synthetic oligonucleotide
uacuccuucccgacugauc

SEQ ID NO: 1250083 - RNA, 19 nt, Artificial Sequence
  Description of Artificial Sequence: Synthetic oligonucleotide
ggugcauucgguacuguac

SEQ ID NO: 1250084 - RNA, 19 nt, Artificial Sequence
  Description of Artificial Sequence: Synthetic oligonucleotide
guggacucgcagccugucg

SEQ ID NO: 1250085 - RNA, 19 nt, Artificial Sequence
  Description of Artificial Sequence: Synthetic oligonucleotide
cgaucauggcccuaaagug

SEQ ID NO: 1250086 - RNA, 19 nt, Artificial Sequence
  Description of Artificial Sequence: Synthetic oligonucleotide
augggcgguaagcugucca

SEQ ID NO: 1250087 - RNA, 19 nt, Artificial Sequence
  Description of Artificial Sequence: Synthetic oligonucleotide
acugcccgcauagaguacu

SEQ ID NO: 1250088 - RNA, 19 nt, Artificial Sequence
  Description of Artificial Sequence: Synthetic oligonucleotide
gacucgcagccugucgugg

SEQ ID NO: 1250089 - RNA, 19 nt, Artificial Sequence
  Description of Artificial Sequence: Synthetic oligonucleotide
aguacgggagucacagaug

SEQ ID NO: 1250090 - RNA, 19 nt, Artificial Sequence
  Description of Artificial Sequence: Synthetic oligonucleotide
uccucgcagggcagagccg

SEQ ID NO: 1250091 - RNA, 19 nt, Artificial Sequence
  Description of Artificial Sequence: Synthetic oligonucleotide
gguuguugacaguacggga

SEQ ID NO: 1250092 - RNA, 19 nt, Artificial Sequence
  Description of Artificial Sequence: Synthetic oligonucleotide
uggggcuacaccgccagaa

SEQ ID NO: 1250093 - RNA, 19 nt, Artificial Sequence
  Description of Artificial Sequence: Synthetic oligonucleotide
aguacuccuucccgacuga

SEQ ID NO: 1250094 - RNA, 19 nt, Artificial Sequence
  Description of Artificial Sequence: Synthetic oligonucleotide
uccaacugugacgccuugc

SEQ ID NO: 1250095 - RNA, 19 nt, Artificial Sequence
  Description of Artificial Sequence: Synthetic oligonucleotide
guacauggccuccgaggcc

SEQ ID NO: 1250096 - RNA, 19 nt, Artificial Sequence
  Description of Artificial Sequence: Synthetic oligonucleotide
uggugcauucgguacugua

SEQ ID NO: 1250097 - RNA, 19 nt, Artificial Sequence
  Description of Artificial Sequence: Synthetic oligonucleotide
gagcacgggugacagcaac

SEQ ID NO: 1250098 - RNA, 19 nt, Artificial Sequence
  Description of Artificial Sequence: Synthetic oligonucleotide
ccuguuggaccugacaaag

SEQ ID NO: 1250099 - RNA, 19 nt, Artificial Sequence
  Description of Artificial Sequence: Synthetic oligonucleotide
agcucagggacgugggaaa

SEQ ID NO: 1250100 - RNA, 19 nt, Artificial Sequence
  Description of Artificial Sequence: Synthetic oligonucleotide
guaagcuguccaugguaca

SEQ ID NO: 1250101 - RNA, 19 nt, Artificial Sequence
  Description of Artificial Sequence: Synthetic oligonucleotide
  modified_base (17)..(17): a, c, u, g, unknown or other
ucucucggccuuggaancc

SEQ ID NO: 1250102 - RNA, 19 nt, Artificial Sequence
  Description of Artificial Sequence: Synthetic oligonucleotide
cuacaccgccagaaccugc

SEQ ID NO: 1250103 - RNA, 19 nt, Artificial Sequence
  Description of Artificial Sequence: Synthetic oligonucleotide
gggaaacuccaacugugac

SEQ ID NO: 1250104 - RNA, 19 nt, Artificial Sequence
  Description of Artificial Sequence: Synthetic oligonucleotide
agccuuaaucacagcugac

SEQ ID NO: 1250105 - RNA, 19 nt, Artificial Sequence
  Description of Artificial Sequence: Synthetic oligonucleotide
caacugugacgccuugcug

SEQ ID NO: 1250106 - RNA, 19 nt, Artificial Sequence
  Description of Artificial Sequence: Synthetic oligonucleotide
uguugacaguacgggaguc

SEQ ID NO: 1250107 - RNA, 19 nt, Artificial Sequence
  Description of Artificial Sequence: Synthetic oligonucleotide
ugcguaccuccccaugcuc

SEQ ID NO: 1250108 - RNA, 19 nt, Artificial Sequence
  Description of Artificial Sequence: Synthetic oligonucleotide
ucugccgggcgugggcucg

SEQ ID NO: 1250109 - RNA, 19 nt, Artificial Sequence
  Description of Artificial Sequence: Synthetic oligonucleotide
cccgugucuauaaguagcc

SEQ ID NO: 1250110 - RNA, 19 nt, Artificial Sequence
  Description of Artificial Sequence: Synthetic oligonucleotide
guuggaccugacaaagguc

SEQ ID NO: 1250111 - RNA, 19 nt, Artificial Sequence
  Description of Artificial Sequence: Synthetic oligonucleotide
guaugguuguugacaguac

SEQ ID NO: 1250112 - RNA, 19 nt, Artificial Sequence
  Description of Artificial Sequence: Synthetic oligonucleotide
ugaagguuguagggugcga

SEQ ID NO: 1250113 - RNA, 19 nt, Artificial Sequence
  Description of Artificial Sequence: Synthetic oligonucleotide
agggacgugggaaacucca

SEQ ID NO: 1250114 - RNA, 19 nt, Artificial Sequence
  Description of Artificial Sequence: Synthetic oligonucleotide
uggcaaagcuacagguguu

SEQ ID NO: 1250115 - RNA, 19 nt, Artificial Sequence
  Description of Artificial Sequence: Synthetic oligonucleotide
ugggcgguaagcuguccau

SEQ ID NO: 1250116 - RNA, 19 nt, Artificial Sequence
  Description of Artificial Sequence: Synthetic oligonucleotide
cuccccggugcugucaugc

SEQ ID NO: 1250117 - RNA, 19 nt, Artificial Sequence
  Description of Artificial Sequence: Synthetic oligonucleotide
ucgggcaggugauggcuga

SEQ ID NO: 1250118 - RNA, 19 nt, Artificial Sequence
  Description of Artificial Sequence: Synthetic oligonucleotide
guugacaguacgggaguca

SEQ ID NO: 1250119 - RNA, 19 nt, Artificial Sequence
  Description of Artificial Sequence: Synthetic oligonucleotide
ggugcagugccuucagauc

SEQ ID NO: 1250120 - RNA, 19 nt, Artificial Sequence
  Description of Artificial Sequence: Synthetic oligonucleotide
agccguggaucucgggcag

SEQ ID NO: 1250121 - RNA, 19 nt, Artificial Sequence
  Description of Artificial Sequence: Synthetic oligonucleotide
cucgagcucagggugcuug

SEQ ID NO: 1250122 - RNA, 19 nt, Artificial Sequence
  Description of Artificial Sequence: Synthetic oligonucleotide
cuauccccuggucccacug

SEQ ID NO: 1250123 - RNA, 19 nt, Artificial Sequence
  Description of Artificial Sequence: Synthetic oligonucleotide
augaggacguggccucaug

SEQ ID NO: 1250124 - RNA, 19 nt, Artificial Sequence
  Description of Artificial Sequence: Synthetic oligonucleotide
ggacgugggaaacuccaac

SEQ ID NO: 1250125 - RNA, 19 nt, Artificial Sequence
  Description of Artificial Sequence: Synthetic oligonucleotide
ccgacugauccucugccgg

SEQ ID NO: 1250126 - RNA, 19 nt, Artificial Sequence
  Description of Artificial Sequence: Synthetic oligonucleotide
gguccagagccccuauccc

SEQ ID NO: 1250127 - RNA, 19 nt, Artificial Sequence
  Description of Artificial Sequence: Synthetic oligonucleotide
gcagguugggcuuggccgc

SEQ ID NO: 1250128 - RNA, 19 nt, Artificial Sequence
  Description of Artificial Sequence: Synthetic oligonucleotide
cacguggcgccgagcacgg

SEQ ID NO: 1250129 - RNA, 19 nt, Artificial Sequence
  Description of Artificial Sequence: Synthetic oligonucleotide
cagaaggaugggcgguaag

SEQ ID NO: 1250130 - RNA, 19 nt, Artificial Sequence
  Description of Artificial Sequence: Synthetic oligonucleotide
ucacuguaaugcgccgggc

SEQ ID NO: 1250131 - RNA, 19 nt, Artificial Sequence
  Description of Artificial Sequence: Synthetic oligonucleotide
uggccuggugcauucggua

SEQ ID NO: 1250132 - RNA, 19 nt, Artificial Sequence
  Description of Artificial Sequence: Synthetic oligonucleotide
cagggacgugggaaacucc

SEQ ID NO: 1250133 - RNA, 19 nt, Artificial Sequence
  Description of Artificial Sequence: Synthetic oligonucleotide
uccuucccgacugauccuc

SEQ ID NO: 1250134 - RNA, 19 nt, Artificial Sequence
  Description of Artificial Sequence: Synthetic oligonucleotide
uagcggcgacuacagugca

SEQ ID NO: 1250135 - RNA, 19 nt, Artificial Sequence
  Description of Artificial Sequence: Synthetic oligonucleotide
acucuucgaucauggcccu

SEQ ID NO: 1250136 - RNA, 19 nt, Artificial Sequence
  Description of Artificial Sequence: Synthetic oligonucleotide
ccugaagguuguagggugc

SEQ ID NO: 1250137 - RNA, 19 nt, Artificial Sequence
  Description of Artificial Sequence: Synthetic oligonucleotide
uguaaugcgccgggccuuc

SEQ ID NO: 1250138 - RNA, 19 nt, Artificial Sequence
  Description of Artificial Sequence: Synthetic oligonucleotide
ggcaaagcuacagguguug

SEQ ID NO: 1250139 - RNA, 19 nt, Artificial Sequence
  Description of Artificial Sequence: Synthetic oligonucleotide
gacaguggcucaggcucag

SEQ ID NO: 1250140 - RNA, 19 nt, Artificial Sequence
  Description of Artificial Sequence: Synthetic oligonucleotide
gcccgugucuauaaguagc

SEQ ID NO: 1250141 - RNA, 19 nt, Artificial Sequence
  Description of Artificial Sequence: Synthetic oligonucleotide
gaugacagcaaugccucau

SEQ ID NO: 1250142 - RNA, 19 nt, Artificial Sequence
  Description of Artificial Sequence: Synthetic oligonucleotide
gccuuaaucacagcugaca

SEQ ID NO: 1250143 - RNA, 19 nt, Artificial Sequence
  Description of Artificial Sequence: Synthetic oligonucleotide
uggcccuaaagugcucugu

SEQ ID NO: 1250144 - RNA, 19 nt, Artificial Sequence
  Description of Artificial Sequence: Synthetic oligonucleotide
ucugguggacucgcagccu

SEQ ID NO: 1250145 - RNA, 19 nt, Artificial Sequence
  Description of Artificial Sequence: Synthetic oligonucleotide
caguacgggagucacagau

SEQ ID NO: 1250146 - RNA, 19 nt, Artificial Sequence
  Description of Artificial Sequence: Synthetic oligonucleotide
ccaguucuaucagagccgc

SEQ ID NO: 1250147 - RNA, 19 nt, Artificial Sequence
  Description of Artificial Sequence: Synthetic oligonucleotide
gccccuauccccugguccc

SEQ ID NO: 1250148 - RNA, 19 nt, Artificial Sequence
  Description of Artificial Sequence: Synthetic oligonucleotide
gcaguagcggcgacuacag

SEQ ID NO: 1250149 - RNA, 19 nt, Artificial Sequence
  Description of Artificial Sequence: Synthetic oligonucleotide
acgaugucauccagguacu

SEQ ID NO: 1250150 - RNA, 19 nt, Artificial Sequence
  Description of Artificial Sequence: Synthetic oligonucleotide
cagccguggaucucgggca

SEQ ID NO: 1250151 - RNA, 19 nt, Artificial Sequence
  Description of Artificial Sequence: Synthetic oligonucleotide
cagcuaucugguggacucg

SEQ ID NO: 1250152 - RNA, 19 nt, Artificial Sequence
  Description of Artificial Sequence: Synthetic oligonucleotide
acaguacgggagucacaga

SEQ ID NO: 1250153 - RNA, 19 nt, Artificial Sequence
  Description of Artificial Sequence: Synthetic oligonucleotide
gcgaugacagcaaugccuc

SEQ ID NO: 1250154 - RNA, 19 nt, Artificial Sequence
  Description of Artificial Sequence: Synthetic oligonucleotide
cuggccgagcacuuggcaa

SEQ ID NO: 1250155 - RNA, 19 nt, Artificial Sequence
  Description of Artificial Sequence: Synthetic oligonucleotide
cugagcucgcccagccuuc

SEQ ID NO: 1250156 - RNA, 19 nt, Artificial Sequence
  Description of Artificial Sequence: Synthetic oligonucleotide
guacucaaaggcugugcgu

SEQ ID NO: 1250157 - RNA, 19 nt, Artificial Sequence
  Description of Artificial Sequence: Synthetic oligonucleotide
gguuguagggugcgaugac

SEQ ID NO: 1250158 - RNA, 19 nt, Artificial Sequence
  Description of Artificial Sequence: Synthetic oligonucleotide
gaagguuguagggugcgau

SEQ ID NO: 1250159 - RNA, 19 nt, Artificial Sequence
  Description of Artificial Sequence: Synthetic oligonucleotide
cuuuggcugcugagcucgc

SEQ ID NO: 1250160 - RNA, 19 nt, Artificial Sequence
  Description of Artificial Sequence: Synthetic oligonucleotide
cugugcguaccuccccaug

SEQ ID NO: 1250161 - RNA, 19 nt, Artificial Sequence
  Description of Artificial Sequence: Synthetic oligonucleotide
caugguacauggccuccga

SEQ ID NO: 1250162 - RNA, 19 nt, Artificial Sequence
  Description of Artificial Sequence: Synthetic oligonucleotide
cuguugagcuuucuguggu

SEQ ID NO: 1250163 - RNA, 19 nt, Artificial Sequence
  Description of Artificial Sequence: Synthetic oligonucleotide
uccgaggcccagcgcguga

SEQ ID NO: 1250164 - RNA, 19 nt, Artificial Sequence
  Description of Artificial Sequence: Synthetic oligonucleotide
uccccggugcugucaugcc

SEQ ID NO: 1250165 - RNA, 19 nt, Artificial Sequence
  Description of Artificial Sequence: Synthetic oligonucleotide
cucagcccugcaugaggac

SEQ ID NO: 1250166 - RNA, 19 nt, Artificial Sequence
  Description of Artificial Sequence: Synthetic oligonucleotide
cacagccguggaucucggg

SEQ ID NO: 1250167 - RNA, 19 nt, Artificial Sequence
  Description of Artificial Sequence: Synthetic oligonucleotide
acaccugguugcgccuugg

SEQ ID NO: 1250168 - RNA, 19 nt, Artificial Sequence
  Description of Artificial Sequence: Synthetic oligonucleotide
caacauugauccgccuguc

SEQ ID NO: 1250169 - RNA, 19 nt, Artificial Sequence
  Description of Artificial Sequence: Synthetic oligonucleotide
  modified_base (16)..(16): a, c, u, g, unknown or other
cucucggccuuggaancca

SEQ ID NO: 1250170 - RNA, 19 nt, Artificial Sequence
  Description of Artificial Sequence: Synthetic oligonucleotide
cugucgcuccaguucuauc

SEQ ID NO: 1250171 - RNA, 19 nt, Artificial Sequence
  Description of Artificial Sequence: Synthetic oligonucleotide
gaugggcgguaagcugucc

SEQ ID NO: 1250172 - RNA, 19 nt, Artificial Sequence
  Description of Artificial Sequence: Synthetic oligonucleotide
gcggcgacuacagugcaug

SEQ ID NO: 1250173 - RNA, 19 nt, Artificial Sequence
  Description of Artificial Sequence: Synthetic oligonucleotide
cucgcagggcagagccggg

SEQ ID NO: 1250174 - RNA, 19 nt, Artificial Sequence
  Description of Artificial Sequence: Synthetic oligonucleotide
agcacuuggcaaagcuaca

SEQ ID NO: 1250175 - RNA, 19 nt, Artificial Sequence
  Description of Artificial Sequence: Synthetic oligonucleotide
ggccuggugcauucgguac

SEQ ID NO: 1250176 - RNA, 19 nt, Artificial Sequence
  Description of Artificial Sequence: Synthetic oligonucleotide
ccugcaugaggacguggcc

SEQ ID NO: 1250177 - RNA, 19 nt, Artificial Sequence
  Description of Artificial Sequence: Synthetic oligonucleotide
uccugcggcccuguccagc

SEQ ID NO: 1250178 - RNA, 19 nt, Artificial Sequence
  Description of Artificial Sequence: Synthetic oligonucleotide
ccacguggcgccgagcacg

SEQ ID NO: 1250179 - RNA, 19 nt, Artificial Sequence
  Description of Artificial Sequence: Synthetic oligonucleotide
agggugcgaugacagcaau

SEQ ID NO: 1250180 - RNA, 19 nt, Artificial Sequence
  Description of Artificial Sequence: Synthetic oligonucleotide
caucgaaguccuccucgca

SEQ ID NO: 1250181 - RNA, 19 nt, Artificial Sequence
  Description of Artificial Sequence: Synthetic oligonucleotide
agccagcccgugucuauaa

SEQ ID NO: 1250182 - RNA, 19 nt, Artificial Sequence
  Description of Artificial Sequence: Synthetic oligonucleotide
  modified_base (5)..(5): a, c, u, g, unknown or other
ggaanccaucaacagacuu

SEQ ID NO: 1250183 - RNA, 19 nt, Artificial Sequence
  Description of Artificial Sequence: Synthetic oligonucleotide
acagaaggaugggcgguaa

SEQ ID NO: 1250184 - RNA, 19 nt, Artificial Sequence
  Description of Artificial Sequence: Synthetic oligonucleotide
cccgacugauccucugccg

SEQ ID NO: 1250185 - RNA, 19 nt, Artificial Sequence
  Description of Artificial Sequence: Synthetic oligonucleotide
ccucgcagggcagagccgg

SEQ ID NO: 1250186 - RNA, 19 nt, Artificial Sequence
  Description of Artificial Sequence: Synthetic oligonucleotide
ggacucgcagccugucgug

SEQ ID NO: 1250187 - RNA, 19 nt, Artificial Sequence
  Description of Artificial Sequence: Synthetic oligonucleotide
ccucacuguaaugcgccgg

SEQ ID NO: 1250188 - RNA, 19 nt, Artificial Sequence
  Description of Artificial Sequence: Synthetic oligonucleotide
  modified_base (15)..(15): a, c, u, g, unknown or other
ucucggccuuggaanccau

SEQ ID NO: 1250189 - RNA, 19 nt, Artificial Sequence
  Description of Artificial Sequence: Synthetic oligonucleotide
ugacugccacguggcgccg

SEQ ID NO: 1250190 - RNA, 19 nt, Artificial Sequence
  Description of Artificial Sequence: Synthetic oligonucleotide
cacugcccgcauagaguac

SEQ ID NO: 1250191 - RNA, 19 nt, Artificial Sequence
  Description of Artificial Sequence: Synthetic oligonucleotide
cugcccgcauagaguacuc

SEQ ID NO: 1250192 - RNA, 19 nt, Artificial Sequence
  Description of Artificial Sequence: Synthetic oligonucleotide
uggcgccgagcacggguga

SEQ ID NO: 1250193 - RNA, 19 nt, Artificial Sequence
  Description of Artificial Sequence: Synthetic oligonucleotide
  modified_base (2)..(2): a, c, u, g, unknown or other
anccaucaacagacuuaau

SEQ ID NO: 1250194 - RNA, 19 nt, Artificial Sequence
  Description of Artificial Sequence: Synthetic oligonucleotide
uuccugcggcccuguccag

SEQ ID NO: 1250195 - RNA, 19 nt, Artificial Sequence
  Description of Artificial Sequence: Synthetic oligonucleotide
ggagcccucauggguguag

SEQ ID NO: 1250196 - RNA, 19 nt, Artificial Sequence
  Description of Artificial Sequence: Synthetic oligonucleotide
augcgccgggccuuccccu

SEQ ID NO: 1250197 - RNA, 19 nt, Artificial Sequence
  Description of Artificial Sequence: Synthetic oligonucleotide
cucgcccagccuucuuguc

SEQ ID NO: 1250198 - RNA, 19 nt, Artificial Sequence
  Description of Artificial Sequence: Synthetic oligonucleotide
ggcugugcguaccucccca

SEQ ID NO: 1250199 - RNA, 19 nt, Artificial Sequence
  Description of Artificial Sequence: Synthetic oligonucleotide
cugcaugaggacguggccu

SEQ ID NO: 1250200 - RNA, 19 nt, Artificial Sequence
  Description of Artificial Sequence: Synthetic oligonucleotide
gagccccuauccccugguc

SEQ ID NO: 1250201 - RNA, 19 nt, Artificial Sequence
  Description of Artificial Sequence: Synthetic oligonucleotide
gcccucauggguguaguuc

SEQ ID NO: 1250202 - RNA, 19 nt, Artificial Sequence
  Description of Artificial Sequence: Synthetic oligonucleotide
cucgcagccugucguggga

SEQ ID NO: 1250203 - RNA, 19 nt, Artificial Sequence
  Description of Artificial Sequence: Synthetic oligonucleotide
ggucgcaaacccacaccug

SEQ ID NO: 1250204 - RNA, 19 nt, Artificial Sequence
  Description of Artificial Sequence: Synthetic oligonucleotide
ugcgccgggccuuccccuc

SEQ ID NO: 1250205 - RNA, 19 nt, Artificial Sequence
  Description of Artificial Sequence: Synthetic oligonucleotide
ggcgacuacagugcaugca

SEQ ID NO: 1250206 - RNA, 19 nt, Artificial Sequence
  Description of Artificial Sequence: Synthetic oligonucleotide
gcucgagccuuuucaccac

SEQ ID NO: 1250207 - RNA, 19 nt, Artificial Sequence
  Description of Artificial Sequence: Synthetic oligonucleotide
cuacagguguugucagccu

SEQ ID NO: 1250208 - RNA, 19 nt, Artificial Sequence
  Description of Artificial Sequence: Synthetic oligonucleotide
cauggcccuaaagugcucu

SEQ ID NO: 1250209 - RNA, 19 nt, Artificial Sequence
  Description of Artificial Sequence: Synthetic oligonucleotide
ccugucgugggagcucagg

SEQ ID NO: 1250210 - RNA, 19 nt, Artificial Sequence
  Description of Artificial Sequence: Synthetic oligonucleotide
ugacgccuugcuggccaca

SEQ ID NO: 1250211 - RNA, 19 nt, Artificial Sequence
  Description of Artificial Sequence: Synthetic oligonucleotide
cacggcuauggcccuggga

SEQ ID NO: 1250212 - RNA, 19 nt, Artificial Sequence
  Description of Artificial Sequence: Synthetic oligonucleotide
cugugacgccuugcuggcc

SEQ ID NO: 1250213 - RNA, 19 nt, Artificial Sequence
  Description of Artificial Sequence: Synthetic oligonucleotide
ccacugcccgcauagagua

SEQ ID NO: 1250214 - RNA, 19 nt, Artificial Sequence
  Description of Artificial Sequence: Synthetic oligonucleotide
agcccucauggguguaguu

SEQ ID NO: 1250215 - RNA, 19 nt, Artificial Sequence
  Description of Artificial Sequence: Synthetic oligonucleotide
gugcguaccuccccaugcu

SEQ ID NO: 1250216 - RNA, 19 nt, Artificial Sequence
  Description of Artificial Sequence: Synthetic oligonucleotide
gccggggcuggaccuuucg

SEQ ID NO: 1250217 - RNA, 19 nt, Artificial Sequence
  Description of Artificial Sequence: Synthetic oligonucleotide
ccuggugcauucgguacug

SEQ ID NO: 1250218 - RNA, 19 nt, Artificial Sequence
  Description of Artificial Sequence: Synthetic oligonucleotide
caccugaagguuguagggu

SEQ ID NO: 1250219 - RNA, 19 nt, Artificial Sequence
  Description of Artificial Sequence: Synthetic oligonucleotide
guaaugcgccgggccuucc

SEQ ID NO: 1250220 - RNA, 19 nt, Artificial Sequence
  Description of Artificial Sequence: Synthetic oligonucleotide
ugguugcgccuuggcaggu

SEQ ID NO: 1250221 - RNA, 19 nt, Artificial Sequence
  Description of Artificial Sequence: Synthetic oligonucleotide
gggcgguaagcuguccaug

SEQ ID NO: 1250222 - RNA, 19 nt, Artificial Sequence
  Description of Artificial Sequence: Synthetic oligonucleotide
gcugaggcaguagcggcga

SEQ ID NO: 1250223 - RNA, 19 nt, Artificial Sequence
  Description of Artificial Sequence: Synthetic oligonucleotide
ggccgagcacuuggcaaag

SEQ ID NO: 1250224 - RNA, 19 nt, Artificial Sequence
  Description of Artificial Sequence: Synthetic oligonucleotide
gcccgcauagaguacuccu

SEQ ID NO: 1250225 - RNA, 19 nt, Artificial Sequence
  Description of Artificial Sequence: Synthetic oligonucleotide
ggaucucgggcaggugaug

SEQ ID NO: 1250226 - RNA, 19 nt, Artificial Sequence
  Description of Artificial Sequence: Synthetic oligonucleotide
cagguguugucagccuuaa

SEQ ID NO: 1250227 - RNA, 19 nt, Artificial Sequence
  Description of Artificial Sequence: Synthetic oligonucleotide
uggccgcccugcugucucu

SEQ ID NO: 1250228 - RNA, 19 nt, Artificial Sequence
  Description of Artificial Sequence: Synthetic oligonucleotide
acgccuugcuggccacaaa

SEQ ID NO: 1250229 - RNA, 19 nt, Artificial Sequence
  Description of Artificial Sequence: Synthetic oligonucleotide
cagagccgcuugcacugga

SEQ ID NO: 1250230 - RNA, 19 nt, Artificial Sequence
  Description of Artificial Sequence: Synthetic oligonucleotide
gcccuaaagugcucugugu

SEQ ID NO: 1250231 - RNA, 19 nt, Artificial Sequence
  Description of Artificial Sequence: Synthetic oligonucleotide
cugcggcccuguccagcag

SEQ ID NO: 1250232 - RNA, 19 nt, Artificial Sequence
  Description of Artificial Sequence: Synthetic oligonucleotide
ggggcuggaccuuucguuu

SEQ ID NO: 1250233 - RNA, 19 nt, Artificial Sequence
  Description of Artificial Sequence: Synthetic oligonucleotide
agcggcgacuacagugcau

SEQ ID NO: 1250234 - RNA, 19 nt, Artificial Sequence
  Description of Artificial Sequence: Synthetic oligonucleotide
gagcccucauggguguagu

SEQ ID NO: 1250235 - RNA, 19 nt, Artificial Sequence
  Description of Artificial Sequence: Synthetic oligonucleotide
ggaugggcgguaagcuguc

SEQ ID NO: 1250236 - RNA, 19 nt, Artificial Sequence
  Description of Artificial Sequence: Synthetic oligonucleotide
guggucugucgcuccaguu

SEQ ID NO: 1250237 - RNA, 19 nt, Artificial Sequence
  Description of Artificial Sequence: Synthetic oligonucleotide
ccugcggcccuguccagca

SEQ ID NO: 1250238 - RNA, 19 nt, Artificial Sequence
  Description of Artificial Sequence: Synthetic oligonucleotide
ggcuggaccuuucguuucu

SEQ ID NO: 1250239 - RNA, 19 nt, Artificial Sequence
  Description of Artificial Sequence: Synthetic oligonucleotide
cggcuauggcccugggagc

SEQ ID NO: 1250240 - RNA, 19 nt, Artificial Sequence
  Description of Artificial Sequence: Synthetic oligonucleotide
cucagggacgugggaaacu

SEQ ID NO: 1250241 - RNA, 19 nt, Artificial Sequence
  Description of Artificial Sequence: Synthetic oligonucleotide
gcuaucugguggacucgca

SEQ ID NO: 1250242 - RNA, 19 nt, Artificial Sequence
  Description of Artificial Sequence: Synthetic oligonucleotide
ugggcccucuuggccgggu

SEQ ID NO: 1250243 - RNA, 19 nt, Artificial Sequence
  Description of Artificial Sequence: Synthetic oligonucleotide
guggggcuacaccgccaga

SEQ ID NO: 1250244 - RNA, 19 nt, Artificial Sequence
  Description of Artificial Sequence: Synthetic oligonucleotide
agccggggcuggaccuuuc

SEQ ID NO: 1250245 - RNA, 19 nt, Artificial Sequence
  Description of Artificial Sequence: Synthetic oligonucleotide
gcacggcuauggcccuggg

SEQ ID NO: 1250246 - RNA, 19 nt, Artificial Sequence
  Description of Artificial Sequence: Synthetic oligonucleotide
gccacguggcgccgagcac

SEQ ID NO: 1250247 - RNA, 19 nt, Artificial Sequence
  Description of Artificial Sequence: Synthetic oligonucleotide
gcgccuuggcagguugggc

SEQ ID NO: 1250248 - RNA, 19 nt, Artificial Sequence
  Description of Artificial Sequence: Synthetic oligonucleotide
gggacgugggaaacuccaa

SEQ ID NO: 1250249 - RNA, 19 nt, Artificial Sequence
  Description of Artificial Sequence: Synthetic oligonucleotide
cacagccagcccgugucua

SEQ ID NO: 1250250 - RNA, 19 nt, Artificial Sequence
  Description of Artificial Sequence: Synthetic oligonucleotide
guacuccuucccgacugau

SEQ ID NO: 1250251 - RNA, 19 nt, Artificial Sequence
  Description of Artificial Sequence: Synthetic oligonucleotide
gccgagcacgggugacagc

SEQ ID NO: 1250252 - RNA, 19 nt, Artificial Sequence
  Description of Artificial Sequence: Synthetic oligonucleotide
cggcgacuacagugcaugc

SEQ ID NO: 1250253 - RNA, 19 nt, Artificial Sequence
  Description of Artificial Sequence: Synthetic oligonucleotide
acguggcgccgagcacggg

SEQ ID NO: 1250254 - RNA, 19 nt, Artificial Sequence
  Description of Artificial Sequence: Synthetic oligonucleotide
gcguaccuccccaugcucu

SEQ ID NO: 1250255 - RNA, 19 nt, Artificial Sequence
  Description of Artificial Sequence: Synthetic oligonucleotide
guaccuccccaugcucugu

SEQ ID NO: 1250256 - RNA, 19 nt, Artificial Sequence
  Description of Artificial Sequence: Synthetic oligonucleotide
cuauggcccugggagcccu

SEQ ID NO: 1250257 - RNA, 19 nt, Artificial Sequence
  Description of Artificial Sequence: Synthetic oligonucleotide
ccuccucgcagggcagagc

SEQ ID NO: 1250258 - RNA, 19 nt, Artificial Sequence
  Description of Artificial Sequence: Synthetic oligonucleotide
ccgccagaaccugcagggc

SEQ ID NO: 1250259 - RNA, 19 nt, Artificial Sequence
  Description of Artificial Sequence: Synthetic oligonucleotide
ccgugucuauaaguagcca

SEQ ID NO: 1250260 - RNA, 19 nt, Artificial Sequence
  Description of Artificial Sequence: Synthetic oligonucleotide
gcaugaggacguggccuca

SEQ ID NO: 1250261 - RNA, 19 nt, Artificial Sequence
  Description of Artificial Sequence: Synthetic oligonucleotide
ggcgccgagcacgggugac

SEQ ID NO: 1250262 - RNA, 19 nt, Artificial Sequence
  Description of Artificial Sequence: Synthetic oligonucleotide
cgccgagcacgggugacag

SEQ ID NO: 1250263 - RNA, 19 nt, Artificial Sequence
  Description of Artificial Sequence: Synthetic oligonucleotide
caguagcggcgacuacagu

SEQ ID NO: 1250264 - RNA, 19 nt, Artificial Sequence
  Description of Artificial Sequence: Synthetic oligonucleotide
gccgggcgugggcucgagc

SEQ ID NO: 1250265 - RNA, 19 nt, Artificial Sequence
  Description of Artificial Sequence: Synthetic oligonucleotide
cucuucgaucauggcccua

SEQ ID NO: 1250266 - RNA, 19 nt, Artificial Sequence
  Description of Artificial Sequence: Synthetic oligonucleotide
cgaugacagcaaugccuca

SEQ ID NO: 1250267 - RNA, 19 nt, Artificial Sequence
  Description of Artificial Sequence: Synthetic oligonucleotide
cgugggcucgagccuuuuc

SEQ ID NO: 1250268 - RNA, 19 nt, Artificial Sequence
  Description of Artificial Sequence: Synthetic oligonucleotide
cuuggccgcccugcugucu

SEQ ID NO: 1250269 - RNA, 19 nt, Artificial Sequence
  Description of Artificial Sequence: Synthetic oligonucleotide
cccuauccccuggucccac

SEQ ID NO: 1250270 - RNA, 19 nt, Artificial Sequence
  Description of Artificial Sequence: Synthetic oligonucleotide
gcugugcguaccuccccau

SEQ ID NO: 1250271 - RNA, 19 nt, Artificial Sequence
  Description of Artificial Sequence: Synthetic oligonucleotide
ccgcccugcugucucugca

SEQ ID NO: 1250272 - RNA, 19 nt, Artificial Sequence
  Description of Artificial Sequence: Synthetic oligonucleotide
gggcacggcuauggcccug

SEQ ID NO: 1250273 - RNA, 19 nt, Artificial Sequence
  Description of Artificial Sequence: Synthetic oligonucleotide
cguggcgccgagcacgggu

SEQ ID NO: 1250274 - RNA, 19 nt, Artificial Sequence
  Description of Artificial Sequence: Synthetic oligonucleotide
cugccgggcgugggcucga

SEQ ID NO: 1250275 - RNA, 19 nt, Artificial Sequence
  Description of Artificial Sequence: Synthetic oligonucleotide
ccccuauccccugguccca

SEQ ID NO: 1250276 - RNA, 19 nt, Artificial Sequence
  Description of Artificial Sequence: Synthetic oligonucleotide
cgagcacgggugacagcaa

SEQ ID NO: 1250277 - RNA, 19 nt, Artificial Sequence
  Description of Artificial Sequence: Synthetic oligonucleotide
gguugcgccuuggcagguu

SEQ ID NO: 1250278 - RNA, 19 nt, Artificial Sequence
  Description of Artificial Sequence: Synthetic oligonucleotide
ccggguccagagccccuau

SEQ ID NO: 1250279 - RNA, 19 nt, Artificial Sequence
  Description of Artificial Sequence: Synthetic oligonucleotide
gacgguaauaacuacaucg

SEQ ID NO: 1250280 - RNA, 19 nt, Artificial Sequence
  Description of Artificial Sequence: Synthetic oligonucleotide
ugagauguauuucugagcg

SEQ ID NO: 1250281 - RNA, 19 nt, Artificial Sequence
  Description of Artificial Sequence: Synthetic oligonucleotide
aaacggaagauauacugcc

SEQ ID NO: 1250282 - RNA, 19 nt, Artificial Sequence
  Description of Artificial Sequence: Synthetic oligonucleotide
cuaagguugacaaagaaug

SEQ ID NO: 1250283 - RNA, 19 nt, Artificial Sequence
  Description of Artificial Sequence: Synthetic oligonucleotide
ugugaauccacucugacgu

SEQ ID NO: 1250284 - RNA, 19 nt, Artificial Sequence
  Description of Artificial Sequence: Synthetic oligonucleotide
uguugaaagaacccgauac

SEQ ID NO: 1250285 - RNA, 19 nt, Artificial Sequence
  Description of Artificial Sequence: Synthetic oligonucleotide
uaugaugcaaccucaacag

SEQ ID NO: 1250286 - RNA, 19 nt, Artificial Sequence
  Description of Artificial Sequence: Synthetic oligonucleotide
uuuacugaauaucagucug

SEQ ID NO: 1250287 - RNA, 19 nt, Artificial Sequence
  Description of Artificial Sequence: Synthetic oligonucleotide
ucauguuugaacaaccucu

SEQ ID NO: 1250288 - RNA, 19 nt, Artificial Sequence
  Description of Artificial Sequence: Synthetic oligonucleotide
agucgcaacacauuaaauc

SEQ ID NO: 1250289 - RNA, 19 nt, Artificial Sequence
  Description of Artificial Sequence: Synthetic oligonucleotide
ugagggauaaggauguucc

SEQ ID NO: 1250290 - RNA, 19 nt, Artificial Sequence
  Description of Artificial Sequence: Synthetic oligonucleotide
uuuuaucuaaauccugaag

SEQ ID NO: 1250291 - RNA, 19 nt, Artificial Sequence
  Description of Artificial Sequence: Synthetic oligonucleotide
acacguugcaaucaaaauc

SEQ ID NO: 1250292 - RNA, 19 nt, Artificial Sequence
  Description of Artificial Sequence: Synthetic oligonucleotide
uuaucugaaacaguuauga

SEQ ID NO: 1250293 - RNA, 19 nt, Artificial Sequence
  Description of Artificial Sequence: Synthetic oligonucleotide
aucugaaacaguuaugaug

SEQ ID NO: 1250294 - RNA, 19 nt, Artificial Sequence
  Description of Artificial Sequence: Synthetic oligonucleotide
agacucauagaguucaagg

SEQ ID NO: 1250295 - RNA, 19 nt, Artificial Sequence
  Description of Artificial Sequence: Synthetic oligonucleotide
guaauaacuacaucguuug

SEQ ID NO: 1250296 - RNA, 19 nt, Artificial Sequence
  Description of Artificial Sequence: Synthetic oligonucleotide
gauccaucccuuuucauag

SEQ ID NO: 1250297 - RNA, 19 nt, Artificial Sequence
  Description of Artificial Sequence: Synthetic oligonucleotide
aauaacuacaucguuugca

SEQ ID NO: 1250298 - RNA, 19 nt, Artificial Sequence
  Description of Artificial Sequence: Synthetic oligonucleotide
guuaauaucauccgcugug

SEQ ID NO: 1250299 - RNA, 19 nt, Artificial Sequence
  Description of Artificial Sequence: Synthetic oligonucleotide
ugaugcaaccucaacagug

SEQ ID NO: 1250300 - RNA, 19 nt, Artificial Sequence
  Description of Artificial Sequence: Synthetic oligonucleotide
gucgcaacacauuaaaucc

SEQ ID NO: 1250301 - RNA, 19 nt, Artificial Sequence
  Description of Artificial Sequence: Synthetic oligonucleotide
auuuuacugaauaucaguc

SEQ ID NO: 1250302 - RNA, 19 nt, Artificial Sequence
  Description of Artificial Sequence: Synthetic oligonucleotide
ugcaaucaaaaucuuggcc

SEQ ID NO: 1250303 - RNA, 19 nt, Artificial Sequence
  Description of Artificial Sequence: Synthetic oligonucleotide
ugauauuauaguucuaaaa

SEQ ID NO: 1250304 - RNA, 19 nt, Artificial Sequence
  Description of Artificial Sequence: Synthetic oligonucleotide
aaucuacgaaacaauuggc

SEQ ID NO: 1250305 - RNA, 19 nt, Artificial Sequence
  Description of Artificial Sequence: Synthetic oligonucleotide
uguugaaaaguggagagca

SEQ ID NO: 1250306 - RNA, 19 nt, Artificial Sequence
  Description of Artificial Sequence: Synthetic oligonucleotide
uguauuagucgcaacacau

SEQ ID NO: 1250307 - RNA, 19 nt, Artificial Sequence
  Description of Artificial Sequence: Synthetic oligonucleotide
ucuacgaaacaauuggcac

SEQ ID NO: 1250308 - RNA, 19 nt, Artificial Sequence
  Description of Artificial Sequence: Synthetic oligonucleotide
aauuucaucauggcucggg

SEQ ID NO: 1250309 - RNA, 19 nt, Artificial Sequence
  Description of Artificial Sequence: Synthetic oligonucleotide
aguaagaacagcuaauaua

SEQ ID NO: 1250310 - RNA, 19 nt, Artificial Sequence
  Description of Artificial Sequence: Synthetic oligonucleotide
caucguuugcaucugagcc

SEQ ID NO: 1250311 - RNA, 19 nt, Artificial Sequence
  Description of Artificial Sequence: Synthetic oligonucleotide
ucauaguaagaacagcuaa

SEQ ID NO: 1250312 - RNA, 19 nt, Artificial Sequence
  Description of Artificial Sequence: Synthetic oligonucleotide
auuucaucauggcucgggc

SEQ ID NO: 1250313 - RNA, 19 nt, Artificial Sequence
  Description of Artificial Sequence: Synthetic oligonucleotide
aguacaaccuuguuaauau

SEQ ID NO: 1250314 - RNA, 19 nt, Artificial Sequence
  Description of Artificial Sequence: Synthetic oligonucleotide
ugacugaacauuuacuuuc

SEQ ID NO: 1250315 - RNA, 19 nt, Artificial Sequence
  Description of Artificial Sequence: Synthetic oligonucleotide
uuuuacugaauaucagucu

SEQ ID NO: 1250316 - RNA, 19 nt, Artificial Sequence
  Description of Artificial Sequence: Synthetic oligonucleotide
caagaagagcugcagacgg

SEQ ID NO: 1250317 - RNA, 19 nt, Artificial Sequence
  Description of Artificial Sequence: Synthetic oligonucleotide
auaaggauguuccuccaag

SEQ ID NO: 1250318 - RNA, 19 nt, Artificial Sequence
  Description of Artificial Sequence: Synthetic oligonucleotide
caguaucuauuucauaacg

SEQ ID NO: 1250319 - RNA, 19 nt, Artificial Sequence
  Description of Artificial Sequence: Synthetic oligonucleotide
uauuagucgcaacacauua

SEQ ID NO: 1250320 - RNA, 19 nt, Artificial Sequence
  Description of Artificial Sequence: Synthetic oligonucleotide
ucuaucaugagagagucau

SEQ ID NO: 1250321 - RNA, 19 nt, Artificial Sequence
  Description of Artificial Sequence: Synthetic oligonucleotide
acaucguuugcaucugagc

SEQ ID NO: 1250322 - RNA, 19 nt, Artificial Sequence
  Description of Artificial Sequence: Synthetic oligonucleotide
acaauuggcacuuccuaag

SEQ ID NO: 1250323 - RNA, 19 nt, Artificial Sequence
  Description of Artificial Sequence: Synthetic oligonucleotide
uucauaacguaauuuccca

SEQ ID NO: 1250324 - RNA, 19 nt, Artificial Sequence
  Description of Artificial Sequence: Synthetic oligonucleotide
ucauacaaugaaucuacga

SEQ ID NO: 1250325 - RNA, 19 nt, Artificial Sequence
  Description of Artificial Sequence: Synthetic oligonucleotide
ucguguauuagucgcaaca

SEQ ID NO: 1250326 - RNA, 19 nt, Artificial Sequence
  Description of Artificial Sequence: Synthetic oligonucleotide
ugaaguacaaccugugcaa

SEQ ID NO: 1250327 - RNA, 19 nt, Artificial Sequence
  Description of Artificial Sequence: Synthetic oligonucleotide
caaacggaagauauacugc

SEQ ID NO: 1250328 - RNA, 19 nt, Artificial Sequence
  Description of Artificial Sequence: Synthetic oligonucleotide
aauauaucacguaauccgu

SEQ ID NO: 1250329 - RNA, 19 nt, Artificial Sequence
  Description of Artificial Sequence: Synthetic oligonucleotide
acugugaaucuguuggcac

SEQ ID NO: 1250330 - RNA, 19 nt, Artificial Sequence
  Description of Artificial Sequence: Synthetic oligonucleotide
uuagucgcaacacauuaaa

SEQ ID NO: 1250331 - RNA, 19 nt, Artificial Sequence
  Description of Artificial Sequence: Synthetic oligonucleotide
agaaucccggcuucuaugg

SEQ ID NO: 1250332 - RNA, 19 nt, Artificial Sequence
  Description of Artificial Sequence: Synthetic oligonucleotide
aggcaaacggaagauauac

SEQ ID NO: 1250333 - RNA, 19 nt, Artificial Sequence
  Description of Artificial Sequence: Synthetic oligonucleotide
ugcuuguugaaagaacccg

SEQ ID NO: 1250334 - RNA, 19 nt, Artificial Sequence
  Description of Artificial Sequence: Synthetic oligonucleotide
cugaauaucagucuggcaa

SEQ ID NO: 1250335 - RNA, 19 nt, Artificial Sequence
  Description of Artificial Sequence: Synthetic oligonucleotide
aacaauuggcacuuccuaa

SEQ ID NO: 1250336 - RNA, 19 nt, Artificial Sequence
  Description of Artificial Sequence: Synthetic oligonucleotide
agaauguuuggccacuuca

SEQ ID NO: 1250337 - RNA, 19 nt, Artificial Sequence
  Description of Artificial Sequence: Synthetic oligonucleotide
aaacauagcuuauaccauu

SEQ ID NO: 1250338 - RNA, 19 nt, Artificial Sequence
  Description of Artificial Sequence: Synthetic oligonucleotide
uucauacaaugaaucuacg

SEQ ID NO: 1250339 - RNA, 19 nt, Artificial Sequence
  Description of Artificial Sequence: Synthetic oligonucleotide
aaggauguuccuccaagcu

SEQ ID NO: 1250340 - RNA, 19 nt, Artificial Sequence
  Description of Artificial Sequence: Synthetic oligonucleotide
cauacaaugaaucuacgaa

SEQ ID NO: 1250341 - RNA, 19 nt, Artificial Sequence
  Description of Artificial Sequence: Synthetic oligonucleotide
uguccaaucccauaagcaa

SEQ ID NO: 1250342 - RNA, 19 nt, Artificial Sequence
  Description of Artificial Sequence: Synthetic oligonucleotide
auaacuacaucguuugcau

SEQ ID NO: 1250343 - RNA, 19 nt, Artificial Sequence
  Description of Artificial Sequence: Synthetic oligonucleotide
ugaauaucagucuggcaac

SEQ ID NO: 1250344 - RNA, 19 nt, Artificial Sequence
  Description of Artificial Sequence: Synthetic oligonucleotide
aaaucuuggccuucauaca

SEQ ID NO: 1250345 - RNA, 19 nt, Artificial Sequence
  Description of Artificial Sequence: Synthetic oligonucleotide
uaacuaaaauauccuuggc

SEQ ID NO: 1250346 - RNA, 19 nt, Artificial Sequence
  Description of Artificial Sequence: Synthetic oligonucleotide
auaucagucuggcaacauc

SEQ ID NO: 1250347 - RNA, 19 nt, Artificial Sequence
  Description of Artificial Sequence: Synthetic oligonucleotide
aaagaacccgauacauccc

SEQ ID NO: 1250348 - RNA, 19 nt, Artificial Sequence
  Description of Artificial Sequence: Synthetic oligonucleotide
aaugaaucuacgaaacaau

SEQ ID NO: 1250349 - RNA, 19 nt, Artificial Sequence
  Description of Artificial Sequence: Synthetic oligonucleotide
uccuccaagcuuaaauacc

SEQ ID NO: 1250350 - RNA, 19 nt, Artificial Sequence
  Description of Artificial Sequence: Synthetic oligonucleotide
gaacuccgaagccagauac

SEQ ID NO: 1250351 - RNA, 19 nt, Artificial Sequence
  Description of Artificial Sequence: Synthetic oligonucleotide
acucuaucaugagagaguc

SEQ ID NO: 1250352 - RNA, 19 nt, Artificial Sequence
  Description of Artificial Sequence: Synthetic oligonucleotide
uggauuaacaaguuuuguu

SEQ ID NO: 1250353 - RNA, 19 nt, Artificial Sequence
  Description of Artificial Sequence: Synthetic oligonucleotide
agauguauuucugagcgug

SEQ ID NO: 1250354 - RNA, 19 nt, Artificial Sequence
  Description of Artificial Sequence: Synthetic oligonucleotide
aauuggcacuuccuaaggu

SEQ ID NO: 1250355 - RNA, 19 nt, Artificial Sequence
  Description of Artificial Sequence: Synthetic oligonucleotide
uguuaauaucauccgcugu

SEQ ID NO: 1250356 - RNA, 19 nt, Artificial Sequence
  Description of Artificial Sequence: Synthetic oligonucleotide
gauucaucgaccccuuaac

SEQ ID NO: 1250357 - RNA, 19 nt, Artificial Sequence
  Description of Artificial Sequence: Synthetic oligonucleotide
ucaucgaccccuuaacuaa

SEQ ID NO: 1250358 - RNA, 19 nt, Artificial Sequence
  Description of Artificial Sequence: Synthetic oligonucleotide
uaagguugacaaagaaugu

SEQ ID NO: 1250359 - RNA, 19 nt, Artificial Sequence
  Description of Artificial Sequence: Synthetic oligonucleotide
aacccgauacaucccacug

SEQ ID NO: 1250360 - RNA, 19 nt, Artificial Sequence
  Description of Artificial Sequence: Synthetic oligonucleotide
ucuugaagacccaccacac

SEQ ID NO: 1250361 - RNA, 19 nt, Artificial Sequence
  Description of Artificial Sequence: Synthetic oligonucleotide
uacaucguuugcaucugag

SEQ ID NO: 1250362 - RNA, 19 nt, Artificial Sequence
  Description of Artificial Sequence: Synthetic oligonucleotide
gcaaacggaagauauacug

SEQ ID NO: 1250363 - RNA, 19 nt, Artificial Sequence
  Description of Artificial Sequence: Synthetic oligonucleotide
auaucacguaauccguuuc

SEQ ID NO: 1250364 - RNA, 19 nt, Artificial Sequence
  Description of Artificial Sequence: Synthetic oligonucleotide
aaucccggcuucuauggcu

SEQ ID NO: 1250365 - RNA, 19 nt, Artificial Sequence
  Description of Artificial Sequence: Synthetic oligonucleotide
uaucacguaauccguuucu

SEQ ID NO: 1250366 - RNA, 19 nt, Artificial Sequence
  Description of Artificial Sequence: Synthetic oligonucleotide
aacaguuaugaugcaaccu

SEQ ID NO: 1250367 - RNA, 19 nt, Artificial Sequence
  Description of Artificial Sequence: Synthetic oligonucleotide
uuggcugaacacucuauca

SEQ ID NO: 1250368 - RNA, 19 nt, Artificial Sequence
  Description of Artificial Sequence: Synthetic oligonucleotide
aaacauugcucuucccggu

SEQ ID NO: 1250369 - RNA, 19 nt, Artificial Sequence
  Description of Artificial Sequence: Synthetic oligonucleotide
ugggcuaagguuucuguga

SEQ ID NO: 1250370 - RNA, 19 nt, Artificial Sequence
  Description of Artificial Sequence: Synthetic oligonucleotide
uacaaccugugcaaacuug

SEQ ID NO: 1250371 - RNA, 19 nt, Artificial Sequence
  Description of Artificial Sequence: Synthetic oligonucleotide
gagagagucauccacugaa

SEQ ID NO: 1250372 - RNA, 19 nt, Artificial Sequence
  Description of Artificial Sequence: Synthetic oligonucleotide
aauccagcggcuccagcug

SEQ ID NO: 1250373 - RNA, 19 nt, Artificial Sequence
  Description of Artificial Sequence: Synthetic oligonucleotide
uuagcagaguucuuccccu

SEQ ID NO: 1250374 - RNA, 19 nt, Artificial Sequence
  Description of Artificial Sequence: Synthetic oligonucleotide
uaguaagaacagcuaauau

SEQ ID NO: 1250375 - RNA, 19 nt, Artificial Sequence
  Description of Artificial Sequence: Synthetic oligonucleotide
caugucacuuguaaagauc

SEQ ID NO: 1250376 - RNA, 19 nt, Artificial Sequence
  Description of Artificial Sequence: Synthetic oligonucleotide
cauaagcaagaagagcugc

SEQ ID NO: 1250377 - RNA, 19 nt, Artificial Sequence
  Description of Artificial Sequence: Synthetic oligonucleotide
aacacucuaucaugagaga

SEQ ID NO: 1250378 - RNA, 19 nt, Artificial Sequence
  Description of Artificial Sequence: Synthetic oligonucleotide
ugguguugauauuauaguu

SEQ ID NO: 1250379 - RNA, 19 nt, Artificial Sequence
  Description of Artificial Sequence: Synthetic oligonucleotide
ucgcaacacauuaaaucca

SEQ ID NO: 1250380 - RNA, 19 nt, Artificial Sequence
  Description of Artificial Sequence: Synthetic oligonucleotide
uugaaagaacccgauacau

SEQ ID NO: 1250381 - RNA, 19 nt, Artificial Sequence
  Description of Artificial Sequence: Synthetic oligonucleotide
ugcaccaauagggaugacc

SEQ ID NO: 1250382 - RNA, 19 nt, Artificial Sequence
  Description of Artificial Sequence: Synthetic oligonucleotide
cugugaaucuguuggcacc

SEQ ID NO: 1250383 - RNA, 19 nt, Artificial Sequence
  Description of Artificial Sequence: Synthetic oligonucleotide
guaucuauuucauaacgua

SEQ ID NO: 1250384 - RNA, 19 nt, Artificial Sequence
  Description of Artificial Sequence: Synthetic oligonucleotide
uucaucgaccccuuaacua

SEQ ID NO: 1250385 - RNA, 19 nt, Artificial Sequence
  Description of Artificial Sequence: Synthetic oligonucleotide
aaacaguacugugaaucug

SEQ ID NO: 1250386 - RNA, 19 nt, Artificial Sequence
  Description of Artificial Sequence: Synthetic oligonucleotide
uauaucacguaauccguuu

SEQ ID NO: 1250387 - RNA, 19 nt, Artificial Sequence
  Description of Artificial Sequence: Synthetic oligonucleotide
agggauaaggauguuccuc

SEQ ID NO: 1250388 - RNA, 19 nt, Artificial Sequence
  Description of Artificial Sequence: Synthetic oligonucleotide
gauggccucacauuuucca

SEQ ID NO: 1250389 - RNA, 19 nt, Artificial Sequence
  Description of Artificial Sequence: Synthetic oligonucleotide
caauuggcacuuccuaagg

SEQ ID NO: 1250390 - RNA, 19 nt, Artificial Sequence
  Description of Artificial Sequence: Synthetic oligonucleotide
cacguugcaaucaaaaucu

SEQ ID NO: 1250391 - RNA, 19 nt, Artificial Sequence
  Description of Artificial Sequence: Synthetic oligonucleotide
guugaaagaacccgauaca

SEQ ID NO: 1250392 - RNA, 19 nt, Artificial Sequence
  Description of Artificial Sequence: Synthetic oligonucleotide
ugacguaggaguucucgga

SEQ ID NO: 1250393 - RNA, 19 nt, Artificial Sequence
  Description of Artificial Sequence: Synthetic oligonucleotide
cugacguaggaguucucgg

SEQ ID NO: 1250394 - RNA, 19 nt, Artificial Sequence
  Description of Artificial Sequence: Synthetic oligonucleotide
ugugcaugucacuuguaaa

SEQ ID NO: 1250395 - RNA, 19 nt, Artificial Sequence
  Description of Artificial Sequence: Synthetic oligonucleotide
accaauagggaugaccuca

SEQ ID NO: 1250396 - RNA, 19 nt, Artificial Sequence
  Description of Artificial Sequence: Synthetic oligonucleotide
accacggcagcucaacgag

SEQ ID NO: 1250397 - RNA, 19 nt, Artificial Sequence
  Description of Artificial Sequence: Synthetic oligonucleotide
aaaucaaaugggacgguaa

SEQ ID NO: 1250398 - RNA, 19 nt, Artificial Sequence
  Description of Artificial Sequence: Synthetic oligonucleotide
aaaaucaaaugggacggua

SEQ ID NO: 1250399 - RNA, 19 nt, Artificial Sequence
  Description of Artificial Sequence: Synthetic oligonucleotide
cuuguaaagauccaucccu

SEQ ID NO: 1250400 - RNA, 19 nt, Artificial Sequence
  Description of Artificial Sequence: Synthetic oligonucleotide
acaccgaucgccgccaugg

SEQ ID NO: 1250401 - RNA, 19 nt, Artificial Sequence
  Description of Artificial Sequence: Synthetic oligonucleotide
ugaaucuguuggcaccuga

SEQ ID NO: 1250402 - RNA, 19 nt, Artificial Sequence
  Description of Artificial Sequence: Synthetic oligonucleotide
cacggcagcucaacgaggg

SEQ ID NO: 1250403 - RNA, 19 nt, Artificial Sequence
  Description of Artificial Sequence: Synthetic oligonucleotide
ugaaacaguuaugaugcaa

SEQ ID NO: 1250404 - RNA, 19 nt, Artificial Sequence
  Description of Artificial Sequence: Synthetic oligonucleotide
aacaaccucuggaacuccg

SEQ ID NO: 1250405 - RNA, 19 nt, Artificial Sequence
  Description of Artificial Sequence: Synthetic oligonucleotide
uuuacucuauccccugcau

SEQ ID NO: 1250406 - RNA, 19 nt, Artificial Sequence
  Description of Artificial Sequence: Synthetic oligonucleotide
auucaucgaccccuuaacu

SEQ ID NO: 1250407 - RNA, 19 nt, Artificial Sequence
  Description of Artificial Sequence: Synthetic oligonucleotide
ugaacaaccucuggaacuc

SEQ ID NO: 1250408 - RNA, 19 nt, Artificial Sequence
  Description of Artificial Sequence: Synthetic oligonucleotide
acacaggccgaugugcagc

SEQ ID NO: 1250409 - RNA, 19 nt, Artificial Sequence
  Description of Artificial Sequence: Synthetic oligonucleotide
uacuuucugagauguauuu

SEQ ID NO: 1250410 - RNA, 19 nt, Artificial Sequence
  Description of Artificial Sequence: Synthetic oligonucleotide
uuucaucauggcucgggca

SEQ ID NO: 1250411 - RNA, 19 nt, Artificial Sequence
  Description of Artificial Sequence: Synthetic oligonucleotide
auuggcacuuccuaagguu

SEQ ID NO: 1250412 - RNA, 19 nt, Artificial Sequence
  Description of Artificial Sequence: Synthetic oligonucleotide
cacuuauacacaaaaccaa

SEQ ID NO: 1250413 - RNA, 19 nt, Artificial Sequence
  Description of Artificial Sequence: Synthetic oligonucleotide
ucggacugcuucuauacau

SEQ ID NO: 1250414 - RNA, 19 nt, Artificial Sequence
  Description of Artificial Sequence: Synthetic oligonucleotide
cuuggucugugcaugucac

SEQ ID NO: 1250415 - RNA, 19 nt, Artificial Sequence
  Description of Artificial Sequence: Synthetic oligonucleotide
cuaagguuucugugaaaug

SEQ ID NO: 1250416 - RNA, 19 nt, Artificial Sequence
  Description of Artificial Sequence: Synthetic oligonucleotide
gacguaggaguucucggac

SEQ ID NO: 1250417 - RNA, 19 nt, Artificial Sequence
  Description of Artificial Sequence: Synthetic oligonucleotide
ucauaacguaauuucccau

SEQ ID NO: 1250418 - RNA, 19 nt, Artificial Sequence
  Description of Artificial Sequence: Synthetic oligonucleotide
aucuacgaaacaauuggca

SEQ ID NO: 1250419 - RNA, 19 nt, Artificial Sequence
  Description of Artificial Sequence: Synthetic oligonucleotide
auggcucgggcauuucuuc

SEQ ID NO: 1250420 - RNA, 19 nt, Artificial Sequence
  Description of Artificial Sequence: Synthetic oligonucleotide
uuccuaagguugacaaaga

SEQ ID NO: 1250421 - RNA, 19 nt, Artificial Sequence
  Description of Artificial Sequence: Synthetic oligonucleotide
acggcucguguauuagucg

SEQ ID NO: 1250422 - RNA, 19 nt, Artificial Sequence
  Description of Artificial Sequence: Synthetic oligonucleotide
uacgaaacaauuggcacuu

SEQ ID NO: 1250423 - RNA, 19 nt, Artificial Sequence
  Description of Artificial Sequence: Synthetic oligonucleotide
ugagagagucauccacuga

SEQ ID NO: 1250424 - RNA, 19 nt, Artificial Sequence
  Description of Artificial Sequence: Synthetic oligonucleotide
gaugcaaccucaacaguga

SEQ ID NO: 1250425 - RNA, 19 nt, Artificial Sequence
  Description of Artificial Sequence: Synthetic oligonucleotide
acauugcucuucccgguag

SEQ ID NO: 1250426 - RNA, 19 nt, Artificial Sequence
  Description of Artificial Sequence: Synthetic oligonucleotide
cuauggcugcaccaauagg

SEQ ID NO: 1250427 - RNA, 19 nt, Artificial Sequence
  Description of Artificial Sequence: Synthetic oligonucleotide
ucguuugcaucugagccca

SEQ ID NO: 1250428 - RNA, 19 nt, Artificial Sequence
  Description of Artificial Sequence: Synthetic oligonucleotide
agagaucuuuaaucagcug

SEQ ID NO: 1250429 - RNA, 19 nt, Artificial Sequence
  Description of Artificial Sequence: Synthetic oligonucleotide
caacgagggacccuucagc

SEQ ID NO: 1250430 - RNA, 19 nt, Artificial Sequence
  Description of Artificial Sequence: Synthetic oligonucleotide
acuccgaagccagauacug

SEQ ID NO: 1250431 - RNA, 19 nt, Artificial Sequence
  Description of Artificial Sequence: Synthetic oligonucleotide
ucauccgcugugaauccac

SEQ ID NO: 1250432 - RNA, 19 nt, Artificial Sequence
  Description of Artificial Sequence: Synthetic oligonucleotide
gguguugauauuauaguuc

SEQ ID NO: 1250433 - RNA, 19 nt, Artificial Sequence
  Description of Artificial Sequence: Synthetic oligonucleotide
ucauagaguucaaggcaaa

SEQ ID NO: 1250434 - RNA, 19 nt, Artificial Sequence
  Description of Artificial Sequence: Synthetic oligonucleotide
ugcuuuacucuauccccug

SEQ ID NO: 1250435 - RNA, 19 nt, Artificial Sequence
  Description of Artificial Sequence: Synthetic oligonucleotide
uuguugaaagaacccgaua

SEQ ID NO: 1250436 - RNA, 19 nt, Artificial Sequence
  Description of Artificial Sequence: Synthetic oligonucleotide
acgguaauaacuacaucgu

SEQ ID NO: 1250437 - RNA, 19 nt, Artificial Sequence
  Description of Artificial Sequence: Synthetic oligonucleotide
ucauggcucgggcauuucu

SEQ ID NO: 1250438 - RNA, 19 nt, Artificial Sequence
  Description of Artificial Sequence: Synthetic oligonucleotide
ugauggccucacauuuucc

SEQ ID NO: 1250439 - RNA, 19 nt, Artificial Sequence
  Description of Artificial Sequence: Synthetic oligonucleotide
aauaucagucuggcaacau

SEQ ID NO: 1250440 - RNA, 19 nt, Artificial Sequence
  Description of Artificial Sequence: Synthetic oligonucleotide
aacauugcucuucccggua

SEQ ID NO: 1250441 - RNA, 19 nt, Artificial Sequence
  Description of Artificial Sequence: Synthetic oligonucleotide
uauacugccaggggcuugu

SEQ ID NO: 1250442 - RNA, 19 nt, Artificial Sequence
  Description of Artificial Sequence: Synthetic oligonucleotide
agaccacggcagcucaacg

SEQ ID NO: 1250443 - RNA, 19 nt, Artificial Sequence
  Description of Artificial Sequence: Synthetic oligonucleotide
cagcuaauauaucacguaa

SEQ ID NO: 1250444 - RNA, 19 nt, Artificial Sequence
  Description of Artificial Sequence: Synthetic oligonucleotide
uagucgcaacacauuaaau

SEQ ID NO: 1250445 - RNA, 19 nt, Artificial Sequence
  Description of Artificial Sequence: Synthetic oligonucleotide
uaacguaauuucccauuuu

SEQ ID NO: 1250446 - RNA, 19 nt, Artificial Sequence
  Description of Artificial Sequence: Synthetic oligonucleotide
accgaucgccgccaugggg

SEQ ID NO: 1250447 - RNA, 19 nt, Artificial Sequence
  Description of Artificial Sequence: Synthetic oligonucleotide
gguugacaaagaauguuug

SEQ ID NO: 1250448 - RNA, 19 nt, Artificial Sequence
  Description of Artificial Sequence: Synthetic oligonucleotide
accccuuaacuaaaauauc

SEQ ID NO: 1250449 - RNA, 19 nt, Artificial Sequence
  Description of Artificial Sequence: Synthetic oligonucleotide
cuuuacucuauccccugca

SEQ ID NO: 1250450 - RNA, 19 nt, Artificial Sequence
  Description of Artificial Sequence: Synthetic oligonucleotide
augaaucuacgaaacaauu

SEQ ID NO: 1250451 - RNA, 19 nt, Artificial Sequence
  Description of Artificial Sequence: Synthetic oligonucleotide
cacuuccuaagguugacaa

SEQ ID NO: 1250452 - RNA, 19 nt, Artificial Sequence
  Description of Artificial Sequence: Synthetic oligonucleotide
caguuaugaugcaaccuca

SEQ ID NO: 1250453 - RNA, 19 nt, Artificial Sequence
  Description of Artificial Sequence: Synthetic oligonucleotide
gguagggcagucuugucca

SEQ ID NO: 1250454 - RNA, 19 nt, Artificial Sequence
  Description of Artificial Sequence: Synthetic oligonucleotide
uacaucccacuguugacuu

SEQ ID NO: 1250455 - RNA, 19 nt, Artificial Sequence
  Description of Artificial Sequence: Synthetic oligonucleotide
gaaucccggcuucuauggc

SEQ ID NO: 1250456 - RNA, 19 nt, Artificial Sequence
  Description of Artificial Sequence: Synthetic oligonucleotide
gaccacggcagcucaacga

SEQ ID NO: 1250457 - RNA, 19 nt, Artificial Sequence
  Description of Artificial Sequence: Synthetic oligonucleotide
cauaguaagaacagcuaau

SEQ ID NO: 1250458 - RNA, 19 nt, Artificial Sequence
  Description of Artificial Sequence: Synthetic oligonucleotide
acuacaucguuugcaucug

SEQ ID NO: 1250459 - RNA, 19 nt, Artificial Sequence
  Description of Artificial Sequence: Synthetic oligonucleotide
gaauaucagucuggcaaca

SEQ ID NO: 1250460 - RNA, 19 nt, Artificial Sequence
  Description of Artificial Sequence: Synthetic oligonucleotide
cuccucuuuagcagaguuc

SEQ ID NO: 1250461 - RNA, 19 nt, Artificial Sequence
  Description of Artificial Sequence: Synthetic oligonucleotide
gacggcucguguauuaguc

SEQ ID NO: 1250462 - RNA, 19 nt, Artificial Sequence
  Description of Artificial Sequence: Synthetic oligonucleotide
uccccugcaucauuugcaa

SEQ ID NO: 1250463 - RNA, 19 nt, Artificial Sequence
  Description of Artificial Sequence: Synthetic oligonucleotide
agcuaauauaucacguaau

SEQ ID NO: 1250464 - RNA, 19 nt, Artificial Sequence
  Description of Artificial Sequence: Synthetic oligonucleotide
acucugacguaggaguucu

SEQ ID NO: 1250465 - RNA, 19 nt, Artificial Sequence
  Description of Artificial Sequence: Synthetic oligonucleotide
acguaggaguucucggacu

SEQ ID NO: 1250466 - RNA, 19 nt, Artificial Sequence
  Description of Artificial Sequence: Synthetic oligonucleotide
cacaggccgaugugcagcc

SEQ ID NO: 1250467 - RNA, 19 nt, Artificial Sequence
  Description of Artificial Sequence: Synthetic oligonucleotide
acccgauacaucccacugu

SEQ ID NO: 1250468 - RNA, 19 nt, Artificial Sequence
  Description of Artificial Sequence: Synthetic oligonucleotide
cauuuacuuucugagaugu

SEQ ID NO: 1250469 - RNA, 19 nt, Artificial Sequence
  Description of Artificial Sequence: Synthetic oligonucleotide
ucgaccccuuaacuaaaau

SEQ ID NO: 1250470 - RNA, 19 nt, Artificial Sequence
  Description of Artificial Sequence: Synthetic oligonucleotide
ggcagucuuguccaauccc

SEQ ID NO: 1250471 - RNA, 19 nt, Artificial Sequence
  Description of Artificial Sequence: Synthetic oligonucleotide
agaacccgauacaucccac

SEQ ID NO: 1250472 - RNA, 19 nt, Artificial Sequence
  Description of Artificial Sequence: Synthetic oligonucleotide
ggacagaacgugcuguuuc

SEQ ID NO: 1250473 - RNA, 19 nt, Artificial Sequence
  Description of Artificial Sequence: Synthetic oligonucleotide
cugagggauaaggauguuc

SEQ ID NO: 1250474 - RNA, 19 nt, Artificial Sequence
  Description of Artificial Sequence: Synthetic oligonucleotide
auuagucgcaacacauuaa

SEQ ID NO: 1250475 - RNA, 19 nt, Artificial Sequence
  Description of Artificial Sequence: Synthetic oligonucleotide
ucggcagggcuucugccaa

SEQ ID NO: 1250476 - RNA, 19 nt, Artificial Sequence
  Description of Artificial Sequence: Synthetic oligonucleotide
uguggaucggcagggcuuc

SEQ ID NO: 1250477 - RNA, 19 nt, Artificial Sequence
  Description of Artificial Sequence: Synthetic oligonucleotide
agacggcucguguauuagu

SEQ ID NO: 1250478 - RNA, 19 nt, Artificial Sequence
  Description of Artificial Sequence: Synthetic oligonucleotide
uucccgguagggcagucuu

SEQ ID NO: 1250479 - RNA, 19 nt, Artificial Sequence
  Description of Artificial Sequence: Synthetic oligonucleotide
ggauucuugaagacccacc

SEQ ID NO: 1250480 - RNA, 19 nt, Artificial Sequence
  Description of Artificial Sequence: Synthetic oligonucleotide
gacagaacgugcuguuucu

SEQ ID NO: 1250481 - RNA, 19 nt, Artificial Sequence
  Description of Artificial Sequence: Synthetic oligonucleotide
cauaacguaauuucccauu

SEQ ID NO: 1250482 - RNA, 19 nt, Artificial Sequence
  Description of Artificial Sequence: Synthetic oligonucleotide
uggacacguugcaaucaaa

SEQ ID NO: 1250483 - RNA, 19 nt, Artificial Sequence
  Description of Artificial Sequence: Synthetic oligonucleotide
aucaaaugggacgguaaua

SEQ ID NO: 1250484 - RNA, 19 nt, Artificial Sequence
  Description of Artificial Sequence: Synthetic oligonucleotide
cucaaaccuugcucuggac

SEQ ID NO: 1250485 - RNA, 19 nt, Artificial Sequence
  Description of Artificial Sequence: Synthetic oligonucleotide
auauaucacguaauccguu

SEQ ID NO: 1250486 - RNA, 19 nt, Artificial Sequence
  Description of Artificial Sequence: Synthetic oligonucleotide
accacaucggcccggccau

SEQ ID NO: 1250487 - RNA, 19 nt, Artificial Sequence
  Description of Artificial Sequence: Synthetic oligonucleotide
cucguguauuagucgcaac

SEQ ID NO: 1250488 - RNA, 19 nt, Artificial Sequence
  Description of Artificial Sequence: Synthetic oligonucleotide
ccgaucgccgccauggggc

SEQ ID NO: 1250489 - RNA, 19 nt, Artificial Sequence
  Description of Artificial Sequence: Synthetic oligonucleotide
cacauuaaauccagcggcu

SEQ ID NO: 1250490 - RNA, 19 nt, Artificial Sequence
  Description of Artificial Sequence: Synthetic oligonucleotide
guaaagauccaucccuuuu

SEQ ID NO: 1250491 - RNA, 19 nt, Artificial Sequence
  Description of Artificial Sequence: Synthetic oligonucleotide
gagaccacggcagcucaac

SEQ ID NO: 1250492 - RNA, 19 nt, Artificial Sequence
  Description of Artificial Sequence: Synthetic oligonucleotide
uggcucgggcauuucuucu

SEQ ID NO: 1250493 - RNA, 19 nt, Artificial Sequence
  Description of Artificial Sequence: Synthetic oligonucleotide
ccggauggaaacaguacug

SEQ ID NO: 1250494 - RNA, 19 nt, Artificial Sequence
  Description of Artificial Sequence: Synthetic oligonucleotide
cuuguugaaagaacccgau

SEQ ID NO: 1250495 - RNA, 19 nt, Artificial Sequence
  Description of Artificial Sequence: Synthetic oligonucleotide
ucccgguagggcagucuug

SEQ ID NO: 1250496 - RNA, 19 nt, Artificial Sequence
  Description of Artificial Sequence: Synthetic oligonucleotide
cucaaugacugaacauuua

SEQ ID NO: 1250497 - RNA, 19 nt, Artificial Sequence
  Description of Artificial Sequence: Synthetic oligonucleotide
gcugugaauccacucugac

SEQ ID NO: 1250498 - RNA, 19 nt, Artificial Sequence
  Description of Artificial Sequence: Synthetic oligonucleotide
ugcacaccgaucgccgcca

SEQ ID NO: 1250499 - RNA, 19 nt, Artificial Sequence
  Description of Artificial Sequence: Synthetic oligonucleotide
cuucgggcuggcagaggag

SEQ ID NO: 1250500 - RNA, 19 nt, Artificial Sequence
  Description of Artificial Sequence: Synthetic oligonucleotide
uggcaacaucuucuggauu

SEQ ID NO: 1250501 - RNA, 19 nt, Artificial Sequence
  Description of Artificial Sequence: Synthetic oligonucleotide
gaacccgauacaucccacu

SEQ ID NO: 1250502 - RNA, 19 nt, Artificial Sequence
  Description of Artificial Sequence: Synthetic oligonucleotide
ggaucggcagggcuucugc

SEQ ID NO: 1250503 - RNA, 19 nt, Artificial Sequence
  Description of Artificial Sequence: Synthetic oligonucleotide
gcuuguugaaagaacccga

SEQ ID NO: 1250504 - RNA, 19 nt, Artificial Sequence
  Description of Artificial Sequence: Synthetic oligonucleotide
caguacaaccuuguuaaua

SEQ ID NO: 1250505 - RNA, 19 nt, Artificial Sequence
  Description of Artificial Sequence: Synthetic oligonucleotide
gcuuuacucuauccccugc

SEQ ID NO: 1250506 - RNA, 19 nt, Artificial Sequence
  Description of Artificial Sequence: Synthetic oligonucleotide
agcucaacgagggacccuu

SEQ ID NO: 1250507 - RNA, 19 nt, Artificial Sequence
  Description of Artificial Sequence: Synthetic oligonucleotide
gguguguugucuucgggcu

SEQ ID NO: 1250508 - RNA, 19 nt, Artificial Sequence
  Description of Artificial Sequence: Synthetic oligonucleotide
augugcagcccaggugcac

SEQ ID NO: 1250509 - RNA, 19 nt, Artificial Sequence
  Description of Artificial Sequence: Synthetic oligonucleotide
aucacguaauccguuucuu

SEQ ID NO: 1250510 - RNA, 19 nt, Artificial Sequence
  Description of Artificial Sequence: Synthetic oligonucleotide
cagacggcucguguauuag

SEQ ID NO: 1250511 - RNA, 19 nt, Artificial Sequence
  Description of Artificial Sequence: Synthetic oligonucleotide
caaccucaacagugauggc

SEQ ID NO: 1250512 - RNA, 19 nt, Artificial Sequence
  Description of Artificial Sequence: Synthetic oligonucleotide
gagggauaaggauguuccu

SEQ ID NO: 1250513 - RNA, 19 nt, Artificial Sequence
  Description of Artificial Sequence: Synthetic oligonucleotide
ggacacguugcaaucaaaa

SEQ ID NO: 1250514 - RNA, 19 nt, Artificial Sequence
  Description of Artificial Sequence: Synthetic oligonucleotide
uuggccacuucagcacugu

SEQ ID NO: 1250515 - RNA, 19 nt, Artificial Sequence
  Description of Artificial Sequence: Synthetic oligonucleotide
caauagggaugaccucauc

SEQ ID NO: 1250516 - RNA, 19 nt, Artificial Sequence
  Description of Artificial Sequence: Synthetic oligonucleotide
cacaucggcccggccaucc

SEQ ID NO: 1250517 - RNA, 19 nt, Artificial Sequence
  Description of Artificial Sequence: Synthetic oligonucleotide
cgauacaucccacuguuga

SEQ ID NO: 1250518 - RNA, 19 nt, Artificial Sequence
  Description of Artificial Sequence: Synthetic oligonucleotide
cucuaucaugagagaguca

SEQ ID NO: 1250519 - RNA, 19 nt, Artificial Sequence
  Description of Artificial Sequence: Synthetic oligonucleotide
cuggacacguugcaaucaa

SEQ ID NO: 1250520 - RNA, 19 nt, Artificial Sequence
  Description of Artificial Sequence: Synthetic oligonucleotide
cguguauuagucgcaacac

SEQ ID NO: 1250521 - RNA, 19 nt, Artificial Sequence
  Description of Artificial Sequence: Synthetic oligonucleotide
uggaucggcagggcuucug

SEQ ID NO: 1250522 - RNA, 19 nt, Artificial Sequence
  Description of Artificial Sequence: Synthetic oligonucleotide
caaccucuggaacuccgaa

SEQ ID NO: 1250523 - RNA, 19 nt, Artificial Sequence
  Description of Artificial Sequence: Synthetic oligonucleotide
cgguagggcagucuugucc

SEQ ID NO: 1250524 - RNA, 19 nt, Artificial Sequence
  Description of Artificial Sequence: Synthetic oligonucleotide
gcuaagguuucugugaaau

SEQ ID NO: 1250525 - RNA, 19 nt, Artificial Sequence
  Description of Artificial Sequence: Synthetic oligonucleotide
cuacaucguuugcaucuga

SEQ ID NO: 1250526 - RNA, 19 nt, Artificial Sequence
  Description of Artificial Sequence: Synthetic oligonucleotide
caucgaccccuuaacuaaa

SEQ ID NO: 1250527 - RNA, 19 nt, Artificial Sequence
  Description of Artificial Sequence: Synthetic oligonucleotide
cuccaagcuuaaauaccaa

SEQ ID NO: 1250528 - RNA, 19 nt, Artificial Sequence
  Description of Artificial Sequence: Synthetic oligonucleotide
acgugcuguuucuuucauu

SEQ ID NO: 1250529 - RNA, 19 nt, Artificial Sequence
  Description of Artificial Sequence: Synthetic oligonucleotide
gggauucuugaagacccac

SEQ ID NO: 1250530 - RNA, 19 nt, Artificial Sequence
  Description of Artificial Sequence: Synthetic oligonucleotide
ugccaagggucugcuuuac

SEQ ID NO: 1250531 - RNA, 19 nt, Artificial Sequence
  Description of Artificial Sequence: Synthetic oligonucleotide
ucccggcuucuauggcugc

SEQ ID NO: 1250532 - RNA, 19 nt, Artificial Sequence
  Description of Artificial Sequence: Synthetic oligonucleotide
caccgaucgccgccauggg

SEQ ID NO: 1250533 - RNA, 19 nt, Artificial Sequence
  Description of Artificial Sequence: Synthetic oligonucleotide
cggcucguguauuagucgc

SEQ ID NO: 1250534 - RNA, 19 nt, Artificial Sequence
  Description of Artificial Sequence: Synthetic oligonucleotide
gggcuaagguuucugugaa

SEQ ID NO: 1250535 - RNA, 19 nt, Artificial Sequence
  Description of Artificial Sequence: Synthetic oligonucleotide
acggcagcucaacgaggga

SEQ ID NO: 1250536 - RNA, 19 nt, Artificial Sequence
  Description of Artificial Sequence: Synthetic oligonucleotide
gaucgccgccauggggcgg

SEQ ID NO: 1250537 - RNA, 19 nt, Artificial Sequence
  Description of Artificial Sequence: Synthetic oligonucleotide
ccucuggaacuccgaagcc

SEQ ID NO: 1250538 - RNA, 19 nt, Artificial Sequence
  Description of Artificial Sequence: Synthetic oligonucleotide
aucggcccggccauccuug

SEQ ID NO: 1250539 - RNA, 19 nt, Artificial Sequence
  Description of Artificial Sequence: Synthetic oligonucleotide
cccuuaacuaaaauauccu

SEQ ID NO: 1250540 - RNA, 19 nt, Artificial Sequence
  Description of Artificial Sequence: Synthetic oligonucleotide
guauuagucgcaacacauu

SEQ ID NO: 1250541 - RNA, 19 nt, Artificial Sequence
  Description of Artificial Sequence: Synthetic oligonucleotide
ccgaagccagauacugggc

SEQ ID NO: 1250542 - RNA, 19 nt, Artificial Sequence
  Description of Artificial Sequence: Synthetic oligonucleotide
gcggcggagaccacggcag

SEQ ID NO: 1250543 - RNA, 19 nt, Artificial Sequence
  Description of Artificial Sequence: Synthetic oligonucleotide
caaccugugcaaacuuggu

SEQ ID NO: 1250544 - RNA, 19 nt, Artificial Sequence
  Description of Artificial Sequence: Synthetic oligonucleotide
aucgaccccuuaacuaaaa

SEQ ID NO: 1250545 - RNA, 19 nt, Artificial Sequence
  Description of Artificial Sequence: Synthetic oligonucleotide
ccgaugugcagcccaggug

SEQ ID NO: 1250546 - RNA, 19 nt, Artificial Sequence
  Description of Artificial Sequence: Synthetic oligonucleotide
gcugcagacggcucgugua

SEQ ID NO: 1250547 - RNA, 19 nt, Artificial Sequence
  Description of Artificial Sequence: Synthetic oligonucleotide
cugccaagggucugcuuua

SEQ ID NO: 1250548 - RNA, 19 nt, Artificial Sequence
  Description of Artificial Sequence: Synthetic oligonucleotide
ugcagacggcucguguauu

SEQ ID NO: 1250549 - RNA, 19 nt, Artificial Sequence
  Description of Artificial Sequence: Synthetic oligonucleotide
cacaccgaucgccgccaug

SEQ ID NO: 1250550 - RNA, 19 nt, Artificial Sequence
  Description of Artificial Sequence: Synthetic oligonucleotide
gcucgggcauuucuucuca

SEQ ID NO: 1250551 - RNA, 19 nt, Artificial Sequence
  Description of Artificial Sequence: Synthetic oligonucleotide
cauggcucgggcauuucuu

SEQ ID NO: 1250552 - RNA, 19 nt, Artificial Sequence
  Description of Artificial Sequence: Synthetic oligonucleotide
agggucugcuuuacucuau

SEQ ID NO: 1250553 - RNA, 19 nt, Artificial Sequence
  Description of Artificial Sequence: Synthetic oligonucleotide
ucggcccggccauccuugu

SEQ ID NO: 1250554 - RNA, 19 nt, Artificial Sequence
  Description of Artificial Sequence: Synthetic oligonucleotide
ccaggugcacaccgaucgc

SEQ ID NO: 1250555 - RNA, 19 nt, Artificial Sequence
  Description of Artificial Sequence: Synthetic oligonucleotide
ccgauacaucccacuguug

SEQ ID NO: 1250556 - RNA, 19 nt, Artificial Sequence
  Description of Artificial Sequence: Synthetic oligonucleotide
acguugcaaucaaaaucuu

SEQ ID NO: 1250557 - RNA, 19 nt, Artificial Sequence
  Description of Artificial Sequence: Synthetic oligonucleotide
cccggauggaaacaguacu

SEQ ID NO: 1250558 - RNA, 19 nt, Artificial Sequence
  Description of Artificial Sequence: Synthetic oligonucleotide
cuaugucaucacugcugcu

SEQ ID NO: 1250559 - RNA, 19 nt, Artificial Sequence
  Description of Artificial Sequence: Synthetic oligonucleotide
acugagggauaaggauguu

SEQ ID NO: 1250560 - RNA, 19 nt, Artificial Sequence
  Description of Artificial Sequence: Synthetic oligonucleotide
gcucguguauuagucgcaa

SEQ ID NO: 1250561 - RNA, 19 nt, Artificial Sequence
  Description of Artificial Sequence: Synthetic oligonucleotide
ggcucguguauuagucgca

SEQ ID NO: 1250562 - RNA, 19 nt, Artificial Sequence
  Description of Artificial Sequence: Synthetic oligonucleotide
gcagacggcucguguauua

SEQ ID NO: 1250563 - RNA, 19 nt, Artificial Sequence
  Description of Artificial Sequence: Synthetic oligonucleotide
ggagucccggauggaaaca

SEQ ID NO: 1250564 - RNA, 19 nt, Artificial Sequence
  Description of Artificial Sequence: Synthetic oligonucleotide
ggcaaacggaagauauacu

SEQ ID NO: 1250565 - RNA, 19 nt, Artificial Sequence
  Description of Artificial Sequence: Synthetic oligonucleotide
cugcagacggcucguguau

SEQ ID NO: 1250566 - RNA, 19 nt, Artificial Sequence
  Description of Artificial Sequence: Synthetic oligonucleotide
cgaucgccgccauggggcg

SEQ ID NO: 1250567 - RNA, 19 nt, Artificial Sequence
  Description of Artificial Sequence: Synthetic oligonucleotide
gccauggggcggcggagac

SEQ ID NO: 1250568 - RNA, 19 nt, Artificial Sequence
  Description of Artificial Sequence: Synthetic oligonucleotide
ggccgaugugcagcccagg

SEQ ID NO: 1250569 - RNA, 19 nt, Artificial Sequence
  Description of Artificial Sequence: Synthetic oligonucleotide
ccggccauccuuguagaca

SEQ ID NO: 1250570 - RNA, 19 nt, Artificial Sequence
  Description of Artificial Sequence: Synthetic oligonucleotide
cucuauccccugcaucauu

SEQ ID NO: 1250571 - RNA, 19 nt, Artificial Sequence
  Description of Artificial Sequence: Synthetic oligonucleotide
cgcugugaauccacucuga

SEQ ID NO: 1250572 - RNA, 19 nt, Artificial Sequence
  Description of Artificial Sequence: Synthetic oligonucleotide
cugcaccaauagggaugac

SEQ ID NO: 1250573 - RNA, 19 nt, Artificial Sequence
  Description of Artificial Sequence: Synthetic oligonucleotide
cuucccgguagggcagucu

SEQ ID NO: 1250574 - RNA, 19 nt, Artificial Sequence
  Description of Artificial Sequence: Synthetic oligonucleotide
auacugccaggggcuugua

SEQ ID NO: 1250575 - RNA, 19 nt, Artificial Sequence
  Description of Artificial Sequence: Synthetic oligonucleotide
gcguguggaucggcagggc

SEQ ID NO: 1250576 - RNA, 19 nt, Artificial Sequence
  Description of Artificial Sequence: Synthetic oligonucleotide
auggggcggcggagaccac

SEQ ID NO: 1250577 - RNA, 19 nt, Artificial Sequence
  Description of Artificial Sequence: Synthetic oligonucleotide
ccgguagggcagucuuguc

SEQ ID NO: 1250578 - RNA, 19 nt, Artificial Sequence
  Description of Artificial Sequence: Synthetic oligonucleotide
gcucaacgagggacccuuc

SEQ ID NO: 1250579 - RNA, 19 nt, Artificial Sequence
  Description of Artificial Sequence: Synthetic oligonucleotide
cccgguagggcagucuugu

SEQ ID NO: 1250580 - RNA, 19 nt, Artificial Sequence
  Description of Artificial Sequence: Synthetic oligonucleotide
cguuugcaucugagcccag

SEQ ID NO: 1250581 - RNA, 19 nt, Artificial Sequence
  Description of Artificial Sequence: Synthetic oligonucleotide
cggcggagaccacggcagc

SEQ ID NO: 1250582 - RNA, 19 nt, Artificial Sequence
  Description of Artificial Sequence: Synthetic oligonucleotide
cgguaauaacuacaucguu

SEQ ID NO: 1250583 - RNA, 19 nt, Artificial Sequence
  Description of Artificial Sequence: Synthetic oligonucleotide
cagcucaacgagggacccu

SEQ ID NO: 1250584 - RNA, 19 nt, Artificial Sequence
  Description of Artificial Sequence: Synthetic oligonucleotide
guggaucggcagggcuucu

SEQ ID NO: 1250585 - RNA, 19 nt, Artificial Sequence
  Description of Artificial Sequence: Synthetic oligonucleotide
ccacaucggcccggccauc

SEQ ID NO: 1250586 - RNA, 19 nt, Artificial Sequence
  Description of Artificial Sequence: Synthetic oligonucleotide
gcacaccgaucgccgccau

SEQ ID NO: 1250587 - RNA, 19 nt, Artificial Sequence
  Description of Artificial Sequence: Synthetic oligonucleotide
cggcccggccauccuugua

SEQ ID NO: 1250588 - RNA, 19 nt, Artificial Sequence
  Description of Artificial Sequence: Synthetic oligonucleotide
agaauuuguaaccaggguc

SEQ ID NO: 1250589 - RNA, 19 nt, Artificial Sequence
  Description of Artificial Sequence: Synthetic oligonucleotide
aaauuucagauguacgcuc

SEQ ID NO: 1250590 - RNA, 19 nt, Artificial Sequence
  Description of Artificial Sequence: Synthetic oligonucleotide
aacauaauccaaugggucu

SEQ ID NO: 1250591 - RNA, 19 nt, Artificial Sequence
  Description of Artificial Sequence: Synthetic oligonucleotide
gcuaacauaauccaauggg

SEQ ID NO: 1250592 - RNA, 19 nt, Artificial Sequence
  Description of Artificial Sequence: Synthetic oligonucleotide
aacucauggacucugcugu

SEQ ID NO: 1250593 - RNA, 19 nt, Artificial Sequence
  Description of Artificial Sequence: Synthetic oligonucleotide
ucagguuagaaccaucugu

SEQ ID NO: 1250594 - RNA, 19 nt, Artificial Sequence
  Description of Artificial Sequence: Synthetic oligonucleotide
cuggaagacauaucgagcc

SEQ ID NO: 1250595 - RNA, 19 nt, Artificial Sequence
  Description of Artificial Sequence: Synthetic oligonucleotide
ugugugccgaugcagaugc

SEQ ID NO: 1250596 - RNA, 19 nt, Artificial Sequence
  Description of Artificial Sequence: Synthetic oligonucleotide
ugcuaacauaauccaaugg

SEQ ID NO: 1250597 - RNA, 19 nt, Artificial Sequence
  Description of Artificial Sequence: Synthetic oligonucleotide
gucaacagaauuuguaacc

SEQ ID NO: 1250598 - RNA, 19 nt, Artificial Sequence
  Description of Artificial Sequence: Synthetic oligonucleotide
uaacauaauccaauggguc

SEQ ID NO: 1250599 - RNA, 19 nt, Artificial Sequence
  Description of Artificial Sequence: Synthetic oligonucleotide
uuugucaacucucuccugu

SEQ ID NO: 1250600 - RNA, 19 nt, Artificial Sequence
  Description of Artificial Sequence: Synthetic oligonucleotide
gauguagugccagugcucg

SEQ ID NO: 1250601 - RNA, 19 nt, Artificial Sequence
  Description of Artificial Sequence: Synthetic oligonucleotide
gaaagagugaggcgaaggc

SEQ ID NO: 1250602 - RNA, 19 nt, Artificial Sequence
  Description of Artificial Sequence: Synthetic oligonucleotide
aaguuugaauuaccucugg

SEQ ID NO: 1250603 - RNA, 19 nt, Artificial Sequence
  Description of Artificial Sequence: Synthetic oligonucleotide
ucacuguuauccaaagggc

SEQ ID NO: 1250604 - RNA, 19 nt, Artificial Sequence
  Description of Artificial Sequence: Synthetic oligonucleotide
ggaucgaucucaaauaugg

SEQ ID NO: 1250605 - RNA, 19 nt, Artificial Sequence
  Description of Artificial Sequence: Synthetic oligonucleotide
uccugguuaaauuucagau

SEQ ID NO: 1250606 - RNA, 19 nt, Artificial Sequence
  Description of Artificial Sequence: Synthetic oligonucleotide
gacaccgacgaucugcagg

SEQ ID NO: 1250607 - RNA, 19 nt, Artificial Sequence
  Description of Artificial Sequence: Synthetic oligonucleotide
ucgaucucaaauaugguuu

SEQ ID NO: 1250608 - RNA, 19 nt, Artificial Sequence
  Description of Artificial Sequence: Synthetic oligonucleotide
uacaugcuaacauaaucca

SEQ ID NO: 1250609 - RNA, 19 nt, Artificial Sequence
  Description of Artificial Sequence: Synthetic oligonucleotide
ucaccugugauacucuugu

SEQ ID NO: 1250610 - RNA, 19 nt, Artificial Sequence
  Description of Artificial Sequence: Synthetic oligonucleotide
caguacuugacgauagcgg

SEQ ID NO: 1250611 - RNA, 19 nt, Artificial Sequence
  Description of Artificial Sequence: Synthetic oligonucleotide
aagacauaucgagccaggc

SEQ ID NO: 1250612 - RNA, 19 nt, Artificial Sequence
  Description of Artificial Sequence: Synthetic oligonucleotide
gacgauagcggugaccugg

SEQ ID NO: 1250613 - RNA, 19 nt, Artificial Sequence
  Description of Artificial Sequence: Synthetic oligonucleotide
acugacaccgcucagguua

SEQ ID NO: 1250614 - RNA, 19 nt, Artificial Sequence
  Description of Artificial Sequence: Synthetic oligonucleotide
uugacgauagcggugaccu

SEQ ID NO: 1250615 - RNA, 19 nt, Artificial Sequence
  Description of Artificial Sequence: Synthetic oligonucleotide
agugcagacaccgacgauc

SEQ ID NO: 1250616 - RNA, 19 nt, Artificial Sequence
  Description of Artificial Sequence: Synthetic oligonucleotide
ggagcugucacuuuccaag

SEQ ID NO: 1250617 - RNA, 19 nt, Artificial Sequence
  Description of Artificial Sequence: Synthetic oligonucleotide
uguggaucgaucucaaaua

SEQ ID NO: 1250618 - RNA, 19 nt, Artificial Sequence
  Description of Artificial Sequence: Synthetic oligonucleotide
gauagcggugaccuggagc

SEQ ID NO: 1250619 - RNA, 19 nt, Artificial Sequence
  Description of Artificial Sequence: Synthetic oligonucleotide
ucucgaguugccgagugcg

SEQ ID NO: 1250620 - RNA, 19 nt, Artificial Sequence
  Description of Artificial Sequence: Synthetic oligonucleotide
acugucgaaugccacauca

SEQ ID NO: 1250621 - RNA, 19 nt, Artificial Sequence
  Description of Artificial Sequence: Synthetic oligonucleotide
ucuuccgucaacagaauuu

SEQ ID NO: 1250622 - RNA, 19 nt, Artificial Sequence
  Description of Artificial Sequence: Synthetic oligonucleotide
agaugcuccggcuauccuc

SEQ ID NO: 1250623 - RNA, 19 nt, Artificial Sequence
  Description of Artificial Sequence: Synthetic oligonucleotide
aaccaucugucucgaugcc

SEQ ID NO: 1250624 - RNA, 19 nt, Artificial Sequence
  Description of Artificial Sequence: Synthetic oligonucleotide
ucagacgaaaugucaauuc

SEQ ID NO: 1250625 - RNA, 19 nt, Artificial Sequence
  Description of Artificial Sequence: Synthetic oligonucleotide
uguaaacucauggacucug

SEQ ID NO: 1250626 - RNA, 19 nt, Artificial Sequence
  Description of Artificial Sequence: Synthetic oligonucleotide
gagucugccccugagacag

SEQ ID NO: 1250627 - RNA, 19 nt, Artificial Sequence
  Description of Artificial Sequence: Synthetic oligonucleotide
agggauguuccuccguggc

SEQ ID NO: 1250628 - RNA, 19 nt, Artificial Sequence
  Description of Artificial Sequence: Synthetic oligonucleotide
agcugcauagggauguucc

SEQ ID NO: 1250629 - RNA, 19 nt, Artificial Sequence
  Description of Artificial Sequence: Synthetic oligonucleotide
ugagccggaggugaggugg

SEQ ID NO: 1250630 - RNA, 19 nt, Artificial Sequence
  Description of Artificial Sequence: Synthetic oligonucleotide
ucagauguacgcucucgag

SEQ ID NO: 1250631 - RNA, 19 nt, Artificial Sequence
  Description of Artificial Sequence: Synthetic oligonucleotide
ugggucuuccgucagcagc

SEQ ID NO: 1250632 - RNA, 19 nt, Artificial Sequence
  Description of Artificial Sequence: Synthetic oligonucleotide
aaaaccacucgguccgucu

SEQ ID NO: 1250633 - RNA, 19 nt, Artificial Sequence
  Description of Artificial Sequence: Synthetic oligonucleotide
guagauggcgugcaguccc

SEQ ID NO: 1250634 - RNA, 19 nt, Artificial Sequence
  Description of Artificial Sequence: Synthetic oligonucleotide
cagguuagaaccaucuguc

SEQ ID NO: 1250635 - RNA, 19 nt, Artificial Sequence
  Description of Artificial Sequence: Synthetic oligonucleotide
aucgaucucaaauaugguu

SEQ ID NO: 1250636 - RNA, 19 nt, Artificial Sequence
  Description of Artificial Sequence: Synthetic oligonucleotide
ugguccccgcuacagaagg

SEQ ID NO: 1250637 - RNA, 19 nt, Artificial Sequence
  Description of Artificial Sequence: Synthetic oligonucleotide
auagggauguuccuccgug

SEQ ID NO: 1250638 - RNA, 19 nt, Artificial Sequence
  Description of Artificial Sequence: Synthetic oligonucleotide
uuugggaaguuugaauuac

SEQ ID NO: 1250639 - RNA, 19 nt, Artificial Sequence
  Description of Artificial Sequence: Synthetic oligonucleotide
uacucuuguaggugaagug

SEQ ID NO: 1250640 - RNA, 19 nt, Artificial Sequence
  Description of Artificial Sequence: Synthetic oligonucleotide
augcuaacauaauccaaug

SEQ ID NO: 1250641 - RNA, 19 nt, Artificial Sequence
  Description of Artificial Sequence: Synthetic oligonucleotide
auucuugacucacuguuau

SEQ ID NO: 1250642 - RNA, 19 nt, Artificial Sequence
  Description of Artificial Sequence: Synthetic oligonucleotide
cugguuaaauuucagaugu

SEQ ID NO: 1250643 - RNA, 19 nt, Artificial Sequence
  Description of Artificial Sequence: Synthetic oligonucleotide
gccaaaaccacucgguccg

SEQ ID NO: 1250644 - RNA, 19 nt, Artificial Sequence
  Description of Artificial Sequence: Synthetic oligonucleotide
agauguacgcucucgaguu

SEQ ID NO: 1250645 - RNA, 19 nt, Artificial Sequence
  Description of Artificial Sequence: Synthetic oligonucleotide
uuuuauucaugggagucuc

SEQ ID NO: 1250646 - RNA, 19 nt, Artificial Sequence
  Description of Artificial Sequence: Synthetic oligonucleotide
cuggucgggguaaaggcgg

SEQ ID NO: 1250647 - RNA, 19 nt, Artificial Sequence
  Description of Artificial Sequence: Synthetic oligonucleotide
uuaucagccagggaccggc

SEQ ID NO: 1250648 - RNA, 19 nt, Artificial Sequence
  Description of Artificial Sequence: Synthetic oligonucleotide
ucacuuuccaagcugucuu

SEQ ID NO: 1250649 - RNA, 19 nt, Artificial Sequence
  Description of Artificial Sequence: Synthetic oligonucleotide
uccgucaacagaauuugua

SEQ ID NO: 1250650 - RNA, 19 nt, Artificial Sequence
  Description of Artificial Sequence: Synthetic oligonucleotide
ccugugauacucuuguagg

SEQ ID NO: 1250651 - RNA, 19 nt, Artificial Sequence
  Description of Artificial Sequence: Synthetic oligonucleotide
aucucaaauaugguuucuc

SEQ ID NO: 1250652 - RNA, 19 nt, Artificial Sequence
  Description of Artificial Sequence: Synthetic oligonucleotide
gucucuuuuacacagcugu

SEQ ID NO: 1250653 - RNA, 19 nt, Artificial Sequence
  Description of Artificial Sequence: Synthetic oligonucleotide
uggaucgaucucaaauaug

SEQ ID NO: 1250654 - RNA, 19 nt, Artificial Sequence
  Description of Artificial Sequence: Synthetic oligonucleotide
ugaucucgagcccucgucu

SEQ ID NO: 1250655 - RNA, 19 nt, Artificial Sequence
  Description of Artificial Sequence: Synthetic oligonucleotide
ugugauggccaugucaccu

SEQ ID NO: 1250656 - RNA, 19 nt, Artificial Sequence
  Description of Artificial Sequence: Synthetic oligonucleotide
auguacgcucucgaguugc

SEQ ID NO: 1250657 - RNA, 19 nt, Artificial Sequence
  Description of Artificial Sequence: Synthetic oligonucleotide
gaagacauaucgagccagg

SEQ ID NO: 1250658 - RNA, 19 nt, Artificial Sequence
  Description of Artificial Sequence: Synthetic oligonucleotide
acaccgcucagguuagaac

SEQ ID NO: 1250659 - RNA, 19 nt, Artificial Sequence
  Description of Artificial Sequence: Synthetic oligonucleotide
gggagucucuuuuacacag

SEQ ID NO: 1250660 - RNA, 19 nt, Artificial Sequence
  Description of Artificial Sequence: Synthetic oligonucleotide
acaccgacgaucugcagga

SEQ ID NO: 1250661 - RNA, 19 nt, Artificial Sequence
  Description of Artificial Sequence: Synthetic oligonucleotide
aaaggcggcggcacucucc

SEQ ID NO: 1250662 - RNA, 19 nt, Artificial Sequence
  Description of Artificial Sequence: Synthetic oligonucleotide
ugcagguguggaucgaucu

SEQ ID NO: 1250663 - RNA, 19 nt, Artificial Sequence
  Description of Artificial Sequence: Synthetic oligonucleotide
uggaagacauaucgagcca

SEQ ID NO: 1250664 - RNA, 19 nt, Artificial Sequence
  Description of Artificial Sequence: Synthetic oligonucleotide
auucaugggagucucuuuu

SEQ ID NO: 1250665 - RNA, 19 nt, Artificial Sequence
  Description of Artificial Sequence: Synthetic oligonucleotide
cuaacauaauccaaugggu

SEQ ID NO: 1250666 - RNA, 19 nt, Artificial Sequence
  Description of Artificial Sequence: Synthetic oligonucleotide
aauuaccucuggagaaguc

SEQ ID NO: 1250667 - RNA, 19 nt, Artificial Sequence
  Description of Artificial Sequence: Synthetic oligonucleotide
uagggauguuccuccgugg

SEQ ID NO: 1250668 - RNA, 19 nt, Artificial Sequence
  Description of Artificial Sequence: Synthetic oligonucleotide
acuguuauccaaagggcug

SEQ ID NO: 1250669 - RNA, 19 nt, Artificial Sequence
  Description of Artificial Sequence: Synthetic oligonucleotide
gaagugccggccaugcagg

SEQ ID NO: 1250670 - RNA, 19 nt, Artificial Sequence
  Description of Artificial Sequence: Synthetic oligonucleotide
ugacuccugguuaaauuuc

SEQ ID NO: 1250671 - RNA, 19 nt, Artificial Sequence
  Description of Artificial Sequence: Synthetic oligonucleotide
cuuccgucaacagaauuug

SEQ ID NO: 1250672 - RNA, 19 nt, Artificial Sequence
  Description of Artificial Sequence: Synthetic oligonucleotide
aguuaucagccagggaccg

SEQ ID NO: 1250673 - RNA, 19 nt, Artificial Sequence
  Description of Artificial Sequence: Synthetic oligonucleotide
aacuaccccaaaagggguc

SEQ ID NO: 1250674 - RNA, 19 nt, Artificial Sequence
  Description of Artificial Sequence: Synthetic oligonucleotide
cacugggagccguugagcc

SEQ ID NO: 1250675 - RNA, 19 nt, Artificial Sequence
  Description of Artificial Sequence: Synthetic oligonucleotide
agugcggaucagcucgugg

SEQ ID NO: 1250676 - RNA, 19 nt, Artificial Sequence
  Description of Artificial Sequence: Synthetic oligonucleotide
ucgcucaggccaaagcuga

SEQ ID NO: 1250677 - RNA, 19 nt, Artificial Sequence
  Description of Artificial Sequence: Synthetic oligonucleotide
uccuguacaugcuaacaua

SEQ ID NO: 1250678 - RNA, 19 nt, Artificial Sequence
  Description of Artificial Sequence: Synthetic oligonucleotide
gucgcugaggguugauugg

SEQ ID NO: 1250679 - RNA, 19 nt, Artificial Sequence
  Description of Artificial Sequence: Synthetic oligonucleotide
gcuccggcuauccucaucg

SEQ ID NO: 1250680 - RNA, 19 nt, Artificial Sequence
  Description of Artificial Sequence: Synthetic oligonucleotide
ugauguagugccagugcuc

SEQ ID NO: 1250681 - RNA, 19 nt, Artificial Sequence
  Description of Artificial Sequence: Synthetic oligonucleotide
uuuauucaugggagucucu

SEQ ID NO: 1250682 - RNA, 19 nt, Artificial Sequence
  Description of Artificial Sequence: Synthetic oligonucleotide
aauuuguaaccagggucca

SEQ ID NO: 1250683 - RNA, 19 nt, Artificial Sequence
  Description of Artificial Sequence: Synthetic oligonucleotide
uacgcucucgaguugccga

SEQ ID NO: 1250684 - RNA, 19 nt, Artificial Sequence
  Description of Artificial Sequence: Synthetic oligonucleotide
ucuguuccuguaaacucau

SEQ ID NO: 1250685 - RNA, 19 nt, Artificial Sequence
  Description of Artificial Sequence: Synthetic oligonucleotide
cugucuuugcggcucgggg

SEQ ID NO: 1250686 - RNA, 19 nt, Artificial Sequence
  Description of Artificial Sequence: Synthetic oligonucleotide
agugcucggggauguuggc

SEQ ID NO: 1250687 - RNA, 19 nt, Artificial Sequence
  Description of Artificial Sequence: Synthetic oligonucleotide
ucauggacucugcugucac

SEQ ID NO: 1250688 - RNA, 19 nt, Artificial Sequence
  Description of Artificial Sequence: Synthetic oligonucleotide
auggcgugcagucccgggg

SEQ ID NO: 1250689 - RNA, 19 nt, Artificial Sequence
  Description of Artificial Sequence: Synthetic oligonucleotide
gauacucuuguaggugaag

SEQ ID NO: 1250690 - RNA, 19 nt, Artificial Sequence
  Description of Artificial Sequence: Synthetic oligonucleotide
uugaucucgagcccucguc

SEQ ID NO: 1250691 - RNA, 19 nt, Artificial Sequence
  Description of Artificial Sequence: Synthetic oligonucleotide
acccaaccaguacuugacg

SEQ ID NO: 1250692 - RNA, 19 nt, Artificial Sequence
  Description of Artificial Sequence: Synthetic oligonucleotide
agcggguucggcuggucgg

SEQ ID NO: 1250693 - RNA, 19 nt, Artificial Sequence
  Description of Artificial Sequence: Synthetic oligonucleotide
uagauggcgugcagucccg

SEQ ID NO: 1250694 - RNA, 19 nt, Artificial Sequence
  Description of Artificial Sequence: Synthetic oligonucleotide
gccauucugucgcugaggg

SEQ ID NO: 1250695 - RNA, 19 nt, Artificial Sequence
  Description of Artificial Sequence: Synthetic oligonucleotide
ugugggucuuccgucagca

SEQ ID NO: 1250696 - RNA, 19 nt, Artificial Sequence
  Description of Artificial Sequence: Synthetic oligonucleotide
ugcugaauucuugacucac

SEQ ID NO: 1250697 - RNA, 19 nt, Artificial Sequence
  Description of Artificial Sequence: Synthetic oligonucleotide
gauggcgugcagucccggg

SEQ ID NO: 1250698 - RNA, 19 nt, Artificial Sequence
  Description of Artificial Sequence: Synthetic oligonucleotide
ugauacucuuguaggugaa

SEQ ID NO: 1250699 - RNA, 19 nt, Artificial Sequence
  Description of Artificial Sequence: Synthetic oligonucleotide
cagacgaaaugucaauuca

SEQ ID NO: 1250700 - RNA, 19 nt, Artificial Sequence
  Description of Artificial Sequence: Synthetic oligonucleotide
auuccuguacaugcuaaca

SEQ ID NO: 1250701 - RNA, 19 nt, Artificial Sequence
  Description of Artificial Sequence: Synthetic oligonucleotide
ucugugggucuuccgucag

SEQ ID NO: 1250702 - RNA, 19 nt, Artificial Sequence
  Description of Artificial Sequence: Synthetic oligonucleotide
gccuuugucaacucucucc

SEQ ID NO: 1250703 - RNA, 19 nt, Artificial Sequence
  Description of Artificial Sequence: Synthetic oligonucleotide
aaggacagguuugcuguug

SEQ ID NO: 1250704 - RNA, 19 nt, Artificial Sequence
  Description of Artificial Sequence: Synthetic oligonucleotide
agguuagaaccaucugucu

SEQ ID NO: 1250705 - RNA, 19 nt, Artificial Sequence
  Description of Artificial Sequence: Synthetic oligonucleotide
accgacgaucugcaggaag

SEQ ID NO: 1250706 - RNA, 19 nt, Artificial Sequence
  Description of Artificial Sequence: Synthetic oligonucleotide
uggucauggguuugacagc

SEQ ID NO: 1250707 - RNA, 19 nt, Artificial Sequence
  Description of Artificial Sequence: Synthetic oligonucleotide
cugucgaaugccacaucag

SEQ ID NO: 1250708 - RNA, 19 nt, Artificial Sequence
  Description of Artificial Sequence: Synthetic oligonucleotide
ucccguggacacaaaugug

SEQ ID NO: 1250709 - RNA, 19 nt, Artificial Sequence
  Description of Artificial Sequence: Synthetic oligonucleotide
uguugaucucgagcccucg

SEQ ID NO: 1250710 - RNA, 19 nt, Artificial Sequence
  Description of Artificial Sequence: Synthetic oligonucleotide
uucagacgaaaugucaauu

SEQ ID NO: 1250711 - RNA, 19 nt, Artificial Sequence
  Description of Artificial Sequence: Synthetic oligonucleotide
gaugcuccggcuauccuca

SEQ ID NO: 1250712 - RNA, 19 nt, Artificial Sequence
  Description of Artificial Sequence: Synthetic oligonucleotide
uaucgagccaggcccugca

SEQ ID NO: 1250713 - RNA, 19 nt, Artificial Sequence
  Description of Artificial Sequence: Synthetic oligonucleotide
gauguacgcucucgaguug

SEQ ID NO: 1250714 - RNA, 19 nt, Artificial Sequence
  Description of Artificial Sequence: Synthetic oligonucleotide
ccuguaaacucauggacuc

SEQ ID NO: 1250715 - RNA, 19 nt, Artificial Sequence
  Description of Artificial Sequence: Synthetic oligonucleotide
caggaagguaacuacccca

SEQ ID NO: 1250716 - RNA, 19 nt, Artificial Sequence
  Description of Artificial Sequence: Synthetic oligonucleotide
ugcagcggacugucgaaug

SEQ ID NO: 1250717 - RNA, 19 nt, Artificial Sequence
  Description of Artificial Sequence: Synthetic oligonucleotide
uguacgcucucgaguugcc

SEQ ID NO: 1250718 - RNA, 19 nt, Artificial Sequence
  Description of Artificial Sequence: Synthetic oligonucleotide
ccggcuauccucaucgucc

SEQ ID NO: 1250719 - RNA, 19 nt, Artificial Sequence
  Description of Artificial Sequence: Synthetic oligonucleotide
aaccacucgguccgucugu

SEQ ID NO: 1250720 - RNA, 19 nt, Artificial Sequence
  Description of Artificial Sequence: Synthetic oligonucleotide
ccgacgaucugcaggaagg

SEQ ID NO: 1250721 - RNA, 19 nt, Artificial Sequence
  Description of Artificial Sequence: Synthetic oligonucleotide
gagcggguucggcuggucg

SEQ ID NO: 1250722 - RNA, 19 nt, Artificial Sequence
  Description of Artificial Sequence: Synthetic oligonucleotide
cucagguuagaaccaucug

SEQ ID NO: 1250723 - RNA, 19 nt, Artificial Sequence
  Description of Artificial Sequence: Synthetic oligonucleotide
aucugugggucuuccguca

SEQ ID NO: 1250724 - RNA, 19 nt, Artificial Sequence
  Description of Artificial Sequence: Synthetic oligonucleotide
cgcaugucaguuaucagcc

SEQ ID NO: 1250725 - RNA, 19 nt, Artificial Sequence
  Description of Artificial Sequence: Synthetic oligonucleotide
gagcccucgucucaggguc

SEQ ID NO: 1250726 - RNA, 19 nt, Artificial Sequence
  Description of Artificial Sequence: Synthetic oligonucleotide
gaugcagaugcuccggcua

SEQ ID NO: 1250727 - RNA, 19 nt, Artificial Sequence
  Description of Artificial Sequence: Synthetic oligonucleotide
acgaucugcaggaagguaa

SEQ ID NO: 1250728 - RNA, 19 nt, Artificial Sequence
  Description of Artificial Sequence: Synthetic oligonucleotide
uucaugggagucucuuuua

SEQ ID NO: 1250729 - RNA, 19 nt, Artificial Sequence
  Description of Artificial Sequence: Synthetic oligonucleotide
caucugugggucuuccguc

SEQ ID NO: 1250730 - RNA, 19 nt, Artificial Sequence
  Description of Artificial Sequence: Synthetic oligonucleotide
cucgaguugccgagugcgg

SEQ ID NO: 1250731 - RNA, 19 nt, Artificial Sequence
  Description of Artificial Sequence: Synthetic oligonucleotide
cuuccacucccguggacac

SEQ ID NO: 1250732 - RNA, 19 nt, Artificial Sequence
  Description of Artificial Sequence: Synthetic oligonucleotide
accggcguguaggacaggg

SEQ ID NO: 1250733 - RNA, 19 nt, Artificial Sequence
  Description of Artificial Sequence: Synthetic oligonucleotide
ccaugcaggagucugcccc

SEQ ID NO: 1250734 - RNA, 19 nt, Artificial Sequence
  Description of Artificial Sequence: Synthetic oligonucleotide
agacuccccuguuucucuc

SEQ ID NO: 1250735 - RNA, 19 nt, Artificial Sequence
  Description of Artificial Sequence: Synthetic oligonucleotide
guaaacucauggacucugc

SEQ ID NO: 1250736 - RNA, 19 nt, Artificial Sequence
  Description of Artificial Sequence: Synthetic oligonucleotide
ccaguacuugacgauagcg

SEQ ID NO: 1250737 - RNA, 19 nt, Artificial Sequence
  Description of Artificial Sequence: Synthetic oligonucleotide
ggaaggacagguuugcugu

SEQ ID NO: 1250738 - RNA, 19 nt, Artificial Sequence
  Description of Artificial Sequence: Synthetic oligonucleotide
ugguuaaauuucagaugua

SEQ ID NO: 1250739 - RNA, 19 nt, Artificial Sequence
  Description of Artificial Sequence: Synthetic oligonucleotide
uuccgucaacagaauuugu

SEQ ID NO: 1250740 - RNA, 19 nt, Artificial Sequence
  Description of Artificial Sequence: Synthetic oligonucleotide
guguggaucgaucucaaau

SEQ ID NO: 1250741 - RNA, 19 nt, Artificial Sequence
  Description of Artificial Sequence: Synthetic oligonucleotide
uccggcuauccucaucguc

SEQ ID NO: 1250742 - RNA, 19 nt, Artificial Sequence
  Description of Artificial Sequence: Synthetic oligonucleotide
agacgaaaugucaauucaa

SEQ ID NO: 1250743 - RNA, 19 nt, Artificial Sequence
  Description of Artificial Sequence: Synthetic oligonucleotide
ggcuggucgggguaaaggc

SEQ ID NO: 1250744 - RNA, 19 nt, Artificial Sequence
  Description of Artificial Sequence: Synthetic oligonucleotide
uguuauccaaagggcugug

SEQ ID NO: 1250745 - RNA, 19 nt, Artificial Sequence
  Description of Artificial Sequence: Synthetic oligonucleotide
ugggugaggccauucuguc

SEQ ID NO: 1250746 - RNA, 19 nt, Artificial Sequence
  Description of Artificial Sequence: Synthetic oligonucleotide
guuugcuguugaucucgag

SEQ ID NO: 1250747 - RNA, 19 nt, Artificial Sequence
  Description of Artificial Sequence: Synthetic oligonucleotide
guacuugacgauagcggug

SEQ ID NO: 1250748 - RNA, 19 nt, Artificial Sequence
  Description of Artificial Sequence: Synthetic oligonucleotide
gaucucgagcccucgucuc

SEQ ID NO: 1250749 - RNA, 19 nt, Artificial Sequence
  Description of Artificial Sequence: Synthetic oligonucleotide
acucccguggacacaaaug

SEQ ID NO: 1250750 - RNA, 19 nt, Artificial Sequence
  Description of Artificial Sequence: Synthetic oligonucleotide
agacacaugguccccgcua

SEQ ID NO: 1250751 - RNA, 19 nt, Artificial Sequence
  Description of Artificial Sequence: Synthetic oligonucleotide
gaggccauucugucgcuga

SEQ ID NO: 1250752 - RNA, 19 nt, Artificial Sequence
  Description of Artificial Sequence: Synthetic oligonucleotide
gcagacaccgacgaucugc

SEQ ID NO: 1250753 - RNA, 19 nt, Artificial Sequence
  Description of Artificial Sequence: Synthetic oligonucleotide
ucgaguugccgagugcgga

SEQ ID NO: 1250754 - RNA, 19 nt, Artificial Sequence
  Description of Artificial Sequence: Synthetic oligonucleotide
ucgggaggucggcugaggu

SEQ ID NO: 1250755 - RNA, 19 nt, Artificial Sequence
  Description of Artificial Sequence: Synthetic oligonucleotide
cuguucucagcaguuccag

SEQ ID NO: 1250756 - RNA, 19 nt, Artificial Sequence
  Description of Artificial Sequence: Synthetic oligonucleotide
ucuccguagauggcgugca

SEQ ID NO: 1250757 - RNA, 19 nt, Artificial Sequence
  Description of Artificial Sequence: Synthetic oligonucleotide
ucccggaucugcucugugu

SEQ ID NO: 1250758 - RNA, 19 nt, Artificial Sequence
  Description of Artificial Sequence: Synthetic oligonucleotide
caaaaggggucugcacagg

SEQ ID NO: 1250759 - RNA, 19 nt, Artificial Sequence
  Description of Artificial Sequence: Synthetic oligonucleotide
uccccgcuacagaaggugu

SEQ ID NO: 1250760 - RNA, 19 nt, Artificial Sequence
  Description of Artificial Sequence: Synthetic oligonucleotide
guuauccaaagggcugugc

SEQ ID NO: 1250761 - RNA, 19 nt, Artificial Sequence
  Description of Artificial Sequence: Synthetic oligonucleotide
cugacaccgcucagguuag

SEQ ID NO: 1250762 - RNA, 19 nt, Artificial Sequence
  Description of Artificial Sequence: Synthetic oligonucleotide
acgcucucgaguugccgag

SEQ ID NO: 1250763 - RNA, 19 nt, Artificial Sequence
  Description of Artificial Sequence: Synthetic oligonucleotide
uccguagauggcgugcagu

SEQ ID NO: 1250764 - RNA, 19 nt, Artificial Sequence
  Description of Artificial Sequence: Synthetic oligonucleotide
gugccgaugcagaugcucc

SEQ ID NO: 1250765 - RNA, 19 nt, Artificial Sequence
  Description of Artificial Sequence: Synthetic oligonucleotide
uugagccccucuuggcccc

SEQ ID NO: 1250766 - RNA, 19 nt, Artificial Sequence
  Description of Artificial Sequence: Synthetic oligonucleotide
caccauagaggucgcucag

SEQ ID NO: 1250767 - RNA, 19 nt, Artificial Sequence
  Description of Artificial Sequence: Synthetic oligonucleotide
cacuguuauccaaagggcu

SEQ ID NO: 1250768 - RNA, 19 nt, Artificial Sequence
  Description of Artificial Sequence: Synthetic oligonucleotide
gucgggguaaaggcggcgg

SEQ ID NO: 1250769 - RNA, 19 nt, Artificial Sequence
  Description of Artificial Sequence: Synthetic oligonucleotide
ucucgagcccucgucucag

SEQ ID NO: 1250770 - RNA, 19 nt, Artificial Sequence
  Description of Artificial Sequence: Synthetic oligonucleotide
uccccauauuccuguacau

SEQ ID NO: 1250771 - RNA, 19 nt, Artificial Sequence
  Description of Artificial Sequence: Synthetic oligonucleotide
gccguugagccccucuugg

SEQ ID NO: 1250772 - RNA, 19 nt, Artificial Sequence
  Description of Artificial Sequence: Synthetic oligonucleotide
guuaucagccagggaccgg

SEQ ID NO: 1250773 - RNA, 19 nt, Artificial Sequence
  Description of Artificial Sequence: Synthetic oligonucleotide
acaugcuaacauaauccaa

SEQ ID NO: 1250774 - RNA, 19 nt, Artificial Sequence
  Description of Artificial Sequence: Synthetic oligonucleotide
aggaagguaacuaccccaa

SEQ ID NO: 1250775 - RNA, 19 nt, Artificial Sequence
  Description of Artificial Sequence: Synthetic oligonucleotide
agccguugagccccucuug

SEQ ID NO: 1250776 - RNA, 19 nt, Artificial Sequence
  Description of Artificial Sequence: Synthetic oligonucleotide
ucgcugaggguugauuggu

SEQ ID NO: 1250777 - RNA, 19 nt, Artificial Sequence
  Description of Artificial Sequence: Synthetic oligonucleotide
caacucucuccuguugcag

SEQ ID NO: 1250778 - RNA, 19 nt, Artificial Sequence
  Description of Artificial Sequence: Synthetic oligonucleotide
cugcauagggauguuccuc

SEQ ID NO: 1250779 - RNA, 19 nt, Artificial Sequence
  Description of Artificial Sequence: Synthetic oligonucleotide
cucccguggacacaaaugu

SEQ ID NO: 1250780 - RNA, 19 nt, Artificial Sequence
  Description of Artificial Sequence: Synthetic oligonucleotide
uaucagccagggaccggca

SEQ ID NO: 1250781 - RNA, 19 nt, Artificial Sequence
  Description of Artificial Sequence: Synthetic oligonucleotide
uggucgggguaaaggcggc

SEQ ID NO: 1250782 - RNA, 19 nt, Artificial Sequence
  Description of Artificial Sequence: Synthetic oligonucleotide
cagacaccgacgaucugca

SEQ ID NO: 1250783 - RNA, 19 nt, Artificial Sequence
  Description of Artificial Sequence: Synthetic oligonucleotide
uaccccaaaaggggucugc

SEQ ID NO: 1250784 - RNA, 19 nt, Artificial Sequence
  Description of Artificial Sequence: Synthetic oligonucleotide
cucucgaguugccgagugc

SEQ ID NO: 1250785 - RNA, 19 nt, Artificial Sequence
  Description of Artificial Sequence: Synthetic oligonucleotide
ccgcuggccauguuggugg

SEQ ID NO: 1250786 - RNA, 19 nt, Artificial Sequence
  Description of Artificial Sequence: Synthetic oligonucleotide
caaagcugauguagugcca

SEQ ID NO: 1250787 - RNA, 19 nt, Artificial Sequence
  Description of Artificial Sequence: Synthetic oligonucleotide
augcccugcccauuccacu

SEQ ID NO: 1250788 - RNA, 19 nt, Artificial Sequence
  Description of Artificial Sequence: Synthetic oligonucleotide
gcuggucgggguaaaggcg

SEQ ID NO: 1250789 - RNA, 19 nt, Artificial Sequence
  Description of Artificial Sequence: Synthetic oligonucleotide
guacgcucucgaguugccg

SEQ ID NO: 1250790 - RNA, 19 nt, Artificial Sequence
  Description of Artificial Sequence: Synthetic oligonucleotide
cuacaaacucuuccgucaa

SEQ ID NO: 1250791 - RNA, 19 nt, Artificial Sequence
  Description of Artificial Sequence: Synthetic oligonucleotide
uugccgagugcggaucagc

SEQ ID NO: 1250792 - RNA, 19 nt, Artificial Sequence
  Description of Artificial Sequence: Synthetic oligonucleotide
gaauuaccucuggagaagu

SEQ ID NO: 1250793 - RNA, 19 nt, Artificial Sequence
  Description of Artificial Sequence: Synthetic oligonucleotide
ugacgauagcggugaccug

SEQ ID NO: 1250794 - RNA, 19 nt, Artificial Sequence
  Description of Artificial Sequence: Synthetic oligonucleotide
gguuugacagcugggcgug

SEQ ID NO: 1250795 - RNA, 19 nt, Artificial Sequence
  Description of Artificial Sequence: Synthetic oligonucleotide
cagcggacugucgaaugcc

SEQ ID NO: 1250796 - RNA, 19 nt, Artificial Sequence
  Description of Artificial Sequence: Synthetic oligonucleotide
ccuguacaugcuaacauaa

SEQ ID NO: 1250797 - RNA, 19 nt, Artificial Sequence
  Description of Artificial Sequence: Synthetic oligonucleotide
guggaucgaucucaaauau

SEQ ID NO: 1250798 - RNA, 19 nt, Artificial Sequence
  Description of Artificial Sequence: Synthetic oligonucleotide
cagguguggaucgaucuca

SEQ ID NO: 1250799 - RNA, 19 nt, Artificial Sequence
  Description of Artificial Sequence: Synthetic oligonucleotide
guccccgcuacagaaggug

SEQ ID NO: 1250800 - RNA, 19 nt, Artificial Sequence
  Description of Artificial Sequence: Synthetic oligonucleotide
caaaggcgccuuccacucc

SEQ ID NO: 1250801 - RNA, 19 nt, Artificial Sequence
  Description of Artificial Sequence: Synthetic oligonucleotide
guagcuccucagugcagac

SEQ ID NO: 1250802 - RNA, 19 nt, Artificial Sequence
  Description of Artificial Sequence: Synthetic oligonucleotide
ucggggauguuggcagaag

SEQ ID NO: 1250803 - RNA, 19 nt, Artificial Sequence
  Description of Artificial Sequence: Synthetic oligonucleotide
aaggccggagaggcacuag

SEQ ID NO: 1250804 - RNA, 19 nt, Artificial Sequence
  Description of Artificial Sequence: Synthetic oligonucleotide
cugugauacucuuguaggu

SEQ ID NO: 1250805 - RNA, 19 nt, Artificial Sequence
  Description of Artificial Sequence: Synthetic oligonucleotide
uaaaggcggcggcacucuc

SEQ ID NO: 1250806 - RNA, 19 nt, Artificial Sequence
  Description of Artificial Sequence: Synthetic oligonucleotide
cugaagucacugggagccg

SEQ ID NO: 1250807 - RNA, 19 nt, Artificial Sequence
  Description of Artificial Sequence: Synthetic oligonucleotide
guggcaaaggcgccuucca

SEQ ID NO: 1250808 - RNA, 19 nt, Artificial Sequence
  Description of Artificial Sequence: Synthetic oligonucleotide
gcagcggacugucgaaugc

SEQ ID NO: 1250809 - RNA, 19 nt, Artificial Sequence
  Description of Artificial Sequence: Synthetic oligonucleotide
cugugggucuuccgucagc

SEQ ID NO: 1250810 - RNA, 19 nt, Artificial Sequence
  Description of Artificial Sequence: Synthetic oligonucleotide
uguugcagguguggaucga

SEQ ID NO: 1250811 - RNA, 19 nt, Artificial Sequence
  Description of Artificial Sequence: Synthetic oligonucleotide
cucuuugggaaguuugaau

SEQ ID NO: 1250812 - RNA, 19 nt, Artificial Sequence
  Description of Artificial Sequence: Synthetic oligonucleotide
cccaaaaggggucugcaca

SEQ ID NO: 1250813 - RNA, 19 nt, Artificial Sequence
  Description of Artificial Sequence: Synthetic oligonucleotide
agacaccgacgaucugcag

SEQ ID NO: 1250814 - RNA, 19 nt, Artificial Sequence
  Description of Artificial Sequence: Synthetic oligonucleotide
acauaucgagccaggcccu

SEQ ID NO: 1250815 - RNA, 19 nt, Artificial Sequence
  Description of Artificial Sequence: Synthetic oligonucleotide
auuuguaaccaggguccau

SEQ ID NO: 1250816 - RNA, 19 nt, Artificial Sequence
  Description of Artificial Sequence: Synthetic oligonucleotide
cuuccgucagcagcaugug

SEQ ID NO: 1250817 - RNA, 19 nt, Artificial Sequence
  Description of Artificial Sequence: Synthetic oligonucleotide
gacugucgaaugccacauc

SEQ ID NO: 1250818 - RNA, 19 nt, Artificial Sequence
  Description of Artificial Sequence: Synthetic oligonucleotide
uccugacuccugguuaaau

SEQ ID NO: 1250819 - RNA, 19 nt, Artificial Sequence
  Description of Artificial Sequence: Synthetic oligonucleotide
gaucgaucucaaauauggu

SEQ ID NO: 1250820 - RNA, 19 nt, Artificial Sequence
  Description of Artificial Sequence: Synthetic oligonucleotide
agauggcgugcagucccgg

SEQ ID NO: 1250821 - RNA, 19 nt, Artificial Sequence
  Description of Artificial Sequence: Synthetic oligonucleotide
cucgagcccucgucucagg

SEQ ID NO: 1250822 - RNA, 19 nt, Artificial Sequence
  Description of Artificial Sequence: Synthetic oligonucleotide
ggucgcucaggccaaagcu

SEQ ID NO: 1250823 - RNA, 19 nt, Artificial Sequence
  Description of Artificial Sequence: Synthetic oligonucleotide
gacaccgcucagguuagaa

SEQ ID NO: 1250824 - RNA, 19 nt, Artificial Sequence
  Description of Artificial Sequence: Synthetic oligonucleotide
accgcucagguuagaacca

SEQ ID NO: 1250825 - RNA, 19 nt, Artificial Sequence
  Description of Artificial Sequence: Synthetic oligonucleotide
augucaauucaaagccaaa

SEQ ID NO: 1250826 - RNA, 19 nt, Artificial Sequence
  Description of Artificial Sequence: Synthetic oligonucleotide
ggaaugagggcuccugacu

SEQ ID NO: 1250827 - RNA, 19 nt, Artificial Sequence
  Description of Artificial Sequence: Synthetic oligonucleotide
ggauguuccuccguggcaa

SEQ ID NO: 1250828 - RNA, 19 nt, Artificial Sequence
  Description of Artificial Sequence: Synthetic oligonucleotide
guuucuccccuccgcaugu

SEQ ID NO: 1250829 - RNA, 19 nt, Artificial Sequence
  Description of Artificial Sequence: Synthetic oligonucleotide
augguccccgcuacagaag

SEQ ID NO: 1250830 - RNA, 19 nt, Artificial Sequence
  Description of Artificial Sequence: Synthetic oligonucleotide
gaguugccgagugcggauc

SEQ ID NO: 1250831 - RNA, 19 nt, Artificial Sequence
  Description of Artificial Sequence: Synthetic oligonucleotide
ccgaucaugggugaggcca

SEQ ID NO: 1250832 - RNA, 19 nt, Artificial Sequence
  Description of Artificial Sequence: Synthetic oligonucleotide
cuccguagauggcgugcag

SEQ ID NO: 1250833 - RNA, 19 nt, Artificial Sequence
  Description of Artificial Sequence: Synthetic oligonucleotide
caaccaguacuugacgaua

SEQ ID NO: 1250834 - RNA, 19 nt, Artificial Sequence
  Description of Artificial Sequence: Synthetic oligonucleotide
ggcguguaggacaggggcc

SEQ ID NO: 1250835 - RNA, 19 nt, Artificial Sequence
  Description of Artificial Sequence: Synthetic oligonucleotide
ggaccacccaaccaguacu

SEQ ID NO: 1250836 - RNA, 19 nt, Artificial Sequence
  Description of Artificial Sequence: Synthetic oligonucleotide
uagcggugaccuggagcgg

SEQ ID NO: 1250837 - RNA, 19 nt, Artificial Sequence
  Description of Artificial Sequence: Synthetic oligonucleotide
ggaccuguggugggcacag

SEQ ID NO: 1250838 - RNA, 19 nt, Artificial Sequence
  Description of Artificial Sequence: Synthetic oligonucleotide
ugggaccuguggugggcac

SEQ ID NO: 1250839 - RNA, 19 nt, Artificial Sequence
  Description of Artificial Sequence: Synthetic oligonucleotide
gcucucgaguugccgagug

SEQ ID NO: 1250840 - RNA, 19 nt, Artificial Sequence
  Description of Artificial Sequence: Synthetic oligonucleotide
agcggacugucgaaugcca

SEQ ID NO: 1250841 - RNA, 19 nt, Artificial Sequence
  Description of Artificial Sequence: Synthetic oligonucleotide
ggaccggcacuguucucag

SEQ ID NO: 1250842 - RNA, 19 nt, Artificial Sequence
  Description of Artificial Sequence: Synthetic oligonucleotide
gcuagugcagcggacuguc

SEQ ID NO: 1250843 - RNA, 19 nt, Artificial Sequence
  Description of Artificial Sequence: Synthetic oligonucleotide
ggguuugacagcugggcgu

SEQ ID NO: 1250844 - RNA, 19 nt, Artificial Sequence
  Description of Artificial Sequence: Synthetic oligonucleotide
gaccggcacuguucucagc

SEQ ID NO: 1250845 - RNA, 19 nt, Artificial Sequence
  Description of Artificial Sequence: Synthetic oligonucleotide
cggcguguaggacaggggc

SEQ ID NO: 1250846 - RNA, 19 nt, Artificial Sequence
  Description of Artificial Sequence: Synthetic oligonucleotide
gacgaucugcaggaaggua

SEQ ID NO: 1250847 - RNA, 19 nt, Artificial Sequence
  Description of Artificial Sequence: Synthetic oligonucleotide
ccauuccacugcugggccg

SEQ ID NO: 1250848 - RNA, 19 nt, Artificial Sequence
  Description of Artificial Sequence: Synthetic oligonucleotide
gggccgaucaugggugagg

SEQ ID NO: 1250849 - RNA, 19 nt, Artificial Sequence
  Description of Artificial Sequence: Synthetic oligonucleotide
gggaccggcacuguucuca

SEQ ID NO: 1250850 - RNA, 19 nt, Artificial Sequence
  Description of Artificial Sequence: Synthetic oligonucleotide
cuguuauccaaagggcugu

SEQ ID NO: 1250851 - RNA, 19 nt, Artificial Sequence
  Description of Artificial Sequence: Synthetic oligonucleotide
uucugucgcugaggguuga

SEQ ID NO: 1250852 - RNA, 19 nt, Artificial Sequence
  Description of Artificial Sequence: Synthetic oligonucleotide
caggagucugccccugaga

SEQ ID NO: 1250853 - RNA, 19 nt, Artificial Sequence
  Description of Artificial Sequence: Synthetic oligonucleotide
gcugucuuugcggcucggg

SEQ ID NO: 1250854 - RNA, 19 nt, Artificial Sequence
  Description of Artificial Sequence: Synthetic oligonucleotide
ggcgccuuccacucccgug

SEQ ID NO: 1250855 - RNA, 19 nt, Artificial Sequence
  Description of Artificial Sequence: Synthetic oligonucleotide
guugaucucgagcccucgu

SEQ ID NO: 1250856 - RNA, 19 nt, Artificial Sequence
  Description of Artificial Sequence: Synthetic oligonucleotide
gggauguuccuccguggca

SEQ ID NO: 1250857 - RNA, 19 nt, Artificial Sequence
  Description of Artificial Sequence: Synthetic oligonucleotide
gccgaugcagaugcuccgg

SEQ ID NO: 1250858 - RNA, 19 nt, Artificial Sequence
  Description of Artificial Sequence: Synthetic oligonucleotide
ucguccucgggaggucggc

SEQ ID NO: 1250859 - RNA, 19 nt, Artificial Sequence
  Description of Artificial Sequence: Synthetic oligonucleotide
acgauagcggugaccugga

SEQ ID NO: 1250860 - RNA, 19 nt, Artificial Sequence
  Description of Artificial Sequence: Synthetic oligonucleotide
cgaucugcaggaagguaac

SEQ ID NO: 1250861 - RNA, 19 nt, Artificial Sequence
  Description of Artificial Sequence: Synthetic oligonucleotide
cucacacuuguccuuuuau

SEQ ID NO: 1250862 - RNA, 19 nt, Artificial Sequence
  Description of Artificial Sequence: Synthetic oligonucleotide
ggugaccuggagcggguuc

SEQ ID NO: 1250863 - RNA, 19 nt, Artificial Sequence
  Description of Artificial Sequence: Synthetic oligonucleotide
cucgguccgucuguuccug

SEQ ID NO: 1250864 - RNA, 19 nt, Artificial Sequence
  Description of Artificial Sequence: Synthetic oligonucleotide
ggauguuggcagaaggacu

SEQ ID NO: 1250865 - RNA, 19 nt, Artificial Sequence
  Description of Artificial Sequence: Synthetic oligonucleotide
guaggacaggggccugguc

SEQ ID NO: 1250866 - RNA, 19 nt, Artificial Sequence
  Description of Artificial Sequence: Synthetic oligonucleotide
gggaaagagugaggcgaag

SEQ ID NO: 1250867 - RNA, 19 nt, Artificial Sequence
  Description of Artificial Sequence: Synthetic oligonucleotide
ucgguccgucuguuccugu

SEQ ID NO: 1250868 - RNA, 19 nt, Artificial Sequence
  Description of Artificial Sequence: Synthetic oligonucleotide
uccccuccgcaugucaguu

SEQ ID NO: 1250869 - RNA, 19 nt, Artificial Sequence
  Description of Artificial Sequence: Synthetic oligonucleotide
ccacccaaccaguacuuga

SEQ ID NO: 1250870 - RNA, 19 nt, Artificial Sequence
  Description of Artificial Sequence: Synthetic oligonucleotide
gaccuggagcggguucggc

SEQ ID NO: 1250871 - RNA, 19 nt, Artificial Sequence
  Description of Artificial Sequence: Synthetic oligonucleotide
gacuccccuguuucucucu

SEQ ID NO: 1250872 - RNA, 19 nt, Artificial Sequence
  Description of Artificial Sequence: Synthetic oligonucleotide
gagugcggaucagcucgug

SEQ ID NO: 1250873 - RNA, 19 nt, Artificial Sequence
  Description of Artificial Sequence: Synthetic oligonucleotide
ccguugagccccucuuggc

SEQ ID NO: 1250874 - RNA, 19 nt, Artificial Sequence
  Description of Artificial Sequence: Synthetic oligonucleotide
ggcugugugccgaugcaga

SEQ ID NO: 1250875 - RNA, 19 nt, Artificial Sequence
  Description of Artificial Sequence: Synthetic oligonucleotide
gcucagguuagaaccaucu

SEQ ID NO: 1250876 - RNA, 19 nt, Artificial Sequence
  Description of Artificial Sequence: Synthetic oligonucleotide
gaaggacagguuugcuguu

SEQ ID NO: 1250877 - RNA, 19 nt, Artificial Sequence
  Description of Artificial Sequence: Synthetic oligonucleotide
ccgaugcagaugcuccggc

SEQ ID NO: 1250878 - RNA, 19 nt, Artificial Sequence
  Description of Artificial Sequence: Synthetic oligonucleotide
ccccaaaaggggucugcac

SEQ ID NO: 1250879 - RNA, 19 nt, Artificial Sequence
  Description of Artificial Sequence: Synthetic oligonucleotide
gguccgucuguuccuguaa

SEQ ID NO: 1250880 - RNA, 19 nt, Artificial Sequence
  Description of Artificial Sequence: Synthetic oligonucleotide
ggucgggguaaaggcggcg

SEQ ID NO: 1250881 - RNA, 19 nt, Artificial Sequence
  Description of Artificial Sequence: Synthetic oligonucleotide
ggacuccccauauuccugu

SEQ ID NO: 1250882 - RNA, 19 nt, Artificial Sequence
  Description of Artificial Sequence: Synthetic oligonucleotide
gccaagacacauggucccc

SEQ ID NO: 1250883 - RNA, 19 nt, Artificial Sequence
  Description of Artificial Sequence: Synthetic oligonucleotide
gaucugcaggaagguaacu

SEQ ID NO: 1250884 - RNA, 19 nt, Artificial Sequence
  Description of Artificial Sequence: Synthetic oligonucleotide
uuucuccccuccgcauguc

SEQ ID NO: 1250885 - RNA, 19 nt, Artificial Sequence
  Description of Artificial Sequence: Synthetic oligonucleotide
ggcacucuccguagauggc

SEQ ID NO: 1250886 - RNA, 19 nt, Artificial Sequence
  Description of Artificial Sequence: Synthetic oligonucleotide
guaaaggcggcggcacucu

SEQ ID NO: 1250887 - RNA, 19 nt, Artificial Sequence
  Description of Artificial Sequence: Synthetic oligonucleotide
cacucuccguagauggcgu

SEQ ID NO: 1250888 - RNA, 19 nt, Artificial Sequence
  Description of Artificial Sequence: Synthetic oligonucleotide
ccggcguguaggacagggg

SEQ ID NO: 1250889 - RNA, 19 nt, Artificial Sequence
  Description of Artificial Sequence: Synthetic oligonucleotide
gcggguucggcuggucggg

SEQ ID NO: 1250890 - RNA, 19 nt, Artificial Sequence
  Description of Artificial Sequence: Synthetic oligonucleotide
gaaggccggagaggcacua

SEQ ID NO: 1250891 - RNA, 19 nt, Artificial Sequence
  Description of Artificial Sequence: Synthetic oligonucleotide
uucggcuggucgggguaaa

SEQ ID NO: 1250892 - RNA, 19 nt, Artificial Sequence
  Description of Artificial Sequence: Synthetic oligonucleotide
ccaggcuagugcagcggac

SEQ ID NO: 1250893 - RNA, 19 nt, Artificial Sequence
  Description of Artificial Sequence: Synthetic oligonucleotide
gagccguugagccccucuu

SEQ ID NO: 1250894 - RNA, 19 nt, Artificial Sequence
  Description of Artificial Sequence: Synthetic oligonucleotide
gugggaccuguggugggca

SEQ ID NO: 1250895 - RNA, 19 nt, Artificial Sequence
  Description of Artificial Sequence: Synthetic oligonucleotide
ugacaccgcucagguuaga

SEQ ID NO: 1250896 - RNA, 19 nt, Artificial Sequence
  Description of Artificial Sequence: Synthetic oligonucleotide
gccgaucaugggugaggcc

SEQ ID NO: 1250897 - RNA, 19 nt, Artificial Sequence
  Description of Artificial Sequence: Synthetic oligonucleotide
cccgcuacagaagguguuc

SEQ ID NO: 1250898 - RNA, 19 nt, Artificial Sequence
  Description of Artificial Sequence: Synthetic oligonucleotide
accacucgguccgucuguu

SEQ ID NO: 1250899 - RNA, 19 nt, Artificial Sequence
  Description of Artificial Sequence: Synthetic oligonucleotide
uggagcggguucggcuggu

SEQ ID NO: 1250900 - RNA, 19 nt, Artificial Sequence
  Description of Artificial Sequence: Synthetic oligonucleotide
gguucggcuggucggggua

SEQ ID NO: 1250901 - RNA, 19 nt, Artificial Sequence
  Description of Artificial Sequence: Synthetic oligonucleotide
guucggcuggucgggguaa

SEQ ID NO: 1250902 - RNA, 19 nt, Artificial Sequence
  Description of Artificial Sequence: Synthetic oligonucleotide
gagaggaaugagggcuccu

SEQ ID NO: 1250903 - RNA, 19 nt, Artificial Sequence
  Description of Artificial Sequence: Synthetic oligonucleotide
gcuucuuuucaggccagcu

SEQ ID NO: 1250904 - RNA, 19 nt, Artificial Sequence
  Description of Artificial Sequence: Synthetic oligonucleotide
caccugugauacucuugua

SEQ ID NO: 1250905 - RNA, 19 nt, Artificial Sequence
  Description of Artificial Sequence: Synthetic oligonucleotide
gaccacccaaccaguacuu

SEQ ID NO: 1250906 - RNA, 19 nt, Artificial Sequence
  Description of Artificial Sequence: Synthetic oligonucleotide
ccaaccaguacuugacgau

SEQ ID NO: 1250907 - RNA, 19 nt, Artificial Sequence
  Description of Artificial Sequence: Synthetic oligonucleotide
gcggacugucgaaugccac

SEQ ID NO: 1250908 - RNA, 19 nt, Artificial Sequence
  Description of Artificial Sequence: Synthetic oligonucleotide
gcugggccgaguguagcuc

SEQ ID NO: 1250909 - RNA, 19 nt, Artificial Sequence
  Description of Artificial Sequence: Synthetic oligonucleotide
ccugcccauuccacugcug

SEQ ID NO: 1250910 - RNA, 19 nt, Artificial Sequence
  Description of Artificial Sequence: Synthetic oligonucleotide
cggcuggucgggguaaagg

SEQ ID NO: 1250911 - RNA, 19 nt, Artificial Sequence
  Description of Artificial Sequence: Synthetic oligonucleotide
gaagucacugggagccguu

SEQ ID NO: 1250912 - RNA, 19 nt, Artificial Sequence
  Description of Artificial Sequence: Synthetic oligonucleotide
gaggucggcugaggucauc

SEQ ID NO: 1250913 - RNA, 19 nt, Artificial Sequence
  Description of Artificial Sequence: Synthetic oligonucleotide
ggcagacuccccuguuucu

SEQ ID NO: 1250914 - RNA, 19 nt, Artificial Sequence
  Description of Artificial Sequence: Synthetic oligonucleotide
cccaggcuagugcagcgga

SEQ ID NO: 1250915 - RNA, 19 nt, Artificial Sequence
  Description of Artificial Sequence: Synthetic oligonucleotide
ggggccgaucaugggugag

SEQ ID NO: 1250916 - RNA, 19 nt, Artificial Sequence
  Description of Artificial Sequence: Synthetic oligonucleotide
agaggucgcucaggccaaa

SEQ ID NO: 1250917 - RNA, 19 nt, Artificial Sequence
  Description of Artificial Sequence: Synthetic oligonucleotide
ggagccguugagccccucu

SEQ ID NO: 1250918 - RNA, 19 nt, Artificial Sequence
  Description of Artificial Sequence: Synthetic oligonucleotide
gcguguaggacaggggccu

SEQ ID NO: 1250919 - RNA, 19 nt, Artificial Sequence
  Description of Artificial Sequence: Synthetic oligonucleotide
cuccggggcugugugccga

SEQ ID NO: 1250920 - RNA, 19 nt, Artificial Sequence
  Description of Artificial Sequence: Synthetic oligonucleotide
cgcucagguuagaaccauc

SEQ ID NO: 1250921 - RNA, 19 nt, Artificial Sequence
  Description of Artificial Sequence: Synthetic oligonucleotide
cgggaggucggcugagguc

SEQ ID NO: 1250922 - RNA, 19 nt, Artificial Sequence
  Description of Artificial Sequence: Synthetic oligonucleotide
caucagcuccgcuggccau

SEQ ID NO: 1250923 - RNA, 19 nt, Artificial Sequence
  Description of Artificial Sequence: Synthetic oligonucleotide
ccgaguguagcuccucagu

SEQ ID NO: 1250924 - RNA, 19 nt, Artificial Sequence
  Description of Artificial Sequence: Synthetic oligonucleotide
agcugggcgugaggccccu

SEQ ID NO: 1250925 - RNA, 19 nt, Artificial Sequence
  Description of Artificial Sequence: Synthetic oligonucleotide
gccuggucauggguuugac

SEQ ID NO: 1250926 - RNA, 19 nt, Artificial Sequence
  Description of Artificial Sequence: Synthetic oligonucleotide
ccguggacacaaaugugau

SEQ ID NO: 1250927 - RNA, 19 nt, Artificial Sequence
  Description of Artificial Sequence: Synthetic oligonucleotide
ggcuagugcagcggacugu

SEQ ID NO: 1250928 - RNA, 19 nt, Artificial Sequence
  Description of Artificial Sequence: Synthetic oligonucleotide
cgauagcggugaccuggag

SEQ ID NO: 1250929 - RNA, 19 nt, Artificial Sequence
  Description of Artificial Sequence: Synthetic oligonucleotide
cuccggcuauccucaucgu

SEQ ID NO: 1250930 - RNA, 19 nt, Artificial Sequence
  Description of Artificial Sequence: Synthetic oligonucleotide
ggggcagacuccccuguuu

SEQ ID NO: 1250931 - RNA, 19 nt, Artificial Sequence
  Description of Artificial Sequence: Synthetic oligonucleotide
cccuccgcaugucaguuau

SEQ ID NO: 1250932 - RNA, 19 nt, Artificial Sequence
  Description of Artificial Sequence: Synthetic oligonucleotide
cagugcagacaccgacgau

SEQ ID NO: 1250933 - RNA, 19 nt, Artificial Sequence
  Description of Artificial Sequence: Synthetic oligonucleotide
ggcgaaggccggagaggca

SEQ ID NO: 1250934 - RNA, 19 nt, Artificial Sequence
  Description of Artificial Sequence: Synthetic oligonucleotide
ggguucggcuggucggggu

SEQ ID NO: 1250935 - RNA, 19 nt, Artificial Sequence
  Description of Artificial Sequence: Synthetic oligonucleotide
ggagcggguucggcugguc

SEQ ID NO: 1250936 - RNA, 19 nt, Artificial Sequence
  Description of Artificial Sequence: Synthetic oligonucleotide
caccgacgaucugcaggaa

SEQ ID NO: 1250937 - RNA, 19 nt, Artificial Sequence
  Description of Artificial Sequence: Synthetic oligonucleotide
ccguggcaaaggcgccuuc

SEQ ID NO: 1250938 - RNA, 19 nt, Artificial Sequence
  Description of Artificial Sequence: Synthetic oligonucleotide
cggguucggcuggucgggg

SEQ ID NO: 1250939 - RNA, 19 nt, Artificial Sequence
  Description of Artificial Sequence: Synthetic oligonucleotide
gguccccgcuacagaaggu

SEQ ID NO: 1250940 - RNA, 19 nt, Artificial Sequence
  Description of Artificial Sequence: Synthetic oligonucleotide
ccgcuacagaagguguucu

SEQ ID NO: 1250941 - RNA, 19 nt, Artificial Sequence
  Description of Artificial Sequence: Synthetic oligonucleotide
ccaugucaccugugauacu

SEQ ID NO: 1250942 - RNA, 19 nt, Artificial Sequence
  Description of Artificial Sequence: Synthetic oligonucleotide
gugugccgaugcagaugcu

SEQ ID NO: 1250943 - RNA, 19 nt, Artificial Sequence
  Description of Artificial Sequence: Synthetic oligonucleotide
ggucuuccgucagcagcau

SEQ ID NO: 1250944 - RNA, 19 nt, Artificial Sequence
  Description of Artificial Sequence: Synthetic oligonucleotide
cgguccgucuguuccugua

SEQ ID NO: 1250945 - RNA, 19 nt, Artificial Sequence
  Description of Artificial Sequence: Synthetic oligonucleotide
ccccgcuacagaagguguu

SEQ ID NO: 1250946 - RNA, 19 nt, Artificial Sequence
  Description of Artificial Sequence: Synthetic oligonucleotide
cccugcccauuccacugcu

SEQ ID NO: 1250947 - RNA, 19 nt, Artificial Sequence
  Description of Artificial Sequence: Synthetic oligonucleotide
cgacgaucugcaggaaggu

SEQ ID NO: 1250948 - RNA, 19 nt, Artificial Sequence
  Description of Artificial Sequence: Synthetic oligonucleotide
gcggugaccuggagcgggu

SEQ ID NO: 1250949 - RNA, 19 nt, Artificial Sequence
  Description of Artificial Sequence: Synthetic oligonucleotide
ggaggucggcugaggucau

SEQ ID NO: 1250950 - RNA, 19 nt, Artificial Sequence
  Description of Artificial Sequence: Synthetic oligonucleotide
ccgcucagguuagaaccau

SEQ ID NO: 1250951 - RNA, 19 nt, Artificial Sequence
  Description of Artificial Sequence: Synthetic oligonucleotide
cgcucucgaguugccgagu

SEQ ID NO: 1250952 - RNA, 19 nt, Artificial Sequence
  Description of Artificial Sequence: Synthetic oligonucleotide
cagcuccgcuggccauguu

SEQ ID NO: 1250953 - RNA, 19 nt, Artificial Sequence
  Description of Artificial Sequence: Synthetic oligonucleotide
aaauauaugggauggaugc

SEQ ID NO: 1250954 - RNA, 19 nt, Artificial Sequence
  Description of Artificial Sequence: Synthetic oligonucleotide
  modified_base (2)..(2): a, c, u, g, unknown or other
anucauauuuuauuuauag

SEQ ID NO: 1250955 - RNA, 19 nt, Artificial Sequence
  Description of Artificial Sequence: Synthetic oligonucleotide
uuuauagcagcauuggucg

SEQ ID NO: 1250956 - RNA, 19 nt, Artificial Sequence
  Description of Artificial Sequence: Synthetic oligonucleotide
uuaucagacauuuugaagc

SEQ ID NO: 1250957 - RNA, 19 nt, Artificial Sequence
  Description of Artificial Sequence: Synthetic oligonucleotide
uauaagugcacuaaugaag

SEQ ID NO: 1250958 - RNA, 19 nt, Artificial Sequence
  Description of Artificial Sequence: Synthetic oligonucleotide
acagauauacaccugauag

SEQ ID NO: 1250959 - RNA, 19 nt, Artificial Sequence
  Description of Artificial Sequence: Synthetic oligonucleotide
agaugagagacuuucauuc

SEQ ID NO: 1250960 - RNA, 19 nt, Artificial Sequence
  Description of Artificial Sequence: Synthetic oligonucleotide
auaugaugaaaacauuggc

SEQ ID NO: 1250961 - RNA, 19 nt, Artificial Sequence
  Description of Artificial Sequence: Synthetic oligonucleotide
  modified_base (10)..(10): a, c, u, g, unknown or other
ugagauuaanccuuacaag

SEQ ID NO: 1250962 - RNA, 19 nt, Artificial Sequence
  Description of Artificial Sequence: Synthetic oligonucleotide
aacagcuauacagauauac

SEQ ID NO: 1250963 - RNA, 19 nt, Artificial Sequence
  Description of Artificial Sequence: Synthetic oligonucleotide
acauaaacgucacacauuc

SEQ ID NO: 1250964 - RNA, 19 nt, Artificial Sequence
  Description of Artificial Sequence: Synthetic oligonucleotide
acaaccaaaacuucauagc

SEQ ID NO: 1250965 - RNA, 19 nt, Artificial Sequence
  Description of Artificial Sequence: Synthetic oligonucleotide
aaugucuugcugcagaugu

SEQ ID NO: 1250966 - RNA, 19 nt, Artificial Sequence
  Description of Artificial Sequence: Synthetic oligonucleotide
  modified_base (9)..(9): a, c, u, g, unknown or other
gagauuaanccuuacaaga

SEQ ID NO: 1250967 - RNA, 19 nt, Artificial Sequence
  Description of Artificial Sequence: Synthetic oligonucleotide
uuuguggaacuucugacag

SEQ ID NO: 1250968 - RNA, 19 nt, Artificial Sequence
  Description of Artificial Sequence: Synthetic oligonucleotide
  modified_base (4)..(4): a, c, u, g, unknown or other
uuanucauauuuuauuuau

SEQ ID NO: 1250969 - RNA, 19 nt, Artificial Sequence
  Description of Artificial Sequence: Synthetic oligonucleotide
  modified_base (12)..(12): a, c, u, g, unknown or other
aaugagauuaanccuuaca

SEQ ID NO: 1250970 - RNA, 19 nt, Artificial Sequence
  Description of Artificial Sequence: Synthetic oligonucleotide
ucguuuaacaaguugagaa

SEQ ID NO: 1250971 - RNA, 19 nt, Artificial Sequence
  Description of Artificial Sequence: Synthetic oligonucleotide
  modified_base (3)..(3): a, c, u, g, unknown or other
aanccuuacaagaacauga

SEQ ID NO: 1250972 - RNA, 19 nt, Artificial Sequence
  Description of Artificial Sequence: Synthetic oligonucleotide
guaguuuugcuccaaagcc

SEQ ID NO: 1250973 - RNA, 19 nt, Artificial Sequence
  Description of Artificial Sequence: Synthetic oligonucleotide
auagcucaguuauaagugc

SEQ ID NO: 1250974 - RNA, 19 nt, Artificial Sequence
  Description of Artificial Sequence: Synthetic oligonucleotide
aaaguaguggcucacucga

SEQ ID NO: 1250975 - RNA, 19 nt, Artificial Sequence
  Description of Artificial Sequence: Synthetic oligonucleotide
uguguaguccccuugcagg

SEQ ID NO: 1250976 - RNA, 19 nt, Artificial Sequence
  Description of Artificial Sequence: Synthetic oligonucleotide
ucugauagcaagcuugucu

SEQ ID NO: 1250977 - RNA, 19 nt, Artificial Sequence
  Description of Artificial Sequence: Synthetic oligonucleotide
caaguagcgauauaguggc

SEQ ID NO: 1250978 - RNA, 19 nt, Artificial Sequence
  Description of Artificial Sequence: Synthetic oligonucleotide
ucacucgaaacccacacag

SEQ ID NO: 1250979 - RNA, 19 nt, Artificial Sequence
  Description of Artificial Sequence: Synthetic oligonucleotide
agaaauuugccauaccuga

SEQ ID NO: 1250980 - RNA, 19 nt, Artificial Sequence
  Description of Artificial Sequence: Synthetic oligonucleotide
  modified_base (7)..(7): a, c, u, g, unknown or other
gauuaanccuuacaagaac

SEQ ID NO: 1250981 - RNA, 19 nt, Artificial Sequence
  Description of Artificial Sequence: Synthetic oligonucleotide
auuauaaagucccuguggu

SEQ ID NO: 1250982 - RNA, 19 nt, Artificial Sequence
  Description of Artificial Sequence: Synthetic oligonucleotide
cuuucugauagcaagcuug

SEQ ID NO: 1250983 - RNA, 19 nt, Artificial Sequence
  Description of Artificial Sequence: Synthetic oligonucleotide
uuucuauccaaucuaagua

SEQ ID NO: 1250984 - RNA, 19 nt, Artificial Sequence
  Description of Artificial Sequence: Synthetic oligonucleotide
uuuugaagcaugauaacau

SEQ ID NO: 1250985 - RNA, 19 nt, Artificial Sequence
  Description of Artificial Sequence: Synthetic oligonucleotide
uugaacauaaacgucacac

SEQ ID NO: 1250986 - RNA, 19 nt, Artificial Sequence
  Description of Artificial Sequence: Synthetic oligonucleotide
  modified_base (6)..(6): a, c, u, g, unknown or other
uauuanucauauuuuauuu

SEQ ID NO: 1250987 - RNA, 19 nt, Artificial Sequence
  Description of Artificial Sequence: Synthetic oligonucleotide
uccacuaaagggaaguagc

SEQ ID NO: 1250988 - RNA, 19 nt, Artificial Sequence
  Description of Artificial Sequence: Synthetic oligonucleotide
aaggacaacacaaguagcg

SEQ ID NO: 1250989 - RNA, 19 nt, Artificial Sequence
  Description of Artificial Sequence: Synthetic oligonucleotide
  modified_base (7)..(7): a, c, u, g, unknown or other
auauuanucauauuuuauu

SEQ ID NO: 1250990 - RNA, 19 nt, Artificial Sequence
  Description of Artificial Sequence: Synthetic oligonucleotide
aauauaugggauggaugcc

SEQ ID NO: 1250991 - RNA, 19 nt, Artificial Sequence
  Description of Artificial Sequence: Synthetic oligonucleotide
aauggauaugaugaaaaca

SEQ ID NO: 1250992 - RNA, 19 nt, Artificial Sequence
  Description of Artificial Sequence: Synthetic oligonucleotide
ugaguuauccacuguaggc

SEQ ID NO: 1250993 - RNA, 19 nt, Artificial Sequence
  Description of Artificial Sequence: Synthetic oligonucleotide
ggauacuugauacugagcc

SEQ ID NO: 1250994 - RNA, 19 nt, Artificial Sequence
  Description of Artificial Sequence: Synthetic oligonucleotide
aagauuggcccauagcuca

SEQ ID NO: 1250995 - RNA, 19 nt, Artificial Sequence
  Description of Artificial Sequence: Synthetic oligonucleotide
  modified_base (11)..(11): a, c, u, g, unknown or other
augagauuaanccuuacaa

SEQ ID NO: 1250996 - RNA, 19 nt, Artificial Sequence
  Description of Artificial Sequence: Synthetic oligonucleotide
ucaaguaguucuccuaaag

SEQ ID NO: 1250997 - RNA, 19 nt, Artificial Sequence
  Description of Artificial Sequence: Synthetic oligonucleotide
cauguuggauacuugauac

SEQ ID NO: 1250998 - RNA, 19 nt, Artificial Sequence
  Description of Artificial Sequence: Synthetic oligonucleotide
  modified_base (9)..(9): a, c, u, g, unknown or other
uuauauuanucauauuuua

SEQ ID NO: 1250999 - RNA, 19 nt, Artificial Sequence
  Description of Artificial Sequence: Synthetic oligonucleotide
uccaaucuaaguaauucca

SEQ ID NO: 1251000 - RNA, 19 nt, Artificial Sequence
  Description of Artificial Sequence: Synthetic oligonucleotide
gaguaaaucauccagcaaa

SEQ ID NO: 1251001 - RNA, 19 nt, Artificial Sequence
  Description of Artificial Sequence: Synthetic oligonucleotide
agcaguaauccuuugggag

SEQ ID NO: 1251002 - RNA, 19 nt, Artificial Sequence
  Description of Artificial Sequence: Synthetic oligonucleotide
uuucuauccacucgguuug

SEQ ID NO: 1251003 - RNA, 19 nt, Artificial Sequence
  Description of Artificial Sequence: Synthetic oligonucleotide
cauagcucaguuauaagug

SEQ ID NO: 1251004 - RNA, 19 nt, Artificial Sequence
  Description of Artificial Sequence: Synthetic oligonucleotide
uaucccuagcauuaugagg

SEQ ID NO: 1251005 - RNA, 19 nt, Artificial Sequence
  Description of Artificial Sequence: Synthetic oligonucleotide
ucuaucccuagcauuauga

SEQ ID NO: 1251006 - RNA, 19 nt, Artificial Sequence
  Description of Artificial Sequence: Synthetic oligonucleotide
aaaauauaugggauggaug

SEQ ID NO: 1251007 - RNA, 19 nt, Artificial Sequence
  Description of Artificial Sequence: Synthetic oligonucleotide
guaggcaaaucugugaugg

SEQ ID NO: 1251008 - RNA, 19 nt, Artificial Sequence
  Description of Artificial Sequence: Synthetic oligonucleotide
acaaguagcgauauagugg

SEQ ID NO: 1251009 - RNA, 19 nt, Artificial Sequence
  Description of Artificial Sequence: Synthetic oligonucleotide
auaaacgucacacauucau

SEQ ID NO: 1251010 - RNA, 19 nt, Artificial Sequence
  Description of Artificial Sequence: Synthetic oligonucleotide
aacaugauuucucuccacu

SEQ ID NO: 1251011 - RNA, 19 nt, Artificial Sequence
  Description of Artificial Sequence: Synthetic oligonucleotide
cugauagucaggaccaagg

SEQ ID NO: 1251012 - RNA, 19 nt, Artificial Sequence
  Description of Artificial Sequence: Synthetic oligonucleotide
ugauaagccaucaauuaua

SEQ ID NO: 1251013 - RNA, 19 nt, Artificial Sequence
  Description of Artificial Sequence: Synthetic oligonucleotide
uguuggauacuugauacug

SEQ ID NO: 1251014 - RNA, 19 nt, Artificial Sequence
  Description of Artificial Sequence: Synthetic oligonucleotide
uuauaagugcacuaaugaa

SEQ ID NO: 1251015 - RNA, 19 nt, Artificial Sequence
  Description of Artificial Sequence: Synthetic oligonucleotide
uugaagcaugauaacaucu

SEQ ID NO: 1251016 - RNA, 19 nt, Artificial Sequence
  Description of Artificial Sequence: Synthetic oligonucleotide
uccgauaucacugucgugu

SEQ ID NO: 1251017 - RNA, 19 nt, Artificial Sequence
  Description of Artificial Sequence: Synthetic oligonucleotide
guaguaacauguuggauac

SEQ ID NO: 1251018 - RNA, 19 nt, Artificial Sequence
  Description of Artificial Sequence: Synthetic oligonucleotide
ucuuucacagugcuuuaag

SEQ ID NO: 1251019 - RNA, 19 nt, Artificial Sequence
  Description of Artificial Sequence: Synthetic oligonucleotide
uucuauccaaucuaaguaa

SEQ ID NO: 1251020 - RNA, 19 nt, Artificial Sequence
  Description of Artificial Sequence: Synthetic oligonucleotide
auacuugauacugagccuc

SEQ ID NO: 1251021 - RNA, 19 nt, Artificial Sequence
  Description of Artificial Sequence: Synthetic oligonucleotide
uuugccauaccugacaguc

SEQ ID NO: 1251022 - RNA, 19 nt, Artificial Sequence
  Description of Artificial Sequence: Synthetic oligonucleotide
acucgaaacccacacagug

SEQ ID NO: 1251023 - RNA, 19 nt, Artificial Sequence
  Description of Artificial Sequence: Synthetic oligonucleotide
aguuucuuugcauacuggu

SEQ ID NO: 1251024 - RNA, 19 nt, Artificial Sequence
  Description of Artificial Sequence: Synthetic oligonucleotide
aaugccaagcugcugcaca

SEQ ID NO: 1251025 - RNA, 19 nt, Artificial Sequence
  Description of Artificial Sequence: Synthetic oligonucleotide
cucgguuuguuuaucagac

SEQ ID NO: 1251026 - RNA, 19 nt, Artificial Sequence
  Description of Artificial Sequence: Synthetic oligonucleotide
ucgaaacccacacagugcu

SEQ ID NO: 1251027 - RNA, 19 nt, Artificial Sequence
  Description of Artificial Sequence: Synthetic oligonucleotide
cauucagagggauuuucgg

SEQ ID NO: 1251028 - RNA, 19 nt, Artificial Sequence
  Description of Artificial Sequence: Synthetic oligonucleotide
acugucguguuuuauguca

SEQ ID NO: 1251029 - RNA, 19 nt, Artificial Sequence
  Description of Artificial Sequence: Synthetic oligonucleotide
ugaggaaacugagucagag

SEQ ID NO: 1251030 - RNA, 19 nt, Artificial Sequence
  Description of Artificial Sequence: Synthetic oligonucleotide
uauuuauagcagcauuggu

SEQ ID NO: 1251031 - RNA, 19 nt, Artificial Sequence
  Description of Artificial Sequence: Synthetic oligonucleotide
aguggcucacucgaaaccc

SEQ ID NO: 1251032 - RNA, 19 nt, Artificial Sequence
  Description of Artificial Sequence: Synthetic oligonucleotide
  modified_base (5)..(5): a, c, u, g, unknown or other
uuaanccuuacaagaacau

SEQ ID NO: 1251033 - RNA, 19 nt, Artificial Sequence
  Description of Artificial Sequence: Synthetic oligonucleotide
cacaaguagcgauauagug

SEQ ID NO: 1251034 - RNA, 19 nt, Artificial Sequence
  Description of Artificial Sequence: Synthetic oligonucleotide
gucaauaggauccacugga

SEQ ID NO: 1251035 - RNA, 19 nt, Artificial Sequence
  Description of Artificial Sequence: Synthetic oligonucleotide
  modified_base (6)..(6): a, c, u, g, unknown or other
auuaanccuuacaagaaca

SEQ ID NO: 1251036 - RNA, 19 nt, Artificial Sequence
  Description of Artificial Sequence: Synthetic oligonucleotide
uccuaaagcgccuccacug

SEQ ID NO: 1251037 - RNA, 19 nt, Artificial Sequence
  Description of Artificial Sequence: Synthetic oligonucleotide
uucaagauuggcccauagc

SEQ ID NO: 1251038 - RNA, 19 nt, Artificial Sequence
  Description of Artificial Sequence: Synthetic oligonucleotide
  modified_base (4)..(4): a, c, u, g, unknown or other
uaanccuuacaagaacaug

SEQ ID NO: 1251039 - RNA, 19 nt, Artificial Sequence
  Description of Artificial Sequence: Synthetic oligonucleotide
agagccuucuacuggagug

SEQ ID NO: 1251040 - RNA, 19 nt, Artificial Sequence
  Description of Artificial Sequence: Synthetic oligonucleotide
acuaaagggaaguagcauu

SEQ ID NO: 1251041 - RNA, 19 nt, Artificial Sequence
  Description of Artificial Sequence: Synthetic oligonucleotide
uuugaagcaugauaacauc

SEQ ID NO: 1251042 - RNA, 19 nt, Artificial Sequence
  Description of Artificial Sequence: Synthetic oligonucleotide
agagacuuucauucuucac

SEQ ID NO: 1251043 - RNA, 19 nt, Artificial Sequence
  Description of Artificial Sequence: Synthetic oligonucleotide
aucccuagcauuaugagga

SEQ ID NO: 1251044 - RNA, 19 nt, Artificial Sequence
  Description of Artificial Sequence: Synthetic oligonucleotide
aaccucacaucaucucuuc

SEQ ID NO: 1251045 - RNA, 19 nt, Artificial Sequence
  Description of Artificial Sequence: Synthetic oligonucleotide
gagaaauuugccauaccug

SEQ ID NO: 1251046 - RNA, 19 nt, Artificial Sequence
  Description of Artificial Sequence: Synthetic oligonucleotide
acugauaagccaucaauua

SEQ ID NO: 1251047 - RNA, 19 nt, Artificial Sequence
  Description of Artificial Sequence: Synthetic oligonucleotide
caucguuuaacaaguugag

SEQ ID NO: 1251048 - RNA, 19 nt, Artificial Sequence
  Description of Artificial Sequence: Synthetic oligonucleotide
aauguagugugugcuagca

SEQ ID NO: 1251049 - RNA, 19 nt, Artificial Sequence
  Description of Artificial Sequence: Synthetic oligonucleotide
aaggcgagaucauuuucug

SEQ ID NO: 1251050 - RNA, 19 nt, Artificial Sequence
  Description of Artificial Sequence: Synthetic oligonucleotide
aaguugaguaaaucaucca

SEQ ID NO: 1251051 - RNA, 19 nt, Artificial Sequence
  Description of Artificial Sequence: Synthetic oligonucleotide
gguaguuuugcuccaaagc

SEQ ID NO: 1251052 - RNA, 19 nt, Artificial Sequence
  Description of Artificial Sequence: Synthetic oligonucleotide
ucuccgauaucacugucgu

SEQ ID NO: 1251053 - RNA, 19 nt, Artificial Sequence
  Description of Artificial Sequence: Synthetic oligonucleotide
aaagcgccuccacugacug

SEQ ID NO: 1251054 - RNA, 19 nt, Artificial Sequence
  Description of Artificial Sequence: Synthetic oligonucleotide
aaccagacauguggaaagc

SEQ ID NO: 1251055 - RNA, 19 nt, Artificial Sequence
  Description of Artificial Sequence: Synthetic oligonucleotide
uuucugauagcaagcuugu

SEQ ID NO: 1251056 - RNA, 19 nt, Artificial Sequence
  Description of Artificial Sequence: Synthetic oligonucleotide
ugagucagagccuucuacu

SEQ ID NO: 1251057 - RNA, 19 nt, Artificial Sequence
  Description of Artificial Sequence: Synthetic oligonucleotide
cugaguuauccacuguagg

SEQ ID NO: 1251058 - RNA, 19 nt, Artificial Sequence
  Description of Artificial Sequence: Synthetic oligonucleotide
aagugcacuaaugaagccu

SEQ ID NO: 1251059 - RNA, 19 nt, Artificial Sequence
  Description of Artificial Sequence: Synthetic oligonucleotide
uaugggauggaugcccugg

SEQ ID NO: 1251060 - RNA, 19 nt, Artificial Sequence
  Description of Artificial Sequence: Synthetic oligonucleotide
ucaguuauaagugcacuaa

SEQ ID NO: 1251061 - RNA, 19 nt, Artificial Sequence
  Description of Artificial Sequence: Synthetic oligonucleotide
ucacugucguguuuuaugu

SEQ ID NO: 1251062 - RNA, 19 nt, Artificial Sequence
  Description of Artificial Sequence: Synthetic oligonucleotide
caugauaacaucucuccga

SEQ ID NO: 1251063 - RNA, 19 nt, Artificial Sequence
  Description of Artificial Sequence: Synthetic oligonucleotide
cugacagauagcagugugg

SEQ ID NO: 1251064 - RNA, 19 nt, Artificial Sequence
  Description of Artificial Sequence: Synthetic oligonucleotide
gauacugagccuccaauaa

SEQ ID NO: 1251065 - RNA, 19 nt, Artificial Sequence
  Description of Artificial Sequence: Synthetic oligonucleotide
ucuauccaaucuaaguaau

SEQ ID NO: 1251066 - RNA, 19 nt, Artificial Sequence
  Description of Artificial Sequence: Synthetic oligonucleotide
auuaugaggaacagagaag

SEQ ID NO: 1251067 - RNA, 19 nt, Artificial Sequence
  Description of Artificial Sequence: Synthetic oligonucleotide
aguuauaagugcacuaaug

SEQ ID NO: 1251068 - RNA, 19 nt, Artificial Sequence
  Description of Artificial Sequence: Synthetic oligonucleotide
aucaauuauaaagucccug

SEQ ID NO: 1251069 - RNA, 19 nt, Artificial Sequence
  Description of Artificial Sequence: Synthetic oligonucleotide
  modified_base (3)..(3): a, c, u, g, unknown or other
uanucauauuuuauuuaua

SEQ ID NO: 1251070 - RNA, 19 nt, Artificial Sequence
  Description of Artificial Sequence: Synthetic oligonucleotide
gacacaaaccagucguggc

SEQ ID NO: 1251071 - RNA, 19 nt, Artificial Sequence
  Description of Artificial Sequence: Synthetic oligonucleotide
  modified_base (18)..(18): a, c, u, g, unknown or other
ugggccaaugagauuaanc

SEQ ID NO: 1251072 - RNA, 19 nt, Artificial Sequence
  Description of Artificial Sequence: Synthetic oligonucleotide
aacgucacacauucauuga

SEQ ID NO: 1251073 - RNA, 19 nt, Artificial Sequence
  Description of Artificial Sequence: Synthetic oligonucleotide
agcaucguuuaacaaguug

SEQ ID NO: 1251074 - RNA, 19 nt, Artificial Sequence
  Description of Artificial Sequence: Synthetic oligonucleotide
  modified_base (4)..(4): a, c, u, g, unknown or other
gcanccaggucacagcucg

SEQ ID NO: 1251075 - RNA, 19 nt, Artificial Sequence
  Description of Artificial Sequence: Synthetic oligonucleotide
ucuacuggaguggggaucc

SEQ ID NO: 1251076 - RNA, 19 nt, Artificial Sequence
  Description of Artificial Sequence: Synthetic oligonucleotide
guguauuccacuaaaggga

SEQ ID NO: 1251077 - RNA, 19 nt, Artificial Sequence
  Description of Artificial Sequence: Synthetic oligonucleotide
auacugagccuccaauaag

SEQ ID NO: 1251078 - RNA, 19 nt, Artificial Sequence
  Description of Artificial Sequence: Synthetic oligonucleotide
uuauagcagcauuggucgg

SEQ ID NO: 1251079 - RNA, 19 nt, Artificial Sequence
  Description of Artificial Sequence: Synthetic oligonucleotide
uguggaacuucugacagau

SEQ ID NO: 1251080 - RNA, 19 nt, Artificial Sequence
  Description of Artificial Sequence: Synthetic oligonucleotide
uuccacuaaagggaaguag

SEQ ID NO: 1251081 - RNA, 19 nt, Artificial Sequence
  Description of Artificial Sequence: Synthetic oligonucleotide
uaguggcucacucgaaacc

SEQ ID NO: 1251082 - RNA, 19 nt, Artificial Sequence
  Description of Artificial Sequence: Synthetic oligonucleotide
cucgaaacccacacagugc

SEQ ID NO: 1251083 - RNA, 19 nt, Artificial Sequence
  Description of Artificial Sequence: Synthetic oligonucleotide
augauaacaucucuccgau

SEQ ID NO: 1251084 - RNA, 19 nt, Artificial Sequence
  Description of Artificial Sequence: Synthetic oligonucleotide
aaccaaaacuucauagcca

SEQ ID NO: 1251085 - RNA, 19 nt, Artificial Sequence
  Description of Artificial Sequence: Synthetic oligonucleotide
gaauguuguagagcuacug

SEQ ID NO: 1251086 - RNA, 19 nt, Artificial Sequence
  Description of Artificial Sequence: Synthetic oligonucleotide
aggcgagaucauuuucugc

SEQ ID NO: 1251087 - RNA, 19 nt, Artificial Sequence
  Description of Artificial Sequence: Synthetic oligonucleotide
agacacaaaccagucgugg

SEQ ID NO: 1251088 - RNA, 19 nt, Artificial Sequence
  Description of Artificial Sequence: Synthetic oligonucleotide
uacagauauacaccugaua

SEQ ID NO: 1251089 - RNA, 19 nt, Artificial Sequence
  Description of Artificial Sequence: Synthetic oligonucleotide
auaaagucccugugguucu

SEQ ID NO: 1251090 - RNA, 19 nt, Artificial Sequence
  Description of Artificial Sequence: Synthetic oligonucleotide
aaaacugucuucggcaguu

SEQ ID NO: 1251091 - RNA, 19 nt, Artificial Sequence
  Description of Artificial Sequence: Synthetic oligonucleotide
ugauacugagccuccaaua

SEQ ID NO: 1251092 - RNA, 19 nt, Artificial Sequence
  Description of Artificial Sequence: Synthetic oligonucleotide
aguuacuggugacugcugu

SEQ ID NO: 1251093 - RNA, 19 nt, Artificial Sequence
  Description of Artificial Sequence: Synthetic oligonucleotide
acucgguuuguuuaucaga

SEQ ID NO: 1251094 - RNA, 19 nt, Artificial Sequence
  Description of Artificial Sequence: Synthetic oligonucleotide
uauccacucgguuuguuua

SEQ ID NO: 1251095 - RNA, 19 nt, Artificial Sequence
  Description of Artificial Sequence: Synthetic oligonucleotide
auucaagauuggcccauag

SEQ ID NO: 1251096 - RNA, 19 nt, Artificial Sequence
  Description of Artificial Sequence: Synthetic oligonucleotide
uaagugcacuaaugaagcc

SEQ ID NO: 1251097 - RNA, 19 nt, Artificial Sequence
  Description of Artificial Sequence: Synthetic oligonucleotide
accucacaucaucucuucc

SEQ ID NO: 1251098 - RNA, 19 nt, Artificial Sequence
  Description of Artificial Sequence: Synthetic oligonucleotide
ucuucggcaguuuucuauc

SEQ ID NO: 1251099 - RNA, 19 nt, Artificial Sequence
  Description of Artificial Sequence: Synthetic oligonucleotide
uuaaugccaagcugcugca

SEQ ID NO: 1251100 - RNA, 19 nt, Artificial Sequence
  Description of Artificial Sequence: Synthetic oligonucleotide
guuuuaugucagcacuuug

SEQ ID NO: 1251101 - RNA, 19 nt, Artificial Sequence
  Description of Artificial Sequence: Synthetic oligonucleotide
auuugcaucaguagcugug

SEQ ID NO: 1251102 - RNA, 19 nt, Artificial Sequence
  Description of Artificial Sequence: Synthetic oligonucleotide
aagaagcaguaauccuuug

SEQ ID NO: 1251103 - RNA, 19 nt, Artificial Sequence
  Description of Artificial Sequence: Synthetic oligonucleotide
aagggaaguagcauucaga

SEQ ID NO: 1251104 - RNA, 19 nt, Artificial Sequence
  Description of Artificial Sequence: Synthetic oligonucleotide
aggcaaaucugugauggag

SEQ ID NO: 1251105 - RNA, 19 nt, Artificial Sequence
  Description of Artificial Sequence: Synthetic oligonucleotide
ucggucaauaggauccacu

SEQ ID NO: 1251106 - RNA, 19 nt, Artificial Sequence
  Description of Artificial Sequence: Synthetic oligonucleotide
uaaagcgccuccacugacu

SEQ ID NO: 1251107 - RNA, 19 nt, Artificial Sequence
  Description of Artificial Sequence: Synthetic oligonucleotide
uaauccuuugggaguggca

SEQ ID NO: 1251108 - RNA, 19 nt, Artificial Sequence
  Description of Artificial Sequence: Synthetic oligonucleotide
gaaauuugccauaccugac

SEQ ID NO: 1251109 - RNA, 19 nt, Artificial Sequence
  Description of Artificial Sequence: Synthetic oligonucleotide
gaaacccacacagugcuuc

SEQ ID NO: 1251110 - RNA, 19 nt, Artificial Sequence
  Description of Artificial Sequence: Synthetic oligonucleotide
ggcgagaucauuuucugca

SEQ ID NO: 1251111 - RNA, 19 nt, Artificial Sequence
  Description of Artificial Sequence: Synthetic oligonucleotide
  modified_base (8)..(8): a, c, u, g, unknown or other
agauuaanccuuacaagaa

SEQ ID NO: 1251112 - RNA, 19 nt, Artificial Sequence
  Description of Artificial Sequence: Synthetic oligonucleotide
gaaaacacaaguggcaccu

SEQ ID NO: 1251113 - RNA, 19 nt, Artificial Sequence
  Description of Artificial Sequence: Synthetic oligonucleotide
aguaguggcucacucgaaa

SEQ ID NO: 1251114 - RNA, 19 nt, Artificial Sequence
  Description of Artificial Sequence: Synthetic oligonucleotide
uuccacauucaagauuggc

SEQ ID NO: 1251115 - RNA, 19 nt, Artificial Sequence
  Description of Artificial Sequence: Synthetic oligonucleotide
ucuccuaaagcgccuccac

SEQ ID NO: 1251116 - RNA, 19 nt, Artificial Sequence
  Description of Artificial Sequence: Synthetic oligonucleotide
gauuuucggugagaugaag

SEQ ID NO: 1251117 - RNA, 19 nt, Artificial Sequence
  Description of Artificial Sequence: Synthetic oligonucleotide
ugcaucaguagcuguguau

SEQ ID NO: 1251118 - RNA, 19 nt, Artificial Sequence
  Description of Artificial Sequence: Synthetic oligonucleotide
auacaccugauagucagga

SEQ ID NO: 1251119 - RNA, 19 nt, Artificial Sequence
  Description of Artificial Sequence: Synthetic oligonucleotide
gaagcaugauaacaucucu

SEQ ID NO: 1251120 - RNA, 19 nt, Artificial Sequence
  Description of Artificial Sequence: Synthetic oligonucleotide
cugagucagagccuucuac

SEQ ID NO: 1251121 - RNA, 19 nt, Artificial Sequence
  Description of Artificial Sequence: Synthetic oligonucleotide
gcaugauaacaucucuccg

SEQ ID NO: 1251122 - RNA, 19 nt, Artificial Sequence
  Description of Artificial Sequence: Synthetic oligonucleotide
guaguggcucacucgaaac

SEQ ID NO: 1251123 - RNA, 19 nt, Artificial Sequence
  Description of Artificial Sequence: Synthetic oligonucleotide
  modified_base (2)..(2): a, c, u, g, unknown or other
anccuuacaagaacaugau

SEQ ID NO: 1251124 - RNA, 19 nt, Artificial Sequence
  Description of Artificial Sequence: Synthetic oligonucleotide
cugucguguuuuaugucag

SEQ ID NO: 1251125 - RNA, 19 nt, Artificial Sequence
  Description of Artificial Sequence: Synthetic oligonucleotide
uucucucuaucccuagcau

SEQ ID NO: 1251126 - RNA, 19 nt, Artificial Sequence
  Description of Artificial Sequence: Synthetic oligonucleotide
uucaaguaguucuccuaaa

SEQ ID NO: 1251127 - RNA, 19 nt, Artificial Sequence
  Description of Artificial Sequence: Synthetic oligonucleotide
uuuguuuaucagacauuuu

SEQ ID NO: 1251128 - RNA, 19 nt, Artificial Sequence
  Description of Artificial Sequence: Synthetic oligonucleotide
gagagacuuucauucuuca

SEQ ID NO: 1251129 - RNA, 19 nt, Artificial Sequence
  Description of Artificial Sequence: Synthetic oligonucleotide
cuucggcaguuuucuaucc

SEQ ID NO: 1251130 - RNA, 19 nt, Artificial Sequence
  Description of Artificial Sequence: Synthetic oligonucleotide
aguagcgauauaguggcau

SEQ ID NO: 1251131 - RNA, 19 nt, Artificial Sequence
  Description of Artificial Sequence: Synthetic oligonucleotide
aagacacaaaccagucgug

SEQ ID NO: 1251132 - RNA, 19 nt, Artificial Sequence
  Description of Artificial Sequence: Synthetic oligonucleotide
agaaugucuugcugcagau

SEQ ID NO: 1251133 - RNA, 19 nt, Artificial Sequence
  Description of Artificial Sequence: Synthetic oligonucleotide
uggaguggggauccuuucu

SEQ ID NO: 1251134 - RNA, 19 nt, Artificial Sequence
  Description of Artificial Sequence: Synthetic oligonucleotide
acauuugcaucaguagcug

SEQ ID NO: 1251135 - RNA, 19 nt, Artificial Sequence
  Description of Artificial Sequence: Synthetic oligonucleotide
agcuguguauuccacuaaa

SEQ ID NO: 1251136 - RNA, 19 nt, Artificial Sequence
  Description of Artificial Sequence: Synthetic oligonucleotide
ugucguguuuuaugucagc

SEQ ID NO: 1251137 - RNA, 19 nt, Artificial Sequence
  Description of Artificial Sequence: Synthetic oligonucleotide
gauacuugauacugagccu

SEQ ID NO: 1251138 - RNA, 19 nt, Artificial Sequence
  Description of Artificial Sequence: Synthetic oligonucleotide
  modified_base (13)..(13): a, c, u, g, unknown or other
caaugagauuaanccuuac

SEQ ID NO: 1251139 - RNA, 19 nt, Artificial Sequence
  Description of Artificial Sequence: Synthetic oligonucleotide
gcuauacagauauacaccu

SEQ ID NO: 1251140 - RNA, 19 nt, Artificial Sequence
  Description of Artificial Sequence: Synthetic oligonucleotide
cacucgguuuguuuaucag

SEQ ID NO: 1251141 - RNA, 19 nt, Artificial Sequence
  Description of Artificial Sequence: Synthetic oligonucleotide
cucucuaucccuagcauua

SEQ ID NO: 1251142 - RNA, 19 nt, Artificial Sequence
  Description of Artificial Sequence: Synthetic oligonucleotide
caccugauagucaggacca

SEQ ID NO: 1251143 - RNA, 19 nt, Artificial Sequence
  Description of Artificial Sequence: Synthetic oligonucleotide
gcaucguuuaacaaguuga

SEQ ID NO: 1251144 - RNA, 19 nt, Artificial Sequence
  Description of Artificial Sequence: Synthetic oligonucleotide
agucguggccuguguaguc

SEQ ID NO: 1251145 - RNA, 19 nt, Artificial Sequence
  Description of Artificial Sequence: Synthetic oligonucleotide
acgucacacauucauugau

SEQ ID NO: 1251146 - RNA, 19 nt, Artificial Sequence
  Description of Artificial Sequence: Synthetic oligonucleotide
  modified_base (18)..(18): a, c, u, g, unknown or other
ccaauaagagaagagcanc

SEQ ID NO: 1251147 - RNA, 19 nt, Artificial Sequence
  Description of Artificial Sequence: Synthetic oligonucleotide
cacauuugcaucaguagcu

SEQ ID NO: 1251148 - RNA, 19 nt, Artificial Sequence
  Description of Artificial Sequence: Synthetic oligonucleotide
aucguuuaacaaguugaga

SEQ ID NO: 1251149 - RNA, 19 nt, Artificial Sequence
  Description of Artificial Sequence: Synthetic oligonucleotide
ucgguuuguuuaucagaca

SEQ ID NO: 1251150 - RNA, 19 nt, Artificial Sequence
  Description of Artificial Sequence: Synthetic oligonucleotide
guaacauguuggauacuug

SEQ ID NO: 1251151 - RNA, 19 nt, Artificial Sequence
  Description of Artificial Sequence: Synthetic oligonucleotide
acaacacaaguagcgauau

SEQ ID NO: 1251152 - RNA, 19 nt, Artificial Sequence
  Description of Artificial Sequence: Synthetic oligonucleotide
guuuguuuaucagacauuu

SEQ ID NO: 1251153 - RNA, 19 nt, Artificial Sequence
  Description of Artificial Sequence: Synthetic oligonucleotide
  modified_base (2)..(2): a, c, u, g, unknown or other
anccaggucacagcucggu

SEQ ID NO: 1251154 - RNA, 19 nt, Artificial Sequence
  Description of Artificial Sequence: Synthetic oligonucleotide
caucaguagcuguguauuc

SEQ ID NO: 1251155 - RNA, 19 nt, Artificial Sequence
  Description of Artificial Sequence: Synthetic oligonucleotide
aggacaacacaaguagcga

SEQ ID NO: 1251156 - RNA, 19 nt, Artificial Sequence
  Description of Artificial Sequence: Synthetic oligonucleotide
gggaguggcagcaaaguug

SEQ ID NO: 1251157 - RNA, 19 nt, Artificial Sequence
  Description of Artificial Sequence: Synthetic oligonucleotide
cuaaagcgccuccacugac

SEQ ID NO: 1251158 - RNA, 19 nt, Artificial Sequence
  Description of Artificial Sequence: Synthetic oligonucleotide
aaaccagucguggccugug

SEQ ID NO: 1251159 - RNA, 19 nt, Artificial Sequence
  Description of Artificial Sequence: Synthetic oligonucleotide
uacaccugauagucaggac

SEQ ID NO: 1251160 - RNA, 19 nt, Artificial Sequence
  Description of Artificial Sequence: Synthetic oligonucleotide
caauguugggagacuccug

SEQ ID NO: 1251161 - RNA, 19 nt, Artificial Sequence
  Description of Artificial Sequence: Synthetic oligonucleotide
ugcacuaaugaagccugaa

SEQ ID NO: 1251162 - RNA, 19 nt, Artificial Sequence
  Description of Artificial Sequence: Synthetic oligonucleotide
aacccacacagugcuucuc

SEQ ID NO: 1251163 - RNA, 19 nt, Artificial Sequence
  Description of Artificial Sequence: Synthetic oligonucleotide
cucaguuauaagugcacua

SEQ ID NO: 1251164 - RNA, 19 nt, Artificial Sequence
  Description of Artificial Sequence: Synthetic oligonucleotide
gacagauagcaguguggca

SEQ ID NO: 1251165 - RNA, 19 nt, Artificial Sequence
  Description of Artificial Sequence: Synthetic oligonucleotide
uagcuguguauuccacuaa

SEQ ID NO: 1251166 - RNA, 19 nt, Artificial Sequence
  Description of Artificial Sequence: Synthetic oligonucleotide
accaaggcgagaucauuuu

SEQ ID NO: 1251167 - RNA, 19 nt, Artificial Sequence
  Description of Artificial Sequence: Synthetic oligonucleotide
aaguagcauucagagggau

SEQ ID NO: 1251168 - RNA, 19 nt, Artificial Sequence
  Description of Artificial Sequence: Synthetic oligonucleotide
auaugggauggaugcccug

SEQ ID NO: 1251169 - RNA, 19 nt, Artificial Sequence
  Description of Artificial Sequence: Synthetic oligonucleotide
guugaacauaaacgucaca

SEQ ID NO: 1251170 - RNA, 19 nt, Artificial Sequence
  Description of Artificial Sequence: Synthetic oligonucleotide
ucgguaguuuugcuccaaa

SEQ ID NO: 1251171 - RNA, 19 nt, Artificial Sequence
  Description of Artificial Sequence: Synthetic oligonucleotide
guaauccuuugggaguggc

SEQ ID NO: 1251172 - RNA, 19 nt, Artificial Sequence
  Description of Artificial Sequence: Synthetic oligonucleotide
caaggcgagaucauuuucu

SEQ ID NO: 1251173 - RNA, 19 nt, Artificial Sequence
  Description of Artificial Sequence: Synthetic oligonucleotide
uggugacugcuguuguuuc

SEQ ID NO: 1251174 - RNA, 19 nt, Artificial Sequence
  Description of Artificial Sequence: Synthetic oligonucleotide
cucuaucccuagcauuaug

SEQ ID NO: 1251175 - RNA, 19 nt, Artificial Sequence
  Description of Artificial Sequence: Synthetic oligonucleotide
gacgccaccuguacaacca

SEQ ID NO: 1251176 - RNA, 19 nt, Artificial Sequence
  Description of Artificial Sequence: Synthetic oligonucleotide
guggacgccaccuguacaa

SEQ ID NO: 1251177 - RNA, 19 nt, Artificial Sequence
  Description of Artificial Sequence: Synthetic oligonucleotide
  modified_base (6)..(6): a, c, u, g, unknown or other
gagcanccaggucacagcu

SEQ ID NO: 1251178 - RNA, 19 nt, Artificial Sequence
  Description of Artificial Sequence: Synthetic oligonucleotide
aaccagucguggccugugu

SEQ ID NO: 1251179 - RNA, 19 nt, Artificial Sequence
  Description of Artificial Sequence: Synthetic oligonucleotide
aaguuacuggugacugcug

SEQ ID NO: 1251180 - RNA, 19 nt, Artificial Sequence
  Description of Artificial Sequence: Synthetic oligonucleotide
cacauucaagauuggccca

SEQ ID NO: 1251181 - RNA, 19 nt, Artificial Sequence
  Description of Artificial Sequence: Synthetic oligonucleotide
uagcgauauaguggcauau

SEQ ID NO: 1251182 - RNA, 19 nt, Artificial Sequence
  Description of Artificial Sequence: Synthetic oligonucleotide
ucucuccgauaucacuguc

SEQ ID NO: 1251183 - RNA, 19 nt, Artificial Sequence
  Description of Artificial Sequence: Synthetic oligonucleotide
cagauauacaccugauagu

SEQ ID NO: 1251184 - RNA, 19 nt, Artificial Sequence
  Description of Artificial Sequence: Synthetic oligonucleotide
ggaguggcagcaaaguuga

SEQ ID NO: 1251185 - RNA, 19 nt, Artificial Sequence
  Description of Artificial Sequence: Synthetic oligonucleotide
agcgccuccacugacugaa

SEQ ID NO: 1251186 - RNA, 19 nt, Artificial Sequence
  Description of Artificial Sequence: Synthetic oligonucleotide
auguagugugugcuagcaa

SEQ ID NO: 1251187 - RNA, 19 nt, Artificial Sequence
  Description of Artificial Sequence: Synthetic oligonucleotide
ugauaacaucucuccgaua

SEQ ID NO: 1251188 - RNA, 19 nt, Artificial Sequence
  Description of Artificial Sequence: Synthetic oligonucleotide
ugggaugggugaaccucac

SEQ ID NO: 1251189 - RNA, 19 nt, Artificial Sequence
  Description of Artificial Sequence: Synthetic oligonucleotide
aagaccaaggcgagaucau

SEQ ID NO: 1251190 - RNA, 19 nt, Artificial Sequence
  Description of Artificial Sequence: Synthetic oligonucleotide
cugauaagccaucaauuau

SEQ ID NO: 1251191 - RNA, 19 nt, Artificial Sequence
  Description of Artificial Sequence: Synthetic oligonucleotide
  modified_base (3)..(3): a, c, u, g, unknown or other
canccaggucacagcucgg

SEQ ID NO: 1251192 - RNA, 19 nt, Artificial Sequence
  Description of Artificial Sequence: Synthetic oligonucleotide
cgauauaguggcauauuuc

SEQ ID NO: 1251193 - RNA, 19 nt, Artificial Sequence
  Description of Artificial Sequence: Synthetic oligonucleotide
guagcgauauaguggcaua

SEQ ID NO: 1251194 - RNA, 19 nt, Artificial Sequence
  Description of Artificial Sequence: Synthetic oligonucleotide
cacugucguguuuuauguc

SEQ ID NO: 1251195 - RNA, 19 nt, Artificial Sequence
  Description of Artificial Sequence: Synthetic oligonucleotide
cauaaacgucacacauuca

SEQ ID NO: 1251196 - RNA, 19 nt, Artificial Sequence
  Description of Artificial Sequence: Synthetic oligonucleotide
cagagggauuuucggugag

SEQ ID NO: 1251197 - RNA, 19 nt, Artificial Sequence
  Description of Artificial Sequence: Synthetic oligonucleotide
cacugauaagccaucaauu

SEQ ID NO: 1251198 - RNA, 19 nt, Artificial Sequence
  Description of Artificial Sequence: Synthetic oligonucleotide
gacauguggaaagcugaaa

SEQ ID NO: 1251199 - RNA, 19 nt, Artificial Sequence
  Description of Artificial Sequence: Synthetic oligonucleotide
gcuuuaagaccaaggcgag

SEQ ID NO: 1251200 - RNA, 19 nt, Artificial Sequence
  Description of Artificial Sequence: Synthetic oligonucleotide
  modified_base (5)..(5): a, c, u, g, unknown or other
agcanccaggucacagcuc

SEQ ID NO: 1251201 - RNA, 19 nt, Artificial Sequence
  Description of Artificial Sequence: Synthetic oligonucleotide
auauaguggcauauuucua

SEQ ID NO: 1251202 - RNA, 19 nt, Artificial Sequence
  Description of Artificial Sequence: Synthetic oligonucleotide
aaucugugauggagcaaaa

SEQ ID NO: 1251203 - RNA, 19 nt, Artificial Sequence
  Description of Artificial Sequence: Synthetic oligonucleotide
ccagucguggccuguguag

SEQ ID NO: 1251204 - RNA, 19 nt, Artificial Sequence
  Description of Artificial Sequence: Synthetic oligonucleotide
uaaugccaagcugcugcac

SEQ ID NO: 1251205 - RNA, 19 nt, Artificial Sequence
  Description of Artificial Sequence: Synthetic oligonucleotide
ccauagcucaguuauaagu

SEQ ID NO: 1251206 - RNA, 19 nt, Artificial Sequence
  Description of Artificial Sequence: Synthetic oligonucleotide
ucccuagcauuaugaggaa

SEQ ID NO: 1251207 - RNA, 19 nt, Artificial Sequence
  Description of Artificial Sequence: Synthetic oligonucleotide
aggcuuggacuucauuguu

SEQ ID NO: 1251208 - RNA, 19 nt, Artificial Sequence
  Description of Artificial Sequence: Synthetic oligonucleotide
ggacgccaccuguacaacc

SEQ ID NO: 1251209 - RNA, 19 nt, Artificial Sequence
  Description of Artificial Sequence: Synthetic oligonucleotide
uucugauagcaagcuuguc

SEQ ID NO: 1251210 - RNA, 19 nt, Artificial Sequence
  Description of Artificial Sequence: Synthetic oligonucleotide
gccuguguaguccccuugc

SEQ ID NO: 1251211 - RNA, 19 nt, Artificial Sequence
  Description of Artificial Sequence: Synthetic oligonucleotide
agcgauauaguggcauauu

SEQ ID NO: 1251212 - RNA, 19 nt, Artificial Sequence
  Description of Artificial Sequence: Synthetic oligonucleotide
cuccgauaucacugucgug

SEQ ID NO: 1251213 - RNA, 19 nt, Artificial Sequence
  Description of Artificial Sequence: Synthetic oligonucleotide
ccacuaaagggaaguagca

SEQ ID NO: 1251214 - RNA, 19 nt, Artificial Sequence
  Description of Artificial Sequence: Synthetic oligonucleotide
cugaaucaggcuuggacuu

SEQ ID NO: 1251215 - RNA, 19 nt, Artificial Sequence
  Description of Artificial Sequence: Synthetic oligonucleotide
aaguagcgauauaguggca

SEQ ID NO: 1251216 - RNA, 19 nt, Artificial Sequence
  Description of Artificial Sequence: Synthetic oligonucleotide
aaguaguggcucacucgaa

SEQ ID NO: 1251217 - RNA, 19 nt, Artificial Sequence
  Description of Artificial Sequence: Synthetic oligonucleotide
uaguaacauguuggauacu

SEQ ID NO: 1251218 - RNA, 19 nt, Artificial Sequence
  Description of Artificial Sequence: Synthetic oligonucleotide
  modified_base (14)..(14): a, c, u, g, unknown or other
ccaaugagauuaanccuua

SEQ ID NO: 1251219 - RNA, 19 nt, Artificial Sequence
  Description of Artificial Sequence: Synthetic oligonucleotide
gcagcaucguuuaacaagu

SEQ ID NO: 1251220 - RNA, 19 nt, Artificial Sequence
  Description of Artificial Sequence: Synthetic oligonucleotide
cccauagcucaguuauaag

SEQ ID NO: 1251221 - RNA, 19 nt, Artificial Sequence
  Description of Artificial Sequence: Synthetic oligonucleotide
ugacugaaucaggcuugga

SEQ ID NO: 1251222 - RNA, 19 nt, Artificial Sequence
  Description of Artificial Sequence: Synthetic oligonucleotide
ggcaauggauaugaugaaa

SEQ ID NO: 1251223 - RNA, 19 nt, Artificial Sequence
  Description of Artificial Sequence: Synthetic oligonucleotide
aaacugucuucggcaguuu

SEQ ID NO: 1251224 - RNA, 19 nt, Artificial Sequence
  Description of Artificial Sequence: Synthetic oligonucleotide
cguuuaacaaguugagaaa

SEQ ID NO: 1251225 - RNA, 19 nt, Artificial Sequence
  Description of Artificial Sequence: Synthetic oligonucleotide
agaccaaggcgagaucauu

SEQ ID NO: 1251226 - RNA, 19 nt, Artificial Sequence
  Description of Artificial Sequence: Synthetic oligonucleotide
ucuauccacucgguuuguu

SEQ ID NO: 1251227 - RNA, 19 nt, Artificial Sequence
  Description of Artificial Sequence: Synthetic oligonucleotide
uggacgccaccuguacaac

SEQ ID NO: 1251228 - RNA, 19 nt, Artificial Sequence
  Description of Artificial Sequence: Synthetic oligonucleotide
ggauccacuggaguugcuc

SEQ ID NO: 1251229 - RNA, 19 nt, Artificial Sequence
  Description of Artificial Sequence: Synthetic oligonucleotide
cgguaguuuugcuccaaag

SEQ ID NO: 1251230 - RNA, 19 nt, Artificial Sequence
  Description of Artificial Sequence: Synthetic oligonucleotide
caguuauaagugcacuaau

SEQ ID NO: 1251231 - RNA, 19 nt, Artificial Sequence
  Description of Artificial Sequence: Synthetic oligonucleotide
gaaccucacaucaucucuu

SEQ ID NO: 1251232 - RNA, 19 nt, Artificial Sequence
  Description of Artificial Sequence: Synthetic oligonucleotide
cucggucaauaggauccac

SEQ ID NO: 1251233 - RNA, 19 nt, Artificial Sequence
  Description of Artificial Sequence: Synthetic oligonucleotide
ccaaggcgagaucauuuuc

SEQ ID NO: 1251234 - RNA, 19 nt, Artificial Sequence
  Description of Artificial Sequence: Synthetic oligonucleotide
guuacuggugacugcuguu

SEQ ID NO: 1251235 - RNA, 19 nt, Artificial Sequence
  Description of Artificial Sequence: Synthetic oligonucleotide
ccaaggauaugggccaaug

SEQ ID NO: 1251236 - RNA, 19 nt, Artificial Sequence
  Description of Artificial Sequence: Synthetic oligonucleotide
  modified_base (15)..(15): a, c, u, g, unknown or other
gccaaugagauuaanccuu

SEQ ID NO: 1251237 - RNA, 19 nt, Artificial Sequence
  Description of Artificial Sequence: Synthetic oligonucleotide
uagcauucagagggauuuu

SEQ ID NO: 1251238 - RNA, 19 nt, Artificial Sequence
  Description of Artificial Sequence: Synthetic oligonucleotide
gcccauagcucaguuauaa

SEQ ID NO: 1251239 - RNA, 19 nt, Artificial Sequence
  Description of Artificial Sequence: Synthetic oligonucleotide
  modified_base (9)..(9): a, c, u, g, unknown or other
gaagagcanccaggucaca

SEQ ID NO: 1251240 - RNA, 19 nt, Artificial Sequence
  Description of Artificial Sequence: Synthetic oligonucleotide
acgccaccuguacaaccaa

SEQ ID NO: 1251241 - RNA, 19 nt, Artificial Sequence
  Description of Artificial Sequence: Synthetic oligonucleotide
guggcucacucgaaaccca

SEQ ID NO: 1251242 - RNA, 19 nt, Artificial Sequence
  Description of Artificial Sequence: Synthetic oligonucleotide
gcgauauaguggcauauuu

SEQ ID NO: 1251243 - RNA, 19 nt, Artificial Sequence
  Description of Artificial Sequence: Synthetic oligonucleotide
cuccuaaagcgccuccacu

SEQ ID NO: 1251244 - RNA, 19 nt, Artificial Sequence
  Description of Artificial Sequence: Synthetic oligonucleotide
ccuaaagcgccuccacuga

SEQ ID NO: 1251245 - RNA, 19 nt, Artificial Sequence
  Description of Artificial Sequence: Synthetic oligonucleotide
cacuaaagggaaguagcau

SEQ ID NO: 1251246 - RNA, 19 nt, Artificial Sequence
  Description of Artificial Sequence: Synthetic oligonucleotide
cacucgaaacccacacagu

SEQ ID NO: 1251247 - RNA, 19 nt, Artificial Sequence
  Description of Artificial Sequence: Synthetic oligonucleotide
ccacugauaagccaucaau

SEQ ID NO: 1251248 - RNA, 19 nt, Artificial Sequence
  Description of Artificial Sequence: Synthetic oligonucleotide
ggauuuucggugagaugaa

SEQ ID NO: 1251249 - RNA, 19 nt, Artificial Sequence
  Description of Artificial Sequence: Synthetic oligonucleotide
ccacucgguuuguuuauca

SEQ ID NO: 1251250 - RNA, 19 nt, Artificial Sequence
  Description of Artificial Sequence: Synthetic oligonucleotide
  modified_base (19)..(19): a, c, u, g, unknown or other
augggccaaugagauuaan

SEQ ID NO: 1251251 - RNA, 19 nt, Artificial Sequence
  Description of Artificial Sequence: Synthetic oligonucleotide
cuucuacuggaguggggau

SEQ ID NO: 1251252 - RNA, 19 nt, Artificial Sequence
  Description of Artificial Sequence: Synthetic oligonucleotide
gaacagcuauacagauaua

SEQ ID NO: 1251253 - RNA, 19 nt, Artificial Sequence
  Description of Artificial Sequence: Synthetic oligonucleotide
ggaaacugagucagagccu

SEQ ID NO: 1251254 - RNA, 19 nt, Artificial Sequence
  Description of Artificial Sequence: Synthetic oligonucleotide
gcucaguuauaagugcacu

SEQ ID NO: 1251255 - RNA, 19 nt, Artificial Sequence
  Description of Artificial Sequence: Synthetic oligonucleotide
accugauagucaggaccaa

SEQ ID NO: 1251256 - RNA, 19 nt, Artificial Sequence
  Description of Artificial Sequence: Synthetic oligonucleotide
cauaccugacagucauuuu

SEQ ID NO: 1251257 - RNA, 19 nt, Artificial Sequence
  Description of Artificial Sequence: Synthetic oligonucleotide
gucgguaguuuugcuccaa

SEQ ID NO: 1251258 - RNA, 19 nt, Artificial Sequence
  Description of Artificial Sequence: Synthetic oligonucleotide
cccugugguucucagaggu

SEQ ID NO: 1251259 - RNA, 19 nt, Artificial Sequence
  Description of Artificial Sequence: Synthetic oligonucleotide
gguuuguuuaucagacauu

SEQ ID NO: 1251260 - RNA, 19 nt, Artificial Sequence
  Description of Artificial Sequence: Synthetic oligonucleotide
ggcucacucgaaacccaca

SEQ ID NO: 1251261 - RNA, 19 nt, Artificial Sequence
  Description of Artificial Sequence: Synthetic oligonucleotide
cagucguggccuguguagu

SEQ ID NO: 1251262 - RNA, 19 nt, Artificial Sequence
  Description of Artificial Sequence: Synthetic oligonucleotide
caaaccagucguggccugu

SEQ ID NO: 1251263 - RNA, 19 nt, Artificial Sequence
  Description of Artificial Sequence: Synthetic oligonucleotide
cagcaucguuuaacaaguu

SEQ ID NO: 1251264 - RNA, 19 nt, Artificial Sequence
  Description of Artificial Sequence: Synthetic oligonucleotide
ccgauaucacugucguguu

SEQ ID NO: 1251265 - RNA, 19 nt, Artificial Sequence
  Description of Artificial Sequence: Synthetic oligonucleotide
gccaaggauaugggccaau

SEQ ID NO: 1251266 - RNA, 19 nt, Artificial Sequence
  Description of Artificial Sequence: Synthetic oligonucleotide
gcgccuccacugacugaau

SEQ ID NO: 1251267 - RNA, 19 nt, Artificial Sequence
  Description of Artificial Sequence: Synthetic oligonucleotide
aauacugugugacaguagc

SEQ ID NO: 1251268 - RNA, 19 nt, Artificial Sequence
  Description of Artificial Sequence: Synthetic oligonucleotide
aguuaauuccuucagaagg

SEQ ID NO: 1251269 - RNA, 19 nt, Artificial Sequence
  Description of Artificial Sequence: Synthetic oligonucleotide
agggauacuacauuguugc

SEQ ID NO: 1251270 - RNA, 19 nt, Artificial Sequence
  Description of Artificial Sequence: Synthetic oligonucleotide
auuguugccauccuaaagg

SEQ ID NO: 1251271 - RNA, 19 nt, Artificial Sequence
  Description of Artificial Sequence: Synthetic oligonucleotide
uaguuaauaauacauguug

SEQ ID NO: 1251272 - RNA, 19 nt, Artificial Sequence
  Description of Artificial Sequence: Synthetic oligonucleotide
uuaucuaacagcaauguuc

SEQ ID NO: 1251273 - RNA, 19 nt, Artificial Sequence
  Description of Artificial Sequence: Synthetic oligonucleotide
auaauaaauacugugugac

SEQ ID NO: 1251274 - RNA, 19 nt, Artificial Sequence
  Description of Artificial Sequence: Synthetic oligonucleotide
aaucgcugaacugugaggc

SEQ ID NO: 1251275 - RNA, 19 nt, Artificial Sequence
  Description of Artificial Sequence: Synthetic oligonucleotide
aauaauaaauacuguguga

SEQ ID NO: 1251276 - RNA, 19 nt, Artificial Sequence
  Description of Artificial Sequence: Synthetic oligonucleotide
aaagcaacagccauugccc

SEQ ID NO: 1251277 - RNA, 19 nt, Artificial Sequence
  Description of Artificial Sequence: Synthetic oligonucleotide
uuuaauggaaggcgcaugg

SEQ ID NO: 1251278 - RNA, 19 nt, Artificial Sequence
  Description of Artificial Sequence: Synthetic oligonucleotide
ugaaguaguauacacggcc

SEQ ID NO: 1251279 - RNA, 19 nt, Artificial Sequence
  Description of Artificial Sequence: Synthetic oligonucleotide
agaaacaaggcccuccugc

SEQ ID NO: 1251280 - RNA, 19 nt, Artificial Sequence
  Description of Artificial Sequence: Synthetic oligonucleotide
agaaguggguggcagaugc

SEQ ID NO: 1251281 - RNA, 19 nt, Artificial Sequence
  Description of Artificial Sequence: Synthetic oligonucleotide
ugaguuaagcaacuugggg

SEQ ID NO: 1251282 - RNA, 19 nt, Artificial Sequence
  Description of Artificial Sequence: Synthetic oligonucleotide
aauggaagggguuggcugg

SEQ ID NO: 1251283 - RNA, 19 nt, Artificial Sequence
  Description of Artificial Sequence: Synthetic oligonucleotide
uaucuaacagcaauguuca

SEQ ID NO: 1251284 - RNA, 19 nt, Artificial Sequence
  Description of Artificial Sequence: Synthetic oligonucleotide
aaaggaagcucagagcccc

SEQ ID NO: 1251285 - RNA, 19 nt, Artificial Sequence
  Description of Artificial Sequence: Synthetic oligonucleotide
agugguuccagauuuaaug

SEQ ID NO: 1251286 - RNA, 19 nt, Artificial Sequence
  Description of Artificial Sequence: Synthetic oligonucleotide
ugugauugaaguaguauac

SEQ ID NO: 1251287 - RNA, 19 nt, Artificial Sequence
  Description of Artificial Sequence: Synthetic oligonucleotide
uguauagacaauggaaggg

SEQ ID NO: 1251288 - RNA, 19 nt, Artificial Sequence
  Description of Artificial Sequence: Synthetic oligonucleotide
caucuuaggagacacaggc

SEQ ID NO: 1251289 - RNA, 19 nt, Artificial Sequence
  Description of Artificial Sequence: Synthetic oligonucleotide
uaauggaaggcgcaugggg

SEQ ID NO: 1251290 - RNA, 19 nt, Artificial Sequence
  Description of Artificial Sequence: Synthetic oligonucleotide
gauugaaguaguauacacg

SEQ ID NO: 1251291 - RNA, 19 nt, Artificial Sequence
  Description of Artificial Sequence: Synthetic oligonucleotide
aaguuaauuccuucagaag

SEQ ID NO: 1251292 - RNA, 19 nt, Artificial Sequence
  Description of Artificial Sequence: Synthetic oligonucleotide
gguaaugagauacaguacc

SEQ ID NO: 1251293 - RNA, 19 nt, Artificial Sequence
  Description of Artificial Sequence: Synthetic oligonucleotide
  modified_base (7)..(7): a, c, u, g, unknown or other
aaaaccngccagaaguggg

SEQ ID NO: 1251294 - RNA, 19 nt, Artificial Sequence
  Description of Artificial Sequence: Synthetic oligonucleotide
caaacagggaaaaggaagc

SEQ ID NO: 1251295 - RNA, 19 nt, Artificial Sequence
  Description of Artificial Sequence: Synthetic oligonucleotide
ucuccucuagucaaagggg

SEQ ID NO: 1251296 - RNA, 19 nt, Artificial Sequence
  Description of Artificial Sequence: Synthetic oligonucleotide
aguuaagcaacuuggggug

SEQ ID NO: 1251297 - RNA, 19 nt, Artificial Sequence
  Description of Artificial Sequence: Synthetic oligonucleotide
accucugacccacuaagcc

SEQ ID NO: 1251298 - RNA, 19 nt, Artificial Sequence
  Description of Artificial Sequence: Synthetic oligonucleotide
ugauugaaguaguauacac

SEQ ID NO: 1251299 - RNA, 19 nt, Artificial Sequence
  Description of Artificial Sequence: Synthetic oligonucleotide
guuguggacacugaguugg

SEQ ID NO: 1251300 - RNA, 19 nt, Artificial Sequence
  Description of Artificial Sequence: Synthetic oligonucleotide
gacccacuaagccugaggg

SEQ ID NO: 1251301 - RNA, 19 nt, Artificial Sequence
  Description of Artificial Sequence: Synthetic oligonucleotide
gaaguuaauuccuucagaa

SEQ ID NO: 1251302 - RNA, 19 nt, Artificial Sequence
  Description of Artificial Sequence: Synthetic oligonucleotide
aagggcuaaccccacacag

SEQ ID NO: 1251303 - RNA, 19 nt, Artificial Sequence
  Description of Artificial Sequence: Synthetic oligonucleotide
gaugcaauauguucucacc

SEQ ID NO: 1251304 - RNA, 19 nt, Artificial Sequence
  Description of Artificial Sequence: Synthetic oligonucleotide
ugcuucaccaguaggugcg

SEQ ID NO: 1251305 - RNA, 19 nt, Artificial Sequence
  Description of Artificial Sequence: Synthetic oligonucleotide
cuguauagacaauggaagg

SEQ ID NO: 1251306 - RNA, 19 nt, Artificial Sequence
  Description of Artificial Sequence: Synthetic oligonucleotide
agccacuuaaagcaacagc

SEQ ID NO: 1251307 - RNA, 19 nt, Artificial Sequence
  Description of Artificial Sequence: Synthetic oligonucleotide
uuuggcagagcugcaaucg

SEQ ID NO: 1251308 - RNA, 19 nt, Artificial Sequence
  Description of Artificial Sequence: Synthetic oligonucleotide
gaggguuaggcucaggggc

SEQ ID NO: 1251309 - RNA, 19 nt, Artificial Sequence
  Description of Artificial Sequence: Synthetic oligonucleotide
ugaaguuaauuccuucaga

SEQ ID NO: 1251310 - RNA, 19 nt, Artificial Sequence
  Description of Artificial Sequence: Synthetic oligonucleotide
aguauacacggccugagcu

SEQ ID NO: 1251311 - RNA, 19 nt, Artificial Sequence
  Description of Artificial Sequence: Synthetic oligonucleotide
ucagucuuggguuuucacc

SEQ ID NO: 1251312 - RNA, 19 nt, Artificial Sequence
  Description of Artificial Sequence: Synthetic oligonucleotide
agaggaauggagcauaaaa

SEQ ID NO: 1251313 - RNA, 19 nt, Artificial Sequence
  Description of Artificial Sequence: Synthetic oligonucleotide
cauuuaucuaacagcaaug

SEQ ID NO: 1251314 - RNA, 19 nt, Artificial Sequence
  Description of Artificial Sequence: Synthetic oligonucleotide
ggagcauaaaacuaacaag

SEQ ID NO: 1251315 - RNA, 19 nt, Artificial Sequence
  Description of Artificial Sequence: Synthetic oligonucleotide
caucuuggucuacagagcg

SEQ ID NO: 1251316 - RNA, 19 nt, Artificial Sequence
  Description of Artificial Sequence: Synthetic oligonucleotide
cagauuuaauggaaggcgc

SEQ ID NO: 1251317 - RNA, 19 nt, Artificial Sequence
  Description of Artificial Sequence: Synthetic oligonucleotide
ucaaaggggccucuguugc

SEQ ID NO: 1251318 - RNA, 19 nt, Artificial Sequence
  Description of Artificial Sequence: Synthetic oligonucleotide
acaagaaacaaggcccucc

SEQ ID NO: 1251319 - RNA, 19 nt, Artificial Sequence
  Description of Artificial Sequence: Synthetic oligonucleotide
cuuaaagcaacagccauug

SEQ ID NO: 1251320 - RNA, 19 nt, Artificial Sequence
  Description of Artificial Sequence: Synthetic oligonucleotide
acugugaggccagagauuc

SEQ ID NO: 1251321 - RNA, 19 nt, Artificial Sequence
  Description of Artificial Sequence: Synthetic oligonucleotide
uguucucaccaauaagcag

SEQ ID NO: 1251322 - RNA, 19 nt, Artificial Sequence
  Description of Artificial Sequence: Synthetic oligonucleotide
ggaaacggcaucuggaggg

SEQ ID NO: 1251323 - RNA, 19 nt, Artificial Sequence
  Description of Artificial Sequence: Synthetic oligonucleotide
ucaccaauaagcagucucu

SEQ ID NO: 1251324 - RNA, 19 nt, Artificial Sequence
  Description of Artificial Sequence: Synthetic oligonucleotide
ugcugaguuaagcaacuug

SEQ ID NO: 1251325 - RNA, 19 nt, Artificial Sequence
  Description of Artificial Sequence: Synthetic oligonucleotide
uacuacauuguugccaucc

SEQ ID NO: 1251326 - RNA, 19 nt, Artificial Sequence
  Description of Artificial Sequence: Synthetic oligonucleotide
gaggaauggagcauaaaac

SEQ ID NO: 1251327 - RNA, 19 nt, Artificial Sequence
  Description of Artificial Sequence: Synthetic oligonucleotide
auuuaucuaacagcaaugu

SEQ ID NO: 1251328 - RNA, 19 nt, Artificial Sequence
  Description of Artificial Sequence: Synthetic oligonucleotide
ucuaucaggauuccuguuu

SEQ ID NO: 1251329 - RNA, 19 nt, Artificial Sequence
  Description of Artificial Sequence: Synthetic oligonucleotide
uauagacaauggaaggggu

SEQ ID NO: 1251330 - RNA, 19 nt, Artificial Sequence
  Description of Artificial Sequence: Synthetic oligonucleotide
gggaaaaggaagcucagag

SEQ ID NO: 1251331 - RNA, 19 nt, Artificial Sequence
  Description of Artificial Sequence: Synthetic oligonucleotide
  modified_base (8)..(8): a, c, u, g, unknown or other
gaaaaccngccagaagugg

SEQ ID NO: 1251332 - RNA, 19 nt, Artificial Sequence
  Description of Artificial Sequence: Synthetic oligonucleotide
cugaguuaagcaacuuggg

SEQ ID NO: 1251333 - RNA, 19 nt, Artificial Sequence
  Description of Artificial Sequence: Synthetic oligonucleotide
gaguuaagcaacuuggggu

SEQ ID NO: 1251334 - RNA, 19 nt, Artificial Sequence
  Description of Artificial Sequence: Synthetic oligonucleotide
uagacaauggaagggguug

SEQ ID NO: 1251335 - RNA, 19 nt, Artificial Sequence
  Description of Artificial Sequence: Synthetic oligonucleotide
augugauugaaguaguaua

SEQ ID NO: 1251336 - RNA, 19 nt, Artificial Sequence
  Description of Artificial Sequence: Synthetic oligonucleotide
aguuaauaauacauguugu

SEQ ID NO: 1251337 - RNA, 19 nt, Artificial Sequence
  Description of Artificial Sequence: Synthetic oligonucleotide
agaggguuaggcucagggg

SEQ ID NO: 1251338 - RNA, 19 nt, Artificial Sequence
  Description of Artificial Sequence: Synthetic oligonucleotide
gcugaguuaagcaacuugg

SEQ ID NO: 1251339 - RNA, 19 nt, Artificial Sequence
  Description of Artificial Sequence: Synthetic oligonucleotide
uuguugccauccuaaaggc

SEQ ID NO: 1251340 - RNA, 19 nt, Artificial Sequence
  Description of Artificial Sequence: Synthetic oligonucleotide
uuaauuccuucagaaggag

SEQ ID NO: 1251341 - RNA, 19 nt, Artificial Sequence
  Description of Artificial Sequence: Synthetic oligonucleotide
augcaauauguucucacca

SEQ ID NO: 1251342 - RNA, 19 nt, Artificial Sequence
  Description of Artificial Sequence: Synthetic oligonucleotide
auaaauacugugugacagu

SEQ ID NO: 1251343 - RNA, 19 nt, Artificial Sequence
  Description of Artificial Sequence: Synthetic oligonucleotide
  modified_base (14)..(14): a, c, u, g, unknown or other
acccaggaaaaccngccag

SEQ ID NO: 1251344 - RNA, 19 nt, Artificial Sequence
  Description of Artificial Sequence: Synthetic oligonucleotide
accaguaggugcgagcagc

SEQ ID NO: 1251345 - RNA, 19 nt, Artificial Sequence
  Description of Artificial Sequence: Synthetic oligonucleotide
gacuuaaucuucuggaugu

SEQ ID NO: 1251346 - RNA, 19 nt, Artificial Sequence
  Description of Artificial Sequence: Synthetic oligonucleotide
acauguuguggacacugag

SEQ ID NO: 1251347 - RNA, 19 nt, Artificial Sequence
  Description of Artificial Sequence: Synthetic oligonucleotide
ugacccacuaagccugagg

SEQ ID NO: 1251348 - RNA, 19 nt, Artificial Sequence
  Description of Artificial Sequence: Synthetic oligonucleotide
ugcaauauguucucaccaa

SEQ ID NO: 1251349 - RNA, 19 nt, Artificial Sequence
  Description of Artificial Sequence: Synthetic oligonucleotide
cagaggguuaggcucaggg

SEQ ID NO: 1251350 - RNA, 19 nt, Artificial Sequence
  Description of Artificial Sequence: Synthetic oligonucleotide
cucaccaauaagcagucuc

SEQ ID NO: 1251351 - RNA, 19 nt, Artificial Sequence
  Description of Artificial Sequence: Synthetic oligonucleotide
uuuaucuaacagcaauguu

SEQ ID NO: 1251352 - RNA, 19 nt, Artificial Sequence
  Description of Artificial Sequence: Synthetic oligonucleotide
ugggugggaacuuggagca

SEQ ID NO: 1251353 - RNA, 19 nt, Artificial Sequence
  Description of Artificial Sequence: Synthetic oligonucleotide
caacugaacagaggaaugg

SEQ ID NO: 1251354 - RNA, 19 nt, Artificial Sequence
  Description of Artificial Sequence: Synthetic oligonucleotide
agagaaacucugcugaguu

SEQ ID NO: 1251355 - RNA, 19 nt, Artificial Sequence
  Description of Artificial Sequence: Synthetic oligonucleotide
ugcaacugaacagaggaau

SEQ ID NO: 1251356 - RNA, 19 nt, Artificial Sequence
  Description of Artificial Sequence: Synthetic oligonucleotide
cuccucuagucaaaggggc

SEQ ID NO: 1251357 - RNA, 19 nt, Artificial Sequence
  Description of Artificial Sequence: Synthetic oligonucleotide
cauugaucagcuccagggc

SEQ ID NO: 1251358 - RNA, 19 nt, Artificial Sequence
  Description of Artificial Sequence: Synthetic oligonucleotide
uuaauggaaggcgcauggg

SEQ ID NO: 1251359 - RNA, 19 nt, Artificial Sequence
  Description of Artificial Sequence: Synthetic oligonucleotide
aaagggcuaaccccacaca

SEQ ID NO: 1251360 - RNA, 19 nt, Artificial Sequence
  Description of Artificial Sequence: Synthetic oligonucleotide
agagcugcaaucgcugaac

SEQ ID NO: 1251361 - RNA, 19 nt, Artificial Sequence
  Description of Artificial Sequence: Synthetic oligonucleotide
acgacucaugcgcuucucc

SEQ ID NO: 1251362 - RNA, 19 nt, Artificial Sequence
  Description of Artificial Sequence: Synthetic oligonucleotide
gaucuuuuccugccgccag

SEQ ID NO: 1251363 - RNA, 19 nt, Artificial Sequence
  Description of Artificial Sequence: Synthetic oligonucleotide
gguaguuaauaauacaugu

SEQ ID NO: 1251364 - RNA, 19 nt, Artificial Sequence
  Description of Artificial Sequence: Synthetic oligonucleotide
uguugccauccuaaaggcc

SEQ ID NO: 1251365 - RNA, 19 nt, Artificial Sequence
  Description of Artificial Sequence: Synthetic oligonucleotide
auccuaaaggcccaggauu

SEQ ID NO: 1251366 - RNA, 19 nt, Artificial Sequence
  Description of Artificial Sequence: Synthetic oligonucleotide
ugcugcaucgccaggugug

SEQ ID NO: 1251367 - RNA, 19 nt, Artificial Sequence
  Description of Artificial Sequence: Synthetic oligonucleotide
aguaggugcgagcagcgca

SEQ ID NO: 1251368 - RNA, 19 nt, Artificial Sequence
  Description of Artificial Sequence: Synthetic oligonucleotide
agaaacucugcugaguuaa

SEQ ID NO: 1251369 - RNA, 19 nt, Artificial Sequence
  Description of Artificial Sequence: Synthetic oligonucleotide
cuuaggagacacaggcccc

SEQ ID NO: 1251370 - RNA, 19 nt, Artificial Sequence
  Description of Artificial Sequence: Synthetic oligonucleotide
accacuguauagacaaugg

SEQ ID NO: 1251371 - RNA, 19 nt, Artificial Sequence
  Description of Artificial Sequence: Synthetic oligonucleotide
uaaugagauacaguaccac

SEQ ID NO: 1251372 - RNA, 19 nt, Artificial Sequence
  Description of Artificial Sequence: Synthetic oligonucleotide
cugagcuacgacucaugcg

SEQ ID NO: 1251373 - RNA, 19 nt, Artificial Sequence
  Description of Artificial Sequence: Synthetic oligonucleotide
acagagaaacucugcugag

SEQ ID NO: 1251374 - RNA, 19 nt, Artificial Sequence
  Description of Artificial Sequence: Synthetic oligonucleotide
aaauacugugugacaguag

SEQ ID NO: 1251375 - RNA, 19 nt, Artificial Sequence
  Description of Artificial Sequence: Synthetic oligonucleotide
acccacuaagccugagggc

SEQ ID NO: 1251376 - RNA, 19 nt, Artificial Sequence
  Description of Artificial Sequence: Synthetic oligonucleotide
uggugaucuuuuccugccg

SEQ ID NO: 1251377 - RNA, 19 nt, Artificial Sequence
  Description of Artificial Sequence: Synthetic oligonucleotide
agccugagggccuccacac

SEQ ID NO: 1251378 - RNA, 19 nt, Artificial Sequence
  Description of Artificial Sequence: Synthetic oligonucleotide
agguaguuaauaauacaug

SEQ ID NO: 1251379 - RNA, 19 nt, Artificial Sequence
  Description of Artificial Sequence: Synthetic oligonucleotide
uccuaaaggcccaggauuu

SEQ ID NO: 1251380 - RNA, 19 nt, Artificial Sequence
  Description of Artificial Sequence: Synthetic oligonucleotide
cugggagcugacaaagccc

SEQ ID NO: 1251381 - RNA, 19 nt, Artificial Sequence
  Description of Artificial Sequence: Synthetic oligonucleotide
  modified_base (15)..(15): a, c, u, g, unknown or other
aacccaggaaaaccngcca

SEQ ID NO: 1251382 - RNA, 19 nt, Artificial Sequence
  Description of Artificial Sequence: Synthetic oligonucleotide
aagaaacaaggcccuccug

SEQ ID NO: 1251383 - RNA, 19 nt, Artificial Sequence
  Description of Artificial Sequence: Synthetic oligonucleotide
uuucaccacuguauagaca

SEQ ID NO: 1251384 - RNA, 19 nt, Artificial Sequence
  Description of Artificial Sequence: Synthetic oligonucleotide
ucaccaguaggugcgagca

SEQ ID NO: 1251385 - RNA, 19 nt, Artificial Sequence
  Description of Artificial Sequence: Synthetic oligonucleotide
agguaaugagauacaguac

SEQ ID NO: 1251386 - RNA, 19 nt, Artificial Sequence
  Description of Artificial Sequence: Synthetic oligonucleotide
gaucccucuaucaggauuc

SEQ ID NO: 1251387 - RNA, 19 nt, Artificial Sequence
  Description of Artificial Sequence: Synthetic oligonucleotide
gguccaaagggcuaacccc

SEQ ID NO: 1251388 - RNA, 19 nt, Artificial Sequence
  Description of Artificial Sequence: Synthetic oligonucleotide
caaagggcuaaccccacac

SEQ ID NO: 1251389 - RNA, 19 nt, Artificial Sequence
  Description of Artificial Sequence: Synthetic oligonucleotide
cagucuuggguuuucacca

SEQ ID NO: 1251390 - RNA, 19 nt, Artificial Sequence
  Description of Artificial Sequence: Synthetic oligonucleotide
agagccccuuccuucuccc

SEQ ID NO: 1251391 - RNA, 19 nt, Artificial Sequence
  Description of Artificial Sequence: Synthetic oligonucleotide
  modified_base (19)..(19): a, c, u, g, unknown or other
acugaacccaggaaaaccn

SEQ ID NO: 1251392 - RNA, 19 nt, Artificial Sequence
  Description of Artificial Sequence: Synthetic oligonucleotide
uucucaccaauaagcaguc

SEQ ID NO: 1251393 - RNA, 19 nt, Artificial Sequence
  Description of Artificial Sequence: Synthetic oligonucleotide
auuuaauggaaggcgcaug

SEQ ID NO: 1251394 - RNA, 19 nt, Artificial Sequence
  Description of Artificial Sequence: Synthetic oligonucleotide
acucaugcgcuucucccag

SEQ ID NO: 1251395 - RNA, 19 nt, Artificial Sequence
  Description of Artificial Sequence: Synthetic oligonucleotide
ugaguuggcucccggggca

SEQ ID NO: 1251396 - RNA, 19 nt, Artificial Sequence
  Description of Artificial Sequence: Synthetic oligonucleotide
uauacacggccugagcuac

SEQ ID NO: 1251397 - RNA, 19 nt, Artificial Sequence
  Description of Artificial Sequence: Synthetic oligonucleotide
ucuugcuacugccuccaac

SEQ ID NO: 1251398 - RNA, 19 nt, Artificial Sequence
  Description of Artificial Sequence: Synthetic oligonucleotide
  modified_base (4)..(4): a, c, u, g, unknown or other
accngccagaagugggugg

SEQ ID NO: 1251399 - RNA, 19 nt, Artificial Sequence
  Description of Artificial Sequence: Synthetic oligonucleotide
  modified_base (18)..(18): a, c, u, g, unknown or other
cugaacccaggaaaaccng

SEQ ID NO: 1251400 - RNA, 19 nt, Artificial Sequence
  Description of Artificial Sequence: Synthetic oligonucleotide
auaagcagucucugugugu

SEQ ID NO: 1251401 - RNA, 19 nt, Artificial Sequence
  Description of Artificial Sequence: Synthetic oligonucleotide
ccaauaagcagucucugug

SEQ ID NO: 1251402 - RNA, 19 nt, Artificial Sequence
  Description of Artificial Sequence: Synthetic oligonucleotide
ggugacugaacccaggaaa

SEQ ID NO: 1251403 - RNA, 19 nt, Artificial Sequence
  Description of Artificial Sequence: Synthetic oligonucleotide
ggaagguaaugagauacag

SEQ ID NO: 1251404 - RNA, 19 nt, Artificial Sequence
  Description of Artificial Sequence: Synthetic oligonucleotide
gggcacauuuaucuaacag

SEQ ID NO: 1251405 - RNA, 19 nt, Artificial Sequence
  Description of Artificial Sequence: Synthetic oligonucleotide
uucuggauguagccauuga

SEQ ID NO: 1251406 - RNA, 19 nt, Artificial Sequence
  Description of Artificial Sequence: Synthetic oligonucleotide
gggcuaaccccacacagag

SEQ ID NO: 1251407 - RNA, 19 nt, Artificial Sequence
  Description of Artificial Sequence: Synthetic oligonucleotide
ggucaggucaccucugacc

SEQ ID NO: 1251408 - RNA, 19 nt, Artificial Sequence
  Description of Artificial Sequence: Synthetic oligonucleotide
  modified_base (6)..(6): a, c, u, g, unknown or other
aaaccngccagaagugggu

SEQ ID NO: 1251409 - RNA, 19 nt, Artificial Sequence
  Description of Artificial Sequence: Synthetic oligonucleotide
ugaugugauugaaguagua

SEQ ID NO: 1251410 - RNA, 19 nt, Artificial Sequence
  Description of Artificial Sequence: Synthetic oligonucleotide
agcaacagccauugcccag

SEQ ID NO: 1251411 - RNA, 19 nt, Artificial Sequence
  Description of Artificial Sequence: Synthetic oligonucleotide
guucucaccaauaagcagu

SEQ ID NO: 1251412 - RNA, 19 nt, Artificial Sequence
  Description of Artificial Sequence: Synthetic oligonucleotide
agauuuaauggaaggcgca

SEQ ID NO: 1251413 - RNA, 19 nt, Artificial Sequence
  Description of Artificial Sequence: Synthetic oligonucleotide
ugaucuuuuccugccgcca

SEQ ID NO: 1251414 - RNA, 19 nt, Artificial Sequence
  Description of Artificial Sequence: Synthetic oligonucleotide
guuaagcaacuuggggugg

SEQ ID NO: 1251415 - RNA, 19 nt, Artificial Sequence
  Description of Artificial Sequence: Synthetic oligonucleotide
guaaugagauacaguacca

SEQ ID NO: 1251416 - RNA, 19 nt, Artificial Sequence
  Description of Artificial Sequence: Synthetic oligonucleotide
gaacugugaggccagagau

SEQ ID NO: 1251417 - RNA, 19 nt, Artificial Sequence
  Description of Artificial Sequence: Synthetic oligonucleotide
agaucccucuaucaggauu

SEQ ID NO: 1251418 - RNA, 19 nt, Artificial Sequence
  Description of Artificial Sequence: Synthetic oligonucleotide
agggugcuaggucugguga

SEQ ID NO: 1251419 - RNA, 19 nt, Artificial Sequence
  Description of Artificial Sequence: Synthetic oligonucleotide
ugugugugccccugagaca

SEQ ID NO: 1251420 - RNA, 19 nt, Artificial Sequence
  Description of Artificial Sequence: Synthetic oligonucleotide
ggaugcaauauguucucac

SEQ ID NO: 1251421 - RNA, 19 nt, Artificial Sequence
  Description of Artificial Sequence: Synthetic oligonucleotide
caccacuguauagacaaug

SEQ ID NO: 1251422 - RNA, 19 nt, Artificial Sequence
  Description of Artificial Sequence: Synthetic oligonucleotide
acuugggguggagggauac

SEQ ID NO: 1251423 - RNA, 19 nt, Artificial Sequence
  Description of Artificial Sequence: Synthetic oligonucleotide
cugaguuggcucccggggc

SEQ ID NO: 1251424 - RNA, 19 nt, Artificial Sequence
  Description of Artificial Sequence: Synthetic oligonucleotide
cuaaaggcccaggauuuac

SEQ ID NO: 1251425 - RNA, 19 nt, Artificial Sequence
  Description of Artificial Sequence: Synthetic oligonucleotide
aaaccacagguaguuaaua

SEQ ID NO: 1251426 - RNA, 19 nt, Artificial Sequence
  Description of Artificial Sequence: Synthetic oligonucleotide
ucgcugaacugugaggcca

SEQ ID NO: 1251427 - RNA, 19 nt, Artificial Sequence
  Description of Artificial Sequence: Synthetic oligonucleotide
uacagccaguucccaguag

SEQ ID NO: 1251428 - RNA, 19 nt, Artificial Sequence
  Description of Artificial Sequence: Synthetic oligonucleotide
agcagcgcacccuggcagg

SEQ ID NO: 1251429 - RNA, 19 nt, Artificial Sequence
  Description of Artificial Sequence: Synthetic oligonucleotide
aggaaccccacaccccauc

SEQ ID NO: 1251430 - RNA, 19 nt, Artificial Sequence
  Description of Artificial Sequence: Synthetic oligonucleotide
  modified_base (11)..(11): a, c, u, g, unknown or other
caggaaaaccngccagaag

SEQ ID NO: 1251431 - RNA, 19 nt, Artificial Sequence
  Description of Artificial Sequence: Synthetic oligonucleotide
uugccauccuaaaggccca

SEQ ID NO: 1251432 - RNA, 19 nt, Artificial Sequence
  Description of Artificial Sequence: Synthetic oligonucleotide
cagggaaaaggaagcucag

SEQ ID NO: 1251433 - RNA, 19 nt, Artificial Sequence
  Description of Artificial Sequence: Synthetic oligonucleotide
  modified_base (5)..(5): a, c, u, g, unknown or other
aaccngccagaagugggug

SEQ ID NO: 1251434 - RNA, 19 nt, Artificial Sequence
  Description of Artificial Sequence: Synthetic oligonucleotide
gaaccccacaccccaucag

SEQ ID NO: 1251435 - RNA, 19 nt, Artificial Sequence
  Description of Artificial Sequence: Synthetic oligonucleotide
ggguccaaagggcuaaccc

SEQ ID NO: 1251436 - RNA, 19 nt, Artificial Sequence
  Description of Artificial Sequence: Synthetic oligonucleotide
acauuguugccauccuaaa

SEQ ID NO: 1251437 - RNA, 19 nt, Artificial Sequence
  Description of Artificial Sequence: Synthetic oligonucleotide
acggccugagcuacgacuc

SEQ ID NO: 1251438 - RNA, 19 nt, Artificial Sequence
  Description of Artificial Sequence: Synthetic oligonucleotide
ggauuuacagccaguuccc

SEQ ID NO: 1251439 - RNA, 19 nt, Artificial Sequence
  Description of Artificial Sequence: Synthetic oligonucleotide
ccugacuuaaucuucugga

SEQ ID NO: 1251440 - RNA, 19 nt, Artificial Sequence
  Description of Artificial Sequence: Synthetic oligonucleotide
ggauacuacauuguugcca

SEQ ID NO: 1251441 - RNA, 19 nt, Artificial Sequence
  Description of Artificial Sequence: Synthetic oligonucleotide
gaaacucugcugaguuaag

SEQ ID NO: 1251442 - RNA, 19 nt, Artificial Sequence
  Description of Artificial Sequence: Synthetic oligonucleotide
uggugacugaacccaggaa

SEQ ID NO: 1251443 - RNA, 19 nt, Artificial Sequence
  Description of Artificial Sequence: Synthetic oligonucleotide
cccacuaagccugagggcc

SEQ ID NO: 1251444 - RNA, 19 nt, Artificial Sequence
  Description of Artificial Sequence: Synthetic oligonucleotide
uccugccugccucugggac

SEQ ID NO: 1251445 - RNA, 19 nt, Artificial Sequence
  Description of Artificial Sequence: Synthetic oligonucleotide
gugauugaaguaguauaca

SEQ ID NO: 1251446 - RNA, 19 nt, Artificial Sequence
  Description of Artificial Sequence: Synthetic oligonucleotide
gacaggaaccccacacccc

SEQ ID NO: 1251447 - RNA, 19 nt, Artificial Sequence
  Description of Artificial Sequence: Synthetic oligonucleotide
cuaggucuggugacugaac

SEQ ID NO: 1251448 - RNA, 19 nt, Artificial Sequence
  Description of Artificial Sequence: Synthetic oligonucleotide
uccugggagcugacaaagc

SEQ ID NO: 1251449 - RNA, 19 nt, Artificial Sequence
  Description of Artificial Sequence: Synthetic oligonucleotide
aggugcgagcagcgcaccc

SEQ ID NO: 1251450 - RNA, 19 nt, Artificial Sequence
  Description of Artificial Sequence: Synthetic oligonucleotide
ugacugaacccaggaaaac

SEQ ID NO: 1251451 - RNA, 19 nt, Artificial Sequence
  Description of Artificial Sequence: Synthetic oligonucleotide
cccagaucccucuaucagg

SEQ ID NO: 1251452 - RNA, 19 nt, Artificial Sequence
  Description of Artificial Sequence: Synthetic oligonucleotide
ggugggaacuuggagcagg

SEQ ID NO: 1251453 - RNA, 19 nt, Artificial Sequence
  Description of Artificial Sequence: Synthetic oligonucleotide
uuguggacacugaguuggc

SEQ ID NO: 1251454 - RNA, 19 nt, Artificial Sequence
  Description of Artificial Sequence: Synthetic oligonucleotide
acacugaguuggcucccgg

SEQ ID NO: 1251455 - RNA, 19 nt, Artificial Sequence
  Description of Artificial Sequence: Synthetic oligonucleotide
aucuaacagcaauguucag

SEQ ID NO: 1251456 - RNA, 19 nt, Artificial Sequence
  Description of Artificial Sequence: Synthetic oligonucleotide
cccucuaucaggauuccug

SEQ ID NO: 1251457 - RNA, 19 nt, Artificial Sequence
  Description of Artificial Sequence: Synthetic oligonucleotide
ggcguuggugaugugauug

SEQ ID NO: 1251458 - RNA, 19 nt, Artificial Sequence
  Description of Artificial Sequence: Synthetic oligonucleotide
agggaaaccacagguaguu

SEQ ID NO: 1251459 - RNA, 19 nt, Artificial Sequence
  Description of Artificial Sequence: Synthetic oligonucleotide
uaucaggauuccuguuuuc

SEQ ID NO: 1251460 - RNA, 19 nt, Artificial Sequence
  Description of Artificial Sequence: Synthetic oligonucleotide
gacacugaguuggcucccg

SEQ ID NO: 1251461 - RNA, 19 nt, Artificial Sequence
  Description of Artificial Sequence: Synthetic oligonucleotide
ggaagagggccuccgagac

SEQ ID NO: 1251462 - RNA, 19 nt, Artificial Sequence
  Description of Artificial Sequence: Synthetic oligonucleotide
gcaauguucagucuugggu

SEQ ID NO: 1251463 - RNA, 19 nt, Artificial Sequence
  Description of Artificial Sequence: Synthetic oligonucleotide
gugccccugagacaggaac

SEQ ID NO: 1251464 - RNA, 19 nt, Artificial Sequence
  Description of Artificial Sequence: Synthetic oligonucleotide
  modified_base (9)..(9): a, c, u, g, unknown or other
ggaaaaccngccagaagug

SEQ ID NO: 1251465 - RNA, 19 nt, Artificial Sequence
  Description of Artificial Sequence: Synthetic oligonucleotide
auugcccagaucccucuau

SEQ ID NO: 1251466 - RNA, 19 nt, Artificial Sequence
  Description of Artificial Sequence: Synthetic oligonucleotide
acacccugaggcugaguug

SEQ ID NO: 1251467 - RNA, 19 nt, Artificial Sequence
  Description of Artificial Sequence: Synthetic oligonucleotide
guauacacggccugagcua

SEQ ID NO: 1251468 - RNA, 19 nt, Artificial Sequence
  Description of Artificial Sequence: Synthetic oligonucleotide
caauaagcagucucugugu

SEQ ID NO: 1251469 - RNA, 19 nt, Artificial Sequence
  Description of Artificial Sequence: Synthetic oligonucleotide
uggaugcaauauguucuca

SEQ ID NO: 1251470 - RNA, 19 nt, Artificial Sequence
  Description of Artificial Sequence: Synthetic oligonucleotide
caccaauaagcagucucug

SEQ ID NO: 1251471 - RNA, 19 nt, Artificial Sequence
  Description of Artificial Sequence: Synthetic oligonucleotide
cagcaauguucagucuugg

SEQ ID NO: 1251472 - RNA, 19 nt, Artificial Sequence
  Description of Artificial Sequence: Synthetic oligonucleotide
ucuagucaaaggggccucu

SEQ ID NO: 1251473 - RNA, 19 nt, Artificial Sequence
  Description of Artificial Sequence: Synthetic oligonucleotide
ccauuuuaggaauaauaaa

SEQ ID NO: 1251474 - RNA, 19 nt, Artificial Sequence
  Description of Artificial Sequence: Synthetic oligonucleotide
ugcccuucugaaguuaauu

SEQ ID NO: 1251475 - RNA, 19 nt, Artificial Sequence
  Description of Artificial Sequence: Synthetic oligonucleotide
gugacugaacccaggaaaa

SEQ ID NO: 1251476 - RNA, 19 nt, Artificial Sequence
  Description of Artificial Sequence: Synthetic oligonucleotide
ucuucuggauguagccauu

SEQ ID NO: 1251477 - RNA, 19 nt, Artificial Sequence
  Description of Artificial Sequence: Synthetic oligonucleotide
auagacaauggaagggguu

SEQ ID NO: 1251478 - RNA, 19 nt, Artificial Sequence
  Description of Artificial Sequence: Synthetic oligonucleotide
ccugagggccuccacaccc

SEQ ID NO: 1251479 - RNA, 19 nt, Artificial Sequence
  Description of Artificial Sequence: Synthetic oligonucleotide
ccugagcuacgacucaugc

SEQ ID NO: 1251480 - RNA, 19 nt, Artificial Sequence
  Description of Artificial Sequence: Synthetic oligonucleotide
acuaagccugagggccucc

SEQ ID NO: 1251481 - RNA, 19 nt, Artificial Sequence
  Description of Artificial Sequence: Synthetic oligonucleotide
uacacggccugagcuacga

SEQ ID NO: 1251482 - RNA, 19 nt, Artificial Sequence
  Description of Artificial Sequence: Synthetic oligonucleotide
gcuagggcagccccaacug

SEQ ID NO: 1251483 - RNA, 19 nt, Artificial Sequence
  Description of Artificial Sequence: Synthetic oligonucleotide
guaggugcgagcagcgcac

SEQ ID NO: 1251484 - RNA, 19 nt, Artificial Sequence
  Description of Artificial Sequence: Synthetic oligonucleotide
aggaagguaaugagauaca

SEQ ID NO: 1251485 - RNA, 19 nt, Artificial Sequence
  Description of Artificial Sequence: Synthetic oligonucleotide
gauuuaauggaaggcgcau

SEQ ID NO: 1251486 - RNA, 19 nt, Artificial Sequence
  Description of Artificial Sequence: Synthetic oligonucleotide
aaacggcaucuggagggug

SEQ ID NO: 1251487 - RNA, 19 nt, Artificial Sequence
  Description of Artificial Sequence: Synthetic oligonucleotide
gagaaacucugcugaguua

SEQ ID NO: 1251488 - RNA, 19 nt, Artificial Sequence
  Description of Artificial Sequence: Synthetic oligonucleotide
ucuccccuguccguagagc

SEQ ID NO: 1251489 - RNA, 19 nt, Artificial Sequence
  Description of Artificial Sequence: Synthetic oligonucleotide
guaguuaauaauacauguu

SEQ ID NO: 1251490 - RNA, 19 nt, Artificial Sequence
  Description of Artificial Sequence: Synthetic oligonucleotide
gcccagaucccucuaucag

SEQ ID NO: 1251491 - RNA, 19 nt, Artificial Sequence
  Description of Artificial Sequence: Synthetic oligonucleotide
aacugugaggccagagauu

SEQ ID NO: 1251492 - RNA, 19 nt, Artificial Sequence
  Description of Artificial Sequence: Synthetic oligonucleotide
aggaagcucagagccccuc

SEQ ID NO: 1251493 - RNA, 19 nt, Artificial Sequence
  Description of Artificial Sequence: Synthetic oligonucleotide
cuccugacuuaaucuucug

SEQ ID NO: 1251494 - RNA, 19 nt, Artificial Sequence
  Description of Artificial Sequence: Synthetic oligonucleotide
caucgccagguguggagug

SEQ ID NO: 1251495 - RNA, 19 nt, Artificial Sequence
  Description of Artificial Sequence: Synthetic oligonucleotide
gggauacuacauuguugcc

SEQ ID NO: 1251496 - RNA, 19 nt, Artificial Sequence
  Description of Artificial Sequence: Synthetic oligonucleotide
aggggcguccauggacugc

SEQ ID NO: 1251497 - RNA, 19 nt, Artificial Sequence
  Description of Artificial Sequence: Synthetic oligonucleotide
uccccuggcuuuggcagag

SEQ ID NO: 1251498 - RNA, 19 nt, Artificial Sequence
  Description of Artificial Sequence: Synthetic oligonucleotide
gguuggcugggguccaaag

SEQ ID NO: 1251499 - RNA, 19 nt, Artificial Sequence
  Description of Artificial Sequence: Synthetic oligonucleotide
acacggccugagcuacgac

SEQ ID NO: 1251500 - RNA, 19 nt, Artificial Sequence
  Description of Artificial Sequence: Synthetic oligonucleotide
uggggcgcugcaccacacc

SEQ ID NO: 1251501 - RNA, 19 nt, Artificial Sequence
  Description of Artificial Sequence: Synthetic oligonucleotide
ucaccacuguauagacaau

SEQ ID NO: 1251502 - RNA, 19 nt, Artificial Sequence
  Description of Artificial Sequence: Synthetic oligonucleotide
cuagucaaaggggccucug

SEQ ID NO: 1251503 - RNA, 19 nt, Artificial Sequence
  Description of Artificial Sequence: Synthetic oligonucleotide
gaaggggcguccauggacu

SEQ ID NO: 1251504 - RNA, 19 nt, Artificial Sequence
  Description of Artificial Sequence: Synthetic oligonucleotide
caugcgcuucucccagccc

SEQ ID NO: 1251505 - RNA, 19 nt, Artificial Sequence
  Description of Artificial Sequence: Synthetic oligonucleotide
aggguuaggcucaggggca

SEQ ID NO: 1251506 - RNA, 19 nt, Artificial Sequence
  Description of Artificial Sequence: Synthetic oligonucleotide
uccgagacuggcugugcuu

SEQ ID NO: 1251507 - RNA, 19 nt, Artificial Sequence
  Description of Artificial Sequence: Synthetic oligonucleotide
cucaugcgcuucucccagc

SEQ ID NO: 1251508 - RNA, 19 nt, Artificial Sequence
  Description of Artificial Sequence: Synthetic oligonucleotide
agggcagccccaacugggg

SEQ ID NO: 1251509 - RNA, 19 nt, Artificial Sequence
  Description of Artificial Sequence: Synthetic oligonucleotide
acuggcuggcguuggugau

SEQ ID NO: 1251510 - RNA, 19 nt, Artificial Sequence
  Description of Artificial Sequence: Synthetic oligonucleotide
gugcgagcagcgcacccug

SEQ ID NO: 1251511 - RNA, 19 nt, Artificial Sequence
  Description of Artificial Sequence: Synthetic oligonucleotide
ccagaucccucuaucagga

SEQ ID NO: 1251512 - RNA, 19 nt, Artificial Sequence
  Description of Artificial Sequence: Synthetic oligonucleotide
ggggcgcugcaccacaccc

SEQ ID NO: 1251513 - RNA, 19 nt, Artificial Sequence
  Description of Artificial Sequence: Synthetic oligonucleotide
cuacauuguugccauccua

SEQ ID NO: 1251514 - RNA, 19 nt, Artificial Sequence
  Description of Artificial Sequence: Synthetic oligonucleotide
cucuagucaaaggggccuc

SEQ ID NO: 1251515 - RNA, 19 nt, Artificial Sequence
  Description of Artificial Sequence: Synthetic oligonucleotide
ugggaacuuggagcaggug

SEQ ID NO: 1251516 - RNA, 19 nt, Artificial Sequence
  Description of Artificial Sequence: Synthetic oligonucleotide
cuucaccaguaggugcgag

SEQ ID NO: 1251517 - RNA, 19 nt, Artificial Sequence
  Description of Artificial Sequence: Synthetic oligonucleotide
ugugccccugagacaggaa

SEQ ID NO: 1251518 - RNA, 19 nt, Artificial Sequence
  Description of Artificial Sequence: Synthetic oligonucleotide
ugggccgcucccacuggcu

SEQ ID NO: 1251519 - RNA, 19 nt, Artificial Sequence
  Description of Artificial Sequence: Synthetic oligonucleotide
ccugagacaggaaccccac

SEQ ID NO: 1251520 - RNA, 19 nt, Artificial Sequence
  Description of Artificial Sequence: Synthetic oligonucleotide
ucucaccaauaagcagucu

SEQ ID NO: 1251521 - RNA, 19 nt, Artificial Sequence
  Description of Artificial Sequence: Synthetic oligonucleotide
gugcuaggucuggugacug

SEQ ID NO: 1251522 - RNA, 19 nt, Artificial Sequence
  Description of Artificial Sequence: Synthetic oligonucleotide
uggcucccggggcacauuu

SEQ ID NO: 1251523 - RNA, 19 nt, Artificial Sequence
  Description of Artificial Sequence: Synthetic oligonucleotide
gucuccccuggcuuuggca

SEQ ID NO: 1251524 - RNA, 19 nt, Artificial Sequence
  Description of Artificial Sequence: Synthetic oligonucleotide
agcuacgacucaugcgcuu

SEQ ID NO: 1251525 - RNA, 19 nt, Artificial Sequence
  Description of Artificial Sequence: Synthetic oligonucleotide
gcugcaucgccaggugugg

SEQ ID NO: 1251526 - RNA, 19 nt, Artificial Sequence
  Description of Artificial Sequence: Synthetic oligonucleotide
acugcccuucugaaguuaa

SEQ ID NO: 1251527 - RNA, 19 nt, Artificial Sequence
  Description of Artificial Sequence: Synthetic oligonucleotide
gucucugugugugccccug

SEQ ID NO: 1251528 - RNA, 19 nt, Artificial Sequence
  Description of Artificial Sequence: Synthetic oligonucleotide
  modified_base (3)..(3): a, c, u, g, unknown or other
ccngccagaaguggguggc

SEQ ID NO: 1251529 - RNA, 19 nt, Artificial Sequence
  Description of Artificial Sequence: Synthetic oligonucleotide
ccucuccucuagucaaagg

SEQ ID NO: 1251530 - RNA, 19 nt, Artificial Sequence
  Description of Artificial Sequence: Synthetic oligonucleotide
gagcugcaaucgcugaacu

SEQ ID NO: 1251531 - RNA, 19 nt, Artificial Sequence
  Description of Artificial Sequence: Synthetic oligonucleotide
ggaaccccacaccccauca

SEQ ID NO: 1251532 - RNA, 19 nt, Artificial Sequence
  Description of Artificial Sequence: Synthetic oligonucleotide
aggggcaucuuaggagaca

SEQ ID NO: 1251533 - RNA, 19 nt, Artificial Sequence
  Description of Artificial Sequence: Synthetic oligonucleotide
gggugcuaggucuggugac

SEQ ID NO: 1251534 - RNA, 19 nt, Artificial Sequence
  Description of Artificial Sequence: Synthetic oligonucleotide
agcaggaaggggcguccau

SEQ ID NO: 1251535 - RNA, 19 nt, Artificial Sequence
  Description of Artificial Sequence: Synthetic oligonucleotide
uaggugcgagcagcgcacc

SEQ ID NO: 1251536 - RNA, 19 nt, Artificial Sequence
  Description of Artificial Sequence: Synthetic oligonucleotide
auacacggccugagcuacg

SEQ ID NO: 1251537 - RNA, 19 nt, Artificial Sequence
  Description of Artificial Sequence: Synthetic oligonucleotide
caguaggugcgagcagcgc

SEQ ID NO: 1251538 - RNA, 19 nt, Artificial Sequence
  Description of Artificial Sequence: Synthetic oligonucleotide
cucccggggcacauuuauc

SEQ ID NO: 1251539 - RNA, 19 nt, Artificial Sequence
  Description of Artificial Sequence: Synthetic oligonucleotide
ucccucuaucaggauuccu

SEQ ID NO: 1251540 - RNA, 19 nt, Artificial Sequence
  Description of Artificial Sequence: Synthetic oligonucleotide
acagaggguuaggcucagg

SEQ ID NO: 1251541 - RNA, 19 nt, Artificial Sequence
  Description of Artificial Sequence: Synthetic oligonucleotide
uacgacucaugcgcuucuc

SEQ ID NO: 1251542 - RNA, 19 nt, Artificial Sequence
  Description of Artificial Sequence: Synthetic oligonucleotide
cuggcuggcguuggugaug

SEQ ID NO: 1251543 - RNA, 19 nt, Artificial Sequence
  Description of Artificial Sequence: Synthetic oligonucleotide
cauccuaaaggcccaggau

SEQ ID NO: 1251544 - RNA, 19 nt, Artificial Sequence
  Description of Artificial Sequence: Synthetic oligonucleotide
ggcguccauggacugcuug

SEQ ID NO: 1251545 - RNA, 19 nt, Artificial Sequence
  Description of Artificial Sequence: Synthetic oligonucleotide
cuggcguuggugaugugau

SEQ ID NO: 1251546 - RNA, 19 nt, Artificial Sequence
  Description of Artificial Sequence: Synthetic oligonucleotide
gaagagggccuccgagacu

SEQ ID NO: 1251547 - RNA, 19 nt, Artificial Sequence
  Description of Artificial Sequence: Synthetic oligonucleotide
uuccugccgccaggaagag

SEQ ID NO: 1251548 - RNA, 19 nt, Artificial Sequence
  Description of Artificial Sequence: Synthetic oligonucleotide
aucgccagguguggagugu

SEQ ID NO: 1251549 - RNA, 19 nt, Artificial Sequence
  Description of Artificial Sequence: Synthetic oligonucleotide
gcuggcguuggugauguga

SEQ ID NO: 1251550 - RNA, 19 nt, Artificial Sequence
  Description of Artificial Sequence: Synthetic oligonucleotide
guuaggcucaggggcaucu

SEQ ID NO: 1251551 - RNA, 19 nt, Artificial Sequence
  Description of Artificial Sequence: Synthetic oligonucleotide
gaaacggcaucuggagggu

SEQ ID NO: 1251552 - RNA, 19 nt, Artificial Sequence
  Description of Artificial Sequence: Synthetic oligonucleotide
cccagccacuuaaagcaac

SEQ ID NO: 1251553 - RNA, 19 nt, Artificial Sequence
  Description of Artificial Sequence: Synthetic oligonucleotide
ucgccagguguggaguguc

SEQ ID NO: 1251554 - RNA, 19 nt, Artificial Sequence
  Description of Artificial Sequence: Synthetic oligonucleotide
ccauccuaaaggcccagga

SEQ ID NO: 1251555 - RNA, 19 nt, Artificial Sequence
  Description of Artificial Sequence: Synthetic oligonucleotide
  modified_base (13)..(13): a, c, u, g, unknown or other
cccaggaaaaccngccaga

SEQ ID NO: 1251556 - RNA, 19 nt, Artificial Sequence
  Description of Artificial Sequence: Synthetic oligonucleotide
gcgcauggggcgcugcacc

SEQ ID NO: 1251557 - RNA, 19 nt, Artificial Sequence
  Description of Artificial Sequence: Synthetic oligonucleotide
gcuacgacucaugcgcuuc

SEQ ID NO: 1251558 - RNA, 19 nt, Artificial Sequence
  Description of Artificial Sequence: Synthetic oligonucleotide
cugagacaggaaccccaca

SEQ ID NO: 1251559 - RNA, 19 nt, Artificial Sequence
  Description of Artificial Sequence: Synthetic oligonucleotide
cacagaggguuaggcucag

SEQ ID NO: 1251560 - RNA, 19 nt, Artificial Sequence
  Description of Artificial Sequence: Synthetic oligonucleotide
gaguuggcucccggggcac

SEQ ID NO: 1251561 - RNA, 19 nt, Artificial Sequence
  Description of Artificial Sequence: Synthetic oligonucleotide
gcguuggugaugugauuga

SEQ ID NO: 1251562 - RNA, 19 nt, Artificial Sequence
  Description of Artificial Sequence: Synthetic oligonucleotide
uuaggcucaggggcaucuu

SEQ ID NO: 1251563 - RNA, 19 nt, Artificial Sequence
  Description of Artificial Sequence: Synthetic oligonucleotide
ggggcacauuuaucuaaca

SEQ ID NO: 1251564 - RNA, 19 nt, Artificial Sequence
  Description of Artificial Sequence: Synthetic oligonucleotide
cacuaagccugagggccuc

SEQ ID NO: 1251565 - RNA, 19 nt, Artificial Sequence
  Description of Artificial Sequence: Synthetic oligonucleotide
cccucccagccauuuuagg

SEQ ID NO: 1251566 - RNA, 19 nt, Artificial Sequence
  Description of Artificial Sequence: Synthetic oligonucleotide
ggcugaguugcugcaucgc

SEQ ID NO: 1251567 - RNA, 19 nt, Artificial Sequence
  Description of Artificial Sequence: Synthetic oligonucleotide
cugacccacuaagccugag

SEQ ID NO: 1251568 - RNA, 19 nt, Artificial Sequence
  Description of Artificial Sequence: Synthetic oligonucleotide
augcuggaugcaauauguu

SEQ ID NO: 1251569 - RNA, 19 nt, Artificial Sequence
  Description of Artificial Sequence: Synthetic oligonucleotide
ccuucagaaggagccuggc

SEQ ID NO: 1251570 - RNA, 19 nt, Artificial Sequence
  Description of Artificial Sequence: Synthetic oligonucleotide
gaaggcgcauggggcgcug

SEQ ID NO: 1251571 - RNA, 19 nt, Artificial Sequence
  Description of Artificial Sequence: Synthetic oligonucleotide
ugggguccaaagggcuaac

SEQ ID NO: 1251572 - RNA, 19 nt, Artificial Sequence
  Description of Artificial Sequence: Synthetic oligonucleotide
gccauccuaaaggcccagg

SEQ ID NO: 1251573 - RNA, 19 nt, Artificial Sequence
  Description of Artificial Sequence: Synthetic oligonucleotide
cugggguccaaagggcuaa

SEQ ID NO: 1251574 - RNA, 19 nt, Artificial Sequence
  Description of Artificial Sequence: Synthetic oligonucleotide
guggcagaugcuggaugca

SEQ ID NO: 1251575 - RNA, 19 nt, Artificial Sequence
  Description of Artificial Sequence: Synthetic oligonucleotide
cggggcacauuuaucuaac

SEQ ID NO: 1251576 - RNA, 19 nt, Artificial Sequence
  Description of Artificial Sequence: Synthetic oligonucleotide
accccaucaggaagguaau

SEQ ID NO: 1251577 - RNA, 19 nt, Artificial Sequence
  Description of Artificial Sequence: Synthetic oligonucleotide
gguggagggauacuacauu

SEQ ID NO: 1251578 - RNA, 19 nt, Artificial Sequence
  Description of Artificial Sequence: Synthetic oligonucleotide
ccgagacuggcugugcuuc

SEQ ID NO: 1251579 - RNA, 19 nt, Artificial Sequence
  Description of Artificial Sequence: Synthetic oligonucleotide
ccccucccagccauuuuag

SEQ ID NO: 1251580 - RNA, 19 nt, Artificial Sequence
  Description of Artificial Sequence: Synthetic oligonucleotide
gccauggaaacggcaucug

SEQ ID NO: 1251581 - RNA, 19 nt, Artificial Sequence
  Description of Artificial Sequence: Synthetic oligonucleotide
caucuccccuguccguaga

SEQ ID NO: 1251582 - RNA, 19 nt, Artificial Sequence
  Description of Artificial Sequence: Synthetic oligonucleotide
gaaguggguggcagaugcu

SEQ ID NO: 1251583 - RNA, 19 nt, Artificial Sequence
  Description of Artificial Sequence: Synthetic oligonucleotide
ccucugacccacuaagccu

SEQ ID NO: 1251584 - RNA, 19 nt, Artificial Sequence
  Description of Artificial Sequence: Synthetic oligonucleotide
cuaaccccacacagagggu

SEQ ID NO: 1251585 - RNA, 19 nt, Artificial Sequence
  Description of Artificial Sequence: Synthetic oligonucleotide
cagugguuccagauuuaau

SEQ ID NO: 1251586 - RNA, 19 nt, Artificial Sequence
  Description of Artificial Sequence: Synthetic oligonucleotide
caacuugggguggagggau

SEQ ID NO: 1251587 - RNA, 19 nt, Artificial Sequence
  Description of Artificial Sequence: Synthetic oligonucleotide
aguuggcucccggggcaca

SEQ ID NO: 1251588 - RNA, 19 nt, Artificial Sequence
  Description of Artificial Sequence: Synthetic oligonucleotide
cuacgacucaugcgcuucu

SEQ ID NO: 1251589 - RNA, 19 nt, Artificial Sequence
  Description of Artificial Sequence: Synthetic oligonucleotide
cucuaucaggauuccuguu

SEQ ID NO: 1251590 - RNA, 19 nt, Artificial Sequence
  Description of Artificial Sequence: Synthetic oligonucleotide
gagcuacgacucaugcgcu

SEQ ID NO: 1251591 - RNA, 19 nt, Artificial Sequence
  Description of Artificial Sequence: Synthetic oligonucleotide
  modified_base (12)..(12): a, c, u, g, unknown or other
ccaggaaaaccngccagaa

SEQ ID NO: 1251592 - RNA, 19 nt, Artificial Sequence
  Description of Artificial Sequence: Synthetic oligonucleotide
gccugagggccuccacacc

SEQ ID NO: 1251593 - RNA, 19 nt, Artificial Sequence
  Description of Artificial Sequence: Synthetic oligonucleotide
ccggggcacauuuaucuaa

SEQ ID NO: 1251594 - RNA, 19 nt, Artificial Sequence
  Description of Artificial Sequence: Synthetic oligonucleotide
gcuuuggcagagcugcaau

SEQ ID NO: 1251595 - RNA, 19 nt, Artificial Sequence
  Description of Artificial Sequence: Synthetic oligonucleotide
gccugagcuacgacucaug

SEQ ID NO: 1251596 - RNA, 19 nt, Artificial Sequence
  Description of Artificial Sequence: Synthetic oligonucleotide
cauugcccagaucccucua

SEQ ID NO: 1251597 - RNA, 19 nt, Artificial Sequence
  Description of Artificial Sequence: Synthetic oligonucleotide
gccuccgagacuggcugug

SEQ ID NO: 1251598 - RNA, 19 nt, Artificial Sequence
  Description of Artificial Sequence: Synthetic oligonucleotide
gugggaacuuggagcaggu

SEQ ID NO: 1251599 - RNA, 19 nt, Artificial Sequence
  Description of Artificial Sequence: Synthetic oligonucleotide
cuccgagacuggcugugcu

SEQ ID NO: 1251600 - RNA, 19 nt, Artificial Sequence
  Description of Artificial Sequence: Synthetic oligonucleotide
cuucuucuccugacuuaau

SEQ ID NO: 1251601 - RNA, 19 nt, Artificial Sequence
  Description of Artificial Sequence: Synthetic oligonucleotide
ggcgcauggggcgcugcac

SEQ ID NO: 1251602 - RNA, 19 nt, Artificial Sequence
  Description of Artificial Sequence: Synthetic oligonucleotide
  modified_base (2)..(2): a, c, u, g, unknown or other
cngccagaaguggguggca

SEQ ID NO: 1251603 - RNA, 19 nt, Artificial Sequence
  Description of Artificial Sequence: Synthetic oligonucleotide
cugcaucgccaggugugga

SEQ ID NO: 1251604 - RNA, 19 nt, Artificial Sequence
  Description of Artificial Sequence: Synthetic oligonucleotide
cacugcccuucugaaguua

SEQ ID NO: 1251605 - RNA, 19 nt, Artificial Sequence
  Description of Artificial Sequence: Synthetic oligonucleotide
ccuccgagacuggcugugc

SEQ ID NO: 1251606 - RNA, 19 nt, Artificial Sequence
  Description of Artificial Sequence: Synthetic oligonucleotide
ccccacacagaggguuagg

SEQ ID NO: 1251607 - RNA, 19 nt, Artificial Sequence
  Description of Artificial Sequence: Synthetic oligonucleotide
gccugccucugggaccuag

SEQ ID NO: 1251608 - RNA, 19 nt, Artificial Sequence
  Description of Artificial Sequence: Synthetic oligonucleotide
gguuaggcucaggggcauc

SEQ ID NO: 1251609 - RNA, 19 nt, Artificial Sequence
  Description of Artificial Sequence: Synthetic oligonucleotide
ggcagaugcuggaugcaau

SEQ ID NO: 1251610 - RNA, 19 nt, Artificial Sequence
  Description of Artificial Sequence: Synthetic oligonucleotide
gggcaucuuaggagacaca

SEQ ID NO: 1251611 - RNA, 19 nt, Artificial Sequence
  Description of Artificial Sequence: Synthetic oligonucleotide
ggggaggggucaggucacc

SEQ ID NO: 1251612 - RNA, 19 nt, Artificial Sequence
  Description of Artificial Sequence: Synthetic oligonucleotide
gcaucgccagguguggagu

SEQ ID NO: 1251613 - RNA, 19 nt, Artificial Sequence
  Description of Artificial Sequence: Synthetic oligonucleotide
gccgccaggaagagggccu

SEQ ID NO: 1251614 - RNA, 19 nt, Artificial Sequence
  Description of Artificial Sequence: Synthetic oligonucleotide
cgagcagcgcacccuggca

SEQ ID NO: 1251615 - RNA, 19 nt, Artificial Sequence
  Description of Artificial Sequence: Synthetic oligonucleotide
ccccagccacuuaaagcaa

SEQ ID NO: 1251616 - RNA, 19 nt, Artificial Sequence
  Description of Artificial Sequence: Synthetic oligonucleotide
cccggggcacauuuaucua

SEQ ID NO: 1251617 - RNA, 19 nt, Artificial Sequence
  Description of Artificial Sequence: Synthetic oligonucleotide
ugccaccacugggccgcuc

SEQ ID NO: 1251618 - RNA, 19 nt, Artificial Sequence
  Description of Artificial Sequence: Synthetic oligonucleotide
ggagggugcuaggucuggu

SEQ ID NO: 1251619 - RNA, 19 nt, Artificial Sequence
  Description of Artificial Sequence: Synthetic oligonucleotide
gcgcuucucccagcccggc

SEQ ID NO: 1251620 - RNA, 19 nt, Artificial Sequence
  Description of Artificial Sequence: Synthetic oligonucleotide
cugcugaguuaagcaacuu

SEQ ID NO: 1251621 - RNA, 19 nt, Artificial Sequence
  Description of Artificial Sequence: Synthetic oligonucleotide
ggccugagcuacgacucau

SEQ ID NO: 1251622 - RNA, 19 nt, Artificial Sequence
  Description of Artificial Sequence: Synthetic oligonucleotide
ggccuccgagacuggcugu

SEQ ID NO: 1251623 - RNA, 19 nt, Artificial Sequence
  Description of Artificial Sequence: Synthetic oligonucleotide
ggcccuccugccugccucu

SEQ ID NO: 1251624 - RNA, 19 nt, Artificial Sequence
  Description of Artificial Sequence: Synthetic oligonucleotide
ggguuaggcucaggggcau

SEQ ID NO: 1251625 - RNA, 19 nt, Artificial Sequence
  Description of Artificial Sequence: Synthetic oligonucleotide
ggcucccggggcacauuua

SEQ ID NO: 1251626 - RNA, 19 nt, Artificial Sequence
  Description of Artificial Sequence: Synthetic oligonucleotide
ccacugcccuucugaaguu

SEQ ID NO: 1251627 - RNA, 19 nt, Artificial Sequence
  Description of Artificial Sequence: Synthetic oligonucleotide
gggcguccauggacugcuu

SEQ ID NO: 1251628 - RNA, 19 nt, Artificial Sequence
  Description of Artificial Sequence: Synthetic oligonucleotide
uccgcuuucagucacaccg

SEQ ID NO: 1251629 - RNA, 19 nt, Artificial Sequence
  Description of Artificial Sequence: Synthetic oligonucleotide
gauuaaguuauuuggaaug

SEQ ID NO: 1251630 - RNA, 19 nt, Artificial Sequence
  Description of Artificial Sequence: Synthetic oligonucleotide
uaaguuauuuggaauggug

SEQ ID NO: 1251631 - RNA, 19 nt, Artificial Sequence
  Description of Artificial Sequence: Synthetic oligonucleotide
gauuauacagccgauuaag

SEQ ID NO: 1251632 - RNA, 19 nt, Artificial Sequence
  Description of Artificial Sequence: Synthetic oligonucleotide
agccgauuaaguuauuugg

SEQ ID NO: 1251633 - RNA, 19 nt, Artificial Sequence
  Description of Artificial Sequence: Synthetic oligonucleotide
auugcuuaucgacaaacag

SEQ ID NO: 1251634 - RNA, 19 nt, Artificial Sequence
  Description of Artificial Sequence: Synthetic oligonucleotide
aguuauuuggaauggugag

SEQ ID NO: 1251635 - RNA, 19 nt, Artificial Sequence
  Description of Artificial Sequence: Synthetic oligonucleotide
uuagcagaugauaaagugu

SEQ ID NO: 1251636 - RNA, 19 nt, Artificial Sequence
  Description of Artificial Sequence: Synthetic oligonucleotide
agcgugaugauucucuccg

SEQ ID NO: 1251637 - RNA, 19 nt, Artificial Sequence
  Description of Artificial Sequence: Synthetic oligonucleotide
uauacagccgauuaaguua

SEQ ID NO: 1251638 - RNA, 19 nt, Artificial Sequence
  Description of Artificial Sequence: Synthetic oligonucleotide
acacuuacaaauuauuuaa

SEQ ID NO: 1251639 - RNA, 19 nt, Artificial Sequence
  Description of Artificial Sequence: Synthetic oligonucleotide
cuuagcagaugauaaagug

SEQ ID NO: 1251640 - RNA, 19 nt, Artificial Sequence
  Description of Artificial Sequence: Synthetic oligonucleotide
gauguuggcgccuuggcgc

SEQ ID NO: 1251641 - RNA, 19 nt, Artificial Sequence
  Description of Artificial Sequence: Synthetic oligonucleotide
ucgaugaucauggcgaagg

SEQ ID NO: 1251642 - RNA, 19 nt, Artificial Sequence
  Description of Artificial Sequence: Synthetic oligonucleotide
ugauaaaguguagaaacug

SEQ ID NO: 1251643 - RNA, 19 nt, Artificial Sequence
  Description of Artificial Sequence: Synthetic oligonucleotide
uuuuaaccaauccacuuuc

SEQ ID NO: 1251644 - RNA, 19 nt, Artificial Sequence
  Description of Artificial Sequence: Synthetic oligonucleotide
uucuuagcagaugauaaag

SEQ ID NO: 1251645 - RNA, 19 nt, Artificial Sequence
  Description of Artificial Sequence: Synthetic oligonucleotide
aauucuuagcagaugauaa

SEQ ID NO: 1251646 - RNA, 19 nt, Artificial Sequence
  Description of Artificial Sequence: Synthetic oligonucleotide
agucaauuccggcgaaucc

SEQ ID NO: 1251647 - RNA, 19 nt, Artificial Sequence
  Description of Artificial Sequence: Synthetic oligonucleotide
ucuuaaauucuugacauua

SEQ ID NO: 1251648 - RNA, 19 nt, Artificial Sequence
  Description of Artificial Sequence: Synthetic oligonucleotide
uuaucgacaaacagaaaua

SEQ ID NO: 1251649 - RNA, 19 nt, Artificial Sequence
  Description of Artificial Sequence: Synthetic oligonucleotide
aaccaauccacuuucuuua

SEQ ID NO: 1251650 - RNA, 19 nt, Artificial Sequence
  Description of Artificial Sequence: Synthetic oligonucleotide
gugagagucacguugaguc

SEQ ID NO: 1251651 - RNA, 19 nt, Artificial Sequence
  Description of Artificial Sequence: Synthetic oligonucleotide
agaucgagcggagaaaugg

SEQ ID NO: 1251652 - RNA, 19 nt, Artificial Sequence
  Description of Artificial Sequence: Synthetic oligonucleotide
ucgaguaggcgucuagagg

SEQ ID NO: 1251653 - RNA, 19 nt, Artificial Sequence
  Description of Artificial Sequence: Synthetic oligonucleotide
agugagacuguugucuugc

SEQ ID NO: 1251654 - RNA, 19 nt, Artificial Sequence
  Description of Artificial Sequence: Synthetic oligonucleotide
ugauguuggcgccuuggcg

SEQ ID NO: 1251655 - RNA, 19 nt, Artificial Sequence
  Description of Artificial Sequence: Synthetic oligonucleotide
auuccggcgaaucccgucc

SEQ ID NO: 1251656 - RNA, 19 nt, Artificial Sequence
  Description of Artificial Sequence: Synthetic oligonucleotide
ugaugauucucuccgggca

SEQ ID NO: 1251657 - RNA, 19 nt, Artificial Sequence
  Description of Artificial Sequence: Synthetic oligonucleotide
aaguuauuuggaaugguga

SEQ ID NO: 1251658 - RNA, 19 nt, Artificial Sequence
  Description of Artificial Sequence: Synthetic oligonucleotide
uuuccgugcaucagcagcc

SEQ ID NO: 1251659 - RNA, 19 nt, Artificial Sequence
  Description of Artificial Sequence: Synthetic oligonucleotide
ucuuagcagaugauaaagu

SEQ ID NO: 1251660 - RNA, 19 nt, Artificial Sequence
  Description of Artificial Sequence: Synthetic oligonucleotide
uccgagauguugauccgcg

SEQ ID NO: 1251661 - RNA, 19 nt, Artificial Sequence
  Description of Artificial Sequence: Synthetic oligonucleotide
uacgagcgaaccuacacug

SEQ ID NO: 1251662 - RNA, 19 nt, Artificial Sequence
  Description of Artificial Sequence: Synthetic oligonucleotide
ucgcggaucuccuugaucu

SEQ ID NO: 1251663 - RNA, 19 nt, Artificial Sequence
  Description of Artificial Sequence: Synthetic oligonucleotide
uggcggaucucauugaugu

SEQ ID NO: 1251664 - RNA, 19 nt, Artificial Sequence
  Description of Artificial Sequence: Synthetic oligonucleotide
aauuccggcgaaucccguc

SEQ ID NO: 1251665 - RNA, 19 nt, Artificial Sequence
  Description of Artificial Sequence: Synthetic oligonucleotide
aacuaaauauggaucccag

SEQ ID NO: 1251666 - RNA, 19 nt, Artificial Sequence
  Description of Artificial Sequence: Synthetic oligonucleotide
auagugauggcccgcucgg

SEQ ID NO: 1251667 - RNA, 19 nt, Artificial Sequence
  Description of Artificial Sequence: Synthetic oligonucleotide
caucauggcaaagugagac

SEQ ID NO: 1251668 - RNA, 19 nt, Artificial Sequence
  Description of Artificial Sequence: Synthetic oligonucleotide
uuauacagccgauuaaguu

SEQ ID NO: 1251669 - RNA, 19 nt, Artificial Sequence
  Description of Artificial Sequence: Synthetic oligonucleotide
cuugcagccgcccuugccg

SEQ ID NO: 1251670 - RNA, 19 nt, Artificial Sequence
  Description of Artificial Sequence: Synthetic oligonucleotide
gcugcagcgaucuuggccg

SEQ ID NO: 1251671 - RNA, 19 nt, Artificial Sequence
  Description of Artificial Sequence: Synthetic oligonucleotide
gaugauucucuccgggcag

SEQ ID NO: 1251672 - RNA, 19 nt, Artificial Sequence
  Description of Artificial Sequence: Synthetic oligonucleotide
cuugaaucgaguaggcguc

SEQ ID NO: 1251673 - RNA, 19 nt, Artificial Sequence
  Description of Artificial Sequence: Synthetic oligonucleotide
agcuugucgaugaucaugg

SEQ ID NO: 1251674 - RNA, 19 nt, Artificial Sequence
  Description of Artificial Sequence: Synthetic oligonucleotide
uuacgagcgaaccuacacu

SEQ ID NO: 1251675 - RNA, 19 nt, Artificial Sequence
  Description of Artificial Sequence: Synthetic oligonucleotide
agacuguugucuugccacc

SEQ ID NO: 1251676 - RNA, 19 nt, Artificial Sequence
  Description of Artificial Sequence: Synthetic oligonucleotide
auagugaccugccuuccag

SEQ ID NO: 1251677 - RNA, 19 nt, Artificial Sequence
  Description of Artificial Sequence: Synthetic oligonucleotide
gagagucacguugaguccg

SEQ ID NO: 1251678 - RNA, 19 nt, Artificial Sequence
  Description of Artificial Sequence: Synthetic oligonucleotide
uacguggucaaguccuggg

SEQ ID NO: 1251679 - RNA, 19 nt, Artificial Sequence
  Description of Artificial Sequence: Synthetic oligonucleotide
uauggaucccagcaauaac

SEQ ID NO: 1251680 - RNA, 19 nt, Artificial Sequence
  Description of Artificial Sequence: Synthetic oligonucleotide
cuuaucgacaaacagaaau

SEQ ID NO: 1251681 - RNA, 19 nt, Artificial Sequence
  Description of Artificial Sequence: Synthetic oligonucleotide
uaucgacaaacagaaauaa

SEQ ID NO: 1251682 - RNA, 19 nt, Artificial Sequence
  Description of Artificial Sequence: Synthetic oligonucleotide
guuacgagcgaaccuacac

SEQ ID NO: 1251683 - RNA, 19 nt, Artificial Sequence
  Description of Artificial Sequence: Synthetic oligonucleotide
uugccgaucagagagccgc

SEQ ID NO: 1251684 - RNA, 19 nt, Artificial Sequence
  Description of Artificial Sequence: Synthetic oligonucleotide
guguguuguccuugaaucg

SEQ ID NO: 1251685 - RNA, 19 nt, Artificial Sequence
  Description of Artificial Sequence: Synthetic oligonucleotide
acguggucaaguccugggc

SEQ ID NO: 1251686 - RNA, 19 nt, Artificial Sequence
  Description of Artificial Sequence: Synthetic oligonucleotide
aguaggcccgaacugccgg

SEQ ID NO: 1251687 - RNA, 19 nt, Artificial Sequence
  Description of Artificial Sequence: Synthetic oligonucleotide
aucagagagccgcacuggg

SEQ ID NO: 1251688 - RNA, 19 nt, Artificial Sequence
  Description of Artificial Sequence: Synthetic oligonucleotide
gcuggagucaauuccggcg

SEQ ID NO: 1251689 - RNA, 19 nt, Artificial Sequence
  Description of Artificial Sequence: Synthetic oligonucleotide
ugagagucacguugagucc

SEQ ID NO: 1251690 - RNA, 19 nt, Artificial Sequence
  Description of Artificial Sequence: Synthetic oligonucleotide
ugcuugacacacucgguca

SEQ ID NO: 1251691 - RNA, 19 nt, Artificial Sequence
  Description of Artificial Sequence: Synthetic oligonucleotide
ucgagcggagaaauggugu

SEQ ID NO: 1251692 - RNA, 19 nt, Artificial Sequence
  Description of Artificial Sequence: Synthetic oligonucleotide
augaccggcgagcuggccg

SEQ ID NO: 1251693 - RNA, 19 nt, Artificial Sequence
  Description of Artificial Sequence: Synthetic oligonucleotide
uugauguuggcgccuuggc

SEQ ID NO: 1251694 - RNA, 19 nt, Artificial Sequence
  Description of Artificial Sequence: Synthetic oligonucleotide
gucaauuccggcgaauccc

SEQ ID NO: 1251695 - RNA, 19 nt, Artificial Sequence
  Description of Artificial Sequence: Synthetic oligonucleotide
gacacacucggucaccgac

SEQ ID NO: 1251696 - RNA, 19 nt, Artificial Sequence
  Description of Artificial Sequence: Synthetic oligonucleotide
uugacacacucggucaccg

SEQ ID NO: 1251697 - RNA, 19 nt, Artificial Sequence
  Description of Artificial Sequence: Synthetic oligonucleotide
aaaacagggaaaagcuuau

SEQ ID NO: 1251698 - RNA, 19 nt, Artificial Sequence
  Description of Artificial Sequence: Synthetic oligonucleotide
agcgaaccuacacuguucu

SEQ ID NO: 1251699 - RNA, 19 nt, Artificial Sequence
  Description of Artificial Sequence: Synthetic oligonucleotide
gaaucgaguaggcgucuag

SEQ ID NO: 1251700 - RNA, 19 nt, Artificial Sequence
  Description of Artificial Sequence: Synthetic oligonucleotide
cacucggucaccgacugcg

SEQ ID NO: 1251701 - RNA, 19 nt, Artificial Sequence
  Description of Artificial Sequence: Synthetic oligonucleotide
ucguuacguggucaagucc

SEQ ID NO: 1251702 - RNA, 19 nt, Artificial Sequence
  Description of Artificial Sequence: Synthetic oligonucleotide
cagccgauuaaguuauuug

SEQ ID NO: 1251703 - RNA, 19 nt, Artificial Sequence
  Description of Artificial Sequence: Synthetic oligonucleotide
acgccggcgauagugaugg

SEQ ID NO: 1251704 - RNA, 19 nt, Artificial Sequence
  Description of Artificial Sequence: Synthetic oligonucleotide
uuccccuccgagauguuga

SEQ ID NO: 1251705 - RNA, 19 nt, Artificial Sequence
  Description of Artificial Sequence: Synthetic oligonucleotide
uccuugaaucgaguaggcg

SEQ ID NO: 1251706 - RNA, 19 nt, Artificial Sequence
  Description of Artificial Sequence: Synthetic oligonucleotide
ugaccggcgagcuggccgg

SEQ ID NO: 1251707 - RNA, 19 nt, Artificial Sequence
  Description of Artificial Sequence: Synthetic oligonucleotide
cagagagccgcacugggug

SEQ ID NO: 1251708 - RNA, 19 nt, Artificial Sequence
  Description of Artificial Sequence: Synthetic oligonucleotide
uuggugggcccagucagcg

SEQ ID NO: 1251709 - RNA, 19 nt, Artificial Sequence
  Description of Artificial Sequence: Synthetic oligonucleotide
augacucucccuugcggag

SEQ ID NO: 1251710 - RNA, 19 nt, Artificial Sequence
  Description of Artificial Sequence: Synthetic oligonucleotide
ugaguccgcuuucagucac

SEQ ID NO: 1251711 - RNA, 19 nt, Artificial Sequence
  Description of Artificial Sequence: Synthetic oligonucleotide
gucaugacucucccuugcg

SEQ ID NO: 1251712 - RNA, 19 nt, Artificial Sequence
  Description of Artificial Sequence: Synthetic oligonucleotide
auuauacagccgauuaagu

SEQ ID NO: 1251713 - RNA, 19 nt, Artificial Sequence
  Description of Artificial Sequence: Synthetic oligonucleotide
agagagccgcacugggugg

SEQ ID NO: 1251714 - RNA, 19 nt, Artificial Sequence
  Description of Artificial Sequence: Synthetic oligonucleotide
cucguuacguggucaaguc

SEQ ID NO: 1251715 - RNA, 19 nt, Artificial Sequence
  Description of Artificial Sequence: Synthetic oligonucleotide
uguuguccuugaaucgagu

SEQ ID NO: 1251716 - RNA, 19 nt, Artificial Sequence
  Description of Artificial Sequence: Synthetic oligonucleotide
ucagagagccgcacugggu

SEQ ID NO: 1251717 - RNA, 19 nt, Artificial Sequence
  Description of Artificial Sequence: Synthetic oligonucleotide
aaucccgucccgccgugca

SEQ ID NO: 1251718 - RNA, 19 nt, Artificial Sequence
  Description of Artificial Sequence: Synthetic oligonucleotide
uuacguggucaaguccugg

SEQ ID NO: 1251719 - RNA, 19 nt, Artificial Sequence
  Description of Artificial Sequence: Synthetic oligonucleotide
auauggaucccagcaauaa

SEQ ID NO: 1251720 - RNA, 19 nt, Artificial Sequence
  Description of Artificial Sequence: Synthetic oligonucleotide
ucuugcagccgcccuugcc

SEQ ID NO: 1251721 - RNA, 19 nt, Artificial Sequence
  Description of Artificial Sequence: Synthetic oligonucleotide
cauugcuuaucgacaaaca

SEQ ID NO: 1251722 - RNA, 19 nt, Artificial Sequence
  Description of Artificial Sequence: Synthetic oligonucleotide
uugaguccgcuuucaguca

SEQ ID NO: 1251723 - RNA, 19 nt, Artificial Sequence
  Description of Artificial Sequence: Synthetic oligonucleotide
aguucaugggugguuugag

SEQ ID NO: 1251724 - RNA, 19 nt, Artificial Sequence
  Description of Artificial Sequence: Synthetic oligonucleotide
ggaucaugggaaaacagca

SEQ ID NO: 1251725 - RNA, 19 nt, Artificial Sequence
  Description of Artificial Sequence: Synthetic oligonucleotide
aguaggcgucuagaggugg

SEQ ID NO: 1251726 - RNA, 19 nt, Artificial Sequence
  Description of Artificial Sequence: Synthetic oligonucleotide
caggcugauacuggcagcc

SEQ ID NO: 1251727 - RNA, 19 nt, Artificial Sequence
  Description of Artificial Sequence: Synthetic oligonucleotide
aauauggaucccagcaaua

SEQ ID NO: 1251728 - RNA, 19 nt, Artificial Sequence
  Description of Artificial Sequence: Synthetic oligonucleotide
agugaccugccuuccagaa

SEQ ID NO: 1251729 - RNA, 19 nt, Artificial Sequence
  Description of Artificial Sequence: Synthetic oligonucleotide
auacagccgauuaaguuau

SEQ ID NO: 1251730 - RNA, 19 nt, Artificial Sequence
  Description of Artificial Sequence: Synthetic oligonucleotide
uggucaugacucucccuug

SEQ ID NO: 1251731 - RNA, 19 nt, Artificial Sequence
  Description of Artificial Sequence: Synthetic oligonucleotide
agcagccgaauggugagag

SEQ ID NO: 1251732 - RNA, 19 nt, Artificial Sequence
  Description of Artificial Sequence: Synthetic oligonucleotide
uuggccagaucgagcggag

SEQ ID NO: 1251733 - RNA, 19 nt, Artificial Sequence
  Description of Artificial Sequence: Synthetic oligonucleotide
cagcaauaacagcugaaca

SEQ ID NO: 1251734 - RNA, 19 nt, Artificial Sequence
  Description of Artificial Sequence: Synthetic oligonucleotide
gagucaauuccggcgaauc

SEQ ID NO: 1251735 - RNA, 19 nt, Artificial Sequence
  Description of Artificial Sequence: Synthetic oligonucleotide
aguccgcuuucagucacac

SEQ ID NO: 1251736 - RNA, 19 nt, Artificial Sequence
  Description of Artificial Sequence: Synthetic oligonucleotide
ggcaaagugagacuguugu

SEQ ID NO: 1251737 - RNA, 19 nt, Artificial Sequence
  Description of Artificial Sequence: Synthetic oligonucleotide
cagcgugaugauucucucc

SEQ ID NO: 1251738 - RNA, 19 nt, Artificial Sequence
  Description of Artificial Sequence: Synthetic oligonucleotide
cagccgaauggugagaguc

SEQ ID NO: 1251739 - RNA, 19 nt, Artificial Sequence
  Description of Artificial Sequence: Synthetic oligonucleotide
agagucacguugaguccgc

SEQ ID NO: 1251740 - RNA, 19 nt, Artificial Sequence
  Description of Artificial Sequence: Synthetic oligonucleotide
aaguccugggcggcuggcg

SEQ ID NO: 1251741 - RNA, 19 nt, Artificial Sequence
  Description of Artificial Sequence: Synthetic oligonucleotide
ucacguugaguccgcuuuc

SEQ ID NO: 1251742 - RNA, 19 nt, Artificial Sequence
  Description of Artificial Sequence: Synthetic oligonucleotide
cuugccgaucagagagccg

SEQ ID NO: 1251743 - RNA, 19 nt, Artificial Sequence
  Description of Artificial Sequence: Synthetic oligonucleotide
guuguccuugaaucgagua

SEQ ID NO: 1251744 - RNA, 19 nt, Artificial Sequence
  Description of Artificial Sequence: Synthetic oligonucleotide
ugcggcacgccggcgauag

SEQ ID NO: 1251745 - RNA, 19 nt, Artificial Sequence
  Description of Artificial Sequence: Synthetic oligonucleotide
agccgagccggugauagug

SEQ ID NO: 1251746 - RNA, 19 nt, Artificial Sequence
  Description of Artificial Sequence: Synthetic oligonucleotide
aucuuggccgcccgcgcag

SEQ ID NO: 1251747 - RNA, 19 nt, Artificial Sequence
  Description of Artificial Sequence: Synthetic oligonucleotide
uccggcgaaucccgucccg

SEQ ID NO: 1251748 - RNA, 19 nt, Artificial Sequence
  Description of Artificial Sequence: Synthetic oligonucleotide
ccggcgauagugauggccc

SEQ ID NO: 1251749 - RNA, 19 nt, Artificial Sequence
  Description of Artificial Sequence: Synthetic oligonucleotide
gaguaggcccgaacugccg

SEQ ID NO: 1251750 - RNA, 19 nt, Artificial Sequence
  Description of Artificial Sequence: Synthetic oligonucleotide
guuauuuggaauggugagu

SEQ ID NO: 1251751 - RNA, 19 nt, Artificial Sequence
  Description of Artificial Sequence: Synthetic oligonucleotide
gacucucccuugcggagac

SEQ ID NO: 1251752 - RNA, 19 nt, Artificial Sequence
  Description of Artificial Sequence: Synthetic oligonucleotide
aucgagcggagaaauggug

SEQ ID NO: 1251753 - RNA, 19 nt, Artificial Sequence
  Description of Artificial Sequence: Synthetic oligonucleotide
ugauggcccgcucggucga

SEQ ID NO: 1251754 - RNA, 19 nt, Artificial Sequence
  Description of Artificial Sequence: Synthetic oligonucleotide
auggcgagcggcgggcggc

SEQ ID NO: 1251755 - RNA, 19 nt, Artificial Sequence
  Description of Artificial Sequence: Synthetic oligonucleotide
ucccuugcggagacuggga

SEQ ID NO: 1251756 - RNA, 19 nt, Artificial Sequence
  Description of Artificial Sequence: Synthetic oligonucleotide
cucucccuugcggagacug

SEQ ID NO: 1251757 - RNA, 19 nt, Artificial Sequence
  Description of Artificial Sequence: Synthetic oligonucleotide
ugaucauggcgaaggccuu

SEQ ID NO: 1251758 - RNA, 19 nt, Artificial Sequence
  Description of Artificial Sequence: Synthetic oligonucleotide
aucgacaaacagaaauaaa

SEQ ID NO: 1251759 - RNA, 19 nt, Artificial Sequence
  Description of Artificial Sequence: Synthetic oligonucleotide
gccggcaugggcugguacg

SEQ ID NO: 1251760 - RNA, 19 nt, Artificial Sequence
  Description of Artificial Sequence: Synthetic oligonucleotide
uaggcccgaacugccggcg

SEQ ID NO: 1251761 - RNA, 19 nt, Artificial Sequence
  Description of Artificial Sequence: Synthetic oligonucleotide
uugaaucgaguaggcgucu

SEQ ID NO: 1251762 - RNA, 19 nt, Artificial Sequence
  Description of Artificial Sequence: Synthetic oligonucleotide
cagaucgagcggagaaaug

SEQ ID NO: 1251763 - RNA, 19 nt, Artificial Sequence
  Description of Artificial Sequence: Synthetic oligonucleotide
cugauacuggcagccgagc

SEQ ID NO: 1251764 - RNA, 19 nt, Artificial Sequence
  Description of Artificial Sequence: Synthetic oligonucleotide
cgaaccuacacuguucuag

SEQ ID NO: 1251765 - RNA, 19 nt, Artificial Sequence
  Description of Artificial Sequence: Synthetic oligonucleotide
ggauggucaugacucuccc

SEQ ID NO: 1251766 - RNA, 19 nt, Artificial Sequence
  Description of Artificial Sequence: Synthetic oligonucleotide
ugacucucccuugcggaga

SEQ ID NO: 1251767 - RNA, 19 nt, Artificial Sequence
  Description of Artificial Sequence: Synthetic oligonucleotide
cuuggcgcccgauuauaca

SEQ ID NO: 1251768 - RNA, 19 nt, Artificial Sequence
  Description of Artificial Sequence: Synthetic oligonucleotide
uugauccgcgcgccgcucu

SEQ ID NO: 1251769 - RNA, 19 nt, Artificial Sequence
  Description of Artificial Sequence: Synthetic oligonucleotide
aggcccgaacugccggcgc

SEQ ID NO: 1251770 - RNA, 19 nt, Artificial Sequence
  Description of Artificial Sequence: Synthetic oligonucleotide
uggagucaauuccggcgaa

SEQ ID NO: 1251771 - RNA, 19 nt, Artificial Sequence
  Description of Artificial Sequence: Synthetic oligonucleotide
agucagcgugaugauucuc

SEQ ID NO: 1251772 - RNA, 19 nt, Artificial Sequence
  Description of Artificial Sequence: Synthetic oligonucleotide
gcucggucgaguugggcag

SEQ ID NO: 1251773 - RNA, 19 nt, Artificial Sequence
  Description of Artificial Sequence: Synthetic oligonucleotide
guaggcccgaacugccggc

SEQ ID NO: 1251774 - RNA, 19 nt, Artificial Sequence
  Description of Artificial Sequence: Synthetic oligonucleotide
acagccgauuaaguuauuu

SEQ ID NO: 1251775 - RNA, 19 nt, Artificial Sequence
  Description of Artificial Sequence: Synthetic oligonucleotide
ugacacacucggucaccga

SEQ ID NO: 1251776 - RNA, 19 nt, Artificial Sequence
  Description of Artificial Sequence: Synthetic oligonucleotide
gaguaggcgucuagaggug

SEQ ID NO: 1251777 - RNA, 19 nt, Artificial Sequence
  Description of Artificial Sequence: Synthetic oligonucleotide
guuacguggucaaguccug

SEQ ID NO: 1251778 - RNA, 19 nt, Artificial Sequence
  Description of Artificial Sequence: Synthetic oligonucleotide
ggcgaaucccgucccgccg

SEQ ID NO: 1251779 - RNA, 19 nt, Artificial Sequence
  Description of Artificial Sequence: Synthetic oligonucleotide
ccuugaaucgaguaggcgu

SEQ ID NO: 1251780 - RNA, 19 nt, Artificial Sequence
  Description of Artificial Sequence: Synthetic oligonucleotide
uccgugcaucagcagccga

SEQ ID NO: 1251781 - RNA, 19 nt, Artificial Sequence
  Description of Artificial Sequence: Synthetic oligonucleotide
gagcgaaccuacacuguuc

SEQ ID NO: 1251782 - RNA, 19 nt, Artificial Sequence
  Description of Artificial Sequence: Synthetic oligonucleotide
ugggcucguuacgugguca

SEQ ID NO: 1251783 - RNA, 19 nt, Artificial Sequence
  Description of Artificial Sequence: Synthetic oligonucleotide
ugccgaucagagagccgca

SEQ ID NO: 1251784 - RNA, 19 nt, Artificial Sequence
  Description of Artificial Sequence: Synthetic oligonucleotide
gucacguugaguccgcuuu

SEQ ID NO: 1251785 - RNA, 19 nt, Artificial Sequence
  Description of Artificial Sequence: Synthetic oligonucleotide
ggcgaaggccuuaaagaug

SEQ ID NO: 1251786 - RNA, 19 nt, Artificial Sequence
  Description of Artificial Sequence: Synthetic oligonucleotide
agaugaccggcgagcuggc

SEQ ID NO: 1251787 - RNA, 19 nt, Artificial Sequence
  Description of Artificial Sequence: Synthetic oligonucleotide
gccgauuaaguuauuugga

SEQ ID NO: 1251788 - RNA, 19 nt, Artificial Sequence
  Description of Artificial Sequence: Synthetic oligonucleotide
ccgauuaaguuauuuggaa

SEQ ID NO: 1251789 - RNA, 19 nt, Artificial Sequence
  Description of Artificial Sequence: Synthetic oligonucleotide
gucgaugaucauggcgaag

SEQ ID NO: 1251790 - RNA, 19 nt, Artificial Sequence
  Description of Artificial Sequence: Synthetic oligonucleotide
augauucucuccgggcagu

SEQ ID NO: 1251791 - RNA, 19 nt, Artificial Sequence
  Description of Artificial Sequence: Synthetic oligonucleotide
aggcugauacuggcagccg

SEQ ID NO: 1251792 - RNA, 19 nt, Artificial Sequence
  Description of Artificial Sequence: Synthetic oligonucleotide
cauggcgagcggcgggcgg

SEQ ID NO: 1251793 - RNA, 19 nt, Artificial Sequence
  Description of Artificial Sequence: Synthetic oligonucleotide
cacgccggcgauagugaug

SEQ ID NO: 1251794 - RNA, 19 nt, Artificial Sequence
  Description of Artificial Sequence: Synthetic oligonucleotide
agucacguugaguccgcuu

SEQ ID NO: 1251795 - RNA, 19 nt, Artificial Sequence
  Description of Artificial Sequence: Synthetic oligonucleotide
gaaaugguguguuguccuu

SEQ ID NO: 1251796 - RNA, 19 nt, Artificial Sequence
  Description of Artificial Sequence: Synthetic oligonucleotide
acacacucggucaccgacu

SEQ ID NO: 1251797 - RNA, 19 nt, Artificial Sequence
  Description of Artificial Sequence: Synthetic oligonucleotide
ugaaucgaguaggcgucua

SEQ ID NO: 1251798 - RNA, 19 nt, Artificial Sequence
  Description of Artificial Sequence: Synthetic oligonucleotide
accccaugcccuucucaga

SEQ ID NO: 1251799 - RNA, 19 nt, Artificial Sequence
  Description of Artificial Sequence: Synthetic oligonucleotide
agccgaauggugagaguca

SEQ ID NO: 1251800 - RNA, 19 nt, Artificial Sequence
  Description of Artificial Sequence: Synthetic oligonucleotide
gaucgagcggagaaauggu

SEQ ID NO: 1251801 - RNA, 19 nt, Artificial Sequence
  Description of Artificial Sequence: Synthetic oligonucleotide
acaccggcguccauggcga

SEQ ID NO: 1251802 - RNA, 19 nt, Artificial Sequence
  Description of Artificial Sequence: Synthetic oligonucleotide
ucaccgacugcggcacgcc

SEQ ID NO: 1251803 - RNA, 19 nt, Artificial Sequence
  Description of Artificial Sequence: Synthetic oligonucleotide
caccgacugcggcacgccg

SEQ ID NO: 1251804 - RNA, 19 nt, Artificial Sequence
  Description of Artificial Sequence: Synthetic oligonucleotide
guacgggauggucaugacu

SEQ ID NO: 1251805 - RNA, 19 nt, Artificial Sequence
  Description of Artificial Sequence: Synthetic oligonucleotide
aacugccggcgcgaggcga

SEQ ID NO: 1251806 - RNA, 19 nt, Artificial Sequence
  Description of Artificial Sequence: Synthetic oligonucleotide
gucaccgacugcggcacgc

SEQ ID NO: 1251807 - RNA, 19 nt, Artificial Sequence
  Description of Artificial Sequence: Synthetic oligonucleotide
uguuggucauggagcuguu

SEQ ID NO: 1251808 - RNA, 19 nt, Artificial Sequence
  Description of Artificial Sequence: Synthetic oligonucleotide
ggagagcgucuccagcaug

SEQ ID NO: 1251809 - RNA, 19 nt, Artificial Sequence
  Description of Artificial Sequence: Synthetic oligonucleotide
cuacacuguucuagcugca

SEQ ID NO: 1251810 - RNA, 19 nt, Artificial Sequence
  Description of Artificial Sequence: Synthetic oligonucleotide
gguggcgggcaccaccagc

SEQ ID NO: 1251811 - RNA, 19 nt, Artificial Sequence
  Description of Artificial Sequence: Synthetic oligonucleotide
ccggugauagugaccugcc

SEQ ID NO: 1251812 - RNA, 19 nt, Artificial Sequence
  Description of Artificial Sequence: Synthetic oligonucleotide
ccuugccgaucagagagcc

SEQ ID NO: 1251813 - RNA, 19 nt, Artificial Sequence
  Description of Artificial Sequence: Synthetic oligonucleotide
cgaacugccggcgcgaggc

SEQ ID NO: 1251814 - RNA, 19 nt, Artificial Sequence
  Description of Artificial Sequence: Synthetic oligonucleotide
ccgauuauacagccgauua

SEQ ID NO: 1251815 - RNA, 19 nt, Artificial Sequence
  Description of Artificial Sequence: Synthetic oligonucleotide
cuggcagccgagccgguga

SEQ ID NO: 1251816 - RNA, 19 nt, Artificial Sequence
  Description of Artificial Sequence: Synthetic oligonucleotide
cgaucagagagccgcacug

SEQ ID NO: 1251817 - RNA, 19 nt, Artificial Sequence
  Description of Artificial Sequence: Synthetic oligonucleotide
ccgcuuucagucacaccgg

SEQ ID NO: 1251818 - RNA, 19 nt, Artificial Sequence
  Description of Artificial Sequence: Synthetic oligonucleotide
uccccuccgagauguugau

SEQ ID NO: 1251819 - RNA, 19 nt, Artificial Sequence
  Description of Artificial Sequence: Synthetic oligonucleotide
gcgaucuuggccgcccgcg

SEQ ID NO: 1251820 - RNA, 19 nt, Artificial Sequence
  Description of Artificial Sequence: Synthetic oligonucleotide
cagcgaucuuggccgcccg

SEQ ID NO: 1251821 - RNA, 19 nt, Artificial Sequence
  Description of Artificial Sequence: Synthetic oligonucleotide
ggccagaucgagcggagaa

SEQ ID NO: 1251822 - RNA, 19 nt, Artificial Sequence
  Description of Artificial Sequence: Synthetic oligonucleotide
cugcagcgaucuuggccgc

SEQ ID NO: 1251823 - RNA, 19 nt, Artificial Sequence
  Description of Artificial Sequence: Synthetic oligonucleotide
gagcggggccgcgggagcg

SEQ ID NO: 1251824 - RNA, 19 nt, Artificial Sequence
  Description of Artificial Sequence: Synthetic oligonucleotide
gccggcgauagugauggcc

SEQ ID NO: 1251825 - RNA, 19 nt, Artificial Sequence
  Description of Artificial Sequence: Synthetic oligonucleotide
ucggucgaguugggcagca

SEQ ID NO: 1251826 - RNA, 19 nt, Artificial Sequence
  Description of Artificial Sequence: Synthetic oligonucleotide
ggcccgaacugccggcgcg

SEQ ID NO: 1251827 - RNA, 19 nt, Artificial Sequence
  Description of Artificial Sequence: Synthetic oligonucleotide
gggguuacgagcgaaccua

SEQ ID NO: 1251828 - RNA, 19 nt, Artificial Sequence
  Description of Artificial Sequence: Synthetic oligonucleotide
ugcagcgaucuuggccgcc

SEQ ID NO: 1251829 - RNA, 19 nt, Artificial Sequence
  Description of Artificial Sequence: Synthetic oligonucleotide
cgaguaggcgucuagaggu

SEQ ID NO: 1251830 - RNA, 19 nt, Artificial Sequence
  Description of Artificial Sequence: Synthetic oligonucleotide
ccgcccuugccgaucagag

SEQ ID NO: 1251831 - RNA, 19 nt, Artificial Sequence
  Description of Artificial Sequence: Synthetic oligonucleotide
gaucauggcgaaggccuua

SEQ ID NO: 1251832 - RNA, 19 nt, Artificial Sequence
  Description of Artificial Sequence: Synthetic oligonucleotide
uggcagccgagccggugau

SEQ ID NO: 1251833 - RNA, 19 nt, Artificial Sequence
  Description of Artificial Sequence: Synthetic oligonucleotide
gaaucccgucccgccgugc

SEQ ID NO: 1251834 - RNA, 19 nt, Artificial Sequence
  Description of Artificial Sequence: Synthetic oligonucleotide
ccgcccgcgcagaugaccg

SEQ ID NO: 1251835 - RNA, 19 nt, Artificial Sequence
  Description of Artificial Sequence: Synthetic oligonucleotide
gccgccgugcuguugguca

SEQ ID NO: 1251836 - RNA, 19 nt, Artificial Sequence
  Description of Artificial Sequence: Synthetic oligonucleotide
cucggucgaguugggcagc

SEQ ID NO: 1251837 - RNA, 19 nt, Artificial Sequence
  Description of Artificial Sequence: Synthetic oligonucleotide
uuggccgcccgcgcagaug

SEQ ID NO: 1251838 - RNA, 19 nt, Artificial Sequence
  Description of Artificial Sequence: Synthetic oligonucleotide
gggaggaguaggcccgaac

SEQ ID NO: 1251839 - RNA, 19 nt, Artificial Sequence
  Description of Artificial Sequence: Synthetic oligonucleotide
cacguugaguccgcuuuca

SEQ ID NO: 1251840 - RNA, 19 nt, Artificial Sequence
  Description of Artificial Sequence: Synthetic oligonucleotide
cccuugcggagacugggag

SEQ ID NO: 1251841 - RNA, 19 nt, Artificial Sequence
  Description of Artificial Sequence: Synthetic oligonucleotide
gccgaauggugagagucac

SEQ ID NO: 1251842 - RNA, 19 nt, Artificial Sequence
  Description of Artificial Sequence: Synthetic oligonucleotide
ucccgucccgccgugcauc

SEQ ID NO: 1251843 - RNA, 19 nt, Artificial Sequence
  Description of Artificial Sequence: Synthetic oligonucleotide
cguuacguggucaaguccu

SEQ ID NO: 1251844 - RNA, 19 nt, Artificial Sequence
  Description of Artificial Sequence: Synthetic oligonucleotide
uacagccgauuaaguuauu

SEQ ID NO: 1251845 - RNA, 19 nt, Artificial Sequence
  Description of Artificial Sequence: Synthetic oligonucleotide
ggucauggagcuguugaua

SEQ ID NO: 1251846 - RNA, 19 nt, Artificial Sequence
  Description of Artificial Sequence: Synthetic oligonucleotide
gcagaugaccggcgagcug

SEQ ID NO: 1251847 - RNA, 19 nt, Artificial Sequence
  Description of Artificial Sequence: Synthetic oligonucleotide
ccaugcccuucucagagga

SEQ ID NO: 1251848 - RNA, 19 nt, Artificial Sequence
  Description of Artificial Sequence: Synthetic oligonucleotide
gagcggagaaauggugugu

SEQ ID NO: 1251849 - RNA, 19 nt, Artificial Sequence
  Description of Artificial Sequence: Synthetic oligonucleotide
uguuggcgccuuggcgccc

SEQ ID NO: 1251850 - RNA, 19 nt, Artificial Sequence
  Description of Artificial Sequence: Synthetic oligonucleotide
cccaugcccuucucagagg

SEQ ID NO: 1251851 - RNA, 19 nt, Artificial Sequence
  Description of Artificial Sequence: Synthetic oligonucleotide
gcguucgggaguugggcuc

SEQ ID NO: 1251852 - RNA, 19 nt, Artificial Sequence
  Description of Artificial Sequence: Synthetic oligonucleotide
ccggcaugggcugguacgg

SEQ ID NO: 1251853 - RNA, 19 nt, Artificial Sequence
  Description of Artificial Sequence: Synthetic oligonucleotide
ucccgccgugcaucauggc

SEQ ID NO: 1251854 - RNA, 19 nt, Artificial Sequence
  Description of Artificial Sequence: Synthetic oligonucleotide
gcagcgaucuuggccgccc

SEQ ID NO: 1251855 - RNA, 19 nt, Artificial Sequence
  Description of Artificial Sequence: Synthetic oligonucleotide
gaguccgcuuucagucaca

SEQ ID NO: 1251856 - RNA, 19 nt, Artificial Sequence
  Description of Artificial Sequence: Synthetic oligonucleotide
ggguuacgagcgaaccuac

SEQ ID NO: 1251857 - RNA, 19 nt, Artificial Sequence
  Description of Artificial Sequence: Synthetic oligonucleotide
cccuugccgaucagagagc

SEQ ID NO: 1251858 - RNA, 19 nt, Artificial Sequence
  Description of Artificial Sequence: Synthetic oligonucleotide
cgcuuucagucacaccggc

SEQ ID NO: 1251859 - RNA, 19 nt, Artificial Sequence
  Description of Artificial Sequence: Synthetic oligonucleotide
aucccgucccgccgugcau

SEQ ID NO: 1251860 - RNA, 19 nt, Artificial Sequence
  Description of Artificial Sequence: Synthetic oligonucleotide
ggcucguuacguggucaag

SEQ ID NO: 1251861 - RNA, 19 nt, Artificial Sequence
  Description of Artificial Sequence: Synthetic oligonucleotide
gguuacgagcgaaccuaca

SEQ ID NO: 1251862 - RNA, 19 nt, Artificial Sequence
  Description of Artificial Sequence: Synthetic oligonucleotide
guagcccgccgcgucgcug

SEQ ID NO: 1251863 - RNA, 19 nt, Artificial Sequence
  Description of Artificial Sequence: Synthetic oligonucleotide
cgauuaaguuauuuggaau

SEQ ID NO: 1251864 - RNA, 19 nt, Artificial Sequence
  Description of Artificial Sequence: Synthetic oligonucleotide
cgauuauacagccgauuaa

SEQ ID NO: 1251865 - RNA, 19 nt, Artificial Sequence
  Description of Artificial Sequence: Synthetic oligonucleotide
ccgagccggugauagugac

SEQ ID NO: 1251866 - RNA, 19 nt, Artificial Sequence
  Description of Artificial Sequence: Synthetic oligonucleotide
cgagccggugauagugacc

SEQ ID NO: 1251867 - RNA, 19 nt, Artificial Sequence
  Description of Artificial Sequence: Synthetic oligonucleotide
ggucaccgacugcggcacg

SEQ ID NO: 1251868 - RNA, 19 nt, Artificial Sequence
  Description of Artificial Sequence: Synthetic oligonucleotide
gagcggcgggcggcguucg

SEQ ID NO: 1251869 - RNA, 19 nt, Artificial Sequence
  Description of Artificial Sequence: Synthetic oligonucleotide
cugguacgggauggucaug

SEQ ID NO: 1251870 - RNA, 19 nt, Artificial Sequence
  Description of Artificial Sequence: Synthetic oligonucleotide
gcucguuacguggucaagu

SEQ ID NO: 1251871 - RNA, 19 nt, Artificial Sequence
  Description of Artificial Sequence: Synthetic oligonucleotide
cagucagcgugaugauucu

SEQ ID NO: 1251872 - RNA, 19 nt, Artificial Sequence
  Description of Artificial Sequence: Synthetic oligonucleotide
ggcguucgggaguugggcu

SEQ ID NO: 1251873 - RNA, 19 nt, Artificial Sequence
  Description of Artificial Sequence: Synthetic oligonucleotide
cgcucggucgaguugggca

SEQ ID NO: 1251874 - RNA, 19 nt, Artificial Sequence
  Description of Artificial Sequence: Synthetic oligonucleotide
cgucgcugcagcgaucuug

SEQ ID NO: 1251875 - RNA, 19 nt, Artificial Sequence
  Description of Artificial Sequence: Synthetic oligonucleotide
gggcucguuacguggucaa

SEQ ID NO: 1251876 - RNA, 19 nt, Artificial Sequence
  Description of Artificial Sequence: Synthetic oligonucleotide
aggggaggaguaggcccga

SEQ ID NO: 1251877 - RNA, 19 nt, Artificial Sequence
  Description of Artificial Sequence: Synthetic oligonucleotide
cgacuccccuuucuucccg

SEQ ID NO: 1251878 - RNA, 19 nt, Artificial Sequence
  Description of Artificial Sequence: Synthetic oligonucleotide
ugggcccagucagcgugau

SEQ ID NO: 1251879 - RNA, 19 nt, Artificial Sequence
  Description of Artificial Sequence: Synthetic oligonucleotide
caccggcguccauggcgag

SEQ ID NO: 1251880 - RNA, 19 nt, Artificial Sequence
  Description of Artificial Sequence: Synthetic oligonucleotide
caauuccggcgaaucccgu

SEQ ID NO: 1251881 - RNA, 19 nt, Artificial Sequence
  Description of Artificial Sequence: Synthetic oligonucleotide
ccgugcaucagcagccgaa

SEQ ID NO: 1251882 - RNA, 19 nt, Artificial Sequence
  Description of Artificial Sequence: Synthetic oligonucleotide
gccagaucgagcggagaaa

SEQ ID NO: 1251883 - RNA, 19 nt, Artificial Sequence
  Description of Artificial Sequence: Synthetic oligonucleotide
gccgaucagagagccgcac

SEQ ID NO: 1251884 - RNA, 19 nt, Artificial Sequence
  Description of Artificial Sequence: Synthetic oligonucleotide
gcgagcggggccgcgggag

SEQ ID NO: 1251885 - RNA, 19 nt, Artificial Sequence
  Description of Artificial Sequence: Synthetic oligonucleotide
ccgaacugccggcgcgagg

SEQ ID NO: 1251886 - RNA, 19 nt, Artificial Sequence
  Description of Artificial Sequence: Synthetic oligonucleotide
cgucccgccgugcaucaug

SEQ ID NO: 1251887 - RNA, 19 nt, Artificial Sequence
  Description of Artificial Sequence: Synthetic oligonucleotide
cgcgcagaugaccggcgag

SEQ ID NO: 1251888 - RNA, 19 nt, Artificial Sequence
  Description of Artificial Sequence: Synthetic oligonucleotide
ccggcgaaucccgucccgc

SEQ ID NO: 1251889 - RNA, 19 nt, Artificial Sequence
  Description of Artificial Sequence: Synthetic oligonucleotide
gcuuaucgacaaacagaaa

SEQ ID NO: 1251890 - RNA, 19 nt, Artificial Sequence
  Description of Artificial Sequence: Synthetic oligonucleotide
gccgcccgcgcagaugacc

SEQ ID NO: 1251891 - RNA, 19 nt, Artificial Sequence
  Description of Artificial Sequence: Synthetic oligonucleotide
cggcgaaucccgucccgcc

SEQ ID NO: 1251892 - RNA, 19 nt, Artificial Sequence
  Description of Artificial Sequence: Synthetic oligonucleotide
gcgccuuggcgcccgauua

SEQ ID NO: 1251893 - RNA, 19 nt, Artificial Sequence
  Description of Artificial Sequence: Synthetic oligonucleotide
ggugaguucaugggugguu

SEQ ID NO: 1251894 - RNA, 19 nt, Artificial Sequence
  Description of Artificial Sequence: Synthetic oligonucleotide
caccagccggagggugacc

SEQ ID NO: 1251895 - RNA, 19 nt, Artificial Sequence
  Description of Artificial Sequence: Synthetic oligonucleotide
acucucccuugcggagacu

SEQ ID NO: 1251896 - RNA, 19 nt, Artificial Sequence
  Description of Artificial Sequence: Synthetic oligonucleotide
cggcacgccggcgauagug

SEQ ID NO: 1251897 - RNA, 19 nt, Artificial Sequence
  Description of Artificial Sequence: Synthetic oligonucleotide
gcuggccggcaugggcugg

SEQ ID NO: 1251898 - RNA, 19 nt, Artificial Sequence
  Description of Artificial Sequence: Synthetic oligonucleotide
cgcgaggcgagcggggccg

SEQ ID NO: 1251899 - RNA, 19 nt, Artificial Sequence
  Description of Artificial Sequence: Synthetic oligonucleotide
cguugaguccgcuuucagu

SEQ ID NO: 1251900 - RNA, 19 nt, Artificial Sequence
  Description of Artificial Sequence: Synthetic oligonucleotide
gaccggcgagcuggccggc

SEQ ID NO: 1251901 - RNA, 19 nt, Artificial Sequence
  Description of Artificial Sequence: Synthetic oligonucleotide
gagucacguugaguccgcu

SEQ ID NO: 1251902 - RNA, 19 nt, Artificial Sequence
  Description of Artificial Sequence: Synthetic oligonucleotide
gcgaaucccgucccgccgu

SEQ ID NO: 1251903 - RNA, 19 nt, Artificial Sequence
  Description of Artificial Sequence: Synthetic oligonucleotide
cggcguucgggaguugggc

SEQ ID NO: 1251904 - RNA, 19 nt, Artificial Sequence
  Description of Artificial Sequence: Synthetic oligonucleotide
ggcgcgggagggcggccgc

SEQ ID NO: 1251905 - RNA, 19 nt, Artificial Sequence
  Description of Artificial Sequence: Synthetic oligonucleotide
ccagaucgagcggagaaau

SEQ ID NO: 1251906 - RNA, 19 nt, Artificial Sequence
  Description of Artificial Sequence: Synthetic oligonucleotide
accggcgagcuggccggca

SEQ ID NO: 1251907 - RNA, 19 nt, Artificial Sequence
  Description of Artificial Sequence: Synthetic oligonucleotide
gccgagccggugauaguga

SEQ ID NO: 1251908 - RNA, 19 nt, Artificial Sequence
  Description of Artificial Sequence: Synthetic oligonucleotide
gggcccagucagcgugaug

SEQ ID NO: 1251909 - RNA, 19 nt, Artificial Sequence
  Description of Artificial Sequence: Synthetic oligonucleotide
gcgagcuggccggcauggg

SEQ ID NO: 1251910 - RNA, 19 nt, Artificial Sequence
  Description of Artificial Sequence: Synthetic oligonucleotide
gcgaaccuacacuguucua

SEQ ID NO: 1251911 - RNA, 19 nt, Artificial Sequence
  Description of Artificial Sequence: Synthetic oligonucleotide
ugcuggccgccgugcuguu

SEQ ID NO: 1251912 - RNA, 19 nt, Artificial Sequence
  Description of Artificial Sequence: Synthetic oligonucleotide
gccgcccuugccgaucaga

SEQ ID NO: 1251913 - RNA, 19 nt, Artificial Sequence
  Description of Artificial Sequence: Synthetic oligonucleotide
ccgugcaucauggcaaagu

SEQ ID NO: 1251914 - RNA, 19 nt, Artificial Sequence
  Description of Artificial Sequence: Synthetic oligonucleotide
gcagccgcccuugccgauc

SEQ ID NO: 1251915 - RNA, 19 nt, Artificial Sequence
  Description of Artificial Sequence: Synthetic oligonucleotide
ggagucaauuccggcgaau

SEQ ID NO: 1251916 - RNA, 19 nt, Artificial Sequence
  Description of Artificial Sequence: Synthetic oligonucleotide
gcagccgaauggugagagu

SEQ ID NO: 1251917 - RNA, 19 nt, Artificial Sequence
  Description of Artificial Sequence: Synthetic oligonucleotide
uggccggcaugggcuggua

SEQ ID NO: 1251918 - RNA, 19 nt, Artificial Sequence
  Description of Artificial Sequence: Synthetic oligonucleotide
ccgaucagagagccgcacu

SEQ ID NO: 1251919 - RNA, 19 nt, Artificial Sequence
  Description of Artificial Sequence: Synthetic oligonucleotide
ggucaaguccugggcggcu

SEQ ID NO: 1251920 - RNA, 19 nt, Artificial Sequence
  Description of Artificial Sequence: Synthetic oligonucleotide
cgaaucccgucccgccgug

SEQ ID NO: 1251921 - RNA, 19 nt, Artificial Sequence
  Description of Artificial Sequence: Synthetic oligonucleotide
gccgcgucgcugcagcgau

SEQ ID NO: 1251922 - RNA, 19 nt, Artificial Sequence
  Description of Artificial Sequence: Synthetic oligonucleotide
gcuggccgccgugcuguug

SEQ ID NO: 1251923 - RNA, 19 nt, Artificial Sequence
  Description of Artificial Sequence: Synthetic oligonucleotide
cgagcgaaccuacacuguu

SEQ ID NO: 1251924 - RNA, 19 nt, Artificial Sequence
  Description of Artificial Sequence: Synthetic oligonucleotide
cgcccgcgcagaugaccgg

SEQ ID NO: 1251925 - RNA, 19 nt, Artificial Sequence
  Description of Artificial Sequence: Synthetic oligonucleotide
cuuggccgcccgcgcagau

SEQ ID NO: 1251926 - RNA, 19 nt, Artificial Sequence
  Description of Artificial Sequence: Synthetic oligonucleotide
cccgucccgccgugcauca

SEQ ID NO: 1251927 - RNA, 19 nt, Artificial Sequence
  Description of Artificial Sequence: Synthetic oligonucleotide
gcacgccggcgauagugau

SEQ ID NO: 1251928 - RNA, 19 nt, Artificial Sequence
  Description of Artificial Sequence: Synthetic oligonucleotide
ccgcgcagaugaccggcga

SEQ ID NO: 1251929 - RNA, 19 nt, Artificial Sequence
  Description of Artificial Sequence: Synthetic oligonucleotide
ggccgccgugcuguugguc

SEQ ID NO: 1251930 - RNA, 19 nt, Artificial Sequence
  Description of Artificial Sequence: Synthetic oligonucleotide
cuggccggcaugggcuggu

SEQ ID NO: 1251931 - RNA, 19 nt, Artificial Sequence
  Description of Artificial Sequence: Synthetic oligonucleotide
gguagcccgccgcgucgcu

SEQ ID NO: 1251932 - RNA, 19 nt, Artificial Sequence
  Description of Artificial Sequence: Synthetic oligonucleotide
ccgugcuguuggucaugga

SEQ ID NO: 1251933 - RNA, 19 nt, Artificial Sequence
  Description of Artificial Sequence: Synthetic oligonucleotide
cgagcggcgggcggcguuc

SEQ ID NO: 1251934 - RNA, 19 nt, Artificial Sequence
  Description of Artificial Sequence: Synthetic oligonucleotide
ccgcgucgcugcagcgauc

SEQ ID NO: 1251935 - RNA, 19 nt, Artificial Sequence
  Description of Artificial Sequence: Synthetic oligonucleotide
cgcgucgcugcagcgaucu

SEQ ID NO: 1251936 - RNA, 19 nt, Artificial Sequence
  Description of Artificial Sequence: Synthetic oligonucleotide
cgcagaugaccggcgagcu

SEQ ID NO: 1251937 - RNA, 19 nt, Artificial Sequence
  Description of Artificial Sequence: Synthetic oligonucleotide
cgccgugcuguuggucaug

SEQ ID NO: 1251938 - RNA, 19 nt, Artificial Sequence
  Description of Artificial Sequence: Synthetic oligonucleotide
cugcggcacgccggcgaua

SEQ ID NO: 1251939 - RNA, 19 nt, Artificial Sequence
  Description of Artificial Sequence: Synthetic oligonucleotide
cccagucagcgugaugauu

SEQ ID NO: 1251940 - RNA, 19 nt, Artificial Sequence
  Description of Artificial Sequence: Synthetic oligonucleotide
ccgugcucucgcggaucuc

SEQ ID NO: 1251941 - RNA, 19 nt, Artificial Sequence
  Description of Artificial Sequence: Synthetic oligonucleotide
cgccggcgauagugauggc

SEQ ID NO: 1251942 - RNA, 19 nt, Artificial Sequence
  Description of Artificial Sequence: Synthetic oligonucleotide
cgccgcgucgcugcagcga

SEQ ID NO: 1251943 - RNA, 19 nt, Artificial Sequence
  Description of Artificial Sequence: Synthetic oligonucleotide
ccgccgugcuguuggucau

SEQ ID NO: 1251944 - RNA, 19 nt, Artificial Sequence
  Description of Artificial Sequence: Synthetic oligonucleotide
gcgagcggcgggcggcguu

SEQ ID NO: 1251945 - RNA, 19 nt, Artificial Sequence
  Description of Artificial Sequence: Synthetic oligonucleotide
ccggcgagcuggccggcau

SEQ ID NO: 1251946 - RNA, 19 nt, Artificial Sequence
  Description of Artificial Sequence: Synthetic oligonucleotide
gcggcacgccggcgauagu

SEQ ID NO: 1251947 - RNA, 19 nt, Artificial Sequence
  Description of Artificial Sequence: Synthetic oligonucleotide
cggucgaguugggcagcau

SEQ ID NO: 1251948 - RNA, 19 nt, Artificial Sequence
  Description of Artificial Sequence: Synthetic oligonucleotide
ccgucccgccgugcaucau

SEQ ID NO: 1251949 - RNA, 19 nt, Artificial Sequence
  Description of Artificial Sequence: Synthetic oligonucleotide
auaaaauucacccucgggc

SEQ ID NO: 1251950 - RNA, 19 nt, Artificial Sequence
  Description of Artificial Sequence: Synthetic oligonucleotide
ugagauauacuacaaaucc

SEQ ID NO: 1251951 - RNA, 19 nt, Artificial Sequence
  Description of Artificial Sequence: Synthetic oligonucleotide
uauacuacaaauccagcgg

SEQ ID NO: 1251952 - RNA, 19 nt, Artificial Sequence
  Description of Artificial Sequence: Synthetic oligonucleotide
auauacuacaaauccagcg

SEQ ID NO: 1251953 - RNA, 19 nt, Artificial Sequence
  Description of Artificial Sequence: Synthetic oligonucleotide
uuugagauauacuacaaau

SEQ ID NO: 1251954 - RNA, 19 nt, Artificial Sequence
  Description of Artificial Sequence: Synthetic oligonucleotide
ucaucucacauuuugacga

SEQ ID NO: 1251955 - RNA, 19 nt, Artificial Sequence
  Description of Artificial Sequence: Synthetic oligonucleotide
uguuguuacacaccccucg

SEQ ID NO: 1251956 - RNA, 19 nt, Artificial Sequence
  Description of Artificial Sequence: Synthetic oligonucleotide
uguagguauacauuggcug

SEQ ID NO: 1251957 - RNA, 19 nt, Artificial Sequence
  Description of Artificial Sequence: Synthetic oligonucleotide
ugcucaguggaucagcagg

SEQ ID NO: 1251958 - RNA, 19 nt, Artificial Sequence
  Description of Artificial Sequence: Synthetic oligonucleotide
aaaauucacccucgggccg

SEQ ID NO: 1251959 - RNA, 19 nt, Artificial Sequence
  Description of Artificial Sequence: Synthetic oligonucleotide
ugauauucugacaccgacg

SEQ ID NO: 1251960 - RNA, 19 nt, Artificial Sequence
  Description of Artificial Sequence: Synthetic oligonucleotide
gauauucugacaccgacga

SEQ ID NO: 1251961 - RNA, 19 nt, Artificial Sequence
  Description of Artificial Sequence: Synthetic oligonucleotide
guagguauacauuggcugg

SEQ ID NO: 1251962 - RNA, 19 nt, Artificial Sequence
  Description of Artificial Sequence: Synthetic oligonucleotide
agauauacuacaaauccag

SEQ ID NO: 1251963 - RNA, 19 nt, Artificial Sequence
  Description of Artificial Sequence: Synthetic oligonucleotide
aaauccagcggccagcaga

SEQ ID NO: 1251964 - RNA, 19 nt, Artificial Sequence
  Description of Artificial Sequence: Synthetic oligonucleotide
caugucaucgcccaaguac

SEQ ID NO: 1251965 - RNA, 19 nt, Artificial Sequence
  Description of Artificial Sequence: Synthetic oligonucleotide
agcaguaaccauccacucc

SEQ ID NO: 1251966 - RNA, 19 nt, Artificial Sequence
  Description of Artificial Sequence: Synthetic oligonucleotide
uucccgaaagcacaagucc

SEQ ID NO: 1251967 - RNA, 19 nt, Artificial Sequence
  Description of Artificial Sequence: Synthetic oligonucleotide
ucauaagcuccucucuggg

SEQ ID NO: 1251968 - RNA, 19 nt, Artificial Sequence
  Description of Artificial Sequence: Synthetic oligonucleotide
accagguauuccuacaguc

SEQ ID NO: 1251969 - RNA, 19 nt, Artificial Sequence
  Description of Artificial Sequence: Synthetic oligonucleotide
ugccauaaggaucuccugc

SEQ ID NO: 1251970 - RNA, 19 nt, Artificial Sequence
  Description of Artificial Sequence: Synthetic oligonucleotide
cucaucucacauuuugacg

SEQ ID NO: 1251971 - RNA, 19 nt, Artificial Sequence
  Description of Artificial Sequence: Synthetic oligonucleotide
ugugcagaauucugggagg

SEQ ID NO: 1251972 - RNA, 19 nt, Artificial Sequence
  Description of Artificial Sequence: Synthetic oligonucleotide
uguuucuauggaaacugca

SEQ ID NO: 1251973 - RNA, 19 nt, Artificial Sequence
  Description of Artificial Sequence: Synthetic oligonucleotide
auugguaccaaugacuggu

SEQ ID NO: 1251974 - RNA, 19 nt, Artificial Sequence
  Description of Artificial Sequence: Synthetic oligonucleotide
ucucaucucacauuuugac

SEQ ID NO: 1251975 - RNA, 19 nt, Artificial Sequence
  Description of Artificial Sequence: Synthetic oligonucleotide
aguugacucucucaaagca

SEQ ID NO: 1251976 - RNA, 19 nt, Artificial Sequence
  Description of Artificial Sequence: Synthetic oligonucleotide
agcaggucguguuugggac

SEQ ID NO: 1251977 - RNA, 19 nt, Artificial Sequence
  Description of Artificial Sequence: Synthetic oligonucleotide
guauacauuggcugggcag

SEQ ID NO: 1251978 - RNA, 19 nt, Artificial Sequence
  Description of Artificial Sequence: Synthetic oligonucleotide
ucugacaccgacgauugag

SEQ ID NO: 1251979 - RNA, 19 nt, Artificial Sequence
  Description of Artificial Sequence: Synthetic oligonucleotide
acuugugaaccccgaaaac

SEQ ID NO: 1251980 - RNA, 19 nt, Artificial Sequence
  Description of Artificial Sequence: Synthetic oligonucleotide
caucacacacuugugaacc

SEQ ID NO: 1251981 - RNA, 19 nt, Artificial Sequence
  Description of Artificial Sequence: Synthetic oligonucleotide
gagcgugacacacugcugc

SEQ ID NO: 1251982 - RNA, 19 nt, Artificial Sequence
  Description of Artificial Sequence: Synthetic oligonucleotide
uaugugugaacagcagccg

SEQ ID NO: 1251983 - RNA, 19 nt, Artificial Sequence
  Description of Artificial Sequence: Synthetic oligonucleotide
aauccagcggccagcagac

SEQ ID NO: 1251984 - RNA, 19 nt, Artificial Sequence
  Description of Artificial Sequence: Synthetic oligonucleotide
acaccgacgauugaggcag

SEQ ID NO: 1251985 - RNA, 19 nt, Artificial Sequence
  Description of Artificial Sequence: Synthetic oligonucleotide
gauauacuacaaauccagc

SEQ ID NO: 1251986 - RNA, 19 nt, Artificial Sequence
  Description of Artificial Sequence: Synthetic oligonucleotide
uguucccgaaagcacaagu

SEQ ID NO: 1251987 - RNA, 19 nt, Artificial Sequence
  Description of Artificial Sequence: Synthetic oligonucleotide
uauucugacaccgacgauu

SEQ ID NO: 1251988 - RNA, 19 nt, Artificial Sequence
  Description of Artificial Sequence: Synthetic oligonucleotide
uaggcgauugugugaagag

SEQ ID NO: 1251989 - RNA, 19 nt, Artificial Sequence
  Description of Artificial Sequence: Synthetic oligonucleotide
gcaguaaccauccacuccc

SEQ ID NO: 1251990 - RNA, 19 nt, Artificial Sequence
  Description of Artificial Sequence: Synthetic oligonucleotide
cugauauucugacaccgac

SEQ ID NO: 1251991 - RNA, 19 nt, Artificial Sequence
  Description of Artificial Sequence: Synthetic oligonucleotide
aacugcauugguaccaaug

SEQ ID NO: 1251992 - RNA, 19 nt, Artificial Sequence
  Description of Artificial Sequence: Synthetic oligonucleotide
ucuggcaugucaucgccca

SEQ ID NO: 1251993 - RNA, 19 nt, Artificial Sequence
  Description of Artificial Sequence: Synthetic oligonucleotide
aucaaggucuuccuuuuga

SEQ ID NO: 1251994 - RNA, 19 nt, Artificial Sequence
  Description of Artificial Sequence: Synthetic oligonucleotide
cugacaccgacgauugagg

SEQ ID NO: 1251995 - RNA, 19 nt, Artificial Sequence
  Description of Artificial Sequence: Synthetic oligonucleotide
ucccgaaagcacaaguccu

SEQ ID NO: 1251996 - RNA, 19 nt, Artificial Sequence
  Description of Artificial Sequence: Synthetic oligonucleotide
cagaauccgaccuccuucc

SEQ ID NO: 1251997 - RNA, 19 nt, Artificial Sequence
  Description of Artificial Sequence: Synthetic oligonucleotide
gaauucugggaggucacag

SEQ ID NO: 1251998 - RNA, 19 nt, Artificial Sequence
  Description of Artificial Sequence: Synthetic oligonucleotide
caccucagcuuuucuaugg

SEQ ID NO: 1251999 - RNA, 19 nt, Artificial Sequence
  Description of Artificial Sequence: Synthetic oligonucleotide
ugggucuggcaugucaucg

SEQ ID NO: 1252000 - RNA, 19 nt, Artificial Sequence
  Description of Artificial Sequence: Synthetic oligonucleotide
agccgcaucaaggucuucc

SEQ ID NO: 1252001 - RNA, 19 nt, Artificial Sequence
  Description of Artificial Sequence: Synthetic oligonucleotide
cauccacucccugacaugg

SEQ ID NO: 1252002 - RNA, 19 nt, Artificial Sequence
  Description of Artificial Sequence: Synthetic oligonucleotide
uucacagcauugcccaugu

SEQ ID NO: 1252003 - RNA, 19 nt, Artificial Sequence
  Description of Artificial Sequence: Synthetic oligonucleotide
ugccguuguagcaguaacc

SEQ ID NO: 1252004 - RNA, 19 nt, Artificial Sequence
  Description of Artificial Sequence: Synthetic oligonucleotide
aguugccauaaggaucucc

SEQ ID NO: 1252005 - RNA, 19 nt, Artificial Sequence
  Description of Artificial Sequence: Synthetic oligonucleotide
ugcuucggggcccagcagc

SEQ ID NO: 1252006 - RNA, 19 nt, Artificial Sequence
  Description of Artificial Sequence: Synthetic oligonucleotide
augacuggucggcuggcac

SEQ ID NO: 1252007 - RNA, 19 nt, Artificial Sequence
  Description of Artificial Sequence: Synthetic oligonucleotide
ugugaaccccgaaaacacu

SEQ ID NO: 1252008 - RNA, 19 nt, Artificial Sequence
  Description of Artificial Sequence: Synthetic oligonucleotide
guugacucucucaaagcag

SEQ ID NO: 1252009 - RNA, 19 nt, Artificial Sequence
  Description of Artificial Sequence: Synthetic oligonucleotide
caugugcacacacagcauc

SEQ ID NO: 1252010 - RNA, 19 nt, Artificial Sequence
  Description of Artificial Sequence: Synthetic oligonucleotide
cacacacuugugaaccccg

SEQ ID NO: 1252011 - RNA, 19 nt, Artificial Sequence
  Description of Artificial Sequence: Synthetic oligonucleotide
cuugguguaggcgauugug

SEQ ID NO: 1252012 - RNA, 19 nt, Artificial Sequence
  Description of Artificial Sequence: Synthetic oligonucleotide
cuugugaaccccgaaaaca

SEQ ID NO: 1252013 - RNA, 19 nt, Artificial Sequence
  Description of Artificial Sequence: Synthetic oligonucleotide
cuagugagccgagaugucc

SEQ ID NO: 1252014 - RNA, 19 nt, Artificial Sequence
  Description of Artificial Sequence: Synthetic oligonucleotide
gacaugggugcccaucaug

SEQ ID NO: 1252015 - RNA, 19 nt, Artificial Sequence
  Description of Artificial Sequence: Synthetic oligonucleotide
gguauuccuacagucaagc

SEQ ID NO: 1252016 - RNA, 19 nt, Artificial Sequence
  Description of Artificial Sequence: Synthetic oligonucleotide
ucucaccaaggcacuagug

SEQ ID NO: 1252017 - RNA, 19 nt, Artificial Sequence
  Description of Artificial Sequence: Synthetic oligonucleotide
augagggcugggcuugugg

SEQ ID NO: 1252018 - RNA, 19 nt, Artificial Sequence
  Description of Artificial Sequence: Synthetic oligonucleotide
cccgaaaacacugauauuc

SEQ ID NO: 1252019 - RNA, 19 nt, Artificial Sequence
  Description of Artificial Sequence: Synthetic oligonucleotide
ucucuggguccccauaaaa

SEQ ID NO: 1252020 - RNA, 19 nt, Artificial Sequence
  Description of Artificial Sequence: Synthetic oligonucleotide
uucucaccaaggcacuagu

SEQ ID NO: 1252021 - RNA, 19 nt, Artificial Sequence
  Description of Artificial Sequence: Synthetic oligonucleotide
cuaaggugagagccacugg

SEQ ID NO: 1252022 - RNA, 19 nt, Artificial Sequence
  Description of Artificial Sequence: Synthetic oligonucleotide
ugacuggucggcuggcacc

SEQ ID NO: 1252023 - RNA, 19 nt, Artificial Sequence
  Description of Artificial Sequence: Synthetic oligonucleotide
augggucuggcagaugccg

SEQ ID NO: 1252024 - RNA, 19 nt, Artificial Sequence
  Description of Artificial Sequence: Synthetic oligonucleotide
cugcuugccgaaugggacc

SEQ ID NO: 1252025 - RNA, 19 nt, Artificial Sequence
  Description of Artificial Sequence: Synthetic oligonucleotide
auuuugacgaaggcacucu

SEQ ID NO: 1252026 - RNA, 19 nt, Artificial Sequence
  Description of Artificial Sequence: Synthetic oligonucleotide
acagucaagcccugguuau

SEQ ID NO: 1252027 - RNA, 19 nt, Artificial Sequence
  Description of Artificial Sequence: Synthetic oligonucleotide
ugacuggggaugagggaug

SEQ ID NO: 1252028 - RNA, 19 nt, Artificial Sequence
  Description of Artificial Sequence: Synthetic oligonucleotide
uuuuccgagggugggguga

SEQ ID NO: 1252029 - RNA, 19 nt, Artificial Sequence
  Description of Artificial Sequence: Synthetic oligonucleotide
auugucgccggccuggcuu

SEQ ID NO: 1252030 - RNA, 19 nt, Artificial Sequence
  Description of Artificial Sequence: Synthetic oligonucleotide
augucaucgcccaaguaca

SEQ ID NO: 1252031 - RNA, 19 nt, Artificial Sequence
  Description of Artificial Sequence: Synthetic oligonucleotide
uccuacugcccugagucug

SEQ ID NO: 1252032 - RNA, 19 nt, Artificial Sequence
  Description of Artificial Sequence: Synthetic oligonucleotide
cugcauugguaccaaugac

SEQ ID NO: 1252033 - RNA, 19 nt, Artificial Sequence
  Description of Artificial Sequence: Synthetic oligonucleotide
cauaaggaucuccugcaga

SEQ ID NO: 1252034 - RNA, 19 nt, Artificial Sequence
  Description of Artificial Sequence: Synthetic oligonucleotide
cauuuugacgaaggcacuc

SEQ ID NO: 1252035 - RNA, 19 nt, Artificial Sequence
  Description of Artificial Sequence: Synthetic oligonucleotide
gacucucucaaagcagaug

SEQ ID NO: 1252036 - RNA, 19 nt, Artificial Sequence
  Description of Artificial Sequence: Synthetic oligonucleotide
agucaagcccugguuaucu

SEQ ID NO: 1252037 - RNA, 19 nt, Artificial Sequence
  Description of Artificial Sequence: Synthetic oligonucleotide
caccccucggccauggcac

SEQ ID NO: 1252038 - RNA, 19 nt, Artificial Sequence
  Description of Artificial Sequence: Synthetic oligonucleotide
gagcaggucguguuuggga

SEQ ID NO: 1252039 - RNA, 19 nt, Artificial Sequence
  Description of Artificial Sequence: Synthetic oligonucleotide
caugggucuggcagaugcc

SEQ ID NO: 1252040 - RNA, 19 nt, Artificial Sequence
  Description of Artificial Sequence: Synthetic oligonucleotide
gaugccaggggcugguuua

SEQ ID NO: 1252041 - RNA, 19 nt, Artificial Sequence
  Description of Artificial Sequence: Synthetic oligonucleotide
agcuggcagucuucacagc

SEQ ID NO: 1252042 - RNA, 19 nt, Artificial Sequence
  Description of Artificial Sequence: Synthetic oligonucleotide
cacuugugaaccccgaaaa

SEQ ID NO: 1252043 - RNA, 19 nt, Artificial Sequence
  Description of Artificial Sequence: Synthetic oligonucleotide
uauccgggaagggugcaca

SEQ ID NO: 1252044 - RNA, 19 nt, Artificial Sequence
  Description of Artificial Sequence: Synthetic oligonucleotide
gguguuggaauguggugac

SEQ ID NO: 1252045 - RNA, 19 nt, Artificial Sequence
  Description of Artificial Sequence: Synthetic oligonucleotide
agugagccgagauguccug

SEQ ID NO: 1252046 - RNA, 19 nt, Artificial Sequence
  Description of Artificial Sequence: Synthetic oligonucleotide
aaugacuggucggcuggca

SEQ ID NO: 1252047 - RNA, 19 nt, Artificial Sequence
  Description of Artificial Sequence: Synthetic oligonucleotide
gcuaaggugagagccacug

SEQ ID NO: 1252048 - RNA, 19 nt, Artificial Sequence
  Description of Artificial Sequence: Synthetic oligonucleotide
ugacucucucaaagcagau

SEQ ID NO: 1252049 - RNA, 19 nt, Artificial Sequence
  Description of Artificial Sequence: Synthetic oligonucleotide
uucacccucgggccgcaug

SEQ ID NO: 1252050 - RNA, 19 nt, Artificial Sequence
  Description of Artificial Sequence: Synthetic oligonucleotide
accacuaucugugcuuccu

SEQ ID NO: 1252051 - RNA, 19 nt, Artificial Sequence
  Description of Artificial Sequence: Synthetic oligonucleotide
guucccgaaagcacaaguc

SEQ ID NO: 1252052 - RNA, 19 nt, Artificial Sequence
  Description of Artificial Sequence: Synthetic oligonucleotide
aucucacauuuugacgaag

SEQ ID NO: 1252053 - RNA, 19 nt, Artificial Sequence
  Description of Artificial Sequence: Synthetic oligonucleotide
ugcuugccgaaugggacca

SEQ ID NO: 1252054 - RNA, 19 nt, Artificial Sequence
  Description of Artificial Sequence: Synthetic oligonucleotide
aagggugcacacaccucag

SEQ ID NO: 1252055 - RNA, 19 nt, Artificial Sequence
  Description of Artificial Sequence: Synthetic oligonucleotide
ccccauaaaauucacccuc

SEQ ID NO: 1252056 - RNA, 19 nt, Artificial Sequence
  Description of Artificial Sequence: Synthetic oligonucleotide
guugccauaaggaucuccu

SEQ ID NO: 1252057 - RNA, 19 nt, Artificial Sequence
  Description of Artificial Sequence: Synthetic oligonucleotide
aaacugcauugguaccaau

SEQ ID NO: 1252058 - RNA, 19 nt, Artificial Sequence
  Description of Artificial Sequence: Synthetic oligonucleotide
ggcgauugugugaagaguc

SEQ ID NO: 1252059 - RNA, 19 nt, Artificial Sequence
  Description of Artificial Sequence: Synthetic oligonucleotide
ggaaacugcauugguacca

SEQ ID NO: 1252060 - RNA, 19 nt, Artificial Sequence
  Description of Artificial Sequence: Synthetic oligonucleotide
uuuccgaggguggggugag

SEQ ID NO: 1252061 - RNA, 19 nt, Artificial Sequence
  Description of Artificial Sequence: Synthetic oligonucleotide
uccugcucaguggaucagc

SEQ ID NO: 1252062 - RNA, 19 nt, Artificial Sequence
  Description of Artificial Sequence: Synthetic oligonucleotide
acugauauucugacaccga

SEQ ID NO: 1252063 - RNA, 19 nt, Artificial Sequence
  Description of Artificial Sequence: Synthetic oligonucleotide
uccccagagcgugacacac

SEQ ID NO: 1252064 - RNA, 19 nt, Artificial Sequence
  Description of Artificial Sequence: Synthetic oligonucleotide
uggcuaaggugagagccac

SEQ ID NO: 1252065 - RNA, 19 nt, Artificial Sequence
  Description of Artificial Sequence: Synthetic oligonucleotide
gcacuugaugcuugggagc

SEQ ID NO: 1252066 - RNA, 19 nt, Artificial Sequence
  Description of Artificial Sequence: Synthetic oligonucleotide
uugucgccggccuggcuug

SEQ ID NO: 1252067 - RNA, 19 nt, Artificial Sequence
  Description of Artificial Sequence: Synthetic oligonucleotide
agguauuccuacagucaag

SEQ ID NO: 1252068 - RNA, 19 nt, Artificial Sequence
  Description of Artificial Sequence: Synthetic oligonucleotide
acuagugagccgagauguc

SEQ ID NO: 1252069 - RNA, 19 nt, Artificial Sequence
  Description of Artificial Sequence: Synthetic oligonucleotide
gugcaggauuggcaggcag

SEQ ID NO: 1252070 - RNA, 19 nt, Artificial Sequence
  Description of Artificial Sequence: Synthetic oligonucleotide
agcgugacacacugcugcu

SEQ ID NO: 1252071 - RNA, 19 nt, Artificial Sequence
  Description of Artificial Sequence: Synthetic oligonucleotide
cugccggagugcaggauug

SEQ ID NO: 1252072 - RNA, 19 nt, Artificial Sequence
  Description of Artificial Sequence: Synthetic oligonucleotide
gucacagaagggaggugcc

SEQ ID NO: 1252073 - RNA, 19 nt, Artificial Sequence
  Description of Artificial Sequence: Synthetic oligonucleotide
gaccggcucaucagcaggc

SEQ ID NO: 1252074 - RNA, 19 nt, Artificial Sequence
  Description of Artificial Sequence: Synthetic oligonucleotide
acuugguguaggcgauugu

SEQ ID NO: 1252075 - RNA, 19 nt, Artificial Sequence
  Description of Artificial Sequence: Synthetic oligonucleotide
uguggguacccugggccug

SEQ ID NO: 1252076 - RNA, 19 nt, Artificial Sequence
  Description of Artificial Sequence: Synthetic oligonucleotide
accggcucaucagcaggcc

SEQ ID NO: 1252077 - RNA, 19 nt, Artificial Sequence
  Description of Artificial Sequence: Synthetic oligonucleotide
ggagcacucgcugagguga

SEQ ID NO: 1252078 - RNA, 19 nt, Artificial Sequence
  Description of Artificial Sequence: Synthetic oligonucleotide
cacuagugagccgagaugu

SEQ ID NO: 1252079 - RNA, 19 nt, Artificial Sequence
  Description of Artificial Sequence: Synthetic oligonucleotide
uugccgaaugggaccacua

SEQ ID NO: 1252080 - RNA, 19 nt, Artificial Sequence
  Description of Artificial Sequence: Synthetic oligonucleotide
auauucugacaccgacgau

SEQ ID NO: 1252081 - RNA, 19 nt, Artificial Sequence
  Description of Artificial Sequence: Synthetic oligonucleotide
auacauuggcugggcagug

SEQ ID NO: 1252082 - RNA, 19 nt, Artificial Sequence
  Description of Artificial Sequence: Synthetic oligonucleotide
cacgcgggcgcagagccgg

SEQ ID NO: 1252083 - RNA, 19 nt, Artificial Sequence
  Description of Artificial Sequence: Synthetic oligonucleotide
gguguaggcgauuguguga

SEQ ID NO: 1252084 - RNA, 19 nt, Artificial Sequence
  Description of Artificial Sequence: Synthetic oligonucleotide
guguaggcgauugugugaa

SEQ ID NO: 1252085 - RNA, 19 nt, Artificial Sequence
  Description of Artificial Sequence: Synthetic oligonucleotide
aggcgauugugugaagagu

SEQ ID NO: 1252086 - RNA, 19 nt, Artificial Sequence
  Description of Artificial Sequence: Synthetic oligonucleotide
guucccggaggcuucagcu

SEQ ID NO: 1252087 - RNA, 19 nt, Artificial Sequence
  Description of Artificial Sequence: Synthetic oligonucleotide
cugagucugccucgacccc

SEQ ID NO: 1252088 - RNA, 19 nt, Artificial Sequence
  Description of Artificial Sequence: Synthetic oligonucleotide
aaggcacuagugagccgag

SEQ ID NO: 1252089 - RNA, 19 nt, Artificial Sequence
  Description of Artificial Sequence: Synthetic oligonucleotide
cuuuuccgaggguggggug

SEQ ID NO: 1252090 - RNA, 19 nt, Artificial Sequence
  Description of Artificial Sequence: Synthetic oligonucleotide
caggucguguuugggacug

SEQ ID NO: 1252091 - RNA, 19 nt, Artificial Sequence
  Description of Artificial Sequence: Synthetic oligonucleotide
ugacaugggugcccaucau

SEQ ID NO: 1252092 - RNA, 19 nt, Artificial Sequence
  Description of Artificial Sequence: Synthetic oligonucleotide
cugggcggaggccaggcuc

SEQ ID NO: 1252093 - RNA, 19 nt, Artificial Sequence
  Description of Artificial Sequence: Synthetic oligonucleotide
gcacuagugagccgagaug

SEQ ID NO: 1252094 - RNA, 19 nt, Artificial Sequence
  Description of Artificial Sequence: Synthetic oligonucleotide
gaugccguuguagcaguaa

SEQ ID NO: 1252095 - RNA, 19 nt, Artificial Sequence
  Description of Artificial Sequence: Synthetic oligonucleotide
caucauguagguauacauu

SEQ ID NO: 1252096 - RNA, 19 nt, Artificial Sequence
  Description of Artificial Sequence: Synthetic oligonucleotide
aaccccgaaaacacugaua

SEQ ID NO: 1252097 - RNA, 19 nt, Artificial Sequence
  Description of Artificial Sequence: Synthetic oligonucleotide
cacaccucagcuuuucuau

SEQ ID NO: 1252098 - RNA, 19 nt, Artificial Sequence
  Description of Artificial Sequence: Synthetic oligonucleotide
gccguuguagcaguaacca

SEQ ID NO: 1252099 - RNA, 19 nt, Artificial Sequence
  Description of Artificial Sequence: Synthetic oligonucleotide
cgagauguccugcucagug

SEQ ID NO: 1252100 - RNA, 19 nt, Artificial Sequence
  Description of Artificial Sequence: Synthetic oligonucleotide
ucgccggccuggcuugcag

SEQ ID NO: 1252101 - RNA, 19 nt, Artificial Sequence
  Description of Artificial Sequence: Synthetic oligonucleotide
cacaguggcaauucuuccu

SEQ ID NO: 1252102 - RNA, 19 nt, Artificial Sequence
  Description of Artificial Sequence: Synthetic oligonucleotide
ccagguauuccuacaguca

SEQ ID NO: 1252103 - RNA, 19 nt, Artificial Sequence
  Description of Artificial Sequence: Synthetic oligonucleotide
cagucccugugcagaauuc

SEQ ID NO: 1252104 - RNA, 19 nt, Artificial Sequence
  Description of Artificial Sequence: Synthetic oligonucleotide
acguccuacugcccugagu

SEQ ID NO: 1252105 - RNA, 19 nt, Artificial Sequence
  Description of Artificial Sequence: Synthetic oligonucleotide
gacuggucggcuggcacca

SEQ ID NO: 1252106 - RNA, 19 nt, Artificial Sequence
  Description of Artificial Sequence: Synthetic oligonucleotide
gccgagauguccugcucag

SEQ ID NO: 1252107 - RNA, 19 nt, Artificial Sequence
  Description of Artificial Sequence: Synthetic oligonucleotide
uccucucuggguccccaua

SEQ ID NO: 1252108 - RNA, 19 nt, Artificial Sequence
  Description of Artificial Sequence: Synthetic oligonucleotide
gccauugucgccggccugg

SEQ ID NO: 1252109 - RNA, 19 nt, Artificial Sequence
  Description of Artificial Sequence: Synthetic oligonucleotide
ugccggagugcaggauugg

SEQ ID NO: 1252110 - RNA, 19 nt, Artificial Sequence
  Description of Artificial Sequence: Synthetic oligonucleotide
gggucuggcaugucaucgc

SEQ ID NO: 1252111 - RNA, 19 nt, Artificial Sequence
  Description of Artificial Sequence: Synthetic oligonucleotide
cccagagcgugacacacug

SEQ ID NO: 1252112 - RNA, 19 nt, Artificial Sequence
  Description of Artificial Sequence: Synthetic oligonucleotide
cccgaaagcacaaguccug

SEQ ID NO: 1252113 - RNA, 19 nt, Artificial Sequence
  Description of Artificial Sequence: Synthetic oligonucleotide
gggcugguuuagcaccugg

SEQ ID NO: 1252114 - RNA, 19 nt, Artificial Sequence
  Description of Artificial Sequence: Synthetic oligonucleotide
gucguguuugggacugggc

SEQ ID NO: 1252115 - RNA, 19 nt, Artificial Sequence
  Description of Artificial Sequence: Synthetic oligonucleotide
acuugaugcuugggagcag

SEQ ID NO: 1252116 - RNA, 19 nt, Artificial Sequence
  Description of Artificial Sequence: Synthetic oligonucleotide
gacguccuacugcccugag

SEQ ID NO: 1252117 - RNA, 19 nt, Artificial Sequence
  Description of Artificial Sequence: Synthetic oligonucleotide
cucccugacaugggugccc

SEQ ID NO: 1252118 - RNA, 19 nt, Artificial Sequence
  Description of Artificial Sequence: Synthetic oligonucleotide
guguuugggacugggcgga

SEQ ID NO: 1252119 - RNA, 19 nt, Artificial Sequence
  Description of Artificial Sequence: Synthetic oligonucleotide
ggucguguuugggacuggg

SEQ ID NO: 1252120 - RNA, 19 nt, Artificial Sequence
  Description of Artificial Sequence: Synthetic oligonucleotide
gccgaaugggaccacuauc

SEQ ID NO: 1252121 - RNA, 19 nt, Artificial Sequence
  Description of Artificial Sequence: Synthetic oligonucleotide
uguuugggacugggcggag

SEQ ID NO: 1252122 - RNA, 19 nt, Artificial Sequence
  Description of Artificial Sequence: Synthetic oligonucleotide
gggcgcucugccauugucg

SEQ ID NO: 1252123 - RNA, 19 nt, Artificial Sequence
  Description of Artificial Sequence: Synthetic oligonucleotide
gggcuuguggguacccugg

SEQ ID NO: 1252124 - RNA, 19 nt, Artificial Sequence
  Description of Artificial Sequence: Synthetic oligonucleotide
ggagcaggucguguuuggg

SEQ ID NO: 1252125 - RNA, 19 nt, Artificial Sequence
  Description of Artificial Sequence: Synthetic oligonucleotide
ccgggaagggugcacacac

SEQ ID NO: 1252126 - RNA, 19 nt, Artificial Sequence
  Description of Artificial Sequence: Synthetic oligonucleotide
acacaccccucggccaugg

SEQ ID NO: 1252127 - RNA, 19 nt, Artificial Sequence
  Description of Artificial Sequence: Synthetic oligonucleotide
gggaggucacaggaguugc

SEQ ID NO: 1252128 - RNA, 19 nt, Artificial Sequence
  Description of Artificial Sequence: Synthetic oligonucleotide
ccgaaagcacaaguccugg

SEQ ID NO: 1252129 - RNA, 19 nt, Artificial Sequence
  Description of Artificial Sequence: Synthetic oligonucleotide
gagccgagauguccugcuc

SEQ ID NO: 1252130 - RNA, 19 nt, Artificial Sequence
  Description of Artificial Sequence: Synthetic oligonucleotide
caggaugcucaccagguau

SEQ ID NO: 1252131 - RNA, 19 nt, Artificial Sequence
  Description of Artificial Sequence: Synthetic oligonucleotide
gggaccgccuguccuuggg

SEQ ID NO: 1252132 - RNA, 19 nt, Artificial Sequence
  Description of Artificial Sequence: Synthetic oligonucleotide
ccuguuguuacacaccccu

SEQ ID NO: 1252133 - RNA, 19 nt, Artificial Sequence
  Description of Artificial Sequence: Synthetic oligonucleotide
cccggcacagaauccgacc

SEQ ID NO: 1252134 - RNA, 19 nt, Artificial Sequence
  Description of Artificial Sequence: Synthetic oligonucleotide
aucccacgcgggcgcagag

SEQ ID NO: 1252135 - RNA, 19 nt, Artificial Sequence
  Description of Artificial Sequence: Synthetic oligonucleotide
gcccugguuaucugcuugc

SEQ ID NO: 1252136 - RNA, 19 nt, Artificial Sequence
  Description of Artificial Sequence: Synthetic oligonucleotide
ccgaaugggaccacuaucu

SEQ ID NO: 1252137 - RNA, 19 nt, Artificial Sequence
  Description of Artificial Sequence: Synthetic oligonucleotide
aggaugcucaccagguauu

SEQ ID NO: 1252138 - RNA, 19 nt, Artificial Sequence
  Description of Artificial Sequence: Synthetic oligonucleotide
cccacgcgggcgcagagcc

SEQ ID NO: 1252139 - RNA, 19 nt, Artificial Sequence
  Description of Artificial Sequence: Synthetic oligonucleotide
ugguccccagagcgugaca

SEQ ID NO: 1252140 - RNA, 19 nt, Artificial Sequence
  Description of Artificial Sequence: Synthetic oligonucleotide
gggccugccggagugcagg

SEQ ID NO: 1252141 - RNA, 19 nt, Artificial Sequence
  Description of Artificial Sequence: Synthetic oligonucleotide
acacacuugugaaccccga

SEQ ID NO: 1252142 - RNA, 19 nt, Artificial Sequence
  Description of Artificial Sequence: Synthetic oligonucleotide
ugcuugggagcaggucgug

SEQ ID NO: 1252143 - RNA, 19 nt, Artificial Sequence
  Description of Artificial Sequence: Synthetic oligonucleotide
ggauggcucgaguguugag

SEQ ID NO: 1252144 - RNA, 19 nt, Artificial Sequence
  Description of Artificial Sequence: Synthetic oligonucleotide
cacacuugugaaccccgaa

SEQ ID NO: 1252145 - RNA, 19 nt, Artificial Sequence
  Description of Artificial Sequence: Synthetic oligonucleotide
ggccuuuuccgaggguggg

SEQ ID NO: 1252146 - RNA, 19 nt, Artificial Sequence
  Description of Artificial Sequence: Synthetic oligonucleotide
guauccgggaagggugcac

SEQ ID NO: 1252147 - RNA, 19 nt, Artificial Sequence
  Description of Artificial Sequence: Synthetic oligonucleotide
gggacguccuacugcccug

SEQ ID NO: 1252148 - RNA, 19 nt, Artificial Sequence
  Description of Artificial Sequence: Synthetic oligonucleotide
cagucaagcccugguuauc

SEQ ID NO: 1252149 - RNA, 19 nt, Artificial Sequence
  Description of Artificial Sequence: Synthetic oligonucleotide
ggcacuagugagccgagau

SEQ ID NO: 1252150 - RNA, 19 nt, Artificial Sequence
  Description of Artificial Sequence: Synthetic oligonucleotide
ggguauccgggaagggugc

SEQ ID NO: 1252151 - RNA, 19 nt, Artificial Sequence
  Description of Artificial Sequence: Synthetic oligonucleotide
ucccacgcgggcgcagagc

SEQ ID NO: 1252152 - RNA, 19 nt, Artificial Sequence
  Description of Artificial Sequence: Synthetic oligonucleotide
cugguccccagagcgugac

SEQ ID NO: 1252153 - RNA, 19 nt, Artificial Sequence
  Description of Artificial Sequence: Synthetic oligonucleotide
ggugaccggcucaucagca

SEQ ID NO: 1252154 - RNA, 19 nt, Artificial Sequence
  Description of Artificial Sequence: Synthetic oligonucleotide
cugcuucggggcccagcag

SEQ ID NO: 1252155 - RNA, 19 nt, Artificial Sequence
  Description of Artificial Sequence: Synthetic oligonucleotide
ggucuggcagaugccguug

SEQ ID NO: 1252156 - RNA, 19 nt, Artificial Sequence
  Description of Artificial Sequence: Synthetic oligonucleotide
cuuugcagggaccgccugu

SEQ ID NO: 1252157 - RNA, 19 nt, Artificial Sequence
  Description of Artificial Sequence: Synthetic oligonucleotide
ccauccacucccugacaug

SEQ ID NO: 1252158 - RNA, 19 nt, Artificial Sequence
  Description of Artificial Sequence: Synthetic oligonucleotide
aggucguguuugggacugg

SEQ ID NO: 1252159 - RNA, 19 nt, Artificial Sequence
  Description of Artificial Sequence: Synthetic oligonucleotide
gacgauugaggcagauuuu

SEQ ID NO: 1252160 - RNA, 19 nt, Artificial Sequence
  Description of Artificial Sequence: Synthetic oligonucleotide
cuacagucaagcccugguu

SEQ ID NO: 1252161 - RNA, 19 nt, Artificial Sequence
  Description of Artificial Sequence: Synthetic oligonucleotide
ccgaaaacacugauauucu

SEQ ID NO: 1252162 - RNA, 19 nt, Artificial Sequence
  Description of Artificial Sequence: Synthetic oligonucleotide
cgcauggggcgccagcagg

SEQ ID NO: 1252163 - RNA, 19 nt, Artificial Sequence
  Description of Artificial Sequence: Synthetic oligonucleotide
gcucgaguguugaggggcc

SEQ ID NO: 1252164 - RNA, 19 nt, Artificial Sequence
  Description of Artificial Sequence: Synthetic oligonucleotide
cucucuggguccccauaaa

SEQ ID NO: 1252165 - RNA, 19 nt, Artificial Sequence
  Description of Artificial Sequence: Synthetic oligonucleotide
gccauggcacugcaucaca

SEQ ID NO: 1252166 - RNA, 19 nt, Artificial Sequence
  Description of Artificial Sequence: Synthetic oligonucleotide
ccacuaucugugcuuccuc

SEQ ID NO: 1252167 - RNA, 19 nt, Artificial Sequence
  Description of Artificial Sequence: Synthetic oligonucleotide
cucugccauugucgccggc

SEQ ID NO: 1252168 - RNA, 19 nt, Artificial Sequence
  Description of Artificial Sequence: Synthetic oligonucleotide
accgacgauugaggcagau

SEQ ID NO: 1252169 - RNA, 19 nt, Artificial Sequence
  Description of Artificial Sequence: Synthetic oligonucleotide
aggcacuagugagccgaga

SEQ ID NO: 1252170 - RNA, 19 nt, Artificial Sequence
  Description of Artificial Sequence: Synthetic oligonucleotide
gccggagugcaggauuggc

SEQ ID NO: 1252171 - RNA, 19 nt, Artificial Sequence
  Description of Artificial Sequence: Synthetic oligonucleotide
ggccucacaguggcaauuc

SEQ ID NO: 1252172 - RNA, 19 nt, Artificial Sequence
  Description of Artificial Sequence: Synthetic oligonucleotide
ggcaugucaucgcccaagu

SEQ ID NO: 1252173 - RNA, 19 nt, Artificial Sequence
  Description of Artificial Sequence: Synthetic oligonucleotide
cgacgauugaggcagauuu

SEQ ID NO: 1252174 - RNA, 19 nt, Artificial Sequence
  Description of Artificial Sequence: Synthetic oligonucleotide
ggugcacacaccucagcuu

SEQ ID NO: 1252175 - RNA, 19 nt, Artificial Sequence
  Description of Artificial Sequence: Synthetic oligonucleotide
uuccgaggguggggugagc

SEQ ID NO: 1252176 - RNA, 19 nt, Artificial Sequence
  Description of Artificial Sequence: Synthetic oligonucleotide
ucgggccgcauggggcgcc

SEQ ID NO: 1252177 - RNA, 19 nt, Artificial Sequence
  Description of Artificial Sequence: Synthetic oligonucleotide
cacaccccucggccauggc

SEQ ID NO: 1252178 - RNA, 19 nt, Artificial Sequence
  Description of Artificial Sequence: Synthetic oligonucleotide
caguggcaauucuuccugu

SEQ ID NO: 1252179 - RNA, 19 nt, Artificial Sequence
  Description of Artificial Sequence: Synthetic oligonucleotide
ggguacccugggccugccg

SEQ ID NO: 1252180 - RNA, 19 nt, Artificial Sequence
  Description of Artificial Sequence: Synthetic oligonucleotide
ugucgccggccuggcuugc

SEQ ID NO: 1252181 - RNA, 19 nt, Artificial Sequence
  Description of Artificial Sequence: Synthetic oligonucleotide
gugugaacagcagccgcau

SEQ ID NO: 1252182 - RNA, 19 nt, Artificial Sequence
  Description of Artificial Sequence: Synthetic oligonucleotide
caccaccuuuggcacugga

SEQ ID NO: 1252183 - RNA, 19 nt, Artificial Sequence
  Description of Artificial Sequence: Synthetic oligonucleotide
agugggccucacaguggca

SEQ ID NO: 1252184 - RNA, 19 nt, Artificial Sequence
  Description of Artificial Sequence: Synthetic oligonucleotide
ccagcggccagcagacaca

SEQ ID NO: 1252185 - RNA, 19 nt, Artificial Sequence
  Description of Artificial Sequence: Synthetic oligonucleotide
agcaucccacgcgggcgca

SEQ ID NO: 1252186 - RNA, 19 nt, Artificial Sequence
  Description of Artificial Sequence: Synthetic oligonucleotide
gcgggagcacucgcugagg

SEQ ID NO: 1252187 - RNA, 19 nt, Artificial Sequence
  Description of Artificial Sequence: Synthetic oligonucleotide
gugcccagugggccucaca

SEQ ID NO: 1252188 - RNA, 19 nt, Artificial Sequence
  Description of Artificial Sequence: Synthetic oligonucleotide
cucgggccgcauggggcgc

SEQ ID NO: 1252189 - RNA, 19 nt, Artificial Sequence
  Description of Artificial Sequence: Synthetic oligonucleotide
gguauccgggaagggugca

SEQ ID NO: 1252190 - RNA, 19 nt, Artificial Sequence
  Description of Artificial Sequence: Synthetic oligonucleotide
ggccgcauggggcgccagc

SEQ ID NO: 1252191 - RNA, 19 nt, Artificial Sequence
  Description of Artificial Sequence: Synthetic oligonucleotide
caguucccggaggcuucag

SEQ ID NO: 1252192 - RNA, 19 nt, Artificial Sequence
  Description of Artificial Sequence: Synthetic oligonucleotide
gcgauugugugaagagucu

SEQ ID NO: 1252193 - RNA, 19 nt, Artificial Sequence
  Description of Artificial Sequence: Synthetic oligonucleotide
gcugggcuuguggguaccc

SEQ ID NO: 1252194 - RNA, 19 nt, Artificial Sequence
  Description of Artificial Sequence: Synthetic oligonucleotide
gcagucccugugcagaauu

SEQ ID NO: 1252195 - RNA, 19 nt, Artificial Sequence
  Description of Artificial Sequence: Synthetic oligonucleotide
caucccacgcgggcgcaga

SEQ ID NO: 1252196 - RNA, 19 nt, Artificial Sequence
  Description of Artificial Sequence: Synthetic oligonucleotide
ccccggcacagaauccgac

SEQ ID NO: 1252197 - RNA, 19 nt, Artificial Sequence
  Description of Artificial Sequence: Synthetic oligonucleotide
agaugccguuguagcagua

SEQ ID NO: 1252198 - RNA, 19 nt, Artificial Sequence
  Description of Artificial Sequence: Synthetic oligonucleotide
ggacguccuacugcccuga

SEQ ID NO: 1252199 - RNA, 19 nt, Artificial Sequence
  Description of Artificial Sequence: Synthetic oligonucleotide
gcaugucaucgcccaagua

SEQ ID NO: 1252200 - RNA, 19 nt, Artificial Sequence
  Description of Artificial Sequence: Synthetic oligonucleotide
gcaggucguguuugggacu

SEQ ID NO: 1252201 - RNA, 19 nt, Artificial Sequence
  Description of Artificial Sequence: Synthetic oligonucleotide
gccgcauggggcgccagca

SEQ ID NO: 1252202 - RNA, 19 nt, Artificial Sequence
  Description of Artificial Sequence: Synthetic oligonucleotide
gguucucaccaaggcacua

SEQ ID NO: 1252203 - RNA, 19 nt, Artificial Sequence
  Description of Artificial Sequence: Synthetic oligonucleotide
ccgaccuccuuccugcugu

SEQ ID NO: 1252204 - RNA, 19 nt, Artificial Sequence
  Description of Artificial Sequence: Synthetic oligonucleotide
ccacgcgggcgcagagccg

SEQ ID NO: 1252205 - RNA, 19 nt, Artificial Sequence
  Description of Artificial Sequence: Synthetic oligonucleotide
gcgugacacacugcugcuc

SEQ ID NO: 1252206 - RNA, 19 nt, Artificial Sequence
  Description of Artificial Sequence: Synthetic oligonucleotide
ccauugucgccggccuggc

SEQ ID NO: 1252207 - RNA, 19 nt, Artificial Sequence
  Description of Artificial Sequence: Synthetic oligonucleotide
caguugccauaaggaucuc

SEQ ID NO: 1252208 - RNA, 19 nt, Artificial Sequence
  Description of Artificial Sequence: Synthetic oligonucleotide
ccgcauggggcgccagcag

SEQ ID NO: 1252209 - RNA, 19 nt, Artificial Sequence
  Description of Artificial Sequence: Synthetic oligonucleotide
ccgcagcaucccacgcggg

SEQ ID NO: 1252210 - RNA, 19 nt, Artificial Sequence
  Description of Artificial Sequence: Synthetic oligonucleotide
gguuaucugcuugccgaau

SEQ ID NO: 1252211 - RNA, 19 nt, Artificial Sequence
  Description of Artificial Sequence: Synthetic oligonucleotide
ggcgggcgcucugccauug

SEQ ID NO: 1252212 - RNA, 19 nt, Artificial Sequence
  Description of Artificial Sequence: Synthetic oligonucleotide
gcaguucccggaggcuuca

SEQ ID NO: 1252213 - RNA, 19 nt, Artificial Sequence
  Description of Artificial Sequence: Synthetic oligonucleotide
caccgacgauugaggcaga

SEQ ID NO: 1252214 - RNA, 19 nt, Artificial Sequence
  Description of Artificial Sequence: Synthetic oligonucleotide
ccuuuuccgaggguggggu

SEQ ID NO: 1252215 - RNA, 19 nt, Artificial Sequence
  Description of Artificial Sequence: Synthetic oligonucleotide
ggugcccaucauguaggua

SEQ ID NO: 1252216 - RNA, 19 nt, Artificial Sequence
  Description of Artificial Sequence: Synthetic oligonucleotide
acgcgggcgcagagccggg

SEQ ID NO: 1252217 - RNA, 19 nt, Artificial Sequence
  Description of Artificial Sequence: Synthetic oligonucleotide
cauugucgccggccuggcu

SEQ ID NO: 1252218 - RNA, 19 nt, Artificial Sequence
  Description of Artificial Sequence: Synthetic oligonucleotide
gcaucccacgcgggcgcag

SEQ ID NO: 1252219 - RNA, 19 nt, Artificial Sequence
  Description of Artificial Sequence: Synthetic oligonucleotide
cucgaguguugaggggccu

SEQ ID NO: 1252220 - RNA, 19 nt, Artificial Sequence
  Description of Artificial Sequence: Synthetic oligonucleotide
cgccggccuggcuugcagc

SEQ ID NO: 1252221 - RNA, 19 nt, Artificial Sequence
  Description of Artificial Sequence: Synthetic oligonucleotide
gucgccggccuggcuugca

SEQ ID NO: 1252222 - RNA, 19 nt, Artificial Sequence
  Description of Artificial Sequence: Synthetic oligonucleotide
aggcacucuuggagucuuu

SEQ ID NO: 1252223 - RNA, 19 nt, Artificial Sequence
  Description of Artificial Sequence: Synthetic oligonucleotide
ggagggccugcaugcaguu

SEQ ID NO: 1252224 - RNA, 19 nt, Artificial Sequence
  Description of Artificial Sequence: Synthetic oligonucleotide
cgggcgcucugccauuguc

SEQ ID NO: 1252225 - RNA, 19 nt, Artificial Sequence
  Description of Artificial Sequence: Synthetic oligonucleotide
gcggcgggcgcucugccau

SEQ ID NO: 1252226 - RNA, 19 nt, Artificial Sequence
  Description of Artificial Sequence: Synthetic oligonucleotide
ccugccggagugcaggauu

SEQ ID NO: 1252227 - RNA, 19 nt, Artificial Sequence
  Description of Artificial Sequence: Synthetic oligonucleotide
gcccagugggccucacagu

SEQ ID NO: 1252228 - RNA, 19 nt, Artificial Sequence
  Description of Artificial Sequence: Synthetic oligonucleotide
gcuugccgaaugggaccac

SEQ ID NO: 1252229 - RNA, 19 nt, Artificial Sequence
  Description of Artificial Sequence: Synthetic oligonucleotide
ccguuguagcaguaaccau

SEQ ID NO: 1252230 - RNA, 19 nt, Artificial Sequence
  Description of Artificial Sequence: Synthetic oligonucleotide
cucggccauggcacugcau

SEQ ID NO: 1252231 - RNA, 19 nt, Artificial Sequence
  Description of Artificial Sequence: Synthetic oligonucleotide
cagccgcaucaaggucuuc

SEQ ID NO: 1252232 - RNA, 19 nt, Artificial Sequence
  Description of Artificial Sequence: Synthetic oligonucleotide
ggcuaaggugagagccacu

SEQ ID NO: 1252233 - RNA, 19 nt, Artificial Sequence
  Description of Artificial Sequence: Synthetic oligonucleotide
gcaggccuuuuccgagggu

SEQ ID NO: 1252234 - RNA, 19 nt, Artificial Sequence
  Description of Artificial Sequence: Synthetic oligonucleotide
ccggcucaucagcaggccu

SEQ ID NO: 1252235 - RNA, 19 nt, Artificial Sequence
  Description of Artificial Sequence: Synthetic oligonucleotide
gggccucacaguggcaauu

SEQ ID NO: 1252236 - RNA, 19 nt, Artificial Sequence
  Description of Artificial Sequence: Synthetic oligonucleotide
ccccagagcgugacacacu

SEQ ID NO: 1252237 - RNA, 19 nt, Artificial Sequence
  Description of Artificial Sequence: Synthetic oligonucleotide
gggccgcauggggcgccag

SEQ ID NO: 1252238 - RNA, 19 nt, Artificial Sequence
  Description of Artificial Sequence: Synthetic oligonucleotide
ccccgaaaacacugauauu

SEQ ID NO: 1252239 - RNA, 19 nt, Artificial Sequence
  Description of Artificial Sequence: Synthetic oligonucleotide
ccgacgauugaggcagauu

SEQ ID NO: 1252240 - RNA, 19 nt, Artificial Sequence
  Description of Artificial Sequence: Synthetic oligonucleotide
ggugcacguggggccuggu

SEQ ID NO: 1252241 - RNA, 19 nt, Artificial Sequence
  Description of Artificial Sequence: Synthetic oligonucleotide
gcgggcgcucugccauugu

SEQ ID NO: 1252242 - RNA, 19 nt, Artificial Sequence
  Description of Artificial Sequence: Synthetic oligonucleotide
ccgagauguccugcucagu

SEQ ID NO: 1252243 - RNA, 19 nt, Artificial Sequence
  Description of Artificial Sequence: Synthetic oligonucleotide
gccugccggagugcaggau

SEQ ID NO: 1252244 - RNA, 19 nt, Artificial Sequence
  Description of Artificial Sequence: Synthetic oligonucleotide
gcgcgccgcggcgggcgcu

SEQ ID NO: 1252245 - RNA, 19 nt, Artificial Sequence
  Description of Artificial Sequence: Synthetic oligonucleotide
cggcgggcgcucugccauu

SEQ ID NO: 1252246 - RNA, 19 nt, Artificial Sequence
  Description of Artificial Sequence: Synthetic oligonucleotide
aauuguuucagguaaggcc

SEQ ID NO: 1252247 - RNA, 19 nt, Artificial Sequence
  Description of Artificial Sequence: Synthetic oligonucleotide
uuugauuggacacugaucc

SEQ ID NO: 1252248 - RNA, 19 nt, Artificial Sequence
  Description of Artificial Sequence: Synthetic oligonucleotide
aguaauauuucugauaccc

SEQ ID NO: 1252249 - RNA, 19 nt, Artificial Sequence
  Description of Artificial Sequence: Synthetic oligonucleotide
aauuaaaccucuuuucuca

SEQ ID NO: 1252250 - RNA, 19 nt, Artificial Sequence
  Description of Artificial Sequence: Synthetic oligonucleotide
auuauuaggagcugggauc

SEQ ID NO: 1252251 - RNA, 19 nt, Artificial Sequence
  Description of Artificial Sequence: Synthetic oligonucleotide
acucauaaaguguuguugg

SEQ ID NO: 1252252 - RNA, 19 nt, Artificial Sequence
  Description of Artificial Sequence: Synthetic oligonucleotide
acuaacagggauccgaagg

SEQ ID NO: 1252253 - RNA, 19 nt, Artificial Sequence
  Description of Artificial Sequence: Synthetic oligonucleotide
uauaacuugaaaacucuga

SEQ ID NO: 1252254 - RNA, 19 nt, Artificial Sequence
  Description of Artificial Sequence: Synthetic oligonucleotide
aaguuauagacuucaauau

SEQ ID NO: 1252255 - RNA, 19 nt, Artificial Sequence
  Description of Artificial Sequence: Synthetic oligonucleotide
uguaaauagguuucuuuag

SEQ ID NO: 1252256 - RNA, 19 nt, Artificial Sequence
  Description of Artificial Sequence: Synthetic oligonucleotide
aguucgacaucugugaccc

SEQ ID NO: 1252257 - RNA, 19 nt, Artificial Sequence
  Description of Artificial Sequence: Synthetic oligonucleotide
ucuccaugugauuaggccg

SEQ ID NO: 1252258 - RNA, 19 nt, Artificial Sequence
  Description of Artificial Sequence: Synthetic oligonucleotide
aauacuuauucagguacac

SEQ ID NO: 1252259 - RNA, 19 nt, Artificial Sequence
  Description of Artificial Sequence: Synthetic oligonucleotide
gucaguaacucuucgaucc

SEQ ID NO: 1252260 - RNA, 19 nt, Artificial Sequence
  Description of Artificial Sequence: Synthetic oligonucleotide
ugugauuaggccgaugagg

SEQ ID NO: 1252261 - RNA, 19 nt, Artificial Sequence
  Description of Artificial Sequence: Synthetic oligonucleotide
aaagaagacaaaugcugug

SEQ ID NO: 1252262 - RNA, 19 nt, Artificial Sequence
  Description of Artificial Sequence: Synthetic oligonucleotide
uuucaauuguauuuagucu

SEQ ID NO: 1252263 - RNA, 19 nt, Artificial Sequence
  Description of Artificial Sequence: Synthetic oligonucleotide
uuagcaaagugcaagcgcu

SEQ ID NO: 1252264 - RNA, 19 nt, Artificial Sequence
  Description of Artificial Sequence: Synthetic oligonucleotide
uuguugguaaagaagacaa

SEQ ID NO: 1252265 - RNA, 19 nt, Artificial Sequence
  Description of Artificial Sequence: Synthetic oligonucleotide
agaauuaaaccucuuuucu

SEQ ID NO: 1252266 - RNA, 19 nt, Artificial Sequence
  Description of Artificial Sequence: Synthetic oligonucleotide
caugacuuccauuauuagg

SEQ ID NO: 1252267 - RNA, 19 nt, Artificial Sequence
  Description of Artificial Sequence: Synthetic oligonucleotide
cagaauuuccugauuacgg

SEQ ID NO: 1252268 - RNA, 19 nt, Artificial Sequence
  Description of Artificial Sequence: Synthetic oligonucleotide
cacuauauuagaaguaagc

SEQ ID NO: 1252269 - RNA, 19 nt, Artificial Sequence
  Description of Artificial Sequence: Synthetic oligonucleotide
uuucagguaaggccgaaag

SEQ ID NO: 1252270 - RNA, 19 nt, Artificial Sequence
  Description of Artificial Sequence: Synthetic oligonucleotide
ugccauauaacuugaaaac

SEQ ID NO: 1252271 - RNA, 19 nt, Artificial Sequence
  Description of Artificial Sequence: Synthetic oligonucleotide
ugaucugagacgaggauga

SEQ ID NO: 1252272 - RNA, 19 nt, Artificial Sequence
  Description of Artificial Sequence: Synthetic oligonucleotide
uuugcaaugggugagcaca

SEQ ID NO: 1252273 - RNA, 19 nt, Artificial Sequence
  Description of Artificial Sequence: Synthetic oligonucleotide
uacuuauucagguacacau

SEQ ID NO: 1252274 - RNA, 19 nt, Artificial Sequence
  Description of Artificial Sequence: Synthetic oligonucleotide
ucagaauuaaaccucuuuu

SEQ ID NO: 1252275 - RNA, 19 nt, Artificial Sequence
  Description of Artificial Sequence: Synthetic oligonucleotide
uucaauuguauuuagucuu

SEQ ID NO: 1252276 - RNA, 19 nt, Artificial Sequence
  Description of Artificial Sequence: Synthetic oligonucleotide
caugccaugaucugagacg

SEQ ID NO: 1252277 - RNA, 19 nt, Artificial Sequence
  Description of Artificial Sequence: Synthetic oligonucleotide
cagauagaaugucagaggc

SEQ ID NO: 1252278 - RNA, 19 nt, Artificial Sequence
  Description of Artificial Sequence: Synthetic oligonucleotide
auauugauuugauuggaca

SEQ ID NO: 1252279 - RNA, 19 nt, Artificial Sequence
  Description of Artificial Sequence: Synthetic oligonucleotide
uguauccacucauaaagug

SEQ ID NO: 1252280 - RNA, 19 nt, Artificial Sequence
  Description of Artificial Sequence: Synthetic oligonucleotide
ugucguucaugguagaagc

SEQ ID NO: 1252281 - RNA, 19 nt, Artificial Sequence
  Description of Artificial Sequence: Synthetic oligonucleotide
uucaagaccuucauaauua

SEQ ID NO: 1252282 - RNA, 19 nt, Artificial Sequence
  Description of Artificial Sequence: Synthetic oligonucleotide
ucaauuguauuuagucuug

SEQ ID NO: 1252283 - RNA, 19 nt, Artificial Sequence
  Description of Artificial Sequence: Synthetic oligonucleotide
aaugucaguaacucuucga

SEQ ID NO: 1252284 - RNA, 19 nt, Artificial Sequence
  Description of Artificial Sequence: Synthetic oligonucleotide
ucuaaauacagaguguaaa

SEQ ID NO: 1252285 - RNA, 19 nt, Artificial Sequence
  Description of Artificial Sequence: Synthetic oligonucleotide
uuaugggcgggacuaacag

SEQ ID NO: 1252286 - RNA, 19 nt, Artificial Sequence
  Description of Artificial Sequence: Synthetic oligonucleotide
uuggcacuauauuagaagu

SEQ ID NO: 1252287 - RNA, 19 nt, Artificial Sequence
  Description of Artificial Sequence: Synthetic oligonucleotide
aauuguauuuagucuuggu

SEQ ID NO: 1252288 - RNA, 19 nt, Artificial Sequence
  Description of Artificial Sequence: Synthetic oligonucleotide
ugucacuuuuagcaaagug

SEQ ID NO: 1252289 - RNA, 19 nt, Artificial Sequence
  Description of Artificial Sequence: Synthetic oligonucleotide
ugauacauuggcacuauau

SEQ ID NO: 1252290 - RNA, 19 nt, Artificial Sequence
  Description of Artificial Sequence: Synthetic oligonucleotide
uccugguauaggcagcugg

SEQ ID NO: 1252291 - RNA, 19 nt, Artificial Sequence
  Description of Artificial Sequence: Synthetic oligonucleotide
auggauucaaugcaagcug

SEQ ID NO: 1252292 - RNA, 19 nt, Artificial Sequence
  Description of Artificial Sequence: Synthetic oligonucleotide
uuuuagcaaagugcaagcg

SEQ ID NO: 1252293 - RNA, 19 nt, Artificial Sequence
  Description of Artificial Sequence: Synthetic oligonucleotide
cauucggucaaccuucugc

SEQ ID NO: 1252294 - RNA, 19 nt, Artificial Sequence
  Description of Artificial Sequence: Synthetic oligonucleotide
uucccauaaguacagcucu

SEQ ID NO: 1252295 - RNA, 19 nt, Artificial Sequence
  Description of Artificial Sequence: Synthetic oligonucleotide
aaccauucggucaaccuuc

SEQ ID NO: 1252296 - RNA, 19 nt, Artificial Sequence
  Description of Artificial Sequence: Synthetic oligonucleotide
acuuauccaaguucagguc

SEQ ID NO: 1252297 - RNA, 19 nt, Artificial Sequence
  Description of Artificial Sequence: Synthetic oligonucleotide
uuucaagaccuucauaauu

SEQ ID NO: 1252298 - RNA, 19 nt, Artificial Sequence
  Description of Artificial Sequence: Synthetic oligonucleotide
ugaaacugauucuugucgu

SEQ ID NO: 1252299 - RNA, 19 nt, Artificial Sequence
  Description of Artificial Sequence: Synthetic oligonucleotide
uggauucaaugcaagcugc

SEQ ID NO: 1252300 - RNA, 19 nt, Artificial Sequence
  Description of Artificial Sequence: Synthetic oligonucleotide
acgucagugggucucaguc

SEQ ID NO: 1252301 - RNA, 19 nt, Artificial Sequence
  Description of Artificial Sequence: Synthetic oligonucleotide
aggaagguguaagaugucc

SEQ ID NO: 1252302 - RNA, 19 nt, Artificial Sequence
  Description of Artificial Sequence: Synthetic oligonucleotide
aaccagaauuuccugauua

SEQ ID NO: 1252303 - RNA, 19 nt, Artificial Sequence
  Description of Artificial Sequence: Synthetic oligonucleotide
uagacaacuuuaauauugu

SEQ ID NO: 1252304 - RNA, 19 nt, Artificial Sequence
  Description of Artificial Sequence: Synthetic oligonucleotide
uauuucucuggaacgucag

SEQ ID NO: 1252305 - RNA, 19 nt, Artificial Sequence
  Description of Artificial Sequence: Synthetic oligonucleotide
cauaacuuagcuuagaauu

SEQ ID NO: 1252306 - RNA, 19 nt, Artificial Sequence
  Description of Artificial Sequence: Synthetic oligonucleotide
cuuggguaagaauuguuuc

SEQ ID NO: 1252307 - RNA, 19 nt, Artificial Sequence
  Description of Artificial Sequence: Synthetic oligonucleotide
aacugauucuugucguuca

SEQ ID NO: 1252308 - RNA, 19 nt, Artificial Sequence
  Description of Artificial Sequence: Synthetic oligonucleotide
uuauuaggagcugggauca

SEQ ID NO: 1252309 - RNA, 19 nt, Artificial Sequence
  Description of Artificial Sequence: Synthetic oligonucleotide
acuuccauuauuaggagcu

SEQ ID NO: 1252310 - RNA, 19 nt, Artificial Sequence
  Description of Artificial Sequence: Synthetic oligonucleotide
ucggucaaccuucugcaag

SEQ ID NO: 1252311 - RNA, 19 nt, Artificial Sequence
  Description of Artificial Sequence: Synthetic oligonucleotide
ugauggauucaaugcaagc

SEQ ID NO: 1252312 - RNA, 19 nt, Artificial Sequence
  Description of Artificial Sequence: Synthetic oligonucleotide
ugaguuggaaccagaauuu

SEQ ID NO: 1252313 - RNA, 19 nt, Artificial Sequence
  Description of Artificial Sequence: Synthetic oligonucleotide
aagauuggcaaauguguuu

SEQ ID NO: 1252314 - RNA, 19 nt, Artificial Sequence
  Description of Artificial Sequence: Synthetic oligonucleotide
aacauuuaugggcgggacu

SEQ ID NO: 1252315 - RNA, 19 nt, Artificial Sequence
  Description of Artificial Sequence: Synthetic oligonucleotide
uuuaugggcgggacuaaca

SEQ ID NO: 1252316 - RNA, 19 nt, Artificial Sequence
  Description of Artificial Sequence: Synthetic oligonucleotide
ucagcaugccaaccauucg

SEQ ID NO: 1252317 - RNA, 19 nt, Artificial Sequence
  Description of Artificial Sequence: Synthetic oligonucleotide
uucaaccucaacaggucug

SEQ ID NO: 1252318 - RNA, 19 nt, Artificial Sequence
  Description of Artificial Sequence: Synthetic oligonucleotide
auucggucaaccuucugca

SEQ ID NO: 1252319 - RNA, 19 nt, Artificial Sequence
  Description of Artificial Sequence: Synthetic oligonucleotide
cugauuacggaugacuuug

SEQ ID NO: 1252320 - RNA, 19 nt, Artificial Sequence
  Description of Artificial Sequence: Synthetic oligonucleotide
uuacugaggaagguguaag

SEQ ID NO: 1252321 - RNA, 19 nt, Artificial Sequence
  Description of Artificial Sequence: Synthetic oligonucleotide
gugauuaggccgaugaggc

SEQ ID NO: 1252322 - RNA, 19 nt, Artificial Sequence
  Description of Artificial Sequence: Synthetic oligonucleotide
gagacauagucauuacuga

SEQ ID NO: 1252323 - RNA, 19 nt, Artificial Sequence
  Description of Artificial Sequence: Synthetic oligonucleotide
cauaaaguguuguugguaa

SEQ ID NO: 1252324 - RNA, 19 nt, Artificial Sequence
  Description of Artificial Sequence: Synthetic oligonucleotide
ugggguguaaauagguuuc

SEQ ID NO: 1252325 - RNA, 19 nt, Artificial Sequence
  Description of Artificial Sequence: Synthetic oligonucleotide
uaugggcgggacuaacagg

SEQ ID NO: 1252326 - RNA, 19 nt, Artificial Sequence
  Description of Artificial Sequence: Synthetic oligonucleotide
agugcaagcgcuuggguaa

SEQ ID NO: 1252327 - RNA, 19 nt, Artificial Sequence
  Description of Artificial Sequence: Synthetic oligonucleotide
uugucguucaugguagaag

SEQ ID NO: 1252328 - RNA, 19 nt, Artificial Sequence
  Description of Artificial Sequence: Synthetic oligonucleotide
uuguagcacggugucaugg

SEQ ID NO: 1252329 - RNA, 19 nt, Artificial Sequence
  Description of Artificial Sequence: Synthetic oligonucleotide
gaguucgacaucugugacc

SEQ ID NO: 1252330 - RNA, 19 nt, Artificial Sequence
  Description of Artificial Sequence: Synthetic oligonucleotide
uaacuuagcuuagaauuac

SEQ ID NO: 1252331 - RNA, 19 nt, Artificial Sequence
  Description of Artificial Sequence: Synthetic oligonucleotide
ugacuuccauuauuaggag

SEQ ID NO: 1252332 - RNA, 19 nt, Artificial Sequence
  Description of Artificial Sequence: Synthetic oligonucleotide
agccaauaaagagagcuug

SEQ ID NO: 1252333 - RNA, 19 nt, Artificial Sequence
  Description of Artificial Sequence: Synthetic oligonucleotide
ucacaugugcagccgaggu

SEQ ID NO: 1252334 - RNA, 19 nt, Artificial Sequence
  Description of Artificial Sequence: Synthetic oligonucleotide
cucaacaggucugaaacug

SEQ ID NO: 1252335 - RNA, 19 nt, Artificial Sequence
  Description of Artificial Sequence: Synthetic oligonucleotide
acugccauauaacuugaaa

SEQ ID NO: 1252336 - RNA, 19 nt, Artificial Sequence
  Description of Artificial Sequence: Synthetic oligonucleotide
ucguucaugguagaagcug

SEQ ID NO: 1252337 - RNA, 19 nt, Artificial Sequence
  Description of Artificial Sequence: Synthetic oligonucleotide
cacucuaagggacucugag

SEQ ID NO: 1252338 - RNA, 19 nt, Artificial Sequence
  Description of Artificial Sequence: Synthetic oligonucleotide
uccgcaauacuuccuuucu

SEQ ID NO: 1252339 - RNA, 19 nt, Artificial Sequence
  Description of Artificial Sequence: Synthetic oligonucleotide
aagugcaagcgcuugggua

SEQ ID NO: 1252340 - RNA, 19 nt, Artificial Sequence
  Description of Artificial Sequence: Synthetic oligonucleotide
aguauuucucuggaacguc

SEQ ID NO: 1252341 - RNA, 19 nt, Artificial Sequence
  Description of Artificial Sequence: Synthetic oligonucleotide
cuuggcuaaagauuggcaa

SEQ ID NO: 1252342 - RNA, 19 nt, Artificial Sequence
  Description of Artificial Sequence: Synthetic oligonucleotide
gauuggacacugauccggg

SEQ ID NO: 1252343 - RNA, 19 nt, Artificial Sequence
  Description of Artificial Sequence: Synthetic oligonucleotide
aaagugcaagcgcuugggu

SEQ ID NO: 1252344 - RNA, 19 nt, Artificial Sequence
  Description of Artificial Sequence: Synthetic oligonucleotide
cugauggauucaaugcaag

SEQ ID NO: 1252345 - RNA, 19 nt, Artificial Sequence
  Description of Artificial Sequence: Synthetic oligonucleotide
cugccauauaacuugaaaa

SEQ ID NO: 1252346 - RNA, 19 nt, Artificial Sequence
  Description of Artificial Sequence: Synthetic oligonucleotide
guaaggccgaaagugcugg

SEQ ID NO: 1252347 - RNA, 19 nt, Artificial Sequence
  Description of Artificial Sequence: Synthetic oligonucleotide
cuaagggacucugagauga

SEQ ID NO: 1252348 - RNA, 19 nt, Artificial Sequence
  Description of Artificial Sequence: Synthetic oligonucleotide
ugguauaggcagcuggaaa

SEQ ID NO: 1252349 - RNA, 19 nt, Artificial Sequence
  Description of Artificial Sequence: Synthetic oligonucleotide
guagaagcugaguccagug

SEQ ID NO: 1252350 - RNA, 19 nt, Artificial Sequence
  Description of Artificial Sequence: Synthetic oligonucleotide
cucuacaacuuccaugguc

SEQ ID NO: 1252351 - RNA, 19 nt, Artificial Sequence
  Description of Artificial Sequence: Synthetic oligonucleotide
uccugauuacggaugacuu

SEQ ID NO: 1252352 - RNA, 19 nt, Artificial Sequence
  Description of Artificial Sequence: Synthetic oligonucleotide
uaguauuucucuggaacgu

SEQ ID NO: 1252353 - RNA, 19 nt, Artificial Sequence
  Description of Artificial Sequence: Synthetic oligonucleotide
caaugggugagcacaauga

SEQ ID NO: 1252354 - RNA, 19 nt, Artificial Sequence
  Description of Artificial Sequence: Synthetic oligonucleotide
guaagaauuguuucaggua

SEQ ID NO: 1252355 - RNA, 19 nt, Artificial Sequence
  Description of Artificial Sequence: Synthetic oligonucleotide
uguagcacggugucaugga

SEQ ID NO: 1252356 - RNA, 19 nt, Artificial Sequence
  Description of Artificial Sequence: Synthetic oligonucleotide
ugucaguaacucuucgauc

SEQ ID NO: 1252357 - RNA, 19 nt, Artificial Sequence
  Description of Artificial Sequence: Synthetic oligonucleotide
uuccugauuacggaugacu

SEQ ID NO: 1252358 - RNA, 19 nt, Artificial Sequence
  Description of Artificial Sequence: Synthetic oligonucleotide
aagcgcuuggguaagaauu

SEQ ID NO: 1252359 - RNA, 19 nt, Artificial Sequence
  Description of Artificial Sequence: Synthetic oligonucleotide
auauaacuugaaaacucug

SEQ ID NO: 1252360 - RNA, 19 nt, Artificial Sequence
  Description of Artificial Sequence: Synthetic oligonucleotide
auuuaugggcgggacuaac

SEQ ID NO: 1252361 - RNA, 19 nt, Artificial Sequence
  Description of Artificial Sequence: Synthetic oligonucleotide
uucgacaucugugacccga

SEQ ID NO: 1252362 - RNA, 19 nt, Artificial Sequence
  Description of Artificial Sequence: Synthetic oligonucleotide
acagguccgugugagugcc

SEQ ID NO: 1252363 - RNA, 19 nt, Artificial Sequence
  Description of Artificial Sequence: Synthetic oligonucleotide
ucauaaaguguuguuggua

SEQ ID NO: 1252364 - RNA, 19 nt, Artificial Sequence
  Description of Artificial Sequence: Synthetic oligonucleotide
ucuggaacgucaguggguc

SEQ ID NO: 1252365 - RNA, 19 nt, Artificial Sequence
  Description of Artificial Sequence: Synthetic oligonucleotide
uccacucauaaaguguugu

SEQ ID NO: 1252366 - RNA, 19 nt, Artificial Sequence
  Description of Artificial Sequence: Synthetic oligonucleotide
uuaaaccucuuuucucaaa

SEQ ID NO: 1252367 - RNA, 19 nt, Artificial Sequence
  Description of Artificial Sequence: Synthetic oligonucleotide
gugaguuggaaccagaauu

SEQ ID NO: 1252368 - RNA, 19 nt, Artificial Sequence
  Description of Artificial Sequence: Synthetic oligonucleotide
uagaaugucagaggcucga

SEQ ID NO: 1252369 - RNA, 19 nt, Artificial Sequence
  Description of Artificial Sequence: Synthetic oligonucleotide
agugaguuggaaccagaau

SEQ ID NO: 1252370 - RNA, 19 nt, Artificial Sequence
  Description of Artificial Sequence: Synthetic oligonucleotide
auaacuuagcuuagaauua

SEQ ID NO: 1252371 - RNA, 19 nt, Artificial Sequence
  Description of Artificial Sequence: Synthetic oligonucleotide
guauaggcagcuggaaaag

SEQ ID NO: 1252372 - RNA, 19 nt, Artificial Sequence
  Description of Artificial Sequence: Synthetic oligonucleotide
ugaaauccacuuccgcaau

SEQ ID NO: 1252373 - RNA, 19 nt, Artificial Sequence
  Description of Artificial Sequence: Synthetic oligonucleotide
gacuaacagggauccgaag

SEQ ID NO: 1252374 - RNA, 19 nt, Artificial Sequence
  Description of Artificial Sequence: Synthetic oligonucleotide
gaaugucagaggcucgauc

SEQ ID NO: 1252375 - RNA, 19 nt, Artificial Sequence
  Description of Artificial Sequence: Synthetic oligonucleotide
acauuuaugggcgggacua

SEQ ID NO: 1252376 - RNA, 19 nt, Artificial Sequence
  Description of Artificial Sequence: Synthetic oligonucleotide
aggaacccauaacuuagcu

SEQ ID NO: 1252377 - RNA, 19 nt, Artificial Sequence
  Description of Artificial Sequence: Synthetic oligonucleotide
gguauaggcagcuggaaaa

SEQ ID NO: 1252378 - RNA, 19 nt, Artificial Sequence
  Description of Artificial Sequence: Synthetic oligonucleotide
ucgacaucugugacccgag

SEQ ID NO: 1252379 - RNA, 19 nt, Artificial Sequence
  Description of Artificial Sequence: Synthetic oligonucleotide
ugcacucuaagggacucug

SEQ ID NO: 1252380 - RNA, 19 nt, Artificial Sequence
  Description of Artificial Sequence: Synthetic oligonucleotide
gauucaaugcaagcugcca

SEQ ID NO: 1252381 - RNA, 19 nt, Artificial Sequence
  Description of Artificial Sequence: Synthetic oligonucleotide
caggcacuuauccaaguuc

SEQ ID NO: 1252382 - RNA, 19 nt, Artificial Sequence
  Description of Artificial Sequence: Synthetic oligonucleotide
gacagguccgugugagugc

SEQ ID NO: 1252383 - RNA, 19 nt, Artificial Sequence
  Description of Artificial Sequence: Synthetic oligonucleotide
gaaggugguuaagacugcc

SEQ ID NO: 1252384 - RNA, 19 nt, Artificial Sequence
  Description of Artificial Sequence: Synthetic oligonucleotide
agauuggcaaauguguuuu

SEQ ID NO: 1252385 - RNA, 19 nt, Artificial Sequence
  Description of Artificial Sequence: Synthetic oligonucleotide
gguaagaauuguuucaggu

SEQ ID NO: 1252386 - RNA, 19 nt, Artificial Sequence
  Description of Artificial Sequence: Synthetic oligonucleotide
uggcuguauccacucauaa

SEQ ID NO: 1252387 - RNA, 19 nt, Artificial Sequence
  Description of Artificial Sequence: Synthetic oligonucleotide
cuuguuccaugccaugauc

SEQ ID NO: 1252388 - RNA, 19 nt, Artificial Sequence
  Description of Artificial Sequence: Synthetic oligonucleotide
aacuuagcuuagaauuacu

SEQ ID NO: 1252389 - RNA, 19 nt, Artificial Sequence
  Description of Artificial Sequence: Synthetic oligonucleotide
auagaaugucagaggcucg

SEQ ID NO: 1252390 - RNA, 19 nt, Artificial Sequence
  Description of Artificial Sequence: Synthetic oligonucleotide
agaaggugguuaagacugc

SEQ ID NO: 1252391 - RNA, 19 nt, Artificial Sequence
  Description of Artificial Sequence: Synthetic oligonucleotide
uuguuucagguaaggccga

SEQ ID NO: 1252392 - RNA, 19 nt, Artificial Sequence
  Description of Artificial Sequence: Synthetic oligonucleotide
cacuuauccaaguucaggu

SEQ ID NO: 1252393 - RNA, 19 nt, Artificial Sequence
  Description of Artificial Sequence: Synthetic oligonucleotide
cugcaaggccuugauaacc

SEQ ID NO: 1252394 - RNA, 19 nt, Artificial Sequence
  Description of Artificial Sequence: Synthetic oligonucleotide
augacaguuugcaaugggu

SEQ ID NO: 1252395 - RNA, 19 nt, Artificial Sequence
  Description of Artificial Sequence: Synthetic oligonucleotide
uuuguagcacggugucaug

SEQ ID NO: 1252396 - RNA, 19 nt, Artificial Sequence
  Description of Artificial Sequence: Synthetic oligonucleotide
gucagugggucucagucga

SEQ ID NO: 1252397 - RNA, 19 nt, Artificial Sequence
  Description of Artificial Sequence: Synthetic oligonucleotide
ugauuaggccgaugaggca

SEQ ID NO: 1252398 - RNA, 19 nt, Artificial Sequence
  Description of Artificial Sequence: Synthetic oligonucleotide
aacccauaacuuagcuuag

SEQ ID NO: 1252399 - RNA, 19 nt, Artificial Sequence
  Description of Artificial Sequence: Synthetic oligonucleotide
gguucaggcacuuauccaa

SEQ ID NO: 1252400 - RNA, 19 nt, Artificial Sequence
  Description of Artificial Sequence: Synthetic oligonucleotide
gaacauuuaugggcgggac

SEQ ID NO: 1252401 - RNA, 19 nt, Artificial Sequence
  Description of Artificial Sequence: Synthetic oligonucleotide
guugucagagccaugaaau

SEQ ID NO: 1252402 - RNA, 19 nt, Artificial Sequence
  Description of Artificial Sequence: Synthetic oligonucleotide
aaaccggggucuuccguaa

SEQ ID NO: 1252403 - RNA, 19 nt, Artificial Sequence
  Description of Artificial Sequence: Synthetic oligonucleotide
auacuuauucagguacaca

SEQ ID NO: 1252404 - RNA, 19 nt, Artificial Sequence
  Description of Artificial Sequence: Synthetic oligonucleotide
cuccaugugauuaggccga

SEQ ID NO: 1252405 - RNA, 19 nt, Artificial Sequence
  Description of Artificial Sequence: Synthetic oligonucleotide
aacgucagugggucucagu

SEQ ID NO: 1252406 - RNA, 19 nt, Artificial Sequence
  Description of Artificial Sequence: Synthetic oligonucleotide
aguaacucuucgauccaug

SEQ ID NO: 1252407 - RNA, 19 nt, Artificial Sequence
  Description of Artificial Sequence: Synthetic oligonucleotide
aaggugguuaagacugcca

SEQ ID NO: 1252408 - RNA, 19 nt, Artificial Sequence
  Description of Artificial Sequence: Synthetic oligonucleotide
aggugcaguaauauuucug

SEQ ID NO: 1252409 - RNA, 19 nt, Artificial Sequence
  Description of Artificial Sequence: Synthetic oligonucleotide
gcacuuauccaaguucagg

SEQ ID NO: 1252410 - RNA, 19 nt, Artificial Sequence
  Description of Artificial Sequence: Synthetic oligonucleotide
gaggaacccauaacuuagc

SEQ ID NO: 1252411 - RNA, 19 nt, Artificial Sequence
  Description of Artificial Sequence: Synthetic oligonucleotide
gccaugaucugagacgagg

SEQ ID NO: 1252412 - RNA, 19 nt, Artificial Sequence
  Description of Artificial Sequence: Synthetic oligonucleotide
guauuucucuggaacguca

SEQ ID NO: 1252413 - RNA, 19 nt, Artificial Sequence
  Description of Artificial Sequence: Synthetic oligonucleotide
ucuuuguagcacgguguca

SEQ ID NO: 1252414 - RNA, 19 nt, Artificial Sequence
  Description of Artificial Sequence: Synthetic oligonucleotide
uugcaaugggugagcacaa

SEQ ID NO: 1252415 - RNA, 19 nt, Artificial Sequence
  Description of Artificial Sequence: Synthetic oligonucleotide
ugcugguuuggcucccggc

SEQ ID NO: 1252416 - RNA, 19 nt, Artificial Sequence
  Description of Artificial Sequence: Synthetic oligonucleotide
uccgaagguccugguauag

SEQ ID NO: 1252417 - RNA, 19 nt, Artificial Sequence
  Description of Artificial Sequence: Synthetic oligonucleotide
cugguacaauccaggaguc

SEQ ID NO: 1252418 - RNA, 19 nt, Artificial Sequence
  Description of Artificial Sequence: Synthetic oligonucleotide
agggauccgaagguccugg

SEQ ID NO: 1252419 - RNA, 19 nt, Artificial Sequence
  Description of Artificial Sequence: Synthetic oligonucleotide
ggggucuuccguaaggugc

SEQ ID NO: 1252420 - RNA, 19 nt, Artificial Sequence
  Description of Artificial Sequence: Synthetic oligonucleotide
gcaaugggugagcacaaug

SEQ ID NO: 1252421 - RNA, 19 nt, Artificial Sequence
  Description of Artificial Sequence: Synthetic oligonucleotide
agcgcuuggguaagaauug

SEQ ID NO: 1252422 - RNA, 19 nt, Artificial Sequence
  Description of Artificial Sequence: Synthetic oligonucleotide
uggaacgucagugggucuc

SEQ ID NO: 1252423 - RNA, 19 nt, Artificial Sequence
  Description of Artificial Sequence: Synthetic oligonucleotide
gauccggggagcucucuuc

SEQ ID NO: 1252424 - RNA, 19 nt, Artificial Sequence
  Description of Artificial Sequence: Synthetic oligonucleotide
gucacaugugcagccgagg

SEQ ID NO: 1252425 - RNA, 19 nt, Artificial Sequence
  Description of Artificial Sequence: Synthetic oligonucleotide
guuugcaaugggugagcac

SEQ ID NO: 1252426 - RNA, 19 nt, Artificial Sequence
  Description of Artificial Sequence: Synthetic oligonucleotide
auccauguagacuccuguu

SEQ ID NO: 1252427 - RNA, 19 nt, Artificial Sequence
  Description of Artificial Sequence: Synthetic oligonucleotide
ucagugggucucagucgag

SEQ ID NO: 1252428 - RNA, 19 nt, Artificial Sequence
  Description of Artificial Sequence: Synthetic oligonucleotide
cuaacagggauccgaaggu

SEQ ID NO: 1252429 - RNA, 19 nt, Artificial Sequence
  Description of Artificial Sequence: Synthetic oligonucleotide
aguuugcaaugggugagca

SEQ ID NO: 1252430 - RNA, 19 nt, Artificial Sequence
  Description of Artificial Sequence: Synthetic oligonucleotide
aaccggggucuuccguaag

SEQ ID NO: 1252431 - RNA, 19 nt, Artificial Sequence
  Description of Artificial Sequence: Synthetic oligonucleotide
acugauucuugucguucau

SEQ ID NO: 1252432 - RNA, 19 nt, Artificial Sequence
  Description of Artificial Sequence: Synthetic oligonucleotide
guauccacucauaaagugu

SEQ ID NO: 1252433 - RNA, 19 nt, Artificial Sequence
  Description of Artificial Sequence: Synthetic oligonucleotide
gauuacggaugacuuugcu

SEQ ID NO: 1252434 - RNA, 19 nt, Artificial Sequence
  Description of Artificial Sequence: Synthetic oligonucleotide
gaguuggaaccagaauuuc

SEQ ID NO: 1252435 - RNA, 19 nt, Artificial Sequence
  Description of Artificial Sequence: Synthetic oligonucleotide
aggccgaaagugcugguuu

SEQ ID NO: 1252436 - RNA, 19 nt, Artificial Sequence
  Description of Artificial Sequence: Synthetic oligonucleotide
augaggcaagaugaaggcu

SEQ ID NO: 1252437 - RNA, 19 nt, Artificial Sequence
  Description of Artificial Sequence: Synthetic oligonucleotide
auuaggccgaugaggcaag

SEQ ID NO: 1252438 - RNA, 19 nt, Artificial Sequence
  Description of Artificial Sequence: Synthetic oligonucleotide
cugcugacagguccgugug

SEQ ID NO: 1252439 - RNA, 19 nt, Artificial Sequence
  Description of Artificial Sequence: Synthetic oligonucleotide
auccggggagcucucuucu

SEQ ID NO: 1252440 - RNA, 19 nt, Artificial Sequence
  Description of Artificial Sequence: Synthetic oligonucleotide
ccauguagacuccuguuuc

SEQ ID NO: 1252441 - RNA, 19 nt, Artificial Sequence
  Description of Artificial Sequence: Synthetic oligonucleotide
caguuugcaaugggugagc

SEQ ID NO: 1252442 - RNA, 19 nt, Artificial Sequence
  Description of Artificial Sequence: Synthetic oligonucleotide
gcuaaagauuggcaaaugu

SEQ ID NO: 1252443 - RNA, 19 nt, Artificial Sequence
  Description of Artificial Sequence: Synthetic oligonucleotide
gcacuauauuagaaguaag

SEQ ID NO: 1252444 - RNA, 19 nt, Artificial Sequence
  Description of Artificial Sequence: Synthetic oligonucleotide
uacccucuacaacuuccau

SEQ ID NO: 1252445 - RNA, 19 nt, Artificial Sequence
  Description of Artificial Sequence: Synthetic oligonucleotide
ucugugacccgagcucugu

SEQ ID NO: 1252446 - RNA, 19 nt, Artificial Sequence
  Description of Artificial Sequence: Synthetic oligonucleotide
auacccucuacaacuucca

SEQ ID NO: 1252447 - RNA, 19 nt, Artificial Sequence
  Description of Artificial Sequence: Synthetic oligonucleotide
gguuaagacugccaugacu

SEQ ID NO: 1252448 - RNA, 19 nt, Artificial Sequence
  Description of Artificial Sequence: Synthetic oligonucleotide
gccaauaaagagagcuugc

SEQ ID NO: 1252449 - RNA, 19 nt, Artificial Sequence
  Description of Artificial Sequence: Synthetic oligonucleotide
cucccggcaagaaagauuu

SEQ ID NO: 1252450 - RNA, 19 nt, Artificial Sequence
  Description of Artificial Sequence: Synthetic oligonucleotide
aacaggucugaaacugauu

SEQ ID NO: 1252451 - RNA, 19 nt, Artificial Sequence
  Description of Artificial Sequence: Synthetic oligonucleotide
agcaaugcuucagaauaua

SEQ ID NO: 1252452 - RNA, 19 nt, Artificial Sequence
  Description of Artificial Sequence: Synthetic oligonucleotide
aaggccgaaagugcugguu

SEQ ID NO: 1252453 - RNA, 19 nt, Artificial Sequence
  Description of Artificial Sequence: Synthetic oligonucleotide
gggacuaacagggauccga

SEQ ID NO: 1252454 - RNA, 19 nt, Artificial Sequence
  Description of Artificial Sequence: Synthetic oligonucleotide
ugguggagcgaggaaccca

SEQ ID NO: 1252455 - RNA, 19 nt, Artificial Sequence
  Description of Artificial Sequence: Synthetic oligonucleotide
gaucugagacgaggaugag

SEQ ID NO: 1252456 - RNA, 19 nt, Artificial Sequence
  Description of Artificial Sequence: Synthetic oligonucleotide
ggauucaaugcaagcugcc

SEQ ID NO: 1252457 - RNA, 19 nt, Artificial Sequence
  Description of Artificial Sequence: Synthetic oligonucleotide
ggccgaugaggcaagauga

SEQ ID NO: 1252458 - RNA, 19 nt, Artificial Sequence
  Description of Artificial Sequence: Synthetic oligonucleotide
agccgagguuacuggauau

SEQ ID NO: 1252459 - RNA, 19 nt, Artificial Sequence
  Description of Artificial Sequence: Synthetic oligonucleotide
ccaugacuuccauuauuag

SEQ ID NO: 1252460 - RNA, 19 nt, Artificial Sequence
  Description of Artificial Sequence: Synthetic oligonucleotide
gcuguucuuuguagcacgg

SEQ ID NO: 1252461 - RNA, 19 nt, Artificial Sequence
  Description of Artificial Sequence: Synthetic oligonucleotide
ccaugccaugaucugagac

SEQ ID NO: 1252462 - RNA, 19 nt, Artificial Sequence
  Description of Artificial Sequence: Synthetic oligonucleotide
ugagugcccugaggaauca

SEQ ID NO: 1252463 - RNA, 19 nt, Artificial Sequence
  Description of Artificial Sequence: Synthetic oligonucleotide
cuuuguagcacggugucau

SEQ ID NO: 1252464 - RNA, 19 nt, Artificial Sequence
  Description of Artificial Sequence: Synthetic oligonucleotide
ugggcgggacuaacaggga

SEQ ID NO: 1252465 - RNA, 19 nt, Artificial Sequence
  Description of Artificial Sequence: Synthetic oligonucleotide
agcgaggaacccauaacuu

SEQ ID NO: 1252466 - RNA, 19 nt, Artificial Sequence
  Description of Artificial Sequence: Synthetic oligonucleotide
guagacuccuguuucccau

SEQ ID NO: 1252467 - RNA, 19 nt, Artificial Sequence
  Description of Artificial Sequence: Synthetic oligonucleotide
cccauaaguacagcucucc

SEQ ID NO: 1252468 - RNA, 19 nt, Artificial Sequence
  Description of Artificial Sequence: Synthetic oligonucleotide
uguuucagguaaggccgaa

SEQ ID NO: 1252469 - RNA, 19 nt, Artificial Sequence
  Description of Artificial Sequence: Synthetic oligonucleotide
gugcugguuuggcucccgg

SEQ ID NO: 1252470 - RNA, 19 nt, Artificial Sequence
  Description of Artificial Sequence: Synthetic oligonucleotide
gugagugcccugaggaauc

SEQ ID NO: 1252471 - RNA, 19 nt, Artificial Sequence
  Description of Artificial Sequence: Synthetic oligonucleotide
auccacucauaaaguguug

SEQ ID NO: 1252472 - RNA, 19 nt, Artificial Sequence
  Description of Artificial Sequence: Synthetic oligonucleotide
acccauaacuuagcuuaga

SEQ ID NO: 1252473 - RNA, 19 nt, Artificial Sequence
  Description of Artificial Sequence: Synthetic oligonucleotide
ggccgaaagugcugguuug

SEQ ID NO: 1252474 - RNA, 19 nt, Artificial Sequence
  Description of Artificial Sequence: Synthetic oligonucleotide
cucugauacauuggcacua

SEQ ID NO: 1252475 - RNA, 19 nt, Artificial Sequence
  Description of Artificial Sequence: Synthetic oligonucleotide
gcgggacuaacagggaucc

SEQ ID NO: 1252476 - RNA, 19 nt, Artificial Sequence
  Description of Artificial Sequence: Synthetic oligonucleotide
ggaacauuuaugggcggga

SEQ ID NO: 1252477 - RNA, 19 nt, Artificial Sequence
  Description of Artificial Sequence: Synthetic oligonucleotide
guucgacaucugugacccg

SEQ ID NO: 1252478 - RNA, 19 nt, Artificial Sequence
  Description of Artificial Sequence: Synthetic oligonucleotide
gaacgucagugggucucag

SEQ ID NO: 1252479 - RNA, 19 nt, Artificial Sequence
  Description of Artificial Sequence: Synthetic oligonucleotide
gguccauagacaacuuuaa

SEQ ID NO: 1252480 - RNA, 19 nt, Artificial Sequence
  Description of Artificial Sequence: Synthetic oligonucleotide
gccgaaagugcugguuugg

SEQ ID NO: 1252481 - RNA, 19 nt, Artificial Sequence
  Description of Artificial Sequence: Synthetic oligonucleotide
cacccacugguacaaucca

SEQ ID NO: 1252482 - RNA, 19 nt, Artificial Sequence
  Description of Artificial Sequence: Synthetic oligonucleotide
ccgagguuacuggauauug

SEQ ID NO: 1252483 - RNA, 19 nt, Artificial Sequence
  Description of Artificial Sequence: Synthetic oligonucleotide
gcgaggaacccauaacuua

SEQ ID NO: 1252484 - RNA, 19 nt, Artificial Sequence
  Description of Artificial Sequence: Synthetic oligonucleotide
acugauccggggagcucuc

SEQ ID NO: 1252485 - RNA, 19 nt, Artificial Sequence
  Description of Artificial Sequence: Synthetic oligonucleotide
uuaggccgaugaggcaaga

SEQ ID NO: 1252486 - RNA, 19 nt, Artificial Sequence
  Description of Artificial Sequence: Synthetic oligonucleotide
ugcaaugggugagcacaau

SEQ ID NO: 1252487 - RNA, 19 nt, Artificial Sequence
  Description of Artificial Sequence: Synthetic oligonucleotide
gacacugauccggggagcu

SEQ ID NO: 1252488 - RNA, 19 nt, Artificial Sequence
  Description of Artificial Sequence: Synthetic oligonucleotide
gugcaagcgcuuggguaag

SEQ ID NO: 1252489 - RNA, 19 nt, Artificial Sequence
  Description of Artificial Sequence: Synthetic oligonucleotide
guccgugugagugcccuga

SEQ ID NO: 1252490 - RNA, 19 nt, Artificial Sequence
  Description of Artificial Sequence: Synthetic oligonucleotide
ccgaugaggcaagaugaag

SEQ ID NO: 1252491 - RNA, 19 nt, Artificial Sequence
  Description of Artificial Sequence: Synthetic oligonucleotide
agacugccaugacuuccau

SEQ ID NO: 1252492 - RNA, 19 nt, Artificial Sequence
  Description of Artificial Sequence: Synthetic oligonucleotide
uucuuacagcugccuuguu

SEQ ID NO: 1252493 - RNA, 19 nt, Artificial Sequence
  Description of Artificial Sequence: Synthetic oligonucleotide
ugcaagcgcuuggguaaga

SEQ ID NO: 1252494 - RNA, 19 nt, Artificial Sequence
  Description of Artificial Sequence: Synthetic oligonucleotide
ggucaaccuucugcaaggc

SEQ ID NO: 1252495 - RNA, 19 nt, Artificial Sequence
  Description of Artificial Sequence: Synthetic oligonucleotide
cuuccguaaggugcaguaa

SEQ ID NO: 1252496 - RNA, 19 nt, Artificial Sequence
  Description of Artificial Sequence: Synthetic oligonucleotide
guuugaaggcagguccaua

SEQ ID NO: 1252497 - RNA, 19 nt, Artificial Sequence
  Description of Artificial Sequence: Synthetic oligonucleotide
ggcgggacuaacagggauc

SEQ ID NO: 1252498 - RNA, 19 nt, Artificial Sequence
  Description of Artificial Sequence: Synthetic oligonucleotide
ccgcaauacuuccuuucug

SEQ ID NO: 1252499 - RNA, 19 nt, Artificial Sequence
  Description of Artificial Sequence: Synthetic oligonucleotide
guagcacggugucauggau

SEQ ID NO: 1252500 - RNA, 19 nt, Artificial Sequence
  Description of Artificial Sequence: Synthetic oligonucleotide
ccgaaagugcugguuuggc

SEQ ID NO: 1252501 - RNA, 19 nt, Artificial Sequence
  Description of Artificial Sequence: Synthetic oligonucleotide
cagggauccgaagguccug

SEQ ID NO: 1252502 - RNA, 19 nt, Artificial Sequence
  Description of Artificial Sequence: Synthetic oligonucleotide
ggacuaacagggauccgaa

SEQ ID NO: 1252503 - RNA, 19 nt, Artificial Sequence
  Description of Artificial Sequence: Synthetic oligonucleotide
uccaugugauuaggccgau

SEQ ID NO: 1252504 - RNA, 19 nt, Artificial Sequence
  Description of Artificial Sequence: Synthetic oligonucleotide
cagccgagguuacuggaua

SEQ ID NO: 1252505 - RNA, 19 nt, Artificial Sequence
  Description of Artificial Sequence: Synthetic oligonucleotide
ccgaagguccugguauagg

SEQ ID NO: 1252506 - RNA, 19 nt, Artificial Sequence
  Description of Artificial Sequence: Synthetic oligonucleotide
uccggggagcucucuucuu

SEQ ID NO: 1252507 - RNA, 19 nt, Artificial Sequence
  Description of Artificial Sequence: Synthetic oligonucleotide
cacugauccggggagcucu

SEQ ID NO: 1252508 - RNA, 19 nt, Artificial Sequence
  Description of Artificial Sequence: Synthetic oligonucleotide
ccauaacuuagcuuagaau

SEQ ID NO: 1252509 - RNA, 19 nt, Artificial Sequence
  Description of Artificial Sequence: Synthetic oligonucleotide
ccgugugagugcccugagg

SEQ ID NO: 1252510 - RNA, 19 nt, Artificial Sequence
  Description of Artificial Sequence: Synthetic oligonucleotide
caagcgcuuggguaagaau

SEQ ID NO: 1252511 - RNA, 19 nt, Artificial Sequence
  Description of Artificial Sequence: Synthetic oligonucleotide
gguagaagcugaguccagu

SEQ ID NO: 1252512 - RNA, 19 nt, Artificial Sequence
  Description of Artificial Sequence: Synthetic oligonucleotide
gucguucaugguagaagcu

SEQ ID NO: 1252513 - RNA, 19 nt, Artificial Sequence
  Description of Artificial Sequence: Synthetic oligonucleotide
gcuuggguaagaauuguuu

SEQ ID NO: 1252514 - RNA, 19 nt, Artificial Sequence
  Description of Artificial Sequence: Synthetic oligonucleotide
cugauacauuggcacuaua

SEQ ID NO: 1252515 - RNA, 19 nt, Artificial Sequence
  Description of Artificial Sequence: Synthetic oligonucleotide
cgccauguuugaaggcagg

SEQ ID NO: 1252516 - RNA, 19 nt, Artificial Sequence
  Description of Artificial Sequence: Synthetic oligonucleotide
cgagguuacuggauauuga

SEQ ID NO: 1252517 - RNA, 19 nt, Artificial Sequence
  Description of Artificial Sequence: Synthetic oligonucleotide
gggacucugagaugacagu

SEQ ID NO: 1252518 - RNA, 19 nt, Artificial Sequence
  Description of Artificial Sequence: Synthetic oligonucleotide
ucccggcaagaaagauuuu

SEQ ID NO: 1252519 - RNA, 19 nt, Artificial Sequence
  Description of Artificial Sequence: Synthetic oligonucleotide
ggaacgucagugggucuca

SEQ ID NO: 1252520 - RNA, 19 nt, Artificial Sequence
  Description of Artificial Sequence: Synthetic oligonucleotide
ccaaccauucggucaaccu

SEQ ID NO: 1252521 - RNA, 19 nt, Artificial Sequence
  Description of Artificial Sequence: Synthetic oligonucleotide
cugccacugaggguccaga

SEQ ID NO: 1252522 - RNA, 19 nt, Artificial Sequence
  Description of Artificial Sequence: Synthetic oligonucleotide
cacaugugcagccgagguu

SEQ ID NO: 1252523 - RNA, 19 nt, Artificial Sequence
  Description of Artificial Sequence: Synthetic oligonucleotide
gguggagcgaggaacccau

SEQ ID NO: 1252524 - RNA, 19 nt, Artificial Sequence
  Description of Artificial Sequence: Synthetic oligonucleotide
gcaagcgcuuggguaagaa

SEQ ID NO: 1252525 - RNA, 19 nt, Artificial Sequence
  Description of Artificial Sequence: Synthetic oligonucleotide
gcacucuaagggacucuga

SEQ ID NO: 1252526 - RNA, 19 nt, Artificial Sequence
  Description of Artificial Sequence: Synthetic oligonucleotide
gccgaugaggcaagaugaa

SEQ ID NO: 1252527 - RNA, 19 nt, Artificial Sequence
  Description of Artificial Sequence: Synthetic oligonucleotide
cuggaacgucagugggucu

SEQ ID NO: 1252528 - RNA, 19 nt, Artificial Sequence
  Description of Artificial Sequence: Synthetic oligonucleotide
gggucucagucgagcagca

SEQ ID NO: 1252529 - RNA, 19 nt, Artificial Sequence
  Description of Artificial Sequence: Synthetic oligonucleotide
cgaaagugcugguuuggcu

SEQ ID NO: 1252530 - RNA, 19 nt, Artificial Sequence
  Description of Artificial Sequence: Synthetic oligonucleotide
gcucccggcaagaaagauu

SEQ ID NO: 1252531 - RNA, 19 nt, Artificial Sequence
  Description of Artificial Sequence: Synthetic oligonucleotide
ccuuucugauggauucaau

SEQ ID NO: 1252532 - RNA, 19 nt, Artificial Sequence
  Description of Artificial Sequence: Synthetic oligonucleotide
ggucagaauuaaaccucuu

SEQ ID NO: 1252533 - RNA, 19 nt, Artificial Sequence
  Description of Artificial Sequence: Synthetic oligonucleotide
gcgcuuggguaagaauugu

SEQ ID NO: 1252534 - RNA, 19 nt, Artificial Sequence
  Description of Artificial Sequence: Synthetic oligonucleotide
cgggacuaacagggauccg

SEQ ID NO: 1252535 - RNA, 19 nt, Artificial Sequence
  Description of Artificial Sequence: Synthetic oligonucleotide
ggcucccggcaagaaagau

SEQ ID NO: 1252536 - RNA, 19 nt, Artificial Sequence
  Description of Artificial Sequence: Synthetic oligonucleotide
gccgagguuacuggauauu

SEQ ID NO: 1252537 - RNA, 19 nt, Artificial Sequence
  Description of Artificial Sequence: Synthetic oligonucleotide
ccucuacaacuuccauggu

SEQ ID NO: 1252538 - RNA, 19 nt, Artificial Sequence
  Description of Artificial Sequence: Synthetic oligonucleotide
cgcuuggguaagaauuguu

SEQ ID NO: 1252539 - RNA, 19 nt, Artificial Sequence
  Description of Artificial Sequence: Synthetic oligonucleotide
agagauugggcacagaccc

SEQ ID NO: 1252540 - RNA, 19 nt, Artificial Sequence
  Description of Artificial Sequence: Synthetic oligonucleotide
aaaacauacuucuuguaca

SEQ ID NO: 1252541 - RNA, 19 nt, Artificial Sequence
  Description of Artificial Sequence: Synthetic oligonucleotide
uguuaaagaggucagacau

SEQ ID NO: 1252542 - RNA, 19 nt, Artificial Sequence
  Description of Artificial Sequence: Synthetic oligonucleotide
uauacaugaggucaucugc

SEQ ID NO: 1252543 - RNA, 19 nt, Artificial Sequence
  Description of Artificial Sequence: Synthetic oligonucleotide
uacugcgccagccagaggg

SEQ ID NO: 1252544 - RNA, 19 nt, Artificial Sequence
  Description of Artificial Sequence: Synthetic oligonucleotide
auagaaguaguucucuggg

SEQ ID NO: 1252545 - RNA, 19 nt, Artificial Sequence
  Description of Artificial Sequence: Synthetic oligonucleotide
gaaaacauacuucuuguac

SEQ ID NO: 1252546 - RNA, 19 nt, Artificial Sequence
  Description of Artificial Sequence: Synthetic oligonucleotide
aggaaaguauuucagcuuc

SEQ ID NO: 1252547 - RNA, 19 nt, Artificial Sequence
  Description of Artificial Sequence: Synthetic oligonucleotide
gauggagccauauucuugc

SEQ ID NO: 1252548 - RNA, 19 nt, Artificial Sequence
  Description of Artificial Sequence: Synthetic oligonucleotide
ugcagauuagggucgaggg

SEQ ID NO: 1252549 - RNA, 19 nt, Artificial Sequence
  Description of Artificial Sequence: Synthetic oligonucleotide
uuaaagaggucagacauca

SEQ ID NO: 1252550 - RNA, 19 nt, Artificial Sequence
  Description of Artificial Sequence: Synthetic oligonucleotide
ugcaguugccacuucaggg

SEQ ID NO: 1252551 - RNA, 19 nt, Artificial Sequence
  Description of Artificial Sequence: Synthetic oligonucleotide
cauagaaguaguucucugg

SEQ ID NO: 1252552 - RNA, 19 nt, Artificial Sequence
  Description of Artificial Sequence: Synthetic oligonucleotide
ucggcauuauacaugaggu

SEQ ID NO: 1252553 - RNA, 19 nt, Artificial Sequence
  Description of Artificial Sequence: Synthetic oligonucleotide
gaagagauugggcacagac

SEQ ID NO: 1252554 - RNA, 19 nt, Artificial Sequence
  Description of Artificial Sequence: Synthetic oligonucleotide
aggggcaucaaacaacuuc

SEQ ID NO: 1252555 - RNA, 19 nt, Artificial Sequence
  Description of Artificial Sequence: Synthetic oligonucleotide
acaggaaaguauuucagcu

SEQ ID NO: 1252556 - RNA, 19 nt, Artificial Sequence
  Description of Artificial Sequence: Synthetic oligonucleotide
aagagauugggcacagacc

SEQ ID NO: 1252557 - RNA, 19 nt, Artificial Sequence
  Description of Artificial Sequence: Synthetic oligonucleotide
aagucggcauuauacauga

SEQ ID NO: 1252558 - RNA, 19 nt, Artificial Sequence
  Description of Artificial Sequence: Synthetic oligonucleotide
gucggcauuauacaugagg

SEQ ID NO: 1252559 - RNA, 19 nt, Artificial Sequence
  Description of Artificial Sequence: Synthetic oligonucleotide
cuugcagacgcucaggcgc

SEQ ID NO: 1252560 - RNA, 19 nt, Artificial Sequence
  Description of Artificial Sequence: Synthetic oligonucleotide
uuauacaugaggucaucug

SEQ ID NO: 1252561 - RNA, 19 nt, Artificial Sequence
  Description of Artificial Sequence: Synthetic oligonucleotide
gauguugcugggaagaccc

SEQ ID NO: 1252562 - RNA, 19 nt, Artificial Sequence
  Description of Artificial Sequence: Synthetic oligonucleotide
ugcugaaugugggagaggg

SEQ ID NO: 1252563 - RNA, 19 nt, Artificial Sequence
  Description of Artificial Sequence: Synthetic oligonucleotide
ucuaucuucgccugggcca

SEQ ID NO: 1252564 - RNA, 19 nt, Artificial Sequence
  Description of Artificial Sequence: Synthetic oligonucleotide
uuguacagauuuucugugg

SEQ ID NO: 1252565 - RNA, 19 nt, Artificial Sequence
  Description of Artificial Sequence: Synthetic oligonucleotide
cucacuagugccagaaccg

SEQ ID NO: 1252566 - RNA, 19 nt, Artificial Sequence
  Description of Artificial Sequence: Synthetic oligonucleotide
agaggucagacaucaaguc

SEQ ID NO: 1252567 - RNA, 19 nt, Artificial Sequence
  Description of Artificial Sequence: Synthetic oligonucleotide
uucuuguacagauuuucug

SEQ ID NO: 1252568 - RNA, 19 nt, Artificial Sequence
  Description of Artificial Sequence: Synthetic oligonucleotide
ugcucucucuugcugauag

SEQ ID NO: 1252569 - RNA, 19 nt, Artificial Sequence
  Description of Artificial Sequence: Synthetic oligonucleotide
uauucuugcagacgcucag

SEQ ID NO: 1252570 - RNA, 19 nt, Artificial Sequence
  Description of Artificial Sequence: Synthetic oligonucleotide
accccuaacacuuguauca

SEQ ID NO: 1252571 - RNA, 19 nt, Artificial Sequence
  Description of Artificial Sequence: Synthetic oligonucleotide
uccggagaugcucuguagg

SEQ ID NO: 1252572 - RNA, 19 nt, Artificial Sequence
  Description of Artificial Sequence: Synthetic oligonucleotide
ugcgaugccaggcaaguca

SEQ ID NO: 1252573 - RNA, 19 nt, Artificial Sequence
  Description of Artificial Sequence: Synthetic oligonucleotide
cuuguuaaagaggucagac

SEQ ID NO: 1252574 - RNA, 19 nt, Artificial Sequence
  Description of Artificial Sequence: Synthetic oligonucleotide
ugacccaccaagcagugcu

SEQ ID NO: 1252575 - RNA, 19 nt, Artificial Sequence
  Description of Artificial Sequence: Synthetic oligonucleotide
augacaagcuuguuaaaga

SEQ ID NO: 1252576 - RNA, 19 nt, Artificial Sequence
  Description of Artificial Sequence: Synthetic oligonucleotide
uugcugauagacagagggg

SEQ ID NO: 1252577 - RNA, 19 nt, Artificial Sequence
  Description of Artificial Sequence: Synthetic oligonucleotide
uuccagagauuccuuugcg

SEQ ID NO: 1252578 - RNA, 19 nt, Artificial Sequence
  Description of Artificial Sequence: Synthetic oligonucleotide
gaggucagacaucaagucc

SEQ ID NO: 1252579 - RNA, 19 nt, Artificial Sequence
  Description of Artificial Sequence: Synthetic oligonucleotide
gauggagucugacauccgc

SEQ ID NO: 1252580 - RNA, 19 nt, Artificial Sequence
  Description of Artificial Sequence: Synthetic oligonucleotide
accgacucagcucuacucg

SEQ ID NO: 1252581 - RNA, 19 nt, Artificial Sequence
  Description of Artificial Sequence: Synthetic oligonucleotide
uuuguuacugcgccagcca

SEQ ID NO: 1252582 - RNA, 19 nt, Artificial Sequence
  Description of Artificial Sequence: Synthetic oligonucleotide
caccaguaaagauggagcc

SEQ ID NO: 1252583 - RNA, 19 nt, Artificial Sequence
  Description of Artificial Sequence: Synthetic oligonucleotide
auacuucuuguacagauuu

SEQ ID NO: 1252584 - RNA, 19 nt, Artificial Sequence
  Description of Artificial Sequence: Synthetic oligonucleotide
uucgccugggccaaggaga

SEQ ID NO: 1252585 - RNA, 19 nt, Artificial Sequence
  Description of Artificial Sequence: Synthetic oligonucleotide
guaaggcugacccaccaag

SEQ ID NO: 1252586 - RNA, 19 nt, Artificial Sequence
  Description of Artificial Sequence: Synthetic oligonucleotide
auaaggggcacuguguaag

SEQ ID NO: 1252587 - RNA, 19 nt, Artificial Sequence
  Description of Artificial Sequence: Synthetic oligonucleotide
uucuugcagacgcucaggc

SEQ ID NO: 1252588 - RNA, 19 nt, Artificial Sequence
  Description of Artificial Sequence: Synthetic oligonucleotide
cucaugacaagcuuguuaa

SEQ ID NO: 1252589 - RNA, 19 nt, Artificial Sequence
  Description of Artificial Sequence: Synthetic oligonucleotide
uuuuguuacugcgccagcc

SEQ ID NO: 1252590 - RNA, 19 nt, Artificial Sequence
  Description of Artificial Sequence: Synthetic oligonucleotide
auacaugaggucaucugcg

SEQ ID NO: 1252591 - RNA, 19 nt, Artificial Sequence
  Description of Artificial Sequence: Synthetic oligonucleotide
cuuggcacuagagaagacc

SEQ ID NO: 1252592 - RNA, 19 nt, Artificial Sequence
  Description of Artificial Sequence: Synthetic oligonucleotide
uccuuugcgccucaugaca

SEQ ID NO: 1252593 - RNA, 19 nt, Artificial Sequence
  Description of Artificial Sequence: Synthetic oligonucleotide
uuguuacugcgccagccag

SEQ ID NO: 1252594 - RNA, 19 nt, Artificial Sequence
  Description of Artificial Sequence: Synthetic oligonucleotide
cuuaggagcuccuuggaca

SEQ ID NO: 1252595 - RNA, 19 nt, Artificial Sequence
  Description of Artificial Sequence: Synthetic oligonucleotide
ucaggcgccggguacuugg

SEQ ID NO: 1252596 - RNA, 19 nt, Artificial Sequence
  Description of Artificial Sequence: Synthetic oligonucleotide
ucuugcagacgcucaggcg

SEQ ID NO: 1252597 - RNA, 19 nt, Artificial Sequence
  Description of Artificial Sequence: Synthetic oligonucleotide
acauagaaguaguucucug

SEQ ID NO: 1252598 - RNA, 19 nt, Artificial Sequence
  Description of Artificial Sequence: Synthetic oligonucleotide
uguaccggggucuucucug

SEQ ID NO: 1252599 - RNA, 19 nt, Artificial Sequence
  Description of Artificial Sequence: Synthetic oligonucleotide
acuccaugaagagauuggg

SEQ ID NO: 1252600 - RNA, 19 nt, Artificial Sequence
  Description of Artificial Sequence: Synthetic oligonucleotide
caagucggcauuauacaug

SEQ ID NO: 1252601 - RNA, 19 nt, Artificial Sequence
  Description of Artificial Sequence: Synthetic oligonucleotide
cuggaauggcaccaggagc

SEQ ID NO: 1252602 - RNA, 19 nt, Artificial Sequence
  Description of Artificial Sequence: Synthetic oligonucleotide
uggauaaggggcacugugu

SEQ ID NO: 1252603 - RNA, 19 nt, Artificial Sequence
  Description of Artificial Sequence: Synthetic oligonucleotide
gggcacgucaaucucaggg

SEQ ID NO: 1252604 - RNA, 19 nt, Artificial Sequence
  Description of Artificial Sequence: Synthetic oligonucleotide
aaggggcacuguguaaggc

SEQ ID NO: 1252605 - RNA, 19 nt, Artificial Sequence
  Description of Artificial Sequence: Synthetic oligonucleotide
ucacuagugccagaaccgg

SEQ ID NO: 1252606 - RNA, 19 nt, Artificial Sequence
  Description of Artificial Sequence: Synthetic oligonucleotide
uagagaagaccuugauggc

SEQ ID NO: 1252607 - RNA, 19 nt, Artificial Sequence
  Description of Artificial Sequence: Synthetic oligonucleotide
ccugaaaggccucagcugg

SEQ ID NO: 1252608 - RNA, 19 nt, Artificial Sequence
  Description of Artificial Sequence: Synthetic oligonucleotide
uaggagggcacgucaaucu

SEQ ID NO: 1252609 - RNA, 19 nt, Artificial Sequence
  Description of Artificial Sequence: Synthetic oligonucleotide
ugaagaugucuccggagau

SEQ ID NO: 1252610 - RNA, 19 nt, Artificial Sequence
  Description of Artificial Sequence: Synthetic oligonucleotide
gagcuccuuggacagaggc

SEQ ID NO: 1252611 - RNA, 19 nt, Artificial Sequence
  Description of Artificial Sequence: Synthetic oligonucleotide
ggcauuauacaugagguca

SEQ ID NO: 1252612 - RNA, 19 nt, Artificial Sequence
  Description of Artificial Sequence: Synthetic oligonucleotide
gacagaggggcaucaaaca

SEQ ID NO: 1252613 - RNA, 19 nt, Artificial Sequence
  Description of Artificial Sequence: Synthetic oligonucleotide
ugggcacagaccccuaaca

SEQ ID NO: 1252614 - RNA, 19 nt, Artificial Sequence
  Description of Artificial Sequence: Synthetic oligonucleotide
aucaaacaacuucuccucu

SEQ ID NO: 1252615 - RNA, 19 nt, Artificial Sequence
  Description of Artificial Sequence: Synthetic oligonucleotide
cagaggggcaucaaacaac

SEQ ID NO: 1252616 - RNA, 19 nt, Artificial Sequence
  Description of Artificial Sequence: Synthetic oligonucleotide
auuuucugugguguugaag

SEQ ID NO: 1252617 - RNA, 19 nt, Artificial Sequence
  Description of Artificial Sequence: Synthetic oligonucleotide
agagauuccuuugcgccuc

SEQ ID NO: 1252618 - RNA, 19 nt, Artificial Sequence
  Description of Artificial Sequence: Synthetic oligonucleotide
ucgucauccucgucgcccg

SEQ ID NO: 1252619 - RNA, 19 nt, Artificial Sequence
  Description of Artificial Sequence: Synthetic oligonucleotide
caaccaccuccuuaggagc

SEQ ID NO: 1252620 - RNA, 19 nt, Artificial Sequence
  Description of Artificial Sequence: Synthetic oligonucleotide
aggcggcucgcacaguccc

SEQ ID NO: 1252621 - RNA, 19 nt, Artificial Sequence
  Description of Artificial Sequence: Synthetic oligonucleotide
acagaggggcaucaaacaa

SEQ ID NO: 1252622 - RNA, 19 nt, Artificial Sequence
  Description of Artificial Sequence: Synthetic oligonucleotide
accccucucccuaagggcc

SEQ ID NO: 1252623 - RNA, 19 nt, Artificial Sequence
  Description of Artificial Sequence: Synthetic oligonucleotide
cucuggacccuguaccggg

SEQ ID NO: 1252624 - RNA, 19 nt, Artificial Sequence
  Description of Artificial Sequence: Synthetic oligonucleotide
gauuccuuugcgccucaug

SEQ ID NO: 1252625 - RNA, 19 nt, Artificial Sequence
  Description of Artificial Sequence: Synthetic oligonucleotide
agaaccggguccuuuucca

SEQ ID NO: 1252626 - RNA, 19 nt, Artificial Sequence
  Description of Artificial Sequence: Synthetic oligonucleotide
guuacugcgccagccagag

SEQ ID NO: 1252627 - RNA, 19 nt, Artificial Sequence
  Description of Artificial Sequence: Synthetic oligonucleotide
uggcaaccuggccaggugc

SEQ ID NO: 1252628 - RNA, 19 nt, Artificial Sequence
  Description of Artificial Sequence: Synthetic oligonucleotide
ggucagagcacacucagga

SEQ ID NO: 1252629 - RNA, 19 nt, Artificial Sequence
  Description of Artificial Sequence: Synthetic oligonucleotide
ugauguugcugggaagacc

SEQ ID NO: 1252630 - RNA, 19 nt, Artificial Sequence
  Description of Artificial Sequence: Synthetic oligonucleotide
aaguaguucucuggggccu

SEQ ID NO: 1252631 - RNA, 19 nt, Artificial Sequence
  Description of Artificial Sequence: Synthetic oligonucleotide
gaagaugucuccggagaug

SEQ ID NO: 1252632 - RNA, 19 nt, Artificial Sequence
  Description of Artificial Sequence: Synthetic oligonucleotide
guacagauuuucuguggug

SEQ ID NO: 1252633 - RNA, 19 nt, Artificial Sequence
  Description of Artificial Sequence: Synthetic oligonucleotide
ucuggacccuguaccgggg

SEQ ID NO: 1252634 - RNA, 19 nt, Artificial Sequence
  Description of Artificial Sequence: Synthetic oligonucleotide
aaggagaccccucucccua

SEQ ID NO: 1252635 - RNA, 19 nt, Artificial Sequence
  Description of Artificial Sequence: Synthetic oligonucleotide
uuugcgccucaugacaagc

SEQ ID NO: 1252636 - RNA, 19 nt, Artificial Sequence
  Description of Artificial Sequence: Synthetic oligonucleotide
ucauccucaggcuccgacu

SEQ ID NO: 1252637 - RNA, 19 nt, Artificial Sequence
  Description of Artificial Sequence: Synthetic oligonucleotide
ugggccacgccgcugcucc

SEQ ID NO: 1252638 - RNA, 19 nt, Artificial Sequence
  Description of Artificial Sequence: Synthetic oligonucleotide
cauauucuugcagacgcuc

SEQ ID NO: 1252639 - RNA, 19 nt, Artificial Sequence
  Description of Artificial Sequence: Synthetic oligonucleotide
gagucugacauccgcguga

SEQ ID NO: 1252640 - RNA, 19 nt, Artificial Sequence
  Description of Artificial Sequence: Synthetic oligonucleotide
cagauuagggucgagggca

SEQ ID NO: 1252641 - RNA, 19 nt, Artificial Sequence
  Description of Artificial Sequence: Synthetic oligonucleotide
cuguguaaggcugacccac

SEQ ID NO: 1252642 - RNA, 19 nt, Artificial Sequence
  Description of Artificial Sequence: Synthetic oligonucleotide
ugugcccagcaucgugugg

SEQ ID NO: 1252643 - RNA, 19 nt, Artificial Sequence
  Description of Artificial Sequence: Synthetic oligonucleotide
cugcugaagaugucuccgg

SEQ ID NO: 1252644 - RNA, 19 nt, Artificial Sequence
  Description of Artificial Sequence: Synthetic oligonucleotide
ggagccauauucuugcaga

SEQ ID NO: 1252645 - RNA, 19 nt, Artificial Sequence
  Description of Artificial Sequence: Synthetic oligonucleotide
uccggcuggauaaggggca

SEQ ID NO: 1252646 - RNA, 19 nt, Artificial Sequence
  Description of Artificial Sequence: Synthetic oligonucleotide
guacuuggcacuagagaag

SEQ ID NO: 1252647 - RNA, 19 nt, Artificial Sequence
  Description of Artificial Sequence: Synthetic oligonucleotide
gaccccucucccuaagggc

SEQ ID NO: 1252648 - RNA, 19 nt, Artificial Sequence
  Description of Artificial Sequence: Synthetic oligonucleotide
gauugccuccucucgucgc

SEQ ID NO: 1252649 - RNA, 19 nt, Artificial Sequence
  Description of Artificial Sequence: Synthetic oligonucleotide
gguuguggggcacugacca

SEQ ID NO: 1252650 - RNA, 19 nt, Artificial Sequence
  Description of Artificial Sequence: Synthetic oligonucleotide
cacuagugccagaaccggg

SEQ ID NO: 1252651 - RNA, 19 nt, Artificial Sequence
  Description of Artificial Sequence: Synthetic oligonucleotide
gaugucuccggagaugcuc

SEQ ID NO: 1252652 - RNA, 19 nt, Artificial Sequence
  Description of Artificial Sequence: Synthetic oligonucleotide
agccauauucuugcagacg

SEQ ID NO: 1252653 - RNA, 19 nt, Artificial Sequence
  Description of Artificial Sequence: Synthetic oligonucleotide
agaccccuaacacuuguau

SEQ ID NO: 1252654 - RNA, 19 nt, Artificial Sequence
  Description of Artificial Sequence: Synthetic oligonucleotide
auggagucugacauccgcg

SEQ ID NO: 1252655 - RNA, 19 nt, Artificial Sequence
  Description of Artificial Sequence: Synthetic oligonucleotide
cuccucucgucgcaggucc

SEQ ID NO: 1252656 - RNA, 19 nt, Artificial Sequence
  Description of Artificial Sequence: Synthetic oligonucleotide
gaugccaggcaagucagga

SEQ ID NO: 1252657 - RNA, 19 nt, Artificial Sequence
  Description of Artificial Sequence: Synthetic oligonucleotide
uguaaggcugacccaccaa

SEQ ID NO: 1252658 - RNA, 19 nt, Artificial Sequence
  Description of Artificial Sequence: Synthetic oligonucleotide
aacauacuucuuguacaga

SEQ ID NO: 1252659 - RNA, 19 nt, Artificial Sequence
  Description of Artificial Sequence: Synthetic oligonucleotide
uugcagacgcucaggcgcc

SEQ ID NO: 1252660 - RNA, 19 nt, Artificial Sequence
  Description of Artificial Sequence: Synthetic oligonucleotide
agaggggcaucaaacaacu

SEQ ID NO: 1252661 - RNA, 19 nt, Artificial Sequence
  Description of Artificial Sequence: Synthetic oligonucleotide
uuccuuugcgccucaugac

SEQ ID NO: 1252662 - RNA, 19 nt, Artificial Sequence
  Description of Artificial Sequence: Synthetic oligonucleotide
agccagaggguccaggaaa

SEQ ID NO: 1252663 - RNA, 19 nt, Artificial Sequence
  Description of Artificial Sequence: Synthetic oligonucleotide
uccuuaggagcuccuugga

SEQ ID NO: 1252664 - RNA, 19 nt, Artificial Sequence
  Description of Artificial Sequence: Synthetic oligonucleotide
aggggcacuguguaaggcu

SEQ ID NO: 1252665 - RNA, 19 nt, Artificial Sequence
  Description of Artificial Sequence: Synthetic oligonucleotide
uccgcgugaaggcucccgc

SEQ ID NO: 1252666 - RNA, 19 nt, Artificial Sequence
  Description of Artificial Sequence: Synthetic oligonucleotide
agauugggcacagaccccu

SEQ ID NO: 1252667 - RNA, 19 nt, Artificial Sequence
  Description of Artificial Sequence: Synthetic oligonucleotide
cagcuugcgcuccuugacg

SEQ ID NO: 1252668 - RNA, 19 nt, Artificial Sequence
  Description of Artificial Sequence: Synthetic oligonucleotide
caggucuggcacauagaag

SEQ ID NO: 1252669 - RNA, 19 nt, Artificial Sequence
  Description of Artificial Sequence: Synthetic oligonucleotide
agcucuacucgcugggaga

SEQ ID NO: 1252670 - RNA, 19 nt, Artificial Sequence
  Description of Artificial Sequence: Synthetic oligonucleotide
acuagugccagaaccgggu

SEQ ID NO: 1252671 - RNA, 19 nt, Artificial Sequence
  Description of Artificial Sequence: Synthetic oligonucleotide
gagggcacgucaaucucag

SEQ ID NO: 1252672 - RNA, 19 nt, Artificial Sequence
  Description of Artificial Sequence: Synthetic oligonucleotide
acuucagggaacacuggug

SEQ ID NO: 1252673 - RNA, 19 nt, Artificial Sequence
  Description of Artificial Sequence: Synthetic oligonucleotide
gauaaggggcacuguguaa

SEQ ID NO: 1252674 - RNA, 19 nt, Artificial Sequence
  Description of Artificial Sequence: Synthetic oligonucleotide
ggcgucugccacuugcugg

SEQ ID NO: 1252675 - RNA, 19 nt, Artificial Sequence
  Description of Artificial Sequence: Synthetic oligonucleotide
agcugauguugcugggaag

SEQ ID NO: 1252676 - RNA, 19 nt, Artificial Sequence
  Description of Artificial Sequence: Synthetic oligonucleotide
acauccgcgugaaggcucc

SEQ ID NO: 1252677 - RNA, 19 nt, Artificial Sequence
  Description of Artificial Sequence: Synthetic oligonucleotide
uggauugccuccucucguc

SEQ ID NO: 1252678 - RNA, 19 nt, Artificial Sequence
  Description of Artificial Sequence: Synthetic oligonucleotide
gcaccaguaaagauggagc

SEQ ID NO: 1252679 - RNA, 19 nt, Artificial Sequence
  Description of Artificial Sequence: Synthetic oligonucleotide
cagaagcgcuccauccucc

SEQ ID NO: 1252680 - RNA, 19 nt, Artificial Sequence
  Description of Artificial Sequence: Synthetic oligonucleotide
gucaucugcgaugccaggc

SEQ ID NO: 1252681 - RNA, 19 nt, Artificial Sequence
  Description of Artificial Sequence: Synthetic oligonucleotide
uugcgccucaugacaagcu

SEQ ID NO: 1252682 - RNA, 19 nt, Artificial Sequence
  Description of Artificial Sequence: Synthetic oligonucleotide
cuuugcgccucaugacaag

SEQ ID NO: 1252683 - RNA, 19 nt, Artificial Sequence
  Description of Artificial Sequence: Synthetic oligonucleotide
cugaaaggccucagcuggc

SEQ ID NO: 1252684 - RNA, 19 nt, Artificial Sequence
  Description of Artificial Sequence: Synthetic oligonucleotide
acagauuuucugugguguu

SEQ ID NO: 1252685 - RNA, 19 nt, Artificial Sequence
  Description of Artificial Sequence: Synthetic oligonucleotide
gaaggugggcaguucugga

SEQ ID NO: 1252686 - RNA, 19 nt, Artificial Sequence
  Description of Artificial Sequence: Synthetic oligonucleotide
agugccagaaccggguccu

SEQ ID NO: 1252687 - RNA, 19 nt, Artificial Sequence
  Description of Artificial Sequence: Synthetic oligonucleotide
acucgcugggagauccugc

SEQ ID NO: 1252688 - RNA, 19 nt, Artificial Sequence
  Description of Artificial Sequence: Synthetic oligonucleotide
ucgucgcagguccggcugg

SEQ ID NO: 1252689 - RNA, 19 nt, Artificial Sequence
  Description of Artificial Sequence: Synthetic oligonucleotide
cacuggaggggucaaccac

SEQ ID NO: 1252690 - RNA, 19 nt, Artificial Sequence
  Description of Artificial Sequence: Synthetic oligonucleotide
aguucuggaauggcaccag

SEQ ID NO: 1252691 - RNA, 19 nt, Artificial Sequence
  Description of Artificial Sequence: Synthetic oligonucleotide
uccuugacgcugcgcagcu

SEQ ID NO: 1252692 - RNA, 19 nt, Artificial Sequence
  Description of Artificial Sequence: Synthetic oligonucleotide
auuagggucgagggcacca

SEQ ID NO: 1252693 - RNA, 19 nt, Artificial Sequence
  Description of Artificial Sequence: Synthetic oligonucleotide
cuaagggccugcagcuggc

SEQ ID NO: 1252694 - RNA, 19 nt, Artificial Sequence
  Description of Artificial Sequence: Synthetic oligonucleotide
agauuagggucgagggcac

SEQ ID NO: 1252695 - RNA, 19 nt, Artificial Sequence
  Description of Artificial Sequence: Synthetic oligonucleotide
aaccuggccaggugcaguu

SEQ ID NO: 1252696 - RNA, 19 nt, Artificial Sequence
  Description of Artificial Sequence: Synthetic oligonucleotide
agagcacacucaggacucc

SEQ ID NO: 1252697 - RNA, 19 nt, Artificial Sequence
  Description of Artificial Sequence: Synthetic oligonucleotide
aggucaucugcgaugccag

SEQ ID NO: 1252698 - RNA, 19 nt, Artificial Sequence
  Description of Artificial Sequence: Synthetic oligonucleotide
ugaaaggccucagcuggcu

SEQ ID NO: 1252699 - RNA, 19 nt, Artificial Sequence
  Description of Artificial Sequence: Synthetic oligonucleotide
uuagggucgagggcaccag

SEQ ID NO: 1252700 - RNA, 19 nt, Artificial Sequence
  Description of Artificial Sequence: Synthetic oligonucleotide
agcuuggcggauggacucc

SEQ ID NO: 1252701 - RNA, 19 nt, Artificial Sequence
  Description of Artificial Sequence: Synthetic oligonucleotide
gucagagcacacucaggac

SEQ ID NO: 1252702 - RNA, 19 nt, Artificial Sequence
  Description of Artificial Sequence: Synthetic oligonucleotide
aguucuggcuggaaaggcu

SEQ ID NO: 1252703 - RNA, 19 nt, Artificial Sequence
  Description of Artificial Sequence: Synthetic oligonucleotide
cagcuggcugagaagcccc

SEQ ID NO: 1252704 - RNA, 19 nt, Artificial Sequence
  Description of Artificial Sequence: Synthetic oligonucleotide
gcagauuagggucgagggc

SEQ ID NO: 1252705 - RNA, 19 nt, Artificial Sequence
  Description of Artificial Sequence: Synthetic oligonucleotide
ggauugccuccucucgucg

SEQ ID NO: 1252706 - RNA, 19 nt, Artificial Sequence
  Description of Artificial Sequence: Synthetic oligonucleotide
caccgacucagcucuacuc

SEQ ID NO: 1252707 - RNA, 19 nt, Artificial Sequence
  Description of Artificial Sequence: Synthetic oligonucleotide
ugcgccucaugacaagcuu

SEQ ID NO: 1252708 - RNA, 19 nt, Artificial Sequence
  Description of Artificial Sequence: Synthetic oligonucleotide
aguggcucggccacuggag

SEQ ID NO: 1252709 - RNA, 19 nt, Artificial Sequence
  Description of Artificial Sequence: Synthetic oligonucleotide
acgcucaggcgccggguac

SEQ ID NO: 1252710 - RNA, 19 nt, Artificial Sequence
  Description of Artificial Sequence: Synthetic oligonucleotide
ugccacuugcuggauugcc

SEQ ID NO: 1252711 - RNA, 19 nt, Artificial Sequence
  Description of Artificial Sequence: Synthetic oligonucleotide
gugggcaguucuggaaugg

SEQ ID NO: 1252712 - RNA, 19 nt, Artificial Sequence
  Description of Artificial Sequence: Synthetic oligonucleotide
ucuucgccugggccaagga

SEQ ID NO: 1252713 - RNA, 19 nt, Artificial Sequence
  Description of Artificial Sequence: Synthetic oligonucleotide
ucccgcaggucccucacua

SEQ ID NO: 1252714 - RNA, 19 nt, Artificial Sequence
  Description of Artificial Sequence: Synthetic oligonucleotide
ugggcaguucuggaauggc

SEQ ID NO: 1252715 - RNA, 19 nt, Artificial Sequence
  Description of Artificial Sequence: Synthetic oligonucleotide
ugacauccgcgugaaggcu

SEQ ID NO: 1252716 - RNA, 19 nt, Artificial Sequence
  Description of Artificial Sequence: Synthetic oligonucleotide
gaagguaggagggcacguc

SEQ ID NO: 1252717 - RNA, 19 nt, Artificial Sequence
  Description of Artificial Sequence: Synthetic oligonucleotide
gaaggcucccgcagguccc

SEQ ID NO: 1252718 - RNA, 19 nt, Artificial Sequence
  Description of Artificial Sequence: Synthetic oligonucleotide
gagauugggcacagacccc

SEQ ID NO: 1252719 - RNA, 19 nt, Artificial Sequence
  Description of Artificial Sequence: Synthetic oligonucleotide
agaguggcucggccacugg

SEQ ID NO: 1252720 - RNA, 19 nt, Artificial Sequence
  Description of Artificial Sequence: Synthetic oligonucleotide
gccaaggagaccccucucc

SEQ ID NO: 1252721 - RNA, 19 nt, Artificial Sequence
  Description of Artificial Sequence: Synthetic oligonucleotide
acgucaaucucagggacuu

SEQ ID NO: 1252722 - RNA, 19 nt, Artificial Sequence
  Description of Artificial Sequence: Synthetic oligonucleotide
agguccggcuggauaaggg

SEQ ID NO: 1252723 - RNA, 19 nt, Artificial Sequence
  Description of Artificial Sequence: Synthetic oligonucleotide
uuacugcgccagccagagg

SEQ ID NO: 1252724 - RNA, 19 nt, Artificial Sequence
  Description of Artificial Sequence: Synthetic oligonucleotide
ggcaguucuggaauggcac

SEQ ID NO: 1252725 - RNA, 19 nt, Artificial Sequence
  Description of Artificial Sequence: Synthetic oligonucleotide
aggcugagugggccacgcc

SEQ ID NO: 1252726 - RNA, 19 nt, Artificial Sequence
  Description of Artificial Sequence: Synthetic oligonucleotide
ggcacgucaaucucaggga

SEQ ID NO: 1252727 - RNA, 19 nt, Artificial Sequence
  Description of Artificial Sequence: Synthetic oligonucleotide
uacucgcugggagauccug

SEQ ID NO: 1252728 - RNA, 19 nt, Artificial Sequence
  Description of Artificial Sequence: Synthetic oligonucleotide
auugggcacagaccccuaa

SEQ ID NO: 1252729 - RNA, 19 nt, Artificial Sequence
  Description of Artificial Sequence: Synthetic oligonucleotide
guaggagggcacgucaauc

SEQ ID NO: 1252730 - RNA, 19 nt, Artificial Sequence
  Description of Artificial Sequence: Synthetic oligonucleotide
cuagugccagaaccggguc

SEQ ID NO: 1252731 - RNA, 19 nt, Artificial Sequence
  Description of Artificial Sequence: Synthetic oligonucleotide
gacauccgcgugaaggcuc

SEQ ID NO: 1252732 - RNA, 19 nt, Artificial Sequence
  Description of Artificial Sequence: Synthetic oligonucleotide
ucagcucuacucgcuggga

SEQ ID NO: 1252733 - RNA, 19 nt, Artificial Sequence
  Description of Artificial Sequence: Synthetic oligonucleotide
cugauguugcugggaagac

SEQ ID NO: 1252734 - RNA, 19 nt, Artificial Sequence
  Description of Artificial Sequence: Synthetic oligonucleotide
auguugcugggaagacccc

SEQ ID NO: 1252735 - RNA, 19 nt, Artificial Sequence
  Description of Artificial Sequence: Synthetic oligonucleotide
guguaaggcugacccacca

SEQ ID NO: 1252736 - RNA, 19 nt, Artificial Sequence
  Description of Artificial Sequence: Synthetic oligonucleotide
uagggucgagggcaccagu

SEQ ID NO: 1252737 - RNA, 19 nt, Artificial Sequence
  Description of Artificial Sequence: Synthetic oligonucleotide
agaggggucagagcacacu

SEQ ID NO: 1252738 - RNA, 19 nt, Artificial Sequence
  Description of Artificial Sequence: Synthetic oligonucleotide
acuuggcacuagagaagac

SEQ ID NO: 1252739 - RNA, 19 nt, Artificial Sequence
  Description of Artificial Sequence: Synthetic oligonucleotide
ugaggucaucugcgaugcc

SEQ ID NO: 1252740 - RNA, 19 nt, Artificial Sequence
  Description of Artificial Sequence: Synthetic oligonucleotide
gagcacacucaggacuccc

SEQ ID NO: 1252741 - RNA, 19 nt, Artificial Sequence
  Description of Artificial Sequence: Synthetic oligonucleotide
gauuagggucgagggcacc

SEQ ID NO: 1252742 - RNA, 19 nt, Artificial Sequence
  Description of Artificial Sequence: Synthetic oligonucleotide
ggaaaacauacuucuugua

SEQ ID NO: 1252743 - RNA, 19 nt, Artificial Sequence
  Description of Artificial Sequence: Synthetic oligonucleotide
aguaguucucuggggccug

SEQ ID NO: 1252744 - RNA, 19 nt, Artificial Sequence
  Description of Artificial Sequence: Synthetic oligonucleotide
ggauaaggggcacugugua

SEQ ID NO: 1252745 - RNA, 19 nt, Artificial Sequence
  Description of Artificial Sequence: Synthetic oligonucleotide
gucagacaucaaguccccg

SEQ ID NO: 1252746 - RNA, 19 nt, Artificial Sequence
  Description of Artificial Sequence: Synthetic oligonucleotide
ugggccaaggagaccccuc

SEQ ID NO: 1252747 - RNA, 19 nt, Artificial Sequence
  Description of Artificial Sequence: Synthetic oligonucleotide
ucggccacuggagggguca

SEQ ID NO: 1252748 - RNA, 19 nt, Artificial Sequence
  Description of Artificial Sequence: Synthetic oligonucleotide
cuggcaccgacucagcucu

SEQ ID NO: 1252749 - RNA, 19 nt, Artificial Sequence
  Description of Artificial Sequence: Synthetic oligonucleotide
gcacgucaaucucagggac

SEQ ID NO: 1252750 - RNA, 19 nt, Artificial Sequence
  Description of Artificial Sequence: Synthetic oligonucleotide
uggcacuagagaagaccuu

SEQ ID NO: 1252751 - RNA, 19 nt, Artificial Sequence
  Description of Artificial Sequence: Synthetic oligonucleotide
aagcagugcugggucuuca

SEQ ID NO: 1252752 - RNA, 19 nt, Artificial Sequence
  Description of Artificial Sequence: Synthetic oligonucleotide
ggagucugacauccgcgug

SEQ ID NO: 1252753 - RNA, 19 nt, Artificial Sequence
  Description of Artificial Sequence: Synthetic oligonucleotide
aucugcgaugccaggcaag

SEQ ID NO: 1252754 - RNA, 19 nt, Artificial Sequence
  Description of Artificial Sequence: Synthetic oligonucleotide
agggcacgucaaucucagg

SEQ ID NO: 1252755 - RNA, 19 nt, Artificial Sequence
  Description of Artificial Sequence: Synthetic oligonucleotide
cagacgcucaggcgccggg

SEQ ID NO: 1252756 - RNA, 19 nt, Artificial Sequence
  Description of Artificial Sequence: Synthetic oligonucleotide
cacugaccaccacgguggg

SEQ ID NO: 1252757 - RNA, 19 nt, Artificial Sequence
  Description of Artificial Sequence: Synthetic oligonucleotide
auccgcgugaaggcucccg

SEQ ID NO: 1252758 - RNA, 19 nt, Artificial Sequence
  Description of Artificial Sequence: Synthetic oligonucleotide
caggcggcucgcacagucc

SEQ ID NO: 1252759 - RNA, 19 nt, Artificial Sequence
  Description of Artificial Sequence: Synthetic oligonucleotide
gacuuggcccaggucuggc

SEQ ID NO: 1252760 - RNA, 19 nt, Artificial Sequence
  Description of Artificial Sequence: Synthetic oligonucleotide
ccuuaggagcuccuuggac

SEQ ID NO: 1252761 - RNA, 19 nt, Artificial Sequence
  Description of Artificial Sequence: Synthetic oligonucleotide
cugugguguugaagagcag

SEQ ID NO: 1252762 - RNA, 19 nt, Artificial Sequence
  Description of Artificial Sequence: Synthetic oligonucleotide
guggaaggugggcaguucu

SEQ ID NO: 1252763 - RNA, 19 nt, Artificial Sequence
  Description of Artificial Sequence: Synthetic oligonucleotide
ccgacucagcucuacucgc

SEQ ID NO: 1252764 - RNA, 19 nt, Artificial Sequence
  Description of Artificial Sequence: Synthetic oligonucleotide
ccuccuuaggagcuccuug

SEQ ID NO: 1252765 - RNA, 19 nt, Artificial Sequence
  Description of Artificial Sequence: Synthetic oligonucleotide
gcgugaaggcucccgcagg

SEQ ID NO: 1252766 - RNA, 19 nt, Artificial Sequence
  Description of Artificial Sequence: Synthetic oligonucleotide
cacauagaaguaguucucu

SEQ ID NO: 1252767 - RNA, 19 nt, Artificial Sequence
  Description of Artificial Sequence: Synthetic oligonucleotide
cagguccggcuggauaagg

SEQ ID NO: 1252768 - RNA, 19 nt, Artificial Sequence
  Description of Artificial Sequence: Synthetic oligonucleotide
ugcagacgcucaggcgccg

SEQ ID NO: 1252769 - RNA, 19 nt, Artificial Sequence
  Description of Artificial Sequence: Synthetic oligonucleotide
uggugguuguggggcacug

SEQ ID NO: 1252770 - RNA, 19 nt, Artificial Sequence
  Description of Artificial Sequence: Synthetic oligonucleotide
uugccuccucucgucgcag

SEQ ID NO: 1252771 - RNA, 19 nt, Artificial Sequence
  Description of Artificial Sequence: Synthetic oligonucleotide
cccaagucggcauuauaca

SEQ ID NO: 1252772 - RNA, 19 nt, Artificial Sequence
  Description of Artificial Sequence: Synthetic oligonucleotide
gccacuggaggggucaacc

SEQ ID NO: 1252773 - RNA, 19 nt, Artificial Sequence
  Description of Artificial Sequence: Synthetic oligonucleotide
aagccccucgaagcugcug

SEQ ID NO: 1252774 - RNA, 19 nt, Artificial Sequence
  Description of Artificial Sequence: Synthetic oligonucleotide
cagagauuccuuugcgccu

SEQ ID NO: 1252775 - RNA, 19 nt, Artificial Sequence
  Description of Artificial Sequence: Synthetic oligonucleotide
ggucccucacuagugccag

SEQ ID NO: 1252776 - RNA, 19 nt, Artificial Sequence
  Description of Artificial Sequence: Synthetic oligonucleotide
ugagugggccacgccgcug

SEQ ID NO: 1252777 - RNA, 19 nt, Artificial Sequence
  Description of Artificial Sequence: Synthetic oligonucleotide
cauccucgucgcccgcggg

SEQ ID NO: 1252778 - RNA, 19 nt, Artificial Sequence
  Description of Artificial Sequence: Synthetic oligonucleotide
gcacauagaaguaguucuc

SEQ ID NO: 1252779 - RNA, 19 nt, Artificial Sequence
  Description of Artificial Sequence: Synthetic oligonucleotide
auagacagaggggcaucaa

SEQ ID NO: 1252780 - RNA, 19 nt, Artificial Sequence
  Description of Artificial Sequence: Synthetic oligonucleotide
ugcccagcaucgugugggu

SEQ ID NO: 1252781 - RNA, 19 nt, Artificial Sequence
  Description of Artificial Sequence: Synthetic oligonucleotide
caggaaaguauuucagcuu

SEQ ID NO: 1252782 - RNA, 19 nt, Artificial Sequence
  Description of Artificial Sequence: Synthetic oligonucleotide
ggucagacaucaagucccc

SEQ ID NO: 1252783 - RNA, 19 nt, Artificial Sequence
  Description of Artificial Sequence: Synthetic oligonucleotide
ccaggucuggcacauagaa

SEQ ID NO: 1252784 - RNA, 19 nt, Artificial Sequence
  Description of Artificial Sequence: Synthetic oligonucleotide
gagauuccuuugcgccuca

SEQ ID NO: 1252785 - RNA, 19 nt, Artificial Sequence
  Description of Artificial Sequence: Synthetic oligonucleotide
ggcgccggguacuuggcac

SEQ ID NO: 1252786 - RNA, 19 nt, Artificial Sequence
  Description of Artificial Sequence: Synthetic oligonucleotide
ccacuucagggaacacugg

SEQ ID NO: 1252787 - RNA, 19 nt, Artificial Sequence
  Description of Artificial Sequence: Synthetic oligonucleotide
ccagaagcgcuccauccuc

SEQ ID NO: 1252788 - RNA, 19 nt, Artificial Sequence
  Description of Artificial Sequence: Synthetic oligonucleotide
cucucgucgcagguccggc

SEQ ID NO: 1252789 - RNA, 19 nt, Artificial Sequence
  Description of Artificial Sequence: Synthetic oligonucleotide
gcucgcacaguccccacuc

SEQ ID NO: 1252790 - RNA, 19 nt, Artificial Sequence
  Description of Artificial Sequence: Synthetic oligonucleotide
caguugccacuucagggaa

SEQ ID NO: 1252791 - RNA, 19 nt, Artificial Sequence
  Description of Artificial Sequence: Synthetic oligonucleotide
aggagaccccucucccuaa

SEQ ID NO: 1252792 - RNA, 19 nt, Artificial Sequence
  Description of Artificial Sequence: Synthetic oligonucleotide
cagcuuggccuugccaaug

SEQ ID NO: 1252793 - RNA, 19 nt, Artificial Sequence
  Description of Artificial Sequence: Synthetic oligonucleotide
guaguucucuggggccugc

SEQ ID NO: 1252794 - RNA, 19 nt, Artificial Sequence
  Description of Artificial Sequence: Synthetic oligonucleotide
gcugagugggccacgccgc

SEQ ID NO: 1252795 - RNA, 19 nt, Artificial Sequence
  Description of Artificial Sequence: Synthetic oligonucleotide
gcugauagacagaggggca

SEQ ID NO: 1252796 - RNA, 19 nt, Artificial Sequence
  Description of Artificial Sequence: Synthetic oligonucleotide
gaggguccaggaaaacaua

SEQ ID NO: 1252797 - RNA, 19 nt, Artificial Sequence
  Description of Artificial Sequence: Synthetic oligonucleotide
gcucuggacccuguaccgg

SEQ ID NO: 1252798 - RNA, 19 nt, Artificial Sequence
  Description of Artificial Sequence: Synthetic oligonucleotide
ggccaggugcaguugccac

SEQ ID NO: 1252799 - RNA, 19 nt, Artificial Sequence
  Description of Artificial Sequence: Synthetic oligonucleotide
ggucgagggcaccaguaaa

SEQ ID NO: 1252800 - RNA, 19 nt, Artificial Sequence
  Description of Artificial Sequence: Synthetic oligonucleotide
ccucaugacaagcuuguua

SEQ ID NO: 1252801 - RNA, 19 nt, Artificial Sequence
  Description of Artificial Sequence: Synthetic oligonucleotide
ggauggagucugacauccg

SEQ ID NO: 1252802 - RNA, 19 nt, Artificial Sequence
  Description of Artificial Sequence: Synthetic oligonucleotide
ucgcccgcgggcugcugug

SEQ ID NO: 1252803 - RNA, 19 nt, Artificial Sequence
  Description of Artificial Sequence: Synthetic oligonucleotide
cucgcugggagauccugcu

SEQ ID NO: 1252804 - RNA, 19 nt, Artificial Sequence
  Description of Artificial Sequence: Synthetic oligonucleotide
gcaggcggcucgcacaguc

SEQ ID NO: 1252805 - RNA, 19 nt, Artificial Sequence
  Description of Artificial Sequence: Synthetic oligonucleotide
gacgcucaggcgccgggua

SEQ ID NO: 1252806 - RNA, 19 nt, Artificial Sequence
  Description of Artificial Sequence: Synthetic oligonucleotide
cagcuggcaccgacucagc

SEQ ID NO: 1252807 - RNA, 19 nt, Artificial Sequence
  Description of Artificial Sequence: Synthetic oligonucleotide
agguaggagggcacgucaa

SEQ ID NO: 1252808 - RNA, 19 nt, Artificial Sequence
  Description of Artificial Sequence: Synthetic oligonucleotide
caaggagaccccucucccu

SEQ ID NO: 1252809 - RNA, 19 nt, Artificial Sequence
  Description of Artificial Sequence: Synthetic oligonucleotide
agggcgucugccacuugcu

SEQ ID NO: 1252810 - RNA, 19 nt, Artificial Sequence
  Description of Artificial Sequence: Synthetic oligonucleotide
cccagcuuggcggauggac

SEQ ID NO: 1252811 - RNA, 19 nt, Artificial Sequence
  Description of Artificial Sequence: Synthetic oligonucleotide
gcgccucaugacaagcuug

SEQ ID NO: 1252812 - RNA, 19 nt, Artificial Sequence
  Description of Artificial Sequence: Synthetic oligonucleotide
agucggcauuauacaugag

SEQ ID NO: 1252813 - RNA, 19 nt, Artificial Sequence
  Description of Artificial Sequence: Synthetic oligonucleotide
ggggucaaccaccuccuua

SEQ ID NO: 1252814 - RNA, 19 nt, Artificial Sequence
  Description of Artificial Sequence: Synthetic oligonucleotide
agggucgagggcaccagua

SEQ ID NO: 1252815 - RNA, 19 nt, Artificial Sequence
  Description of Artificial Sequence: Synthetic oligonucleotide
cggcauuauacaugagguc

SEQ ID NO: 1252816 - RNA, 19 nt, Artificial Sequence
  Description of Artificial Sequence: Synthetic oligonucleotide
gggcgucugccacuugcug

SEQ ID NO: 1252817 - RNA, 19 nt, Artificial Sequence
  Description of Artificial Sequence: Synthetic oligonucleotide
cugauagacagaggggcau

SEQ ID NO: 1252818 - RNA, 19 nt, Artificial Sequence
  Description of Artificial Sequence: Synthetic oligonucleotide
cauccucaggcuccgacuu

SEQ ID NO: 1252819 - RNA, 19 nt, Artificial Sequence
  Description of Artificial Sequence: Synthetic oligonucleotide
agugggccacgccgcugcu

SEQ ID NO: 1252820 - RNA, 19 nt, Artificial Sequence
  Description of Artificial Sequence: Synthetic oligonucleotide
acugaccaccacgguggga

SEQ ID NO: 1252821 - RNA, 19 nt, Artificial Sequence
  Description of Artificial Sequence: Synthetic oligonucleotide
ccuuugcgccucaugacaa

SEQ ID NO: 1252822 - RNA, 19 nt, Artificial Sequence
  Description of Artificial Sequence: Synthetic oligonucleotide
ggcuggaaaggcucagcua

SEQ ID NO: 1252823 - RNA, 19 nt, Artificial Sequence
  Description of Artificial Sequence: Synthetic oligonucleotide
cagaccccuaacacuugua

SEQ ID NO: 1252824 - RNA, 19 nt, Artificial Sequence
  Description of Artificial Sequence: Synthetic oligonucleotide
ccccaagucccuccucagc

SEQ ID NO: 1252825 - RNA, 19 nt, Artificial Sequence
  Description of Artificial Sequence: Synthetic oligonucleotide
gugaaggcucccgcagguc

SEQ ID NO: 1252826 - RNA, 19 nt, Artificial Sequence
  Description of Artificial Sequence: Synthetic oligonucleotide
agcuggcugagaagccccu

SEQ ID NO: 1252827 - RNA, 19 nt, Artificial Sequence
  Description of Artificial Sequence: Synthetic oligonucleotide
cgcgugaaggcucccgcag

SEQ ID NO: 1252828 - RNA, 19 nt, Artificial Sequence
  Description of Artificial Sequence: Synthetic oligonucleotide
ccaguaaagauggagccau

SEQ ID NO: 1252829 - RNA, 19 nt, Artificial Sequence
  Description of Artificial Sequence: Synthetic oligonucleotide
cucuacucgcugggagauc

SEQ ID NO: 1252830 - RNA, 19 nt, Artificial Sequence
  Description of Artificial Sequence: Synthetic oligonucleotide
caagggugucaugaugccu

SEQ ID NO: 1252831 - RNA, 19 nt, Artificial Sequence
  Description of Artificial Sequence: Synthetic oligonucleotide
gacucccagucaucgucau

SEQ ID NO: 1252832 - RNA, 19 nt, Artificial Sequence
  Description of Artificial Sequence: Synthetic oligonucleotide
ccaagucggcauuauacau

SEQ ID NO: 1252833 - RNA, 19 nt, Artificial Sequence
  Description of Artificial Sequence: Synthetic oligonucleotide
cucggccacuggagggguc

SEQ ID NO: 1252834 - RNA, 19 nt, Artificial Sequence
  Description of Artificial Sequence: Synthetic oligonucleotide
gccagaagcgcuccauccu

SEQ ID NO: 1252835 - RNA, 19 nt, Artificial Sequence
  Description of Artificial Sequence: Synthetic oligonucleotide
gauugggcacagaccccua

SEQ ID NO: 1252836 - RNA, 19 nt, Artificial Sequence
  Description of Artificial Sequence: Synthetic oligonucleotide
ccgacuugguguucacaca

SEQ ID NO: 1252837 - RNA, 19 nt, Artificial Sequence
  Description of Artificial Sequence: Synthetic oligonucleotide
cuccgacuugguguucaca

SEQ ID NO: 1252838 - RNA, 19 nt, Artificial Sequence
  Description of Artificial Sequence: Synthetic oligonucleotide
agauuccuuugcgccucau

SEQ ID NO: 1252839 - RNA, 19 nt, Artificial Sequence
  Description of Artificial Sequence: Synthetic oligonucleotide
cuguaccggggucuucucu

SEQ ID NO: 1252840 - RNA, 19 nt, Artificial Sequence
  Description of Artificial Sequence: Synthetic oligonucleotide
ccccuggaccugcaugggc

SEQ ID NO: 1252841 - RNA, 19 nt, Artificial Sequence
  Description of Artificial Sequence: Synthetic oligonucleotide
caggcuccgacuugguguu

SEQ ID NO: 1252842 - RNA, 19 nt, Artificial Sequence
  Description of Artificial Sequence: Synthetic oligonucleotide
ccucucgucgcagguccgg

SEQ ID NO: 1252843 - RNA, 19 nt, Artificial Sequence
  Description of Artificial Sequence: Synthetic oligonucleotide
gguaggagggcacgucaau

SEQ ID NO: 1252844 - RNA, 19 nt, Artificial Sequence
  Description of Artificial Sequence: Synthetic oligonucleotide
gcagguccggcuggauaag

SEQ ID NO: 1252845 - RNA, 19 nt, Artificial Sequence
  Description of Artificial Sequence: Synthetic oligonucleotide
ggccaaggagaccccucuc

SEQ ID NO: 1252846 - RNA, 19 nt, Artificial Sequence
  Description of Artificial Sequence: Synthetic oligonucleotide
cgcagguccggcuggauaa

SEQ ID NO: 1252847 - RNA, 19 nt, Artificial Sequence
  Description of Artificial Sequence: Synthetic oligonucleotide
cacgccgcugcuccugucu

SEQ ID NO: 1252848 - RNA, 19 nt, Artificial Sequence
  Description of Artificial Sequence: Synthetic oligonucleotide
cucaggcgccggguacuug

SEQ ID NO: 1252849 - RNA, 19 nt, Artificial Sequence
  Description of Artificial Sequence: Synthetic oligonucleotide
gucccucacuagugccaga

SEQ ID NO: 1252850 - RNA, 19 nt, Artificial Sequence
  Description of Artificial Sequence: Synthetic oligonucleotide
cucucccuaagggccugca

SEQ ID NO: 1252851 - RNA, 19 nt, Artificial Sequence
  Description of Artificial Sequence: Synthetic oligonucleotide
ccggagaugcucuguaggu

SEQ ID NO: 1252852 - RNA, 19 nt, Artificial Sequence
  Description of Artificial Sequence: Synthetic oligonucleotide
ccagcuuggcggauggacu

SEQ ID NO: 1252853 - RNA, 19 nt, Artificial Sequence
  Description of Artificial Sequence: Synthetic oligonucleotide
gcccgcgggcugcuguggg

SEQ ID NO: 1252854 - RNA, 19 nt, Artificial Sequence
  Description of Artificial Sequence: Synthetic oligonucleotide
cauccgcgugaaggcuccc

SEQ ID NO: 1252855 - RNA, 19 nt, Artificial Sequence
  Description of Artificial Sequence: Synthetic oligonucleotide
uggcaccgacucagcucua

SEQ ID NO: 1252856 - RNA, 19 nt, Artificial Sequence
  Description of Artificial Sequence: Synthetic oligonucleotide
ccauauucuugcagacgcu

SEQ ID NO: 1252857 - RNA, 19 nt, Artificial Sequence
  Description of Artificial Sequence: Synthetic oligonucleotide
ggacccuguaccggggucu

SEQ ID NO: 1252858 - RNA, 19 nt, Artificial Sequence
  Description of Artificial Sequence: Synthetic oligonucleotide
caaccuggccaggugcagu

SEQ ID NO: 1252859 - RNA, 19 nt, Artificial Sequence
  Description of Artificial Sequence: Synthetic oligonucleotide
ggcggcucgcacagucccc

SEQ ID NO: 1252860 - RNA, 19 nt, Artificial Sequence
  Description of Artificial Sequence: Synthetic oligonucleotide
gccacuugcuggauugccu

SEQ ID NO: 1252861 - RNA, 19 nt, Artificial Sequence
  Description of Artificial Sequence: Synthetic oligonucleotide
guccccgccuuggcuggug

SEQ ID NO: 1252862 - RNA, 19 nt, Artificial Sequence
  Description of Artificial Sequence: Synthetic oligonucleotide
gucgcccgcgggcugcugu

SEQ ID NO: 1252863 - RNA, 19 nt, Artificial Sequence
  Description of Artificial Sequence: Synthetic oligonucleotide
cugagugggccacgccgcu

SEQ ID NO: 1252864 - RNA, 19 nt, Artificial Sequence
  Description of Artificial Sequence: Synthetic oligonucleotide
cuggacccuguaccggggu

SEQ ID NO: 1252865 - RNA, 19 nt, Artificial Sequence
  Description of Artificial Sequence: Synthetic oligonucleotide
gcucuacucgcugggagau

SEQ ID NO: 1252866 - RNA, 19 nt, Artificial Sequence
  Description of Artificial Sequence: Synthetic oligonucleotide
ggugcuugcucuggacccu

SEQ ID NO: 1252867 - RNA, 19 nt, Artificial Sequence
  Description of Artificial Sequence: Synthetic oligonucleotide
gccggguacuuggcacuag

SEQ ID NO: 1252868 - RNA, 19 nt, Artificial Sequence
  Description of Artificial Sequence: Synthetic oligonucleotide
gccagaaccggguccuuuu

SEQ ID NO: 1252869 - RNA, 19 nt, Artificial Sequence
  Description of Artificial Sequence: Synthetic oligonucleotide
gcugggucuucaagggugu

SEQ ID NO: 1252870 - RNA, 19 nt, Artificial Sequence
  Description of Artificial Sequence: Synthetic oligonucleotide
gcaccgacucagcucuacu

SEQ ID NO: 1252871 - RNA, 19 nt, Artificial Sequence
  Description of Artificial Sequence: Synthetic oligonucleotide
aguccccgccuuggcuggu

SEQ ID NO: 1252872 - RNA, 19 nt, Artificial Sequence
  Description of Artificial Sequence: Synthetic oligonucleotide
cuucugugcccagcaucgu

SEQ ID NO: 1252873 - RNA, 19 nt, Artificial Sequence
  Description of Artificial Sequence: Synthetic oligonucleotide
cgccucaugacaagcuugu

SEQ ID NO: 1252874 - RNA, 19 nt, Artificial Sequence
  Description of Artificial Sequence: Synthetic oligonucleotide
ccgcgugaaggcucccgca

SEQ ID NO: 1252875 - RNA, 19 nt, Artificial Sequence
  Description of Artificial Sequence: Synthetic oligonucleotide
gacccuguaccggggucuu

SEQ ID NO: 1252876 - RNA, 19 nt, Artificial Sequence
  Description of Artificial Sequence: Synthetic oligonucleotide
ggccacuggaggggucaac

SEQ ID NO: 1252877 - RNA, 19 nt, Artificial Sequence
  Description of Artificial Sequence: Synthetic oligonucleotide
gcgcugccagaagcgcucc

SEQ ID NO: 1252878 - RNA, 19 nt, Artificial Sequence
  Description of Artificial Sequence: Synthetic oligonucleotide
gaggggcaucaaacaacuu

SEQ ID NO: 1252879 - RNA, 19 nt, Artificial Sequence
  Description of Artificial Sequence: Synthetic oligonucleotide
cagcuaccucuguguggaa

SEQ ID NO: 1252880 - RNA, 19 nt, Artificial Sequence
  Description of Artificial Sequence: Synthetic oligonucleotide
gcgccggguacuuggcacu

SEQ ID NO: 1252881 - RNA, 19 nt, Artificial Sequence
  Description of Artificial Sequence: Synthetic oligonucleotide
cgugaaggcucccgcaggu

SEQ ID NO: 1252882 - RNA, 19 nt, Artificial Sequence
  Description of Artificial Sequence: Synthetic oligonucleotide
cagggcccaagucggcauu

SEQ ID NO: 1252883 - RNA, 19 nt, Artificial Sequence
  Description of Artificial Sequence: Synthetic oligonucleotide
cgacucagcucuacucgcu

SEQ ID NO: 1252884 - RNA, 19 nt, Artificial Sequence
  Description of Artificial Sequence: Synthetic oligonucleotide
cgagggcaccaguaaagau

SEQ ID NO: 1252885 - RNA, 19 nt, Artificial Sequence
  Description of Artificial Sequence: Synthetic oligonucleotide
gccuuggcugguggcucuc

SEQ ID NO: 1252886 - RNA, 19 nt, Artificial Sequence
  Description of Artificial Sequence: Synthetic oligonucleotide
gccacgccgcugcuccugu

SEQ ID NO: 1252887 - RNA, 19 nt, Artificial Sequence
  Description of Artificial Sequence: Synthetic oligonucleotide
ccacgccgcugcuccuguc

SEQ ID NO: 1252888 - RNA, 19 nt, Artificial Sequence
  Description of Artificial Sequence: Synthetic oligonucleotide
ccaagcagugcugggucuu

SEQ ID NO: 1252889 - RNA, 19 nt, Artificial Sequence
  Description of Artificial Sequence: Synthetic oligonucleotide
cggcucgcacaguccccac

SEQ ID NO: 1252890 - RNA, 19 nt, Artificial Sequence
  Description of Artificial Sequence: Synthetic oligonucleotide
gggcccaagucggcauuau

SEQ ID NO: 1252891 - RNA, 19 nt, Artificial Sequence
  Description of Artificial Sequence: Synthetic oligonucleotide
gugccagaaccggguccuu

SEQ ID NO: 1252892 - RNA, 19 nt, Artificial Sequence
  Description of Artificial Sequence: Synthetic oligonucleotide
cgucgcagguccggcugga

SEQ ID NO: 1252893 - RNA, 19 nt, Artificial Sequence
  Description of Artificial Sequence: Synthetic oligonucleotide
cgcucaggcgccggguacu

SEQ ID NO: 1252894 - RNA, 19 nt, Artificial Sequence
  Description of Artificial Sequence: Synthetic oligonucleotide
cgccggguacuuggcacua

SEQ ID NO: 1252895 - RNA, 19 nt, Artificial Sequence
  Description of Artificial Sequence: Synthetic oligonucleotide
cgucgcccgcgggcugcug

SEQ ID NO: 1252896 - RNA, 19 nt, Artificial Sequence
  Description of Artificial Sequence: Synthetic oligonucleotide
aauaucacaggacaaguac

SEQ ID NO: 1252897 - RNA, 19 nt, Artificial Sequence
  Description of Artificial Sequence: Synthetic oligonucleotide
auagcuuuuauuuaccuac

SEQ ID NO: 1252898 - RNA, 19 nt, Artificial Sequence
  Description of Artificial Sequence: Synthetic oligonucleotide
auucagucaggauaaaucc

SEQ ID NO: 1252899 - RNA, 19 nt, Artificial Sequence
  Description of Artificial Sequence: Synthetic oligonucleotide
aaaccauuucccucgaggc

SEQ ID NO: 1252900 - RNA, 19 nt, Artificial Sequence
  Description of Artificial Sequence: Synthetic oligonucleotide
aauauguuuguccaccauc

SEQ ID NO: 1252901 - RNA, 19 nt, Artificial Sequence
  Description of Artificial Sequence: Synthetic oligonucleotide
ucuguaauucaaaugggag

SEQ ID NO: 1252902 - RNA, 19 nt, Artificial Sequence
  Description of Artificial Sequence: Synthetic oligonucleotide
ugauuuauuggaaucaggu

SEQ ID NO: 1252903 - RNA, 19 nt, Artificial Sequence
  Description of Artificial Sequence: Synthetic oligonucleotide
acucaacuaggccagagcc

SEQ ID NO: 1252904 - RNA, 19 nt, Artificial Sequence
  Description of Artificial Sequence: Synthetic oligonucleotide
aaagcaagggaaugaagag

SEQ ID NO: 1252905 - RNA, 19 nt, Artificial Sequence
  Description of Artificial Sequence: Synthetic oligonucleotide
aauguuuagcacauguacg

SEQ ID NO: 1252906 - RNA, 19 nt, Artificial Sequence
  Description of Artificial Sequence: Synthetic oligonucleotide
aaaggcaauauguggguuc

SEQ ID NO: 1252907 - RNA, 19 nt, Artificial Sequence
  Description of Artificial Sequence: Synthetic oligonucleotide
uaaucacucaacuaggcca

SEQ ID NO: 1252908 - RNA, 19 nt, Artificial Sequence
  Description of Artificial Sequence: Synthetic oligonucleotide
caagucguaaauaucacag

SEQ ID NO: 1252909 - RNA, 19 nt, Artificial Sequence
  Description of Artificial Sequence: Synthetic oligonucleotide
auguuuagcacauguacgg

SEQ ID NO: 1252910 - RNA, 19 nt, Artificial Sequence
  Description of Artificial Sequence: Synthetic oligonucleotide
ucguaaauaucacaggaca

SEQ ID NO: 1252911 - RNA, 19 nt, Artificial Sequence
  Description of Artificial Sequence: Synthetic oligonucleotide
ugacaaaggcaauaugugg

SEQ ID NO: 1252912 - RNA, 19 nt, Artificial Sequence
  Description of Artificial Sequence: Synthetic oligonucleotide
acaauaaacacagcaggcc

SEQ ID NO: 1252913 - RNA, 19 nt, Artificial Sequence
  Description of Artificial Sequence: Synthetic oligonucleotide
ucuagaagaucccucacca

SEQ ID NO: 1252914 - RNA, 19 nt, Artificial Sequence
  Description of Artificial Sequence: Synthetic oligonucleotide
aaaagaaagaggauggaga

SEQ ID NO: 1252915 - RNA, 19 nt, Artificial Sequence
  Description of Artificial Sequence: Synthetic oligonucleotide
agcacauaccgucaguggc

SEQ ID NO: 1252916 - RNA, 19 nt, Artificial Sequence
  Description of Artificial Sequence: Synthetic oligonucleotide
acaaguaccacuuuggguu

SEQ ID NO: 1252917 - RNA, 19 nt, Artificial Sequence
  Description of Artificial Sequence: Synthetic oligonucleotide
aaauacagcaccaaccuca

SEQ ID NO: 1252918 - RNA, 19 nt, Artificial Sequence
  Description of Artificial Sequence: Synthetic oligonucleotide
cugaaauacagcaccaacc

SEQ ID NO: 1252919 - RNA, 19 nt, Artificial Sequence
  Description of Artificial Sequence: Synthetic oligonucleotide
caauauguggguucguugg

SEQ ID NO: 1252920 - RNA, 19 nt, Artificial Sequence
  Description of Artificial Sequence: Synthetic oligonucleotide
aauauguggguucguuggg

SEQ ID NO: 1252921 - RNA, 19 nt, Artificial Sequence
  Description of Artificial Sequence: Synthetic oligonucleotide
agagguuuguccuaccuag

SEQ ID NO: 1252922 - RNA, 19 nt, Artificial Sequence
  Description of Artificial Sequence: Synthetic oligonucleotide
cauacucaggacuugugcg

SEQ ID NO: 1252923 - RNA, 19 nt, Artificial Sequence
  Description of Artificial Sequence: Synthetic oligonucleotide
aaauccccgggucacagag

SEQ ID NO: 1252924 - RNA, 19 nt, Artificial Sequence
  Description of Artificial Sequence: Synthetic oligonucleotide
ugagcugaaaguuucucug

SEQ ID NO: 1252925 - RNA, 19 nt, Artificial Sequence
  Description of Artificial Sequence: Synthetic oligonucleotide
auacucaggacuugugcgc

SEQ ID NO: 1252926 - RNA, 19 nt, Artificial Sequence
  Description of Artificial Sequence: Synthetic oligonucleotide
agucguaaauaucacagga

SEQ ID NO: 1252927 - RNA, 19 nt, Artificial Sequence
  Description of Artificial Sequence: Synthetic oligonucleotide
cacauguacggaaacaggc

SEQ ID NO: 1252928 - RNA, 19 nt, Artificial Sequence
  Description of Artificial Sequence: Synthetic oligonucleotide
uuuauuggaaucaggugaa

SEQ ID NO: 1252929 - RNA, 19 nt, Artificial Sequence
  Description of Artificial Sequence: Synthetic oligonucleotide
uguuccaaauacaucccag

SEQ ID NO: 1252930 - RNA, 19 nt, Artificial Sequence
  Description of Artificial Sequence: Synthetic oligonucleotide
cauucagucaggauaaauc

SEQ ID NO: 1252931 - RNA, 19 nt, Artificial Sequence
  Description of Artificial Sequence: Synthetic oligonucleotide
aauacaucccagcagccau

SEQ ID NO: 1252932 - RNA, 19 nt, Artificial Sequence
  Description of Artificial Sequence: Synthetic oligonucleotide
uaucacaggacaaguacca

SEQ ID NO: 1252933 - RNA, 19 nt, Artificial Sequence
  Description of Artificial Sequence: Synthetic oligonucleotide
agcgagagcacauaccguc

SEQ ID NO: 1252934 - RNA, 19 nt, Artificial Sequence
  Description of Artificial Sequence: Synthetic oligonucleotide
aacuugucaauuucagccu

SEQ ID NO: 1252935 - RNA, 19 nt, Artificial Sequence
  Description of Artificial Sequence: Synthetic oligonucleotide
acuugacucgaucuguuuc

SEQ ID NO: 1252936 - RNA, 19 nt, Artificial Sequence
  Description of Artificial Sequence: Synthetic oligonucleotide
cucgauggaacaaucuggg

SEQ ID NO: 1252937 - RNA, 19 nt, Artificial Sequence
  Description of Artificial Sequence: Synthetic oligonucleotide
uuuggaacgggcacgggca

SEQ ID NO: 1252938 - RNA, 19 nt, Artificial Sequence
  Description of Artificial Sequence: Synthetic oligonucleotide
gggguaaucacucaacuag

SEQ ID NO: 1252939 - RNA, 19 nt, Artificial Sequence
  Description of Artificial Sequence: Synthetic oligonucleotide
ugugaguuaucugugcucc

SEQ ID NO: 1252940 - RNA, 19 nt, Artificial Sequence
  Description of Artificial Sequence: Synthetic oligonucleotide
aaggcaauauguggguucg

SEQ ID NO: 1252941 - RNA, 19 nt, Artificial Sequence
  Description of Artificial Sequence: Synthetic oligonucleotide
gugaaaagugcuucacugg

SEQ ID NO: 1252942 - RNA, 19 nt, Artificial Sequence
  Description of Artificial Sequence: Synthetic oligonucleotide
aagggguaaucacucaacu

SEQ ID NO: 1252943 - RNA, 19 nt, Artificial Sequence
  Description of Artificial Sequence: Synthetic oligonucleotide
acugucgacaucucccugg

SEQ ID NO: 1252944 - RNA, 19 nt, Artificial Sequence
  Description of Artificial Sequence: Synthetic oligonucleotide
aaugaucuagaagaucccu

SEQ ID NO: 1252945 - RNA, 19 nt, Artificial Sequence
  Description of Artificial Sequence: Synthetic oligonucleotide
uuuagcacauguacggaaa

SEQ ID NO: 1252946 - RNA, 19 nt, Artificial Sequence
  Description of Artificial Sequence: Synthetic oligonucleotide
auauucaguggccaacuug

SEQ ID NO: 1252947 - RNA, 19 nt, Artificial Sequence
  Description of Artificial Sequence: Synthetic oligonucleotide
ggcucuacaauaaacacag

SEQ ID NO: 1252948 - RNA, 19 nt, Artificial Sequence
  Description of Artificial Sequence: Synthetic oligonucleotide
ggugaaaagugcuucacug

SEQ ID NO: 1252949 - RNA, 19 nt, Artificial Sequence
  Description of Artificial Sequence: Synthetic oligonucleotide
aaauuccuugcacuugcca

SEQ ID NO: 1252950 - RNA, 19 nt, Artificial Sequence
  Description of Artificial Sequence: Synthetic oligonucleotide
auagucacuugacucgauc

SEQ ID NO: 1252951 - RNA, 19 nt, Artificial Sequence
  Description of Artificial Sequence: Synthetic oligonucleotide
auuuggaagagaucuggga

SEQ ID NO: 1252952 - RNA, 19 nt, Artificial Sequence
  Description of Artificial Sequence: Synthetic oligonucleotide
gucgacaucucccuggacc

SEQ ID NO: 1252953 - RNA, 19 nt, Artificial Sequence
  Description of Artificial Sequence: Synthetic oligonucleotide
guaaucacucaacuaggcc

SEQ ID NO: 1252954 - RNA, 19 nt, Artificial Sequence
  Description of Artificial Sequence: Synthetic oligonucleotide
uacggaaacaggcucuaca

SEQ ID NO: 1252955 - RNA, 19 nt, Artificial Sequence
  Description of Artificial Sequence: Synthetic oligonucleotide
uguggguucguugggaucc

SEQ ID NO: 1252956 - RNA, 19 nt, Artificial Sequence
  Description of Artificial Sequence: Synthetic oligonucleotide
agaugcauaauuacaaagu

SEQ ID NO: 1252957 - RNA, 19 nt, Artificial Sequence
  Description of Artificial Sequence: Synthetic oligonucleotide
gagaccuggugacaaaggc

SEQ ID NO: 1252958 - RNA, 19 nt, Artificial Sequence
  Description of Artificial Sequence: Synthetic oligonucleotide
ucaggauaaauccccgggu

SEQ ID NO: 1252959 - RNA, 19 nt, Artificial Sequence
  Description of Artificial Sequence: Synthetic oligonucleotide
gaagagcugucauagucac

SEQ ID NO: 1252960 - RNA, 19 nt, Artificial Sequence
  Description of Artificial Sequence: Synthetic oligonucleotide
uucaguggccaacuuguca

SEQ ID NO: 1252961 - RNA, 19 nt, Artificial Sequence
  Description of Artificial Sequence: Synthetic oligonucleotide
ccaaauacaucccagcagc

SEQ ID NO: 1252962 - RNA, 19 nt, Artificial Sequence
  Description of Artificial Sequence: Synthetic oligonucleotide
acucgauggaacaaucugg

SEQ ID NO: 1252963 - RNA, 19 nt, Artificial Sequence
  Description of Artificial Sequence: Synthetic oligonucleotide
agagugcccacuccacugc

SEQ ID NO: 1252964 - RNA, 19 nt, Artificial Sequence
  Description of Artificial Sequence: Synthetic oligonucleotide
ucgacaucucccuggaccc

SEQ ID NO: 1252965 - RNA, 19 nt, Artificial Sequence
  Description of Artificial Sequence: Synthetic oligonucleotide
uagucacuugacucgaucu

SEQ ID NO: 1252966 - RNA, 19 nt, Artificial Sequence
  Description of Artificial Sequence: Synthetic oligonucleotide
agcccaaaugaucuagaag

SEQ ID NO: 1252967 - RNA, 19 nt, Artificial Sequence
  Description of Artificial Sequence: Synthetic oligonucleotide
uccuaccuagccccggugg

SEQ ID NO: 1252968 - RNA, 19 nt, Artificial Sequence
  Description of Artificial Sequence: Synthetic oligonucleotide
caagggaaugaagaggacc

SEQ ID NO: 1252969 - RNA, 19 nt, Artificial Sequence
  Description of Artificial Sequence: Synthetic oligonucleotide
uagcuuuuauuuaccuacc

SEQ ID NO: 1252970 - RNA, 19 nt, Artificial Sequence
  Description of Artificial Sequence: Synthetic oligonucleotide
ugccccagcccuuaaauac

SEQ ID NO: 1252971 - RNA, 19 nt, Artificial Sequence
  Description of Artificial Sequence: Synthetic oligonucleotide
cuuuggaacgggcacgggc

SEQ ID NO: 1252972 - RNA, 19 nt, Artificial Sequence
  Description of Artificial Sequence: Synthetic oligonucleotide
auauguuuguccaccaucu

SEQ ID NO: 1252973 - RNA, 19 nt, Artificial Sequence
  Description of Artificial Sequence: Synthetic oligonucleotide
aaccauuucccucgaggcu

SEQ ID NO: 1252974 - RNA, 19 nt, Artificial Sequence
  Description of Artificial Sequence: Synthetic oligonucleotide
gaacaaucuggguugucac

SEQ ID NO: 1252975 - RNA, 19 nt, Artificial Sequence
  Description of Artificial Sequence: Synthetic oligonucleotide
uucguucuugggagcagcg

SEQ ID NO: 1252976 - RNA, 19 nt, Artificial Sequence
  Description of Artificial Sequence: Synthetic oligonucleotide
uccaacacaucagaggggu

SEQ ID NO: 1252977 - RNA, 19 nt, Artificial Sequence
  Description of Artificial Sequence: Synthetic oligonucleotide
aggacuugugcgcacaagu

SEQ ID NO: 1252978 - RNA, 19 nt, Artificial Sequence
  Description of Artificial Sequence: Synthetic oligonucleotide
uguggcgcccucccuaccg

SEQ ID NO: 1252979 - RNA, 19 nt, Artificial Sequence
  Description of Artificial Sequence: Synthetic oligonucleotide
aacgggccaggucuguauc

SEQ ID NO: 1252980 - RNA, 19 nt, Artificial Sequence
  Description of Artificial Sequence: Synthetic oligonucleotide
aguuaucugugcuccaccu

SEQ ID NO: 1252981 - RNA, 19 nt, Artificial Sequence
  Description of Artificial Sequence: Synthetic oligonucleotide
cacuccuuuuacaugugag

SEQ ID NO: 1252982 - RNA, 19 nt, Artificial Sequence
  Description of Artificial Sequence: Synthetic oligonucleotide
agucacuugacucgaucug

SEQ ID NO: 1252983 - RNA, 19 nt, Artificial Sequence
  Description of Artificial Sequence: Synthetic oligonucleotide
uuuguccuaccuagccccg

SEQ ID NO: 1252984 - RNA, 19 nt, Artificial Sequence
  Description of Artificial Sequence: Synthetic oligonucleotide
aggacaaguaccacuuugg

SEQ ID NO: 1252985 - RNA, 19 nt, Artificial Sequence
  Description of Artificial Sequence: Synthetic oligonucleotide
gugacaaaggcaauaugug

SEQ ID NO: 1252986 - RNA, 19 nt, Artificial Sequence
  Description of Artificial Sequence: Synthetic oligonucleotide
ucuccuuuugaguccggcc

SEQ ID NO: 1252987 - RNA, 19 nt, Artificial Sequence
  Description of Artificial Sequence: Synthetic oligonucleotide
agaucagccucaaaacggg

SEQ ID NO: 1252988 - RNA, 19 nt, Artificial Sequence
  Description of Artificial Sequence: Synthetic oligonucleotide
ugugcgcacaaguuuuagc

SEQ ID NO: 1252989 - RNA, 19 nt, Artificial Sequence
  Description of Artificial Sequence: Synthetic oligonucleotide
ugggcaaaaccauuucccu

SEQ ID NO: 1252990 - RNA, 19 nt, Artificial Sequence
  Description of Artificial Sequence: Synthetic oligonucleotide
cauguacggaaacaggcuc

SEQ ID NO: 1252991 - RNA, 19 nt, Artificial Sequence
  Description of Artificial Sequence: Synthetic oligonucleotide
augauuuauuggaaucagg

SEQ ID NO: 1252992 - RNA, 19 nt, Artificial Sequence
  Description of Artificial Sequence: Synthetic oligonucleotide
uugucgucaccaaauuccu

SEQ ID NO: 1252993 - RNA, 19 nt, Artificial Sequence
  Description of Artificial Sequence: Synthetic oligonucleotide
cacucgauggaacaaucug

SEQ ID NO: 1252994 - RNA, 19 nt, Artificial Sequence
  Description of Artificial Sequence: Synthetic oligonucleotide
cucaacuaggccagagccc

SEQ ID NO: 1252995 - RNA, 19 nt, Artificial Sequence
  Description of Artificial Sequence: Synthetic oligonucleotide
caggucuguauccagccgc

SEQ ID NO: 1252996 - RNA, 19 nt, Artificial Sequence
  Description of Artificial Sequence: Synthetic oligonucleotide
uccagauaauguuccaaau

SEQ ID NO: 1252997 - RNA, 19 nt, Artificial Sequence
  Description of Artificial Sequence: Synthetic oligonucleotide
uucccuuuggaacgggcac

SEQ ID NO: 1252998 - RNA, 19 nt, Artificial Sequence
  Description of Artificial Sequence: Synthetic oligonucleotide
uuggguuucaugucuuguc

SEQ ID NO: 1252999 - RNA, 19 nt, Artificial Sequence
  Description of Artificial Sequence: Synthetic oligonucleotide
cucuguaauucaaauggga

SEQ ID NO: 1253000 - RNA, 19 nt, Artificial Sequence
  Description of Artificial Sequence: Synthetic oligonucleotide
gaguuaucugugcuccacc

SEQ ID NO: 1253001 - RNA, 19 nt, Artificial Sequence
  Description of Artificial Sequence: Synthetic oligonucleotide
uggagcgagagcacauacc

SEQ ID NO: 1253002 - RNA, 19 nt, Artificial Sequence
  Description of Artificial Sequence: Synthetic oligonucleotide
acaggcauauccaacacau

SEQ ID NO: 1253003 - RNA, 19 nt, Artificial Sequence
  Description of Artificial Sequence: Synthetic oligonucleotide
gguucguugggauccacag

SEQ ID NO: 1253004 - RNA, 19 nt, Artificial Sequence
  Description of Artificial Sequence: Synthetic oligonucleotide
uauccagccgccgaauaug

SEQ ID NO: 1253005 - RNA, 19 nt, Artificial Sequence
  Description of Artificial Sequence: Synthetic oligonucleotide
caggacaaguaccacuuug

SEQ ID NO: 1253006 - RNA, 19 nt, Artificial Sequence
  Description of Artificial Sequence: Synthetic oligonucleotide
agcagaugcauaauuacaa

SEQ ID NO: 1253007 - RNA, 19 nt, Artificial Sequence
  Description of Artificial Sequence: Synthetic oligonucleotide
agugggauuccuucccucu

SEQ ID NO: 1253008 - RNA, 19 nt, Artificial Sequence
  Description of Artificial Sequence: Synthetic oligonucleotide
ucgucaccaaauuccuugc

SEQ ID NO: 1253009 - RNA, 19 nt, Artificial Sequence
  Description of Artificial Sequence: Synthetic oligonucleotide
ucauagucacuugacucga

SEQ ID NO: 1253010 - RNA, 19 nt, Artificial Sequence
  Description of Artificial Sequence: Synthetic oligonucleotide
uggugacaaaggcaauaug

SEQ ID NO: 1253011 - RNA, 19 nt, Artificial Sequence
  Description of Artificial Sequence: Synthetic oligonucleotide
gaucuagaagaucccucac

SEQ ID NO: 1253012 - RNA, 19 nt, Artificial Sequence
  Description of Artificial Sequence: Synthetic oligonucleotide
aaaaggacagugaguggga

SEQ ID NO: 1253013 - RNA, 19 nt, Artificial Sequence
  Description of Artificial Sequence: Synthetic oligonucleotide
auggagagguuuguccuac

SEQ ID NO: 1253014 - RNA, 19 nt, Artificial Sequence
  Description of Artificial Sequence: Synthetic oligonucleotide
acgggccaggucuguaucc

SEQ ID NO: 1253015 - RNA, 19 nt, Artificial Sequence
  Description of Artificial Sequence: Synthetic oligonucleotide
ggagcagaugcauaauuac

SEQ ID NO: 1253016 - RNA, 19 nt, Artificial Sequence
  Description of Artificial Sequence: Synthetic oligonucleotide
auaaauccccgggucacag

SEQ ID NO: 1253017 - RNA, 19 nt, Artificial Sequence
  Description of Artificial Sequence: Synthetic oligonucleotide
uguuuagcacauguacgga

SEQ ID NO: 1253018 - RNA, 19 nt, Artificial Sequence
  Description of Artificial Sequence: Synthetic oligonucleotide
caggauaaauccccggguc

SEQ ID NO: 1253019 - RNA, 19 nt, Artificial Sequence
  Description of Artificial Sequence: Synthetic oligonucleotide
ggaaucaggugaaaagugc

SEQ ID NO: 1253020 - RNA, 19 nt, Artificial Sequence
  Description of Artificial Sequence: Synthetic oligonucleotide
gaagggguaaucacucaac

SEQ ID NO: 1253021 - RNA, 19 nt, Artificial Sequence
  Description of Artificial Sequence: Synthetic oligonucleotide
ugggcaagucguaaauauc

SEQ ID NO: 1253022 - RNA, 19 nt, Artificial Sequence
  Description of Artificial Sequence: Synthetic oligonucleotide
uuggucuaggucccucaug

SEQ ID NO: 1253023 - RNA, 19 nt, Artificial Sequence
  Description of Artificial Sequence: Synthetic oligonucleotide
uucacuggagcagaugcau

SEQ ID NO: 1253024 - RNA, 19 nt, Artificial Sequence
  Description of Artificial Sequence: Synthetic oligonucleotide
ucccuuuggaacgggcacg

SEQ ID NO: 1253025 - RNA, 19 nt, Artificial Sequence
  Description of Artificial Sequence: Synthetic oligonucleotide
ccaaauuccuugcacuugc

SEQ ID NO: 1253026 - RNA, 19 nt, Artificial Sequence
  Description of Artificial Sequence: Synthetic oligonucleotide
guuuagcacauguacggaa

SEQ ID NO: 1253027 - RNA, 19 nt, Artificial Sequence
  Description of Artificial Sequence: Synthetic oligonucleotide
aggacccucccucugaaau

SEQ ID NO: 1253028 - RNA, 19 nt, Artificial Sequence
  Description of Artificial Sequence: Synthetic oligonucleotide
uauguuuguccaccaucuc

SEQ ID NO: 1253029 - RNA, 19 nt, Artificial Sequence
  Description of Artificial Sequence: Synthetic oligonucleotide
cugucacuagcccagguca

SEQ ID NO: 1253030 - RNA, 19 nt, Artificial Sequence
  Description of Artificial Sequence: Synthetic oligonucleotide
uuucccucgaggcuugguu

SEQ ID NO: 1253031 - RNA, 19 nt, Artificial Sequence
  Description of Artificial Sequence: Synthetic oligonucleotide
cauggcaagcugcaccuug

SEQ ID NO: 1253032 - RNA, 19 nt, Artificial Sequence
  Description of Artificial Sequence: Synthetic oligonucleotide
gaagggacggcgguacugc

SEQ ID NO: 1253033 - RNA, 19 nt, Artificial Sequence
  Description of Artificial Sequence: Synthetic oligonucleotide
ugacucgaucuguuucucc

SEQ ID NO: 1253034 - RNA, 19 nt, Artificial Sequence
  Description of Artificial Sequence: Synthetic oligonucleotide
caaauuccuugcacuugcc

SEQ ID NO: 1253035 - RNA, 19 nt, Artificial Sequence
  Description of Artificial Sequence: Synthetic oligonucleotide
gaccuggugacaaaggcaa

SEQ ID NO: 1253036 - RNA, 19 nt, Artificial Sequence
  Description of Artificial Sequence: Synthetic oligonucleotide
cacucaacuaggccagagc

SEQ ID NO: 1253037 - RNA, 19 nt, Artificial Sequence
  Description of Artificial Sequence: Synthetic oligonucleotide
aagaucccucaccauggaa

SEQ ID NO: 1253038 - RNA, 19 nt, Artificial Sequence
  Description of Artificial Sequence: Synthetic oligonucleotide
ucacucaacuaggccagag

SEQ ID NO: 1253039 - RNA, 19 nt, Artificial Sequence
  Description of Artificial Sequence: Synthetic oligonucleotide
accgucaguggcuguggcg

SEQ ID NO: 1253040 - RNA, 19 nt, Artificial Sequence
  Description of Artificial Sequence: Synthetic oligonucleotide
gagacugggagagugccca

SEQ ID NO: 1253041 - RNA, 19 nt, Artificial Sequence
  Description of Artificial Sequence: Synthetic oligonucleotide
uuuucguucuugggagcag

SEQ ID NO: 1253042 - RNA, 19 nt, Artificial Sequence
  Description of Artificial Sequence: Synthetic oligonucleotide
uugccccucucccauucag

SEQ ID NO: 1253043 - RNA, 19 nt, Artificial Sequence
  Description of Artificial Sequence: Synthetic oligonucleotide
ccuaccgggguuuggaugc

SEQ ID NO: 1253044 - RNA, 19 nt, Artificial Sequence
  Description of Artificial Sequence: Synthetic oligonucleotide
uuggaacgggcacgggcag

SEQ ID NO: 1253045 - RNA, 19 nt, Artificial Sequence
  Description of Artificial Sequence: Synthetic oligonucleotide
guccagauaauguuccaaa

SEQ ID NO: 1253046 - RNA, 19 nt, Artificial Sequence
  Description of Artificial Sequence: Synthetic oligonucleotide
uuuggucuaggucccucau

SEQ ID NO: 1253047 - RNA, 19 nt, Artificial Sequence
  Description of Artificial Sequence: Synthetic oligonucleotide
agugcuucacuggagcaga

SEQ ID NO: 1253048 - RNA, 19 nt, Artificial Sequence
  Description of Artificial Sequence: Synthetic oligonucleotide
acauguacggaaacaggcu

SEQ ID NO: 1253049 - RNA, 19 nt, Artificial Sequence
  Description of Artificial Sequence: Synthetic oligonucleotide
aaucaggugaaaagugcuu

SEQ ID NO: 1253050 - RNA, 19 nt, Artificial Sequence
  Description of Artificial Sequence: Synthetic oligonucleotide
gcaauauguggguucguug

SEQ ID NO: 1253051 - RNA, 19 nt, Artificial Sequence
  Description of Artificial Sequence: Synthetic oligonucleotide
aaggacagugagugggauu

SEQ ID NO: 1253052 - RNA, 19 nt, Artificial Sequence
  Description of Artificial Sequence: Synthetic oligonucleotide
ggguaaucacucaacuagg

SEQ ID NO: 1253053 - RNA, 19 nt, Artificial Sequence
  Description of Artificial Sequence: Synthetic oligonucleotide
ggcgaaguggaaccacucg

SEQ ID NO: 1253054 - RNA, 19 nt, Artificial Sequence
  Description of Artificial Sequence: Synthetic oligonucleotide
uagcacauguacggaaaca

SEQ ID NO: 1253055 - RNA, 19 nt, Artificial Sequence
  Description of Artificial Sequence: Synthetic oligonucleotide
gguaaucacucaacuaggc

SEQ ID NO: 1253056 - RNA, 19 nt, Artificial Sequence
  Description of Artificial Sequence: Synthetic oligonucleotide
ggugacaaaggcaauaugu

SEQ ID NO: 1253057 - RNA, 19 nt, Artificial Sequence
  Description of Artificial Sequence: Synthetic oligonucleotide
aaguaccacuuuggguuuc

SEQ ID NO: 1253058 - RNA, 19 nt, Artificial Sequence
  Description of Artificial Sequence: Synthetic oligonucleotide
uauuucuggcaagccauuc

SEQ ID NO: 1253059 - RNA, 19 nt, Artificial Sequence
  Description of Artificial Sequence: Synthetic oligonucleotide
agcugaaaguuucucugua

SEQ ID NO: 1253060 - RNA, 19 nt, Artificial Sequence
  Description of Artificial Sequence: Synthetic oligonucleotide
augggagguuuucaauacu

SEQ ID NO: 1253061 - RNA, 19 nt, Artificial Sequence
  Description of Artificial Sequence: Synthetic oligonucleotide
aaccacucgauggaacaau

SEQ ID NO: 1253062 - RNA, 19 nt, Artificial Sequence
  Description of Artificial Sequence: Synthetic oligonucleotide
cagagcccaaaugaucuag

SEQ ID NO: 1253063 - RNA, 19 nt, Artificial Sequence
  Description of Artificial Sequence: Synthetic oligonucleotide
cauaccgucaguggcugug

SEQ ID NO: 1253064 - RNA, 19 nt, Artificial Sequence
  Description of Artificial Sequence: Synthetic oligonucleotide
acggcgguacugcacuguc

SEQ ID NO: 1253065 - RNA, 19 nt, Artificial Sequence
  Description of Artificial Sequence: Synthetic oligonucleotide
uguccuaccuagccccggu

SEQ ID NO: 1253066 - RNA, 19 nt, Artificial Sequence
  Description of Artificial Sequence: Synthetic oligonucleotide
ccaacuugucaauuucagc

SEQ ID NO: 1253067 - RNA, 19 nt, Artificial Sequence
  Description of Artificial Sequence: Synthetic oligonucleotide
gggcaagucguaaauauca

SEQ ID NO: 1253068 - RNA, 19 nt, Artificial Sequence
  Description of Artificial Sequence: Synthetic oligonucleotide
cagugcaaggcaccccucc

SEQ ID NO: 1253069 - RNA, 19 nt, Artificial Sequence
  Description of Artificial Sequence: Synthetic oligonucleotide
cagccgccgaauauguuug

SEQ ID NO: 1253070 - RNA, 19 nt, Artificial Sequence
  Description of Artificial Sequence: Synthetic oligonucleotide
uugugcgcacaaguuuuag

SEQ ID NO: 1253071 - RNA, 19 nt, Artificial Sequence
  Description of Artificial Sequence: Synthetic oligonucleotide
agcagaggcguuccucucu

SEQ ID NO: 1253072 - RNA, 19 nt, Artificial Sequence
  Description of Artificial Sequence: Synthetic oligonucleotide
cucgaggcuugguugucag

SEQ ID NO: 1253073 - RNA, 19 nt, Artificial Sequence
  Description of Artificial Sequence: Synthetic oligonucleotide
auauguggguucguuggga

SEQ ID NO: 1253074 - RNA, 19 nt, Artificial Sequence
  Description of Artificial Sequence: Synthetic oligonucleotide
acuugugcgcacaaguuuu

SEQ ID NO: 1253075 - RNA, 19 nt, Artificial Sequence
  Description of Artificial Sequence: Synthetic oligonucleotide
agcguggauagcuuuuauu

SEQ ID NO: 1253076 - RNA, 19 nt, Artificial Sequence
  Description of Artificial Sequence: Synthetic oligonucleotide
cuugacucgaucuguuucu

SEQ ID NO: 1253077 - RNA, 19 nt, Artificial Sequence
  Description of Artificial Sequence: Synthetic oligonucleotide
agaccuggugacaaaggca

SEQ ID NO: 1253078 - RNA, 19 nt, Artificial Sequence
  Description of Artificial Sequence: Synthetic oligonucleotide
ccgaauauguuuguccacc

SEQ ID NO: 1253079 - RNA, 19 nt, Artificial Sequence
  Description of Artificial Sequence: Synthetic oligonucleotide
gcgcuacucauauauucag

SEQ ID NO: 1253080 - RNA, 19 nt, Artificial Sequence
  Description of Artificial Sequence: Synthetic oligonucleotide
caaggcaccccuccaggug

SEQ ID NO: 1253081 - RNA, 19 nt, Artificial Sequence
  Description of Artificial Sequence: Synthetic oligonucleotide
gagcccaaaugaucuagaa

SEQ ID NO: 1253082 - RNA, 19 nt, Artificial Sequence
  Description of Artificial Sequence: Synthetic oligonucleotide
gagagguuuguccuaccua

SEQ ID NO: 1253083 - RNA, 19 nt, Artificial Sequence
  Description of Artificial Sequence: Synthetic oligonucleotide
ugcgcacaaguuuuagcuu

SEQ ID NO: 1253084 - RNA, 19 nt, Artificial Sequence
  Description of Artificial Sequence: Synthetic oligonucleotide
auaccgucaguggcugugg

SEQ ID NO: 1253085 - RNA, 19 nt, Artificial Sequence
  Description of Artificial Sequence: Synthetic oligonucleotide
guggagcgagagcacauac

SEQ ID NO: 1253086 - RNA, 19 nt, Artificial Sequence
  Description of Artificial Sequence: Synthetic oligonucleotide
uccuuuugaguccggccuu

SEQ ID NO: 1253087 - RNA, 19 nt, Artificial Sequence
  Description of Artificial Sequence: Synthetic oligonucleotide
aauccccgggucacagagg

SEQ ID NO: 1253088 - RNA, 19 nt, Artificial Sequence
  Description of Artificial Sequence: Synthetic oligonucleotide
augucuuguccuauuucug

SEQ ID NO: 1253089 - RNA, 19 nt, Artificial Sequence
  Description of Artificial Sequence: Synthetic oligonucleotide
cacuagcccaggucagggg

SEQ ID NO: 1253090 - RNA, 19 nt, Artificial Sequence
  Description of Artificial Sequence: Synthetic oligonucleotide
ucccucgaggcuugguugu

SEQ ID NO: 1253091 - RNA, 19 nt, Artificial Sequence
  Description of Artificial Sequence: Synthetic oligonucleotide
agaagggacggcgguacug

SEQ ID NO: 1253092 - RNA, 19 nt, Artificial Sequence
  Description of Artificial Sequence: Synthetic oligonucleotide
ucguugggauccacaggca

SEQ ID NO: 1253093 - RNA, 19 nt, Artificial Sequence
  Description of Artificial Sequence: Synthetic oligonucleotide
aggugggcaagucguaaau

SEQ ID NO: 1253094 - RNA, 19 nt, Artificial Sequence
  Description of Artificial Sequence: Synthetic oligonucleotide
gcaagucguaaauaucaca

SEQ ID NO: 1253095 - RNA, 19 nt, Artificial Sequence
  Description of Artificial Sequence: Synthetic oligonucleotide
gauggagagguuuguccua

SEQ ID NO: 1253096 - RNA, 19 nt, Artificial Sequence
  Description of Artificial Sequence: Synthetic oligonucleotide
gagauugaggagacuggga

SEQ ID NO: 1253097 - RNA, 19 nt, Artificial Sequence
  Description of Artificial Sequence: Synthetic oligonucleotide
agaguggagcgagagcaca

SEQ ID NO: 1253098 - RNA, 19 nt, Artificial Sequence
  Description of Artificial Sequence: Synthetic oligonucleotide
auguacggaaacaggcucu

SEQ ID NO: 1253099 - RNA, 19 nt, Artificial Sequence
  Description of Artificial Sequence: Synthetic oligonucleotide
gagcagcgugggcaaaacc

SEQ ID NO: 1253100 - RNA, 19 nt, Artificial Sequence
  Description of Artificial Sequence: Synthetic oligonucleotide
ucucugucacuagcccagg

SEQ ID NO: 1253101 - RNA, 19 nt, Artificial Sequence
  Description of Artificial Sequence: Synthetic oligonucleotide
cuuuggucuaggucccuca

SEQ ID NO: 1253102 - RNA, 19 nt, Artificial Sequence
  Description of Artificial Sequence: Synthetic oligonucleotide
aagggacggcgguacugca

SEQ ID NO: 1253103 - RNA, 19 nt, Artificial Sequence
  Description of Artificial Sequence: Synthetic oligonucleotide
ucucccauucagucaggau

SEQ ID NO: 1253104 - RNA, 19 nt, Artificial Sequence
  Description of Artificial Sequence: Synthetic oligonucleotide
cuaccuagccccggugggg

SEQ ID NO: 1253105 - RNA, 19 nt, Artificial Sequence
  Description of Artificial Sequence: Synthetic oligonucleotide
aacgggcacgggcagcuuu

SEQ ID NO: 1253106 - RNA, 19 nt, Artificial Sequence
  Description of Artificial Sequence: Synthetic oligonucleotide
uuguccuaccuagccccgg

SEQ ID NO: 1253107 - RNA, 19 nt, Artificial Sequence
  Description of Artificial Sequence: Synthetic oligonucleotide
gccaacuugucaauuucag

SEQ ID NO: 1253108 - RNA, 19 nt, Artificial Sequence
  Description of Artificial Sequence: Synthetic oligonucleotide
gggcgcuacucauauauuc

SEQ ID NO: 1253109 - RNA, 19 nt, Artificial Sequence
  Description of Artificial Sequence: Synthetic oligonucleotide
accgggguuuggaugcagc

SEQ ID NO: 1253110 - RNA, 19 nt, Artificial Sequence
  Description of Artificial Sequence: Synthetic oligonucleotide
cuucacuggagcagaugca

SEQ ID NO: 1253111 - RNA, 19 nt, Artificial Sequence
  Description of Artificial Sequence: Synthetic oligonucleotide
uuauuggaaucaggugaaa

SEQ ID NO: 1253112 - RNA, 19 nt, Artificial Sequence
  Description of Artificial Sequence: Synthetic oligonucleotide
gguuuucaauacuguccag

SEQ ID NO: 1253113 - RNA, 19 nt, Artificial Sequence
  Description of Artificial Sequence: Synthetic oligonucleotide
gagcugucauagucacuug

SEQ ID NO: 1253114 - RNA, 19 nt, Artificial Sequence
  Description of Artificial Sequence: Synthetic oligonucleotide
gcgcacaaguuuuagcuuc

SEQ ID NO: 1253115 - RNA, 19 nt, Artificial Sequence
  Description of Artificial Sequence: Synthetic oligonucleotide
gucuguauccagccgccga

SEQ ID NO: 1253116 - RNA, 19 nt, Artificial Sequence
  Description of Artificial Sequence: Synthetic oligonucleotide
ggauaaauccccgggucac

SEQ ID NO: 1253117 - RNA, 19 nt, Artificial Sequence
  Description of Artificial Sequence: Synthetic oligonucleotide
ccgccgaauauguuugucc

SEQ ID NO: 1253118 - RNA, 19 nt, Artificial Sequence
  Description of Artificial Sequence: Synthetic oligonucleotide
ggagaccuggugacaaagg

SEQ ID NO: 1253119 - RNA, 19 nt, Artificial Sequence
  Description of Artificial Sequence: Synthetic oligonucleotide
cacauaccgucaguggcug

SEQ ID NO: 1253120 - RNA, 19 nt, Artificial Sequence
  Description of Artificial Sequence: Synthetic oligonucleotide
gaauauguuuguccaccau

SEQ ID NO: 1253121 - RNA, 19 nt, Artificial Sequence
  Description of Artificial Sequence: Synthetic oligonucleotide
ggcgguacugcacugucga

SEQ ID NO: 1253122 - RNA, 19 nt, Artificial Sequence
  Description of Artificial Sequence: Synthetic oligonucleotide
gacuugugcgcacaaguuu

SEQ ID NO: 1253123 - RNA, 19 nt, Artificial Sequence
  Description of Artificial Sequence: Synthetic oligonucleotide
ucgaggcuugguugucagc

SEQ ID NO: 1253124 - RNA, 19 nt, Artificial Sequence
  Description of Artificial Sequence: Synthetic oligonucleotide
ggaagggguaaucacucaa

SEQ ID NO: 1253125 - RNA, 19 nt, Artificial Sequence
  Description of Artificial Sequence: Synthetic oligonucleotide
cuccuuuugaguccggccu

SEQ ID NO: 1253126 - RNA, 19 nt, Artificial Sequence
  Description of Artificial Sequence: Synthetic oligonucleotide
ugucgucaccaaauuccuu

SEQ ID NO: 1253127 - RNA, 19 nt, Artificial Sequence
  Description of Artificial Sequence: Synthetic oligonucleotide
ggguggacacugccaaagg

SEQ ID NO: 1253128 - RNA, 19 nt, Artificial Sequence
  Description of Artificial Sequence: Synthetic oligonucleotide
accuugucgucaccaaauu

SEQ ID NO: 1253129 - RNA, 19 nt, Artificial Sequence
  Description of Artificial Sequence: Synthetic oligonucleotide
gcgaaguggaaccacucga

SEQ ID NO: 1253130 - RNA, 19 nt, Artificial Sequence
  Description of Artificial Sequence: Synthetic oligonucleotide
uugacucgaucuguuucuc

SEQ ID NO: 1253131 - RNA, 19 nt, Artificial Sequence
  Description of Artificial Sequence: Synthetic oligonucleotide
ccugccucucauccaaucc

SEQ ID NO: 1253132 - RNA, 19 nt, Artificial Sequence
  Description of Artificial Sequence: Synthetic oligonucleotide
caaggaaaccuauuucuuu

SEQ ID NO: 1253133 - RNA, 19 nt, Artificial Sequence
  Description of Artificial Sequence: Synthetic oligonucleotide
uaggagaccuggugacaaa

SEQ ID NO: 1253134 - RNA, 19 nt, Artificial Sequence
  Description of Artificial Sequence: Synthetic oligonucleotide
agagcccaaaugaucuaga

SEQ ID NO: 1253135 - RNA, 19 nt, Artificial Sequence
  Description of Artificial Sequence: Synthetic oligonucleotide
aagcugcaccuugucguca

SEQ ID NO: 1253136 - RNA, 19 nt, Artificial Sequence
  Description of Artificial Sequence: Synthetic oligonucleotide
ccuaccuagccccgguggg

SEQ ID NO: 1253137 - RNA, 19 nt, Artificial Sequence
  Description of Artificial Sequence: Synthetic oligonucleotide
gagaguggagcgagagcac

SEQ ID NO: 1253138 - RNA, 19 nt, Artificial Sequence
  Description of Artificial Sequence: Synthetic oligonucleotide
ugucgacaucucccuggac

SEQ ID NO: 1253139 - RNA, 19 nt, Artificial Sequence
  Description of Artificial Sequence: Synthetic oligonucleotide
cgaggcuugguugucagcc

SEQ ID NO: 1253140 - RNA, 19 nt, Artificial Sequence
  Description of Artificial Sequence: Synthetic oligonucleotide
ggauagcuuuuauuuaccu

SEQ ID NO: 1253141 - RNA, 19 nt, Artificial Sequence
  Description of Artificial Sequence: Synthetic oligonucleotide
ccaaaugaucuagaagauc

SEQ ID NO: 1253142 - RNA, 19 nt, Artificial Sequence
  Description of Artificial Sequence: Synthetic oligonucleotide
ggcgcuacucauauauuca

SEQ ID NO: 1253143 - RNA, 19 nt, Artificial Sequence
  Description of Artificial Sequence: Synthetic oligonucleotide
ggcaagucguaaauaucac

SEQ ID NO: 1253144 - RNA, 19 nt, Artificial Sequence
  Description of Artificial Sequence: Synthetic oligonucleotide
cuaccccacuccuuuuaca

SEQ ID NO: 1253145 - RNA, 19 nt, Artificial Sequence
  Description of Artificial Sequence: Synthetic oligonucleotide
ucagccccacacaggcgaa

SEQ ID NO: 1253146 - RNA, 19 nt, Artificial Sequence
  Description of Artificial Sequence: Synthetic oligonucleotide
agcgugggcaaaaccauuu

SEQ ID NO: 1253147 - RNA, 19 nt, Artificial Sequence
  Description of Artificial Sequence: Synthetic oligonucleotide
accuaccccacuccuuuua

SEQ ID NO: 1253148 - RNA, 19 nt, Artificial Sequence
  Description of Artificial Sequence: Synthetic oligonucleotide
ccgucaguggcuguggcgc

SEQ ID NO: 1253149 - RNA, 19 nt, Artificial Sequence
  Description of Artificial Sequence: Synthetic oligonucleotide
ggucuaggucccucaugag

SEQ ID NO: 1253150 - RNA, 19 nt, Artificial Sequence
  Description of Artificial Sequence: Synthetic oligonucleotide
aucccauacucaggacuug

SEQ ID NO: 1253151 - RNA, 19 nt, Artificial Sequence
  Description of Artificial Sequence: Synthetic oligonucleotide
caucccauacucaggacuu

SEQ ID NO: 1253152 - RNA, 19 nt, Artificial Sequence
  Description of Artificial Sequence: Synthetic oligonucleotide
cacugucgacaucucccug

SEQ ID NO: 1253153 - RNA, 19 nt, Artificial Sequence
  Description of Artificial Sequence: Synthetic oligonucleotide
caggacuugugcgcacaag

SEQ ID NO: 1253154 - RNA, 19 nt, Artificial Sequence
  Description of Artificial Sequence: Synthetic oligonucleotide
cugucgacaucucccugga

SEQ ID NO: 1253155 - RNA, 19 nt, Artificial Sequence
  Description of Artificial Sequence: Synthetic oligonucleotide
ggaauguuuagcacaugua

SEQ ID NO: 1253156 - RNA, 19 nt, Artificial Sequence
  Description of Artificial Sequence: Synthetic oligonucleotide
gcaucccauacucaggacu

SEQ ID NO: 1253157 - RNA, 19 nt, Artificial Sequence
  Description of Artificial Sequence: Synthetic oligonucleotide
auccagccgccgaauaugu

SEQ ID NO: 1253158 - RNA, 19 nt, Artificial Sequence
  Description of Artificial Sequence: Synthetic oligonucleotide
cguaaauaucacaggacaa

SEQ ID NO: 1253159 - RNA, 19 nt, Artificial Sequence
  Description of Artificial Sequence: Synthetic oligonucleotide
aguggccaacuugucaauu

SEQ ID NO: 1253160 - RNA, 19 nt, Artificial Sequence
  Description of Artificial Sequence: Synthetic oligonucleotide
guauccagccgccgaauau

SEQ ID NO: 1253161 - RNA, 19 nt, Artificial Sequence
  Description of Artificial Sequence: Synthetic oligonucleotide
ccaggucuguauccagccg

SEQ ID NO: 1253162 - RNA, 19 nt, Artificial Sequence
  Description of Artificial Sequence: Synthetic oligonucleotide
ccuauuucuggcaagccau

SEQ ID NO: 1253163 - RNA, 19 nt, Artificial Sequence
  Description of Artificial Sequence: Synthetic oligonucleotide
acauaccgucaguggcugu

SEQ ID NO: 1253164 - RNA, 19 nt, Artificial Sequence
  Description of Artificial Sequence: Synthetic oligonucleotide
caccuugucgucaccaaau

SEQ ID NO: 1253165 - RNA, 19 nt, Artificial Sequence
  Description of Artificial Sequence: Synthetic oligonucleotide
cuugugcgcacaaguuuua

SEQ ID NO: 1253166 - RNA, 19 nt, Artificial Sequence
  Description of Artificial Sequence: Synthetic oligonucleotide
caggcugcgggcgcuacuc

SEQ ID NO: 1253167 - RNA, 19 nt, Artificial Sequence
  Description of Artificial Sequence: Synthetic oligonucleotide
gguggacacugccaaaggu

SEQ ID NO: 1253168 - RNA, 19 nt, Artificial Sequence
  Description of Artificial Sequence: Synthetic oligonucleotide
ccagaggaugcaaaaggaa

SEQ ID NO: 1253169 - RNA, 19 nt, Artificial Sequence
  Description of Artificial Sequence: Synthetic oligonucleotide
auuucccucgaggcuuggu

SEQ ID NO: 1253170 - RNA, 19 nt, Artificial Sequence
  Description of Artificial Sequence: Synthetic oligonucleotide
agccccacacaggcgaagu

SEQ ID NO: 1253171 - RNA, 19 nt, Artificial Sequence
  Description of Artificial Sequence: Synthetic oligonucleotide
uccacugccccagcccuua

SEQ ID NO: 1253172 - RNA, 19 nt, Artificial Sequence
  Description of Artificial Sequence: Synthetic oligonucleotide
ggcaagccauucuccugcc

SEQ ID NO: 1253173 - RNA, 19 nt, Artificial Sequence
  Description of Artificial Sequence: Synthetic oligonucleotide
caggugggcaagucguaaa

SEQ ID NO: 1253174 - RNA, 19 nt, Artificial Sequence
  Description of Artificial Sequence: Synthetic oligonucleotide
guuuguccaccaucucaua

SEQ ID NO: 1253175 - RNA, 19 nt, Artificial Sequence
  Description of Artificial Sequence: Synthetic oligonucleotide
agccgccgaauauguuugu

SEQ ID NO: 1253176 - RNA, 19 nt, Artificial Sequence
  Description of Artificial Sequence: Synthetic oligonucleotide
cagcagaggcguuccucuc

SEQ ID NO: 1253177 - RNA, 19 nt, Artificial Sequence
  Description of Artificial Sequence: Synthetic oligonucleotide
cccauacucaggacuugug

SEQ ID NO: 1253178 - RNA, 19 nt, Artificial Sequence
  Description of Artificial Sequence: Synthetic oligonucleotide
uccagccgccgaauauguu

SEQ ID NO: 1253179 - RNA, 19 nt, Artificial Sequence
  Description of Artificial Sequence: Synthetic oligonucleotide
cccuuuggaacgggcacgg

SEQ ID NO: 1253180 - RNA, 19 nt, Artificial Sequence
  Description of Artificial Sequence: Synthetic oligonucleotide
ggucuguauccagccgccg

SEQ ID NO: 1253181 - RNA, 19 nt, Artificial Sequence
  Description of Artificial Sequence: Synthetic oligonucleotide
agggguggacacugccaaa

SEQ ID NO: 1253182 - RNA, 19 nt, Artificial Sequence
  Description of Artificial Sequence: Synthetic oligonucleotide
guacggaaacaggcucuac

SEQ ID NO: 1253183 - RNA, 19 nt, Artificial Sequence
  Description of Artificial Sequence: Synthetic oligonucleotide
cauuucccucgaggcuugg

SEQ ID NO: 1253184 - RNA, 19 nt, Artificial Sequence
  Description of Artificial Sequence: Synthetic oligonucleotide
cuggugacaaaggcaauau

SEQ ID NO: 1253185 - RNA, 19 nt, Artificial Sequence
  Description of Artificial Sequence: Synthetic oligonucleotide
cccuaccgggguuuggaug

SEQ ID NO: 1253186 - RNA, 19 nt, Artificial Sequence
  Description of Artificial Sequence: Synthetic oligonucleotide
gcgggcgcuacucauauau

SEQ ID NO: 1253187 - RNA, 19 nt, Artificial Sequence
  Description of Artificial Sequence: Synthetic oligonucleotide
gcuguggcgcccucccuac

SEQ ID NO: 1253188 - RNA, 19 nt, Artificial Sequence
  Description of Artificial Sequence: Synthetic oligonucleotide
cgagagcacauaccgucag

SEQ ID NO: 1253189 - RNA, 19 nt, Artificial Sequence
  Description of Artificial Sequence: Synthetic oligonucleotide
ccuuuuacaugugaguuau

SEQ ID NO: 1253190 - RNA, 19 nt, Artificial Sequence
  Description of Artificial Sequence: Synthetic oligonucleotide
cucggagcucaggcugcgg

SEQ ID NO: 1253191 - RNA, 19 nt, Artificial Sequence
  Description of Artificial Sequence: Synthetic oligonucleotide
caccccuccaggugggcaa

SEQ ID NO: 1253192 - RNA, 19 nt, Artificial Sequence
  Description of Artificial Sequence: Synthetic oligonucleotide
cugccccagcccuuaaaua

SEQ ID NO: 1253193 - RNA, 19 nt, Artificial Sequence
  Description of Artificial Sequence: Synthetic oligonucleotide
uggguucguugggauccac

SEQ ID NO: 1253194 - RNA, 19 nt, Artificial Sequence
  Description of Artificial Sequence: Synthetic oligonucleotide
gcgugggcaaaaccauuuc

SEQ ID NO: 1253195 - RNA, 19 nt, Artificial Sequence
  Description of Artificial Sequence: Synthetic oligonucleotide
cuguggcgcccucccuacc

SEQ ID NO: 1253196 - RNA, 19 nt, Artificial Sequence
  Description of Artificial Sequence: Synthetic oligonucleotide
gggacggcgguacugcacu

SEQ ID NO: 1253197 - RNA, 19 nt, Artificial Sequence
  Description of Artificial Sequence: Synthetic oligonucleotide
ccaacacaucagaggggug

SEQ ID NO: 1253198 - RNA, 19 nt, Artificial Sequence
  Description of Artificial Sequence: Synthetic oligonucleotide
aggcaccccuccagguggg

SEQ ID NO: 1253199 - RNA, 19 nt, Artificial Sequence
  Description of Artificial Sequence: Synthetic oligonucleotide
guaauucaaaugggagguu

SEQ ID NO: 1253200 - RNA, 19 nt, Artificial Sequence
  Description of Artificial Sequence: Synthetic oligonucleotide
ggugggcaagucguaaaua

SEQ ID NO: 1253201 - RNA, 19 nt, Artificial Sequence
  Description of Artificial Sequence: Synthetic oligonucleotide
gcgagagcacauaccguca

SEQ ID NO: 1253202 - RNA, 19 nt, Artificial Sequence
  Description of Artificial Sequence: Synthetic oligonucleotide
cauagucacuugacucgau

SEQ ID NO: 1253203 - RNA, 19 nt, Artificial Sequence
  Description of Artificial Sequence: Synthetic oligonucleotide
ggacggcgguacugcacug

SEQ ID NO: 1253204 - RNA, 19 nt, Artificial Sequence
  Description of Artificial Sequence: Synthetic oligonucleotide
gacggcgguacugcacugu

SEQ ID NO: 1253205 - RNA, 19 nt, Artificial Sequence
  Description of Artificial Sequence: Synthetic oligonucleotide
ugcgggcgcuacucauaua

SEQ ID NO: 1253206 - RNA, 19 nt, Artificial Sequence
  Description of Artificial Sequence: Synthetic oligonucleotide
gccccagcccuuaaauaca

SEQ ID NO: 1253207 - RNA, 19 nt, Artificial Sequence
  Description of Artificial Sequence: Synthetic oligonucleotide
cccaaaugaucuagaagau

SEQ ID NO: 1253208 - RNA, 19 nt, Artificial Sequence
  Description of Artificial Sequence: Synthetic oligonucleotide
ccacuccuuuuacauguga

SEQ ID NO: 1253209 - RNA, 19 nt, Artificial Sequence
  Description of Artificial Sequence: Synthetic oligonucleotide
cacuugacucgaucuguuu

SEQ ID NO: 1253210 - RNA, 19 nt, Artificial Sequence
  Description of Artificial Sequence: Synthetic oligonucleotide
caaaggcaauauguggguu

SEQ ID NO: 1253211 - RNA, 19 nt, Artificial Sequence
  Description of Artificial Sequence: Synthetic oligonucleotide
caaccucaccauggaggca

SEQ ID NO: 1253212 - RNA, 19 nt, Artificial Sequence
  Description of Artificial Sequence: Synthetic oligonucleotide
ggcaauauguggguucguu

SEQ ID NO: 1253213 - RNA, 19 nt, Artificial Sequence
  Description of Artificial Sequence: Synthetic oligonucleotide
gcgguacugcacugucgac

SEQ ID NO: 1253214 - RNA, 19 nt, Artificial Sequence
  Description of Artificial Sequence: Synthetic oligonucleotide
cggcgguacugcacugucg

SEQ ID NO: 1253215 - RNA, 19 nt, Artificial Sequence
  Description of Artificial Sequence: Synthetic oligonucleotide
gcaaggcaccccuccaggu

SEQ ID NO: 1253216 - RNA, 19 nt, Artificial Sequence
  Description of Artificial Sequence: Synthetic oligonucleotide
cacugccccagcccuuaaa

SEQ ID NO: 1253217 - RNA, 19 nt, Artificial Sequence
  Description of Artificial Sequence: Synthetic oligonucleotide
cucauccaauccagaggau

SEQ ID NO: 1253218 - RNA, 19 nt, Artificial Sequence
  Description of Artificial Sequence: Synthetic oligonucleotide
cugcgggcgcuacucauau

SEQ ID NO: 1253219 - RNA, 19 nt, Artificial Sequence
  Description of Artificial Sequence: Synthetic oligonucleotide
ccagccgccgaauauguuu

SEQ ID NO: 1253220 - RNA, 19 nt, Artificial Sequence
  Description of Artificial Sequence: Synthetic oligonucleotide
gccgccgaauauguuuguc

SEQ ID NO: 1253221 - RNA, 19 nt, Artificial Sequence
  Description of Artificial Sequence: Synthetic oligonucleotide
ccuuuggaacgggcacggg

SEQ ID NO: 1253222 - RNA, 19 nt, Artificial Sequence
  Description of Artificial Sequence: Synthetic oligonucleotide
cgguacugcacugucgaca

SEQ ID NO: 1253223 - RNA, 19 nt, Artificial Sequence
  Description of Artificial Sequence: Synthetic oligonucleotide
ggacuugugcgcacaaguu

SEQ ID NO: 1253224 - RNA, 19 nt, Artificial Sequence
  Description of Artificial Sequence: Synthetic oligonucleotide
cuaccgggguuuggaugca

SEQ ID NO: 1253225 - RNA, 19 nt, Artificial Sequence
  Description of Artificial Sequence: Synthetic oligonucleotide
cccucaugagcugaaaguu

SEQ ID NO: 1253226 - RNA, 19 nt, Artificial Sequence
  Description of Artificial Sequence: Synthetic oligonucleotide
ccccagugcaaggcacccc

SEQ ID NO: 1253227 - RNA, 19 nt, Artificial Sequence
  Description of Artificial Sequence: Synthetic oligonucleotide
cgacaucucccuggacccc

SEQ ID NO: 1253228 - RNA, 19 nt, Artificial Sequence
  Description of Artificial Sequence: Synthetic oligonucleotide
cuuuugaguccggccuuuu

SEQ ID NO: 1253229 - RNA, 19 nt, Artificial Sequence
  Description of Artificial Sequence: Synthetic oligonucleotide
ccucgaggcuugguuguca

SEQ ID NO: 1253230 - RNA, 19 nt, Artificial Sequence
  Description of Artificial Sequence: Synthetic oligonucleotide
ccagcguggauagcuuuua

SEQ ID NO: 1253231 - RNA, 19 nt, Artificial Sequence
  Description of Artificial Sequence: Synthetic oligonucleotide
ggcaccccuccaggugggc

SEQ ID NO: 1253232 - RNA, 19 nt, Artificial Sequence
  Description of Artificial Sequence: Synthetic oligonucleotide
ggccagcguggauagcuuu

SEQ ID NO: 1253233 - RNA, 19 nt, Artificial Sequence
  Description of Artificial Sequence: Synthetic oligonucleotide
gcaggccagcguggauagc

SEQ ID NO: 1253234 - RNA, 19 nt, Artificial Sequence
  Description of Artificial Sequence: Synthetic oligonucleotide
cccucgaggcuugguuguc

SEQ ID NO: 1253235 - RNA, 19 nt, Artificial Sequence
  Description of Artificial Sequence: Synthetic oligonucleotide
gccagcguggauagcuuuu

SEQ ID NO: 1253236 - RNA, 19 nt, Artificial Sequence
  Description of Artificial Sequence: Synthetic oligonucleotide
cccucccuaccgggguuug

SEQ ID NO: 1253237 - RNA, 19 nt, Artificial Sequence
  Description of Artificial Sequence: Synthetic oligonucleotide
cccauucagucaggauaaa

SEQ ID NO: 1253238 - RNA, 19 nt, Artificial Sequence
  Description of Artificial Sequence: Synthetic oligonucleotide
gcauggcaagcugcaccuu

SEQ ID NO: 1253239 - RNA, 19 nt, Artificial Sequence
  Description of Artificial Sequence: Synthetic oligonucleotide
cgggcgcuacucauauauu

SEQ ID NO: 1253240 - RNA, 19 nt, Artificial Sequence
  Description of Artificial Sequence: Synthetic oligonucleotide
uguauuaagagcaaggccc

SEQ ID NO: 1253241 - RNA, 19 nt, Artificial Sequence
  Description of Artificial Sequence: Synthetic oligonucleotide
uaugaugucagaauuagcc

SEQ ID NO: 1253242 - RNA, 19 nt, Artificial Sequence
  Description of Artificial Sequence: Synthetic oligonucleotide
uuuuguauuaagagcaagg

SEQ ID NO: 1253243 - RNA, 19 nt, Artificial Sequence
  Description of Artificial Sequence: Synthetic oligonucleotide
acuguuacuguccugagac

SEQ ID NO: 1253244 - RNA, 19 nt, Artificial Sequence
  Description of Artificial Sequence: Synthetic oligonucleotide
gauucuagcauuucuuucg

SEQ ID NO: 1253245 - RNA, 19 nt, Artificial Sequence
  Description of Artificial Sequence: Synthetic oligonucleotide
aagagcaaggcccuagucg

SEQ ID NO: 1253246 - RNA, 19 nt, Artificial Sequence
  Description of Artificial Sequence: Synthetic oligonucleotide
aaugccauaugguacccgg

SEQ ID NO: 1253247 - RNA, 19 nt, Artificial Sequence
  Description of Artificial Sequence: Synthetic oligonucleotide
cuuguuugaugcuauauag

SEQ ID NO: 1253248 - RNA, 19 nt, Artificial Sequence
  Description of Artificial Sequence: Synthetic oligonucleotide
ugcacaacaagcaacacaa

SEQ ID NO: 1253249 - RNA, 19 nt, Artificial Sequence
  Description of Artificial Sequence: Synthetic oligonucleotide
caaguuuuguauuaagagc

SEQ ID NO: 1253250 - RNA, 19 nt, Artificial Sequence
  Description of Artificial Sequence: Synthetic oligonucleotide
aaggccacaagccacaagu

SEQ ID NO: 1253251 - RNA, 19 nt, Artificial Sequence
  Description of Artificial Sequence: Synthetic oligonucleotide
ugacgaagcacaaagggca

SEQ ID NO: 1253252 - RNA, 19 nt, Artificial Sequence
  Description of Artificial Sequence: Synthetic oligonucleotide
aauaccugucacucaaguc

SEQ ID NO: 1253253 - RNA, 19 nt, Artificial Sequence
  Description of Artificial Sequence: Synthetic oligonucleotide
ucucacagcucauuaaccg

SEQ ID NO: 1253254 - RNA, 19 nt, Artificial Sequence
  Description of Artificial Sequence: Synthetic oligonucleotide
guaggguacaccuucagag

SEQ ID NO: 1253255 - RNA, 19 nt, Artificial Sequence
  Description of Artificial Sequence: Synthetic oligonucleotide
cuuucgauggcagaaaugc

SEQ ID NO: 1253256 - RNA, 19 nt, Artificial Sequence
  Description of Artificial Sequence: Synthetic oligonucleotide
uuuguauuaagagcaaggc

SEQ ID NO: 1253257 - RNA, 19 nt, Artificial Sequence
  Description of Artificial Sequence: Synthetic oligonucleotide
ugugagacgugcaggaagg

SEQ ID NO: 1253258 - RNA, 19 nt, Artificial Sequence
  Description of Artificial Sequence: Synthetic oligonucleotide
uuguauuaagagcaaggcc

SEQ ID NO: 1253259 - RNA, 19 nt, Artificial Sequence
  Description of Artificial Sequence: Synthetic oligonucleotide
agaauuagcccuugcaaag

SEQ ID NO: 1253260 - RNA, 19 nt, Artificial Sequence
  Description of Artificial Sequence: Synthetic oligonucleotide
acacaaagaguggagaagc

SEQ ID NO: 1253261 - RNA, 19 nt, Artificial Sequence
  Description of Artificial Sequence: Synthetic oligonucleotide
ucuagcauuucuuucgaug

SEQ ID NO: 1253262 - RNA, 19 nt, Artificial Sequence
  Description of Artificial Sequence: Synthetic oligonucleotide
acuguucacagucugagcu

SEQ ID NO: 1253263 - RNA, 19 nt, Artificial Sequence
  Description of Artificial Sequence: Synthetic oligonucleotide
uguguaugcacagacagac

SEQ ID NO: 1253264 - RNA, 19 nt, Artificial Sequence
  Description of Artificial Sequence: Synthetic oligonucleotide
aagcacaaagggcagacga

SEQ ID NO: 1253265 - RNA, 19 nt, Artificial Sequence
  Description of Artificial Sequence: Synthetic oligonucleotide
aaguugagggauaugaugu

SEQ ID NO: 1253266 - RNA, 19 nt, Artificial Sequence
  Description of Artificial Sequence: Synthetic oligonucleotide
aaauaccugucacucaagu

SEQ ID NO: 1253267 - RNA, 19 nt, Artificial Sequence
  Description of Artificial Sequence: Synthetic oligonucleotide
ucugugacucccuagcuug

SEQ ID NO: 1253268 - RNA, 19 nt, Artificial Sequence
  Description of Artificial Sequence: Synthetic oligonucleotide
acucgaaaauaccugucac

SEQ ID NO: 1253269 - RNA, 19 nt, Artificial Sequence
  Description of Artificial Sequence: Synthetic oligonucleotide
ugcaucuacucgaaaauac

SEQ ID NO: 1253270 - RNA, 19 nt, Artificial Sequence
  Description of Artificial Sequence: Synthetic oligonucleotide
ugcaacuugagaacauugc

SEQ ID NO: 1253271 - RNA, 19 nt, Artificial Sequence
  Description of Artificial Sequence: Synthetic oligonucleotide
ucuacucgaaaauaccugu

SEQ ID NO: 1253272 - RNA, 19 nt, Artificial Sequence
  Description of Artificial Sequence: Synthetic oligonucleotide
uuguuugaugcuauauagc

SEQ ID NO: 1253273 - RNA, 19 nt, Artificial Sequence
  Description of Artificial Sequence: Synthetic oligonucleotide
caugcuaccugucuguagc

SEQ ID NO: 1253274 - RNA, 19 nt, Artificial Sequence
  Description of Artificial Sequence: Synthetic oligonucleotide
aggguacaccuucagagac

SEQ ID NO: 1253275 - RNA, 19 nt, Artificial Sequence
  Description of Artificial Sequence: Synthetic oligonucleotide
ucagauucuggcuggaaac

SEQ ID NO: 1253276 - RNA, 19 nt, Artificial Sequence
  Description of Artificial Sequence: Synthetic oligonucleotide
cucucuaccgcacugaguc

SEQ ID NO: 1253277 - RNA, 19 nt, Artificial Sequence
  Description of Artificial Sequence: Synthetic oligonucleotide
ucacagcucauuaaccgcc

SEQ ID NO: 1253278 - RNA, 19 nt, Artificial Sequence
  Description of Artificial Sequence: Synthetic oligonucleotide
uugagggauaugaugucag

SEQ ID NO: 1253279 - RNA, 19 nt, Artificial Sequence
  Description of Artificial Sequence: Synthetic oligonucleotide
ugugaggaggccaguuucg

SEQ ID NO: 1253280 - RNA, 19 nt, Artificial Sequence
  Description of Artificial Sequence: Synthetic oligonucleotide
uauauagccacuugaugau

SEQ ID NO: 1253281 - RNA, 19 nt, Artificial Sequence
  Description of Artificial Sequence: Synthetic oligonucleotide
cuuucuaccacugugccuc

SEQ ID NO: 1253282 - RNA, 19 nt, Artificial Sequence
  Description of Artificial Sequence: Synthetic oligonucleotide
acuuuucuccccuuccagg

SEQ ID NO: 1253283 - RNA, 19 nt, Artificial Sequence
  Description of Artificial Sequence: Synthetic oligonucleotide
gaugcuauauagccacuug

SEQ ID NO: 1253284 - RNA, 19 nt, Artificial Sequence
  Description of Artificial Sequence: Synthetic oligonucleotide
ucgaaaauaccugucacuc

SEQ ID NO: 1253285 - RNA, 19 nt, Artificial Sequence
  Description of Artificial Sequence: Synthetic oligonucleotide
ucugcaucuacucgaaaau

SEQ ID NO: 1253286 - RNA, 19 nt, Artificial Sequence
  Description of Artificial Sequence: Synthetic oligonucleotide
ucccuagcuuguuugaugc

SEQ ID NO: 1253287 - RNA, 19 nt, Artificial Sequence
  Description of Artificial Sequence: Synthetic oligonucleotide
agcucacaacacuucaagg

SEQ ID NO: 1253288 - RNA, 19 nt, Artificial Sequence
  Description of Artificial Sequence: Synthetic oligonucleotide
ugcuauauagccacuugau

SEQ ID NO: 1253289 - RNA, 19 nt, Artificial Sequence
  Description of Artificial Sequence: Synthetic oligonucleotide
acauugcacaacaagcaac

SEQ ID NO: 1253290 - RNA, 19 nt, Artificial Sequence
  Description of Artificial Sequence: Synthetic oligonucleotide
accggcuucaccaugcuac

SEQ ID NO: 1253291 - RNA, 19 nt, Artificial Sequence
  Description of Artificial Sequence: Synthetic oligonucleotide
ugcggaaguagucgggucc

SEQ ID NO: 1253292 - RNA, 19 nt, Artificial Sequence
  Description of Artificial Sequence: Synthetic oligonucleotide
ucacaacacuucaaggaga

SEQ ID NO: 1253293 - RNA, 19 nt, Artificial Sequence
  Description of Artificial Sequence: Synthetic oligonucleotide
gacgaaggauccuggaagc

SEQ ID NO: 1253294 - RNA, 19 nt, Artificial Sequence
  Description of Artificial Sequence: Synthetic oligonucleotide
gagcugaucaugcuugcgc

SEQ ID NO: 1253295 - RNA, 19 nt, Artificial Sequence
  Description of Artificial Sequence: Synthetic oligonucleotide
ucugaagggaaggucuccg

SEQ ID NO: 1253296 - RNA, 19 nt, Artificial Sequence
  Description of Artificial Sequence: Synthetic oligonucleotide
ggagcuacucucuugcggg

SEQ ID NO: 1253297 - RNA, 19 nt, Artificial Sequence
  Description of Artificial Sequence: Synthetic oligonucleotide
gucuguagcgucuccgugg

SEQ ID NO: 1253298 - RNA, 19 nt, Artificial Sequence
  Description of Artificial Sequence: Synthetic oligonucleotide
accgcacugagucucuugg

SEQ ID NO: 1253299 - RNA, 19 nt, Artificial Sequence
  Description of Artificial Sequence: Synthetic oligonucleotide
uucaaggagaccucacaac

SEQ ID NO: 1253300 - RNA, 19 nt, Artificial Sequence
  Description of Artificial Sequence: Synthetic oligonucleotide
uuucgauggcagaaaugcc

SEQ ID NO: 1253301 - RNA, 19 nt, Artificial Sequence
  Description of Artificial Sequence: Synthetic oligonucleotide
cacaacacuucaaggagac

SEQ ID NO: 1253302 - RNA, 19 nt, Artificial Sequence
  Description of Artificial Sequence: Synthetic oligonucleotide
ucacguugcacaccgcucu

SEQ ID NO: 1253303 - RNA, 19 nt, Artificial Sequence
  Description of Artificial Sequence: Synthetic oligonucleotide
augcuauauagccacuuga

SEQ ID NO: 1253304 - RNA, 19 nt, Artificial Sequence
  Description of Artificial Sequence: Synthetic oligonucleotide
ucacaugggagcuacucuc

SEQ ID NO: 1253305 - RNA, 19 nt, Artificial Sequence
  Description of Artificial Sequence: Synthetic oligonucleotide
cucacagcucauuaaccgc

SEQ ID NO: 1253306 - RNA, 19 nt, Artificial Sequence
  Description of Artificial Sequence: Synthetic oligonucleotide
gguaccgccgaugugaagg

SEQ ID NO: 1253307 - RNA, 19 nt, Artificial Sequence
  Description of Artificial Sequence: Synthetic oligonucleotide
cauugcacaacaagcaaca

SEQ ID NO: 1253308 - RNA, 19 nt, Artificial Sequence
  Description of Artificial Sequence: Synthetic oligonucleotide
ucuuacacaugggacaccu

SEQ ID NO: 1253309 - RNA, 19 nt, Artificial Sequence
  Description of Artificial Sequence: Synthetic oligonucleotide
cagucugagcugaucaugc

SEQ ID NO: 1253310 - RNA, 19 nt, Artificial Sequence
  Description of Artificial Sequence: Synthetic oligonucleotide
aauuagcccuugcaaaguu

SEQ ID NO: 1253311 - RNA, 19 nt, Artificial Sequence
  Description of Artificial Sequence: Synthetic oligonucleotide
auggugggcggucuuuccc

SEQ ID NO: 1253312 - RNA, 19 nt, Artificial Sequence
  Description of Artificial Sequence: Synthetic oligonucleotide
ucucacguugcacaccgcu

SEQ ID NO: 1253313 - RNA, 19 nt, Artificial Sequence
  Description of Artificial Sequence: Synthetic oligonucleotide
agggauaugaugucagaau

SEQ ID NO: 1253314 - RNA, 19 nt, Artificial Sequence
  Description of Artificial Sequence: Synthetic oligonucleotide
uuaagagcaaggcccuagu

SEQ ID NO: 1253315 - RNA, 19 nt, Artificial Sequence
  Description of Artificial Sequence: Synthetic oligonucleotide
agaguggagaagcucacaa

SEQ ID NO: 1253316 - RNA, 19 nt, Artificial Sequence
  Description of Artificial Sequence: Synthetic oligonucleotide
gucacuuugcggaugucgg

SEQ ID NO: 1253317 - RNA, 19 nt, Artificial Sequence
  Description of Artificial Sequence: Synthetic oligonucleotide
aggcguaggguacaccuuc

SEQ ID NO: 1253318 - RNA, 19 nt, Artificial Sequence
  Description of Artificial Sequence: Synthetic oligonucleotide
guuuuguauuaagagcaag

SEQ ID NO: 1253319 - RNA, 19 nt, Artificial Sequence
  Description of Artificial Sequence: Synthetic oligonucleotide
ucggucagauucuggcugg

SEQ ID NO: 1253320 - RNA, 19 nt, Artificial Sequence
  Description of Artificial Sequence: Synthetic oligonucleotide
ucggucuuggcaugguugc

SEQ ID NO: 1253321 - RNA, 19 nt, Artificial Sequence
  Description of Artificial Sequence: Synthetic oligonucleotide
agacuguucacagucugag

SEQ ID NO: 1253322 - RNA, 19 nt, Artificial Sequence
  Description of Artificial Sequence: Synthetic oligonucleotide
gugugagacgugcaggaag

SEQ ID NO: 1253323 - RNA, 19 nt, Artificial Sequence
  Description of Artificial Sequence: Synthetic oligonucleotide
augaguguucagcaagacu

SEQ ID NO: 1253324 - RNA, 19 nt, Artificial Sequence
  Description of Artificial Sequence: Synthetic oligonucleotide
augggacaccuucugugac

SEQ ID NO: 1253325 - RNA, 19 nt, Artificial Sequence
  Description of Artificial Sequence: Synthetic oligonucleotide
ggucucacguugcacaccg

SEQ ID NO: 1253326 - RNA, 19 nt, Artificial Sequence
  Description of Artificial Sequence: Synthetic oligonucleotide
ugaucaugcuugcgcugcg

SEQ ID NO: 1253327 - RNA, 19 nt, Artificial Sequence
  Description of Artificial Sequence: Synthetic oligonucleotide
auucuagcauuucuuucga

SEQ ID NO: 1253328 - RNA, 19 nt, Artificial Sequence
  Description of Artificial Sequence: Synthetic oligonucleotide
agggucucacguugcacac

SEQ ID NO: 1253329 - RNA, 19 nt, Artificial Sequence
  Description of Artificial Sequence: Synthetic oligonucleotide
uucuuucgauggcagaaau

SEQ ID NO: 1253330 - RNA, 19 nt, Artificial Sequence
  Description of Artificial Sequence: Synthetic oligonucleotide
agcugaucaugcuugcgcu

SEQ ID NO: 1253331 - RNA, 19 nt, Artificial Sequence
  Description of Artificial Sequence: Synthetic oligonucleotide
cacaucugcaucuacucga

SEQ ID NO: 1253332 - RNA, 19 nt, Artificial Sequence
  Description of Artificial Sequence: Synthetic oligonucleotide
ucugcaaaggagugucggu

SEQ ID NO: 1253333 - RNA, 19 nt, Artificial Sequence
  Description of Artificial Sequence: Synthetic oligonucleotide
ugucuguagcgucuccgug

SEQ ID NO: 1253334 - RNA, 19 nt, Artificial Sequence
  Description of Artificial Sequence: Synthetic oligonucleotide
aucuacucgaaaauaccug

SEQ ID NO: 1253335 - RNA, 19 nt, Artificial Sequence
  Description of Artificial Sequence: Synthetic oligonucleotide
accgccgaugugaaggugc

SEQ ID NO: 1253336 - RNA, 19 nt, Artificial Sequence
  Description of Artificial Sequence: Synthetic oligonucleotide
gccgugacgaagcacaaag

SEQ ID NO: 1253337 - RNA, 19 nt, Artificial Sequence
  Description of Artificial Sequence: Synthetic oligonucleotide
ucgaguccacaguaguuga

SEQ ID NO: 1253338 - RNA, 19 nt, Artificial Sequence
  Description of Artificial Sequence: Synthetic oligonucleotide
uagucggguccuuuguuca

SEQ ID NO: 1253339 - RNA, 19 nt, Artificial Sequence
  Description of Artificial Sequence: Synthetic oligonucleotide
cucggucuuggcaugguug

SEQ ID NO: 1253340 - RNA, 19 nt, Artificial Sequence
  Description of Artificial Sequence: Synthetic oligonucleotide
gaugauauucuugaggauu

SEQ ID NO: 1253341 - RNA, 19 nt, Artificial Sequence
  Description of Artificial Sequence: Synthetic oligonucleotide
ugagggauaugaugucaga

SEQ ID NO: 1253342 - RNA, 19 nt, Artificial Sequence
  Description of Artificial Sequence: Synthetic oligonucleotide
auaugguacccggucauug

SEQ ID NO: 1253343 - RNA, 19 nt, Artificial Sequence
  Description of Artificial Sequence: Synthetic oligonucleotide
cagaauuagcccuugcaaa

SEQ ID NO: 1253344 - RNA, 19 nt, Artificial Sequence
  Description of Artificial Sequence: Synthetic oligonucleotide
gucgaguccacaguaguug

SEQ ID NO: 1253345 - RNA, 19 nt, Artificial Sequence
  Description of Artificial Sequence: Synthetic oligonucleotide
uaagagcaaggcccuaguc

SEQ ID NO: 1253346 - RNA, 19 nt, Artificial Sequence
  Description of Artificial Sequence: Synthetic oligonucleotide
auugcacaacaagcaacac

SEQ ID NO: 1253347 - RNA, 19 nt, Artificial Sequence
  Description of Artificial Sequence: Synthetic oligonucleotide
cugaccggcuucaccaugc

SEQ ID NO: 1253348 - RNA, 19 nt, Artificial Sequence
  Description of Artificial Sequence: Synthetic oligonucleotide
acaccuuaagaguggggcu

SEQ ID NO: 1253349 - RNA, 19 nt, Artificial Sequence
  Description of Artificial Sequence: Synthetic oligonucleotide
gagacucugcaaaggagug

SEQ ID NO: 1253350 - RNA, 19 nt, Artificial Sequence
  Description of Artificial Sequence: Synthetic oligonucleotide
gcucacaacacuucaagga

SEQ ID NO: 1253351 - RNA, 19 nt, Artificial Sequence
  Description of Artificial Sequence: Synthetic oligonucleotide
ugagcugaucaugcuugcg

SEQ ID NO: 1253352 - RNA, 19 nt, Artificial Sequence
  Description of Artificial Sequence: Synthetic oligonucleotide
ucggagcuguugaugauau

SEQ ID NO: 1253353 - RNA, 19 nt, Artificial Sequence
  Description of Artificial Sequence: Synthetic oligonucleotide
uuaaccgccgcuguggcuu

SEQ ID NO: 1253354 - RNA, 19 nt, Artificial Sequence
  Description of Artificial Sequence: Synthetic oligonucleotide
accuuaagaguggggcugc

SEQ ID NO: 1253355 - RNA, 19 nt, Artificial Sequence
  Description of Artificial Sequence: Synthetic oligonucleotide
augcuaccugucuguagcg

SEQ ID NO: 1253356 - RNA, 19 nt, Artificial Sequence
  Description of Artificial Sequence: Synthetic oligonucleotide
cgugacgaagcacaaaggg

SEQ ID NO: 1253357 - RNA, 19 nt, Artificial Sequence
  Description of Artificial Sequence: Synthetic oligonucleotide
gaagcacaaagggcagacg

SEQ ID NO: 1253358 - RNA, 19 nt, Artificial Sequence
  Description of Artificial Sequence: Synthetic oligonucleotide
uuccgggucgaguccacag

SEQ ID NO: 1253359 - RNA, 19 nt, Artificial Sequence
  Description of Artificial Sequence: Synthetic oligonucleotide
ugugcgcuuggcuccuggg

SEQ ID NO: 1253360 - RNA, 19 nt, Artificial Sequence
  Description of Artificial Sequence: Synthetic oligonucleotide
agggguaccgccgauguga

SEQ ID NO: 1253361 - RNA, 19 nt, Artificial Sequence
  Description of Artificial Sequence: Synthetic oligonucleotide
cacuuuucuccccuuccag

SEQ ID NO: 1253362 - RNA, 19 nt, Artificial Sequence
  Description of Artificial Sequence: Synthetic oligonucleotide
cauuaaccgccgcuguggc

SEQ ID NO: 1253363 - RNA, 19 nt, Artificial Sequence
  Description of Artificial Sequence: Synthetic oligonucleotide
guuucgggagcugugcuug

SEQ ID NO: 1253364 - RNA, 19 nt, Artificial Sequence
  Description of Artificial Sequence: Synthetic oligonucleotide
augucggaggagcugugug

SEQ ID NO: 1253365 - RNA, 19 nt, Artificial Sequence
  Description of Artificial Sequence: Synthetic oligonucleotide
agacucugcagagauguga

SEQ ID NO: 1253366 - RNA, 19 nt, Artificial Sequence
  Description of Artificial Sequence: Synthetic oligonucleotide
gaaaugccauaugguaccc

SEQ ID NO: 1253367 - RNA, 19 nt, Artificial Sequence
  Description of Artificial Sequence: Synthetic oligonucleotide
uuccccggcagccgugacg

SEQ ID NO: 1253368 - RNA, 19 nt, Artificial Sequence
  Description of Artificial Sequence: Synthetic oligonucleotide
agacgugcaggaaggacuc

SEQ ID NO: 1253369 - RNA, 19 nt, Artificial Sequence
  Description of Artificial Sequence: Synthetic oligonucleotide
gcaacuugagaacauugca

SEQ ID NO: 1253370 - RNA, 19 nt, Artificial Sequence
  Description of Artificial Sequence: Synthetic oligonucleotide
guagucggguccuuuguuc

SEQ ID NO: 1253371 - RNA, 19 nt, Artificial Sequence
  Description of Artificial Sequence: Synthetic oligonucleotide
ucuaccacugugccucuua

SEQ ID NO: 1253372 - RNA, 19 nt, Artificial Sequence
  Description of Artificial Sequence: Synthetic oligonucleotide
caugggagcuacucucuug

SEQ ID NO: 1253373 - RNA, 19 nt, Artificial Sequence
  Description of Artificial Sequence: Synthetic oligonucleotide
uggugggcggucuuucccc

SEQ ID NO: 1253374 - RNA, 19 nt, Artificial Sequence
  Description of Artificial Sequence: Synthetic oligonucleotide
accucugaagggaaggucu

SEQ ID NO: 1253375 - RNA, 19 nt, Artificial Sequence
  Description of Artificial Sequence: Synthetic oligonucleotide
gggagcuacucucuugcgg

SEQ ID NO: 1253376 - RNA, 19 nt, Artificial Sequence
  Description of Artificial Sequence: Synthetic oligonucleotide
cacuuugcggaugucggag

SEQ ID NO: 1253377 - RNA, 19 nt, Artificial Sequence
  Description of Artificial Sequence: Synthetic oligonucleotide
cucauuaaccgccgcugug

SEQ ID NO: 1253378 - RNA, 19 nt, Artificial Sequence
  Description of Artificial Sequence: Synthetic oligonucleotide
gacgaagcacaaagggcag

SEQ ID NO: 1253379 - RNA, 19 nt, Artificial Sequence
  Description of Artificial Sequence: Synthetic oligonucleotide
cugcaaaggagugucggug

SEQ ID NO: 1253380 - RNA, 19 nt, Artificial Sequence
  Description of Artificial Sequence: Synthetic oligonucleotide
caucuacucgaaaauaccu

SEQ ID NO: 1253381 - RNA, 19 nt, Artificial Sequence
  Description of Artificial Sequence: Synthetic oligonucleotide
augcaacuugagaacauug

SEQ ID NO: 1253382 - RNA, 19 nt, Artificial Sequence
  Description of Artificial Sequence: Synthetic oligonucleotide
aggagugucggugcagguc

SEQ ID NO: 1253383 - RNA, 19 nt, Artificial Sequence
  Description of Artificial Sequence: Synthetic oligonucleotide
gcccuagucggucagauuc

SEQ ID NO: 1253384 - RNA, 19 nt, Artificial Sequence
  Description of Artificial Sequence: Synthetic oligonucleotide
cugccugcggaaguagucg

SEQ ID NO: 1253385 - RNA, 19 nt, Artificial Sequence
  Description of Artificial Sequence: Synthetic oligonucleotide
uguucaggaugcggagggg

SEQ ID NO: 1253386 - RNA, 19 nt, Artificial Sequence
  Description of Artificial Sequence: Synthetic oligonucleotide
ucuaccgcacugagucucu

SEQ ID NO: 1253387 - RNA, 19 nt, Artificial Sequence
  Description of Artificial Sequence: Synthetic oligonucleotide
uccccuuccaggcggcccc

SEQ ID NO: 1253388 - RNA, 19 nt, Artificial Sequence
  Description of Artificial Sequence: Synthetic oligonucleotide
uuugcggaugucggaggag

SEQ ID NO: 1253389 - RNA, 19 nt, Artificial Sequence
  Description of Artificial Sequence: Synthetic oligonucleotide
caugggacaccuucuguga

SEQ ID NO: 1253390 - RNA, 19 nt, Artificial Sequence
  Description of Artificial Sequence: Synthetic oligonucleotide
ugcacaccgcucucggucu

SEQ ID NO: 1253391 - RNA, 19 nt, Artificial Sequence
  Description of Artificial Sequence: Synthetic oligonucleotide
uucaggaugcggaggggua

SEQ ID NO: 1253392 - RNA, 19 nt, Artificial Sequence
  Description of Artificial Sequence: Synthetic oligonucleotide
caguaguugaagaaccucu

SEQ ID NO: 1253393 - RNA, 19 nt, Artificial Sequence
  Description of Artificial Sequence: Synthetic oligonucleotide
cuugcgggcugccucgccc

SEQ ID NO: 1253394 - RNA, 19 nt, Artificial Sequence
  Description of Artificial Sequence: Synthetic oligonucleotide
caccuuaagaguggggcug

SEQ ID NO: 1253395 - RNA, 19 nt, Artificial Sequence
  Description of Artificial Sequence: Synthetic oligonucleotide
ugaugcuauauagccacuu

SEQ ID NO: 1253396 - RNA, 19 nt, Artificial Sequence
  Description of Artificial Sequence: Synthetic oligonucleotide
agucggguccuuuguucag

SEQ ID NO: 1253397 - RNA, 19 nt, Artificial Sequence
  Description of Artificial Sequence: Synthetic oligonucleotide
acaacuguguaugcacaga

SEQ ID NO: 1253398 - RNA, 19 nt, Artificial Sequence
  Description of Artificial Sequence: Synthetic oligonucleotide
ggagcugugugagacgugc

SEQ ID NO: 1253399 - RNA, 19 nt, Artificial Sequence
  Description of Artificial Sequence: Synthetic oligonucleotide
uugaugauucuagcauuuc

SEQ ID NO: 1253400 - RNA, 19 nt, Artificial Sequence
  Description of Artificial Sequence: Synthetic oligonucleotide
agcaaggcccuagucgguc

SEQ ID NO: 1253401 - RNA, 19 nt, Artificial Sequence
  Description of Artificial Sequence: Synthetic oligonucleotide
cucacguugcacaccgcuc

SEQ ID NO: 1253402 - RNA, 19 nt, Artificial Sequence
  Description of Artificial Sequence: Synthetic oligonucleotide
agcagucuccugcucacau

SEQ ID NO: 1253403 - RNA, 19 nt, Artificial Sequence
  Description of Artificial Sequence: Synthetic oligonucleotide
cucuugacauacuuggccu

SEQ ID NO: 1253404 - RNA, 19 nt, Artificial Sequence
  Description of Artificial Sequence: Synthetic oligonucleotide
gagacgugcaggaaggacu

SEQ ID NO: 1253405 - RNA, 19 nt, Artificial Sequence
  Description of Artificial Sequence: Synthetic oligonucleotide
cauggugggcggucuuucc

SEQ ID NO: 1253406 - RNA, 19 nt, Artificial Sequence
  Description of Artificial Sequence: Synthetic oligonucleotide
ucaugcuugcgcugcggaa

SEQ ID NO: 1253407 - RNA, 19 nt, Artificial Sequence
  Description of Artificial Sequence: Synthetic oligonucleotide
uccgggucgaguccacagu

SEQ ID NO: 1253408 - RNA, 19 nt, Artificial Sequence
  Description of Artificial Sequence: Synthetic oligonucleotide
ggcaugguugccaaacacc

SEQ ID NO: 1253409 - RNA, 19 nt, Artificial Sequence
  Description of Artificial Sequence: Synthetic oligonucleotide
ucaggaugcggagggguac

SEQ ID NO: 1253410 - RNA, 19 nt, Artificial Sequence
  Description of Artificial Sequence: Synthetic oligonucleotide
ucggguccuuuguucagga

SEQ ID NO: 1253411 - RNA, 19 nt, Artificial Sequence
  Description of Artificial Sequence: Synthetic oligonucleotide
aguagucggguccuuuguu

SEQ ID NO: 1253412 - RNA, 19 nt, Artificial Sequence
  Description of Artificial Sequence: Synthetic oligonucleotide
aguguucagcaagacucug

SEQ ID NO: 1253413 - RNA, 19 nt, Artificial Sequence
  Description of Artificial Sequence: Synthetic oligonucleotide
ugguugccaaacaccuuaa

SEQ ID NO: 1253414 - RNA, 19 nt, Artificial Sequence
  Description of Artificial Sequence: Synthetic oligonucleotide
ugggcggucuuuccccggc

SEQ ID NO: 1253415 - RNA, 19 nt, Artificial Sequence
  Description of Artificial Sequence: Synthetic oligonucleotide
uccuuuuaaucggcuuggc

SEQ ID NO: 1253416 - RNA, 19 nt, Artificial Sequence
  Description of Artificial Sequence: Synthetic oligonucleotide
ugcggaugucggaggagcu

SEQ ID NO: 1253417 - RNA, 19 nt, Artificial Sequence
  Description of Artificial Sequence: Synthetic oligonucleotide
auuaaccgccgcuguggcu

SEQ ID NO: 1253418 - RNA, 19 nt, Artificial Sequence
  Description of Artificial Sequence: Synthetic oligonucleotide
uccugagacuguucacagu

SEQ ID NO: 1253419 - RNA, 19 nt, Artificial Sequence
  Description of Artificial Sequence: Synthetic oligonucleotide
aguuuuguauuaagagcaa

SEQ ID NO: 1253420 - RNA, 19 nt, Artificial Sequence
  Description of Artificial Sequence: Synthetic oligonucleotide
agcgucuccgugggcaugg

SEQ ID NO: 1253421 - RNA, 19 nt, Artificial Sequence
  Description of Artificial Sequence: Synthetic oligonucleotide
acugagucucuugggguug

SEQ ID NO: 1253422 - RNA, 19 nt, Artificial Sequence
  Description of Artificial Sequence: Synthetic oligonucleotide
cucgaaaauaccugucacu

SEQ ID NO: 1253423 - RNA, 19 nt, Artificial Sequence
  Description of Artificial Sequence: Synthetic oligonucleotide
aguuucgggagcugugcuu

SEQ ID NO: 1253424 - RNA, 19 nt, Artificial Sequence
  Description of Artificial Sequence: Synthetic oligonucleotide
uaccgcacugagucucuug

SEQ ID NO: 1253425 - RNA, 19 nt, Artificial Sequence
  Description of Artificial Sequence: Synthetic oligonucleotide
uucuagcauuucuuucgau

SEQ ID NO: 1253426 - RNA, 19 nt, Artificial Sequence
  Description of Artificial Sequence: Synthetic oligonucleotide
aggggacuucauggcagcc

SEQ ID NO: 1253427 - RNA, 19 nt, Artificial Sequence
  Description of Artificial Sequence: Synthetic oligonucleotide
gaagcucacaacacuucaa

SEQ ID NO: 1253428 - RNA, 19 nt, Artificial Sequence
  Description of Artificial Sequence: Synthetic oligonucleotide
ucuuuccccggcagccgug

SEQ ID NO: 1253429 - RNA, 19 nt, Artificial Sequence
  Description of Artificial Sequence: Synthetic oligonucleotide
gggacuucauggcagccac

SEQ ID NO: 1253430 - RNA, 19 nt, Artificial Sequence
  Description of Artificial Sequence: Synthetic oligonucleotide
cucuaccgcacugagucuc

SEQ ID NO: 1253431 - RNA, 19 nt, Artificial Sequence
  Description of Artificial Sequence: Synthetic oligonucleotide
ccuccuuucuaccacugug

SEQ ID NO: 1253432 - RNA, 19 nt, Artificial Sequence
  Description of Artificial Sequence: Synthetic oligonucleotide
agaguggggcugcccagug

SEQ ID NO: 1253433 - RNA, 19 nt, Artificial Sequence
  Description of Artificial Sequence: Synthetic oligonucleotide
ucucuaccgcacugagucu

SEQ ID NO: 1253434 - RNA, 19 nt, Artificial Sequence
  Description of Artificial Sequence: Synthetic oligonucleotide
cuucacaacuguguaugca

SEQ ID NO: 1253435 - RNA, 19 nt, Artificial Sequence
  Description of Artificial Sequence: Synthetic oligonucleotide
uuucaaguuugagggucuc

SEQ ID NO: 1253436 - RNA, 19 nt, Artificial Sequence
  Description of Artificial Sequence: Synthetic oligonucleotide
gcuuguuugaugcuauaua

SEQ ID NO: 1253437 - RNA, 19 nt, Artificial Sequence
  Description of Artificial Sequence: Synthetic oligonucleotide
ucgcccaggcguaggguac

SEQ ID NO: 1253438 - RNA, 19 nt, Artificial Sequence
  Description of Artificial Sequence: Synthetic oligonucleotide
cuugaugauucuagcauuu

SEQ ID NO: 1253439 - RNA, 19 nt, Artificial Sequence
  Description of Artificial Sequence: Synthetic oligonucleotide
gucaguggugucccuguga

SEQ ID NO: 1253440 - RNA, 19 nt, Artificial Sequence
  Description of Artificial Sequence: Synthetic oligonucleotide
ugugugagacgugcaggaa

SEQ ID NO: 1253441 - RNA, 19 nt, Artificial Sequence
  Description of Artificial Sequence: Synthetic oligonucleotide
guauuaagagcaaggcccu

SEQ ID NO: 1253442 - RNA, 19 nt, Artificial Sequence
  Description of Artificial Sequence: Synthetic oligonucleotide
ugcggaaguugagggauau

SEQ ID NO: 1253443 - RNA, 19 nt, Artificial Sequence
  Description of Artificial Sequence: Synthetic oligonucleotide
guguaugcacagacagacc

SEQ ID NO: 1253444 - RNA, 19 nt, Artificial Sequence
  Description of Artificial Sequence: Synthetic oligonucleotide
caaggcccuagucggucag

SEQ ID NO: 1253445 - RNA, 19 nt, Artificial Sequence
  Description of Artificial Sequence: Synthetic oligonucleotide
ugcuaccugucuguagcgu

SEQ ID NO: 1253446 - RNA, 19 nt, Artificial Sequence
  Description of Artificial Sequence: Synthetic oligonucleotide
gaccucugaagggaagguc

SEQ ID NO: 1253447 - RNA, 19 nt, Artificial Sequence
  Description of Artificial Sequence: Synthetic oligonucleotide
agauucuggcuggaaacuu

SEQ ID NO: 1253448 - RNA, 19 nt, Artificial Sequence
  Description of Artificial Sequence: Synthetic oligonucleotide
gcacacuggaggcuuggcc

SEQ ID NO: 1253449 - RNA, 19 nt, Artificial Sequence
  Description of Artificial Sequence: Synthetic oligonucleotide
ggccccugcacaaaaggcc

SEQ ID NO: 1253450 - RNA, 19 nt, Artificial Sequence
  Description of Artificial Sequence: Synthetic oligonucleotide
gugugcgcuuggcuccugg

SEQ ID NO: 1253451 - RNA, 19 nt, Artificial Sequence
  Description of Artificial Sequence: Synthetic oligonucleotide
ucucggucuuggcaugguu

SEQ ID NO: 1253452 - RNA, 19 nt, Artificial Sequence
  Description of Artificial Sequence: Synthetic oligonucleotide
gcaacacaaagaguggaga

SEQ ID NO: 1253453 - RNA, 19 nt, Artificial Sequence
  Description of Artificial Sequence: Synthetic oligonucleotide
ugaccggcuucaccaugcu

SEQ ID NO: 1253454 - RNA, 19 nt, Artificial Sequence
  Description of Artificial Sequence: Synthetic oligonucleotide
gcggccccugcacaaaagg

SEQ ID NO: 1253455 - RNA, 19 nt, Artificial Sequence
  Description of Artificial Sequence: Synthetic oligonucleotide
uauuaagagcaaggcccua

SEQ ID NO: 1253456 - RNA, 19 nt, Artificial Sequence
  Description of Artificial Sequence: Synthetic oligonucleotide
uugcgggcugccucgccca

SEQ ID NO: 1253457 - RNA, 19 nt, Artificial Sequence
  Description of Artificial Sequence: Synthetic oligonucleotide
gcuaccugucuguagcguc

SEQ ID NO: 1253458 - RNA, 19 nt, Artificial Sequence
  Description of Artificial Sequence: Synthetic oligonucleotide
auauagccacuugaugauu

SEQ ID NO: 1253459 - RNA, 19 nt, Artificial Sequence
  Description of Artificial Sequence: Synthetic oligonucleotide
ucuuccgggucgaguccac

SEQ ID NO: 1253460 - RNA, 19 nt, Artificial Sequence
  Description of Artificial Sequence: Synthetic oligonucleotide
ggugggcggucuuuccccg

SEQ ID NO: 1253461 - RNA, 19 nt, Artificial Sequence
  Description of Artificial Sequence: Synthetic oligonucleotide
gaggagcugugugagacgu

SEQ ID NO: 1253462 - RNA, 19 nt, Artificial Sequence
  Description of Artificial Sequence: Synthetic oligonucleotide
acgaaggauccuggaagca

SEQ ID NO: 1253463 - RNA, 19 nt, Artificial Sequence
  Description of Artificial Sequence: Synthetic oligonucleotide
acaugggagcuacucucuu

SEQ ID NO: 1253464 - RNA, 19 nt, Artificial Sequence
  Description of Artificial Sequence: Synthetic oligonucleotide
gcugaucaugcuugcgcug

SEQ ID NO: 1253465 - RNA, 19 nt, Artificial Sequence
  Description of Artificial Sequence: Synthetic oligonucleotide
cugcggaaguagucggguc

SEQ ID NO: 1253466 - RNA, 19 nt, Artificial Sequence
  Description of Artificial Sequence: Synthetic oligonucleotide
caggaugcggagggguacc

SEQ ID NO: 1253467 - RNA, 19 nt, Artificial Sequence
  Description of Artificial Sequence: Synthetic oligonucleotide
gagggguaccgccgaugug

SEQ ID NO: 1253468 - RNA, 19 nt, Artificial Sequence
  Description of Artificial Sequence: Synthetic oligonucleotide
ccgugacgaagcacaaagg

SEQ ID NO: 1253469 - RNA, 19 nt, Artificial Sequence
  Description of Artificial Sequence: Synthetic oligonucleotide
augcggagggguaccgccg

SEQ ID NO: 1253470 - RNA, 19 nt, Artificial Sequence
  Description of Artificial Sequence: Synthetic oligonucleotide
cacaguaguugaagaaccu

SEQ ID NO: 1253471 - RNA, 19 nt, Artificial Sequence
  Description of Artificial Sequence: Synthetic oligonucleotide
cuacucucuugcgggcugc

SEQ ID NO: 1253472 - RNA, 19 nt, Artificial Sequence
  Description of Artificial Sequence: Synthetic oligonucleotide
ccugucuguagcgucuccg

SEQ ID NO: 1253473 - RNA, 19 nt, Artificial Sequence
  Description of Artificial Sequence: Synthetic oligonucleotide
agcuacucucuugcgggcu

SEQ ID NO: 1253474 - RNA, 19 nt, Artificial Sequence
  Description of Artificial Sequence: Synthetic oligonucleotide
gccauaugguacccgguca

SEQ ID NO: 1253475 - RNA, 19 nt, Artificial Sequence
  Description of Artificial Sequence: Synthetic oligonucleotide
aggucuccggcugacccca

SEQ ID NO: 1253476 - RNA, 19 nt, Artificial Sequence
  Description of Artificial Sequence: Synthetic oligonucleotide
gcuacucucuugcgggcug

SEQ ID NO: 1253477 - RNA, 19 nt, Artificial Sequence
  Description of Artificial Sequence: Synthetic oligonucleotide
cuaccugucuguagcgucu

SEQ ID NO: 1253478 - RNA, 19 nt, Artificial Sequence
  Description of Artificial Sequence: Synthetic oligonucleotide
uagccacuugaugauucua

SEQ ID NO: 1253479 - RNA, 19 nt, Artificial Sequence
  Description of Artificial Sequence: Synthetic oligonucleotide
cauugaucaccuccuggcu

SEQ ID NO: 1253480 - RNA, 19 nt, Artificial Sequence
  Description of Artificial Sequence: Synthetic oligonucleotide
cacaaagaguggagaagcu

SEQ ID NO: 1253481 - RNA, 19 nt, Artificial Sequence
  Description of Artificial Sequence: Synthetic oligonucleotide
gcagagaugugagaaggaa

SEQ ID NO: 1253482 - RNA, 19 nt, Artificial Sequence
  Description of Artificial Sequence: Synthetic oligonucleotide
gugggcggucuuuccccgg

SEQ ID NO: 1253483 - RNA, 19 nt, Artificial Sequence
  Description of Artificial Sequence: Synthetic oligonucleotide
gccucucuaccgcacugag

SEQ ID NO: 1253484 - RNA, 19 nt, Artificial Sequence
  Description of Artificial Sequence: Synthetic oligonucleotide
gauucuggcuggaaacuuu

SEQ ID NO: 1253485 - RNA, 19 nt, Artificial Sequence
  Description of Artificial Sequence: Synthetic oligonucleotide
cacugccggcuucaccggc

SEQ ID NO: 1253486 - RNA, 19 nt, Artificial Sequence
  Description of Artificial Sequence: Synthetic oligonucleotide
gcagucuccugcucacaug

SEQ ID NO: 1253487 - RNA, 19 nt, Artificial Sequence
  Description of Artificial Sequence: Synthetic oligonucleotide
agcacacuuuucuccccuu

SEQ ID NO: 1253488 - RNA, 19 nt, Artificial Sequence
  Description of Artificial Sequence: Synthetic oligonucleotide
ccaugcuaccugucuguag

SEQ ID NO: 1253489 - RNA, 19 nt, Artificial Sequence
  Description of Artificial Sequence: Synthetic oligonucleotide
ugcucacaugggagcuacu

SEQ ID NO: 1253490 - RNA, 19 nt, Artificial Sequence
  Description of Artificial Sequence: Synthetic oligonucleotide
gcaaaggagugucggugca

SEQ ID NO: 1253491 - RNA, 19 nt, Artificial Sequence
  Description of Artificial Sequence: Synthetic oligonucleotide
gggcagacgaaggauccug

SEQ ID NO: 1253492 - RNA, 19 nt, Artificial Sequence
  Description of Artificial Sequence: Synthetic oligonucleotide
gugcuuguggccagagcca

SEQ ID NO: 1253493 - RNA, 19 nt, Artificial Sequence
  Description of Artificial Sequence: Synthetic oligonucleotide
ggucuuuccccggcagccg

SEQ ID NO: 1253494 - RNA, 19 nt, Artificial Sequence
  Description of Artificial Sequence: Synthetic oligonucleotide
cacguugcacaccgcucuc

SEQ ID NO: 1253495 - RNA, 19 nt, Artificial Sequence
  Description of Artificial Sequence: Synthetic oligonucleotide
gcucacaugggagcuacuc

SEQ ID NO: 1253496 - RNA, 19 nt, Artificial Sequence
  Description of Artificial Sequence: Synthetic oligonucleotide
uuuccccggcagccgugac

SEQ ID NO: 1253497 - RNA, 19 nt, Artificial Sequence
  Description of Artificial Sequence: Synthetic oligonucleotide
uaccugucuguagcgucuc

SEQ ID NO: 1253498 - RNA, 19 nt, Artificial Sequence
  Description of Artificial Sequence: Synthetic oligonucleotide
gucugagcugaucaugcuu

SEQ ID NO: 1253499 - RNA, 19 nt, Artificial Sequence
  Description of Artificial Sequence: Synthetic oligonucleotide
cacucaagucugacuugga

SEQ ID NO: 1253500 - RNA, 19 nt, Artificial Sequence
  Description of Artificial Sequence: Synthetic oligonucleotide
cacaugggagcuacucucu

SEQ ID NO: 1253501 - RNA, 19 nt, Artificial Sequence
  Description of Artificial Sequence: Synthetic oligonucleotide
ggcggucuuuccccggcag

SEQ ID NO: 1253502 - RNA, 19 nt, Artificial Sequence
  Description of Artificial Sequence: Synthetic oligonucleotide
gcguaggguacaccuucag

SEQ ID NO: 1253503 - RNA, 19 nt, Artificial Sequence
  Description of Artificial Sequence: Synthetic oligonucleotide
ugcccgcgggacugaccgg

SEQ ID NO: 1253504 - RNA, 19 nt, Artificial Sequence
  Description of Artificial Sequence: Synthetic oligonucleotide
uaccgccgaugugaaggug

SEQ ID NO: 1253505 - RNA, 19 nt, Artificial Sequence
  Description of Artificial Sequence: Synthetic oligonucleotide
agggcagacgaaggauccu

SEQ ID NO: 1253506 - RNA, 19 nt, Artificial Sequence
  Description of Artificial Sequence: Synthetic oligonucleotide
cuuccaggcggccccugca

SEQ ID NO: 1253507 - RNA, 19 nt, Artificial Sequence
  Description of Artificial Sequence: Synthetic oligonucleotide
gcucuuccgggucgagucc

SEQ ID NO: 1253508 - RNA, 19 nt, Artificial Sequence
  Description of Artificial Sequence: Synthetic oligonucleotide
gaugucggaggagcugugu

SEQ ID NO: 1253509 - RNA, 19 nt, Artificial Sequence
  Description of Artificial Sequence: Synthetic oligonucleotide
cugucuguagcgucuccgu

SEQ ID NO: 1253510 - RNA, 19 nt, Artificial Sequence
  Description of Artificial Sequence: Synthetic oligonucleotide
ccggcuucaccaugcuacc

SEQ ID NO: 1253511 - RNA, 19 nt, Artificial Sequence
  Description of Artificial Sequence: Synthetic oligonucleotide
ucuugggguugggcucugc

SEQ ID NO: 1253512 - RNA, 19 nt, Artificial Sequence
  Description of Artificial Sequence: Synthetic oligonucleotide
uaaccgccgcuguggcuuc

SEQ ID NO: 1253513 - RNA, 19 nt, Artificial Sequence
  Description of Artificial Sequence: Synthetic oligonucleotide
cuagcucuuccgggucgag

SEQ ID NO: 1253514 - RNA, 19 nt, Artificial Sequence
  Description of Artificial Sequence: Synthetic oligonucleotide
uagcgucuccgugggcaug

SEQ ID NO: 1253515 - RNA, 19 nt, Artificial Sequence
  Description of Artificial Sequence: Synthetic oligonucleotide
ccgcacugagucucuuggg

SEQ ID NO: 1253516 - RNA, 19 nt, Artificial Sequence
  Description of Artificial Sequence: Synthetic oligonucleotide
ccgaugugaaggugcccgc

SEQ ID NO: 1253517 - RNA, 19 nt, Artificial Sequence
  Description of Artificial Sequence: Synthetic oligonucleotide
gagcugugugagacgugca

SEQ ID NO: 1253518 - RNA, 19 nt, Artificial Sequence
  Description of Artificial Sequence: Synthetic oligonucleotide
gccucgcccaggcguaggg

SEQ ID NO: 1253519 - RNA, 19 nt, Artificial Sequence
  Description of Artificial Sequence: Synthetic oligonucleotide
cucuuccgggucgagucca

SEQ ID NO: 1253520 - RNA, 19 nt, Artificial Sequence
  Description of Artificial Sequence: Synthetic oligonucleotide
ggagggguaccgccgaugu

SEQ ID NO: 1253521 - RNA, 19 nt, Artificial Sequence
  Description of Artificial Sequence: Synthetic oligonucleotide
guaccgccgaugugaaggu

SEQ ID NO: 1253522 - RNA, 19 nt, Artificial Sequence
  Description of Artificial Sequence: Synthetic oligonucleotide
ucuccccuuccaggcggcc

SEQ ID NO: 1253523 - RNA, 19 nt, Artificial Sequence
  Description of Artificial Sequence: Synthetic oligonucleotide
gcggucuuuccccggcagc

SEQ ID NO: 1253524 - RNA, 19 nt, Artificial Sequence
  Description of Artificial Sequence: Synthetic oligonucleotide
gccaguuucgggagcugug

SEQ ID NO: 1253525 - RNA, 19 nt, Artificial Sequence
  Description of Artificial Sequence: Synthetic oligonucleotide
gcccagguuuucuagcucu

SEQ ID NO: 1253526 - RNA, 19 nt, Artificial Sequence
  Description of Artificial Sequence: Synthetic oligonucleotide
cuguuacuguccugagacu

SEQ ID NO: 1253527 - RNA, 19 nt, Artificial Sequence
  Description of Artificial Sequence: Synthetic oligonucleotide
gaccggcuucaccaugcua

SEQ ID NO: 1253528 - RNA, 19 nt, Artificial Sequence
  Description of Artificial Sequence: Synthetic oligonucleotide
cagcucauuaaccgccgcu

SEQ ID NO: 1253529 - RNA, 19 nt, Artificial Sequence
  Description of Artificial Sequence: Synthetic oligonucleotide
gccugcggaaguagucggg

SEQ ID NO: 1253530 - RNA, 19 nt, Artificial Sequence
  Description of Artificial Sequence: Synthetic oligonucleotide
guugcacaccgcucucggu

SEQ ID NO: 1253531 - RNA, 19 nt, Artificial Sequence
  Description of Artificial Sequence: Synthetic oligonucleotide
caugcaacuugagaacauu

SEQ ID NO: 1253532 - RNA, 19 nt, Artificial Sequence
  Description of Artificial Sequence: Synthetic oligonucleotide
aggugcccgcgggacugac

SEQ ID NO: 1253533 - RNA, 19 nt, Artificial Sequence
  Description of Artificial Sequence: Synthetic oligonucleotide
gggucgaguccacaguagu

SEQ ID NO: 1253534 - RNA, 19 nt, Artificial Sequence
  Description of Artificial Sequence: Synthetic oligonucleotide
gucuuuccccggcagccgu

SEQ ID NO: 1253535 - RNA, 19 nt, Artificial Sequence
  Description of Artificial Sequence: Synthetic oligonucleotide
ccuagucggucagauucug

SEQ ID NO: 1253536 - RNA, 19 nt, Artificial Sequence
  Description of Artificial Sequence: Synthetic oligonucleotide
aggagcugugugagacgug

SEQ ID NO: 1253537 - RNA, 19 nt, Artificial Sequence
  Description of Artificial Sequence: Synthetic oligonucleotide
gacugaccggcuucaccau

SEQ ID NO: 1253538 - RNA, 19 nt, Artificial Sequence
  Description of Artificial Sequence: Synthetic oligonucleotide
cuuuccccggcagccguga

SEQ ID NO: 1253539 - RNA, 19 nt, Artificial Sequence
  Description of Artificial Sequence: Synthetic oligonucleotide
cagcaagacucugcagaga

SEQ ID NO: 1253540 - RNA, 19 nt, Artificial Sequence
  Description of Artificial Sequence: Synthetic oligonucleotide
gcggaugucggaggagcug

SEQ ID NO: 1253541 - RNA, 19 nt, Artificial Sequence
  Description of Artificial Sequence: Synthetic oligonucleotide
agccgugacgaagcacaaa

SEQ ID NO: 1253542 - RNA, 19 nt, Artificial Sequence
  Description of Artificial Sequence: Synthetic oligonucleotide
gggucucacguugcacacc

SEQ ID NO: 1253543 - RNA, 19 nt, Artificial Sequence
  Description of Artificial Sequence: Synthetic oligonucleotide
guagcgucuccgugggcau

SEQ ID NO: 1253544 - RNA, 19 nt, Artificial Sequence
  Description of Artificial Sequence: Synthetic oligonucleotide
cguaggguacaccuucaga

SEQ ID NO: 1253545 - RNA, 19 nt, Artificial Sequence
  Description of Artificial Sequence: Synthetic oligonucleotide
gucucacguugcacaccgc

SEQ ID NO: 1253546 - RNA, 19 nt, Artificial Sequence
  Description of Artificial Sequence: Synthetic oligonucleotide
ggguaccgccgaugugaag

SEQ ID NO: 1253547 - RNA, 19 nt, Artificial Sequence
  Description of Artificial Sequence: Synthetic oligonucleotide
cagccgugacgaagcacaa

SEQ ID NO: 1253548 - RNA, 19 nt, Artificial Sequence
  Description of Artificial Sequence: Synthetic oligonucleotide
ccuuaagaguggggcugcc

SEQ ID NO: 1253549 - RNA, 19 nt, Artificial Sequence
  Description of Artificial Sequence: Synthetic oligonucleotide
gcauggugggcggucuuuc

SEQ ID NO: 1253550 - RNA, 19 nt, Artificial Sequence
  Description of Artificial Sequence: Synthetic oligonucleotide
ggcguaggguacaccuuca

SEQ ID NO: 1253551 - RNA, 19 nt, Artificial Sequence
  Description of Artificial Sequence: Synthetic oligonucleotide
aaccgccgcuguggcuuca

SEQ ID NO: 1253552 - RNA, 19 nt, Artificial Sequence
  Description of Artificial Sequence: Synthetic oligonucleotide
cuuccgggucgaguccaca

SEQ ID NO: 1253553 - RNA, 19 nt, Artificial Sequence
  Description of Artificial Sequence: Synthetic oligonucleotide
gcggaaguugagggauaug

SEQ ID NO: 1253554 - RNA, 19 nt, Artificial Sequence
  Description of Artificial Sequence: Synthetic oligonucleotide
gagcaaggcccuagucggu

SEQ ID NO: 1253555 - RNA, 19 nt, Artificial Sequence
  Description of Artificial Sequence: Synthetic oligonucleotide
ggucagauucuggcuggaa

SEQ ID NO: 1253556 - RNA, 19 nt, Artificial Sequence
  Description of Artificial Sequence: Synthetic oligonucleotide
ggaccucugaagggaaggu

SEQ ID NO: 1253557 - RNA, 19 nt, Artificial Sequence
  Description of Artificial Sequence: Synthetic oligonucleotide
ggguacaccuucagagacu

SEQ ID NO: 1253558 - RNA, 19 nt, Artificial Sequence
  Description of Artificial Sequence: Synthetic oligonucleotide
ggugcccgcgggacugacc

SEQ ID NO: 1253559 - RNA, 19 nt, Artificial Sequence
  Description of Artificial Sequence: Synthetic oligonucleotide
cauaugguacccggucauu

SEQ ID NO: 1253560 - RNA, 19 nt, Artificial Sequence
  Description of Artificial Sequence: Synthetic oligonucleotide
ccauaugguacccggucau

SEQ ID NO: 1253561 - RNA, 19 nt, Artificial Sequence
  Description of Artificial Sequence: Synthetic oligonucleotide
gacgugcaggaaggacucu

SEQ ID NO: 1253562 - RNA, 19 nt, Artificial Sequence
  Description of Artificial Sequence: Synthetic oligonucleotide
caggcguaggguacaccuu

SEQ ID NO: 1253563 - RNA, 19 nt, Artificial Sequence
  Description of Artificial Sequence: Synthetic oligonucleotide
ggucgaguccacaguaguu

SEQ ID NO: 1253564 - RNA, 19 nt, Artificial Sequence
  Description of Artificial Sequence: Synthetic oligonucleotide
gcggaaguagucggguccu

SEQ ID NO: 1253565 - RNA, 19 nt, Artificial Sequence
  Description of Artificial Sequence: Synthetic oligonucleotide
cgcgggacugaccggcuuc

SEQ ID NO: 1253566 - RNA, 19 nt, Artificial Sequence
  Description of Artificial Sequence: Synthetic oligonucleotide
gggguaccgccgaugugaa

SEQ ID NO: 1253567 - RNA, 19 nt, Artificial Sequence
  Description of Artificial Sequence: Synthetic oligonucleotide
cccuagucggucagauucu

SEQ ID NO: 1253568 - RNA, 19 nt, Artificial Sequence
  Description of Artificial Sequence: Synthetic oligonucleotide
gggcggucuuuccccggca

SEQ ID NO: 1253569 - RNA, 19 nt, Artificial Sequence
  Description of Artificial Sequence: Synthetic oligonucleotide
ccugcggaaguagucgggu

SEQ ID NO: 1253570 - RNA, 19 nt, Artificial Sequence
  Description of Artificial Sequence: Synthetic oligonucleotide
ccauguugacaggcaugca

SEQ ID NO: 1253571 - RNA, 19 nt, Artificial Sequence
  Description of Artificial Sequence: Synthetic oligonucleotide
ccggcuucaccggcuccug

SEQ ID NO: 1253572 - RNA, 19 nt, Artificial Sequence
  Description of Artificial Sequence: Synthetic oligonucleotide
ccugcucacaugggagcua

SEQ ID NO: 1253573 - RNA, 19 nt, Artificial Sequence
  Description of Artificial Sequence: Synthetic oligonucleotide
ggcccuagucggucagauu

SEQ ID NO: 1253574 - RNA, 19 nt, Artificial Sequence
  Description of Artificial Sequence: Synthetic oligonucleotide
gccugccugcggaaguagu

SEQ ID NO: 1253575 - RNA, 19 nt, Artificial Sequence
  Description of Artificial Sequence: Synthetic oligonucleotide
cuaccgcacugagucucuu

SEQ ID NO: 1253576 - RNA, 19 nt, Artificial Sequence
  Description of Artificial Sequence: Synthetic oligonucleotide
ccggcuccugcuuggcauu

SEQ ID NO: 1253577 - RNA, 19 nt, Artificial Sequence
  Description of Artificial Sequence: Synthetic oligonucleotide
gcggagggguaccgccgau

SEQ ID NO: 1253578 - RNA, 19 nt, Artificial Sequence
  Description of Artificial Sequence: Synthetic oligonucleotide
ccucgcccaggcguagggu

SEQ ID NO: 1253579 - RNA, 19 nt, Artificial Sequence
  Description of Artificial Sequence: Synthetic oligonucleotide
ccgcgggacugaccggcuu

SEQ ID NO: 1253580 - RNA, 19 nt, Artificial Sequence
  Description of Artificial Sequence: Synthetic oligonucleotide
ccaggccaguugccauguu

SEQ ID NO: 1253581 - RNA, 19 nt, Artificial Sequence
  Description of Artificial Sequence: Synthetic oligonucleotide
uguuacaucgucaugagug

SEQ ID NO: 1253582 - RNA, 19 nt, Artificial Sequence
  Description of Artificial Sequence: Synthetic oligonucleotide
agacauuucggacagagac

SEQ ID NO: 1253583 - RNA, 19 nt, Artificial Sequence
  Description of Artificial Sequence: Synthetic oligonucleotide
agauuauaccucuugaugg

SEQ ID NO: 1253584 - RNA, 19 nt, Artificial Sequence
  Description of Artificial Sequence: Synthetic oligonucleotide
agcgaguuuguauacagcc

SEQ ID NO: 1253585 - RNA, 19 nt, Artificial Sequence
  Description of Artificial Sequence: Synthetic oligonucleotide
aaauguuacaucgucauga

SEQ ID NO: 1253586 - RNA, 19 nt, Artificial Sequence
  Description of Artificial Sequence: Synthetic oligonucleotide
ugugccauaaugcaggcug

SEQ ID NO: 1253587 - RNA, 19 nt, Artificial Sequence
  Description of Artificial Sequence: Synthetic oligonucleotide
aauggcuaaggcuacagga

SEQ ID NO: 1253588 - RNA, 19 nt, Artificial Sequence
  Description of Artificial Sequence: Synthetic oligonucleotide
uacaguaggggacaaacag

SEQ ID NO: 1253589 - RNA, 19 nt, Artificial Sequence
  Description of Artificial Sequence: Synthetic oligonucleotide
uguacccucggucauauag

SEQ ID NO: 1253590 - RNA, 19 nt, Artificial Sequence
  Description of Artificial Sequence: Synthetic oligonucleotide
uaagccuacgcccaaagug

SEQ ID NO: 1253591 - RNA, 19 nt, Artificial Sequence
  Description of Artificial Sequence: Synthetic oligonucleotide
gauggugucuuguagaaac

SEQ ID NO: 1253592 - RNA, 19 nt, Artificial Sequence
  Description of Artificial Sequence: Synthetic oligonucleotide
aauguuacaucgucaugag

SEQ ID NO: 1253593 - RNA, 19 nt, Artificial Sequence
  Description of Artificial Sequence: Synthetic oligonucleotide
ugaugcgcaugaaugaagg

SEQ ID NO: 1253594 - RNA, 19 nt, Artificial Sequence
  Description of Artificial Sequence: Synthetic oligonucleotide
gacgugacagguuacaccc

SEQ ID NO: 1253595 - RNA, 19 nt, Artificial Sequence
  Description of Artificial Sequence: Synthetic oligonucleotide
uaugcuggacgguagacag

SEQ ID NO: 1253596 - RNA, 19 nt, Artificial Sequence
  Description of Artificial Sequence: Synthetic oligonucleotide
agagguagacauuucggac

SEQ ID NO: 1253597 - RNA, 19 nt, Artificial Sequence
  Description of Artificial Sequence: Synthetic oligonucleotide
auaccugcagauuauaccu

SEQ ID NO: 1253598 - RNA, 19 nt, Artificial Sequence
  Description of Artificial Sequence: Synthetic oligonucleotide
ucggucauauaguauacag

SEQ ID NO: 1253599 - RNA, 19 nt, Artificial Sequence
  Description of Artificial Sequence: Synthetic oligonucleotide
aagagguagacauuucgga

SEQ ID NO: 1253600 - RNA, 19 nt, Artificial Sequence
  Description of Artificial Sequence: Synthetic oligonucleotide
uguagaaacuguuccaacu

SEQ ID NO: 1253601 - RNA, 19 nt, Artificial Sequence
  Description of Artificial Sequence: Synthetic oligonucleotide
gaggacaugagugaagcgg

SEQ ID NO: 1253602 - RNA, 19 nt, Artificial Sequence
  Description of Artificial Sequence: Synthetic oligonucleotide
aguucagaggcccuagacg

SEQ ID NO: 1253603 - RNA, 19 nt, Artificial Sequence
  Description of Artificial Sequence: Synthetic oligonucleotide
ucggacagagaccagcggg

SEQ ID NO: 1253604 - RNA, 19 nt, Artificial Sequence
  Description of Artificial Sequence: Synthetic oligonucleotide
uucuaauaccugcagauua

SEQ ID NO: 1253605 - RNA, 19 nt, Artificial Sequence
  Description of Artificial Sequence: Synthetic oligonucleotide
auaguauacaguaggggac

SEQ ID NO: 1253606 - RNA, 19 nt, Artificial Sequence
  Description of Artificial Sequence: Synthetic oligonucleotide
uucacguggaauugcacag

SEQ ID NO: 1253607 - RNA, 19 nt, Artificial Sequence
  Description of Artificial Sequence: Synthetic oligonucleotide
uuucuguagguccagucca

SEQ ID NO: 1253608 - RNA, 19 nt, Artificial Sequence
  Description of Artificial Sequence: Synthetic oligonucleotide
guucagaggcccuagacgc

SEQ ID NO: 1253609 - RNA, 19 nt, Artificial Sequence
  Description of Artificial Sequence: Synthetic oligonucleotide
uuucggacagagaccagcg

SEQ ID NO: 1253610 - RNA, 19 nt, Artificial Sequence
  Description of Artificial Sequence: Synthetic oligonucleotide
cauugaagcccacacagag

SEQ ID NO: 1253611 - RNA, 19 nt, Artificial Sequence
  Description of Artificial Sequence: Synthetic oligonucleotide
uauacaguaggggacaaac

SEQ ID NO: 1253612 - RNA, 19 nt, Artificial Sequence
  Description of Artificial Sequence: Synthetic oligonucleotide
augcgcaugaaugaaggcc

SEQ ID NO: 1253613 - RNA, 19 nt, Artificial Sequence
  Description of Artificial Sequence: Synthetic oligonucleotide
uuuacuugacgugacaggu

SEQ ID NO: 1253614 - RNA, 19 nt, Artificial Sequence
  Description of Artificial Sequence: Synthetic oligonucleotide
agacauuccuccuagggcu

SEQ ID NO: 1253615 - RNA, 19 nt, Artificial Sequence
  Description of Artificial Sequence: Synthetic oligonucleotide
auacaacuccuucacgugg

SEQ ID NO: 1253616 - RNA, 19 nt, Artificial Sequence
  Description of Artificial Sequence: Synthetic oligonucleotide
guuacaucgucaugagugg

SEQ ID NO: 1253617 - RNA, 19 nt, Artificial Sequence
  Description of Artificial Sequence: Synthetic oligonucleotide
auuucggacagagaccagc

SEQ ID NO: 1253618 - RNA, 19 nt, Artificial Sequence
  Description of Artificial Sequence: Synthetic oligonucleotide
ugcgcaugaaugaaggcca

SEQ ID NO: 1253619 - RNA, 19 nt, Artificial Sequence
  Description of Artificial Sequence: Synthetic oligonucleotide
guuuacuugacgugacagg

SEQ ID NO: 1253620 - RNA, 19 nt, Artificial Sequence
  Description of Artificial Sequence: Synthetic oligonucleotide
acagcugacgaagaaaauc

SEQ ID NO: 1253621 - RNA, 19 nt, Artificial Sequence
  Description of Artificial Sequence: Synthetic oligonucleotide
ucaugaguggggccgaugc

SEQ ID NO: 1253622 - RNA, 19 nt, Artificial Sequence
  Description of Artificial Sequence: Synthetic oligonucleotide
cagauuauaccucuugaug

SEQ ID NO: 1253623 - RNA, 19 nt, Artificial Sequence
  Description of Artificial Sequence: Synthetic oligonucleotide
gaccaaugaucccugaggc

SEQ ID NO: 1253624 - RNA, 19 nt, Artificial Sequence
  Description of Artificial Sequence: Synthetic oligonucleotide
aggaucugugccauaaugc

SEQ ID NO: 1253625 - RNA, 19 nt, Artificial Sequence
  Description of Artificial Sequence: Synthetic oligonucleotide
uuaggauggaggcaauaga

SEQ ID NO: 1253626 - RNA, 19 nt, Artificial Sequence
  Description of Artificial Sequence: Synthetic oligonucleotide
uucaccugauaguaguugc

SEQ ID NO: 1253627 - RNA, 19 nt, Artificial Sequence
  Description of Artificial Sequence: Synthetic oligonucleotide
aacagagacucggcaaacc

SEQ ID NO: 1253628 - RNA, 19 nt, Artificial Sequence
  Description of Artificial Sequence: Synthetic oligonucleotide
aacuccuucacguggaauu

SEQ ID NO: 1253629 - RNA, 19 nt, Artificial Sequence
  Description of Artificial Sequence: Synthetic oligonucleotide
gacucggcaaaccuggacc

SEQ ID NO: 1253630 - RNA, 19 nt, Artificial Sequence
  Description of Artificial Sequence: Synthetic oligonucleotide
ccuccuaggguuuugaugg

SEQ ID NO: 1253631 - RNA, 19 nt, Artificial Sequence
  Description of Artificial Sequence: Synthetic oligonucleotide
ugugagaucaugugcggga

SEQ ID NO: 1253632 - RNA, 19 nt, Artificial Sequence
  Description of Artificial Sequence: Synthetic oligonucleotide
caucagguacaacagagac

SEQ ID NO: 1253633 - RNA, 19 nt, Artificial Sequence
  Description of Artificial Sequence: Synthetic oligonucleotide
acaugagugaagcggcugg

SEQ ID NO: 1253634 - RNA, 19 nt, Artificial Sequence
  Description of Artificial Sequence: Synthetic oligonucleotide
uacaguuuacuugacguga

SEQ ID NO: 1253635 - RNA, 19 nt, Artificial Sequence
  Description of Artificial Sequence: Synthetic oligonucleotide
gaaaguaaguguugguguc

SEQ ID NO: 1253636 - RNA, 19 nt, Artificial Sequence
  Description of Artificial Sequence: Synthetic oligonucleotide
aacgugaagggcuggccag

SEQ ID NO: 1253637 - RNA, 19 nt, Artificial Sequence
  Description of Artificial Sequence: Synthetic oligonucleotide
ucagggugugguuugagcu

SEQ ID NO: 1253638 - RNA, 19 nt, Artificial Sequence
  Description of Artificial Sequence: Synthetic oligonucleotide
ugauaguaguugcugcccc

SEQ ID NO: 1253639 - RNA, 19 nt, Artificial Sequence
  Description of Artificial Sequence: Synthetic oligonucleotide
cucagucuuguccagagug

SEQ ID NO: 1253640 - RNA, 19 nt, Artificial Sequence
  Description of Artificial Sequence: Synthetic oligonucleotide
gugugugagaucaugugcg

SEQ ID NO: 1253641 - RNA, 19 nt, Artificial Sequence
  Description of Artificial Sequence: Synthetic oligonucleotide
ugcuggacgguagacaggg

SEQ ID NO: 1253642 - RNA, 19 nt, Artificial Sequence
  Description of Artificial Sequence: Synthetic oligonucleotide
ucaauggucuguagggcgc

SEQ ID NO: 1253643 - RNA, 19 nt, Artificial Sequence
  Description of Artificial Sequence: Synthetic oligonucleotide
gaggcagacgagcaguuag

SEQ ID NO: 1253644 - RNA, 19 nt, Artificial Sequence
  Description of Artificial Sequence: Synthetic oligonucleotide
gaaaggugagaugcuacgg

SEQ ID NO: 1253645 - RNA, 19 nt, Artificial Sequence
  Description of Artificial Sequence: Synthetic oligonucleotide
aguuuacuugacgugacag

SEQ ID NO: 1253646 - RNA, 19 nt, Artificial Sequence
  Description of Artificial Sequence: Synthetic oligonucleotide
uuauaccucuugauggugu

SEQ ID NO: 1253647 - RNA, 19 nt, Artificial Sequence
  Description of Artificial Sequence: Synthetic oligonucleotide
aaacagcugacgaagaaaa

SEQ ID NO: 1253648 - RNA, 19 nt, Artificial Sequence
  Description of Artificial Sequence: Synthetic oligonucleotide
aucgagggcagucucaaug

SEQ ID NO: 1253649 - RNA, 19 nt, Artificial Sequence
  Description of Artificial Sequence: Synthetic oligonucleotide
aucugugccauaaugcagg

SEQ ID NO: 1253650 - RNA, 19 nt, Artificial Sequence
  Description of Artificial Sequence: Synthetic oligonucleotide
cauuaggacagccuccagc

SEQ ID NO: 1253651 - RNA, 19 nt, Artificial Sequence
  Description of Artificial Sequence: Synthetic oligonucleotide
ucugcaucguguucucccg

SEQ ID NO: 1253652 - RNA, 19 nt, Artificial Sequence
  Description of Artificial Sequence: Synthetic oligonucleotide
acugagcgaguuuguauac

SEQ ID NO: 1253653 - RNA, 19 nt, Artificial Sequence
  Description of Artificial Sequence: Synthetic oligonucleotide
guaagccagacauuccucc

SEQ ID NO: 1253654 - RNA, 19 nt, Artificial Sequence
  Description of Artificial Sequence: Synthetic oligonucleotide
aggacaugagugaagcggc

SEQ ID NO: 1253655 - RNA, 19 nt, Artificial Sequence
  Description of Artificial Sequence: Synthetic oligonucleotide
agguacaacagagacucgg

SEQ ID NO: 1253656 - RNA, 19 nt, Artificial Sequence
  Description of Artificial Sequence: Synthetic oligonucleotide
ugagaugcuacggauguac

SEQ ID NO: 1253657 - RNA, 19 nt, Artificial Sequence
  Description of Artificial Sequence: Synthetic oligonucleotide
uggaacaguccuuucaguc

SEQ ID NO: 1253658 - RNA, 19 nt, Artificial Sequence
  Description of Artificial Sequence: Synthetic oligonucleotide
ugacgugacagguuacacc

SEQ ID NO: 1253659 - RNA, 19 nt, Artificial Sequence
  Description of Artificial Sequence: Synthetic oligonucleotide
agaugcuacggauguacag

SEQ ID NO: 1253660 - RNA, 19 nt, Artificial Sequence
  Description of Artificial Sequence: Synthetic oligonucleotide
augaguggggccgaugccc

SEQ ID NO: 1253661 - RNA, 19 nt, Artificial Sequence
  Description of Artificial Sequence: Synthetic oligonucleotide
gaggcaauagaacccucag

SEQ ID NO: 1253662 - RNA, 19 nt, Artificial Sequence
  Description of Artificial Sequence: Synthetic oligonucleotide
guuaggauggaggcaauag

SEQ ID NO: 1253663 - RNA, 19 nt, Artificial Sequence
  Description of Artificial Sequence: Synthetic oligonucleotide
guagaaacuguuccaacuc

SEQ ID NO: 1253664 - RNA, 19 nt, Artificial Sequence
  Description of Artificial Sequence: Synthetic oligonucleotide
aaugaucccugaggcagac

SEQ ID NO: 1253665 - RNA, 19 nt, Artificial Sequence
  Description of Artificial Sequence: Synthetic oligonucleotide
uuaaggaucucaucuccaa

SEQ ID NO: 1253666 - RNA, 19 nt, Artificial Sequence
  Description of Artificial Sequence: Synthetic oligonucleotide
aaggugagaugcuacggau

SEQ ID NO: 1253667 - RNA, 19 nt, Artificial Sequence
  Description of Artificial Sequence: Synthetic oligonucleotide
uacuugacgugacagguua

SEQ ID NO: 1253668 - RNA, 19 nt, Artificial Sequence
  Description of Artificial Sequence: Synthetic oligonucleotide
acauuucggacagagacca

SEQ ID NO: 1253669 - RNA, 19 nt, Artificial Sequence
  Description of Artificial Sequence: Synthetic oligonucleotide
cagacgagcaguuagguaa

SEQ ID NO: 1253670 - RNA, 19 nt, Artificial Sequence
  Description of Artificial Sequence: Synthetic oligonucleotide
aucgucaugaguggggccg

SEQ ID NO: 1253671 - RNA, 19 nt, Artificial Sequence
  Description of Artificial Sequence: Synthetic oligonucleotide
uuucagucccuccaucgcu

SEQ ID NO: 1253672 - RNA, 19 nt, Artificial Sequence
  Description of Artificial Sequence: Synthetic oligonucleotide
caguagguaugcuggacgg

SEQ ID NO: 1253673 - RNA, 19 nt, Artificial Sequence
  Description of Artificial Sequence: Synthetic oligonucleotide
ggaccaaugaucccugagg

SEQ ID NO: 1253674 - RNA, 19 nt, Artificial Sequence
  Description of Artificial Sequence: Synthetic oligonucleotide
gaucccugggaagagguag

SEQ ID NO: 1253675 - RNA, 19 nt, Artificial Sequence
  Description of Artificial Sequence: Synthetic oligonucleotide
ggaaaggugagaugcuacg

SEQ ID NO: 1253676 - RNA, 19 nt, Artificial Sequence
  Description of Artificial Sequence: Synthetic oligonucleotide
cauacaacuccuucacgug

SEQ ID NO: 1253677 - RNA, 19 nt, Artificial Sequence
  Description of Artificial Sequence: Synthetic oligonucleotide
gaucaugugcgggaguucc

SEQ ID NO: 1253678 - RNA, 19 nt, Artificial Sequence
  Description of Artificial Sequence: Synthetic oligonucleotide
auugaagcccacacagagc

SEQ ID NO: 1253679 - RNA, 19 nt, Artificial Sequence
  Description of Artificial Sequence: Synthetic oligonucleotide
aggcaauagaacccucagg

SEQ ID NO: 1253680 - RNA, 19 nt, Artificial Sequence
  Description of Artificial Sequence: Synthetic oligonucleotide
ucuguagggcgcuugcuac

SEQ ID NO: 1253681 - RNA, 19 nt, Artificial Sequence
  Description of Artificial Sequence: Synthetic oligonucleotide
aaaaucccagauguuucug

SEQ ID NO: 1253682 - RNA, 19 nt, Artificial Sequence
  Description of Artificial Sequence: Synthetic oligonucleotide
acugaucgagggcagucuc

SEQ ID NO: 1253683 - RNA, 19 nt, Artificial Sequence
  Description of Artificial Sequence: Synthetic oligonucleotide
uggugugagguacaguuua

SEQ ID NO: 1253684 - RNA, 19 nt, Artificial Sequence
  Description of Artificial Sequence: Synthetic oligonucleotide
ggaacaucaggaaauuucc

SEQ ID NO: 1253685 - RNA, 19 nt, Artificial Sequence
  Description of Artificial Sequence: Synthetic oligonucleotide
aagccuacgcccaaaguga

SEQ ID NO: 1253686 - RNA, 19 nt, Artificial Sequence
  Description of Artificial Sequence: Synthetic oligonucleotide
gacauuucggacagagacc

SEQ ID NO: 1253687 - RNA, 19 nt, Artificial Sequence
  Description of Artificial Sequence: Synthetic oligonucleotide
uaguauacaguaggggaca

SEQ ID NO: 1253688 - RNA, 19 nt, Artificial Sequence
  Description of Artificial Sequence: Synthetic oligonucleotide
uggacgguagacagggugu

SEQ ID NO: 1253689 - RNA, 19 nt, Artificial Sequence
  Description of Artificial Sequence: Synthetic oligonucleotide
ugcccauuaggacagccuc

SEQ ID NO: 1253690 - RNA, 19 nt, Artificial Sequence
  Description of Artificial Sequence: Synthetic oligonucleotide
agagaaaguaaguguuggu

SEQ ID NO: 1253691 - RNA, 19 nt, Artificial Sequence
  Description of Artificial Sequence: Synthetic oligonucleotide
uccccagugauguguaccc

SEQ ID NO: 1253692 - RNA, 19 nt, Artificial Sequence
  Description of Artificial Sequence: Synthetic oligonucleotide
uagguaugcuggacgguag

SEQ ID NO: 1253693 - RNA, 19 nt, Artificial Sequence
  Description of Artificial Sequence: Synthetic oligonucleotide
agacagcuucucccaaccc

SEQ ID NO: 1253694 - RNA, 19 nt, Artificial Sequence
  Description of Artificial Sequence: Synthetic oligonucleotide
uggaauugcacagcugugu

SEQ ID NO: 1253695 - RNA, 19 nt, Artificial Sequence
  Description of Artificial Sequence: Synthetic oligonucleotide
guaguugcugccccaauca

SEQ ID NO: 1253696 - RNA, 19 nt, Artificial Sequence
  Description of Artificial Sequence: Synthetic oligonucleotide
gaugcgcaugaaugaaggc

SEQ ID NO: 1253697 - RNA, 19 nt, Artificial Sequence
  Description of Artificial Sequence: Synthetic oligonucleotide
caacccaccccuccuaggg

SEQ ID NO: 1253698 - RNA, 19 nt, Artificial Sequence
  Description of Artificial Sequence: Synthetic oligonucleotide
cuucacguggaauugcaca

SEQ ID NO: 1253699 - RNA, 19 nt, Artificial Sequence
  Description of Artificial Sequence: Synthetic oligonucleotide
uccuucacguggaauugca

SEQ ID NO: 1253700 - RNA, 19 nt, Artificial Sequence
  Description of Artificial Sequence: Synthetic oligonucleotide
gauuauaccucuugauggu

SEQ ID NO: 1253701 - RNA, 19 nt, Artificial Sequence
  Description of Artificial Sequence: Synthetic oligonucleotide
uaguugcugccccaaucag

SEQ ID NO: 1253702 - RNA, 19 nt, Artificial Sequence
  Description of Artificial Sequence: Synthetic oligonucleotide
gacugaaauggcuaaggcu

SEQ ID NO: 1253703 - RNA, 19 nt, Artificial Sequence
  Description of Artificial Sequence: Synthetic oligonucleotide
guauacagccucaccagcc

SEQ ID NO: 1253704 - RNA, 19 nt, Artificial Sequence
  Description of Artificial Sequence: Synthetic oligonucleotide
acaguuuacuugacgugac

SEQ ID NO: 1253705 - RNA, 19 nt, Artificial Sequence
  Description of Artificial Sequence: Synthetic oligonucleotide
agugauguguacccucggu

SEQ ID NO: 1253706 - RNA, 19 nt, Artificial Sequence
  Description of Artificial Sequence: Synthetic oligonucleotide
gacugagcgaguuuguaua

SEQ ID NO: 1253707 - RNA, 19 nt, Artificial Sequence
  Description of Artificial Sequence: Synthetic oligonucleotide
ggugucuugaguguguccc

SEQ ID NO: 1253708 - RNA, 19 nt, Artificial Sequence
  Description of Artificial Sequence: Synthetic oligonucleotide
aggguaggaacccaggcua

SEQ ID NO: 1253709 - RNA, 19 nt, Artificial Sequence
  Description of Artificial Sequence: Synthetic oligonucleotide
uguuuuggaacaguccuuu

SEQ ID NO: 1253710 - RNA, 19 nt, Artificial Sequence
  Description of Artificial Sequence: Synthetic oligonucleotide
cauaaugcaggcuggcaga

SEQ ID NO: 1253711 - RNA, 19 nt, Artificial Sequence
  Description of Artificial Sequence: Synthetic oligonucleotide
agcuucuaauaccugcaga

SEQ ID NO: 1253712 - RNA, 19 nt, Artificial Sequence
  Description of Artificial Sequence: Synthetic oligonucleotide
gagagguuuuggaacauca

SEQ ID NO: 1253713 - RNA, 19 nt, Artificial Sequence
  Description of Artificial Sequence: Synthetic oligonucleotide
ggacaaacagcugacgaag

SEQ ID NO: 1253714 - RNA, 19 nt, Artificial Sequence
  Description of Artificial Sequence: Synthetic oligonucleotide
ugacugagcgaguuuguau

SEQ ID NO: 1253715 - RNA, 19 nt, Artificial Sequence
  Description of Artificial Sequence: Synthetic oligonucleotide
cuagacgccauggucuugc

SEQ ID NO: 1253716 - RNA, 19 nt, Artificial Sequence
  Description of Artificial Sequence: Synthetic oligonucleotide
augcuacggauguacagga

SEQ ID NO: 1253717 - RNA, 19 nt, Artificial Sequence
  Description of Artificial Sequence: Synthetic oligonucleotide
cugaaauggcuaaggcuac

SEQ ID NO: 1253718 - RNA, 19 nt, Artificial Sequence
  Description of Artificial Sequence: Synthetic oligonucleotide
augaugcccgccgucacac

SEQ ID NO: 1253719 - RNA, 19 nt, Artificial Sequence
  Description of Artificial Sequence: Synthetic oligonucleotide
agacgccauggucuugccc

SEQ ID NO: 1253720 - RNA, 19 nt, Artificial Sequence
  Description of Artificial Sequence: Synthetic oligonucleotide
gauaguaguugcugcccca

SEQ ID NO: 1253721 - RNA, 19 nt, Artificial Sequence
  Description of Artificial Sequence: Synthetic oligonucleotide
gagugaagcggcuggagaa

SEQ ID NO: 1253722 - RNA, 19 nt, Artificial Sequence
  Description of Artificial Sequence: Synthetic oligonucleotide
agucccuccaucgcucgcc

SEQ ID NO: 1253723 - RNA, 19 nt, Artificial Sequence
  Description of Artificial Sequence: Synthetic oligonucleotide
uccggcagagaaaguaagu

SEQ ID NO: 1253724 - RNA, 19 nt, Artificial Sequence
  Description of Artificial Sequence: Synthetic oligonucleotide
augguggcuaccucaucag

SEQ ID NO: 1253725 - RNA, 19 nt, Artificial Sequence
  Description of Artificial Sequence: Synthetic oligonucleotide
ucagucccuccaucgcucg

SEQ ID NO: 1253726 - RNA, 19 nt, Artificial Sequence
  Description of Artificial Sequence: Synthetic oligonucleotide
cagugcgaggaucugugcc

SEQ ID NO: 1253727 - RNA, 19 nt, Artificial Sequence
  Description of Artificial Sequence: Synthetic oligonucleotide
gaacgugaagggcuggcca

SEQ ID NO: 1253728 - RNA, 19 nt, Artificial Sequence
  Description of Artificial Sequence: Synthetic oligonucleotide
gagucuagaaucagcuuca

SEQ ID NO: 1253729 - RNA, 19 nt, Artificial Sequence
  Description of Artificial Sequence: Synthetic oligonucleotide
cugcagauuauaccucuug

SEQ ID NO: 1253730 - RNA, 19 nt, Artificial Sequence
  Description of Artificial Sequence: Synthetic oligonucleotide
ggaucugugccauaaugca

SEQ ID NO: 1253731 - RNA, 19 nt, Artificial Sequence
  Description of Artificial Sequence: Synthetic oligonucleotide
ccaaugaucccugaggcag

SEQ ID NO: 1253732 - RNA, 19 nt, Artificial Sequence
  Description of Artificial Sequence: Synthetic oligonucleotide
guaaguguuggugucuuga

SEQ ID NO: 1253733 - RNA, 19 nt, Artificial Sequence
  Description of Artificial Sequence: Synthetic oligonucleotide
gacgaagaaaaucccagau

SEQ ID NO: 1253734 - RNA, 19 nt, Artificial Sequence
  Description of Artificial Sequence: Synthetic oligonucleotide
agcggguugaugcgcauga

SEQ ID NO: 1253735 - RNA, 19 nt, Artificial Sequence
  Description of Artificial Sequence: Synthetic oligonucleotide
gaagcggcuggagaaugag

SEQ ID NO: 1253736 - RNA, 19 nt, Artificial Sequence
  Description of Artificial Sequence: Synthetic oligonucleotide
ccugauaguaguugcugcc

SEQ ID NO: 1253737 - RNA, 19 nt, Artificial Sequence
  Description of Artificial Sequence: Synthetic oligonucleotide
cauucuccaguagguaugc

SEQ ID NO: 1253738 - RNA, 19 nt, Artificial Sequence
  Description of Artificial Sequence: Synthetic oligonucleotide
uacgcccaaagugagccug

SEQ ID NO: 1253739 - RNA, 19 nt, Artificial Sequence
  Description of Artificial Sequence: Synthetic oligonucleotide
ccauaaugcaggcuggcag

SEQ ID NO: 1253740 - RNA, 19 nt, Artificial Sequence
  Description of Artificial Sequence: Synthetic oligonucleotide
cacacugcguccuggagga

SEQ ID NO: 1253741 - RNA, 19 nt, Artificial Sequence
  Description of Artificial Sequence: Synthetic oligonucleotide
gugguuugagcuccucccc

SEQ ID NO: 1253742 - RNA, 19 nt, Artificial Sequence
  Description of Artificial Sequence: Synthetic oligonucleotide
ugagaucaugugcgggagu

SEQ ID NO: 1253743 - RNA, 19 nt, Artificial Sequence
  Description of Artificial Sequence: Synthetic oligonucleotide
caggaguaggggucagucc

SEQ ID NO: 1253744 - RNA, 19 nt, Artificial Sequence
  Description of Artificial Sequence: Synthetic oligonucleotide
agugaggacaugagugaag

SEQ ID NO: 1253745 - RNA, 19 nt, Artificial Sequence
  Description of Artificial Sequence: Synthetic oligonucleotide
gaggcccuagacgccaugg

SEQ ID NO: 1253746 - RNA, 19 nt, Artificial Sequence
  Description of Artificial Sequence: Synthetic oligonucleotide
gacgggugcccauuaggac

SEQ ID NO: 1253747 - RNA, 19 nt, Artificial Sequence
  Description of Artificial Sequence: Synthetic oligonucleotide
ugcaucguguucucccgac

SEQ ID NO: 1253748 - RNA, 19 nt, Artificial Sequence
  Description of Artificial Sequence: Synthetic oligonucleotide
gguugaugcgcaugaauga

SEQ ID NO: 1253749 - RNA, 19 nt, Artificial Sequence
  Description of Artificial Sequence: Synthetic oligonucleotide
uugacgugacagguuacac

SEQ ID NO: 1253750 - RNA, 19 nt, Artificial Sequence
  Description of Artificial Sequence: Synthetic oligonucleotide
ugaaauggcuaaggcuaca

SEQ ID NO: 1253751 - RNA, 19 nt, Artificial Sequence
  Description of Artificial Sequence: Synthetic oligonucleotide
auguuacaucgucaugagu

SEQ ID NO: 1253752 - RNA, 19 nt, Artificial Sequence
  Description of Artificial Sequence: Synthetic oligonucleotide
ugcuuggagcucagggugu

SEQ ID NO: 1253753 - RNA, 19 nt, Artificial Sequence
  Description of Artificial Sequence: Synthetic oligonucleotide
ggugguacugaucgagggc

SEQ ID NO: 1253754 - RNA, 19 nt, Artificial Sequence
  Description of Artificial Sequence: Synthetic oligonucleotide
gugugagaucaugugcggg

SEQ ID NO: 1253755 - RNA, 19 nt, Artificial Sequence
  Description of Artificial Sequence: Synthetic oligonucleotide
guaggaacccaggcuaagc

SEQ ID NO: 1253756 - RNA, 19 nt, Artificial Sequence
  Description of Artificial Sequence: Synthetic oligonucleotide
uaaugcaggcuggcagagg

SEQ ID NO: 1253757 - RNA, 19 nt, Artificial Sequence
  Description of Artificial Sequence: Synthetic oligonucleotide
ucacguggaauugcacagc

SEQ ID NO: 1253758 - RNA, 19 nt, Artificial Sequence
  Description of Artificial Sequence: Synthetic oligonucleotide
uugccaccauugaagccca

SEQ ID NO: 1253759 - RNA, 19 nt, Artificial Sequence
  Description of Artificial Sequence: Synthetic oligonucleotide
uguagggcgcuugcuaccu

SEQ ID NO: 1253760 - RNA, 19 nt, Artificial Sequence
  Description of Artificial Sequence: Synthetic oligonucleotide
gcuacggauguacaggauc

SEQ ID NO: 1253761 - RNA, 19 nt, Artificial Sequence
  Description of Artificial Sequence: Synthetic oligonucleotide
ucguguucucccgacuccc

SEQ ID NO: 1253762 - RNA, 19 nt, Artificial Sequence
  Description of Artificial Sequence: Synthetic oligonucleotide
ugaucgagggcagucucaa

SEQ ID NO: 1253763 - RNA, 19 nt, Artificial Sequence
  Description of Artificial Sequence: Synthetic oligonucleotide
agcgggaacgugaagggcu

SEQ ID NO: 1253764 - RNA, 19 nt, Artificial Sequence
  Description of Artificial Sequence: Synthetic oligonucleotide
caugaguggggccgaugcc

SEQ ID NO: 1253765 - RNA, 19 nt, Artificial Sequence
  Description of Artificial Sequence: Synthetic oligonucleotide
ccuacgcccaaagugagcc

SEQ ID NO: 1253766 - RNA, 19 nt, Artificial Sequence
  Description of Artificial Sequence: Synthetic oligonucleotide
caucgcucgccgcagcagc

SEQ ID NO: 1253767 - RNA, 19 nt, Artificial Sequence
  Description of Artificial Sequence: Synthetic oligonucleotide
caugaaugaaggccagcca

SEQ ID NO: 1253768 - RNA, 19 nt, Artificial Sequence
  Description of Artificial Sequence: Synthetic oligonucleotide
gugagaucaugugcgggag

SEQ ID NO: 1253769 - RNA, 19 nt, Artificial Sequence
  Description of Artificial Sequence: Synthetic oligonucleotide
gaugaugcccgccgucaca

SEQ ID NO: 1253770 - RNA, 19 nt, Artificial Sequence
  Description of Artificial Sequence: Synthetic oligonucleotide
aacccaccccuccuagggu

SEQ ID NO: 1253771 - RNA, 19 nt, Artificial Sequence
  Description of Artificial Sequence: Synthetic oligonucleotide
uccaucgcucgccgcagca

SEQ ID NO: 1253772 - RNA, 19 nt, Artificial Sequence
  Description of Artificial Sequence: Synthetic oligonucleotide
uuggugugagguacaguuu

SEQ ID NO: 1253773 - RNA, 19 nt, Artificial Sequence
  Description of Artificial Sequence: Synthetic oligonucleotide
cuacggauguacaggaucu

SEQ ID NO: 1253774 - RNA, 19 nt, Artificial Sequence
  Description of Artificial Sequence: Synthetic oligonucleotide
cccaaucaggguaggaacc

SEQ ID NO: 1253775 - RNA, 19 nt, Artificial Sequence
  Description of Artificial Sequence: Synthetic oligonucleotide
gguacaacagagacucggc

SEQ ID NO: 1253776 - RNA, 19 nt, Artificial Sequence
  Description of Artificial Sequence: Synthetic oligonucleotide
uacugaucgagggcagucu

SEQ ID NO: 1253777 - RNA, 19 nt, Artificial Sequence
  Description of Artificial Sequence: Synthetic oligonucleotide
gaguuuguauacagccuca

SEQ ID NO: 1253778 - RNA, 19 nt, Artificial Sequence
  Description of Artificial Sequence: Synthetic oligonucleotide
cagggugugguuugagcuc

SEQ ID NO: 1253779 - RNA, 19 nt, Artificial Sequence
  Description of Artificial Sequence: Synthetic oligonucleotide
cuccccagugauguguacc

SEQ ID NO: 1253780 - RNA, 19 nt, Artificial Sequence
  Description of Artificial Sequence: Synthetic oligonucleotide
ccucaaauguuacaucguc

SEQ ID NO: 1253781 - RNA, 19 nt, Artificial Sequence
  Description of Artificial Sequence: Synthetic oligonucleotide
caggcuaagccuacgccca

SEQ ID NO: 1253782 - RNA, 19 nt, Artificial Sequence
  Description of Artificial Sequence: Synthetic oligonucleotide
guugaugcgcaugaaugaa

SEQ ID NO: 1253783 - RNA, 19 nt, Artificial Sequence
  Description of Artificial Sequence: Synthetic oligonucleotide
agaucaugugcgggaguuc

SEQ ID NO: 1253784 - RNA, 19 nt, Artificial Sequence
  Description of Artificial Sequence: Synthetic oligonucleotide
auacaguaggggacaaaca

SEQ ID NO: 1253785 - RNA, 19 nt, Artificial Sequence
  Description of Artificial Sequence: Synthetic oligonucleotide
caucgucaugaguggggcc

SEQ ID NO: 1253786 - RNA, 19 nt, Artificial Sequence
  Description of Artificial Sequence: Synthetic oligonucleotide
agggaccgcaguguccggc

SEQ ID NO: 1253787 - RNA, 19 nt, Artificial Sequence
  Description of Artificial Sequence: Synthetic oligonucleotide
ugccauaaugcaggcuggc

SEQ ID NO: 1253788 - RNA, 19 nt, Artificial Sequence
  Description of Artificial Sequence: Synthetic oligonucleotide
uccgacgggugcccauuag

SEQ ID NO: 1253789 - RNA, 19 nt, Artificial Sequence
  Description of Artificial Sequence: Synthetic oligonucleotide
auugccagccccguucccu

SEQ ID NO: 1253790 - RNA, 19 nt, Artificial Sequence
  Description of Artificial Sequence: Synthetic oligonucleotide
aggcagacgagcaguuagg

SEQ ID NO: 1253791 - RNA, 19 nt, Artificial Sequence
  Description of Artificial Sequence: Synthetic oligonucleotide
gugccauaaugcaggcugg

SEQ ID NO: 1253792 - RNA, 19 nt, Artificial Sequence
  Description of Artificial Sequence: Synthetic oligonucleotide
uucucccgacuccccagug

SEQ ID NO: 1253793 - RNA, 19 nt, Artificial Sequence
  Description of Artificial Sequence: Synthetic oligonucleotide
gcuaagccuacgcccaaag

SEQ ID NO: 1253794 - RNA, 19 nt, Artificial Sequence
  Description of Artificial Sequence: Synthetic oligonucleotide
ggugagaugcuacggaugu

SEQ ID NO: 1253795 - RNA, 19 nt, Artificial Sequence
  Description of Artificial Sequence: Synthetic oligonucleotide
aacagcugacgaagaaaau

SEQ ID NO: 1253796 - RNA, 19 nt, Artificial Sequence
  Description of Artificial Sequence: Synthetic oligonucleotide
gggaccaaugaucccugag

SEQ ID NO: 1253797 - RNA, 19 nt, Artificial Sequence
  Description of Artificial Sequence: Synthetic oligonucleotide
ugcgggaguuccuuuccuc

SEQ ID NO: 1253798 - RNA, 19 nt, Artificial Sequence
  Description of Artificial Sequence: Synthetic oligonucleotide
guccggcagagaaaguaag

SEQ ID NO: 1253799 - RNA, 19 nt, Artificial Sequence
  Description of Artificial Sequence: Synthetic oligonucleotide
guaugcuggacgguagaca

SEQ ID NO: 1253800 - RNA, 19 nt, Artificial Sequence
  Description of Artificial Sequence: Synthetic oligonucleotide
cuugacgugacagguuaca

SEQ ID NO: 1253801 - RNA, 19 nt, Artificial Sequence
  Description of Artificial Sequence: Synthetic oligonucleotide
aggugagaugcuacggaug

SEQ ID NO: 1253802 - RNA, 19 nt, Artificial Sequence
  Description of Artificial Sequence: Synthetic oligonucleotide
gaucccugaggcagacgag

SEQ ID NO: 1253803 - RNA, 19 nt, Artificial Sequence
  Description of Artificial Sequence: Synthetic oligonucleotide
cuccuaggguuuugauggc

SEQ ID NO: 1253804 - RNA, 19 nt, Artificial Sequence
  Description of Artificial Sequence: Synthetic oligonucleotide
auaguaguugcugccccaa

SEQ ID NO: 1253805 - RNA, 19 nt, Artificial Sequence
  Description of Artificial Sequence: Synthetic oligonucleotide
guagguaugcuggacggua

SEQ ID NO: 1253806 - RNA, 19 nt, Artificial Sequence
  Description of Artificial Sequence: Synthetic oligonucleotide
cguucccucagucuugucc

SEQ ID NO: 1253807 - RNA, 19 nt, Artificial Sequence
  Description of Artificial Sequence: Synthetic oligonucleotide
ugcuacggauguacaggau

SEQ ID NO: 1253808 - RNA, 19 nt, Artificial Sequence
  Description of Artificial Sequence: Synthetic oligonucleotide
acgugacagguuacacccc

SEQ ID NO: 1253809 - RNA, 19 nt, Artificial Sequence
  Description of Artificial Sequence: Synthetic oligonucleotide
ccuaggguuuugauggcug

SEQ ID NO: 1253810 - RNA, 19 nt, Artificial Sequence
  Description of Artificial Sequence: Synthetic oligonucleotide
aguagguaugcuggacggu

SEQ ID NO: 1253811 - RNA, 19 nt, Artificial Sequence
  Description of Artificial Sequence: Synthetic oligonucleotide
gugaagcggcuggagaaug

SEQ ID NO: 1253812 - RNA, 19 nt, Artificial Sequence
  Description of Artificial Sequence: Synthetic oligonucleotide
cauuucggacagagaccag

SEQ ID NO: 1253813 - RNA, 19 nt, Artificial Sequence
  Description of Artificial Sequence: Synthetic oligonucleotide
caacagagacucggcaaac

SEQ ID NO: 1253814 - RNA, 19 nt, Artificial Sequence
  Description of Artificial Sequence: Synthetic oligonucleotide
cagguacaacagagacucg

SEQ ID NO: 1253815 - RNA, 19 nt, Artificial Sequence
  Description of Artificial Sequence: Synthetic oligonucleotide
guacugaucgagggcaguc

SEQ ID NO: 1253816 - RNA, 19 nt, Artificial Sequence
  Description of Artificial Sequence: Synthetic oligonucleotide
cuccuucacguggaauugc

SEQ ID NO: 1253817 - RNA, 19 nt, Artificial Sequence
  Description of Artificial Sequence: Synthetic oligonucleotide
gucccuccaucgcucgccg

SEQ ID NO: 1253818 - RNA, 19 nt, Artificial Sequence
  Description of Artificial Sequence: Synthetic oligonucleotide
agaaucagcuucaccugau

SEQ ID NO: 1253819 - RNA, 19 nt, Artificial Sequence
  Description of Artificial Sequence: Synthetic oligonucleotide
agugaagcggcuggagaau

SEQ ID NO: 1253820 - RNA, 19 nt, Artificial Sequence
  Description of Artificial Sequence: Synthetic oligonucleotide
gagaugcuacggauguaca

SEQ ID NO: 1253821 - RNA, 19 nt, Artificial Sequence
  Description of Artificial Sequence: Synthetic oligonucleotide
aguauacaguaggggacaa

SEQ ID NO: 1253822 - RNA, 19 nt, Artificial Sequence
  Description of Artificial Sequence: Synthetic oligonucleotide
agcaguuagguaagccaga

SEQ ID NO: 1253823 - RNA, 19 nt, Artificial Sequence
  Description of Artificial Sequence: Synthetic oligonucleotide
ccagggaccgcaguguccg

SEQ ID NO: 1253824 - RNA, 19 nt, Artificial Sequence
  Description of Artificial Sequence: Synthetic oligonucleotide
ccaaucaggguaggaaccc

SEQ ID NO: 1253825 - RNA, 19 nt, Artificial Sequence
  Description of Artificial Sequence: Synthetic oligonucleotide
caagauccugacugagcga

SEQ ID NO: 1253826 - RNA, 19 nt, Artificial Sequence
  Description of Artificial Sequence: Synthetic oligonucleotide
cugaucgagggcagucuca

SEQ ID NO: 1253827 - RNA, 19 nt, Artificial Sequence
  Description of Artificial Sequence: Synthetic oligonucleotide
caaugaucccugaggcaga

SEQ ID NO: 1253828 - RNA, 19 nt, Artificial Sequence
  Description of Artificial Sequence: Synthetic oligonucleotide
caccauugaagcccacaca

SEQ ID NO: 1253829 - RNA, 19 nt, Artificial Sequence
  Description of Artificial Sequence: Synthetic oligonucleotide
acugcguccuggaggaagu

SEQ ID NO: 1253830 - RNA, 19 nt, Artificial Sequence
  Description of Artificial Sequence: Synthetic oligonucleotide
aguaggggacaaacagcug

SEQ ID NO: 1253831 - RNA, 19 nt, Artificial Sequence
  Description of Artificial Sequence: Synthetic oligonucleotide
gauguguacccucggucau

SEQ ID NO: 1253832 - RNA, 19 nt, Artificial Sequence
  Description of Artificial Sequence: Synthetic oligonucleotide
gacgagcaguuagguaagc

SEQ ID NO: 1253833 - RNA, 19 nt, Artificial Sequence
  Description of Artificial Sequence: Synthetic oligonucleotide
gcugacgaagaaaauccca

SEQ ID NO: 1253834 - RNA, 19 nt, Artificial Sequence
  Description of Artificial Sequence: Synthetic oligonucleotide
caguuuacuugacgugaca

SEQ ID NO: 1253835 - RNA, 19 nt, Artificial Sequence
  Description of Artificial Sequence: Synthetic oligonucleotide
aagugagccugggccucag

SEQ ID NO: 1253836 - RNA, 19 nt, Artificial Sequence
  Description of Artificial Sequence: Synthetic oligonucleotide
ugcguccuggaggaaguuc

SEQ ID NO: 1253837 - RNA, 19 nt, Artificial Sequence
  Description of Artificial Sequence: Synthetic oligonucleotide
gcaguuagguaagccagac

SEQ ID NO: 1253838 - RNA, 19 nt, Artificial Sequence
  Description of Artificial Sequence: Synthetic oligonucleotide
gaacccaggcuaagccuac

SEQ ID NO: 1253839 - RNA, 19 nt, Artificial Sequence
  Description of Artificial Sequence: Synthetic oligonucleotide
agccuacgcccaaagugag

SEQ ID NO: 1253840 - RNA, 19 nt, Artificial Sequence
  Description of Artificial Sequence: Synthetic oligonucleotide
aggcccuagacgccauggu

SEQ ID NO: 1253841 - RNA, 19 nt, Artificial Sequence
  Description of Artificial Sequence: Synthetic oligonucleotide
gaguaggggucaguccgac

SEQ ID NO: 1253842 - RNA, 19 nt, Artificial Sequence
  Description of Artificial Sequence: Synthetic oligonucleotide
cuggagaaugaggugaccu

SEQ ID NO: 1253843 - RNA, 19 nt, Artificial Sequence
  Description of Artificial Sequence: Synthetic oligonucleotide
gguaggaacccaggcuaag

SEQ ID NO: 1253844 - RNA, 19 nt, Artificial Sequence
  Description of Artificial Sequence: Synthetic oligonucleotide
aguuaggauggaggcaaua

SEQ ID NO: 1253845 - RNA, 19 nt, Artificial Sequence
  Description of Artificial Sequence: Synthetic oligonucleotide
gguaugcuggacgguagac

SEQ ID NO: 1253846 - RNA, 19 nt, Artificial Sequence
  Description of Artificial Sequence: Synthetic oligonucleotide
gcugccccaaucaggguag

SEQ ID NO: 1253847 - RNA, 19 nt, Artificial Sequence
  Description of Artificial Sequence: Synthetic oligonucleotide
gcagauuauaccucuugau

SEQ ID NO: 1253848 - RNA, 19 nt, Artificial Sequence
  Description of Artificial Sequence: Synthetic oligonucleotide
aggaaguucagaggcccua

SEQ ID NO: 1253849 - RNA, 19 nt, Artificial Sequence
  Description of Artificial Sequence: Synthetic oligonucleotide
caguuagguaagccagaca

SEQ ID NO: 1253850 - RNA, 19 nt, Artificial Sequence
  Description of Artificial Sequence: Synthetic oligonucleotide
gguaagccagacauuccuc

SEQ ID NO: 1253851 - RNA, 19 nt, Artificial Sequence
  Description of Artificial Sequence: Synthetic oligonucleotide
ccuugccaccauugaagcc

SEQ ID NO: 1253852 - RNA, 19 nt, Artificial Sequence
  Description of Artificial Sequence: Synthetic oligonucleotide
cauugccagccccguuccc

SEQ ID NO: 1253853 - RNA, 19 nt, Artificial Sequence
  Description of Artificial Sequence: Synthetic oligonucleotide
ccgacgggugcccauuagg

SEQ ID NO: 1253854 - RNA, 19 nt, Artificial Sequence
  Description of Artificial Sequence: Synthetic oligonucleotide
ucgucaugaguggggccga

SEQ ID NO: 1253855 - RNA, 19 nt, Artificial Sequence
  Description of Artificial Sequence: Synthetic oligonucleotide
agggaccaaugaucccuga

SEQ ID NO: 1253856 - RNA, 19 nt, Artificial Sequence
  Description of Artificial Sequence: Synthetic oligonucleotide
cccucggucauauaguaua

SEQ ID NO: 1253857 - RNA, 19 nt, Artificial Sequence
  Description of Artificial Sequence: Synthetic oligonucleotide
cccgccgucacacugcguc

SEQ ID NO: 1253858 - RNA, 19 nt, Artificial Sequence
  Description of Artificial Sequence: Synthetic oligonucleotide
ugaggcagacgagcaguua

SEQ ID NO: 1253859 - RNA, 19 nt, Artificial Sequence
  Description of Artificial Sequence: Synthetic oligonucleotide
cucggucauauaguauaca

SEQ ID NO: 1253860 - RNA, 19 nt, Artificial Sequence
  Description of Artificial Sequence: Synthetic oligonucleotide
cuccaguagguaugcugga

SEQ ID NO: 1253861 - RNA, 19 nt, Artificial Sequence
  Description of Artificial Sequence: Synthetic oligonucleotide
cagcgggaacgugaagggc

SEQ ID NO: 1253862 - RNA, 19 nt, Artificial Sequence
  Description of Artificial Sequence: Synthetic oligonucleotide
ggugggacugaaauggcua

SEQ ID NO: 1253863 - RNA, 19 nt, Artificial Sequence
  Description of Artificial Sequence: Synthetic oligonucleotide
cacguggaauugcacagcu

SEQ ID NO: 1253864 - RNA, 19 nt, Artificial Sequence
  Description of Artificial Sequence: Synthetic oligonucleotide
gggcaccagagacagcuuc

SEQ ID NO: 1253865 - RNA, 19 nt, Artificial Sequence
  Description of Artificial Sequence: Synthetic oligonucleotide
gaccgcaguguccggcaga

SEQ ID NO: 1253866 - RNA, 19 nt, Artificial Sequence
  Description of Artificial Sequence: Synthetic oligonucleotide
cugcaaugguggcuaccuc

SEQ ID NO: 1253867 - RNA, 19 nt, Artificial Sequence
  Description of Artificial Sequence: Synthetic oligonucleotide
ggugcccauuaggacagcc

SEQ ID NO: 1253868 - RNA, 19 nt, Artificial Sequence
  Description of Artificial Sequence: Synthetic oligonucleotide
cugagcgaguuuguauaca

SEQ ID NO: 1253869 - RNA, 19 nt, Artificial Sequence
  Description of Artificial Sequence: Synthetic oligonucleotide
cuacaggaguaggggucag

SEQ ID NO: 1253870 - RNA, 19 nt, Artificial Sequence
  Description of Artificial Sequence: Synthetic oligonucleotide
agagaccagcgggaacgug

SEQ ID NO: 1253871 - RNA, 19 nt, Artificial Sequence
  Description of Artificial Sequence: Synthetic oligonucleotide
aggggucaguccgacgggu

SEQ ID NO: 1253872 - RNA, 19 nt, Artificial Sequence
  Description of Artificial Sequence: Synthetic oligonucleotide
ugccccaaucaggguagga

SEQ ID NO: 1253873 - RNA, 19 nt, Artificial Sequence
  Description of Artificial Sequence: Synthetic oligonucleotide
acguggaauugcacagcug

SEQ ID NO: 1253874 - RNA, 19 nt, Artificial Sequence
  Description of Artificial Sequence: Synthetic oligonucleotide
ccuucacguggaauugcac

SEQ ID NO: 1253875 - RNA, 19 nt, Artificial Sequence
  Description of Artificial Sequence: Synthetic oligonucleotide
gcagguagggaccaaugau

SEQ ID NO: 1253876 - RNA, 19 nt, Artificial Sequence
  Description of Artificial Sequence: Synthetic oligonucleotide
guacccucggucauauagu

SEQ ID NO: 1253877 - RNA, 19 nt, Artificial Sequence
  Description of Artificial Sequence: Synthetic oligonucleotide
cguggaauugcacagcugu

SEQ ID NO: 1253878 - RNA, 19 nt, Artificial Sequence
  Description of Artificial Sequence: Synthetic oligonucleotide
guauacaguaggggacaaa

SEQ ID NO: 1253879 - RNA, 19 nt, Artificial Sequence
  Description of Artificial Sequence: Synthetic oligonucleotide
gggucggugggacugaaau

SEQ ID NO: 1253880 - RNA, 19 nt, Artificial Sequence
  Description of Artificial Sequence: Synthetic oligonucleotide
acgugaagggcuggccagu

SEQ ID NO: 1253881 - RNA, 19 nt, Artificial Sequence
  Description of Artificial Sequence: Synthetic oligonucleotide
cuaagccuacgcccaaagu

SEQ ID NO: 1253882 - RNA, 19 nt, Artificial Sequence
  Description of Artificial Sequence: Synthetic oligonucleotide
ggcuggguucugcaucgug

SEQ ID NO: 1253883 - RNA, 19 nt, Artificial Sequence
  Description of Artificial Sequence: Synthetic oligonucleotide
gcggcuggagaaugaggug

SEQ ID NO: 1253884 - RNA, 19 nt, Artificial Sequence
  Description of Artificial Sequence: Synthetic oligonucleotide
cagucccuccaucgcucgc

SEQ ID NO: 1253885 - RNA, 19 nt, Artificial Sequence
  Description of Artificial Sequence: Synthetic oligonucleotide
ggaauugcacagcuguguu

SEQ ID NO: 1253886 - RNA, 19 nt, Artificial Sequence
  Description of Artificial Sequence: Synthetic oligonucleotide
ccuuuggugugagguacag

SEQ ID NO: 1253887 - RNA, 19 nt, Artificial Sequence
  Description of Artificial Sequence: Synthetic oligonucleotide
cuaccucaucagguacaac

SEQ ID NO: 1253888 - RNA, 19 nt, Artificial Sequence
  Description of Artificial Sequence: Synthetic oligonucleotide
aggcuaagccuacgcccaa

SEQ ID NO: 1253889 - RNA, 19 nt, Artificial Sequence
  Description of Artificial Sequence: Synthetic oligonucleotide
cgggugcccauuaggacag

SEQ ID NO: 1253890 - RNA, 19 nt, Artificial Sequence
  Description of Artificial Sequence: Synthetic oligonucleotide
gagacucggcaaaccugga

SEQ ID NO: 1253891 - RNA, 19 nt, Artificial Sequence
  Description of Artificial Sequence: Synthetic oligonucleotide
cagggaccgcaguguccgg

SEQ ID NO: 1253892 - RNA, 19 nt, Artificial Sequence
  Description of Artificial Sequence: Synthetic oligonucleotide
cugcaucguguucucccga

SEQ ID NO: 1253893 - RNA, 19 nt, Artificial Sequence
  Description of Artificial Sequence: Synthetic oligonucleotide
cugacugagcgaguuugua

SEQ ID NO: 1253894 - RNA, 19 nt, Artificial Sequence
  Description of Artificial Sequence: Synthetic oligonucleotide
ggcacuucagggcuggguu

SEQ ID NO: 1253895 - RNA, 19 nt, Artificial Sequence
  Description of Artificial Sequence: Synthetic oligonucleotide
cagcggguugaugcgcaug

SEQ ID NO: 1253896 - RNA, 19 nt, Artificial Sequence
  Description of Artificial Sequence: Synthetic oligonucleotide
cuucuaauaccugcagauu

SEQ ID NO: 1253897 - RNA, 19 nt, Artificial Sequence
  Description of Artificial Sequence: Synthetic oligonucleotide
gggcagguagggaccaaug

SEQ ID NO: 1253898 - RNA, 19 nt, Artificial Sequence
  Description of Artificial Sequence: Synthetic oligonucleotide
cagggaaaggugagaugcu

SEQ ID NO: 1253899 - RNA, 19 nt, Artificial Sequence
  Description of Artificial Sequence: Synthetic oligonucleotide
gcgaggaucugugccauaa

SEQ ID NO: 1253900 - RNA, 19 nt, Artificial Sequence
  Description of Artificial Sequence: Synthetic oligonucleotide
cagccccguucccucaguc

SEQ ID NO: 1253901 - RNA, 19 nt, Artificial Sequence
  Description of Artificial Sequence: Synthetic oligonucleotide
ggacgguagacaggguguc

SEQ ID NO: 1253902 - RNA, 19 nt, Artificial Sequence
  Description of Artificial Sequence: Synthetic oligonucleotide
gcuaccucaucagguacaa

SEQ ID NO: 1253903 - RNA, 19 nt, Artificial Sequence
  Description of Artificial Sequence: Synthetic oligonucleotide
gcagacgagcaguuaggua

SEQ ID NO: 1253904 - RNA, 19 nt, Artificial Sequence
  Description of Artificial Sequence: Synthetic oligonucleotide
aguccgacgggugcccauu

SEQ ID NO: 1253905 - RNA, 19 nt, Artificial Sequence
  Description of Artificial Sequence: Synthetic oligonucleotide
ccaaagugagccugggccu

SEQ ID NO: 1253906 - RNA, 19 nt, Artificial Sequence
  Description of Artificial Sequence: Synthetic oligonucleotide
acccucggucauauaguau

SEQ ID NO: 1253907 - RNA, 19 nt, Artificial Sequence
  Description of Artificial Sequence: Synthetic oligonucleotide
cugccccaaucaggguagg

SEQ ID NO: 1253908 - RNA, 19 nt, Artificial Sequence
  Description of Artificial Sequence: Synthetic oligonucleotide
gcgcaugaaugaaggccag

SEQ ID NO: 1253909 - RNA, 19 nt, Artificial Sequence
  Description of Artificial Sequence: Synthetic oligonucleotide
gcccuagacgccauggucu

SEQ ID NO: 1253910 - RNA, 19 nt, Artificial Sequence
  Description of Artificial Sequence: Synthetic oligonucleotide
guguuuuggaacaguccuu

SEQ ID NO: 1253911 - RNA, 19 nt, Artificial Sequence
  Description of Artificial Sequence: Synthetic oligonucleotide
gugcccauuaggacagccu

SEQ ID NO: 1253912 - RNA, 19 nt, Artificial Sequence
  Description of Artificial Sequence: Synthetic oligonucleotide
gcgaguuuguauacagccu

SEQ ID NO: 1253913 - RNA, 19 nt, Artificial Sequence
  Description of Artificial Sequence: Synthetic oligonucleotide
ggggucaguccgacgggug

SEQ ID NO: 1253914 - RNA, 19 nt, Artificial Sequence
  Description of Artificial Sequence: Synthetic oligonucleotide
ccgccgucacacugcgucc

SEQ ID NO: 1253915 - RNA, 19 nt, Artificial Sequence
  Description of Artificial Sequence: Synthetic oligonucleotide
gugcgggaguuccuuuccu

SEQ ID NO: 1253916 - RNA, 19 nt, Artificial Sequence
  Description of Artificial Sequence: Synthetic oligonucleotide
gccuacgcccaaagugagc

SEQ ID NO: 1253917 - RNA, 19 nt, Artificial Sequence
  Description of Artificial Sequence: Synthetic oligonucleotide
gugagaugcuacggaugua

SEQ ID NO: 1253918 - RNA, 19 nt, Artificial Sequence
  Description of Artificial Sequence: Synthetic oligonucleotide
ggcagacgagcaguuaggu

SEQ ID NO: 1253919 - RNA, 19 nt, Artificial Sequence
  Description of Artificial Sequence: Synthetic oligonucleotide
caggaucuggagagguuuu

SEQ ID NO: 1253920 - RNA, 19 nt, Artificial Sequence
  Description of Artificial Sequence: Synthetic oligonucleotide
ccccguucccucagucuug

SEQ ID NO: 1253921 - RNA, 19 nt, Artificial Sequence
  Description of Artificial Sequence: Synthetic oligonucleotide
cuacgcccaaagugagccu

SEQ ID NO: 1253922 - RNA, 19 nt, Artificial Sequence
  Description of Artificial Sequence: Synthetic oligonucleotide
caauggucuguagggcgcu

SEQ ID NO: 1253923 - RNA, 19 nt, Artificial Sequence
  Description of Artificial Sequence: Synthetic oligonucleotide
ggcaccagagacagcuucu

SEQ ID NO: 1253924 - RNA, 19 nt, Artificial Sequence
  Description of Artificial Sequence: Synthetic oligonucleotide
gccgucacacugcguccug

SEQ ID NO: 1253925 - RNA, 19 nt, Artificial Sequence
  Description of Artificial Sequence: Synthetic oligonucleotide
caccccuccuaggguuuug

SEQ ID NO: 1253926 - RNA, 19 nt, Artificial Sequence
  Description of Artificial Sequence: Synthetic oligonucleotide
agggcgcuugcuaccuuuu

SEQ ID NO: 1253927 - RNA, 19 nt, Artificial Sequence
  Description of Artificial Sequence: Synthetic oligonucleotide
ccaucgcucgccgcagcag

SEQ ID NO: 1253928 - RNA, 19 nt, Artificial Sequence
  Description of Artificial Sequence: Synthetic oligonucleotide
ggguaggaacccaggcuaa

SEQ ID NO: 1253929 - RNA, 19 nt, Artificial Sequence
  Description of Artificial Sequence: Synthetic oligonucleotide
caugugcgggaguuccuuu

SEQ ID NO: 1253930 - RNA, 19 nt, Artificial Sequence
  Description of Artificial Sequence: Synthetic oligonucleotide
guccgacgggugcccauua

SEQ ID NO: 1253931 - RNA, 19 nt, Artificial Sequence
  Description of Artificial Sequence: Synthetic oligonucleotide
gcaucguguucucccgacu

SEQ ID NO: 1253932 - RNA, 19 nt, Artificial Sequence
  Description of Artificial Sequence: Synthetic oligonucleotide
gccuuuggugugagguaca

SEQ ID NO: 1253933 - RNA, 19 nt, Artificial Sequence
  Description of Artificial Sequence: Synthetic oligonucleotide
ggacaugagugaagcggcu

SEQ ID NO: 1253934 - RNA, 19 nt, Artificial Sequence
  Description of Artificial Sequence: Synthetic oligonucleotide
ccgggaucccugggaagag

SEQ ID NO: 1253935 - RNA, 19 nt, Artificial Sequence
  Description of Artificial Sequence: Synthetic oligonucleotide
caacuccuucacguggaau

SEQ ID NO: 1253936 - RNA, 19 nt, Artificial Sequence
  Description of Artificial Sequence: Synthetic oligonucleotide
gugcgaggaucugugccau

SEQ ID NO: 1253937 - RNA, 19 nt, Artificial Sequence
  Description of Artificial Sequence: Synthetic oligonucleotide
ggcuaagccuacgcccaaa

SEQ ID NO: 1253938 - RNA, 19 nt, Artificial Sequence
  Description of Artificial Sequence: Synthetic oligonucleotide
ccuagacgccauggucuug

SEQ ID NO: 1253939 - RNA, 19 nt, Artificial Sequence
  Description of Artificial Sequence: Synthetic oligonucleotide
cugugccauaaugcaggcu

SEQ ID NO: 1253940 - RNA, 19 nt, Artificial Sequence
  Description of Artificial Sequence: Synthetic oligonucleotide
ccugacugagcgaguuugu

SEQ ID NO: 1253941 - RNA, 19 nt, Artificial Sequence
  Description of Artificial Sequence: Synthetic oligonucleotide
ggaucccugggaagaggua

SEQ ID NO: 1253942 - RNA, 19 nt, Artificial Sequence
  Description of Artificial Sequence: Synthetic oligonucleotide
guguacccucggucauaua

SEQ ID NO: 1253943 - RNA, 19 nt, Artificial Sequence
  Description of Artificial Sequence: Synthetic oligonucleotide
cagggucggugggacugaa

SEQ ID NO: 1253944 - RNA, 19 nt, Artificial Sequence
  Description of Artificial Sequence: Synthetic oligonucleotide
cccagacaagauccugacu

SEQ ID NO: 1253945 - RNA, 19 nt, Artificial Sequence
  Description of Artificial Sequence: Synthetic oligonucleotide
caguccgacgggugcccau

SEQ ID NO: 1253946 - RNA, 19 nt, Artificial Sequence
  Description of Artificial Sequence: Synthetic oligonucleotide
gggugcccauuaggacagc

SEQ ID NO: 1253947 - RNA, 19 nt, Artificial Sequence
  Description of Artificial Sequence: Synthetic oligonucleotide
gcggguugaugcgcaugaa

SEQ ID NO: 1253948 - RNA, 19 nt, Artificial Sequence
  Description of Artificial Sequence: Synthetic oligonucleotide
cccuagacgccauggucuu

SEQ ID NO: 1253949 - RNA, 19 nt, Artificial Sequence
  Description of Artificial Sequence: Synthetic oligonucleotide
cggguugaugcgcaugaau

SEQ ID NO: 1253950 - RNA, 19 nt, Artificial Sequence
  Description of Artificial Sequence: Synthetic oligonucleotide
ccguucccucagucuuguc

SEQ ID NO: 1253951 - RNA, 19 nt, Artificial Sequence
  Description of Artificial Sequence: Synthetic oligonucleotide
ccagggucggugggacuga

SEQ ID NO: 1253952 - RNA, 19 nt, Artificial Sequence
  Description of Artificial Sequence: Synthetic oligonucleotide
gcagcggguugaugcgcau

SEQ ID NO: 1253953 - RNA, 19 nt, Artificial Sequence
  Description of Artificial Sequence: Synthetic oligonucleotide
ccagagugugugagaucau

SEQ ID NO: 1253954 - RNA, 19 nt, Artificial Sequence
  Description of Artificial Sequence: Synthetic oligonucleotide
gggugugguuugagcuccu

SEQ ID NO: 1253955 - RNA, 19 nt, Artificial Sequence
  Description of Artificial Sequence: Synthetic oligonucleotide
cugcguccuggaggaaguu

SEQ ID NO: 1253956 - RNA, 19 nt, Artificial Sequence
  Description of Artificial Sequence: Synthetic oligonucleotide
cgaggaucugugccauaau

SEQ ID NO: 1253957 - RNA, 19 nt, Artificial Sequence
  Description of Artificial Sequence: Synthetic oligonucleotide
ccccagugauguguacccu

SEQ ID NO: 1253958 - RNA, 19 nt, Artificial Sequence
  Description of Artificial Sequence: Synthetic oligonucleotide
ccagccccguucccucagu

SEQ ID NO: 1253959 - RNA, 19 nt, Artificial Sequence
  Description of Artificial Sequence: Synthetic oligonucleotide
cgccgucacacugcguccu

SEQ ID NO: 1253960 - RNA, 19 nt, Artificial Sequence
  Description of Artificial Sequence: Synthetic oligonucleotide
ccgcaguguccggcagaga

SEQ ID NO: 1253961 - RNA, 19 nt, Artificial Sequence
  Description of Artificial Sequence: Synthetic oligonucleotide
cgucaugaguggggccgau

SEQ ID NO: 1253962 - RNA, 19 nt, Artificial Sequence
  Description of Artificial Sequence: Synthetic oligonucleotide
gcccgccgucacacugcgu

SEQ ID NO: 1253963 - RNA, 19 nt, Artificial Sequence
  Description of Artificial Sequence: Synthetic oligonucleotide
aacucaacacaauugcacc

SEQ ID NO: 1253964 - RNA, 19 nt, Artificial Sequence
  Description of Artificial Sequence: Synthetic oligonucleotide
aauaguacugaaaagaacu

SEQ ID NO: 1253965 - RNA, 19 nt, Artificial Sequence
  Description of Artificial Sequence: Synthetic oligonucleotide
aaacguauuucucuucaac

SEQ ID NO: 1253966 - RNA, 19 nt, Artificial Sequence
  Description of Artificial Sequence: Synthetic oligonucleotide
guugcaauuacucaggaac

SEQ ID NO: 1253967 - RNA, 19 nt, Artificial Sequence
  Description of Artificial Sequence: Synthetic oligonucleotide
cuguugacgacuuaaagag

SEQ ID NO: 1253968 - RNA, 19 nt, Artificial Sequence
  Description of Artificial Sequence: Synthetic oligonucleotide
aaacucaacacaauugcac

SEQ ID NO: 1253969 - RNA, 19 nt, Artificial Sequence
  Description of Artificial Sequence: Synthetic oligonucleotide
uuauucucuaaauaguacu

SEQ ID NO: 1253970 - RNA, 19 nt, Artificial Sequence
  Description of Artificial Sequence: Synthetic oligonucleotide
uauucucuaaauaguacug

SEQ ID NO: 1253971 - RNA, 19 nt, Artificial Sequence
  Description of Artificial Sequence: Synthetic oligonucleotide
cacaauugcaccuccaugc

SEQ ID NO: 1253972 - RNA, 19 nt, Artificial Sequence
  Description of Artificial Sequence: Synthetic oligonucleotide
auuacucaggaacuucagc

SEQ ID NO: 1253973 - RNA, 19 nt, Artificial Sequence
  Description of Artificial Sequence: Synthetic oligonucleotide
uguugcagcuuucucaugc

SEQ ID NO: 1253974 - RNA, 19 nt, Artificial Sequence
  Description of Artificial Sequence: Synthetic oligonucleotide
gugaacaagggcuaguucc

SEQ ID NO: 1253975 - RNA, 19 nt, Artificial Sequence
  Description of Artificial Sequence: Synthetic oligonucleotide
gagucuagcaccaaccagg

SEQ ID NO: 1253976 - RNA, 19 nt, Artificial Sequence
  Description of Artificial Sequence: Synthetic oligonucleotide
aguacugaaaagaacuuuc

SEQ ID NO: 1253977 - RNA, 19 nt, Artificial Sequence
  Description of Artificial Sequence: Synthetic oligonucleotide
gaucuagggcaucaaaucc

SEQ ID NO: 1253978 - RNA, 19 nt, Artificial Sequence
  Description of Artificial Sequence: Synthetic oligonucleotide
aauggaacgucccgcgggg

SEQ ID NO: 1253979 - RNA, 19 nt, Artificial Sequence
  Description of Artificial Sequence: Synthetic oligonucleotide
aaaucucggaugcucagcu

SEQ ID NO: 1253980 - RNA, 19 nt, Artificial Sequence
  Description of Artificial Sequence: Synthetic oligonucleotide
aucugggauaugcagaauc

SEQ ID NO: 1253981 - RNA, 19 nt, Artificial Sequence
  Description of Artificial Sequence: Synthetic oligonucleotide
ucuuauuccaaacguauuu

SEQ ID NO: 1253982 - RNA, 19 nt, Artificial Sequence
  Description of Artificial Sequence: Synthetic oligonucleotide
uuucacccaaagaugagca

SEQ ID NO: 1253983 - RNA, 19 nt, Artificial Sequence
  Description of Artificial Sequence: Synthetic oligonucleotide
gacuuaaagagagacccgg

SEQ ID NO: 1253984 - RNA, 19 nt, Artificial Sequence
  Description of Artificial Sequence: Synthetic oligonucleotide
acaauugcaccuccaugcc

SEQ ID NO: 1253985 - RNA, 19 nt, Artificial Sequence
  Description of Artificial Sequence: Synthetic oligonucleotide
guugacgacuuaaagagag

SEQ ID NO: 1253986 - RNA, 19 nt, Artificial Sequence
  Description of Artificial Sequence: Synthetic oligonucleotide
uugucuaugcucucgugag

SEQ ID NO: 1253987 - RNA, 19 nt, Artificial Sequence
  Description of Artificial Sequence: Synthetic oligonucleotide
ugggauaugcagaaucagc

SEQ ID NO: 1253988 - RNA, 19 nt, Artificial Sequence
  Description of Artificial Sequence: Synthetic oligonucleotide
ucgugugauacccuguuca

SEQ ID NO: 1253989 - RNA, 19 nt, Artificial Sequence
  Description of Artificial Sequence: Synthetic oligonucleotide
uagggcaucaaauccuucc

SEQ ID NO: 1253990 - RNA, 19 nt, Artificial Sequence
  Description of Artificial Sequence: Synthetic oligonucleotide
uuauuccaaacguauuucu

SEQ ID NO: 1253991 - RNA, 19 nt, Artificial Sequence
  Description of Artificial Sequence: Synthetic oligonucleotide
caucagacaggcuucgccg

SEQ ID NO: 1253992 - RNA, 19 nt, Artificial Sequence
  Description of Artificial Sequence: Synthetic oligonucleotide
auugaucccauccacugcu

SEQ ID NO: 1253993 - RNA, 19 nt, Artificial Sequence
  Description of Artificial Sequence: Synthetic oligonucleotide
uuuucagguagcccagaag

SEQ ID NO: 1253994 - RNA, 19 nt, Artificial Sequence
  Description of Artificial Sequence: Synthetic oligonucleotide
aauaaaucucggaugcuca

SEQ ID NO: 1253995 - RNA, 19 nt, Artificial Sequence
  Description of Artificial Sequence: Synthetic oligonucleotide
guauaguuggaaaugagga

SEQ ID NO: 1253996 - RNA, 19 nt, Artificial Sequence
  Description of Artificial Sequence: Synthetic oligonucleotide
uggugcgggaaauaaaucu

SEQ ID NO: 1253997 - RNA, 19 nt, Artificial Sequence
  Description of Artificial Sequence: Synthetic oligonucleotide
uuggcucaaacucaacaca

SEQ ID NO: 1253998 - RNA, 19 nt, Artificial Sequence
  Description of Artificial Sequence: Synthetic oligonucleotide
uuuggaguauaguuggaaa

SEQ ID NO: 1253999 - RNA, 19 nt, Artificial Sequence
  Description of Artificial Sequence: Synthetic oligonucleotide
aagaugagcaucugggaua

SEQ ID NO: 1254000 - RNA, 19 nt, Artificial Sequence
  Description of Artificial Sequence: Synthetic oligonucleotide
uuuucacccaaagaugagc

SEQ ID NO: 1254001 - RNA, 19 nt, Artificial Sequence
  Description of Artificial Sequence: Synthetic oligonucleotide
uauaguuggaaaugaggau

SEQ ID NO: 1254002 - RNA, 19 nt, Artificial Sequence
  Description of Artificial Sequence: Synthetic oligonucleotide
uugcaauuacucaggaacu

SEQ ID NO: 1254003 - RNA, 19 nt, Artificial Sequence
  Description of Artificial Sequence: Synthetic oligonucleotide
uucgccgaaagucuucacc

SEQ ID NO: 1254004 - RNA, 19 nt, Artificial Sequence
  Description of Artificial Sequence: Synthetic oligonucleotide
ugcgggaaauaaaucucgg

SEQ ID NO: 1254005 - RNA, 19 nt, Artificial Sequence
  Description of Artificial Sequence: Synthetic oligonucleotide
uggaguauaguuggaaaug

SEQ ID NO: 1254006 - RNA, 19 nt, Artificial Sequence
  Description of Artificial Sequence: Synthetic oligonucleotide
uguucgcucgcuacgcccg

SEQ ID NO: 1254007 - RNA, 19 nt, Artificial Sequence
  Description of Artificial Sequence: Synthetic oligonucleotide
caggaagcuacccaacgcg

SEQ ID NO: 1254008 - RNA, 19 nt, Artificial Sequence
  Description of Artificial Sequence: Synthetic oligonucleotide
aaaaggaucuagggcauca

SEQ ID NO: 1254009 - RNA, 19 nt, Artificial Sequence
  Description of Artificial Sequence: Synthetic oligonucleotide
auaaaucucggaugcucag

SEQ ID NO: 1254010 - RNA, 19 nt, Artificial Sequence
  Description of Artificial Sequence: Synthetic oligonucleotide
cucucgugagucuagcacc

SEQ ID NO: 1254011 - RNA, 19 nt, Artificial Sequence
  Description of Artificial Sequence: Synthetic oligonucleotide
uguggcauuccucacucgu

SEQ ID NO: 1254012 - RNA, 19 nt, Artificial Sequence
  Description of Artificial Sequence: Synthetic oligonucleotide
ucaacacaauugcaccucc

SEQ ID NO: 1254013 - RNA, 19 nt, Artificial Sequence
  Description of Artificial Sequence: Synthetic oligonucleotide
aauuacucaggaacuucag

SEQ ID NO: 1254014 - RNA, 19 nt, Artificial Sequence
  Description of Artificial Sequence: Synthetic oligonucleotide
ugugggaggcgcacgcucg

SEQ ID NO: 1254015 - RNA, 19 nt, Artificial Sequence
  Description of Artificial Sequence: Synthetic oligonucleotide
uuuucagcgugcuccuucc

SEQ ID NO: 1254016 - RNA, 19 nt, Artificial Sequence
  Description of Artificial Sequence: Synthetic oligonucleotide
ucguguggcaggaagcuac

SEQ ID NO: 1254017 - RNA, 19 nt, Artificial Sequence
  Description of Artificial Sequence: Synthetic oligonucleotide
aauuccuuuggaguauagu

SEQ ID NO: 1254018 - RNA, 19 nt, Artificial Sequence
  Description of Artificial Sequence: Synthetic oligonucleotide
aauacugucuucagauccu

SEQ ID NO: 1254019 - RNA, 19 nt, Artificial Sequence
  Description of Artificial Sequence: Synthetic oligonucleotide
gaagcuacccaacgcgcag

SEQ ID NO: 1254020 - RNA, 19 nt, Artificial Sequence
  Description of Artificial Sequence: Synthetic oligonucleotide
aaagcgcuguuuguuguag

SEQ ID NO: 1254021 - RNA, 19 nt, Artificial Sequence
  Description of Artificial Sequence: Synthetic oligonucleotide
ucuguggcauuccucacuc

SEQ ID NO: 1254022 - RNA, 19 nt, Artificial Sequence
  Description of Artificial Sequence: Synthetic oligonucleotide
cuacccaacgcgcagucgc

SEQ ID NO: 1254023 - RNA, 19 nt, Artificial Sequence
  Description of Artificial Sequence: Synthetic oligonucleotide
ugagcaucugggauaugca

SEQ ID NO: 1254024 - RNA, 19 nt, Artificial Sequence
  Description of Artificial Sequence: Synthetic oligonucleotide
agucauguuuugcacagaa

SEQ ID NO: 1254025 - RNA, 19 nt, Artificial Sequence
  Description of Artificial Sequence: Synthetic oligonucleotide
cuaaggcugugaacaaggg

SEQ ID NO: 1254026 - RNA, 19 nt, Artificial Sequence
  Description of Artificial Sequence: Synthetic oligonucleotide
caauggaacgucccgcggg

SEQ ID NO: 1254027 - RNA, 19 nt, Artificial Sequence
  Description of Artificial Sequence: Synthetic oligonucleotide
uuugcacccuggaggaaag

SEQ ID NO: 1254028 - RNA, 19 nt, Artificial Sequence
  Description of Artificial Sequence: Synthetic oligonucleotide
uaugcucucgugagucuag

SEQ ID NO: 1254029 - RNA, 19 nt, Artificial Sequence
  Description of Artificial Sequence: Synthetic oligonucleotide
aucgucggugccuaggucu

SEQ ID NO: 1254030 - RNA, 19 nt, Artificial Sequence
  Description of Artificial Sequence: Synthetic oligonucleotide
ucgugcggcaaauaugcug

SEQ ID NO: 1254031 - RNA, 19 nt, Artificial Sequence
  Description of Artificial Sequence: Synthetic oligonucleotide
gauugugggaggcgcacgc

SEQ ID NO: 1254032 - RNA, 19 nt, Artificial Sequence
  Description of Artificial Sequence: Synthetic oligonucleotide
aggucuguucgcucgcuac

SEQ ID NO: 1254033 - RNA, 19 nt, Artificial Sequence
  Description of Artificial Sequence: Synthetic oligonucleotide
cauagagaagauagcgcac

SEQ ID NO: 1254034 - RNA, 19 nt, Artificial Sequence
  Description of Artificial Sequence: Synthetic oligonucleotide
acucaacacaauugcaccu

SEQ ID NO: 1254035 - RNA, 19 nt, Artificial Sequence
  Description of Artificial Sequence: Synthetic oligonucleotide
uguugacgacuuaaagaga

SEQ ID NO: 1254036 - RNA, 19 nt, Artificial Sequence
  Description of Artificial Sequence: Synthetic oligonucleotide
uuaccaucagacaggcuuc

SEQ ID NO: 1254037 - RNA, 19 nt, Artificial Sequence
  Description of Artificial Sequence: Synthetic oligonucleotide
cuagcaccaaccaggacuc

SEQ ID NO: 1254038 - RNA, 19 nt, Artificial Sequence
  Description of Artificial Sequence: Synthetic oligonucleotide
ucaaagcgcuguuuguugu

SEQ ID NO: 1254039 - RNA, 19 nt, Artificial Sequence
  Description of Artificial Sequence: Synthetic oligonucleotide
cuuagcugggucauuguca

SEQ ID NO: 1254040 - RNA, 19 nt, Artificial Sequence
  Description of Artificial Sequence: Synthetic oligonucleotide
caauuacucaggaacuuca

SEQ ID NO: 1254041 - RNA, 19 nt, Artificial Sequence
  Description of Artificial Sequence: Synthetic oligonucleotide
aguuauucucuaaauagua

SEQ ID NO: 1254042 - RNA, 19 nt, Artificial Sequence
  Description of Artificial Sequence: Synthetic oligonucleotide
ugauacccuguucaacaac

SEQ ID NO: 1254043 - RNA, 19 nt, Artificial Sequence
  Description of Artificial Sequence: Synthetic oligonucleotide
aagcucgugcggcaaauau

SEQ ID NO: 1254044 - RNA, 19 nt, Artificial Sequence
  Description of Artificial Sequence: Synthetic oligonucleotide
gacgacuuaaagagagacc

SEQ ID NO: 1254045 - RNA, 19 nt, Artificial Sequence
  Description of Artificial Sequence: Synthetic oligonucleotide
caaauccuuccuuucccag

SEQ ID NO: 1254046 - RNA, 19 nt, Artificial Sequence
  Description of Artificial Sequence: Synthetic oligonucleotide
agagagacccgguuuggcu

SEQ ID NO: 1254047 - RNA, 19 nt, Artificial Sequence
  Description of Artificial Sequence: Synthetic oligonucleotide
ugugaacaagggcuaguuc

SEQ ID NO: 1254048 - RNA, 19 nt, Artificial Sequence
  Description of Artificial Sequence: Synthetic oligonucleotide
aggaagcuacccaacgcgc

SEQ ID NO: 1254049 - RNA, 19 nt, Artificial Sequence
  Description of Artificial Sequence: Synthetic oligonucleotide
gaaucagccagucauguuu

SEQ ID NO: 1254050 - RNA, 19 nt, Artificial Sequence
  Description of Artificial Sequence: Synthetic oligonucleotide
uguugcuccccaugcuuag

SEQ ID NO: 1254051 - RNA, 19 nt, Artificial Sequence
  Description of Artificial Sequence: Synthetic oligonucleotide
gugcgggaaauaaaucucg

SEQ ID NO: 1254052 - RNA, 19 nt, Artificial Sequence
  Description of Artificial Sequence: Synthetic oligonucleotide
aaucucggaugcucagcug

SEQ ID NO: 1254053 - RNA, 19 nt, Artificial Sequence
  Description of Artificial Sequence: Synthetic oligonucleotide
ggaaauacugucuucagau

SEQ ID NO: 1254054 - RNA, 19 nt, Artificial Sequence
  Description of Artificial Sequence: Synthetic oligonucleotide
uuuucccguucccuucucc

SEQ ID NO: 1254055 - RNA, 19 nt, Artificial Sequence
  Description of Artificial Sequence: Synthetic oligonucleotide
cuuguuacucccgucagca

SEQ ID NO: 1254056 - RNA, 19 nt, Artificial Sequence
  Description of Artificial Sequence: Synthetic oligonucleotide
ucuagggcaucaaauccuu

SEQ ID NO: 1254057 - RNA, 19 nt, Artificial Sequence
  Description of Artificial Sequence: Synthetic oligonucleotide
guacuugcccucauguugc

SEQ ID NO: 1254058 - RNA, 19 nt, Artificial Sequence
  Description of Artificial Sequence: Synthetic oligonucleotide
uccccauagagaagauagc

SEQ ID NO: 1254059 - RNA, 19 nt, Artificial Sequence
  Description of Artificial Sequence: Synthetic oligonucleotide
aagauagcgcacagcuggg

SEQ ID NO: 1254060 - RNA, 19 nt, Artificial Sequence
  Description of Artificial Sequence: Synthetic oligonucleotide
auagcgcacagcuggguga

SEQ ID NO: 1254061 - RNA, 19 nt, Artificial Sequence
  Description of Artificial Sequence: Synthetic oligonucleotide
ggaucuagggcaucaaauc

SEQ ID NO: 1254062 - RNA, 19 nt, Artificial Sequence
  Description of Artificial Sequence: Synthetic oligonucleotide
guuacucccgucagcauug

SEQ ID NO: 1254063 - RNA, 19 nt, Artificial Sequence
  Description of Artificial Sequence: Synthetic oligonucleotide
ucagcgugcuccuucccca

SEQ ID NO: 1254064 - RNA, 19 nt, Artificial Sequence
  Description of Artificial Sequence: Synthetic oligonucleotide
ucauguugcuccccaugcu

SEQ ID NO: 1254065 - RNA, 19 nt, Artificial Sequence
  Description of Artificial Sequence: Synthetic oligonucleotide
agggcaucaaauccuuccu

SEQ ID NO: 1254066 - RNA, 19 nt, Artificial Sequence
  Description of Artificial Sequence: Synthetic oligonucleotide
uccuuaccaucagacaggc

SEQ ID NO: 1254067 - RNA, 19 nt, Artificial Sequence
  Description of Artificial Sequence: Synthetic oligonucleotide
guuccugucgccgaggcca

SEQ ID NO: 1254068 - RNA, 19 nt, Artificial Sequence
  Description of Artificial Sequence: Synthetic oligonucleotide
agcgcuguuuguuguaggu

SEQ ID NO: 1254069 - RNA, 19 nt, Artificial Sequence
  Description of Artificial Sequence: Synthetic oligonucleotide
ucuguucgcucgcuacgcc

SEQ ID NO: 1254070 - RNA, 19 nt, Artificial Sequence
  Description of Artificial Sequence: Synthetic oligonucleotide
ucgugagucuagcaccaac

SEQ ID NO: 1254071 - RNA, 19 nt, Artificial Sequence
  Description of Artificial Sequence: Synthetic oligonucleotide
ugaucccauccacugcuac

SEQ ID NO: 1254072 - RNA, 19 nt, Artificial Sequence
  Description of Artificial Sequence: Synthetic oligonucleotide
ucagugcucucucucuuau

SEQ ID NO: 1254073 - RNA, 19 nt, Artificial Sequence
  Description of Artificial Sequence: Synthetic oligonucleotide
ucccggguugcaauuacuc

SEQ ID NO: 1254074 - RNA, 19 nt, Artificial Sequence
  Description of Artificial Sequence: Synthetic oligonucleotide
gagaucgucggugccuagg

SEQ ID NO: 1254075 - RNA, 19 nt, Artificial Sequence
  Description of Artificial Sequence: Synthetic oligonucleotide
agaucgucggugccuaggu

SEQ ID NO: 1254076 - RNA, 19 nt, Artificial Sequence
  Description of Artificial Sequence: Synthetic oligonucleotide
acucccgucagcauugucu

SEQ ID NO: 1254077 - RNA, 19 nt, Artificial Sequence
  Description of Artificial Sequence: Synthetic oligonucleotide
ugucuaugcucucgugagu

SEQ ID NO: 1254078 - RNA, 19 nt, Artificial Sequence
  Description of Artificial Sequence: Synthetic oligonucleotide
agaagcuccuggcaguuuu

SEQ ID NO: 1254079 - RNA, 19 nt, Artificial Sequence
  Description of Artificial Sequence: Synthetic oligonucleotide
agacaggcuucgccgaaag

SEQ ID NO: 1254080 - RNA, 19 nt, Artificial Sequence
  Description of Artificial Sequence: Synthetic oligonucleotide
guucaacaaccucucccag

SEQ ID NO: 1254081 - RNA, 19 nt, Artificial Sequence
  Description of Artificial Sequence: Synthetic oligonucleotide
uccaaacguauuucucuuc

SEQ ID NO: 1254082 - RNA, 19 nt, Artificial Sequence
  Description of Artificial Sequence: Synthetic oligonucleotide
aucuagggcaucaaauccu

SEQ ID NO: 1254083 - RNA, 19 nt, Artificial Sequence
  Description of Artificial Sequence: Synthetic oligonucleotide
ucuaugcucucgugagucu

SEQ ID NO: 1254084 - RNA, 19 nt, Artificial Sequence
  Description of Artificial Sequence: Synthetic oligonucleotide
cuguucgcucgcuacgccc

SEQ ID NO: 1254085 - RNA, 19 nt, Artificial Sequence
  Description of Artificial Sequence: Synthetic oligonucleotide
acucgggucguguggcagg

SEQ ID NO: 1254086 - RNA, 19 nt, Artificial Sequence
  Description of Artificial Sequence: Synthetic oligonucleotide
ccaaccaggacuccugccg

SEQ ID NO: 1254087 - RNA, 19 nt, Artificial Sequence
  Description of Artificial Sequence: Synthetic oligonucleotide
acaccuuggguccaacuuu

SEQ ID NO: 1254088 - RNA, 19 nt, Artificial Sequence
  Description of Artificial Sequence: Synthetic oligonucleotide
gcucgugcggcaaauaugc

SEQ ID NO: 1254089 - RNA, 19 nt, Artificial Sequence
  Description of Artificial Sequence: Synthetic oligonucleotide
ucucggaugcucagcugga

SEQ ID NO: 1254090 - RNA, 19 nt, Artificial Sequence
  Description of Artificial Sequence: Synthetic oligonucleotide
aggaagcgcuuguuuguag

SEQ ID NO: 1254091 - RNA, 19 nt, Artificial Sequence
  Description of Artificial Sequence: Synthetic oligonucleotide
ggcggaagagcccugagga

SEQ ID NO: 1254092 - RNA, 19 nt, Artificial Sequence
  Description of Artificial Sequence: Synthetic oligonucleotide
aacucgggucguguggcag

SEQ ID NO: 1254093 - RNA, 19 nt, Artificial Sequence
  Description of Artificial Sequence: Synthetic oligonucleotide
aggaucuagggcaucaaau

SEQ ID NO: 1254094 - RNA, 19 nt, Artificial Sequence
  Description of Artificial Sequence: Synthetic oligonucleotide
ccccauagagaagauagcg

SEQ ID NO: 1254095 - RNA, 19 nt, Artificial Sequence
  Description of Artificial Sequence: Synthetic oligonucleotide
gcgaagcaaacucgggucg

SEQ ID NO: 1254096 - RNA, 19 nt, Artificial Sequence
  Description of Artificial Sequence: Synthetic oligonucleotide
gucuaugcucucgugaguc

SEQ ID NO: 1254097 - RNA, 19 nt, Artificial Sequence
  Description of Artificial Sequence: Synthetic oligonucleotide
ucgucggugccuaggucug

SEQ ID NO: 1254098 - RNA, 19 nt, Artificial Sequence
  Description of Artificial Sequence: Synthetic oligonucleotide
cauugucuaugcucucgug

SEQ ID NO: 1254099 - RNA, 19 nt, Artificial Sequence
  Description of Artificial Sequence: Synthetic oligonucleotide
aaucagccagucauguuuu

SEQ ID NO: 1254100 - RNA, 19 nt, Artificial Sequence
  Description of Artificial Sequence: Synthetic oligonucleotide
ccggguugcaauuacucag

SEQ ID NO: 1254101 - RNA, 19 nt, Artificial Sequence
  Description of Artificial Sequence: Synthetic oligonucleotide
acugcuaccaggaggcgga

SEQ ID NO: 1254102 - RNA, 19 nt, Artificial Sequence
  Description of Artificial Sequence: Synthetic oligonucleotide
ugcaauuacucaggaacuu

SEQ ID NO: 1254103 - RNA, 19 nt, Artificial Sequence
  Description of Artificial Sequence: Synthetic oligonucleotide
ggucuguucgcucgcuacg

SEQ ID NO: 1254104 - RNA, 19 nt, Artificial Sequence
  Description of Artificial Sequence: Synthetic oligonucleotide
ugucccggguugcaauuac

SEQ ID NO: 1254105 - RNA, 19 nt, Artificial Sequence
  Description of Artificial Sequence: Synthetic oligonucleotide
uugugggaggcgcacgcuc

SEQ ID NO: 1254106 - RNA, 19 nt, Artificial Sequence
  Description of Artificial Sequence: Synthetic oligonucleotide
auaguacugaaaagaacuu

SEQ ID NO: 1254107 - RNA, 19 nt, Artificial Sequence
  Description of Artificial Sequence: Synthetic oligonucleotide
cucgaggguggggugaagg

SEQ ID NO: 1254108 - RNA, 19 nt, Artificial Sequence
  Description of Artificial Sequence: Synthetic oligonucleotide
cccgguuuggcucaaacuc

SEQ ID NO: 1254109 - RNA, 19 nt, Artificial Sequence
  Description of Artificial Sequence: Synthetic oligonucleotide
ggguccaacuuuugcaccc

SEQ ID NO: 1254110 - RNA, 19 nt, Artificial Sequence
  Description of Artificial Sequence: Synthetic oligonucleotide
aaacucgggucguguggca

SEQ ID NO: 1254111 - RNA, 19 nt, Artificial Sequence
  Description of Artificial Sequence: Synthetic oligonucleotide
cagcacgaucccgacagcg

SEQ ID NO: 1254112 - RNA, 19 nt, Artificial Sequence
  Description of Artificial Sequence: Synthetic oligonucleotide
ggaaagccuuguuacuccc

SEQ ID NO: 1254113 - RNA, 19 nt, Artificial Sequence
  Description of Artificial Sequence: Synthetic oligonucleotide
uuucagcgugcuccuuccc

SEQ ID NO: 1254114 - RNA, 19 nt, Artificial Sequence
  Description of Artificial Sequence: Synthetic oligonucleotide
cagccagucauguuuugca

SEQ ID NO: 1254115 - RNA, 19 nt, Artificial Sequence
  Description of Artificial Sequence: Synthetic oligonucleotide
ggaguauaguuggaaauga

SEQ ID NO: 1254116 - RNA, 19 nt, Artificial Sequence
  Description of Artificial Sequence: Synthetic oligonucleotide
ugcggcaaauaugcuguug

SEQ ID NO: 1254117 - RNA, 19 nt, Artificial Sequence
  Description of Artificial Sequence: Synthetic oligonucleotide
gaagcaaacucgggucgug

SEQ ID NO: 1254118 - RNA, 19 nt, Artificial Sequence
  Description of Artificial Sequence: Synthetic oligonucleotide
acccgguuuggcucaaacu

SEQ ID NO: 1254119 - RNA, 19 nt, Artificial Sequence
  Description of Artificial Sequence: Synthetic oligonucleotide
acucgugugauacccuguu

SEQ ID NO: 1254120 - RNA, 19 nt, Artificial Sequence
  Description of Artificial Sequence: Synthetic oligonucleotide
uucucaugcugaagccagu

SEQ ID NO: 1254121 - RNA, 19 nt, Artificial Sequence
  Description of Artificial Sequence: Synthetic oligonucleotide
cacugcuaccaggaggcgg

SEQ ID NO: 1254122 - RNA, 19 nt, Artificial Sequence
  Description of Artificial Sequence: Synthetic oligonucleotide
cuggugcgggaaauaaauc

SEQ ID NO: 1254123 - RNA, 19 nt, Artificial Sequence
  Description of Artificial Sequence: Synthetic oligonucleotide
cgugagucuagcaccaacc

SEQ ID NO: 1254124 - RNA, 19 nt, Artificial Sequence
  Description of Artificial Sequence: Synthetic oligonucleotide
auacugucuucagauccug

SEQ ID NO: 1254125 - RNA, 19 nt, Artificial Sequence
  Description of Artificial Sequence: Synthetic oligonucleotide
cucucuuauuccaaacgua

SEQ ID NO: 1254126 - RNA, 19 nt, Artificial Sequence
  Description of Artificial Sequence: Synthetic oligonucleotide
uccucacucgugugauacc

SEQ ID NO: 1254127 - RNA, 19 nt, Artificial Sequence
  Description of Artificial Sequence: Synthetic oligonucleotide
acuuaaagagagacccggu

SEQ ID NO: 1254128 - RNA, 19 nt, Artificial Sequence
  Description of Artificial Sequence: Synthetic oligonucleotide
gcucucgugagucuagcac

SEQ ID NO: 1254129 - RNA, 19 nt, Artificial Sequence
  Description of Artificial Sequence: Synthetic oligonucleotide
ugcuuagcugggucauugu

SEQ ID NO: 1254130 - RNA, 19 nt, Artificial Sequence
  Description of Artificial Sequence: Synthetic oligonucleotide
uagcgcacagcugggugag

SEQ ID NO: 1254131 - RNA, 19 nt, Artificial Sequence
  Description of Artificial Sequence: Synthetic oligonucleotide
gaagcgggcggcgagucuc

SEQ ID NO: 1254132 - RNA, 19 nt, Artificial Sequence
  Description of Artificial Sequence: Synthetic oligonucleotide
aagcgcuuguuuguaguuu

SEQ ID NO: 1254133 - RNA, 19 nt, Artificial Sequence
  Description of Artificial Sequence: Synthetic oligonucleotide
agucuagcaccaaccagga

SEQ ID NO: 1254134 - RNA, 19 nt, Artificial Sequence
  Description of Artificial Sequence: Synthetic oligonucleotide
gucuguucgcucgcuacgc

SEQ ID NO: 1254135 - RNA, 19 nt, Artificial Sequence
  Description of Artificial Sequence: Synthetic oligonucleotide
gacagcgucuguggcauuc

SEQ ID NO: 1254136 - RNA, 19 nt, Artificial Sequence
  Description of Artificial Sequence: Synthetic oligonucleotide
agcucgugcggcaaauaug

SEQ ID NO: 1254137 - RNA, 19 nt, Artificial Sequence
  Description of Artificial Sequence: Synthetic oligonucleotide
ccaaccacagcccagcgga

SEQ ID NO: 1254138 - RNA, 19 nt, Artificial Sequence
  Description of Artificial Sequence: Synthetic oligonucleotide
aagcuacccaacgcgcagu

SEQ ID NO: 1254139 - RNA, 19 nt, Artificial Sequence
  Description of Artificial Sequence: Synthetic oligonucleotide
ggugccuaggucuguucgc

SEQ ID NO: 1254140 - RNA, 19 nt, Artificial Sequence
  Description of Artificial Sequence: Synthetic oligonucleotide
cugcccugcggccggaagc

SEQ ID NO: 1254141 - RNA, 19 nt, Artificial Sequence
  Description of Artificial Sequence: Synthetic oligonucleotide
cuaccaggaggcggaagag

SEQ ID NO: 1254142 - RNA, 19 nt, Artificial Sequence
  Description of Artificial Sequence: Synthetic oligonucleotide
gcaauggaacgucccgcgg

SEQ ID NO: 1254143 - RNA, 19 nt, Artificial Sequence
  Description of Artificial Sequence: Synthetic oligonucleotide
gaaauaaaucucggaugcu

SEQ ID NO: 1254144 - RNA, 19 nt, Artificial Sequence
  Description of Artificial Sequence: Synthetic oligonucleotide
gcgucuguggcauuccuca

SEQ ID NO: 1254145 - RNA, 19 nt, Artificial Sequence
  Description of Artificial Sequence: Synthetic oligonucleotide
gugugauacccuguucaac

SEQ ID NO: 1254146 - RNA, 19 nt, Artificial Sequence
  Description of Artificial Sequence: Synthetic oligonucleotide
gcgaccgcgaagcaaacuc

SEQ ID NO: 1254147 - RNA, 19 nt, Artificial Sequence
  Description of Artificial Sequence: Synthetic oligonucleotide
acacgccgucagcagcugg

SEQ ID NO: 1254148 - RNA, 19 nt, Artificial Sequence
  Description of Artificial Sequence: Synthetic oligonucleotide
cucgcuacgcccgcgguuc

SEQ ID NO: 1254149 - RNA, 19 nt, Artificial Sequence
  Description of Artificial Sequence: Synthetic oligonucleotide
caauugcaccuccaugcca

SEQ ID NO: 1254150 - RNA, 19 nt, Artificial Sequence
  Description of Artificial Sequence: Synthetic oligonucleotide
cuguggcauuccucacucg

SEQ ID NO: 1254151 - RNA, 19 nt, Artificial Sequence
  Description of Artificial Sequence: Synthetic oligonucleotide
cacccaaagaugagcaucu

SEQ ID NO: 1254152 - RNA, 19 nt, Artificial Sequence
  Description of Artificial Sequence: Synthetic oligonucleotide
caaacguauuucucuucaa

SEQ ID NO: 1254153 - RNA, 19 nt, Artificial Sequence
  Description of Artificial Sequence: Synthetic oligonucleotide
gugauacccuguucaacaa

SEQ ID NO: 1254154 - RNA, 19 nt, Artificial Sequence
  Description of Artificial Sequence: Synthetic oligonucleotide
gaucgucggugccuagguc

SEQ ID NO: 1254155 - RNA, 19 nt, Artificial Sequence
  Description of Artificial Sequence: Synthetic oligonucleotide
accgcgaagcaaacucggg

SEQ ID NO: 1254156 - RNA, 19 nt, Artificial Sequence
  Description of Artificial Sequence: Synthetic oligonucleotide
uugaucccauccacugcua

SEQ ID NO: 1254157 - RNA, 19 nt, Artificial Sequence
  Description of Artificial Sequence: Synthetic oligonucleotide
ccucacucgugugauaccc

SEQ ID NO: 1254158 - RNA, 19 nt, Artificial Sequence
  Description of Artificial Sequence: Synthetic oligonucleotide
gucgccgcggcuccaacca

SEQ ID NO: 1254159 - RNA, 19 nt, Artificial Sequence
  Description of Artificial Sequence: Synthetic oligonucleotide
gcaauuacucaggaacuuc

SEQ ID NO: 1254160 - RNA, 19 nt, Artificial Sequence
  Description of Artificial Sequence: Synthetic oligonucleotide
ugucacuggugcgggaaau

SEQ ID NO: 1254161 - RNA, 19 nt, Artificial Sequence
  Description of Artificial Sequence: Synthetic oligonucleotide
ggccggucccaggagaucg

SEQ ID NO: 1254162 - RNA, 19 nt, Artificial Sequence
  Description of Artificial Sequence: Synthetic oligonucleotide
uaggucuguucgcucgcua

SEQ ID NO: 1254163 - RNA, 19 nt, Artificial Sequence
  Description of Artificial Sequence: Synthetic oligonucleotide
aggcgcacgcucgagggug

SEQ ID NO: 1254164 - RNA, 19 nt, Artificial Sequence
  Description of Artificial Sequence: Synthetic oligonucleotide
aggggcaccgcgccgccug

SEQ ID NO: 1254165 - RNA, 19 nt, Artificial Sequence
  Description of Artificial Sequence: Synthetic oligonucleotide
cggguugcaauuacucagg

SEQ ID NO: 1254166 - RNA, 19 nt, Artificial Sequence
  Description of Artificial Sequence: Synthetic oligonucleotide
gagucucggcgccgcggcg

SEQ ID NO: 1254167 - RNA, 19 nt, Artificial Sequence
  Description of Artificial Sequence: Synthetic oligonucleotide
agaagcucgugcggcaaau

SEQ ID NO: 1254168 - RNA, 19 nt, Artificial Sequence
  Description of Artificial Sequence: Synthetic oligonucleotide
agcacgaucccgacagcgu

SEQ ID NO: 1254169 - RNA, 19 nt, Artificial Sequence
  Description of Artificial Sequence: Synthetic oligonucleotide
acccaacgcgcagucgccg

SEQ ID NO: 1254170 - RNA, 19 nt, Artificial Sequence
  Description of Artificial Sequence: Synthetic oligonucleotide
caggcuucgccgaaagucu

SEQ ID NO: 1254171 - RNA, 19 nt, Artificial Sequence
  Description of Artificial Sequence: Synthetic oligonucleotide
ccgucagcauugucuaugc

SEQ ID NO: 1254172 - RNA, 19 nt, Artificial Sequence
  Description of Artificial Sequence: Synthetic oligonucleotide
cucccgucagcauugucua

SEQ ID NO: 1254173 - RNA, 19 nt, Artificial Sequence
  Description of Artificial Sequence: Synthetic oligonucleotide
gcgggaaauaaaucucgga

SEQ ID NO: 1254174 - RNA, 19 nt, Artificial Sequence
  Description of Artificial Sequence: Synthetic oligonucleotide
cuucgccgaaagucuucac

SEQ ID NO: 1254175 - RNA, 19 nt, Artificial Sequence
  Description of Artificial Sequence: Synthetic oligonucleotide
ccuuguuacucccgucagc

SEQ ID NO: 1254176 - RNA, 19 nt, Artificial Sequence
  Description of Artificial Sequence: Synthetic oligonucleotide
gaagcgcuuguuuguaguu

SEQ ID NO: 1254177 - RNA, 19 nt, Artificial Sequence
  Description of Artificial Sequence: Synthetic oligonucleotide
gguugcaauuacucaggaa

SEQ ID NO: 1254178 - RNA, 19 nt, Artificial Sequence
  Description of Artificial Sequence: Synthetic oligonucleotide
cacgccgucagcagcugga

SEQ ID NO: 1254179 - RNA, 19 nt, Artificial Sequence
  Description of Artificial Sequence: Synthetic oligonucleotide
ggauugugggaggcgcacg

SEQ ID NO: 1254180 - RNA, 19 nt, Artificial Sequence
  Description of Artificial Sequence: Synthetic oligonucleotide
guugcuccccaugcuuagc

SEQ ID NO: 1254181 - RNA, 19 nt, Artificial Sequence
  Description of Artificial Sequence: Synthetic oligonucleotide
cugucgccgaggccagccg

SEQ ID NO: 1254182 - RNA, 19 nt, Artificial Sequence
  Description of Artificial Sequence: Synthetic oligonucleotide
acgaucccgacagcgucug

SEQ ID NO: 1254183 - RNA, 19 nt, Artificial Sequence
  Description of Artificial Sequence: Synthetic oligonucleotide
auugugggaggcgcacgcu

SEQ ID NO: 1254184 - RNA, 19 nt, Artificial Sequence
  Description of Artificial Sequence: Synthetic oligonucleotide
ugccuaggucuguucgcuc

SEQ ID NO: 1254185 - RNA, 19 nt, Artificial Sequence
  Description of Artificial Sequence: Synthetic oligonucleotide
cagcggaggggcaccgcgc

SEQ ID NO: 1254186 - RNA, 19 nt, Artificial Sequence
  Description of Artificial Sequence: Synthetic oligonucleotide
gucuguggcauuccucacu

SEQ ID NO: 1254187 - RNA, 19 nt, Artificial Sequence
  Description of Artificial Sequence: Synthetic oligonucleotide
ugcgaccgcgaagcaaacu

SEQ ID NO: 1254188 - RNA, 19 nt, Artificial Sequence
  Description of Artificial Sequence: Synthetic oligonucleotide
ucggugccuaggucuguuc

SEQ ID NO: 1254189 - RNA, 19 nt, Artificial Sequence
  Description of Artificial Sequence: Synthetic oligonucleotide
auaugcuguugacgacuua

SEQ ID NO: 1254190 - RNA, 19 nt, Artificial Sequence
  Description of Artificial Sequence: Synthetic oligonucleotide
caacgcgcagucgccgcgg

SEQ ID NO: 1254191 - RNA, 19 nt, Artificial Sequence
  Description of Artificial Sequence: Synthetic oligonucleotide
cgcgaagcaaacucggguc

SEQ ID NO: 1254192 - RNA, 19 nt, Artificial Sequence
  Description of Artificial Sequence: Synthetic oligonucleotide
caaagcgcuguuuguugua

SEQ ID NO: 1254193 - RNA, 19 nt, Artificial Sequence
  Description of Artificial Sequence: Synthetic oligonucleotide
uacucccgucagcauuguc

SEQ ID NO: 1254194 - RNA, 19 nt, Artificial Sequence
  Description of Artificial Sequence: Synthetic oligonucleotide
ccucauguugcuccccaug

SEQ ID NO: 1254195 - RNA, 19 nt, Artificial Sequence
  Description of Artificial Sequence: Synthetic oligonucleotide
ggaagcgcuuguuuguagu

SEQ ID NO: 1254196 - RNA, 19 nt, Artificial Sequence
  Description of Artificial Sequence: Synthetic oligonucleotide
ccugcgaccgcgaagcaaa

SEQ ID NO: 1254197 - RNA, 19 nt, Artificial Sequence
  Description of Artificial Sequence: Synthetic oligonucleotide
cgaccgcgaagcaaacucg

SEQ ID NO: 1254198 - RNA, 19 nt, Artificial Sequence
  Description of Artificial Sequence: Synthetic oligonucleotide
guucgcucgcuacgcccgc

SEQ ID NO: 1254199 - RNA, 19 nt, Artificial Sequence
  Description of Artificial Sequence: Synthetic oligonucleotide
gcacgaucccgacagcguc

SEQ ID NO: 1254200 - RNA, 19 nt, Artificial Sequence
  Description of Artificial Sequence: Synthetic oligonucleotide
cucuuauuccaaacguauu

SEQ ID NO: 1254201 - RNA, 19 nt, Artificial Sequence
  Description of Artificial Sequence: Synthetic oligonucleotide
gucuagcaccaaccaggac

SEQ ID NO: 1254202 - RNA, 19 nt, Artificial Sequence
  Description of Artificial Sequence: Synthetic oligonucleotide
cacuggugcgggaaauaaa

SEQ ID NO: 1254203 - RNA, 19 nt, Artificial Sequence
  Description of Artificial Sequence: Synthetic oligonucleotide
ccagcggaggggcaccgcg

SEQ ID NO: 1254204 - RNA, 19 nt, Artificial Sequence
  Description of Artificial Sequence: Synthetic oligonucleotide
ggguugcaauuacucagga

SEQ ID NO: 1254205 - RNA, 19 nt, Artificial Sequence
  Description of Artificial Sequence: Synthetic oligonucleotide
ccuaggucuguucgcucgc

SEQ ID NO: 1254206 - RNA, 19 nt, Artificial Sequence
  Description of Artificial Sequence: Synthetic oligonucleotide
cucagugcucucucucuua

SEQ ID NO: 1254207 - RNA, 19 nt, Artificial Sequence
  Description of Artificial Sequence: Synthetic oligonucleotide
ggaggaaagccuuguuacu

SEQ ID NO: 1254208 - RNA, 19 nt, Artificial Sequence
  Description of Artificial Sequence: Synthetic oligonucleotide
cauguugcuccccaugcuu

SEQ ID NO: 1254209 - RNA, 19 nt, Artificial Sequence
  Description of Artificial Sequence: Synthetic oligonucleotide
ucgcuacgcccgcgguucc

SEQ ID NO: 1254210 - RNA, 19 nt, Artificial Sequence
  Description of Artificial Sequence: Synthetic oligonucleotide
cuaugcucucgugagucua

SEQ ID NO: 1254211 - RNA, 19 nt, Artificial Sequence
  Description of Artificial Sequence: Synthetic oligonucleotide
cgcgcaauggaacgucccg

SEQ ID NO: 1254212 - RNA, 19 nt, Artificial Sequence
  Description of Artificial Sequence: Synthetic oligonucleotide
uuacucccgucagcauugu

SEQ ID NO: 1254213 - RNA, 19 nt, Artificial Sequence
  Description of Artificial Sequence: Synthetic oligonucleotide
ugaggaacucuggguccuc

SEQ ID NO: 1254214 - RNA, 19 nt, Artificial Sequence
  Description of Artificial Sequence: Synthetic oligonucleotide
gaccggcccugcgaccgcg

SEQ ID NO: 1254215 - RNA, 19 nt, Artificial Sequence
  Description of Artificial Sequence: Synthetic oligonucleotide
uccccaugcuuagcugggu

SEQ ID NO: 1254216 - RNA, 19 nt, Artificial Sequence
  Description of Artificial Sequence: Synthetic oligonucleotide
caugcugaagccaguuauu

SEQ ID NO: 1254217 - RNA, 19 nt, Artificial Sequence
  Description of Artificial Sequence: Synthetic oligonucleotide
cggugccuaggucuguucg

SEQ ID NO: 1254218 - RNA, 19 nt, Artificial Sequence
  Description of Artificial Sequence: Synthetic oligonucleotide
gcgcaauggaacgucccgc

SEQ ID NO: 1254219 - RNA, 19 nt, Artificial Sequence
  Description of Artificial Sequence: Synthetic oligonucleotide
uacgcccgcgguuccuguc

SEQ ID NO: 1254220 - RNA, 19 nt, Artificial Sequence
  Description of Artificial Sequence: Synthetic oligonucleotide
cugcgaccgcgaagcaaac

SEQ ID NO: 1254221 - RNA, 19 nt, Artificial Sequence
  Description of Artificial Sequence: Synthetic oligonucleotide
gaugagcaucugggauaug

SEQ ID NO: 1254222 - RNA, 19 nt, Artificial Sequence
  Description of Artificial Sequence: Synthetic oligonucleotide
gcgcuguuuguuguaggug

SEQ ID NO: 1254223 - RNA, 19 nt, Artificial Sequence
  Description of Artificial Sequence: Synthetic oligonucleotide
ccaacgcgcagucgccgcg

SEQ ID NO: 1254224 - RNA, 19 nt, Artificial Sequence
  Description of Artificial Sequence: Synthetic oligonucleotide
gaagcucgugcggcaaaua

SEQ ID NO: 1254225 - RNA, 19 nt, Artificial Sequence
  Description of Artificial Sequence: Synthetic oligonucleotide
gcuucgccgaaagucuuca

SEQ ID NO: 1254226 - RNA, 19 nt, Artificial Sequence
  Description of Artificial Sequence: Synthetic oligonucleotide
ggagaucgucggugccuag

SEQ ID NO: 1254227 - RNA, 19 nt, Artificial Sequence
  Description of Artificial Sequence: Synthetic oligonucleotide
ggggcaaucaggguccugu

SEQ ID NO: 1254228 - RNA, 19 nt, Artificial Sequence
  Description of Artificial Sequence: Synthetic oligonucleotide
cgggaaauaaaucucggau

SEQ ID NO: 1254229 - RNA, 19 nt, Artificial Sequence
  Description of Artificial Sequence: Synthetic oligonucleotide
acgcucgagggugggguga

SEQ ID NO: 1254230 - RNA, 19 nt, Artificial Sequence
  Description of Artificial Sequence: Synthetic oligonucleotide
cccggguugcaauuacuca

SEQ ID NO: 1254231 - RNA, 19 nt, Artificial Sequence
  Description of Artificial Sequence: Synthetic oligonucleotide
ggcggcgagucucggcgcc

SEQ ID NO: 1254232 - RNA, 19 nt, Artificial Sequence
  Description of Artificial Sequence: Synthetic oligonucleotide
cacgaucccgacagcgucu

SEQ ID NO: 1254233 - RNA, 19 nt, Artificial Sequence
  Description of Artificial Sequence: Synthetic oligonucleotide
caccgcgccgccugcccug

SEQ ID NO: 1254234 - RNA, 19 nt, Artificial Sequence
  Description of Artificial Sequence: Synthetic oligonucleotide
uggggcaaucaggguccug

SEQ ID NO: 1254235 - RNA, 19 nt, Artificial Sequence
  Description of Artificial Sequence: Synthetic oligonucleotide
cccaacgcgcagucgccgc

SEQ ID NO: 1254236 - RNA, 19 nt, Artificial Sequence
  Description of Artificial Sequence: Synthetic oligonucleotide
agccgccgcgcgcaaugga

SEQ ID NO: 1254237 - RNA, 19 nt, Artificial Sequence
  Description of Artificial Sequence: Synthetic oligonucleotide
gucacuggugcgggaaaua

SEQ ID NO: 1254238 - RNA, 19 nt, Artificial Sequence
  Description of Artificial Sequence: Synthetic oligonucleotide
cagaagcucgugcggcaaa

SEQ ID NO: 1254239 - RNA, 19 nt, Artificial Sequence
  Description of Artificial Sequence: Synthetic oligonucleotide
caccuuggguccaacuuuu

SEQ ID NO: 1254240 - RNA, 19 nt, Artificial Sequence
  Description of Artificial Sequence: Synthetic oligonucleotide
cugugaacaagggcuaguu

SEQ ID NO: 1254241 - RNA, 19 nt, Artificial Sequence
  Description of Artificial Sequence: Synthetic oligonucleotide
ggccaugaggaaauacugu

SEQ ID NO: 1254242 - RNA, 19 nt, Artificial Sequence
  Description of Artificial Sequence: Synthetic oligonucleotide
caggaagcgcuuguuugua

SEQ ID NO: 1254243 - RNA, 19 nt, Artificial Sequence
  Description of Artificial Sequence: Synthetic oligonucleotide
cggucccaggagaucgucg

SEQ ID NO: 1254244 - RNA, 19 nt, Artificial Sequence
  Description of Artificial Sequence: Synthetic oligonucleotide
gcgagucucggcgccgcgg

SEQ ID NO: 1254245 - RNA, 19 nt, Artificial Sequence
  Description of Artificial Sequence: Synthetic oligonucleotide
gucgccgaggccagccgca

SEQ ID NO: 1254246 - RNA, 19 nt, Artificial Sequence
  Description of Artificial Sequence: Synthetic oligonucleotide
ggcaccgcgccgccugccc

SEQ ID NO: 1254247 - RNA, 19 nt, Artificial Sequence
  Description of Artificial Sequence: Synthetic oligonucleotide
cagucauguuuugcacaga

SEQ ID NO: 1254248 - RNA, 19 nt, Artificial Sequence
  Description of Artificial Sequence: Synthetic oligonucleotide
ggcgagucucggcgccgcg

SEQ ID NO: 1254249 - RNA, 19 nt, Artificial Sequence
  Description of Artificial Sequence: Synthetic oligonucleotide
ccccaugcuuagcuggguc

SEQ ID NO: 1254250 - RNA, 19 nt, Artificial Sequence
  Description of Artificial Sequence: Synthetic oligonucleotide
cgagucucggcgccgcggc

SEQ ID NO: 1254251 - RNA, 19 nt, Artificial Sequence
  Description of Artificial Sequence: Synthetic oligonucleotide
cacacgccgucagcagcug

SEQ ID NO: 1254252 - RNA, 19 nt, Artificial Sequence
  Description of Artificial Sequence: Synthetic oligonucleotide
gaggcgcacgcucgagggu

SEQ ID NO: 1254253 - RNA, 19 nt, Artificial Sequence
  Description of Artificial Sequence: Synthetic oligonucleotide
ggcgcacgcucgagggugg

SEQ ID NO: 1254254 - RNA, 19 nt, Artificial Sequence
  Description of Artificial Sequence: Synthetic oligonucleotide
cccgacagcgucuguggca

SEQ ID NO: 1254255 - RNA, 19 nt, Artificial Sequence
  Description of Artificial Sequence: Synthetic oligonucleotide
ggggcugaucaaagcgcug

SEQ ID NO: 1254256 - RNA, 19 nt, Artificial Sequence
  Description of Artificial Sequence: Synthetic oligonucleotide
aggcuucgccgaaagucuu

SEQ ID NO: 1254257 - RNA, 19 nt, Artificial Sequence
  Description of Artificial Sequence: Synthetic oligonucleotide
cgcggcgacccgcacacgc

SEQ ID NO: 1254258 - RNA, 19 nt, Artificial Sequence
  Description of Artificial Sequence: Synthetic oligonucleotide
gcgcgcaauggaacguccc

SEQ ID NO: 1254259 - RNA, 19 nt, Artificial Sequence
  Description of Artificial Sequence: Synthetic oligonucleotide
gcuacgcccgcgguuccug

SEQ ID NO: 1254260 - RNA, 19 nt, Artificial Sequence
  Description of Artificial Sequence: Synthetic oligonucleotide
cuuuugcacccuggaggaa

SEQ ID NO: 1254261 - RNA, 19 nt, Artificial Sequence
  Description of Artificial Sequence: Synthetic oligonucleotide
ggcuucgccgaaagucuuc

SEQ ID NO: 1254262 - RNA, 19 nt, Artificial Sequence
  Description of Artificial Sequence: Synthetic oligonucleotide
gucguguggcaggaagcua

SEQ ID NO: 1254263 - RNA, 19 nt, Artificial Sequence
  Description of Artificial Sequence: Synthetic oligonucleotide
ggaggcggaagagcccuga

SEQ ID NO: 1254264 - RNA, 19 nt, Artificial Sequence
  Description of Artificial Sequence: Synthetic oligonucleotide
cagacaggcuucgccgaaa

SEQ ID NO: 1254265 - RNA, 19 nt, Artificial Sequence
  Description of Artificial Sequence: Synthetic oligonucleotide
cgcgcgcaauggaacgucc

SEQ ID NO: 1254266 - RNA, 19 nt, Artificial Sequence
  Description of Artificial Sequence: Synthetic oligonucleotide
cucgugcggcaaauaugcu

SEQ ID NO: 1254267 - RNA, 19 nt, Artificial Sequence
  Description of Artificial Sequence: Synthetic oligonucleotide
gcgguuccugucgccgagg

SEQ ID NO: 1254268 - RNA, 19 nt, Artificial Sequence
  Description of Artificial Sequence: Synthetic oligonucleotide
cccagaagcucgugcggca

SEQ ID NO: 1254269 - RNA, 19 nt, Artificial Sequence
  Description of Artificial Sequence: Synthetic oligonucleotide
ccgccgcgcgcaauggaac

SEQ ID NO: 1254270 - RNA, 19 nt, Artificial Sequence
  Description of Artificial Sequence: Synthetic oligonucleotide
gcacccuggaggaaagccu

SEQ ID NO: 1254271 - RNA, 19 nt, Artificial Sequence
  Description of Artificial Sequence: Synthetic oligonucleotide
cgucuguggcauuccucac

SEQ ID NO: 1254272 - RNA, 19 nt, Artificial Sequence
  Description of Artificial Sequence: Synthetic oligonucleotide
gcugugaacaagggcuagu

SEQ ID NO: 1254273 - RNA, 19 nt, Artificial Sequence
  Description of Artificial Sequence: Synthetic oligonucleotide
cuaggucuguucgcucgcu

SEQ ID NO: 1254274 - RNA, 19 nt, Artificial Sequence
  Description of Artificial Sequence: Synthetic oligonucleotide
cugucccggguugcaauua

SEQ ID NO: 1254275 - RNA, 19 nt, Artificial Sequence
  Description of Artificial Sequence: Synthetic oligonucleotide
cuccugccgcggcgacccg

SEQ ID NO: 1254276 - RNA, 19 nt, Artificial Sequence
  Description of Artificial Sequence: Synthetic oligonucleotide
ccgcgaagcaaacucgggu

SEQ ID NO: 1254277 - RNA, 19 nt, Artificial Sequence
  Description of Artificial Sequence: Synthetic oligonucleotide
agcgcacagcugggugaga

SEQ ID NO: 1254278 - RNA, 19 nt, Artificial Sequence
  Description of Artificial Sequence: Synthetic oligonucleotide
cucgugagucuagcaccaa

SEQ ID NO: 1254279 - RNA, 19 nt, Artificial Sequence
  Description of Artificial Sequence: Synthetic oligonucleotide
gucccggguugcaauuacu

SEQ ID NO: 1254280 - RNA, 19 nt, Artificial Sequence
  Description of Artificial Sequence: Synthetic oligonucleotide
ggaccggcccugcgaccgc

SEQ ID NO: 1254281 - RNA, 19 nt, Artificial Sequence
  Description of Artificial Sequence: Synthetic oligonucleotide
gcggcgagucucggcgccg

SEQ ID NO: 1254282 - RNA, 19 nt, Artificial Sequence
  Description of Artificial Sequence: Synthetic oligonucleotide
cagcgucuguggcauuccu

SEQ ID NO: 1254283 - RNA, 19 nt, Artificial Sequence
  Description of Artificial Sequence: Synthetic oligonucleotide
ggggcaccgcgccgccugc

SEQ ID NO: 1254284 - RNA, 19 nt, Artificial Sequence
  Description of Artificial Sequence: Synthetic oligonucleotide
cuacgcccgcgguuccugu

SEQ ID NO: 1254285 - RNA, 19 nt, Artificial Sequence
  Description of Artificial Sequence: Synthetic oligonucleotide
gcccagcggaggggcaccg

SEQ ID NO: 1254286 - RNA, 19 nt, Artificial Sequence
  Description of Artificial Sequence: Synthetic oligonucleotide
gccgccgcgcgcaauggaa

SEQ ID NO: 1254287 - RNA, 19 nt, Artificial Sequence
  Description of Artificial Sequence: Synthetic oligonucleotide
gcccgcgguuccugucgcc

SEQ ID NO: 1254288 - RNA, 19 nt, Artificial Sequence
  Description of Artificial Sequence: Synthetic oligonucleotide
gcucgaggguggggugaag

SEQ ID NO: 1254289 - RNA, 19 nt, Artificial Sequence
  Description of Artificial Sequence: Synthetic oligonucleotide
gucggugccuaggucuguu

SEQ ID NO: 1254290 - RNA, 19 nt, Artificial Sequence
  Description of Artificial Sequence: Synthetic oligonucleotide
ccgcgcgcaauggaacguc

SEQ ID NO: 1254291 - RNA, 19 nt, Artificial Sequence
  Description of Artificial Sequence: Synthetic oligonucleotide
gcgcacgcucgaggguggg

SEQ ID NO: 1254292 - RNA, 19 nt, Artificial Sequence
  Description of Artificial Sequence: Synthetic oligonucleotide
caugcuuagcugggucauu

SEQ ID NO: 1254293 - RNA, 19 nt, Artificial Sequence
  Description of Artificial Sequence: Synthetic oligonucleotide
gcacccgccgcggccugcc

SEQ ID NO: 1254294 - RNA, 19 nt, Artificial Sequence
  Description of Artificial Sequence: Synthetic oligonucleotide
ccggucccaggagaucguc

SEQ ID NO: 1254295 - RNA, 19 nt, Artificial Sequence
  Description of Artificial Sequence: Synthetic oligonucleotide
ccgacagcgucuguggcau

SEQ ID NO: 1254296 - RNA, 19 nt, Artificial Sequence
  Description of Artificial Sequence: Synthetic oligonucleotide
cgcacgcucgagggugggg

SEQ ID NO: 1254297 - RNA, 19 nt, Artificial Sequence
  Description of Artificial Sequence: Synthetic oligonucleotide
ccgcgguuccugucgccga

SEQ ID NO: 1254298 - RNA, 19 nt, Artificial Sequence
  Description of Artificial Sequence: Synthetic oligonucleotide
cgcccgcgguuccugucgc

SEQ ID NO: 1254299 - RNA, 19 nt, Artificial Sequence
  Description of Artificial Sequence: Synthetic oligonucleotide
gggcaccgcgccgccugcc

SEQ ID NO: 1254300 - RNA, 19 nt, Artificial Sequence
  Description of Artificial Sequence: Synthetic oligonucleotide
ccuuaccaucagacaggcu

SEQ ID NO: 1254301 - RNA, 19 nt, Artificial Sequence
  Description of Artificial Sequence: Synthetic oligonucleotide
cggaagcgggcggcgaguc

SEQ ID NO: 1254302 - RNA, 19 nt, Artificial Sequence
  Description of Artificial Sequence: Synthetic oligonucleotide
cccugcgaccgcgaagcaa

SEQ ID NO: 1254303 - RNA, 19 nt, Artificial Sequence
  Description of Artificial Sequence: Synthetic oligonucleotide
cuggggcaaucaggguccu

SEQ ID NO: 1254304 - RNA, 19 nt, Artificial Sequence
  Description of Artificial Sequence: Synthetic oligonucleotide
cgaagcaaacucgggucgu

SEQ ID NO: 1254305 - RNA, 19 nt, Artificial Sequence
  Description of Artificial Sequence: Synthetic oligonucleotide
gccgcgcgcaauggaacgu

SEQ ID NO: 1254306 - RNA, 19 nt, Artificial Sequence
  Description of Artificial Sequence: Synthetic oligonucleotide
cgcggccugcccucuucuc

SEQ ID NO: 1254307 - RNA, 19 nt, Artificial Sequence
  Description of Artificial Sequence: Synthetic oligonucleotide
cggcgagucucggcgccgc

SEQ ID NO: 1254308 - RNA, 19 nt, Artificial Sequence
  Description of Artificial Sequence: Synthetic oligonucleotide
gcggccggucccaggagau

SEQ ID NO: 1254309 - RNA, 19 nt, Artificial Sequence
  Description of Artificial Sequence: Synthetic oligonucleotide
cgucagcauugucuaugcu

SEQ ID NO: 1254310 - RNA, 19 nt, Artificial Sequence
  Description of Artificial Sequence: Synthetic oligonucleotide
gccggucccaggagaucgu

SEQ ID NO: 1254311 - RNA, 19 nt, Artificial Sequence
  Description of Artificial Sequence: Synthetic oligonucleotide
ccgcggcgacccgcacacg

SEQ ID NO: 1254312 - RNA, 19 nt, Artificial Sequence
  Description of Artificial Sequence: Synthetic oligonucleotide
ccguucccuucuccccaua

SEQ ID NO: 1254313 - RNA, 19 nt, Artificial Sequence
  Description of Artificial Sequence: Synthetic oligonucleotide
ccgcggccugcccucuucu

SEQ ID NO: 1254314 - RNA, 19 nt, Artificial Sequence
  Description of Artificial Sequence: Synthetic oligonucleotide
cgcucgcuacgcccgcggu

SEQ ID NO: 1254315 - RNA, 19 nt, Artificial Sequence
  Description of Artificial Sequence: Synthetic oligonucleotide
cgaucccgacagcgucugu

SEQ ID NO: 1254316 - RNA, 19 nt, Artificial Sequence
  Description of Artificial Sequence: Synthetic oligonucleotide
cgucggugccuaggucugu

SEQ ID NO: 1254317 - RNA, 19 nt, Artificial Sequence
  Description of Artificial Sequence: Synthetic oligonucleotide
cgccugcccugcggccgga

SEQ ID NO: 1254318 - RNA, 19 nt, Artificial Sequence
  Description of Artificial Sequence: Synthetic oligonucleotide
aaucgauugcaauuuacgc

SEQ ID NO: 1254319 - RNA, 19 nt, Artificial Sequence
  Description of Artificial Sequence: Synthetic oligonucleotide
aaguuuauaguacugacug

SEQ ID NO: 1254320 - RNA, 19 nt, Artificial Sequence
  Description of Artificial Sequence: Synthetic oligonucleotide
aucuauuuguccuccaucc

SEQ ID NO: 1254321 - RNA, 19 nt, Artificial Sequence
  Description of Artificial Sequence: Synthetic oligonucleotide
agaggcaauguauauauac

SEQ ID NO: 1254322 - RNA, 19 nt, Artificial Sequence
  Description of Artificial Sequence: Synthetic oligonucleotide
ugcaauuuacgccaaagag

SEQ ID NO: 1254323 - RNA, 19 nt, Artificial Sequence
  Description of Artificial Sequence: Synthetic oligonucleotide
aucgauugcaauuuacgcc

SEQ ID NO: 1254324 - RNA, 19 nt, Artificial Sequence
  Description of Artificial Sequence: Synthetic oligonucleotide
aaauauuuccaugauauga

SEQ ID NO: 1254325 - RNA, 19 nt, Artificial Sequence
  Description of Artificial Sequence: Synthetic oligonucleotide
uaaucgauugcaauuuacg

SEQ ID NO: 1254326 - RNA, 19 nt, Artificial Sequence
  Description of Artificial Sequence: Synthetic oligonucleotide
aaagaggcaauguauauau

SEQ ID NO: 1254327 - RNA, 19 nt, Artificial Sequence
  Description of Artificial Sequence: Synthetic oligonucleotide
ugacuguacaauaaaagca

SEQ ID NO: 1254328 - RNA, 19 nt, Artificial Sequence
  Description of Artificial Sequence: Synthetic oligonucleotide
agagguacgaaucaauguc

SEQ ID NO: 1254329 - RNA, 19 nt, Artificial Sequence
  Description of Artificial Sequence: Synthetic oligonucleotide
ucuaccucgagucugagaa

SEQ ID NO: 1254330 - RNA, 19 nt, Artificial Sequence
  Description of Artificial Sequence: Synthetic oligonucleotide
agguuuauucaacacaguc

SEQ ID NO: 1254331 - RNA, 19 nt, Artificial Sequence
  Description of Artificial Sequence: Synthetic oligonucleotide
auuuacgccaaagagcagc

SEQ ID NO: 1254332 - RNA, 19 nt, Artificial Sequence
  Description of Artificial Sequence: Synthetic oligonucleotide
aagaggaaauaucucaacu

SEQ ID NO: 1254333 - RNA, 19 nt, Artificial Sequence
  Description of Artificial Sequence: Synthetic oligonucleotide
uuuuccauaaguagaaaau

SEQ ID NO: 1254334 - RNA, 19 nt, Artificial Sequence
  Description of Artificial Sequence: Synthetic oligonucleotide
uuuagagcgauccuuggac

SEQ ID NO: 1254335 - RNA, 19 nt, Artificial Sequence
  Description of Artificial Sequence: Synthetic oligonucleotide
auaugcguagccuuuggac

SEQ ID NO: 1254336 - RNA, 19 nt, Artificial Sequence
  Description of Artificial Sequence: Synthetic oligonucleotide
ucgauugcaauuuacgcca

SEQ ID NO: 1254337 - RNA, 19 nt, Artificial Sequence
  Description of Artificial Sequence: Synthetic oligonucleotide
ucuauacaaguacaaacac

SEQ ID NO: 1254338 - RNA, 19 nt, Artificial Sequence
  Description of Artificial Sequence: Synthetic oligonucleotide
uuugcaucuaauccuaggu

SEQ ID NO: 1254339 - RNA, 19 nt, Artificial Sequence
  Description of Artificial Sequence: Synthetic oligonucleotide
aauuucagagaguaacaga

SEQ ID NO: 1254340 - RNA, 19 nt, Artificial Sequence
  Description of Artificial Sequence: Synthetic oligonucleotide
uucuuugacuccuagcaag

SEQ ID NO: 1254341 - RNA, 19 nt, Artificial Sequence
  Description of Artificial Sequence: Synthetic oligonucleotide
ugagaaacgaucccuaauc

SEQ ID NO: 1254342 - RNA, 19 nt, Artificial Sequence
  Description of Artificial Sequence: Synthetic oligonucleotide
agaggaaauaucucaacug

SEQ ID NO: 1254343 - RNA, 19 nt, Artificial Sequence
  Description of Artificial Sequence: Synthetic oligonucleotide
gagaaacgaucccuaaucg

SEQ ID NO: 1254344 - RNA, 19 nt, Artificial Sequence
  Description of Artificial Sequence: Synthetic oligonucleotide
uccugaaucaacaguaccu

SEQ ID NO: 1254345 - RNA, 19 nt, Artificial Sequence
  Description of Artificial Sequence: Synthetic oligonucleotide
aucgagaccuccuacgcac

SEQ ID NO: 1254346 - RNA, 19 nt, Artificial Sequence
  Description of Artificial Sequence: Synthetic oligonucleotide
ucuaauccuagguuuauuc

SEQ ID NO: 1254347 - RNA, 19 nt, Artificial Sequence
  Description of Artificial Sequence: Synthetic oligonucleotide
gauccuucucacuugauuc

SEQ ID NO: 1254348 - RNA, 19 nt, Artificial Sequence
  Description of Artificial Sequence: Synthetic oligonucleotide
aauauuuccaugauaugau

SEQ ID NO: 1254349 - RNA, 19 nt, Artificial Sequence
  Description of Artificial Sequence: Synthetic oligonucleotide
cacaaccuuaccuaaaaug

SEQ ID NO: 1254350 - RNA, 19 nt, Artificial Sequence
  Description of Artificial Sequence: Synthetic oligonucleotide
augauaugauccuugguca

SEQ ID NO: 1254351 - RNA, 19 nt, Artificial Sequence
  Description of Artificial Sequence: Synthetic oligonucleotide
uaugcguagccuuuggaca

SEQ ID NO: 1254352 - RNA, 19 nt, Artificial Sequence
  Description of Artificial Sequence: Synthetic oligonucleotide
ucccacuugaagcacugcg

SEQ ID NO: 1254353 - RNA, 19 nt, Artificial Sequence
  Description of Artificial Sequence: Synthetic oligonucleotide
uggauuuggagcgggaacg

SEQ ID NO: 1254354 - RNA, 19 nt, Artificial Sequence
  Description of Artificial Sequence: Synthetic oligonucleotide
auguauauauacacugccc

SEQ ID NO: 1254355 - RNA, 19 nt, Artificial Sequence
  Description of Artificial Sequence: Synthetic oligonucleotide
uuuauaguacugacuguac

SEQ ID NO: 1254356 - RNA, 19 nt, Artificial Sequence
  Description of Artificial Sequence: Synthetic oligonucleotide
gaaucaacaguaccucugc

SEQ ID NO: 1254357 - RNA, 19 nt, Artificial Sequence
  Description of Artificial Sequence: Synthetic oligonucleotide
gagaucgagaccuccuacg

SEQ ID NO: 1254358 - RNA, 19 nt, Artificial Sequence
  Description of Artificial Sequence: Synthetic oligonucleotide
aaaguuuauaguacugacu

SEQ ID NO: 1254359 - RNA, 19 nt, Artificial Sequence
  Description of Artificial Sequence: Synthetic oligonucleotide
guagccuuuggacagauga

SEQ ID NO: 1254360 - RNA, 19 nt, Artificial Sequence
  Description of Artificial Sequence: Synthetic oligonucleotide
acaaacacaaccuuaccua

SEQ ID NO: 1254361 - RNA, 19 nt, Artificial Sequence
  Description of Artificial Sequence: Synthetic oligonucleotide
acaaguacaaacacaaccu

SEQ ID NO: 1254362 - RNA, 19 nt, Artificial Sequence
  Description of Artificial Sequence: Synthetic oligonucleotide
cauaaguuacagagguacg

SEQ ID NO: 1254363 - RNA, 19 nt, Artificial Sequence
  Description of Artificial Sequence: Synthetic oligonucleotide
uaauccuagguuuauucaa

SEQ ID NO: 1254364 - RNA, 19 nt, Artificial Sequence
  Description of Artificial Sequence: Synthetic oligonucleotide
aagccucccaaugugcacc

SEQ ID NO: 1254365 - RNA, 19 nt, Artificial Sequence
  Description of Artificial Sequence: Synthetic oligonucleotide
ucuuugacuccuagcaagc

SEQ ID NO: 1254366 - RNA, 19 nt, Artificial Sequence
  Description of Artificial Sequence: Synthetic oligonucleotide
cuuaucccugccacgaucc

SEQ ID NO: 1254367 - RNA, 19 nt, Artificial Sequence
  Description of Artificial Sequence: Synthetic oligonucleotide
ccaaugugcaccuuggugg

SEQ ID NO: 1254368 - RNA, 19 nt, Artificial Sequence
  Description of Artificial Sequence: Synthetic oligonucleotide
uaccucugcagccagaauc

SEQ ID NO: 1254369 - RNA, 19 nt, Artificial Sequence
  Description of Artificial Sequence: Synthetic oligonucleotide
uaauuugcaucuaauccua

SEQ ID NO: 1254370 - RNA, 19 nt, Artificial Sequence
  Description of Artificial Sequence: Synthetic oligonucleotide
uugcaauuuacgccaaaga

SEQ ID NO: 1254371 - RNA, 19 nt, Artificial Sequence
  Description of Artificial Sequence: Synthetic oligonucleotide
caugccugcgccgagaagg

SEQ ID NO: 1254372 - RNA, 19 nt, Artificial Sequence
  Description of Artificial Sequence: Synthetic oligonucleotide
gaaucaaugucccugcuua

SEQ ID NO: 1254373 - RNA, 19 nt, Artificial Sequence
  Description of Artificial Sequence: Synthetic oligonucleotide
ucccuuuggauccacauuu

SEQ ID NO: 1254374 - RNA, 19 nt, Artificial Sequence
  Description of Artificial Sequence: Synthetic oligonucleotide
uacgaaucaaugucccugc

SEQ ID NO: 1254375 - RNA, 19 nt, Artificial Sequence
  Description of Artificial Sequence: Synthetic oligonucleotide
aggaacuagagccacugcu

SEQ ID NO: 1254376 - RNA, 19 nt, Artificial Sequence
  Description of Artificial Sequence: Synthetic oligonucleotide
cuaaucgauugcaauuuac

SEQ ID NO: 1254377 - RNA, 19 nt, Artificial Sequence
  Description of Artificial Sequence: Synthetic oligonucleotide
augaauggcaggugauaac

SEQ ID NO: 1254378 - RNA, 19 nt, Artificial Sequence
  Description of Artificial Sequence: Synthetic oligonucleotide
accucuaugggcacagucc

SEQ ID NO: 1254379 - RNA, 19 nt, Artificial Sequence
  Description of Artificial Sequence: Synthetic oligonucleotide
uuuacgccaaagagcagca

SEQ ID NO: 1254380 - RNA, 19 nt, Artificial Sequence
  Description of Artificial Sequence: Synthetic oligonucleotide
ugcgcuugguaggagaagg

SEQ ID NO: 1254381 - RNA, 19 nt, Artificial Sequence
  Description of Artificial Sequence: Synthetic oligonucleotide
cuugauucuuuaguggccc

SEQ ID NO: 1254382 - RNA, 19 nt, Artificial Sequence
  Description of Artificial Sequence: Synthetic oligonucleotide
auaucucaacugcuguggg

SEQ ID NO: 1254383 - RNA, 19 nt, Artificial Sequence
  Description of Artificial Sequence: Synthetic oligonucleotide
cuaauuugcaucuaauccu

SEQ ID NO: 1254384 - RNA, 19 nt, Artificial Sequence
  Description of Artificial Sequence: Synthetic oligonucleotide
ucaccaauuucagagagua

SEQ ID NO: 1254385 - RNA, 19 nt, Artificial Sequence
  Description of Artificial Sequence: Synthetic oligonucleotide
auaaguuacagagguacga

SEQ ID NO: 1254386 - RNA, 19 nt, Artificial Sequence
  Description of Artificial Sequence: Synthetic oligonucleotide
ucucuuuuaggugguuugg

SEQ ID NO: 1254387 - RNA, 19 nt, Artificial Sequence
  Description of Artificial Sequence: Synthetic oligonucleotide
ucgagucugagaaacgauc

SEQ ID NO: 1254388 - RNA, 19 nt, Artificial Sequence
  Description of Artificial Sequence: Synthetic oligonucleotide
uacugacuguacaauaaaa

SEQ ID NO: 1254389 - RNA, 19 nt, Artificial Sequence
  Description of Artificial Sequence: Synthetic oligonucleotide
augucggccucacuuaauc

SEQ ID NO: 1254390 - RNA, 19 nt, Artificial Sequence
  Description of Artificial Sequence: Synthetic oligonucleotide
acuccuagcaagcucuucu

SEQ ID NO: 1254391 - RNA, 19 nt, Artificial Sequence
  Description of Artificial Sequence: Synthetic oligonucleotide
uuugacuccuagcaagcuc

SEQ ID NO: 1254392 - RNA, 19 nt, Artificial Sequence
  Description of Artificial Sequence: Synthetic oligonucleotide
agaaacgaucccuaaucga

SEQ ID NO: 1254393 - RNA, 19 nt, Artificial Sequence
  Description of Artificial Sequence: Synthetic oligonucleotide
gaggaugcauccuuucuac

SEQ ID NO: 1254394 - RNA, 19 nt, Artificial Sequence
  Description of Artificial Sequence: Synthetic oligonucleotide
ugugggauccuucccuuug

SEQ ID NO: 1254395 - RNA, 19 nt, Artificial Sequence
  Description of Artificial Sequence: Synthetic oligonucleotide
guagguuccaugaggaccc

SEQ ID NO: 1254396 - RNA, 19 nt, Artificial Sequence
  Description of Artificial Sequence: Synthetic oligonucleotide
uuccugagcggcuggaugc

SEQ ID NO: 1254397 - RNA, 19 nt, Artificial Sequence
  Description of Artificial Sequence: Synthetic oligonucleotide
ucuauuuguccuccaucca

SEQ ID NO: 1254398 - RNA, 19 nt, Artificial Sequence
  Description of Artificial Sequence: Synthetic oligonucleotide
uuggauuuggagcgggaac

SEQ ID NO: 1254399 - RNA, 19 nt, Artificial Sequence
  Description of Artificial Sequence: Synthetic oligonucleotide
cuucugagguguucaaagc

SEQ ID NO: 1254400 - RNA, 19 nt, Artificial Sequence
  Description of Artificial Sequence: Synthetic oligonucleotide
uucgggaugugcuggagcu

SEQ ID NO: 1254401 - RNA, 19 nt, Artificial Sequence
  Description of Artificial Sequence: Synthetic oligonucleotide
gagguacgaaucaaugucc

SEQ ID NO: 1254402 - RNA, 19 nt, Artificial Sequence
  Description of Artificial Sequence: Synthetic oligonucleotide
uuuggagcgggaacgccgc

SEQ ID NO: 1254403 - RNA, 19 nt, Artificial Sequence
  Description of Artificial Sequence: Synthetic oligonucleotide
uacgccaaagagcagcauc

SEQ ID NO: 1254404 - RNA, 19 nt, Artificial Sequence
  Description of Artificial Sequence: Synthetic oligonucleotide
uaucgggaggaguuggagc

SEQ ID NO: 1254405 - RNA, 19 nt, Artificial Sequence
  Description of Artificial Sequence: Synthetic oligonucleotide
ucuuuaguggccccuuuau

SEQ ID NO: 1254406 - RNA, 19 nt, Artificial Sequence
  Description of Artificial Sequence: Synthetic oligonucleotide
ucacucuauacaaguacaa

SEQ ID NO: 1254407 - RNA, 19 nt, Artificial Sequence
  Description of Artificial Sequence: Synthetic oligonucleotide
ugaggaugcauccuuucua

SEQ ID NO: 1254408 - RNA, 19 nt, Artificial Sequence
  Description of Artificial Sequence: Synthetic oligonucleotide
aggcaugucaaucauuuua

SEQ ID NO: 1254409 - RNA, 19 nt, Artificial Sequence
  Description of Artificial Sequence: Synthetic oligonucleotide
gcaauuuacgccaaagagc

SEQ ID NO: 1254410 - RNA, 19 nt, Artificial Sequence
  Description of Artificial Sequence: Synthetic oligonucleotide
agguuaaccugcaacauca

SEQ ID NO: 1254411 - RNA, 19 nt, Artificial Sequence
  Description of Artificial Sequence: Synthetic oligonucleotide
guacgaaucaaugucccug

SEQ ID NO: 1254412 - RNA, 19 nt, Artificial Sequence
  Description of Artificial Sequence: Synthetic oligonucleotide
augcguagccuuuggacag

SEQ ID NO: 1254413 - RNA, 19 nt, Artificial Sequence
  Description of Artificial Sequence: Synthetic oligonucleotide
uucucagacccggaggccg

SEQ ID NO: 1254414 - RNA, 19 nt, Artificial Sequence
  Description of Artificial Sequence: Synthetic oligonucleotide
ucuaugggcacaguccuga

SEQ ID NO: 1254415 - RNA, 19 nt, Artificial Sequence
  Description of Artificial Sequence: Synthetic oligonucleotide
uagccuuuggacagaugag

SEQ ID NO: 1254416 - RNA, 19 nt, Artificial Sequence
  Description of Artificial Sequence: Synthetic oligonucleotide
agcggcuggaugcagagga

SEQ ID NO: 1254417 - RNA, 19 nt, Artificial Sequence
  Description of Artificial Sequence: Synthetic oligonucleotide
acauaugcguagccuuugg

SEQ ID NO: 1254418 - RNA, 19 nt, Artificial Sequence
  Description of Artificial Sequence: Synthetic oligonucleotide
uuagagcgauccuuggacu

SEQ ID NO: 1254419 - RNA, 19 nt, Artificial Sequence
  Description of Artificial Sequence: Synthetic oligonucleotide
gagaccugcgccuugggga

SEQ ID NO: 1254420 - RNA, 19 nt, Artificial Sequence
  Description of Artificial Sequence: Synthetic oligonucleotide
aguuuauaguacugacugu

SEQ ID NO: 1254421 - RNA, 19 nt, Artificial Sequence
  Description of Artificial Sequence: Synthetic oligonucleotide
accuccuacgcacaggaga

SEQ ID NO: 1254422 - RNA, 19 nt, Artificial Sequence
  Description of Artificial Sequence: Synthetic oligonucleotide
auuuggagcgggaacgccg

SEQ ID NO: 1254423 - RNA, 19 nt, Artificial Sequence
  Description of Artificial Sequence: Synthetic oligonucleotide
cugagguguucaaagcagc

SEQ ID NO: 1254424 - RNA, 19 nt, Artificial Sequence
  Description of Artificial Sequence: Synthetic oligonucleotide
acuacaggguaccucuaug

SEQ ID NO: 1254425 - RNA, 19 nt, Artificial Sequence
  Description of Artificial Sequence: Synthetic oligonucleotide
ugaccugcgccacauggga

SEQ ID NO: 1254426 - RNA, 19 nt, Artificial Sequence
  Description of Artificial Sequence: Synthetic oligonucleotide
ggaacauaaguuacagagg

SEQ ID NO: 1254427 - RNA, 19 nt, Artificial Sequence
  Description of Artificial Sequence: Synthetic oligonucleotide
gagucuuaucccugccacg

SEQ ID NO: 1254428 - RNA, 19 nt, Artificial Sequence
  Description of Artificial Sequence: Synthetic oligonucleotide
accuugguggguuuaggug

SEQ ID NO: 1254429 - RNA, 19 nt, Artificial Sequence
  Description of Artificial Sequence: Synthetic oligonucleotide
ucacuuaaucugaacucuc

SEQ ID NO: 1254430 - RNA, 19 nt, Artificial Sequence
  Description of Artificial Sequence: Synthetic oligonucleotide
aacuagagccacugcuuga

SEQ ID NO: 1254431 - RNA, 19 nt, Artificial Sequence
  Description of Artificial Sequence: Synthetic oligonucleotide
cuaauccuagguuuauuca

SEQ ID NO: 1254432 - RNA, 19 nt, Artificial Sequence
  Description of Artificial Sequence: Synthetic oligonucleotide
uaaguuacagagguacgaa

SEQ ID NO: 1254433 - RNA, 19 nt, Artificial Sequence
  Description of Artificial Sequence: Synthetic oligonucleotide
uaaucugaacucucacuuc

SEQ ID NO: 1254434 - RNA, 19 nt, Artificial Sequence
  Description of Artificial Sequence: Synthetic oligonucleotide
ucuuaucccugccacgauc

SEQ ID NO: 1254435 - RNA, 19 nt, Artificial Sequence
  Description of Artificial Sequence: Synthetic oligonucleotide
accuuaccuaaaaugcuac

SEQ ID NO: 1254436 - RNA, 19 nt, Artificial Sequence
  Description of Artificial Sequence: Synthetic oligonucleotide
uccuagguuuauucaacac

SEQ ID NO: 1254437 - RNA, 19 nt, Artificial Sequence
  Description of Artificial Sequence: Synthetic oligonucleotide
acugcccagguuaaccugc

SEQ ID NO: 1254438 - RNA, 19 nt, Artificial Sequence
  Description of Artificial Sequence: Synthetic oligonucleotide
ggugaccugcgccacaugg

SEQ ID NO: 1254439 - RNA, 19 nt, Artificial Sequence
  Description of Artificial Sequence: Synthetic oligonucleotide
acgaucccuaaucgauugc

SEQ ID NO: 1254440 - RNA, 19 nt, Artificial Sequence
  Description of Artificial Sequence: Synthetic oligonucleotide
uccacauaugcguagccuu

SEQ ID NO: 1254441 - RNA, 19 nt, Artificial Sequence
  Description of Artificial Sequence: Synthetic oligonucleotide
cagggugccaacacggcag

SEQ ID NO: 1254442 - RNA, 19 nt, Artificial Sequence
  Description of Artificial Sequence: Synthetic oligonucleotide
ucccuaaucgauugcaauu

SEQ ID NO: 1254443 - RNA, 19 nt, Artificial Sequence
  Description of Artificial Sequence: Synthetic oligonucleotide
aauuugcaucuaauccuag

SEQ ID NO: 1254444 - RNA, 19 nt, Artificial Sequence
  Description of Artificial Sequence: Synthetic oligonucleotide
guggguuuaggugaagggc

SEQ ID NO: 1254445 - RNA, 19 nt, Artificial Sequence
  Description of Artificial Sequence: Synthetic oligonucleotide
gguagguuccaugaggacc

SEQ ID NO: 1254446 - RNA, 19 nt, Artificial Sequence
  Description of Artificial Sequence: Synthetic oligonucleotide
uuaucgggaggaguuggag

SEQ ID NO: 1254447 - RNA, 19 nt, Artificial Sequence
  Description of Artificial Sequence: Synthetic oligonucleotide
uaucucaacugcuguggga

SEQ ID NO: 1254448 - RNA, 19 nt, Artificial Sequence
  Description of Artificial Sequence: Synthetic oligonucleotide
ugggcugaaucgccguggg

SEQ ID NO: 1254449 - RNA, 19 nt, Artificial Sequence
  Description of Artificial Sequence: Synthetic oligonucleotide
augaggaugcauccuuucu

SEQ ID NO: 1254450 - RNA, 19 nt, Artificial Sequence
  Description of Artificial Sequence: Synthetic oligonucleotide
acagagguacgaaucaaug

SEQ ID NO: 1254451 - RNA, 19 nt, Artificial Sequence
  Description of Artificial Sequence: Synthetic oligonucleotide
ucugagaaacgaucccuaa

SEQ ID NO: 1254452 - RNA, 19 nt, Artificial Sequence
  Description of Artificial Sequence: Synthetic oligonucleotide
caucuauuuguccuccauc

SEQ ID NO: 1254453 - RNA, 19 nt, Artificial Sequence
  Description of Artificial Sequence: Synthetic oligonucleotide
uaccucgagucugagaaac

SEQ ID NO: 1254454 - RNA, 19 nt, Artificial Sequence
  Description of Artificial Sequence: Synthetic oligonucleotide
caguccuuucacucuauac

SEQ ID NO: 1254455 - RNA, 19 nt, Artificial Sequence
  Description of Artificial Sequence: Synthetic oligonucleotide
auacaaguacaaacacaac

SEQ ID NO: 1254456 - RNA, 19 nt, Artificial Sequence
  Description of Artificial Sequence: Synthetic oligonucleotide
uccuagccagaaaacuaca

SEQ ID NO: 1254457 - RNA, 19 nt, Artificial Sequence
  Description of Artificial Sequence: Synthetic oligonucleotide
agucuuaucccugccacga

SEQ ID NO: 1254458 - RNA, 19 nt, Artificial Sequence
  Description of Artificial Sequence: Synthetic oligonucleotide
agaauccuccugaagagga

SEQ ID NO: 1254459 - RNA, 19 nt, Artificial Sequence
  Description of Artificial Sequence: Synthetic oligonucleotide
auccuagguuuauucaaca

SEQ ID NO: 1254460 - RNA, 19 nt, Artificial Sequence
  Description of Artificial Sequence: Synthetic oligonucleotide
agucugagaaacgaucccu

SEQ ID NO: 1254461 - RNA, 19 nt, Artificial Sequence
  Description of Artificial Sequence: Synthetic oligonucleotide
aaccuuaccuaaaaugcua

SEQ ID NO: 1254462 - RNA, 19 nt, Artificial Sequence
  Description of Artificial Sequence: Synthetic oligonucleotide
uagguuuauucaacacagu

SEQ ID NO: 1254463 - RNA, 19 nt, Artificial Sequence
  Description of Artificial Sequence: Synthetic oligonucleotide
uuuggauuuggagcgggaa

SEQ ID NO: 1254464 - RNA, 19 nt, Artificial Sequence
  Description of Artificial Sequence: Synthetic oligonucleotide
aacuggagcuucgggaugu

SEQ ID NO: 1254465 - RNA, 19 nt, Artificial Sequence
  Description of Artificial Sequence: Synthetic oligonucleotide
cacauuccugguaagccuc

SEQ ID NO: 1254466 - RNA, 19 nt, Artificial Sequence
  Description of Artificial Sequence: Synthetic oligonucleotide
uaccucuaugggcacaguc

SEQ ID NO: 1254467 - RNA, 19 nt, Artificial Sequence
  Description of Artificial Sequence: Synthetic oligonucleotide
cuguaguacuaacuggcuc

SEQ ID NO: 1254468 - RNA, 19 nt, Artificial Sequence
  Description of Artificial Sequence: Synthetic oligonucleotide
ugcgccacaugggaggcgg

SEQ ID NO: 1254469 - RNA, 19 nt, Artificial Sequence
  Description of Artificial Sequence: Synthetic oligonucleotide
uugauucuuuaguggcccc

SEQ ID NO: 1254470 - RNA, 19 nt, Artificial Sequence
  Description of Artificial Sequence: Synthetic oligonucleotide
aauccuccugaagaggaaa

SEQ ID NO: 1254471 - RNA, 19 nt, Artificial Sequence
  Description of Artificial Sequence: Synthetic oligonucleotide
guuaaccugcaacaucauc

SEQ ID NO: 1254472 - RNA, 19 nt, Artificial Sequence
  Description of Artificial Sequence: Synthetic oligonucleotide
agcacugcgucucuuccga

SEQ ID NO: 1254473 - RNA, 19 nt, Artificial Sequence
  Description of Artificial Sequence: Synthetic oligonucleotide
gaaacgaucccuaaucgau

SEQ ID NO: 1254474 - RNA, 19 nt, Artificial Sequence
  Description of Artificial Sequence: Synthetic oligonucleotide
gguggucuaggccagggug

SEQ ID NO: 1254475 - RNA, 19 nt, Artificial Sequence
  Description of Artificial Sequence: Synthetic oligonucleotide
aucccuaaucgauugcaau

SEQ ID NO: 1254476 - RNA, 19 nt, Artificial Sequence
  Description of Artificial Sequence: Synthetic oligonucleotide
aucucaacugcugugggau

SEQ ID NO: 1254477 - RNA, 19 nt, Artificial Sequence
  Description of Artificial Sequence: Synthetic oligonucleotide
auaguacugacuguacaau

SEQ ID NO: 1254478 - RNA, 19 nt, Artificial Sequence
  Description of Artificial Sequence: Synthetic oligonucleotide
acaggcaugucaaucauuu

SEQ ID NO: 1254479 - RNA, 19 nt, Artificial Sequence
  Description of Artificial Sequence: Synthetic oligonucleotide
uuuaggugaagggcuucgc

SEQ ID NO: 1254480 - RNA, 19 nt, Artificial Sequence
  Description of Artificial Sequence: Synthetic oligonucleotide
caguccugaaucaacagua

SEQ ID NO: 1254481 - RNA, 19 nt, Artificial Sequence
  Description of Artificial Sequence: Synthetic oligonucleotide
acauuuggcuagagaaagg

SEQ ID NO: 1254482 - RNA, 19 nt, Artificial Sequence
  Description of Artificial Sequence: Synthetic oligonucleotide
gcucaccaauuucagagag

SEQ ID NO: 1254483 - RNA, 19 nt, Artificial Sequence
  Description of Artificial Sequence: Synthetic oligonucleotide
ggacaaaacugaguagggg

SEQ ID NO: 1254484 - RNA, 19 nt, Artificial Sequence
  Description of Artificial Sequence: Synthetic oligonucleotide
caugaggacccuguaguac

SEQ ID NO: 1254485 - RNA, 19 nt, Artificial Sequence
  Description of Artificial Sequence: Synthetic oligonucleotide
uacgcacaggagaccugcg

SEQ ID NO: 1254486 - RNA, 19 nt, Artificial Sequence
  Description of Artificial Sequence: Synthetic oligonucleotide
cagaauccuccugaagagg

SEQ ID NO: 1254487 - RNA, 19 nt, Artificial Sequence
  Description of Artificial Sequence: Synthetic oligonucleotide
agagcgauccuuggacuuc

SEQ ID NO: 1254488 - RNA, 19 nt, Artificial Sequence
  Description of Artificial Sequence: Synthetic oligonucleotide
gugggauccuucccuuugg

SEQ ID NO: 1254489 - RNA, 19 nt, Artificial Sequence
  Description of Artificial Sequence: Synthetic oligonucleotide
uccuacgcacaggagaccu

SEQ ID NO: 1254490 - RNA, 19 nt, Artificial Sequence
  Description of Artificial Sequence: Synthetic oligonucleotide
cuugagccugugcuagugc

SEQ ID NO: 1254491 - RNA, 19 nt, Artificial Sequence
  Description of Artificial Sequence: Synthetic oligonucleotide
cuucgggaugugcuggagc

SEQ ID NO: 1254492 - RNA, 19 nt, Artificial Sequence
  Description of Artificial Sequence: Synthetic oligonucleotide
cacuuaaucugaacucuca

SEQ ID NO: 1254493 - RNA, 19 nt, Artificial Sequence
  Description of Artificial Sequence: Synthetic oligonucleotide
uuuaggugguuuggauuug

SEQ ID NO: 1254494 - RNA, 19 nt, Artificial Sequence
  Description of Artificial Sequence: Synthetic oligonucleotide
ugucggccucacuuaaucu

SEQ ID NO: 1254495 - RNA, 19 nt, Artificial Sequence
  Description of Artificial Sequence: Synthetic oligonucleotide
ucagagcgguccuugcgcu

SEQ ID NO: 1254496 - RNA, 19 nt, Artificial Sequence
  Description of Artificial Sequence: Synthetic oligonucleotide
aauuuacgccaaagagcag

SEQ ID NO: 1254497 - RNA, 19 nt, Artificial Sequence
  Description of Artificial Sequence: Synthetic oligonucleotide
gugccaacacggcaguagc

SEQ ID NO: 1254498 - RNA, 19 nt, Artificial Sequence
  Description of Artificial Sequence: Synthetic oligonucleotide
aggcgguggaagcauucuc

SEQ ID NO: 1254499 - RNA, 19 nt, Artificial Sequence
  Description of Artificial Sequence: Synthetic oligonucleotide
aacgccgccuguugucaug

SEQ ID NO: 1254500 - RNA, 19 nt, Artificial Sequence
  Description of Artificial Sequence: Synthetic oligonucleotide
uccgagucuuaucccugcc

SEQ ID NO: 1254501 - RNA, 19 nt, Artificial Sequence
  Description of Artificial Sequence: Synthetic oligonucleotide
gauuuggagcgggaacgcc

SEQ ID NO: 1254502 - RNA, 19 nt, Artificial Sequence
  Description of Artificial Sequence: Synthetic oligonucleotide
cuuuagagcgauccuugga

SEQ ID NO: 1254503 - RNA, 19 nt, Artificial Sequence
  Description of Artificial Sequence: Synthetic oligonucleotide
ucaugaauggcaggugaua

SEQ ID NO: 1254504 - RNA, 19 nt, Artificial Sequence
  Description of Artificial Sequence: Synthetic oligonucleotide
gaucgagaccuggugcugc

SEQ ID NO: 1254505 - RNA, 19 nt, Artificial Sequence
  Description of Artificial Sequence: Synthetic oligonucleotide
ugccaacacggcaguagca

SEQ ID NO: 1254506 - RNA, 19 nt, Artificial Sequence
  Description of Artificial Sequence: Synthetic oligonucleotide
guacugacuguacaauaaa

SEQ ID NO: 1254507 - RNA, 19 nt, Artificial Sequence
  Description of Artificial Sequence: Synthetic oligonucleotide
ugggauccuucccuuugga

SEQ ID NO: 1254508 - RNA, 19 nt, Artificial Sequence
  Description of Artificial Sequence: Synthetic oligonucleotide
ccucacuuaaucugaacuc

SEQ ID NO: 1254509 - RNA, 19 nt, Artificial Sequence
  Description of Artificial Sequence: Synthetic oligonucleotide
cuggagguugagcuggauc

SEQ ID NO: 1254510 - RNA, 19 nt, Artificial Sequence
  Description of Artificial Sequence: Synthetic oligonucleotide
acgccaaagagcagcaucu

SEQ ID NO: 1254511 - RNA, 19 nt, Artificial Sequence
  Description of Artificial Sequence: Synthetic oligonucleotide
cgagucugagaaacgaucc

SEQ ID NO: 1254512 - RNA, 19 nt, Artificial Sequence
  Description of Artificial Sequence: Synthetic oligonucleotide
cugggugggcugaaucgcc

SEQ ID NO: 1254513 - RNA, 19 nt, Artificial Sequence
  Description of Artificial Sequence: Synthetic oligonucleotide
ccuagguuuauucaacaca

SEQ ID NO: 1254514 - RNA, 19 nt, Artificial Sequence
  Description of Artificial Sequence: Synthetic oligonucleotide
caugaauggcaggugauaa

SEQ ID NO: 1254515 - RNA, 19 nt, Artificial Sequence
  Description of Artificial Sequence: Synthetic oligonucleotide
ggugggguagguuccauga

SEQ ID NO: 1254516 - RNA, 19 nt, Artificial Sequence
  Description of Artificial Sequence: Synthetic oligonucleotide
aacauaaguuacagaggua

SEQ ID NO: 1254517 - RNA, 19 nt, Artificial Sequence
  Description of Artificial Sequence: Synthetic oligonucleotide
aggguaccucuaugggcac

SEQ ID NO: 1254518 - RNA, 19 nt, Artificial Sequence
  Description of Artificial Sequence: Synthetic oligonucleotide
cacuucuaccucgagucug

SEQ ID NO: 1254519 - RNA, 19 nt, Artificial Sequence
  Description of Artificial Sequence: Synthetic oligonucleotide
ugcuuaucgggaggaguug

SEQ ID NO: 1254520 - RNA, 19 nt, Artificial Sequence
  Description of Artificial Sequence: Synthetic oligonucleotide
cuuuaucuuuagagcgauc

SEQ ID NO: 1254521 - RNA, 19 nt, Artificial Sequence
  Description of Artificial Sequence: Synthetic oligonucleotide
guggucuaggccagggugc

SEQ ID NO: 1254522 - RNA, 19 nt, Artificial Sequence
  Description of Artificial Sequence: Synthetic oligonucleotide
gugcuagugcuggagcccg

SEQ ID NO: 1254523 - RNA, 19 nt, Artificial Sequence
  Description of Artificial Sequence: Synthetic oligonucleotide
agagaguaacagagacacg

SEQ ID NO: 1254524 - RNA, 19 nt, Artificial Sequence
  Description of Artificial Sequence: Synthetic oligonucleotide
ggaggaacuagagccacug

SEQ ID NO: 1254525 - RNA, 19 nt, Artificial Sequence
  Description of Artificial Sequence: Synthetic oligonucleotide
agaaaacuacaggguaccu

SEQ ID NO: 1254526 - RNA, 19 nt, Artificial Sequence
  Description of Artificial Sequence: Synthetic oligonucleotide
uuaucccugccacgauccu

SEQ ID NO: 1254527 - RNA, 19 nt, Artificial Sequence
  Description of Artificial Sequence: Synthetic oligonucleotide
ucaugccugcgccgagaag

SEQ ID NO: 1254528 - RNA, 19 nt, Artificial Sequence
  Description of Artificial Sequence: Synthetic oligonucleotide
uggccaucuauuuguccuc

SEQ ID NO: 1254529 - RNA, 19 nt, Artificial Sequence
  Description of Artificial Sequence: Synthetic oligonucleotide
ucgagaccuccuacgcaca

SEQ ID NO: 1254530 - RNA, 19 nt, Artificial Sequence
  Description of Artificial Sequence: Synthetic oligonucleotide
agaccugcgccuuggggau

SEQ ID NO: 1254531 - RNA, 19 nt, Artificial Sequence
  Description of Artificial Sequence: Synthetic oligonucleotide
ccugaagaggaaauaucuc

SEQ ID NO: 1254532 - RNA, 19 nt, Artificial Sequence
  Description of Artificial Sequence: Synthetic oligonucleotide
gugggcugaaucgccgugg

SEQ ID NO: 1254533 - RNA, 19 nt, Artificial Sequence
  Description of Artificial Sequence: Synthetic oligonucleotide
guaguacuaacuggcucac

SEQ ID NO: 1254534 - RNA, 19 nt, Artificial Sequence
  Description of Artificial Sequence: Synthetic oligonucleotide
gcuuaucgggaggaguugg

SEQ ID NO: 1254535 - RNA, 19 nt, Artificial Sequence
  Description of Artificial Sequence: Synthetic oligonucleotide
cauguguuucagugccuuc

SEQ ID NO: 1254536 - RNA, 19 nt, Artificial Sequence
  Description of Artificial Sequence: Synthetic oligonucleotide
caaccuuaccuaaaaugcu

SEQ ID NO: 1254537 - RNA, 19 nt, Artificial Sequence
  Description of Artificial Sequence: Synthetic oligonucleotide
ccuccuacgcacaggagac

SEQ ID NO: 1254538 - RNA, 19 nt, Artificial Sequence
  Description of Artificial Sequence: Synthetic oligonucleotide
ggacuucucaucagagcgg

SEQ ID NO: 1254539 - RNA, 19 nt, Artificial Sequence
  Description of Artificial Sequence: Synthetic oligonucleotide
gguuuggauuuggagcggg

SEQ ID NO: 1254540 - RNA, 19 nt, Artificial Sequence
  Description of Artificial Sequence: Synthetic oligonucleotide
gucucuuccgagucuuauc

SEQ ID NO: 1254541 - RNA, 19 nt, Artificial Sequence
  Description of Artificial Sequence: Synthetic oligonucleotide
gguaccucuaugggcacag

SEQ ID NO: 1254542 - RNA, 19 nt, Artificial Sequence
  Description of Artificial Sequence: Synthetic oligonucleotide
cacauaugcguagccuuug

SEQ ID NO: 1254543 - RNA, 19 nt, Artificial Sequence
  Description of Artificial Sequence: Synthetic oligonucleotide
gcuggaucgagaccuggug

SEQ ID NO: 1254544 - RNA, 19 nt, Artificial Sequence
  Description of Artificial Sequence: Synthetic oligonucleotide
acgaaucaaugucccugcu

SEQ ID NO: 1254545 - RNA, 19 nt, Artificial Sequence
  Description of Artificial Sequence: Synthetic oligonucleotide
cauaugcguagccuuugga

SEQ ID NO: 1254546 - RNA, 19 nt, Artificial Sequence
  Description of Artificial Sequence: Synthetic oligonucleotide
gauugcaauuuacgccaaa

SEQ ID NO: 1254547 - RNA, 19 nt, Artificial Sequence
  Description of Artificial Sequence: Synthetic oligonucleotide
cuuaucgggaggaguugga

SEQ ID NO: 1254548 - RNA, 19 nt, Artificial Sequence
  Description of Artificial Sequence: Synthetic oligonucleotide
gucaagaacuggaaggggu

SEQ ID NO: 1254549 - RNA, 19 nt, Artificial Sequence
  Description of Artificial Sequence: Synthetic oligonucleotide
ugcgccgagaagggcuugg

SEQ ID NO: 1254550 - RNA, 19 nt, Artificial Sequence
  Description of Artificial Sequence: Synthetic oligonucleotide
cucacuuaaucugaacucu

SEQ ID NO: 1254551 - RNA, 19 nt, Artificial Sequence
  Description of Artificial Sequence: Synthetic oligonucleotide
cuugcgcuugguaggagaa

SEQ ID NO: 1254552 - RNA, 19 nt, Artificial Sequence
  Description of Artificial Sequence: Synthetic oligonucleotide
cagagguacgaaucaaugu

SEQ ID NO: 1254553 - RNA, 19 nt, Artificial Sequence
  Description of Artificial Sequence: Synthetic oligonucleotide
ucucaacugcugugggauc

SEQ ID NO: 1254554 - RNA, 19 nt, Artificial Sequence
  Description of Artificial Sequence: Synthetic oligonucleotide
uccugguaagccucccaau

SEQ ID NO: 1254555 - RNA, 19 nt, Artificial Sequence
  Description of Artificial Sequence: Synthetic oligonucleotide
ggagaucgagaccuccuac

SEQ ID NO: 1254556 - RNA, 19 nt, Artificial Sequence
  Description of Artificial Sequence: Synthetic oligonucleotide
gagguguucaaagcagcaa

SEQ ID NO: 1254557 - RNA, 19 nt, Artificial Sequence
  Description of Artificial Sequence: Synthetic oligonucleotide
aucggcuucuguggcggcg

SEQ ID NO: 1254558 - RNA, 19 nt, Artificial Sequence
  Description of Artificial Sequence: Synthetic oligonucleotide
ggcgguggaagcauucucc

SEQ ID NO: 1254559 - RNA, 19 nt, Artificial Sequence
  Description of Artificial Sequence: Synthetic oligonucleotide
ggucacauuccugguaagc

SEQ ID NO: 1254560 - RNA, 19 nt, Artificial Sequence
  Description of Artificial Sequence: Synthetic oligonucleotide
aucgagaccuggugcugcu

SEQ ID NO: 1254561 - RNA, 19 nt, Artificial Sequence
  Description of Artificial Sequence: Synthetic oligonucleotide
cucuaugggcacaguccug

SEQ ID NO: 1254562 - RNA, 19 nt, Artificial Sequence
  Description of Artificial Sequence: Synthetic oligonucleotide
uugcgcuugguaggagaag

SEQ ID NO: 1254563 - RNA, 19 nt, Artificial Sequence
  Description of Artificial Sequence: Synthetic oligonucleotide
ggcaugucaaucauuuuaa

SEQ ID NO: 1254564 - RNA, 19 nt, Artificial Sequence
  Description of Artificial Sequence: Synthetic oligonucleotide
auucuccccuucugaggug

SEQ ID NO: 1254565 - RNA, 19 nt, Artificial Sequence
  Description of Artificial Sequence: Synthetic oligonucleotide
aaugugcaccuuggugggu

SEQ ID NO: 1254566 - RNA, 19 nt, Artificial Sequence
  Description of Artificial Sequence: Synthetic oligonucleotide
ggggugaacuuuuccuagc

SEQ ID NO: 1254567 - RNA, 19 nt, Artificial Sequence
  Description of Artificial Sequence: Synthetic oligonucleotide
ugucaugccugcgccgaga

SEQ ID NO: 1254568 - RNA, 19 nt, Artificial Sequence
  Description of Artificial Sequence: Synthetic oligonucleotide
ggauucucaaacuccacau

SEQ ID NO: 1254569 - RNA, 19 nt, Artificial Sequence
  Description of Artificial Sequence: Synthetic oligonucleotide
ggugaacuuuuccuagcca

SEQ ID NO: 1254570 - RNA, 19 nt, Artificial Sequence
  Description of Artificial Sequence: Synthetic oligonucleotide
cuccugauaaauccauucu

SEQ ID NO: 1254571 - RNA, 19 nt, Artificial Sequence
  Description of Artificial Sequence: Synthetic oligonucleotide
gaucccuaaucgauugcaa

SEQ ID NO: 1254572 - RNA, 19 nt, Artificial Sequence
  Description of Artificial Sequence: Synthetic oligonucleotide
uaguacuaacuggcucacc

SEQ ID NO: 1254573 - RNA, 19 nt, Artificial Sequence
  Description of Artificial Sequence: Synthetic oligonucleotide
ggccagggugccaacacgg

SEQ ID NO: 1254574 - RNA, 19 nt, Artificial Sequence
  Description of Artificial Sequence: Synthetic oligonucleotide
uggccccuuuaucuuuaga

SEQ ID NO: 1254575 - RNA, 19 nt, Artificial Sequence
  Description of Artificial Sequence: Synthetic oligonucleotide
ucuucccgaggccgccacc

SEQ ID NO: 1254576 - RNA, 19 nt, Artificial Sequence
  Description of Artificial Sequence: Synthetic oligonucleotide
gccucacuuaaucugaacu

SEQ ID NO: 1254577 - RNA, 19 nt, Artificial Sequence
  Description of Artificial Sequence: Synthetic oligonucleotide
accucgagucugagaaacg

SEQ ID NO: 1254578 - RNA, 19 nt, Artificial Sequence
  Description of Artificial Sequence: Synthetic oligonucleotide
cacgauccuucucacuuga

SEQ ID NO: 1254579 - RNA, 19 nt, Artificial Sequence
  Description of Artificial Sequence: Synthetic oligonucleotide
cucuuuuaggugguuugga

SEQ ID NO: 1254580 - RNA, 19 nt, Artificial Sequence
  Description of Artificial Sequence: Synthetic oligonucleotide
gacuucucaucagagcggu

SEQ ID NO: 1254581 - RNA, 19 nt, Artificial Sequence
  Description of Artificial Sequence: Synthetic oligonucleotide
cugaaucaacaguaccucu

SEQ ID NO: 1254582 - RNA, 19 nt, Artificial Sequence
  Description of Artificial Sequence: Synthetic oligonucleotide
cucccgcucuucucagacc

SEQ ID NO: 1254583 - RNA, 19 nt, Artificial Sequence
  Description of Artificial Sequence: Synthetic oligonucleotide
ugccacgauccuucucacu

SEQ ID NO: 1254584 - RNA, 19 nt, Artificial Sequence
  Description of Artificial Sequence: Synthetic oligonucleotide
gaccugcgccacaugggag

SEQ ID NO: 1254585 - RNA, 19 nt, Artificial Sequence
  Description of Artificial Sequence: Synthetic oligonucleotide
augccugcgccgagaaggg

SEQ ID NO: 1254586 - RNA, 19 nt, Artificial Sequence
  Description of Artificial Sequence: Synthetic oligonucleotide
acaguccuuucacucuaua

SEQ ID NO: 1254587 - RNA, 19 nt, Artificial Sequence
  Description of Artificial Sequence: Synthetic oligonucleotide
uuggagcgggaacgccgcc

SEQ ID NO: 1254588 - RNA, 19 nt, Artificial Sequence
  Description of Artificial Sequence: Synthetic oligonucleotide
aagaggcaauguauauaua

SEQ ID NO: 1254589 - RNA, 19 nt, Artificial Sequence
  Description of Artificial Sequence: Synthetic oligonucleotide
cuaacuggcucaccaauuu

SEQ ID NO: 1254590 - RNA, 19 nt, Artificial Sequence
  Description of Artificial Sequence: Synthetic oligonucleotide
ggauuuggagcgggaacgc

SEQ ID NO: 1254591 - RNA, 19 nt, Artificial Sequence
  Description of Artificial Sequence: Synthetic oligonucleotide
aucuaauccuagguuuauu

SEQ ID NO: 1254592 - RNA, 19 nt, Artificial Sequence
  Description of Artificial Sequence: Synthetic oligonucleotide
ggcaauguauauauacacu

SEQ ID NO: 1254593 - RNA, 19 nt, Artificial Sequence
  Description of Artificial Sequence: Synthetic oligonucleotide
cgagucuuaucccugccac

SEQ ID NO: 1254594 - RNA, 19 nt, Artificial Sequence
  Description of Artificial Sequence: Synthetic oligonucleotide
caaugucggccucacuuaa

SEQ ID NO: 1254595 - RNA, 19 nt, Artificial Sequence
  Description of Artificial Sequence: Synthetic oligonucleotide
caaguacaaacacaaccuu

SEQ ID NO: 1254596 - RNA, 19 nt, Artificial Sequence
  Description of Artificial Sequence: Synthetic oligonucleotide
gggguagguuccaugagga
